United States Patent Application Publication US 2014/0259212 A1 - sequence listing, part 40

SEQ ID NO: 144725 - DNA, 1368 bp, Xanthomonas campestris pv. campestris str. ATCC 33913
  CDS (1)..(1368): transl_table=11
atgtcggattccgccctgctcgccctgtccccactcgatggccgctacgcctccaaggtggacgcgctgcgcccgatcttttccgaatacggcctgatcaaggcgcgggtgaaagtggagatcgagtggctgctggcactggccgccgagccgggcatcgccgaactgccggccttctcggccgccgccacgcagcgcttgcgcgccctggccgagcagttcagcgtgacgcacgccgcacgcgtcaaggagatcgaacgcaccaccaaccatgacgtcaaggcggtggagtacttcatcaaggaacagctcaaggacgacgccgagctgggcccggcgctggaattcgtgcatttcgcatgcaccagcgaagacatcaacaacctcagttacggcctgatgctggagcaggcacgccgcgaggtgctgctgcccaccctggacggcgtcgccgcctcgctgcgcacgcttgcgcacgctcaggccgcgcagccgatgctctcgcgcacgcatggccagaccgcctcgcccaccacgctcggcaaggagatcgccaacgtggtggcgcggctggagcgccagcgcaagcagatcgccgcggtcgagctgaccggcaagatcaatggcgcggtgggcaactacaacgcacacgtggcgtcctacccgtcggtggactggccgcagttcgcgcaacgctttgtcgaaggcttggggctggtcttcaacccctacaccacgcagatcgagccgcacgacaacgtggccgaaatcggcgatgccacccgccgcgccaacaccatcctcatcgacctggcacgtgacatctggggctacatttcgctcggctatttcaagcaaaaattgaaagaaggcgaagtcggttcctcgaccatgccgcacaaggtcaacccgatcgacttcgagaacgccgaaggcaatttcggcgtcgccaatgcgctgttcgagcatttcagcgccaagttgccgatcagccgctggcagcgcgacctcaccgactccaccgtgctgcgcgccctcggcaccgcgttcggccatacgcaagtagcgctcgactcgctggccaagggcctgggcaagctgaccgtcaattccgagcgcctggatgccgatctggacgccgcctgggaagtactggccgaggccgtgcagacggtgatgcgccgccatggcctgcccaatccctacgagcaactcaaggcactgacccgcggccagggcatcaccgccgcctcgatgcaggcgtttgtggaaagcctgcaactgcccgaaaaggacaagcagcgcttgcgtgcgttgacgcccggtgcttataccggtctggccgagcaattggcgcgcgccatctga

SEQ ID NO: 144726 - protein, 455 aa, Xanthomonas campestris pv. campestris str. ATCC 33913
MSDSALLALSPLDGRYASKVDALRPIFSEYGLIKARVKVEIEWLLALAAEPGIAELPAFSAAATQRLRALAEQFSVTHAARVKEIERTTNHDVKAVEYFIKEQLKDDAELGPALEFVHFACTSEDINNLSYGLMLEQARREVLLPTLDGVAASLRTLAHAQAAQPMLSRTHGQTASPTTLGKEIANVVARLERQRKQIAAVELTGKINGAVGNYNAHVASYPSVDWPQFAQRFVEGLGLVFNPYTTQIEPHDNVAEIGDATRRANTILIDLARDIWGYISLGYFKQKLKEGEVGSSTMPHKVNPIDFENAEGNFGVANALFEHFSAKLPISRWQRDLTDSTVLRALGTAFGHTQVALDSLAKGLGKLTVNSERLDADLDAAWEVLAEAVQTVMRRHGLPNPYEQLKALTRGQGITAASMQAFVESLQLPEKDKQRLRALTPGAYTGLAEQLARAI

SEQ ID NO: 144727 - DNA, 1371 bp, Shigella flexneri 2a str. 301
  CDS (1)..(1371): transl_table=11
atggaattatcctcactgaccgccgtttcccctgtcgatggacgctacggcgataaagtcagcgcgctgcgcgggattttcagcgaatatggtttgctgaaattccgtgtacaagttgaagtacgttggctgcaaaaactggccgcgcacgcagcgatcaaggaagttcctgcttttgctgccgacgcaatcggttaccttgatgcaattgtcgccaatttcagcgaagaagatgccgcacgcatcaaaaccatcgagcgtaccactaaccacgacgttaaagcggttgagtatttcctgaaagaaaaagtggcggagatcccggaactgcacgcggtttctgaattcatccactttgcctgtacttcggaagatatcaataacctctcccacgcattaatgctgaaaaccgcgcgtgatgaagtgatcctgccgtactggcgtcaactgattgatggcattaaagatctcgccgttcagtaccgcgatatcccgctgctgtctcgtacccacggtcagccagccacgccgtcaaccatcggtaaagagatggcaaacgtcgcctaccgtatggagcgccagcaccgccagcttaaccaggtggagatcctcggcaaaatcaacggcgcggtcggtaactataacgcccacatcgccgcttacccggaagttgactggcatcagttcagcgaagagttcgtcacctcgctgggtattcaatggaacccgtacactacccagattgaaccgcacgactacattgccgaactgtttgattgcgttgcgcgcttcaacaccattctgatcgactttgaccgtgacgtctggggttatatcgcccttaaccacttcaaacagaaaaccattgctggtgagattggttcttccaccatgccgcataaagttaacccgatcgacttcgaaaactccgaagggaatctgggcctttccaacgcggtattgcagcatctggcaagcaaactgccggtttcccgctggcagcgtgacctgaccgactccaccgtgctgcgtaacctcggcgtgggtatcggttatgcgctgattgcgtatcaatccaccctgaaaggcgtgagcaaactggaagagaaccgtgaccatctgctggatgagctggatcacaactgggaagtgctggcagaaccaatccagacagttatgcgtcgctatggcatcgaaaaaccgtacgagaagctgaaagagcttactcgcggtaagcgcgttgacgccgaaggcatgaagcagtttatcgatggtctggcgttgccagaagaagagaaagcccgcctgaaagcgatgacgccggctaactatattggtcgagctatcacgatggttgatgagctgaaataa

SEQ ID NO: 144728 - protein, 456 aa, Shigella flexneri 2a str. 301
MELSSLTAVSPVDGRYGDKVSALRGIFSEYGLLKFRVQVEVRWLQKLAAHAAIKEVPAFAADAIGYLDAIVANFSEEDAARIKTIERTTNHDVKAVEYFLKEKVAEIPELHAVSEFIHFACTSEDINNLSHALMLKTARDEVILPYWRQLIDGIKDLAVQYRDIPLLSRTHGQPATPSTIGKEMANVAYRMERQHRQLNQVEILGKINGAVGNYNAHIAAYPEVDWHQFSEEFVTSLGIQWNPYTTQIEPHDYIAELFDCVARFNTILIDFDRDVWGYIALNHFKQKTIAGEIGSSTMPHKVNPIDFENSEGNLGLSNAVLQHLASKLPVSRWQRDLTDSTVLRNLGVGIGYALIAYQSTLKGVSKLEENRDHLLDELDHNWEVLAEPIQTVMRRYGIEKPYEKLKELTRGKRVDAEGMKQFIDGLALPEEEKARLKAMTPANYIGRAITMVDELK

SEQ ID NO: 144729 - DNA, 1371 bp, Pseudomonas putida KT2440
  CDS (1)..(1371): transl_table=11
atgcagctttcttcgctcactgcggtttcccctgtagacggccgttatgccggcaaaacccaggccttgcgccccattttcagcgaattcggcctgatccgtttccgcgccctggtcgaagtgcgctggctgcagcgcctggccgcccacccgcaaatcggcgaagtgccggcgttctccgccgaagccaacgccctgctggacagcctggccaccgatttcaagctggagcacgccgagcgcgtcaaggaaatcgagcgcaccaccaaccacgacgtcaaggccattgaatacctcctcaaggagcaggccgccaagctgcctgagctggccaaggtcagcgagttcatccacttcgcctgcaccagcgaggacatcaacaacctgtcccacgccctgatgctgcgcgccggccgtgacgaagtgctgctgccgctgatgcgccaggtcgccgacgccatccgcgccctggcccacgcccacgccgaagtgccaatgctgtcgcgcacccacggccagccggcttcgccgaccaccctgggtaaagagctggccaacgtcgtgtaccgcctggagcgccagatcgcccaggttgccgccgtgccgctgctgggcaagatcaacggcgccgtgggcaactacaacgcccacctgtcggcctactcgcagatcgactgggaagagaacgcccgcgccttcatcgaagacgagctgggcctgcagttcaacccgtacaccacccagatcgagccgcacgactacatcgccgagctgttcgacgccatcgcccgcttcaacaccatcctgatcgacttcgaccgtgatgtgtggggctacatttcgctgggttacttcaagcagaagaccgtcgccggcgaaatcggttcgtcgaccatgccgcacaaggtcaacccgatcgacttcgaaaactccgaaggcaacctgggtatcgccaacgcgctgttccagcacctggccagcaagctgccgatctcgcgctggcagcgtgacctgaccgactccaccgtgctgcgcaacctgggcgtgggctttgcccacagcgtcatcgccttcgaggccagcctgaaaggcatcggcaagctggaagtcaacgaagctcgcatcgccgccgacctggacgcctgctgggaagtgctggccgagccgatccagaccgtgatgcgccgcttcaacatcgaaaacccctacgagaagctcaaagagctgacccgtggcaagggcatcaccccagaagcgctgctgaccttcatcgacggcctggacatgccagccgaagccaaggccgagctcaagcagctgacccccgctacctacatcggtaacgcggcagcccaggccaaacgcatctaa

SEQ ID NO: 144730 - protein, 456 aa, Pseudomonas putida KT2440
MQLSSLTAVSPVDGRYAGKTQALRPIFSEFGLIRFRALVEVRWLQRLAAHPQIGEVPAFSAEANALLDSLATDFKLEHAERVKEIERTTNHDVKAIEYLLKEQAAKLPELAKVSEFIHFACTSEDINNLSHALMLRAGRDEVLLPLMRQVADAIRALAHAHAEVPMLSRTHGQPASPTTLGKELANVVYRLERQIAQVAAVPLLGKINGAVGNYNAHLSAYSQIDWEENARAFIEDELGLQFNPYTTQIEPHDYIAELFDAIARFNTILIDFDRDVWGYISLGYFKQKTVAGEIGSSTMPHKVNPIDFENSEGNLGIANALFQHLASKLPISRWQRDLTDSTVLRNLGVGFAHSVIAFEASLKGIGKLEVNEARIAADLDACWEVLAEPIQTVMRRFNIENPYEKLKELTRGKGITPEALLTFIDGLDMPAEAKAELKQLTPATYIGNAAAQAKRI

SEQ ID NO: 144731 - DNA, 1446 bp, Tropheryma whipplei TW08/27
  CDS (1)..(1446): transl_table=11
gtgtcagaggatgaatatgattcactgtctcccttagatggcaggtatggcccagctgtgcgagcattgcgcggttttctgtctgagagtgcgcttattcgcgagcgtattagggttgaaatcggctgggtattttttttgtggaggaaagcggtttttggacttgcagaacccacaaaggaagatgagaggtttctttcatcgatagtgcatgatgcgcataaaaacataccgcgggtcaagaagattgaagagcggatacagcacgatgtgaaagccgtcgagatcttcctgcgagagagatttacgcagcagggtctgggcaatatagtcgagctactacatttcgcgtgcacaagtgaagacataaacaacctggcgtacgcactgaacatgaaggcagctctctcagaagtcatcctgccctcgattgatgaacttataggacacctagaaaagatgtctcagaaatatgcgggagatgcaatgctcgcgcgcacacacggacaacccgcaacaccaacaactcttggaaaggagctattggtgtttgtctaccgcctgaaaaggcaacggaaaaatctagaagatgtgcaatttcttgggaaattctctggtgcgaccgggacattttcagctcattgcgtagccgccccaaattacccgtggcaagagtgggcaaaagaatttgtgaacagttttggcctcatttataaccccattaccactcaaattgagccacatgactggcaatgcgagctgcttgagagagtggggcatatctgtcgaatcctccacaatctggcaaccgatatgtggagctatatctcattcggatattttcagcaaggctttatatcagaatctgttggctcctcaactatgccacacaaggtcaatcccatccgctttgaaaatgccgaggcaaatctggaaatggcttgcggaataatctcatgcattgttgcaagtctgtctacaagcaggcttcagcgggacttgagcgactccagtgtccagagaaatataggtgtcgccctggggcattcacttgtagcgatcgataacttgaaaagaggtcttgctggtattcgcctgaataaaaatcgcctaactgaagacctcaataacaactgggaagtaattgcggaggcggtacaaacaaccatccgcgccgaaatactggcatgtaaaagcaatgaggctaacccttatgaaaggctcaaagatttcacacgaaacaagaaaattacgaaacacactctcgatgaatttataactaacttggacctaagcgagcatgcaaaaaaacgacttttagaattaacaccaagcaaatatactggcttggcagagcgcatggtgcaggcacatagctcaggcactgggggcaccaaaaatagcattggcactgggggcaccaaaaatagctcaggtgctgggtga

SEQ ID NO: 144732 - protein, 481 aa, Tropheryma whipplei TW08/27
MSEDEYDSLSPLDGRYGPAVRALRGFLSESALIRERIRVEIGWVFFLWRKAVFGLAEPTKEDERFLSSIVHDAHKNIPRVKKIEERIQHDVKAVEIFLRERFTQQGLGNIVELLHFACTSEDINNLAYALNMKAALSEVILPSIDELIGHLEKMSQKYAGDAMLARTHGQPATPTTLGKELLVFVYRLKRQRKNLEDVQFLGKFSGATGTFSAHCVAAPNYPWQEWAKEFVNSFGLIYNPITTQIEPHDWQCELLERVGHICRILHNLATDMWSYISFGYFQQGFISESVGSSTMPHKVNPIRFENAEANLEMACGIISCIVASLSTSRLQRDLSDSSVQRNIGVALGHSLVAIDNLKRGLAGIRLNKNRLTEDLNNNWEVIAEAVQTTIRAEILACKSNEANPYERLKDFTRNKKITKHTLDEFITNLDLSEHAKKRLLELTPSKYTGLAERMVQAHSSGTGGTKNSIGTGGTKNSSGAG

SEQ ID NO: 144733 - DNA, 1371 bp, Vibrio parahaemolyticus RIMD 2210633
  CDS (1)..(1371): transl_table=11
atggaactgtcagcattgactgctgtttcaccagtagacggccgctacggaagcaagacaattgcgttacgcgaaatcttcagtgaatacggtcttttaaaataccgtactatcgttgaaatccgctggctacaaaagcttgctgctactgctgaaattgcagaagtgccagcgtttagcgcagaagcaaaccaattcctagacgaccttgctgcaaacttctctgaagcagacgcactacgtatcaaagagatcgagcgcacaactaaccacgacgtaaaagcggttgagtacttcctaaaagagaaagtcgcagacgttcctgaactgcacgcagtaaacgagttcttccactttgcatgtacttctgaagacatcaacaacacatcacacgctctaatgctaaaagaagcgcgtgaaaccgttattcttccagaaatccgcaaccttattgacgctatcaaagcacttgctgttgagtaccgcgacatccctcttctatctcgtacacacggtcagccagcttctccatcaacaatgggtaaagaaatggcaaacgtggcgtaccgtatggagcgtcaatacaagcaaatcgaaaacgttgaaatcctagcgaaaatcaacggcgcggtaggtaactacaacgcgcacctatctgcttacccggaactagattggcacaagttctctgaagaattcatcactgaatctctaggcgtaacttggaacccttacacaacacaaatcgaaccacacgattacatcgctgagctattcgatgctgtggcacgtttcaacactattctgatcgatttcgaccgtgacgtttggggttacattgcactaggccacttcaagcaaaaaaccattgctggcgagatcggttcttcgacaatgccacacaaagttaacccaatcgactttgaaaactctgaaggtaacctaggtcttgcgaacgccgtgttcggtcacctagcacagaaactgcctatctctcgttggcaacgtgacctaactgactcaacggttctacgtaacctaggtgttggtgttggctacgcaatcatcgcctacacttctacgctaaaaggcatcagcaaactggaagtgaaccgtgacgcgcttcttgctgaactagacaaaaactgggaagttctagcagagccagtacaaacggtaatgcgtcgctacggtatcgagaagccatacgagaagttgaaagagttaactcgcggtaagcgcgtagacggtgaagcaatgcgtaacttcattgacggccttgagcttcctgaacacgaaaaagcacgtctaaaagagatgacgccagcgaactatatcggtcaagcaatcgagctaactgacaagctgtaa

SEQ ID NO: 144734 - protein, 456 aa, Vibrio parahaemolyticus RIMD 2210633
MELSALTAVSPVDGRYGSKTIALREIFSEYGLLKYRTIVEIRWLQKLAATAEIAEVPAFSAEANQFLDDLAANFSEADALRIKEIERTTNHDVKAVEYFLKEKVADVPELHAVNEFFHFACTSEDINNTSHALMLKEARETVILPEIRNLIDAIKALAVEYRDIPLLSRTHGQPASPSTMGKEMANVAYRMERQYKQIENVEILAKINGAVGNYNAHLSAYPELDWHKFSEEFITESLGVTWNPYTTQIEPHDYIAELFDAVARFNTILIDFDRDVWGYIALGHFKQKTIAGEIGSSTMPHKVNPIDFENSEGNLGLANAVFGHLAQKLPISRWQRDLTDSTVLRNLGVGVGYAIIAYTSTLKGISKLEVNRDALLAELDKNWEVLAEPVQTVMRRYGIEKPYEKLKELTRGKRVDGEAMRNFIDGLELPEHEKARLKEMTPANYIGQAIELTDKL

SEQ ID NO: 144735 - DNA, 1371 bp, Salmonella enterica subsp. enterica serovar Typhi Ty2
  CDS (1)..(1371): transl_table=11
atggaattatcctcactgaccgccgtttcccctgtcgatggacgctacggcgataaagtcagcgcgctgcgcggaatttttagcgaatacggtttgctgaaatttcgtgtacaagtcgaagtacgttggctgcagaaattagccgcgcacgcagcgatcaaggaagttcctgcttttgctgccgacgcaaacggttacctggatacgcttgtggcaaacttcaatgaagaagatgccgcgcgcattaaaaccattgagcgcaccacgaatcacgatgtgaaagcggttgagtattttctgaaagaaaaagccgccgcgatcccggcgctacatgacgtttccgaatttatccactttgcctgcacctctgaggatattaacaacctgtcgcacgcgttaatgctcaaaactgcgcgcgatgaagtgatcctgccttactggcgtcaggtgattaacgcggttaaagatctcgccacgcagtatcgcgatattcctctgctctcccgcacccacggccagccggcaacaccttccactctgggtaaagagatggcgaacgtggcgtatcggatggagcgtcagttccgccagctcaatcaggtggagatcctcggtaaaattaacggcgccgtaggcaactataacgcgcatatcgccgcctatccggaagttgactggcatcagttcagcgaagagttcgtcacctcgctgggcatccagtggaacccttacaccacccagattgaaccgcatgattatattgcggaactgtttgactgtatcgcgcgctttaacaccatcctgatcgatttcgatcgcgatgtctggggctatattgcgttgaaccatttcaaacagaaaaccatcgccggagagatcggttcttctaccatgccgcataaagttaaccccattgactttgaaaactcagaaggcaacctcggtctgtctaatgcagtgttgcaccatctggcaaacaaactgccggtttcccgctggcagcgcgatctgaccgactcaaccgtcctgcgtaacctgggtgtcggcatcggctatgcgcttatcgcttatcagtcgaccctgaagggcgtcagcaagctggaagtgaaccgcgatcatctgcttgacgaactggatcacaactgggaagtattagccgaaccgatccagaccgtcatgcgccgctatggcattgaaaaaccatatgaaaaactgaaagagttgacccgtggcaagcgtgtcgatgccgaaggaatgaaacagcttattgatagtctggccctgccggaagcagaaaaaacgcgccttaaagccatgacgccggcaaattatatcggtcgcgctgtgaatctggtcgacgaacttaaataa

SEQ ID NO: 144736 - protein, 456 aa, Salmonella enterica subsp. enterica serovar Typhi Ty2
MELSSLTAVSPVDGRYGDKVSALRGIFSEYGLLKFRVQVEVRWLQKLAAHAAIKEVPAFAADANGYLDTLVANFNEEDAARIKTIERTTNHDVKAVEYFLKEKAAAIPALHDVSEFIHFACTSEDINNLSHALMLKTARDEVILPYWRQVINAVKDLATQYRDIPLLSRTHGQPATPSTLGKEMANVAYRMERQFRQLNQVEILGKINGAVGNYNAHIAAYPEVDWHQFSEEFVTSLGIQWNPYTTQIEPHDYIAELFDCIARFNTILIDFDRDVWGYIALNHFKQKTIAGEIGSSTMPHKVNPIDFENSEGNLGLSNAVLHHLANKLPVSRWQRDLTDSTVLRNLGVGIGYALIAYQSTLKGVSKLEVNRDHLLDELDHNWEVLAEPIQTVMRRYGIEKPYEKLKELTRGKRVDAEGMKQLIDSLALPEAEKTRLKAMTPANYIGRAVNLVDELK

SEQ ID NO: 144737 - DNA, 1347 bp, Bacteroides thetaiotaomicron VPI-5482
  CDS (1)..(1347): transl_table=11
atggaacttgatgtattaacggccatatctccgattgatggtcgatatagaggcaaaactaaagctttggcagcttatttctctgaatttgcactgattaaataccgtgtacaggtagaggtggaatactttatcaccttgtgcgaacttcctttgccgcagttgaaaggaatcgatagcagcgtgtttgaaactttacggaatatctaccgtaacttctcggaagcagatgcgcaacgcattaaagatatcgaaagtgtaaccaaccatgatgtaaaagccgtagaatatttcctgaaagaagaattcgataagctgggtggaatggatgactataaagaattcattcacttcggattgacttctcaagacattaataatacgtctgtgcctctttctatcaaggaagctttggataaagtctattatccgctgatcgaagaactgattgcacaactgaaaacgtatgcaacagaatgggctgaaatcccgatgcttgccaaaactcatgggcaaccggcttctccgactcgtttgggtaaggaagtgatggtattcgtttaccgcctggaacgtcagctggctatgctgaaagcatgtccgatcactgcaaaattcggtggcgctaccggaaattacaatgctcatcatgtagcatatcctcaatatgactggaaacaattcggtaatcggtttgttgcagagaaactgggactggagcgcgaagaatataccactcagatttcgaactacgataacttgtctgctgtctttgacgcgatgaaacgtatcaacaccataatggtggatatgaaccgtgacttctggcagtatatttctatggaatacttcaagcagaagatcaaagccggtgaggtaggatcaagcgcgatgccgcataaagtgaatccgatcgactttgaaaatgcggaaggtaatttgggtatcgcaacttctattctggaacacctggctgtgaaactgcctgtttcccgtttgcagcgtgacctgacagactctacggtgctccgtaatgtaggcgtgcctttcggtcatatcgtgattgctattcagagttcactgaaaggacttcgcaaactgttgctgaacgaaccggctatttaccgtgatctggacaactgctggagcgtagtggctgaggcaatccagacgattttacgccgcgaggcttacccgcatccgtatgaagcattgaaagctttgacccggaccaaccaggctattacagaaagttctattaaagagtttatcgaaggcttgaacgtaagcgaagatattaaaaaagagttaagagcaattactccgcatacatatacgggactttaa

SEQ ID NO: 144738 - protein, 448 aa, Bacteroides thetaiotaomicron VPI-5482
MELDVLTAISPIDGRYRGKTKALAAYFSEFALIKYRVQVEVEYFITLCELPLPQLKGIDSSVFETLRNIYRNFSEADAQRIKDIESVTNHDVKAVEYFLKEEFDKLGGMDDYKEFIHFGLTSQDINNTSVPLSIKEALDKVYYPLIEELIAQLKTYATEWAEIPMLAKTHGQPASPTRLGKEVMVFVYRLERQLAMLKACPITAKFGGATGNYNAHHVAYPQYDWKQFGNRFVAEKLGLEREEYTTQISNYDNLSAVFDAMKRINTIMVDMNRDFWQYISMEYFKQKIKAGEVGSSAMPHKVNPIDFENAEGNLGIATSILEHLAVKLPVSRLQRDLTDSTVLRNVGVPFGHIVIAIQSSLKGLRKLLLNEPAIYRDLDNCWSVVAEAIQTILRREAYPHPYEALKALTRTNQAITESSIKEFIEGLNVSEDIKKELRAITPHTYTGL

SEQ ID NO: 144739 - DNA, 1386 bp, Coxiella burnetii RSA 493
  CDS (1)..(1386): transl_table=11
atgaaactatcgccactaactgcattatcgccgctcgacggtcgctatcaaaacaaggtagaagcgttgcgccccattctcagcgaatatggcctaattcgctatcgggtgatagtcgagatcaaatggctgctttttttatcacaagaaaaaacgctaaccgagatcccttctttaaatgactcggatattaaaaagttagaagagattattgatcactttgatttacaagccgccgaggcggtcaaaacaattgaagcaaccaccaaccacgacgttaaagccgtcgaatattatttacaacgtcaattggaaaaagaaaaaaacctcgcgcctctcatcggttttattcatttcggatgtacttctgaagatattaataatctttcctattcgcttatgattaacgaagcccgtgaaatcgcgcttattcccatcataaaaaatatcggaatgcgatttcaaacgttagcggaaaaatatgctgaacttcctttattaagtcgcactcacggccaaccagcaacgccaacaaccctaggaaaagaattagcaaatattgttgcacgtattcatgctcaatatcatagtctcgcccaccttaaattattaggcaaaatgaacggtgccgtcggcaattttaatgcgcaccaagcagcgtatccaacttttgattggccgacgttcaacaaacgttttattcaatcgctcgggctagaagccaacgaatacacaacgcaaatcgaacctcatgatcgacttagtgaatttttacaatcgctggtccgtttaaatacgatccttatcgattgctgccgggatatttggagttatattagtctcggttatttttttcaaaaatcgaaaaaaaatgaagtgggttcttctaccatgccgcacaaagtaaacccgatcgatttcgaaaatgcggaagggaatttaggacttgctaacgccttagcgaatcacctcatcaacaaactacccatttctcgatggcaacgcgatttaaccgattccaccgtaatgcgaaacttaggttgtatattcggttatgcgcttatcgcttatgaatcacttctcaaagggttagataaaataagtgcgaacgaacaacgcattcgggaggatctcgaagcacattcggaagtgctagcagaagctttacaaacagtaatgcgtcgatacggcgtccccagggcttatgaacaactgaaagagctgacccgggataaaacgattgataaaaatcggctaaccaagtttatcgaacaattatcgcttcccaccgaagctaaaaaccatttaaaatcactgacccccagcaattacactggttttgcagcagaattagcaaaaaaaattagtacttttaaatgggattaa

SEQ ID NO: 144740 - protein, 461 aa, Coxiella burnetii RSA 493
MKLSPLTALSPLDGRYQNKVEALRPILSEYGLIRYRVIVEIKWLLFLSQEKTLTEIPSLNDSDIKKLEEIIDHFDLQAAEAVKTIEATTNHDVKAVEYYLQRQLEKEKNLAPLIGFIHFGCTSEDINNLSYSLMINEAREIALIPIIKNIGMRFQTLAEKYAELPLLSRTHGQPATPTTLGKELANIVARIHAQYHSLAHLKLLGKMNGAVGNFNAHQAAYPTFDWPTFNKRFIQSLGLEANEYTTQIEPHDRLSEFLQSLVRLNTILIDCCRDIWSYISLGYFFQKSKKNEVGSSTMPHKVNPIDFENAEGNLGLANALANHLINKLPISRWQRDLTDSTVMRNLGCIFGYALIAYESLLKGLDKISANEQRIREDLEAHSEVLAEALQTVMRRYGVPRAYEQLKELTRDKTIDKNRLTKFIEQLSLPTEAKNHLKSLTPSNYTGFAAELAKKISTFKWD

SEQ ID NO: 144741 - DNA, 1371 bp, Shigella flexneri 2a str. 2457T
  CDS (1)..(1371): transl_table=11
atggaattatcctcactgaccgccgtttcccctgtcgatggacgctacggcgataaagtcagcgcgctgcgcgggattttcagcgaatatggtttgctgaaattccgtgtacaagttgaagtacgttggctgcaaaaactggccgcgcacgcagcgatcaaggaagttcctgcttttgctgccgacgcaatcggttaccttgatgcaattgtcgccaatttcagcgaagaagatgccgcacgcatcaaaaccatcgagcgtaccactaaccacgacgttaaagcggttgagtatttcctgaaagaaaaagtggcggagatcccggaactgcacgcggtttctgaattcatccactttgcctgtacttcggaagatatcaataacctctcccacgcattaatgctgaaaaccgcgcgtgatgaagtgatcctgccgtactggcgtcaactgattgatggcattaaagatctcgccgttcagtaccgcgatatcccgctgctgtctcgtacccacggtcagccagccacgccgtcaaccatcggtaaagagatggcaaacgtcgcctaccgtatggagcgccagcaccgccagcttaaccaggtggagatcctcggcaaaatcaacggcgcggtcggtaactataacgcccacatcgccgcttacccggaagttgactggcatcagttcagcgaagagttcgtcacctcgctgggtattcaatggaacccgtacactacccagattgaaccgcacgactacattgccgaactgtttgattgcgttgcgcgcttcaacaccattctgatcgactttgaccgtgacgtctggggttatatcgcccttaaccacttcaaacagaaaaccattgctggtgagattggttcttccaccatgccgcataaagttaacccgatcgacttcgaaaactccgaagggaatctgggcctttccaacgcggtattgcagcatctggcaagcaaactgccggtttcccgctggcagcgtgacctgaccgactccaccgtgctgcgtaacctcggcgtgggtatcggttatgcgctgattgcgtatcaatccaccctgaaaggcgtgagcaaactggaagtgaaccgtgaccatctgctggatgagctggatcacaactgggaagtgctggcagaaccaatccagacagttatgcgtcgctatggcatcgaaaaaccgtacgagaagctgaaagagcttactcgcggtaagcgcgttgacgccgaaggcatgaagcagtttatcgatggtctggcgttgccagaagaagagaaagcccgcctgaaagcgatgacgccggctaactatattggtcgagctatcacgatggttgatgagctgaaataa

SEQ ID NO: 144742 - protein, 456 aa, Shigella flexneri 2a str. 2457T
MELSSLTAVSPVDGRYGDKVSALRGIFSEYGLLKFRVQVEVRWLQKLAAHAAIKEVPAFAADAIGYLDAIVANFSEEDAARIKTIERTTNHDVKAVEYFLKEKVAEIPELHAVSEFIHFACTSEDINNLSHALMLKTARDEVILPYWRQLIDGIKDLAVQYRDIPLLSRTHGQPATPSTIGKEMANVAYRMERQHRQLNQVEILGKINGAVGNYNAHIAAYPEVDWHQFSEEFVTSLGIQWNPYTTQIEPHDYIAELFDCVARFNTILIDFDRDVWGYIALNHFKQKTIAGEIGSSTMPHKVNPIDFENSEGNLGLSNAVLQHLASKLPVSRWQRDLTDSTVLRNLGVGIGYALIAYQSTLKGVSKLEVNRDHLLDELDHNWEVLAEPIQTVMRRYGIEKPYEKLKELTRGKRVDAEGMKQFIDGLALPEEEKARLKAMTPANYIGRAITMVDELK

SEQ ID NO: 144743 - DNA, 1386 bp, Candidatus Blochmannia floridanus
  CDS (1)..(1386): transl_table=11
gtgaacaaattttctccattaaccgctatttctccaatcgatggacgttattatcatcaaactcatccactaagaaatatttttagtgaatttgggttattaaaatttcgcattcaaattgaaattcattggatacaaaaattatctcatacaatagaaatcacagaaatacctgtatttactgaaattgaactaaatttcttaaataacttaattacaaattttaatatcacagacgcaaaacatattaaaaaaatagaaaaaatcactaaacatgatgtaaaagcaatagaatattttttaaaagaaaaaataagtgttttacctgatttaaaaaagaaaatcaatgaatttatccattttgcatgtacttcagaagatattaataatcttgcttacggtttaatgatttctcataccaaaaatactatcatattacctatatggaaaaaaattattgatattattaaaaaaataagcatcaaatataaaaatactcctattctttccagaacacatggacaaccagctagtccttctactcttggcaaagaaacggctaatatcgcatatcgattaatacgacaatatcattacttaaaatcaatcaaaattttaggaaaaatgaatggagcagttggtaactataacgctcacattatagcgtatccaaaaataaattggagaaaatttgacgaagagtttgttacatcattaggaatttcatggaacccatatactacgcaaatagaaccacatgattacatagttgaaatctctaatcgcattattcattttaatactattttaattaaatttaatcaagatatctggggatatctttctttaaattattttcaacaagcatatagtcaatttgaaattggttcatctactatgccccataaaattaatccaataaattttgaaaattctgaaggtaatttgggtttatctaatgctatttttaatcatttttctaaaaaattaccaatatcacgttggcaacgtgatttaagtgactccaccgtactaagaaatttaggagtagctattggacattctttaattgcttatcacaatttattaaaaggtatagacaaattaatcattaatgaaaaatatttgttacaagatttaaataaaaattggataatattaagtgaagctattcaaacagtaatgaaaaaatacaacattcataattcttatgaacgtacgaaagattttatattcaacgaaaaagttaatcccgatactataaaaaaatttattgaatctctacctttaccaacatcagaaaaaacccgattgcaacatattactccatctgaatatattggattagctccggatattgccaatgatataataaaatttgaataa

SEQ ID NO: 144744 - protein, 461 aa, Candidatus Blochmannia floridanus
MNKFSPLTAISPIDGRYYHQTHPLRNIFSEFGLLKFRIQIEIHWIQKLSHTIEITEIPVFTEIELNFLNNLITNFNITDAKHIKKIEKITKHDVKAIEYFLKEKISVLPDLKKKINEFIHFACTSEDINNLAYGLMISHTKNTIILPIWKKIIDIIKKISIKYKNTPILSRTHGQPASPSTLGKETANIAYRLIRQYHYLKSIKILGKMNGAVGNYNAHIIAYPKINWRKFDEEFVTSLGISWNPYTTQIEPHDYIVEISNRIIHFNTILIKFNQDIWGYLSLNYFQQAYSQFEIGSSTMPHKINPINFENSEGNLGLSNAIFNHFSKKLPISRWQRDLSDSTVLRNLGVAIGHSLIAYHNLLKGIDKLIINEKYLLQDLNKNWIILSEAIQTVMKKYNIHNSYERTKDFIFNEKVNPDTIKKFIESLPLPTSEKTRLQHITPSEYIGLAPDIANDIIKFE

SEQ ID NO: 144745 - DNA, 1377 bp, Bordetella pertussis Tohama I
  CDS (1)..(1377): transl_table=11
atgcagattgccgaccagcttacccaactcaatgctctttcgccactggatggacgctatgcgtcgcgcgccggggcgctgcgggggctgctgtccgaggccgggttcatggcgcatcgcgtcgaggtcgaggtggcctggctcgttgcgctgtccgatgcgggcctgcccgagctgccggcgttcccggccgccgcgcgcgagcgcctggccgcgctggtgcgcaatttttccgaggccgacgccgcccgcatcaaggacatcgagcgcgtgaccaatcacgatgtcaaggcggtcgagtactggctgaaagaacaggtggccgacgatgccgaattggcgcgtgccgccgagttcatccatttcgcgtgcacctccgaagacatcaacaatacttcgcatgcgctcatgctcacgcgtgcgcgcgccgaagtcgtcgtgccgcagctcaaccaggtgctggccaagctgaacgaactggcccggacgcatgccgaccagcccatgctgtcgcgcacgcacggccagcccgccagtccgaccacgctgggcaaggagttcgccaacgtggcggcgcgcctgcagcgcgccgtggccgccatcgaggcggtcgagccgctggccaagctcaatggcgccacgggcaactacaacgcgcatctgtcggcgtacccggaaatcgactggcccgccttcagccgcaatgtgctggccggcctgggcctgatccagaaccgccataccatccagatcgaaccgcacgactggatggcggcgctgttcgacgccgtggcgcgcgccaacgtcatcgtgctggacctggaccgcgacatctggggctacgtggccctgggctacttcaagcagcgcctgaaggagggcgaggtcggctcctcgaccatgccgcacaaggtcaacccgatcgatttcgagaactccgagggcaacctgggtctggccaatgccgtgctgcgccatctgtccgagaagctgccggtttcgcgctggcagcgcgacctgaccgattcgacggtgttgcgcaacctgggcgtgggcctgggctatgcgctggtcgcctgggatgcttgcctgcgcgggctgaacaagctggaagtcaacgccgcggcgatcgacgccgacatcgatgcgtgctgggaagtgctggccgagccggtgcagacggtcatgcgccgctacggcctgccgcagccgtacgagcagctcaagacgctcacgcgcggcaagggcattaccgaagaggccttgcgcgagttcatcggcggcctggcgctgcccgacgagcccaaggcccgcctgctggcgatgacgccgcgctcgtatatcggcctggccgcgcaactggcgcgggcggtatag

SEQ ID NO: 144746 - protein, 458 aa, Bordetella pertussis Tohama I
MQIADQLTQLNALSPLDGRYASRAGALRGLLSEAGFMAHRVEVEVAWLVALSDAGLPELPAFPAAARERLAALVRNFSEADAARIKDIERVTNHDVKAVEYWLKEQVADDAELARAAEFIHFACTSEDINNTSHALMLTRARAEVVVPQLNQVLAKLNELARTHADQPMLSRTHGQPASPTTLGKEFANVAARLQRAVAAIEAVEPLAKLNGATGNYNAHLSAYPEIDWPAFSRNVLAGLGLIQNRHTIQIEPHDWMAALFDAVARANVIVLDLDRDIWGYVALGYFKQRLKEGEVGSSTMPHKVNPIDFENSEGNLGLANAVLRHLSEKLPVSRWQRDLTDSTVLRNLGVGLGYALVAWDACLRGLNKLEVNAAAIDADIDACWEVLAEPVQTVMRRYGLPQPYEQLKTLTRGKGITEEALREFIGGLALPDEPKARLLAMTPRSYIGLAAQLARAV

SEQ ID NO: 144747 - DNA, 1344 bp, Porphyromonas gingivalis W83
  CDS (1)..(1344): transl_table=11
atgattgctttccaagccctgcaagccatctctccgatagatggccggtatcgcaacaaagtagaagtacttagtcgctatttttcagaaggatctctaattcgctatcgtgtaaaagtggaggtggagtatttcatcgctctttgcaatgaattgccttcgctgaaagatgtgtgccctccatctttagaggaagagttgcgccgtatataccaagactttagcgagaaggatgccgtacgtgtaaaggaaatagaggcggtaacgaatcatgacgtcaaggctgtggagtatttcctcaaagagcggttcgaggccatggggatacgagatgccaaagaatttatccatttcggtctgacctcgcaggatgtaaacaatacggctttcccgatgatgatacgcgaggcaatgaccgaggtttacttgcccgctttacaggagctggtggagcagcttcatgcttatgcccttcagtggaaagatgtcccgatgctggccaaaacgcatggacagccggcgtcgcccactcgcttaggaaaggaaatagaagtattcgtctatcgcttgcgcaagcagatcgacttgctgctggaagtacctcattcagccaaattcggtggtgctacgggcaatttcaatgcgcatcatgtggcttatcctgatcatgactggagcgatttcggccgtcggtttgtaacttctctcgggcttgaacgggaagaactcactacacaaatatccaactacgacaacatggcagccttatttgatgcctgctgtcgcatcaatgtgatactgatcgacctctgccgtgatttctggcagtacatttcgatggagtacttcaaacagaagatcaaggccggcgaggtcggttcttctgccatgccacataaagtgaatccgatcgactatgaaaatgccgaaggcaatctgggtattgcgaatgccatatttgagcatttgtcgcgcaaattgcctatttcccgcttgcagcgagatctgacggattccactgtacttcgtaacgtgggaactcctttggcgcattctctcatagcagtcacgagcatagccaaagggcttggcaaactgcttctcaacgaagctgctctcgatcgggatttgcagaacaactatgctgtggtggctgaggctatacaaactattcttcgtagagaagggtatcccaatccatacgaaacgttgaaggctctgacgcgtacgaatgagacggtgacagccgaatccattgcaagttttatcgaagcattggatattgatgaaaccgtgaaggaggaaatgcgccgcatatcaccttctaattacgtgggaatctga

SEQ ID NO: 144748 - protein, 447 aa, Porphyromonas gingivalis W83
MIAFQALQAISPIDGRYRNKVEVLSRYFSEGSLIRYRVKVEVEYFIALCNELPSLKDVCPPSLEEELRRIYQDFSEKDAVRVKEIEAVTNHDVKAVEYFLKERFEAMGIRDAKEFIHFGLTSQDVNNTAFPMMIREAMTEVYLPALQELVEQLHAYALQWKDVPMLAKTHGQPASPTRLGKEIEVFVYRLRKQIDLLLEVPHSAKFGGATGNFNAHHVAYPDHDWSDFGRRFVTSLGLEREELTTQISNYDNMAALFDACCRINVILIDLCRDFWQYISMEYFKQKIKAGEVGSSAMPHKVNPIDYENAEGNLGIANAIFEHLSRKLPISRLQRDLTDSTVLRNVGTPLAHSLIAVTSIAKGLGKLLLNEAALDRDLQNNYAVVAEAIQTILRREGYPNPYETLKALTRTNETVTAESIASFIEALDIDETVKEEMRRISPSNYVGI

SEQ ID NO: 144749 - DNA, 1371 bp, Photorhabdus luminescens subsp. laumondii TTO1
  CDS (1)..(1371): transl_table=11
atggaattatcctcactgactgctgtttctccgatcgatggccgttacggcgataaagtcagcgtattacgtaccatttttagtgagtttggcttactgaaattccgcgtacaggttgaagtacgttggctgcaaaaactggcagaatgtgctgaaattaaagaagttcccgcgtttgatacagacgcaaacgcttacctgaatgaaattatcgcaaatttcaatgaacaggatgcaatgcgtattaaaactatcgaacgcaccactaaccacgatgtcaaagcagtggaatattttctgaaagagaaagttgcacatattcctgcactacatcaagtttctgagtttattcactttgcctgtacttctgaagatattaacaatctagcttatgcgctgatgctacaaaccgcccgagaagaagtacttttaccccaatggcgtcagatgattgataccatcaaaaaaatggcgagtgaatatcgagacttaccactgttatctcgcactcacggccaaccagccacaccttccacggttggtaaagagtttgccaatgttgctcaccggatggaacgccagtatcgccaactggaacaagtcgaaatactcggtaaaattaatggtgccgtaggtaactataatgcccatatagccgcttacccacaggttgattggcatcagtttagtgaaacttttgtgacttcactcggcatcaaatggaatccatacacgacccaaatcgaaccccatgattatattgctgaattgttcgatactatcgcccgtttcaacacgattctgatcgattttgaccgtgacatttggggttacatcgcacttaaccatttcaaacagaaaacggttgccggtgaaatcggttcttccactatgccacacaaagtcaatccaattgattttgaaaactcggaaggcaatttggggctggcaaatgcggtatttggtcatctggcaagcaagttaccgatttcccgttggcaacgagatctgactgattcaactgtattgcgtaaccttggagttggcctgggatatgctctgatcgcttatcaatctacgatgaaaggcttaaataagttagaagtcaatgagcagcacctgctggatgagctagataaaaactgggaagtgctggctgaacctatccagacagtgatgcgtcgctatggtatcgaaaagccttatgaaaaactcaaagaacttacccgcggtaaacgcgtcaacggtgaaggaatgaaaacctttatcgatggactggatttaccggaagaagagaaaatacgattgaaagccatgacgccagcaaattatattggccgtgcaatcacactggttgatgaattgaagtag

SEQ ID NO: 144750 - protein, 456 aa, Photorhabdus luminescens subsp. laumondii TTO1
MELSSLTAVSPIDGRYGDKVSVLRTIFSEFGLLKFRVQVEVRWLQKLAECAEIKEVPAFDTDANAYLNEIIANFNEQDAMRIKTIERTTNHDVKAVEYFLKEKVAHIPALHQVSEFIHFACTSEDINNLAYALMLQTAREEVLLPQWRQMIDTIKKMASEYRDLPLLSRTHGQPATPSTVGKEFANVAHRMERQYRQLEQVEILGKINGAVGNYNAHIAAYPQVDWHQFSETFVTSLGIKWNPYTTQIEPHDYIAELFDTIARFNTILIDFDRDIWGYIALNHFKQKTVAGEIGSSTMPHKVNPIDFENSEGNLGLANAVFGHLASKLPISRWQRDLTDSTVLRNLGVGLGYALIAYQSTMKGLNKLEVNEQHLLDELDKNWEVLAEPIQTVMRRYGIEKPYEKLKELTRGKRVNGEGMKTFIDGLDLPEEEKIRLKAMTPANYIGRAITLVDELK

SEQ ID NO: 144751 - DNA, 1380 bp, Yersinia pestis biovar Microtus str. 91001
  CDS (1)..(1380): transl_table=11
ttgccaccaatggaattatcctcactgaccgccgtttcaccaattgatggacgttacggcgacaaagtcagcgcactgcgccccatctttagcgaattcggtttgctaaaattccgtgtgcaggtcgaagtgcgttggctgcaaaaactggcagcctgcgcagaaattaaagaggttcctgcttttgatgccaacgcaaacgcttaccttgataaaattgtgcaagagttcaatgaacaagatgcacaacgcattaagaccatcgaacgcacaaccaatcatgatgtgaaggctgtcgagtattttctgaaagaaaaagtggaaaatctccctgcgttacatgccgtgtctgagttcattcactttgcttgtacttcagaagatatcaataacctgtcccacgcattgatgctgcaaactgctcgccaggatgtcctgctgcccgcatggcggcagattattgactcaataaaagcactggcccaccaatatcgcgatttacccttactgtcccgcacccacggccagcccgcgacaccctcaaccatcggtaaagagctggcgaatgtggcgtaccgcatggaacgtcagttccgccaactaacacaagtggaaattctgggtaaaatcaacggtgcagtaggcaactataacgcccacatcgtggcctaccctgaggttgattggcatcagtttagtgaaagttttgtgacatcgctgggaatcaactggaacccatacaccacgcaaatcgagcctcatgattatattgctgagttatttgactgtgtggcccgtttcaatactattttgatcgattttgaccgtgatatctggggttatattgctctgaatcacttcaagcaaaaaaccatcgcgggcgaaatcggttcaagcaccatgccgcataaagttaatccaattgatttcgaaaactcggaaggcaatttgggtctatcgaatgccgtgctaggtcacatggccagcaaactaccggtttctcgctggcaacgtgatctgaccgactcgaccgtgctacgtaatctgggtgtgggtctgggttatgccctgattgcctatcaggcaaccatgaaaggcatcagcaaactggaagttaacgaagcacatctgttgcaagagcttgatcataattgggaagttctggctgaacctattcaaacgatcatgcgccgttacggtattgaaaaaccgtatgaaaaactgaaagaattgacccgtggcaaacgtgtcgatgccgcaggtatgcaagcatttatcgatgggctggatctaccagaagaagaaaaaacccggttgaaggccatgacgccagcgaattacattggccgcgccaccaccatggttgatgaattaaagtaa

SEQ ID NO: 144752 - protein, 459 aa, Yersinia pestis biovar Microtus str. 91001
MPPMELSSLTAVSPIDGRYGDKVSALRPIFSEFGLLKFRVQVEVRWLQKLAACAEIKEVPAFDANANAYLDKIVQEFNEQDAQRIKTIERTTNHDVKAVEYFLKEKVENLPALHAVSEFIHFACTSEDINNLSHALMLQTARQDVLLPAWRQIIDSIKALAHQYRDLPLLSRTHGQPATPSTIGKELANVAYRMERQFRQLTQVEILGKINGAVGNYNAHIVAYPEVDWHQFSESFVTSLGINWNPYTTQIEPHDYIAELFDCVARFNTILIDFDRDIWGYIALNHFKQKTIAGEIGSSTMPHKVNPIDFENSEGNLGLSNAVLGHMASKLPVSRWQRDLTDSTVLRNLGVGLGYALIAYQATMKGISKLEVNEAHLLQELDHNWEVLAEPIQTIMRRYGIEKPYEKLKELTRGKRVDAAGMQAFIDGLDLPEEEKTRLKAMTPANYIGRATTMVDELK

SEQ ID NO: 144753 - DNA, 1434 bp, Herminiimonas arsenicoxydans
  CDS (1)..(1434): transl_table=11
atgtgcgccgttttttgtatttcggcagctttttcattcacgtcattgcgcttgtcgcccatcatcatgccactttccgcactttccgctctttctccgctggacggccgttacgctgtcaaaaccgacaaactccgccctatcctgtccgaggccggcttcatgcatcaccgcgtgaaagtggaaattgcatggctgcaagccttgtcgactgccggctttgccgagatcaaaccgttttcggccagcgccaatgccttgctgaacaagctgaccaccgacttcaccgaagttgacgcacagcgcatcaaagacattgaagcggtcaccaatcacgacgttaaagccgtcgagtactggctcaaggaacaagtcaaggacgtgcccgagctggttgccgccactgaattcattcacttcgcctgcacctcggaagacatcaacaatacgtcgcacggcatgatgctcaaggctgcgcgcgacacggtgatgctgccggcactgcaggcactggtcgcaaaactgacgcaactcgcgcacgacaatgcggcgctgccgatgatgtcgcgtacgcacggccagcctgccagcccgaccacgctcggcaaggaaatggccaatgtcgtggcacgcctgaagcgcgccatcgaccgcatcgccgatgtacagatactcggcaagatgaatggcgcagtcggcaacttcaatgcacatttgtcggcttatccgcacaccgactggcaggcattctcgaaagacgtgattgaaaaccgtctcggcctgaccttcaacccctacacgattcaaatcgaaccgcatgactacatggcggaactgttcgatgcgattgcacgcaccaacaccatcctgctcgatctgaaccgcgatatctggggctatatttcgctcggctatttcaagcaatcgaccaaggccggcgaaatcggctcgtcgacgatgccgcacaaggtcaacccgatcgactttgaaaactccgaaggcaatctcggcatggccaacgcggtgctcaagcacatggcggaaaaactgccgatctcgcgctggcagcgcgatctgaccgactccaccgtattgcgcaatatcggggtcggcttcggttatgccttgctggcttacgacagttgcctgcgcggcttgaacaagcttgaagtcaatcctgtacgcatcgcacaggatctcgatgaaacctgggaagtattggcggagcccgtgcaaacagtaatgcgccgctacggcatcgagaatccgtacgagcagttgaaagacctgacgcgcggcaagggcatttcgaaagaagcgttgcaggagttcatcgtcacgctggctatcccgcaggaagcaaaggatctgttgctgacgatgacacctgccaactacatcggttacgcaagcaagctggccagggaaatttaa

SEQ ID NO: 144754 - protein, 477 aa, Herminiimonas arsenicoxydans
MCAVFCISAAFSFTSLRLSPIIMPLSALSALSPLDGRYAVKTDKLRPILSEAGFMHHRVKVEIAWLQALSTAGFAEIKPFSASANALLNKLTTDFTEVDAQRIKDIEAVTNHDVKAVEYWLKEQVKDVPELVAATEFIHFACTSEDINNTSHGMMLKAARDTVMLPALQALVAKLTQLAHDNAALPMMSRTHGQPASPTTLGKEMANVVARLKRAIDRIADVQILGKMNGAVGNFNAHLSAYPHTDWQAFSKDVIENRLGLTFNPYTIQIEPHDYMAELFDAIARTNTILLDLNRDIWGYISLGYFKQSTKAGEIGSSTMPHKVNPIDFENSEGNLGMANAVLKHMAEKLPISRWQRDLTDSTVLRNIGVGFGYALLAYDSCLRGLNKLEVNPVRIAQDLDETWEVLAEPVQTVMRRYGIENPYEQLKDLTRGKGISKEALQEFIVTLAIPQEAKDLLLTMTPANYIGYASKLAREI

SEQ ID NO: 144755 - DNA, 1389 bp, Acinetobacter sp. ADP1
  CDS (1)..(1389): transl_table=11
atgaacgctttaactgccctctctccattagatggacgttatgccagcaaatgtgatgctttacgcccttttctttctgagtttggtttaatccatgctcgtgtgactgttgaagtacgctggttacaagcgctctctaaccatgcagggatcattgaagtcgctcctttttctacagaaaccaatgctgctttagattcaattgtggcaaatttttctgaagatgatgcaaatcgtattaaagaaatcgaacgcaccaccaatcatgatgtaaaagccgttgagtattttcttaaagagaaaatcgcaggtctggatgaattaaaaaatgcaggtgaattcattcactttgcatgtacctctgaagacatcaataacttgtctcatgctttgatgcttaaaaatggtcgtgaagttctggtttcaagcatgaaacagattctaaatgcaattgcagccttagccactacacatgctgaacaaccaatgttgtcacgtacacatggtcaaactgcaagcccgacaacactgggcaaagaaatggcaaacgtcgcctatcgtttggcacgtcagattaaacaatttgaaaatgtcgaattgcttggcaaaatcaatggtgctgtcggtaactacaatgcgcacctttctgcttatccagatattgattgggctgcgcattcacaagcatttgtggaatctttaggtttaacctttaacccatataccactcaaattgaaccacacgactatatggcggaattgttcgatgcattgcgtcgttacaacacaattctgatcgattttaaccgcgatgtatggggttatatttctttaggttacttcaaacaaaaactgaaagatggtgaagtgggttcttcaacgatgccacataaagttaacccgattgattttgaaaactctgaaggtaacttaggcattgcaaatgctgtattaggccatttgggtgaaaaacttccagtttctcgctggcagcgcgatttaacagactcgactgtactgcgtaatatgggtgttggctttgcacaaagcctgattgcttttgatgcttgcctaaaaggaattggtaaactagagctcaatgcagctcgtcttgcagaagatctcaatcaagcacaagaagtcttggctgaaccaattcaaactgttatgcgtcgttacaatgttgaaaaaccttatgaaaagttaaaagcattaacacgtggtcaagcaatgacgcgcgacatgatggttaactttgtaaacggtgatgaacttagtcaggtacctgccgaagaacgtgcacgcttagcagaaatgacaccagccagctatacaggtaacgctgcagatcaagcaaaacagatcaatgatttgatcaataaaatttaa

SEQ ID NO: 144756 - protein, 462 aa, Acinetobacter sp. ADP1
MNALTALSPLDGRYASKCDALRPFLSEFGLIHARVTVEVRWLQALSNHAGIIEVAPFSTETNAALDSIVANFSEDDANRIKEIERTTNHDVKAVEYFLKEKIAGLDELKNAGEFIHFACTSEDINNLSHALMLKNGREVLVSSMKQILNAIAALATTHAEQPMLSRTHGQTASPTTLGKEMANVAYRLARQIKQFENVELLGKINGAVGNYNAHLSAYPDIDWAAHSQAFVESLGLTFNPYTTQIEPHDYMAELFDALRRYNTILIDFNRDVWGYISLGYFKQKLKDGEVGSSTMPHKVNPIDFENSEGNLGIANAVLGHLGEKLPVSRWQRDLTDSTVLRNMGVGFAQSLIAFDACLKGIGKLELNAARLAEDLNQAQEVLAEPIQTVMRRYNVEKPYEKLKALTRGQAMTRDMMVNFVNGDELSQVPAEERARLAEMTPASYTGNAADQAKQINDLINKI

SEQ ID NO: 144757 - DNA, 1371 bp, Erwinia carotovora subsp. atroseptica SCRI1043
  CDS (1)..(1371): transl_table=11
atggaattatcctcactgaccgccgtttcccctattgatggacgctacggcgataaagtcagcacattgcgcaccattttcagcgaattcggtttgctgaaattccgtgtgcaggttgaagtacgttggttgcaaaaactggcagcctgtgcagagatccaggaagttcctgcatttgacgctgacgcaaacgctttccttgataaaattgtcgccgaatttagcgaagaagatgcggcccgcattaaaacgatcgagcatacgaccaaccacgatgtgaaagccgttgagtattttctgaaagagaaagtcgctgctattccagcactgcatgccgttaacgaattcatccacttcgcctgtacctcagaagacatcaacaacctgtctcacgcactgatgctggataccgctcgccgcgacgtcatcctgccgcactggcgtcaaattattgatgcgctgaaaacgctggcacaggaataccgcgatatcccgctgctttcccgtacacacggtcagccagccacgccatccaccatcggtaaagagttcgctaacgtggcttaccgtatggagcgccaatatcgtcagctacaacaggttgagattctgggcaaaattaatggtgctgtcggcaactataatgcccatctggcagcctacccggaagtggactggcaccagttcagcgaaagctttgtcacgtcactgggtatcaactggaacccgtacaccacacagatcgaaccgcacgattacatcgccgagctgttcgactgcatcgcacgtttcaacaccattttgatcgactttgaccgtgatatctggggctacatcgcactgaatcacttcaaacaaaaaaccattgcgggcgaaatcggttcctctaccatgccacataaggttaacccgattgacttcgaaaactcggaaggcaatctggggctgtcgaacgccgtactggcgcacctggctagcaaattgccggtttctcgctggcagcgcgaccttaccgactctaccgtgctgcgaaacttaggcgtgggtgtgggctatgcactgattgcgtatcaggccacgatgaaaggcatcagcaaactggaagtgaaccgcgatcgtctggctgacgaactggatcacaactgggaagtgttggcagagccgattcaaaccgtgatgcgccgctacgggattgaaaaaccgtacgagaaactgaaagaactgacacgcggcaaacgtattgatgcgacgggtattcaggcatttatcgatggtctggaattacctgaagcggaaaaaacgcgtctgaaagcgatgacgccagccaactatattggccgcgctatcgccatggtcgatgacctgaaataa

SEQ ID NO: 144758 - protein, 456 aa, Erwinia carotovora subsp. atroseptica SCRI1043
MELSSLTAVSPIDGRYGDKVSTLRTIFSEFGLLKFRVQVEVRWLQKLAACAEIQEVPAFDADANAFLDKIVAEFSEEDAARIKTIEHTTNHDVKAVEYFLKEKVAAIPALHAVNEFIHFACTSEDINNLSHALMLDTARRDVILPHWRQIIDALKTLAQEYRDIPLLSRTHGQPATPSTIGKEFANVAYRMERQYRQLQQVEILGKINGAVGNYNAHLAAYPEVDWHQFSESFVTSLGINWNPYTTQIEPHDYIAELFDCIARFNTILIDFDRDIWGYIALNHFKQKTIAGEIGSSTMPHKVNPIDFENSEGNLGLSNAVLAHLASKLPVSRWQRDLTDSTVLRNLGVGVGYALIAYQATMKGISKLEVNRDRLADELDHNWEVLAEPIQTVMRRYGIEKPYEKLKELTRGKRIDATGIQAFIDGLELPEAEKTRLKAMTPANYIGRAIAMVDDLK

SEQ ID NO: 144759 - DNA, 1380 bp, Leifsonia xyli subsp. xyli str. CTCB07
  CDS (1)..(1380): transl_table=11
atgaccgccctgcctccccagccgttgagccccctagacggacgctaccgcccggcggtgctcggcctcggcgaccacctctccgaggcgggcctcaaccgtgctcgcgttcaggtggaggtcgaatggctcctgtacctcacaaaccaccggatgttcggatcgagtccgctgagcgccgagcaggccggacagctgcgggccctggccgacggcttcggacaggccgagatcgaccggctggccgagctggaggcgaccaccaagcacgatgtcaaagccgtcgagtacctcgttcgtgagcgcctccacacgctcggactggaccacatcgccgaactcacgcacttcgcggcgaccagcgaagacatcaataacctctcctacgcgctcacggtcagcgccgccgtcaacgaggtctggctacccaattaccgcgccgtgatcgccgaattgcgggcgcaggccgctcagcaccgcgacgccgcgatgctcgcgcggacccacggccagcccgcgacgcccaccacgatgggcaaggagctcgcggttttcgcacaccgtctcgaacgcatccgcaagcaggtcgagcagaccgaataccttggcaagttctccggcgcgaccggcaccttcgcagcgcacctcatcgccgatccctccgccgactggctcgcgatctccgaagagttcgtccgcagcctcgggctcgactggaaccccctcaccacccagatcgaatcccacgactggcaggcggagctttacgggcgtatctcacacgccaaccgcgtcctgcacaacctctgcaccgatatctggacgtacatctcgctcggctacttccgccagacgcccgaacccggcgccaccggatcttcgaccatgccgcacaaggtcaacccgatccacttcgagaacgccgaggcgaacctcgaactctccagtgccatcctggactcgctcgcggccaacctggtcacaagccggctccagcgtgacctcaccgactccagcgcgcagcgcaacatcggcgtcgggatcggccactccgtgctcgcgctcgacaacatccagcgcggactcggccagatctcgctcgatgcggacgccctggatgcggacctcgacaccaactgggaggtgctggccgaagccatccagaccgtcatccgcgcggatgtcacagcgggccgctcgaccatcgaagacccgtacgcactgctcaagagcctgacccgcggcaagcgcgtcgaccacgccgcgctgaccgagttcgtcaccggcctcgacatcggcccggcagccaagaaccgtctgctggaactcacaccggcgggctacatcggcctcgcctcgcagctggtcggccgcctctga

SEQ ID NO: 144760 - protein, 459 aa, Leifsonia xyli subsp. xyli str. CTCB07
MTALPPQPLSPLDGRYRPAVLGLGDHLSEAGLNRARVQVEVEWLLYLTNHRMFGSSPLSAEQAGQLRALADGFGQAEIDRLAELEATTKHDVKAVEYLVRERLHTLGLDHIAELTHFAATSEDINNLSYALTVSAAVNEVWLPNYRAVIAELRAQAAQHRDAAMLARTHGQPATPTTMGKELAVFAHRLERIRKQVEQTEYLGKFSGATGTFAAHLIADPSADWLAISEEFVRSLGLDWNPLTTQIESHDWQAELYGRISHANRVLHNLCTDIWTYISLGYFRQTPEPGATGSSTMPHKVNPIHFENAEANLELSSAILDSLAANLVTSRLQRDLTDSSAQRNIGVGIGHSVLALDNIQRGLGQISLDADALDADLDTNWEVLAEAIQTVIRADVTAGRSTIEDPYALLKSLTRGKRVDHAALTEFVTGLDIGPAAKNRLLELTPAGYIGLASQLVGRL

SEQ ID NO: 144761 - DNA, 1368 bp, Mannheimia succiniciproducens MBEL55E
  CDS (1)..(1368): transl_table=11
atgcaactttccgcattaaccgcactttcccctatcgacggtcgctatcaagacaaaactactgcgctgcgtggtattttcagcgaattcggtttattaaaattccgagtaaccgtggaggttcgttggttacaaaaattggcggcaaccgcacaaattaatgaagtttcttctttatctcaagaagcaaacgattaccttaatcaaatcgtcacgaattttgccattgaagatgccgaacgcattaaagaaattgagcgcactaccaatcatgacgtaaaagccgttgaatattttttaaaagagaaatccgcggcattgcctgaattagccgccgtaagcgaatttattcactttgcctgcacttccgaagatattaataacctttctcacgcattaatgctgaaaaccgcccgtgaagaagtgattctgccggaatggcaaaaattaatcgacgaaattacccgtttagcgaacgaatataaagaaatcccattattatcacgcactcacggccaaccggcatctccttcaaccgtcggtaaagaaatggcgaacgtcgcctaccgcttgcgccgccagtataaacaattggaacaaattgaagtattaggcaaaatcaacggtgcggtaggtaactacaatgcccatttaagcgcttacccggaaataaactggcatcaattcagtgaagaatttgtcacttcattaggggtaaactggaacccgtacaccacacaaatcgaacctcatgattatatcgccgagttctttgattgtgtggcgcgttttaataccgttattattgattttgaccgtgatctatggggctacatcgctttaaatcacttcaaacaacgcactatcgccggtgaaatcggttcttcgaccatgcctcacaaagtaaaccctatcgactttgaaaactcggaaggcaacttaggtttagctaatgcggtgatgagccatttggcgcaaaaactacccgtttcccgctggcaacgagacttaacggactcgaccgtattacgtaatcttggagtcggtttgggttattgtttgattgcctatgcggccacacgtaaaggtatcagtaaactggaagtaaatgagcaacatttacgtgacgagctcaaccaaaactgggaagtattggcggaaccaatccaaaccgttatgcgccgttacggtattgaaaaaccttatgaaaaattaaaagagcttacccgcggaaaacgtgtcgatgaacaggcaatgcatgattttatcgaaaaacttgatattccggcggaagaaaaagcccgtttgcaacaactaactccggcaacctatatcggtgcggcggtacaattagttgaaaaactataa

SEQ ID NO: 144762 - protein, 455 aa, Mannheimia succiniciproducens MBEL55E
MQLSALTALSPIDGRYQDKTTALRGIFSEFGLLKFRVTVEVRWLQKLAATAQINEVSSLSQEANDYLNQIVTNFAIEDAERIKEIERTTNHDVKAVEYFLKEKSAALPELAAVSEFIHFACTSEDINNLSHALMLKTAREEVILPEWQKLIDEITRLANEYKEIPLLSRTHGQPASPSTVGKEMANVAYRLRRQYKQLEQIEVLGKINGAVGNYNAHLSAYPEINWHQFSEEFVTSLGVNWNPYTTQIEPHDYIAEFFDCVARFNTVIIDFDRDLWGYIALNHFKQRTIAGEIGSSTMPHKVNPIDFENSEGNLGLANAVMSHLAQKLPVSRWQRDLTDSTVLRNLGVGLGYCLIAYAATRKGISKLEVNEQHLRDELNQNWEVLAEPIQTVMRRYGIEKPYEKLKELTRGKRVDEQAMHDFIEKLDIPAEEKARLQQLTPATYIGAAVQLVEKL

SEQ ID NO: 144763 - DNA, 1362 bp, Methylococcus capsulatus str. Bath
  CDS (1)..(1362): transl_table=11
atgaactccatcaaggcattgtcgccagtagacggccgttacgccggcaaggccgacgccctccgcaacaccttcagtgaatacggcctcatccggttccggatcctggtcgaattgcgctggctggaggcgctggcggccgagcccacgatcaccgaggttccccctttgagtggcgaagcgcgcgatcgtctgaaccggatcgtggacgaattcggcgaagatcatgccgaacgggtcaagaccatcgagcggaccaccaaccacgacgtcaaggcggtcgaatatttcctgaaggagaggatccagggctgccccgaactggagcggatcgccgagttcatccatttcgcctgcacctctgaagacatcaacaatcttgcctatgggctgatggtgaaggaggcgcgtgacacggtcctgctgccggcgatggacgagttgatcgaggcggtgcgggagcgggcgcatgtctatgccggccagccgatgctttcgcgcactcacggccagccggcgacgcccaccacggtcgggaaggagttcgccaacttcgccgcccggctggctcgccaacgcgagcaagtagcggcggtggccctgatgggcaagatcaacggtgcggtcggcaatttcaacgcccatgcggtcgcctaccccgaagtcgattggcccaaactggcacaaggtttcgtcgagtcgctggggctggcctggaacccttataccatacagatcgagccacacgattatctggccgagctgtgccatgcctacagccgtttcggcaccgtgctgatcgacttcgaccgcgacgtctggggctacatctcgctgggttttttccggcagaagaccgtggccggcgaagtcggctcttccaccatgccgcacaaggtcaacccgatcgatttcgagaactcggaaggcaacctcggtatcgccaacgcgctgttctcgcatttcgccgaaaagctgccgatttcccgctggcagcgcgatctaaccgactccacggtgctgcgcaatttcggcgtcggcctcgcccatctgctcatcgcgctcggttccactctgaaaggcctgggcaagctggagctgagccctccggtcctggaggccgatctcgacggcaactgggaagtgctggccgaggcgatccagaccgtgatgcgccgctatggcgtggaacggccctacgagaagctcaaggccttgacccgcggccagcgggtggacgcggagggcctgcgtgccttcgtagagaccctggagatacccgaggaggcgcgcagccgcctggcagcgctggctccccgcgattacatcggctacgctgaaaccttcgccaaaaccatctga

SEQ ID NO: 144764 - protein, 453 aa, Methylococcus capsulatus str. Bath
MNSIKALSPVDGRYAGKADALRNTFSEYGLIRFRILVELRWLEALAAEPTITEVPPLSGEARDRLNRIVDEFGEDHAERVKTIERTTNHDVKAVEYFLKERIQGCPELERIAEFIHFACTSEDINNLAYGLMVKEARDTVLLPAMDELIEAVRERAHVYAGQPMLSRTHGQPATPTTVGKEFANFAARLARQREQVAAVALMGKINGAVGNFNAHAVAYPEVDWPKLAQGFVESLGLAWNPYTIQIEPHDYLAELCHAYSRFGTVLIDFDRDVWGYISLGFFRQKTVAGEVGSSTMPHKVNPIDFENSEGNLGIANALFSHFAEKLPISRWQRDLTDSTVLRNFGVGLAHLLIALGSTLKGLGKLELSPPVLEADLDGNWEVLAEAIQTVMRRYGVERPYEKLKALTRGQRVDAEGLRAFVETLEIPEEARSRLAALAPRDYIGYAETFAKTI

SEQ ID NO: 144765 - DNA, 1371 bp, Neisseria gonorrhoeae FA 1090
  CDS (1)..(1371): transl_table=11
atgatcaaccccatcgcctcgctttcccccctagacggccgttatgcccaatccgttgaagcattgcgcccgattttttcagagtacggactgatgaaggcgcgcgtcaaagtcgaattaaactggctcaaagccctggccgccgagccggagattgccgaagtgccgcccttcagtgccgaaacgcttgccgaaatcgacaaagtcatcgaaaacttttcattagaagacgcggccgccgtcaaagccatcgaagccacgaccaatcatgatgtcaaagccatcgaatattggctgaaaaaacgttttgccgaagtgccggaagtcgccgccgtgagcgagttcatccacttcgcctgcaccagcgaagacatcaacaacctgtcccacgccctgatgctgcaagaggcgcgcgaaaccgtcatcctgcccaaacttgccgaaatcatcggcaaactcaccgctatggcgcacgaccttgccgccgtcccgatgatgagccgcacccacggccagcccgccacaccgaccactttgggcaaagaaaccgccaatgtcgtgtaccgcctgcaacgccagttcaaaatccttcaggcgcaagaattcctcggcaaaatcaacggcgcggtcggcaactacaacgcccacatggccgcctatcccgatgtggattgggaaacacactgccgcaacttcgtcgaaatcagcctcggtctgaccttcaacccctacaccatccaaatcgagccgcacgactatatggcggagtttttccaaaccctcagccgcatcaacacgattctcatcgacttcagccgcgacgtttggggttatatttcattgggttatttcaaacaaaaagtcaaagcgggcgaagtcggctcttccaccatgccgcacaaagtcaaccccatcgactttgaaaactccgagggcaacctcggcatggcaaacgccgtattgggctttttggcggaaaaactgcccgtctcacgctggcagcgcgatttgaccgacagcaccgtattgcgcaatatgggcgtgggcgtgggctatgccgtgttgggtttcgccgcccacttgcgcggtctgaacaagctcgagccgaaccctgccgcgcttgccgccgatttggatgtcacttgggagctgctcgccgagccgattcaaaccgtaatgcgccgttacggtgtcgccaatccttacgaaaaactgaaagacctgacgcgcggtaaaggcggcatcacacccgaagtgctgaaaggctttatcggatcgctggaaattcccgccgaagccaaagccaaattgcttgagctgacccccgcgctgtatgtgggcaaggctgaagcgttggcgaaacggatttga

SEQ ID NO: 144766 - protein, 456 aa, Neisseria gonorrhoeae FA 1090
MINPIASLSPLDGRYAQSVEALRPIFSEYGLMKARVKVELNWLKALAAEPEIAEVPPFSAETLAEIDKVIENFSLEDAAAVKAIEATTNHDVKAIEYWLKKRFAEVPEVAAVSEFIHFACTSEDINNLSHALMLQEARETVILPKLAEIIGKLTAMAHDLAAVPMMSRTHGQPATPTTLGKETANVVYRLQRQFKILQAQEFLGKINGAVGNYNAHMAAYPDVDWETHCRNFVEISLGLTFNPYTIQIEPHDYMAEFFQTLSRINTILIDFSRDVWGYISLGYFKQKVKAGEVGSSTMPHKVNPIDFENSEGNLGMANAVLGFLAEKLPVSRWQRDLTDSTVLRNMGVGVGYAVLGFAAHLRGLNKLEPNPAALAADLDVTWELLAEPIQTVMRRYGVANPYEKLKDLTRGKGGITPEVLKGFIGSLEIPAEAKAKLLELTPALYVGKAEALAKRI

SEQ ID NO: 144767 - DNA, 1419 bp, Pseudomonas syringae pv. syringae B728a
  CDS (1)..(1419): transl_table=11
atgtatgatatgcgcccttttcgtcgcccgactgtccgagagcatcccatgcagctttcttcgctcactgcggtttcccctgttgatggccgctacgccggcaaaacccaggccttgcgccctattttcagcgaatacggcctgatccgtttccgcgtgatggttgaagttcgctggctccagcgtcttgcggctcacccgcagatcaccgaagtcccggccttctccgcgcaagccaacgccatcctggatgccctggctgaagacttctccgtggagcatgccgagcgcgtcaaggaaatcgagcgcaccaccaatcatgacgtgaaggctgtggagtatctgctcaaggagcaggctgccaaattgccagagctggaaaaggtcagtgagttcatccacttcgcctgcaccagcgaagacatcaacaacctgtctcacgcattgatgctgcgcgagggccgcgacactgtcgtgctgccgctgatgcgccagatcgccgacgccatccgcgagctggcgattcgcttcgcagacgtgccgatgctgtcccgcacccacggccagcccgcctccccgaccacactgggcaaggaactggccaacgtcgtctaccgcctcgagcgccagatcagccagatcgcggcggtcccgttgctcggcaagatcaacggcgcagtcggcaactacaatgcccacctctctgcctacccagacatcgactgggaagccaacgcgcgcgccttcatcgaagacgaactgggcctgggcttcaacccctacaccacgcagatcgaaccgcacgactacattgccgagctgttcgatgccattgcgcgcttcaacaccatcctgatcgacttcgaccgtgacatctggggctacatctcgctgggctatttcaaacagcgcaccatcgctggcgaaatcggctcctcgaccatgccgcacaaggtcaacccgatcgacttcgaaaactccgaaggcaacctgggcatcgccaacgcactgttccagcatctggcgagcaagctgcctgtctctcgctggcagcgtgacctgaccgactccaccgtgctgcgcaacctgggcgtcggctttgcccacagcgtcattgcctacgaagccagcctcaagggcatcagcaagctggaactgaacgaacagcgcattgccgccgatctggacgcatgctgggaagttctggcagagccgattcagactgtcatgcgtcggtacaacatcgaaaacccgtacgaaaaactgaaagaactgacccgcggcaagggcatcggtcctgaagcgttgcagactttcatcgacggtctggacatgccctccgaagccaaggccgagctcaagaagctcacgccagccaattacatcggtaacgcagccgctcaggccaagcgcatctga

SEQ ID NO: 144768 - protein, 472 aa, Pseudomonas syringae pv. syringae B728a
MYDMRPFRRPTVREHPMQLSSLTAVSPVDGRYAGKTQALRPIFSEYGLIRFRVMVEVRWLQRLAAHPQITEVPAFSAQANAILDALAEDFSVEHAERVKEIERTTNHDVKAVEYLLKEQAAKLPELEKVSEFIHFACTSEDINNLSHALMLREGRDTVVLPLMRQIADAIRELAIRFADVPMLSRTHGQPASPTTLGKELANVVYRLERQISQIAAVPLLGKINGAVGNYNAHLSAYPDIDWEANARAFIEDELGLGFNPYTTQIEPHDYIAELFDAIARFNTILIDFDRDIWGYISLGYFKQRTIAGEIGSSTMPHKVNPIDFENSEGNLGIANALFQHLASKLPVSRWQRDLTDSTVLRNLGVGFAHSVIAYEASLKGISKLELNEQRIAADLDACWEVLAEPIQTVMRRYNIENPYEKLKELTRGKGIGPEALQTFIDGLDMPSEAKAELKKLTPANYIGNAAAQAKRI

SEQ ID NO: 144769 - DNA, 1371 bp, Haemophilus influenzae 86-028NP
  CDS (1)..(1371): transl_table=11
atgcaactctctacactgaccgcactttcccctcttgatggtcgttatcaagataaagtaacgccattacgtgctatttttagcgaattcgggttaatgaaattccgtgtagttgtggaagttcgttggttacaaaaattagcttcaacggcagatattaccgaagtaccgccattttctacgcaagcaaatgcttttttagatggaattgtggctaattttaatgaggccgatgctgcgcgtattaaagaaattgaacgcacaactaatcacgatgtgaaagccgttgagtattttctgaaagagaaaattcaaaacgaagtggaactagtgaacgtttctgaatttattcacttcgcttgcacctcagaagacattaacaatctctctcacgcattaatgttaagcaccgctcgtgacgaagtgattttaccagaatggcaaaaactgattgatgaaatcactcgtcttgcagaagaatataaaacgattccattactttctcgcacacatggccagccagcttcaccaagcaccgtgggcaaagaaatggcgaatgtcgtttatcgcctaaaacgtcaatttaaacaactccaaaatgcggagatcttaggtaaaatcaatggtgcagtaggtaactacaatgcgcatttatcggcatatcctaatattgattggcataaattcagcgaagaatttgtcacttcattaggtattcaatggaatccttataccacacaaattgagccgcacgattacatcgctgaattttttgatgctgtagttcgctttaataccattatcattgattttgatcgtgatttatggggatacattgcattaaatcactttaaacaacgaactatagcaggcgaaattggttcttctaccatgccacataaagtcaatccaattgattttgaaaactcagagggcaatctaggattagccaatgcagtgatgacccatttaggtcaaaaattaccaatttctcgctggcagcgtgacttaacagattcaaccgtattacgtaatttaggcgtaggattaggttattgtttgatcgcttatgcttcaacacgcaaaggcatgagtaaacttgaagtaaatcaaccgcacttattagaagaactcaatcaaaactgggaagttttggctgaaccaattcaaaccgtaatgcgtcgctacggaatagaaaaaccttacgaaaaattaaaagaattaacgcgaggtaaacgagtgacagaacaggctatgcgtgaatttattgataagttggatattccacaagaagaaaaattacgtttacaaaaattaacacccgctacttatattggggctgcagtggaattagtagagaagctatcatag

SEQ ID NO: 144770 - protein, 456 aa, Haemophilus influenzae 86-028NP
MQLSTLTALSPLDGRYQDKVTPLRAIFSEFGLMKFRVVVEVRWLQKLASTADITEVPPFSTQANAFLDGIVANFNEADAARIKEIERTTNHDVKAVEYFLKEKIQNEVELVNVSEFIHFACTSEDINNLSHALMLSTARDEVILPEWQKLIDEITRLAEEYKTIPLLSRTHGQPASPSTVGKEMANVVYRLKRQFKQLQNAEILGKINGAVGNYNAHLSAYPNIDWHKFSEEFVTSLGIQWNPYTTQIEPHDYIAEFFDAVVRFNTIIIDFDRDLWGYIALNHFKQRTIAGEIGSSTMPHKVNPIDFENSEGNLGLANAVMTHLGQKLPISRWQRDLTDSTVLRNLGVGLGYCLIAYASTRKGMSKLEVNQPHLLEELNQNWEVLAEPIQTVMRRYGIEKPYEKLKELTRGKRVTEQAMREFIDKLDIPQEEKLRLQKLTPATYIGAAVELVEKLS

SEQ ID NO: 144771 - DNA, 1392 bp, Psychrobacter arcticus 273-4
  CDS (1)..(1392): transl_table=11
atgaatttacttaccgccctatccccaatcgatggtcgttatgcgtccaaagccgatagcttgcgcccttacttatctgaatttggtctgattaaagcgcgcgttaccgttgagattcgctggttacagtcattggctgataatagtgccattggtgagttagcagcatttgataccgataccaatgcgtttttaaatgctatcgttgataactttagcgaagcagatgcccaagcgattaaagacatagaagcaaccaccaatcatgatgtaaaagcagttgagtactttattaaagacaaattccgtggtcaggcagcgcttgaagattcattagaatttattcattttgcttgtaccagtgaagatattaacaacctatcatacgcattaatgctaaaagacagccgcgaaatcgtcgttgccaaaatgcaagaagtgacggatagtattgttgatttagcgattacctatgctgaccaaccgatgttatcacgtacccatggtcaaaccgctagcccaacgactttgggtaaagagatggcaaacgtggcttatcgtctagcccgtcaaatcaagcaggttggtcaggttgaactacttggtaaaatcaatggcgcagttggtaactataacgctcattatgcctcatatcctgatgttgattggcaagttcatgctgaacaatttatcaacgatagcttagcattgacgtttaacccgtacaccacgcaaattgaaccgcatgattatatcgctgaattgttcgatgcggtaaaacgtttcaacactattctaatcgattttaatcgtgatatttggcaatatattagcttaggctattttaaacagcgcctaaaagagggtgaagttggctcttctaccatgccgcataaagtgaacccgatcgactttgaaaactcggaaggtaacttgggcgttgctaatgcgatgcttgctcatttaggcgaaaagctgccgatttcacggatgcagcgcgatttgtccgactctaccgtattacgtaatatcggtgttggtctggcgcaaagcatgattgcttttgatgcatgtttaaaaggcgtcagcaaacttgaattgaatgcgcagcgtttaaatgatgacttggacagcgcccaagaggttttagcagaaccaattcaaactgttatgcgccgttaccgagttgaaaacccatatgagaagctaaaggcattaacgcgtggcaacgcgatgacccgtgaagcaatgctgactttcgttgaaagtgatgaattatctgcggtgagcgatactgataaagtgcgcctacgtgaaatgacgccagcaacttatgtgggtaatgcggctgaacaagcacgcacaattaaagagtggattgctaagatttaa

SEQ ID NO: 144772 - protein, 463 aa, Psychrobacter arcticus 273-4
MNLLTALSPIDGRYASKADSLRPYLSEFGLIKARVTVEIRWLQSLADNSAIGELAAFDTDTNAFLNAIVDNFSEADAQAIKDIEATTNHDVKAVEYFIKDKFRGQAALEDSLEFIHFACTSEDINNLSYALMLKDSREIVVAKMQEVTDSIVDLAITYADQPMLSRTHGQTASPTTLGKEMANVAYRLARQIKQVGQVELLGKINGAVGNYNAHYASYPDVDWQVHAEQFINDSLALTFNPYTTQIEPHDYIAELFDAVKRFNTILIDFNRDIWQYISLGYFKQRLKEGEVGSSTMPHKVNPIDFENSEGNLGVANAMLAHLGEKLPISRMQRDLSDSTVLRNIGVGLAQSMIAFDACLKGVSKLELNAQRLNDDLDSAQEVLAEPIQTVMRRYRVENPYEKLKALTRGNAMTREAMLTFVESDELSAVSDTDKVRLREMTPATYVGNAAEQARTIKEWIAKI

SEQ ID NO: 144773 - DNA, 1371 bp, Colwellia psychrerythraea 34H
  CDS (1)..(1371): transl_table=11
atggaactttcagcattaagtgcaatatcacctgtagatggtcgttatggtagcaaggtaaaatcattacgctctatttttagtgaatttggcctaattaaataccgtgttactgttgaagtacgttggttacaaaaacttgcagctactagcgcaatagcagaggttcctgcattttctgaacaagcaaatgatgtattaaataatattgttgctaactttagtgaagaagatgctttaacgatcaaaaaaattgaagcgacaactaaccatgatgtaaaagcagttgaatacttcttaaaagataaaattgctgataacgctgaattaaacgctgtgactgaattcattcactttgcctgtacttcagaagacatcaacaacttatcacacgcattaatgttaactgattgtcgtgaaaatgtattattaccagaaatggataacattttagcggcgatgaaagccttagcgattgaatacaaaacgattccaatgatgtgtcgtactcatggccagccagcctcacctagcacgttaggaaaagagatggctaacgtttatgtgcgtctacaacgtcaacgtgagcaaattgctaacgttgaaatgttaggtaaaattaacggcgctgtaggtaactataatgctcaccttagcgcttatcctgaagttgattggcatgaatacgctaatgagtttgttacttcattaggtttatcattcaacgcatttaccacacaaattgaaccgcatgactatattgctgagttatttgacgcaatcgcacgttttaataccattttaatcgattttgatcgtgatatttggggttatattgctatgggtcatttcaagcagaaaactatcgctggtgaaattggttcatcaactatgccacataaagttaaccctattgatttcgaaaactcagaaggtaacttaggcattgcaaacgcattattcactcacttatcgcagaaattgcctatctctcgctggcagcgtgacttaactgactcaacagtgctacgtaacttaggtgttggttttgctcatacaatgattgcttatggtgctacattaaaaggcattagtaagttagaagtaaatgaagctaacttagcagctgaattagacagtaattgggaagtattagcagagccagtacaaacggttatgcgtcgttacggtattgaaaaaccttatgaaaaactaaaagaattaactcgtggcaaacgtgttaatggcgactctatgcgtgcttttatcatgacgcttgaattacctgaacatgctaaagctcagttatgtgaaatgacacctgctagctacattggccgtgcagttgctttcattgatgaactaaaataa

SEQ ID NO: 144774 - protein, 456 aa, Colwellia psychrerythraea 34H
MELSALSAISPVDGRYGSKVKSLRSIFSEFGLIKYRVTVEVRWLQKLAATSAIAEVPAFSEQANDVLNNIVANFSEEDALTIKKIEATTNHDVKAVEYFLKDKIADNAELNAVTEFIHFACTSEDINNLSHALMLTDCRENVLLPEMDNILAAMKALAIEYKTIPMMCRTHGQPASPSTLGKEMANVYVRLQRQREQIANVEMLGKINGAVGNYNAHLSAYPEVDWHEYANEFVTSLGLSFNAFTTQIEPHDYIAELFDAIARFNTILIDFDRDIWGYIAMGHFKQKTIAGEIGSSTMPHKVNPIDFENSEGNLGIANALFTHLSQKLPISRWQRDLTDSTVLRNLGVGFAHTMIAYGATLKGISKLEVNEANLAAELDSNWEVLAEPVQTVMRRYGIEKPYEKLKELTRGKRVNGDSMRAFIMTLELPEHAKAQLCEMTPASYIGRAVAFIDELK

SEQ ID NO: 144775 - DNA, 1371 bp, Thiobacillus denitrificans ATCC 25259
  CDS (1)..(1371): transl_table=11
atggaactgaccgcactgaccgccctttcccccctcgacggccgctacggcggcaagactgccgcgctccgcgacttcttcagcgagtacgcgctgatcaagtaccgcgtcatcgtcgagatcgaatggctgaaggcgctcgcggccgaacccgcgatcacggaggtcccggccttctccgacggtgcgatcgcgctgctcgacgccatcgccgaccgtttttctgtcgcggacgcggagcgcgtgaaggcgatcgaggcgacgaccaaccacgacgtcaaggcggtcgaatatttcctcaaggaaaaaacccgggacaacgccgagatcggcgcggtctccgagttcatccatttcgcgtgcacctcggaagacatcaacaacctgtcgcacgcgctgatgctcaagggcgcgcgcgacgcggtcctgctgcccgcgctggagaagctcatcgcgcgcctgagcgacctcgcccacgaactcgccgacctgccgatgctgtcgcggacccacggccagccggcgtcgccgaccacggtcggcaaggagctcgccaacgtcgtctaccgtctgcggcgcgcctgggacggcatcggcgcggtcgagctgctcggcaagatcaacggcgccgtcggcaattacaacgcccatctgtcggcctaccccgacctcgattgggaaggcttcgcgagcgattttgtcggccatctcgggctcagcttcaatccctataccgtacagattgagccgcacgacgcgatggccgagctttacgacgcgatcgcgcgcaccaacaccgtactcatcgacctcgaccgcgacgtctggggctacatctcgctcggctacttcaagcagaagaccaaggccggcgaggtcgggtcgtcgacgatgccgcacaaggtcaacccgatcgacttcgagaacagcgagggcaacctcggtcttgccaacgcagtcctgcgccatctcgctgaaaagctcccggtctcgcgctggcagcgcgacctcaccgactcgaccgtgctgcgcaacatgggggtcggcttcggctacagcctgctcgcctacgaatcctgcctgcgcggccttggcaaactcgaggcgaaccccgcggcgctggcgaccgacctcgacgccaactgggaagtgctcgccgagcccatccagaccgtcatgcgccgctacggcgtcgccaacccctacgagcagttgaaggacctcacgcgcggcaaaggcggcatgagccgcgagacgctgcatgcgttcatcgacggcttggcgatccccgcgggcgagaaggaccgcctgaaagccatgtcaccggcgtcctacacgggcaaggcggcggagctggcgcggcagatctga

SEQ ID NO: 144776 - protein, 456 aa, Thiobacillus denitrificans ATCC 25259
MELTALTALSPLDGRYGGKTAALRDFFSEYALIKYRVIVEIEWLKALAAEPAITEVPAFSDGAIALLDAIADRFSVADAERVKAIEATTNHDVKAVEYFLKEKTRDNAEIGAVSEFIHFACTSEDINNLSHALMLKGARDAVLLPALEKLIARLSDLAHELADLPMLSRTHGQPASPTTVGKELANVVYRLRRAWDGIGAVELLGKINGAVGNYNAHLSAYPDLDWEGFASDFVGHLGLSFNPYTVQIEPHDAMAELYDAIARTNTVLIDLDRDVWGYISLGYFKQKTKAGEVGSSTMPHKVNPIDFENSEGNLGLANAVLRHLAEKLPVSRWQRDLTDSTVLRNMGVGFGYSLLAYESCLRGLGKLEANPAALATDLDANWEVLAEPIQTVMRRYGVANPYEQLKDLTRGKGGMSRETLHAFIDGLAIPAGEKDRLKAMSPASYTGKAAELARQI

SEQ ID NO: 144777 - DNA, 1452 bp, Burkholderia thailandensis E264
  CDS (1)..(1452): transl_table=11
atggtaaaattcgcggttctccccttcacgttcgaaccgcggccgcgagcctcaagcccgatcatgtccgacacccgtcccgatacccttttcgccctcaccgcgctttcgccgatcgacggccgctacgccagcaagaccgaagcgctgcgcgactggctctccgaagccgccttcatgcgccaccgcgtcaccgtcgaggtgcactggctgatcgcgctgtcgcgcgccggcttcgccgaagtgccgcgcttctccgaagccgccgaacagttcctgctgcagctcgtcgagcgcttcaccgcgcacgacgccgcacgcatcaaggaaatcgagcgcgtgacgaaccacgacgtgaaagccgtcgagtactggctgaaggaatccgtcaagggccagaccgaactcgagcgcgcgagcgaattcatccacttcgcgtgcacgtcggaagacatcaacaacacgtcgcacggaatgatgcttgccggcgcgcgccagcacgtgatcctgcccgcgctgcgcacggtgcacggccgcctcgtcgcgctcgcgcacgcgcacgccgggcaaccgatgctctcgcgcacgcacggccaaccggccagcccgacgacgctcggcaaggaaatcgcgaacgtcgcggcgcgccttgcgcgcgcgatcgagcgcatcgagaaggtcgagatcctcggcaagatgaacggcgcggtcggcaacttcaacgctcacctgtccgcctatccggaattcgactgggaagcgttctcgcgcgacgtgatcgagaaccgcctgaagctcgcgttcaacccgtacacgatccagatcgaaccgcacgactacatggccgagctgttcgacgccgtggcgcgcgcgaacacgatcctgctcgacctcgaccgcgacgtgtggggctacatctcggtcggctacttcaagcagaagacgaaggcgggcgaaatcggctcgtcgacgatgccgcacaaggtcaacccgatcgacttcgaaaactcggaaggcaacctcggcctcgcgaacgcgacgctgcgccacctcgccgacaagctgccggtgtcgcgctggcagcgcgatctcaccgattcgacggtgctgcgcaacatgggcgtcgcgctcggctactcgctgctcgcgtacgactcgctgatccgcggcctcgacaagctcgaggtgaacccgcagcgcctgaacgaagatctcgacaactgctgggaagtgctcgccgagccggtgcagacggtgatgcgccgctacggcatcgagaacccgtacgagcagttgaaggaactgacgcgcggcaagggcatcacgcgcgaggcgctgcagcagttcatcggcacgctcgcgattcccgaggacgcgaaggcgcgcctgctcgcgatgacgcccgcgtcgtacatcggcaaggcggccgagctcgcgaaacgcatcgcgtaa

SEQ ID NO: 144778 - protein, 483 aa, Burkholderia thailandensis E264
MVKFAVLPFTFEPRPRASSPIMSDTRPDTLFALTALSPIDGRYASKTEALRDWLSEAAFMRHRVTVEVHWLIALSRAGFAEVPRFSEAAEQFLLQLVERFTAHDAARIKEIERVTNHDVKAVEYWLKESVKGQTELERASEFIHFACTSEDINNTSHGMMLAGARQHVILPALRTVHGRLVALAHAHAGQPMLSRTHGQPASPTTLGKEIANVAARLARAIERIEKVEILGKMNGAVGNFNAHLSAYPEFDWEAFSRDVIENRLKLAFNPYTIQIEPHDYMAELFDAVARANTILLDLDRDVWGYISVGYFKQKTKAGEIGSSTMPHKVNPIDFENSEGNLGLANATLRHLADKLPVSRWQRDLTDSTVLRNMGVALGYSLLAYDSLIRGLDKLEVNPQRLNEDLDNCWEVLAEPVQTVMRRYGIENPYEQLKELTRGKGITREALQQFIGTLAIPEDAKARLLAMTPASYIGKAAELAKRIA

SEQ ID NO: 144779 - DNA, 1371 bp, Cytophaga hutchinsonii ATCC 33406
  CDS (1)..(1371): transl_table=11
atgtttcctaaagtaaataaaatggaattacaagcattaacagctatcagcccgatagacggccgatatagaaaccaagttgcttcattagcgccttacctatctgaatttggtttaattcactacagagttaaaatcgaaatagaatattttatcgcattatgcgaaaaacctgtgccgcaattaaaagattttgacaaatcgatctatcctgccttgcgtgccatttacttggaattcagcttagaagatgcgcaacgtatcaaagacattgagaaggtaacaaaccacgatgttaaagccgttgaatacttcataaaagaaaaattaaaaaaatacgacttaggtaattaccttgagtttatacacttcggtttaacctctcaggacatcaacaatacttctattccattgttgttgaaagacgtgttaaacaattgcatctatcctgaattatctgcttccattaaacagattgaagcgttggcaaaaagctgggaaacaattccgatgctggcaaaaacacacggacagcctgcctctcctacacgtttgggaaaagagtttatggtgtttgttgaacgtctgatcaatcagatcaatttattgcaccagattccgtacagcgcaaagtttggaggcgctacaggcaatttcaatgcgcataacgttgcttatccggagatcaactggatcgaattcggaaatgattttgtgaatacaacacttggtttatcgcgcaatcaatatactacgcaaattgaacactacgataacctggctgccttgtttgataccctaaaacgtatctcaaccatattgatcgattttgaccgcgatgtgtggcaatatgtttcgatgaactactttaaacaaaaagttaaaaaagatgaagtaggttcttctgccatgccgcacaaggtgaacccgattgattttgaaaacagcgaaggaaatttaggtgtggctattgccctgtttgaacatttctctaccaaacttcctatttcaagattacagagagatttaacggattcaacggtgctgcgtaatatcggcgtgccattgggccatttcttaattgcattaaaatccctacaaaaaggcctttcaaaattagaattaaatgtagatgcaatcaatgcagatcttgaagacaactgggcagtaattgctgaagcaatccagacaattcttcgcagagagaattatccgaatccgtacgaagcgttgaaagacttaacacgcaatggtggtaagatcacaaaagataccctgcagggattcatcaatggactaaccgtttcagaagaaatcaaagtggaacttcgtaaattaagtccccataactatacaggtattcaattctag

SEQ ID NO: 144780 - protein, 456 aa, Cytophaga hutchinsonii ATCC 33406
MFPKVNKMELQALTAISPIDGRYRNQVASLAPYLSEFGLIHYRVKIEIEYFIALCEKPVPQLKDFDKSIYPALRAIYLEFSLEDAQRIKDIEKVTNHDVKAVEYFIKEKLKKYDLGNYLEFIHFGLTSQDINNTSIPLLLKDVLNNCIYPELSASIKQIEALAKSWETIPMLAKTHGQPASPTRLGKEFMVFVERLINQINLLHQIPYSAKFGGATGNFNAHNVAYPEINWIEFGNDFVNTTLGLSRNQYTTQIEHYDNLAALFDTLKRISTILIDFDRDVWQYVSMNYFKQKVKKDEVGSSAMPHKVNPIDFENSEGNLGVAIALFEHFSTKLPISRLQRDLTDSTVLRNIGVPLGHFLIALKSLQKGLSKLELNVDAINADLEDNWAVIAEAIQTILRRENYPNPYEALKDLTRNGGKITKDTLQGFINGLTVSEEIKVELRKLSPHNYTGIQF

SEQ ID NO: 144781 - DNA, 1368 bp, Alkalilimnicola ehrlichei MLHE-1
  CDS (1)..(1368): transl_table=11
atggagctgacccgcctgaccgccatttcccccgttgacggccgctacggcaacaagaccagcgcgttgcaacccctgttcagcgagtttggcctcatccggcaccgggtcattgtggaggtccgctggctggaggccctcgccgcccacccggatatccgcgaggtgcccgccctttcgccccaggcgcgcaccttcctgcaggagctgatcgataatttcggccccaaggacggcgagcggatcaagcgttacgaggccaccaccaatcacgatgtgaaggcggtggagtactacctcaaggagcgcctggccgagctgccggaactggcggcgatcagcgagttcgtccatttcgcctgcacctccgaggacatcaacaacctggcctacgccctgatgctgaaggccgggcgggacgaggtgttgctgccgctgctggacgaggtcatcgagcagctgcggggcttggcgcacacccacgccgatcaacccatgctctcgcgcacccacggccagaccgcctcgcccaccaccctgggcaaggagatcgccaacgtggtccaccgcctgcgccggcagcgcgaacagctggcagcggtgagcgtcctgggcaagatcaacggtgcggtgggcaacttcaacgcccacctgtgcacctatccgcgggtggactggccggggctcgcgcagcgctacgtcgagggcatgggcctggagtggaacccctacacgacacagatcgaaccccacgactacatcgcggaggccttcgatgccctggcccgggtcaacacggtgctgatcgatttcagccgcgatatctggggctacatctcgctgggctactttaagcagcgcctggtggagggcgaggtgggctcctccaccatgccgcacaaggtcaaccccatcgacttcgaaaacgccgagggcaatctgggggtggccaatgccctgctcgagcacctggcccgcaagctgccggtctcgcgctggcaacgcgacctgaccgattccaccgtgttgcgcaccctcggcacgggcatcggccataccgtgatcgcgctgcacagcctgcgcaagggggtggacaagctggaggccaacccccagcgcctggccgaggatctcgacgccgcctgggaggtgctggccgaggcggtgcagacggtgatgcgccggcacggcctggagaagccctacgaacagctcaaggccttcacccgcgggcgcgccatcaccggaccggcgctgcaggcgttcatcgccgagttggacatccccgccagcgcccgcgccgagctgcaacagctcacgccggccggctatattggtaatgccgccgagcaggcgcggcgcatctga

SEQ ID NO: 144782 - protein, 455 aa, Alkalilimnicola ehrlichei MLHE-1
MELTRLTAISPVDGRYGNKTSALQPLFSEFGLIRHRVIVEVRWLEALAAHPDIREVPALSPQARTFLQELIDNFGPKDGERIKRYEATTNHDVKAVEYYLKERLAELPELAAISEFVHFACTSEDINNLAYALMLKAGRDEVLLPLLDEVIEQLRGLAHTHADQPMLSRTHGQTASPTTLGKEIANVVHRLRRQREQLAAVSVLGKINGAVGNFNAHLCTYPRVDWPGLAQRYVEGMGLEWNPYTTQIEPHDYIAEAFDALARVNTVLIDFSRDIWGYISLGYFKQRLVEGEVGSSTMPHKVNPIDFENAEGNLGVANALLEHLARKLPVSRWQRDLTDSTVLRTLGTGIGHTVIALHSLRKGVDKLEANPQRLAEDLDAAWEVLAEAVQTVMRRHGLEKPYEQLKAFTRGRAITGPALQAFIAELDIPASARAELQQLTPAGYIGNAAEQARRI

SEQ ID NO: 144783 - DNA, 1377 bp, Magnetococcus sp. MC-1
  CDS (1)..(1377): transl_table=11
atggctttgcagctctccgcccttaccgcgctctcccccttggatggccgctacggcagcaaaaccgccgacctgcgcgcccatttttccgaatttggcttaatacacgcccgtgtgctggtggagattcgctggttacaggccctctctcaagagccgggcattcctgaggttccccccttctccgccgccgccatggcccagttggatcacttggccgatgccttcgacgaaacaggtgcccagcgcattaaggatattgaggccaccaccaaccatgatgtcaaggcggttgagtactaccttaaagagtcagtcgccaccagtgagatcgcctcggttagcgagtttatccattttgcctgcacctctgaagatatcaacaacctctctcacggtttgatgctgcaaggtgcccggcaagcggtgctactgccccagatggaccacgtggtggaggccgtgaccctcttggccaaacgctatcgggatctgcccatgctgtcgcgcacccatggtcaacccgcctcgcccaccaccttgggtaaagagatggccaacgtggccgatcgccttaaacgggcccgcaaccagtttgcccaagtggcaatccccggcaaaatcaacggtgcggtggggaattttaatgcccatgtcagtgcctatcccgaggtggactggccccgcttcgcccaagcttttgtggagagcctgggcctaacatggcaaccctttaccacccaaattgaaccccatgatggcatggccgaactgttccatgcgctgattcgctttaacaccatcctgatcgatttttgccgggatgtctggggttatatctcttggggattctttaaacagcgcaccgtggccggtgaaatcggctcctccaccatgccccacaaggttaaccccatcgactttgaaaatgccgagggcaacctgggcatggccaacgccatgttggaccatctggccctcaaactgcccatcagccgttttcaacgggatctgaccgactctaccgtgttacgcaacatgggggtaggctttggttataccctgctggcgctgcaatcggcactcaaggggatcggcaaattagaggctaatgcatcgcgcctgctcgatgacctagatgccaactgggaagtattggcggaacccattcagaccgtcatgcgccgctatggtattgaacagccgtatgaaaaactcaaggagcttacccgtggtcaacgggtggaccaagggattatgcaggcctttgtagccaaattggagatccccgatcacgccaaacaggcccttatggagatgaccccagccacctatatcggcttggccaaagagctcaccgatcggttggaaggctaa

SEQ ID NO: 144784 - protein, 458 aa, Magnetococcus sp. MC-1
MALQLSALTALSPLDGRYGSKTADLRAHFSEFGLIHARVLVEIRWLQALSQEPGIPEVPPFSAAAMAQLDHLADAFDETGAQRIKDIEATTNHDVKAVEYYLKESVATSEIASVSEFIHFACTSEDINNLSHGLMLQGARQAVLLPQMDHVVEAVTLLAKRYRDLPMLSRTHGQPASPTTLGKEMANVADRLKRARNQFAQVAIPGKINGAVGNFNAHVSAYPEVDWPRFAQAFVESLGLTWQPFTTQIEPHDGMAELFHALIRFNTILIDFCRDVWGYISWGFFKQRTVAGEIGSSTMPHKVNPIDFENAEGNLGMANAMLDHLALKLPISRFQRDLTDSTVLRNMGVGFGYTLLALQSALKGIGKLEANASRLLDDLDANWEVLAEPIQTVMRRYGIEQPYEKLKELTRGQRVDQGIMQAFVAKLEIPDHAKQALMEMTPATYIGLAKELTDRLEG

SEQ ID NO: 144785 - DNA, 1371 bp, Shewanella sp. ANA-3
  CDS (1)..(1371): transl_table=11
atggatctttccgcactaactgctatctctccggtagacggccgttacggtagtaaaacagcgtcattgcgagggattttcagcgagttcggtcttactaagtaccgtgttcaagttgaaatcaactggttaaaattactcgccgattgcccagaaatcaccgaagtgccgccactgagcgaatctgctatcgcagtattagatgcaattaaagacaatttcagcgagcaagatgcgctacgcgtgaaagccattgaaagcaccaccaaccacgacgtaaaagcggttgaatacttcatcaaagaaaaaatcgcagacaacgctgaactcgccgctgtgggtgaatttgttcacttcgcctgtacctctgaagacatcaacaacctgagccacggcttaatgttgaccgaagcccgtgagcaagtggttctgccatactgcaatgaactgctcagcgccatcaaaaaactggccgttgaataccgctcagtgccattgatgtcacgcactcacggtcaacccgcttcaccttcgactttaggtaaagaaatggcgaacgttgcggtgcgtttagagcgtcaaatcaagcagatcgcagctgttgaagtcatgggtaaaattaacggcgccgtgggtaactacaacgcccacttatctgcttacccagaagtgaactggcatgcactgtctgagcgttttgtcaccagcttaggcctgcactggaacgcttacaccacgcaaatcgagccacacgattacatcgccgaactgtttgatgccatcgcacgtttcaacactatcctgattgacttcgaccgtgacgtttggggttatattgcccttggtcacttcaagcaacgtaccgttgccggtgaaattggttcatcaaccatgccacacaaagtcaacccaatcgactttgaaaactcagagggtaacctcgggattgctaacgcactgatgcaacacttagcgtctaagctgccggtttcaagatggcaacgtgacttaactgactcaaccgtactgcgtaacttaggtgtaggtattgcccactcgctgatcgcctaccaagccaccttaaaaggcatcagcaagttacaagtgaacgaagatcatttacgtgccgaactcgaccaaaactgggaagtcttagccgagccagtacaaaccgttatgcgtcgctatggtattgaaaagccatacgagaagttaaaagaactgactcgcggtaagcgtattgatgcccagcaattagcggtattcatcgacggtttagccctgcctgaagaagtgaaagcagagctgaagaagatgacgccagccaactacattggccgtgctgaagccttcgtcgacgagcttaactaa

SEQ ID NO: 144786 - protein, 456 aa, Shewanella sp. ANA-3
MDLSALTAISPVDGRYGSKTASLRGIFSEFGLTKYRVQVEINWLKLLADCPEITEVPPLSESAIAVLDAIKDNFSEQDALRVKAIESTTNHDVKAVEYFIKEKIADNAELAAVGEFVHFACTSEDINNLSHGLMLTEAREQVVLPYCNELLSAIKKLAVEYRSVPLMSRTHGQPASPSTLGKEMANVAVRLERQIKQIAAVEVMGKINGAVGNYNAHLSAYPEVNWHALSERFVTSLGLHWNAYTTQIEPHDYIAELFDAIARFNTILIDFDRDVWGYIALGHFKQRTVAGEIGSSTMPHKVNPIDFENSEGNLGIANALMQHLASKLPVSRWQRDLTDSTVLRNLGVGIAHSLIAYQATLKGISKLQVNEDHLRAELDQNWEVLAEPVQTVMRRYGIEKPYEKLKELTRGKRIDAQQLAVFIDGLALPEEVKAELKKMTPANYIGRAEAFVDELN

SEQ ID NO: 144787 - DNA, 1380 bp, Acidovorax sp. JS42
  CDS (1)..(1380): transl_table=11
atgagcctgtccaccatcaccgccctgtcgcccctagacggccgctacgccgccaaactctccgccctgcgtcccatcatgagcgagcacggctacatgcaccgccgcgtgcaggtggaggtggcctggttcatcgcgctgtcggacgcgggattcgcggagttcaagccgctgtccaccggcgcgcgcgcctacctgctgggcctggtgaagaacttctccgaggccgacgcgagcgccatcaaggacatcgagaagaccaccaaccacgacgtgaaggcggtcgaatactggatcaagtccaagttcgaggcccgccccgaactggagaaggctgccgagttcgtgcacttcgcctgtaccagcgaggacatcaacaacaccagccatgcgctgcagatccgctcgggccgcgaccaggtcatcctgccgggcctggaccgcatcgtgctcaagctgcgcgagatggcccaccagtttgccgacgtgcccatgctcagccgcacccacggccagaccgccagccccaccacggtgggcaaggagctggccaacgtggtcgtgcgcttgcaggcggcctgcgagcgcatcgcggcggtgaagatcctgggcaagatgaacggcgccgtgggcaactacaacgcccacctgtcggcctggcccgacttcgactgggaagccttcagccgcaaggtcgtggagacgcccgagccgctgggcctgggcctcactttccagccctacagcatccagatcgagccgcacgactacatggccgagctgttcgacgccatcgcccgcgccaacaccatcctggtggacctctcgcgcgacatctggggctacgtgagcctgggctacttcaagcaaaagctcaaggcgggcgagatcggctcgtccaccatgccccacaaagtcaaccccatcgacttcgagaacgccgagggcaacctgggcctggccaatgcgctgctcaggcacctgtccgaaaagctgcccatcagccgctggcagcgcgacctcaccgacagcaccgtgctgcgcaacatcggcgtggcgctgggctacgccgcgctggcctatacctcgctgatgaccggcctgaacaagctggagctgaacgaagaagccctggccgacgacctcaacaccagctgggaagtgctggccgaacccatccaaaccgtgatgcgccgctacggcgtgcagggcgcgtacgagaagctcaaggaagtcacgcgcggcaagaccgtgacggccgaggcgctgcacgcgctgatcaacggcctggagatcccccaagccgacaaggaccgcctgctggccatgacgccgggcagctacaccggcaaggcggccgagctggcgcgccgcgtctga

SEQ ID NO: 144788 - protein, 459 aa, Acidovorax sp. JS42
MSLSTITALSPLDGRYAAKLSALRPIMSEHGYMHRRVQVEVAWFIALSDAGFAEFKPLSTGARAYLLGLVKNFSEADASAIKDIEKTTNHDVKAVEYWIKSKFEARPELEKAAEFVHFACTSEDINNTSHALQIRSGRDQVILPGLDRIVLKLREMAHQFADVPMLSRTHGQTASPTTVGKELANVVVRLQAACERIAAVKILGKMNGAVGNYNAHLSAWPDFDWEAFSRKVVETPEPLGLGLTFQPYSIQIEPHDYMAELFDAIARANTILVDLSRDIWGYVSLGYFKQKLKAGEIGSSTMPHKVNPIDFENAEGNLGLANALLRHLSEKLPISRWQRDLTDSTVLRNIGVALGYAALAYTSLMTGLNKLELNEEALADDLNTSWEVLAEPIQTVMRRYGVQGAYEKLKEVTRGKTVTAEALHALINGLEIPQADKDRLLAMTPGSYTGKAAELARRV

SEQ ID NO: 144789 - DNA, 1437 bp, Bifidobacterium longum DJO10A
  CDS (1)..(1437): transl_table=11
atgaagcttaccgatatttcccccgcaatcgcattgaccccactcgacggccgttatcacaaggccaccgccccgctcgtcgaatacatgagcgaacctgccctgaaccgcgaacgcatgcgtgtcgaagtcgaatggatgattcttctggccaacggctttgagggcaacggcaaccagccgatcgttgacggcgtcaagccgttcactgccgaagagcaggccttcctgcgcgccattcccgaggacttcggcgccgaaggcatcaagcagcacgccgctcatgaggccatcacccaccacgatgtgaaggccgtggagtactacatcgatgatcagatcgacaaggctccggccgagctgaccaacatcaacgacgagctgaagaccctcgtgcacttcgcctgcacgtccgaagacatcaacaacctctccatcgcccgttgcgtcaagaacgcgatggaaaacgtgtggaccccggagttcaagcgcatcatcgaccacctcgccggcaaggccgaggaattcaaggatatgccgctgctctctctcacccacggccagccggccacgccgaccacactcggcaaggagctcgccgtctacgtctaccgtctgaaccgtcagctcaagcacatcgaaaaccaggagtacctgggcaagatcaacggcgcgaccggcacgttcggtgcccacttggccgcatgcccggatgtcgactggatcgctgtctcccgcgagttcgtcacgaaccgcatgggcctgacctggaacccgctgaccacgcagatcgaaagccacgactggcaggccgagctgtactccaccgtctcccacgccaaccgcatcatgcacaacctgtgcgtggacgtgtggatgtacatctcccgcggcgtgttcgcccaggtgccggtcaagggtgccactggttcctccaccatgccgcacaaggtcaacccgattcgtttcgagaacgccgaagccaacttcgagatcagctgctcgctgctcgacaccctctccgccacgctggtggaatcccgttggcagcgcgatctgaccgattcgaccacccagcgcaacatcggttccgcgctcggctactccttgctcgccctgaccaacctcatgggtggccttgagtccatccacccgaacacccacgtcatcgagcgtgagctggatgagaactgggaggtgcttggcgagccgatccagaccgccatgcgcgcctgcgagctcaagggcctgccgggcatggataagccgtacgagaaggtcaaggagcttatgcgcggccacaccatcaacaaggaacaggtcgagcagttcatcgaccagcagtccttcgacccggaaaccgccgctcgcttgaaggctctgacccccgccacctacaccggtgtggccagccagctcgtcgctttcggccgctga

SEQ ID NO: 144790 - protein, 478 aa, Bifidobacterium longum DJO10A
MKLTDISPAIALTPLDGRYHKATAPLVEYMSEPALNRERMRVEVEWMILLANGFEGNGNQPIVDGVKPFTAEEQAFLRAIPEDFGAEGIKQHAAHEAITHHDVKAVEYYIDDQIDKAPAELTNINDELKTLVHFACTSEDINNLSIARCVKNAMENVWTPEFKRIIDHLAGKAEEFKDMPLLSLTHGQPATPTTLGKELAVYVYRLNRQLKHIENQEYLGKINGATGTFGAHLAACPDVDWIAVSREFVTNRMGLTWNPLTTQIESHDWQAELYSTVSHANRIMHNLCVDVWMYISRGVFAQVPVKGATGSSTMPHKVNPIRFENAEANFEISCSLLDTLSATLVESRWQRDLTDSTTQRNIGSALGYSLLALTNLMGGLESIHPNTHVIERELDENWEVLGEPIQTAMRACELKGLPGMDKPYEKVKELMRGHTINKEQVEQFIDQQSFDPETAARLKALTPATYTGVASQLVAFGR

SEQ ID NO: 144791 - DNA, 1413 bp, Kineococcus radiotolerans SRS30216
  CDS (1)..(1413): transl_table=11
gtgaccgactcggccgttgccaccacgcccgcgaccacccccgccagcctgggcgagcccgcgctcggcccgctcgacggccgctaccgccgctccgtcgccccgctgaccgagcacctctccgaggccgcgctgaaccggcgccgcatccacgtcgaggtggagtggctggtcttcctcggcacccacgacgccgtcccgggcgtgcgccgcctgacggacggggagatcgcgttcctgcgggagctgccgctgcgcttcgacgccgacgcggtcaccgagctgggcgagatcgagcgcgtcaccgtccacgacgtgaaggccgtcgagtactggatcaagcgccgcctggagggcacgtcgctggccgacgtcgccgagctcacccacctcttcgccaccagcgaggacatcaacaacctctcctacgccctcatggtgcgcgacgccgtgggcgaggtctggctgccggcggccaccggcctcgtcgacgacgtggcgcggatggcgcgggagctgcgcgacctgccgatgctctcgcgcacccacggccagcccgcgaccccgacgacgctgggcaaggagctcgccgtcctcgcccaccggctgcgccgccagctcaagcggatcgccgccgccgagtacctcggcaagttcaacggcgccaccggcacctacgccgcgcaccgggcggccgtgcccacgacggactggccggcggtgtcggaggaattcgtcaccggcctgggcctgacgtggaacccgctgaccacgcagatcgagtcccacgactggcaggcggagctgtacgccgacgtctcccgcttcgggcgggtgctgcacaacctctgcaccgacgtgtggacctacatctcgctgggctacttcgcccaggtccgcgggcagggcaccgtggggtcctcgacgatgccgcacaaggtgaacccgatccggttcgagaacgccgaggcgaacctcgaggtgtccggcgggctgttccgcgtgctggaggagaccctcacgacgtcgcgcctgcagcgcgacctcaccgactcctccatgcagcgcaacatcggcgtcgccttcgggcactccctgctggcgatcgagaacgcccagcgcggtctcgccggtctcgacgccgcccccgccgcgctcgccgccgacctcgacgggaactgggaggtcctcggcgaggccgtccagtcggtgatgcgcgtgcacgggctgcccgaaccctacgagcgcctgaaggagctcacccgcggccgcaaggtcgaccaggcgaagctgcgcgagttcgtcgcgggcctcggcctgcccgagggcgaggcggcgcggttgtcgctcatgacccccggcgactacaccggcgacgcctccgcactcgtcgacgtgctcgacgcggactga

SEQ ID NO: 144792 - protein, 470 aa, Kineococcus radiotolerans SRS30216
MTDSAVATTPATTPASLGEPALGPLDGRYRRSVAPLTEHLSEAALNRRRIHVEVEWLVFLGTHDAVPGVRRLTDGEIAFLRELPLRFDADAVTELGEIERVTVHDVKAVEYWIKRRLEGTSLADVAELTHLFATSEDINNLSYALMVRDAVGEVWLPAATGLVDDVARMARELRDLPMLSRTHGQPATPTTLGKELAVLAHRLRRQLKRIAAAEYLGKFNGATGTYAAHRAAVPTTDWPAVSEEFVTGLGLTWNPLTTQIESHDWQAELYADVSRFGRVLHNLCTDVWTYISLGYFAQVRGQGTVGSSTMPHKVNPIRFENAEANLEVSGGLFRVLEETLTTSRLQRDLTDSSMQRNIGVAFGHSLLAIENAQRGLAGLDAAPAALAADLDGNWEVLGEAVQSVMRVHGLPEPYERLKELTRGRKVDQAKLREFVAGLGLPEGEAARLSLMTPGDYTGDASALVDVLDAD

SEQ ID NO: 144793 - DNA, 1398 bp, Xylella fastidiosa Dixon
  CDS (1)..(1398): transl_table=11
gtggcgctcccgcttccctcaattacggccatgtcacatttacccctacttgctttgtcgccactggatgggcgctatttgtctaaagtcgatacattgcggccaattttttcagaatatggcttgatcaaagccagggtgaaagtcgagattgcatggttactggcgttggccgcagaaccaaacattgtcgagttggcaccgttctccgttgccgcgcaaacacgcctgcgtgcgttagcagacggtttgaccattgagcacgccgcacgtgtgaaagagattgagcacaccaccaatcacgacgtaaaagcagtggaatatttcatcaaagagcagcttaaggacgatacagagctgcgccccggactggagtttgtccatttcgcttgcaccagcgaggacatcaacaacctgtcctatagcttgatgttgcaacaagccagagatgaggtactgctcccgacactggacggtatcgctacacatctgcgcaccctggcccatgctcaggccgcacaaccgatgctctcacgcacccacgggcaaaccgcctcgcctaccacgctgggcaaggaaatcgccaatgtggtagcccgtttggaacgccagcgccatcagatcgccacgattgcactgagcggaaaaatcaacggtgctgtaggcaattacaacgcacataccatcagctatccggaggtcaattggcctgcattggcacaacgttttgttgagagcctgggcttggtcttcaacccatacaccacacaaattgagccgcacgacaccatcgccgagatcagcgacgcaatccgccgcgccaacaccattctgatcgacctggcacgcgatctttggggctatatctcgttgggttacttcaaacaaaagctcaaggaaggtgaaatcggctcctcaaccatgccgcacaaagtcaatccgattgacttcgaaaatgccgaaggcaatttcggcgtggccaacgcattatttgagcatttttcgaccaagctgccgatcagtcgctggcaacgtgacctcaccgattccaccgtactacgcgcactcggcaccgcgtttggccatactcaggtggctttagattctttaaacaaagggctacacaagctcagcccaaatccagaacgcattgacgctgacctggacgtggcatgggaagtgctggccgaagcagtacagacaatcatgcgccgccacaatctacccaacccctacgagcaactgaaagcgctgacccgtggtcagggcatcaccgccgattcgatgcgcgctttcatcgaaaccctggatctgccaaccgaagccaaacagcggctgcacgatttaactccaagggcttataccggtctggcgaagcagttggcacttaacatctaa

SEQ ID NO: 144794 - protein, 465 aa, Xylella fastidiosa Dixon
MALPLPSITAMSHLPLLALSPLDGRYLSKVDTLRPIFSEYGLIKARVKVEIAWLLALAAEPNIVELAPFSVAAQTRLRALADGLTIEHAARVKEIEHTTNHDVKAVEYFIKEQLKDDTELRPGLEFVHFACTSEDINNLSYSLMLQQARDEVLLPTLDGIATHLRTLAHAQAAQPMLSRTHGQTASPTTLGKEIANVVARLERQRHQIATIALSGKINGAVGNYNAHTISYPEVNWPALAQRFVESLGLVFNPYTTQIEPHDTIAEISDAIRRANTILIDLARDLWGYISLGYFKQKLKEGEIGSSTMPHKVNPIDFENAEGNFGVANALFEHFSTKLPISRWQRDLTDSTVLRALGTAFGHTQVALDSLNKGLHKLSPNPERIDADLDVAWEVLAEAVQTIMRRHNLPNPYEQLKALTRGQGITADSMRAFIETLDLPTEAKQRLHDLTPRAYTGLAKQLALNI

SEQ ID NO: 144795 - DNA, 1338 bp, Croceibacter atlanticus HTCC2559
  CDS (1)..(1338): transl_table=11
atgagcgctttacgtgctatttctccaatagacggccgttatgccggaaagacagaacaacttgctaattattttagcgaagaggctttaattaagtaccgtgttaaagtagaggttgaatattttatagcactctgtgaattgccattaccgcaattaaaggatgtgtctcaagataattttgggaaattaagagctatctatgaagagtttacaacaatagatgcttctgaaattaaagaaattgaaaagacaaccaatcacgatgtaaaagctgttgagtatttcattaagaaaaagtttgatggattagggctttcagattacaaggagtttattcactttgggttaacctctcaggatataaataatacagcagtacctttaagtataaaggatgctatgaataatgtatatgttcctctgtttatcgagcttaaagagcgcttgactgaattgtctaaagattgggctaacataccaatgttggcaagaacacatggtcaacctgcatcgcctacacgtttaggaaaagaagtagaagtttttgtggttaggttaaatgaacaattagatttattaaatgacatccctagtgctgcaaaatttggtggtgcaactggaaactttaatgctcatcatgttgcgtatccagaaatagattggaaagaatttggaaagaactttgtagaaggtaaactagagctacaacactcatttcctacaactcagatagagcattatgatcatatggctgccttgtttgatggtttaaaacgaattaacactatagttttagatttggaccgagatatgtggacatatgtttctatggattactttaagcagaaaattaaaaaaggcgagataggttcttctgcaatgccacacaaggtgaatccaatagattttgaaaacagcgaagggaatataggcattgccaatgctatttttgagcacctatctgctaaactacctgtaagtagattacaacgtgatttaacagacagtactgttttgagaaatgtaggagtgccttttggccatactttaattgcatttaagtctacactaaaaggtttaaataaattattgctgaatgagtctaaactacaacaagacctagaacaaaattgggctgtagttgcagaggcaattcaaacaatattaaggcgtgaagcttaccctaatccttatgaagctcttaagggcttaacgagaacaaatacagctatcactgctgatagtattgcagattttattgaaacattagatgtatctgaagatattaagaaggagttacgtgtaataactccgcaaagttatacaggtatttaa

SEQ ID NO: 144796 - protein, 445 aa, Croceibacter atlanticus HTCC2559
MSALRAISPIDGRYAGKTEQLANYFSEEALIKYRVKVEVEYFIALCELPLPQLKDVSQDNFGKLRAIYEEFTTIDASEIKEIEKTTNHDVKAVEYFIKKKFDGLGLSDYKEFIHFGLTSQDINNTAVPLSIKDAMNNVYVPLFIELKERLTELSKDWANIPMLARTHGQPASPTRLGKEVEVFVVRLNEQLDLLNDIPSAAKFGGATGNFNAHHVAYPEIDWKEFGKNFVEGKLELQHSFPTTQIEHYDHMAALFDGLKRINTIVLDLDRDMWTYVSMDYFKQKIKKGEIGSSAMPHKVNPIDFENSEGNIGIANAIFEHLSAKLPVSRLQRDLTDSTVLRNVGVPFGHTLIAFKSTLKGLNKLLLNESKLQQDLEQNWAVVAEAIQTILRREAYPNPYEALKGLTRTNTAITADSIADFIETLDVSEDIKKELRVITPQSYTGI

SEQ ID NO: 144797 - DNA, 1368 bp, Pseudoalteromonas tunicata D2
  CDS (1)..(1368): transl_table=11
atggagctttcagcgttaaccgctatctcccctgttgacggtcgttacggcagcaaaacatcagaacttcgcagcattttcagcgaatttggtttaatcaaataccgtgtaacggtcgaagttcgttggctacaagcactttctcgtgcagaggcgattgctgaagttcctgcgttcagtgatgaagcaaatgcacttttagatgcaattgtaactaacttctctgaaactgatgcagcgcgcgttaaggaaattgagcgcaccactaaccacgacgtgaaagcggttgaatatcttctaaaagaaaaagtagctggtaacgcagaacttaatgcggtgaatgagtttattcattttgcatgtacttctgaagatatcaataacctatctcatgcattaatgttaagtgaagctcgctctaacgttttactcccatactgtgatcagttattagatgcaattaaaggcttagcttcagcatatcaagcaatgccaatgatgactcgtacgcacggtcagccagcttcaccttcaacgatgggtaaagaaatggctaacgtgtatgcacgtttaaaacgtcaacgtgatcaaattgccaacattgaaatgttaggtaaagcaaatggtgctgtgggtaactacaatgcacatctaagcgcctacccagattacgattggcatgcacatgccgaaaccttcattactggtttagggattacatttaacccatttacgacacaaattgaacctcacgactatattgctgagttattcgatgctgttgcacgtttcaatactattttgattgattttgatcgtgatgtttggggttatatcgcattaggtcactttaaacaaagaacaattgcgggtgaaattggttcatcaacaatgccacataaagttaacccaattgattttgaaaactctgaaggtaacttaggcctagcaaatgctatttttaatcatctagcacaaaagctacctatttctcgttggcaacgtgacttaacggattctaccgttttacgtaatttaggtgtcggtatgggttatgcgattatcgcgtatcaatcaacacttaaaggtattagtaaacttgaagtgaatgaagtcaaattacttgaagaactagaccaaaactgggaattactggcagaaccaattcaaacggttatgcgtaaatacggtattgaaaaaccatatgaaaaattaaaagaattaacgcgtggtaaacgtgtaaatcaacaaattatggccgattttattgatggtcttgatttaccagccgacgttaaagttgaaatgaaaaaactcactccggccaattatattggttgtgctattgagttaaccaattcattataa

SEQ ID NO: 144798 - protein, 455 aa, Pseudoalteromonas tunicata D2
MELSALTAISPVDGRYGSKTSELRSIFSEFGLIKYRVTVEVRWLQALSRAEAIAEVPAFSDEANALLDAIVTNFSETDAARVKEIERTTNHDVKAVEYLLKEKVAGNAELNAVNEFIHFACTSEDINNLSHALMLSEARSNVLLPYCDQLLDAIKGLASAYQAMPMMTRTHGQPASPSTMGKEMANVYARLKRQRDQIANIEMLGKANGAVGNYNAHLSAYPDYDWHAHAETFITGLGITFNPFTTQIEPHDYIAELFDAVARFNTILIDFDRDVWGYIALGHFKQRTIAGEIGSSTMPHKVNPIDFENSEGNLGLANAIFNHLAQKLPISRWQRDLTDSTVLRNLGVGMGYAIIAYQSTLKGISKLEVNEVKLLEELDQNWELLAEPIQTVMRKYGIEKPYEKLKELTRGKRVNQQIMADFIDGLDLPADVKVEMKKLTPANYIGCAIELTNSL

SEQ ID NO: 144799 - DNA, 1368 bp, Photobacterium sp. SKA34
  CDS (1)..(1368): transl_table=11
atggaactgtcagcattgactgctgtttccccagtagatggccgatacggaagtaaaacaagcgcactacgcagcattttcagtgaatttggtctgctaaagtaccgcacaatcgttgaaatccgttggttacaaaaattagccgctactgacgctattgtggaagttcctgcattcagccctgaagctaacgcattcttagatcgtgttgccgctgagtttagtgaagaagatgcgttacgcattaaaacgattgaacgtacaacaaaccatgacgttaaagcggttgagtacttcctaaaagaaaaagttgctgagttaccagagcttcacgcggttaacgaattcatccactttgcatgtacttcagaagatattaacaacctttctcacgcgcttatgctaactgaagcacgtgaaaaagtaatgcttccagaagtacgtaacgtgattgatgcgatcaaagatctagcaaatcaattccgtgatattccaatgcttactcgtactcacggccagccagcttctccatctacaatgggtaaagaaatggcgaacgtggcgtaccgtatggaacgtcaatacaagcaaatcgaaaacgttgaaattcttggtaagatcaacggtgctgtaggtaactacaacgctcacctttcagcttatcctgaaatcgattggcaccaatacagtgaagagttcgtgacctctctaggtatcacttggaacccttacacaacacagattgaaccacacgattacatcgcagagctattcgatgcattcgcacgtttcaacacaatccttctagacttcgaccgtgacgtttggggctacattgccctaggtcacttcaagcagaagacgattgcgggtgaaatcggctcatcaaccatgccgcacaaagttaacccaatcgactttgaaaactccgaaggtaaccttggcctagcaaatgctatcttcggtcacctagcacagaaactgcctgtttctcgctggcagcgcgaccttactgactcaacagtacttcgtaacctaggtgtaggttgtggttatgcaattattgcttacacatcaacactgaaaggcattagcaagctagaagttaacgctgatgcgttagctgcagagcttgataagaactgggaagtattggctgagccagtacaaacagtaatgcgtcgttacggtatcgaaaagccatacgagaagctaaaagaactaacccgtggtaaacgtgttgatggcgaaggcatgcgtgtattcatcgatggccttgatcttccagagcatgaaaaagcacgtctaaaagagctaacaccagcaaattacattggtgatgctgttaagctaactgacaatctataa

SEQ ID NO: 144800 - protein, 455 aa, Photobacterium sp. SKA34
MELSALTAVSPVDGRYGSKTSALRSIFSEFGLLKYRTIVEIRWLQKLAATDAIVEVPAFSPEANAFLDRVAAEFSEEDALRIKTIERTTNHDVKAVEYFLKEKVAELPELHAVNEFIHFACTSEDINNLSHALMLTEAREKVMLPEVRNVIDAIKDLANQFRDIPMLTRTHGQPASPSTMGKEMANVAYRMERQYKQIENVEILGKINGAVGNYNAHLSAYPEIDWHQYSEEFVTSLGITWNPYTTQIEPHDYIAELFDAFARFNTILLDFDRDVWGYIALGHFKQKTIAGEIGSSTMPHKVNPIDFENSEGNLGLANAIFGHLAQKLPVSRWQRDLTDSTVLRNLGVGCGYAIIAYTSTLKGISKLEVNADALAAELDKNWEVLAEPVQTVMRRYGIEKPYEKLKELTRGKRVDGEGMRVFIDGLDLPEHEKARLKELTPANYIGDAVKLTDNL

SEQ ID NO: 144801 - DNA, 1365 bp, Oceanospirillum sp. MED92
  CDS (1)..(1365): transl_table=11
atggagctttccgcactgactgccgtttctccggttgatggtcgttatggcagcaaaacagctgacctacgcgatgtatttagtgaatatggcctgattcgcttccgcgttgaagttgaagttcgctggctgcaaaaactggctgcacaccctcagatcactgaagtgccagccctgagtgcagaagctgacgctctgttgaattcgatcgttgacaactttggtcctgacgacgctcaggcggttaaaacgattgaacgtacgactaaccacgatgtaaaagcggttgagtacttcatcaaagacaaattcaaagataacgctgagctaatggcgatcaacgaatttgttcacttcgcatgtacttctgaagacatcaacaacctgtcacacgcactgatgcttaagcacggtctggcggttgtacttcctcagatgcagcaggtttctgatgagatcgctaaaatgggtcgtgagtttgctgagcagccaatgctgtctcgcacacacggtcagacagcctctcctactaccgtaggtaaagagatggctaacgttgcataccgcatgcagcgccagatcaaacaacttcagaatgttgagctgctgggcaagatcaatggtgctgtaggtaactacaacgctcacctgtctgcttacgctgatatcgactgggaagtgaacgctaaagagttcgtagaaagcctgggtcttaactggaacccttacacaactcagatcgaaccacacgattacattgcagagctgtttgacgcggttgcacgtttcaacacaattctgatcgattttgaccgcgatatctggggttacatctcccaggcttacttcaagcagaagacgattgctggtgaagtgggttcttcgacaatgccgcacaaagttaaccctatcgacttcgaaaattccgaaggtaacctgggtatcgctaacgcaatcatgagccacctggcgcagaaactgccaatctctcgctggcagcgtgaccttactgactccactgttctgcgcaacatgggcgttggttttggttatagcatgatcgcttaccagtctaccctgaaaggtatcagcaagcttgagcttaaccctgcacagctgaacgaagacctggaaaatgcctgggaagtactggctgagccgatccagacagtaatgcgccgttatgcgattgaagagccttacgagaaactgaaggccctgacacgtggccaggacatgagcaaagaaaccattatggcctttgttgatacgctggatatgccagaagaagctaagcaatctctgaaagacctgacaccgcacagctacatcggtaatgcggtagcacaggcgaagaaaatctaa

SEQ ID NO: 144802 - protein, 454 aa, Oceanospirillum sp. MED92
MELSALTAVSPVDGRYGSKTADLRDVFSEYGLIRFRVEVEVRWLQKLAAHPQITEVPALSAEADALLNSIVDNFGPDDAQAVKTIERTTNHDVKAVEYFIKDKFKDNAELMAINEFVHFACTSEDINNLSHALMLKHGLAVVLPQMQQVSDEIAKMGREFAEQPMLSRTHGQTASPTTVGKEMANVAYRMQRQIKQLQNVELLGKINGAVGNYNAHLSAYADIDWEVNAKEFVESLGLNWNPYTTQIEPHDYIAELFDAVARFNTILIDFDRDIWGYISQAYFKQKTIAGEVGSSTMPHKVNPIDFENSEGNLGIANAIMSHLAQKLPISRWQRDLTDSTVLRNMGVGFGYSMIAYQSTLKGISKLELNPAQLNEDLENAWEVLAEPIQTVMRRYAIEEPYEKLKALTRGQDMSKETIMAFVDTLDMPEEAKQSLKDLTPHSYIGNAVAQAKKI

SEQ ID NO: 144803 - DNA, 1341 bp, Flavobacteria bacterium BBFL7
  CDS (1)..(1341): transl_table=11
atgcctactgctttacaagctatttctcctatagacggtcgttaccgttcaaaagtcgacacacttgctcctttcttttcagaatctgctttgatacgttatcgtgtcctggttgagattgaatattttatcgctttaagcgaaagcggaatccaacaacttcaaccttttcctgaagatactcaagagcagttaagaaacttgtatcgcaactttacagatgaacatgcacaagcaattaaagacatcgagaaagtaactaaccatgatgtgaaagccgttgagtattttattaaagaacagtttgatcaactaggtttacaagctcataaagaattcatccattttggactgacttctcaagatattaataatacagccataccactttccataaaagatgctgtagaagaaatttaccgacctgagatagagtccttaaaagaaactctagagaaattatctgttgaatgggcaaatattccaatgctcgctcgtacacacgggcagccagcttctcctactcgattaggtaaagaattttatgtatttgcagtacgactagatgagcaattaaacatgcttgaccaagtacaacatgcagcaaaatttggtggagctacaggaaactataatgcacatcatgttgcttttacacaaatagattggagaaattttggtgaagattttgtagaaagcagattaggtttaacgcacagttttccaactactcaaatagagcactatgatcacatggcttcgctatttgatactttaaaacgaatcaatactattttaatagacttagacagagatatatggacttatatatcgatggactacttcaagcaaaaaattaagaaaggtgaagttggttctagcgccatgcctcataaagtcaatcctattgactttgagaatagtgaaggaaacctagggctcgcaaatgctatttttgagcatcttgctgcaaagttacctatctctagattgcaacgtgacttaacagattcaactgtattacgtaatgtaggtgtaccatttgcacatactattattgctataaaagcaactatgaaaggtttaggaaaattacttcttaatgaggctaagattgctcaagatcttgaaaacaattgggcagtagttgcagaagcgatacagaccatattgagacgtgaggcatatcctaatccttatgaagctcttaaagaattgacacgtactaatgagaaaatcacaggcgatagtattgctaggtttatcgatggattagatgtgagtgaaagtattaaaagtgaaatgaaagatataacaccagccacgttcactggtatataa

SEQ ID NO: 144804 - protein, 446 aa, Flavobacteria bacterium BBFL7
MPTALQAISPIDGRYRSKVDTLAPFFSESALIRYRVLVEIEYFIALSESGIQQLQPFPEDTQEQLRNLYRNFTDEHAQAIKDIEKVTNHDVKAVEYFIKEQFDQLGLQAHKEFIHFGLTSQDINNTAIPLSIKDAVEEIYRPEIESLKETLEKLSVEWANIPMLARTHGQPASPTRLGKEFYVFAVRLDEQLNMLDQVQHAAKFGGATGNYNAHHVAFTQIDWRNFGEDFVESRLGLTHSFPTTQIEHYDHMASLFDTLKRINTILIDLDRDIWTYISMDYFKQKIKKGEVGSSAMPHKVNPIDFENSEGNLGLANAIFEHLAAKLPISRLQRDLTDSTVLRNVGVPFAHTIIAIKATMKGLGKLLLNEAKIAQDLENNWAVVAEAIQTILRREAYPNPYEALKELTRTNEKITGDSIARFIDGLDVSESIKSEMKDITPATFTGI

SEQ ID NO: 144805 - DNA, 1371 bp, Alteromonadales bacterium TW-7
  CDS (1)..(1371): transl_table=11
atggagctttcagcgttaacggctatctcgccagttgatggtcgctacggcagcaaaaccactgaactacgcagtattttcagcgaatttggattaattaaataccgtgtaattgttgaagtgcgttggttgcaagcgttagctgcagcaagcgacattaaagaagtgcccgcatttagcgaccaagcaaatgcacttttaaacgctattgttgataacttcagtgaagccgacgcgcagcgcgtgaaggatattgaacgaacaactaaccacgacgttaaagccgttgaataccttttaaaagaaaaagtagctgataacgcagagctacatgctattaacgaatttattcactttgcatgtacctcagaagacattaacaacctatcacatggtttaatgttaactgaagcacgtgacagcgtattactgccatactgtgaccaattactcaacgccatcaaagaaaaagccattgagtataaagcagtgccaatgatgactcgtacgcacggacaacctgctacaccatcaactatgggtaaagagtttgcaaatgtatacatgcgtttaaaacgtcaacgcgatcaaattgcgcaagtagaaatgcttggtaaagtaaatggcgctgttggtaactataacgctcaccttagcgcttaccctgattacgactggcatactcatgcagataagtttgtatcgagcctagggttaacattgaacccgtttactacacaaattgaaccacatgactacattgcagaattatttgatgcaattgcacgttttaatactattttgcttgattttgaccgtgatgtttggggttacattgcccttaaccactttaagcaaaaaaccattgctggcgaaattggctcatcaactatgccacacaaagttaaccctattgattttgaaaactcagaaggtaacttaggtttagcaaatgcaatttttgcacaccttgcacaaaaactgcctgtatctcgctggcagcgtgatcttaccgattcgacagtgctacgtaaccttggtgtgggtatgggttatgcgcttattgcatatcaatcaacgcttaaaggtgttagcaagcttgaagttaacgaaccacgtttacttgaagagctagaccaaaactgggaattactcgctgagcctattcaaacagttatgcgtaaatacggcattgaaaagccatacgaaaaacttaaagatttaacccgtggaaagcgcgtaaatcaagaaataatggctgacttcatcgatggtttagatcttcctgaagttgctaaagtagaaatgaaaaaactaacaccggctaattacattggccgtgcggttgaatttattgatgatttagtttaa

SEQ ID NO: 144806 - protein, 456 aa, Alteromonadales bacterium TW-7
MELSALTAISPVDGRYGSKTTELRSIFSEFGLIKYRVIVEVRWLQALAAASDIKEVPAFSDQANALLNAIVDNFSEADAQRVKDIERTTNHDVKAVEYLLKEKVADNAELHAINEFIHFACTSEDINNLSHGLMLTEARDSVLLPYCDQLLNAIKEKAIEYKAVPMMTRTHGQPATPSTMGKEFANVYMRLKRQRDQIAQVEMLGKVNGAVGNYNAHLSAYPDYDWHTHADKFVSSLGLTLNPFTTQIEPHDYIAELFDAIARFNTILLDFDRDVWGYIALNHFKQKTIAGEIGSSTMPHKVNPIDFENSEGNLGLANAIFAHLAQKLPVSRWQRDLTDSTVLRNLGVGMGYALIAYQSTLKGVSKLEVNEPRLLEELDQNWELLAEPIQTVMRKYGIEKPYEKLKDLTRGKRVNQEIMADFIDGLDLPEVAKVEMKKLTPANYIGRAVEFIDDLV

SEQ ID NO: 144807 - DNA, 1365 bp, marine gamma proteobacterium HTCC2143
  CDS (1)..(1365): transl_table=11
atgaatttatcagcattaacggccatttcacccattgatggccgttatggcagcaaaacagaatccctacgcggtgtgttcagtgagtttggcctcatcaaaaatcgagtagtggtcgaggttcgttggttgcagtgtttgtctgcaaacccagccataatcgaagtccctgcttttaccgacagcgccaatagctttctggatcgtcttgtaacggagttttctgaagaggacgccttatcgataaaaacgattgaaagtaccaccaatcatgatgtcaaagccgtagagtattttcttaaacaagccgtttcaaagaatgcagaaataaatgccgttagcgaattcattcactttgcctgtacgtcagaagacattaataacctttcacacgcgctgatgctcaaagagggacgcgtaatcattcggcagcagatgactgctatcgtcgacaaattggttgagctcagtcacgctcacgcaagcacagcaatgctatcgaggacacatggccagacagcaagcccttctacgatcggtaaagagtttgccaacgtggttgcgcgtttacggcggcaaatcagtcagctggatagtattgagcttctaggaaagctcaacggcgccgtcggcaattacaacgcccatttctccgcgtactctgaagtcgactggcagcaaactgccaagcaatttgttgaaggtcttggtatcgactggaacccgtatacaactcaaatagagccccatgattacatcgcagagctatttgatgctctggctcggtttaacacaataattatcgatctggaccgtgatatttggggatatatttccatgggttttttcaagcagcgggttattgaaggtgaggtagggtcttcaaccatgccacacaaagttaaccccattgacttcgaaaactcagagggcaacctcggcttagcgaatgcaattttttcacatatgtcggcaaaattaccgatttcacgttggcagagagacctaaccgactcgacagtattacggaatatgggcgttggtataggctatagtttgatcgcctatgcttcgactctgaaaggcttagggaaactggagattaatctgcaacggctgtctgacgacctcgataatagctgggaagttctcgccgaacccattcaaaccgtcatgcgtcgatataacatcgaagaaccttatgaaaaattaaaggctctgacccgggggcaaactatcaacagagaaacgcttgatcgttttattgataccctggatattcctgcgaaagcaaaggatgaattacggctgctgtcaccttctacttacattggcaatgctatcgatcaagccaatgctatttaa

SEQ ID NO: 144808 - protein, 454 aa, marine gamma proteobacterium HTCC2143
MNLSALTAISPIDGRYGSKTESLRGVFSEFGLIKNRVVVEVRWLQCLSANPAIIEVPAFTDSANSFLDRLVTEFSEEDALSIKTIESTTNHDVKAVEYFLKQAVSKNAEINAVSEFIHFACTSEDINNLSHALMLKEGRVIIRQQMTAIVDKLVELSHAHASTAMLSRTHGQTASPSTIGKEFANVVARLRRQISQLDSIELLGKLNGAVGNYNAHFSAYSEVDWQQTAKQFVEGLGIDWNPYTTQIEPHDYIAELFDALARFNTIIIDLDRDIWGYISMGFFKQRVIEGEVGSSTMPHKVNPIDFENSEGNLGLANAIFSHMSAKLPISRWQRDLTDSTVLRNMGVGIGYSLIAYASTLKGLGKLEINLQRLSDDLDNSWEVLAEPIQTVMRRYNIEEPYEKLKALTRGQTINRETLDRFIDTLDIPAKAKDELRLLSPSTYIGNAIDQANAI

SEQ ID NO: 144809 - DNA, 1371 bp, marine gamma proteobacterium HTCC2080
  CDS (1)..(1371): transl_table=11
atggaactgaatgcactcacagcaatttcccccctcgatgggcgatacggaagcaagctgttaccgcttcgcgatgtctttagtgaatacggtttaattgctaggcgggtgcaggttgaggttcgctggttacagtgtctcgcagcccatgaaagtattgtcgaggtaccaccattcagttcagccgcaacgcaatttctaaacgacctcttacacaactttggtcccgaagaggctgcaaagatcaagcaaatagaggcaacgacaaatcatgatgttaaagctgttgaatattttttaaaggaggctgtcgccagcgaaccggagctcgcggctgtcagcgaattcattcattttgcctgcacctccgaggatattaacaacctcgcgcacgggttaatgttaagagatggtctgaccatcctcctaccaccaatgcggaaaataatagacgcactggccgaccttgctcagcagcaggccgagcaacccatgctgtcgagaacccacggacaaacggctagcccaacaacgctggggaaagaactagcaaatgtcgttgcgaggcttcagcggcaattacaacaattagaagccgtgacgcccttgggtaaaattaatggtgcagtcggcaactacaatgcacatcttgcgacttatcctgacgttgattggcccaataccgctcaacattttgttgaaaccctgggactaggctggaatccttacacgacgcagatcgaaccccacgattatatggccgaaattttcgatgtcatgatgcgctttaacaccattttgatcgatttcaaccgagacatttggagctacatttccttggggtatttcaagcagcgaacgattgctggcgaagtgggttcatcgaccatgccccacaaagtgaatccgatcgattttgaaaactctgaaggcaacctaggtctggcaaacgcacttctctcacatctgtctcaaaagttgcccattagccgctggcaacgtgatctgacagacagtaccgtgctgcgcaatatgggcgtcggatgcgcctacgaactgttggcttatcagagctgcctcaagggcattggcaagctgcaagttaatgcgacgcgcattgacgaggacttaaacgatagctgggaggtgcttgcggaaccgattcagacaattatgcgccggtacggtatacctgagccgtatgaaaaacttaaagcacttactcgaggacaagctataacgccaacagtactggcgaaatttatcgactccctagacttgccccctgaggtaaaaacatctctacgggctatgacaccggccagctatacaggcaacgccgcgtatcaagctcaaaatattcgagactga

SEQ ID NO: 144810 - protein, 456 aa, marine gamma proteobacterium HTCC2080
MELNALTAISPLDGRYGSKLLPLRDVFSEYGLIARRVQVEVRWLQCLAAHESIVEVPPFSSAATQFLNDLLHNFGPEEAAKIKQIEATTNHDVKAVEYFLKEAVASEPELAAVSEFIHFACTSEDINNLAHGLMLRDGLTILLPPMRKIIDALADLAQQQAEQPMLSRTHGQTASPTTLGKELANVVARLQRQLQQLEAVTPLGKINGAVGNYNAHLATYPDVDWPNTAQHFVETLGLGWNPYTTQIEPHDYMAEIFDVMMRFNTILIDFNRDIWSYISLGYFKQRTIAGEVGSSTMPHKVNPIDFENSEGNLGLANALLSHLSQKLPISRWQRDLTDSTVLRNMGVGCAYELLAYQSCLKGIGKLQVNATRIDEDLNDSWEVLAEPIQTIMRRYGIPEPYEKLKALTRGQAITPTVLAKFIDSLDLPPEVKTSLRAMTPASYTGNAAYQAQNIRD

SEQ ID NO: 144811 - DNA, 1365 bp, Candidatus Desulfococcus oleovorans Hxd3
  CDS (1)..(1365): transl_table=11
atggagcaactgacggccctgtcggtgttggacgggcgatacgcgaaactggtgggcgagctgggcgatatcttttccgaatacggcctgattcgtcaccgggtgcatgtggaaacctgctggcttgtttttctgggccgggacctgggcctgttcgacctgaacggccagcaggccgaggctgttgccggtatctcctcaggctttgacgtacagggcgcccgccggatcaaggagatagaaaagaccaccaaccacgatgtcaaggccgtggagtattacatcaaggagcagctggaccgggccgggctttccgccattcgggagtggacccattttgcctgcacctccgaggacatcaacaacaccgcctatgccctgatgcttcgggcgggccggcagcaggcggccgaaacgtttggcctggtcctggaaaccatcgagtccatggcccggcaataccggtccgtgcccatgatgtcccgtacccatggacagcccgccacccccaccaccgtgggcaaggagatggtcaatttcgcctggcgcctgcggcgggagcaggaccggttccttcatgcccctgttgaggccaagttcaacggcgcttccggcaatttcaacgcccacgccttcgtgtttccggaaatcgactggatcgacgcctcccggcggtttctttcccagtcgctcaaggtggagccgcttctctttaccacccagatcaacccctacaactacattgccgagatccttcacgccatgatccggatcgccgccgttttgatcgacctggacagggacatgtggggatacatctccctgggctattttcgccagaaggtaaaagaaggggaggtggggtcttccaccatgccgcacaaggtcaatcccattgactttgaaaacagcgagggcaacatgggcgtggccatcggcatgatggaacacctgtccgtcaaactgcttcagtcccgttttcagcgggacctgtcggacagcaccgtgctgcgcaacctcggggccgtgttcggctactttgtcatcggcatgaaaaactgtttgaagggactgcataaaattgatataaacgaagaacagatttcaggggaccttgccgccacgccggagctgttggcagaacccctgcagaccgttatgcgggttttcggggaggacaatccctatgaaaggctcaaatctctcacacgggggaaaaaggttacatccggggactttgccggcatgatcagcgacctgtctaaagtaccggaggcccacaaacagagaatgaaacggctttcctgtgatgcctatacgggaatggccgaacggctggtggatgcttatttcaaaacaacctaa

SEQ ID NO: 144812 - protein, 454 aa, Candidatus Desulfococcus oleovorans Hxd3
MEQLTALSVLDGRYAKLVGELGDIFSEYGLIRHRVHVETCWLVFLGRDLGLFDLNGQQAEAVAGISSGFDVQGARRIKEIEKTTNHDVKAVEYYIKEQLDRAGLSAIREWTHFACTSEDINNTAYALMLRAGRQQAAETFGLVLETIESMARQYRSVPMMSRTHGQPATPTTVGKEMVNFAWRLRREQDRFLHAPVEAKFNGASGNFNAHAFVFPEIDWIDASRRFLSQSLKVEPLLFTTQINPYNYIAEILHAMIRIAAVLIDLDRDMWGYISLGYFRQKVKEGEVGSSTMPHKVNPIDFENSEGNMGVAIGMMEHLSVKLLQSRFQRDLSDSTVLRNLGAVFGYFVIGMKNCLKGLHKIDINEEQISGDLAATPELLAEPLQTVMRVFGEDNPYERLKSLTRGKKVTSGDFAGMISDLSKVPEAHKQRMKRLSCDAYTGMAERLVDAYFKTT

SEQ ID NO: 144813 - DNA, 1455 bp, Oryza sativa subsp
  CDS (1)..(1455)
atggattgggcgacgaggtcgctggaggagatgcagcgggcagaggacttcgactctttctgcctgatggggctttcgccgctggatgggcggtacgagcgctttaccagggacctgaaacccttcttcagtgagttcggcctcatcagataccgggtcatcgttgaggtaaagtggctactgaaactctcccaaatccctgagatcaatgaggtgcctccattcagcaaggaggcccagttattcctggatgcgattatccaggatttcagtgttgctgatgcaaaagaagtgaaaaagattgagaaaacaaccaaccatgatgtgaaggctgttgagtactttctcaagcaaaaatgcagctcaaatccagagattgcaaaggtgttggagttcttccattttggatgtacttctgaagatatcaacaacttgtcacatgcattagctctaaaagagggggtaaatacagttatgttccctgttatgatggacatatgcaaagcaatgtgctccttggcaacacaaaattcaaccatccctatgctgtcgcgaactcatggacagccagcatcgccaacaactctgggaaaagagatggcgaattttgcggccagattgtcaagcataggaaatagtttttctgaggtcaagatactagggaaattcgctggagctgtcggaaattacaacgctgatgttgttgcatatccagaagttgactggcctaaggttgcagaagattttgtcaaatcgttgggcttggagttcaatccttatgttacccagattgagccacatgactatatctcgaagctcttcaatctatttgttcagtttaacaatgtcttgactgatttcgatagagacatgtggacctatatatcactaggctacttcaagcagatagtaaaggctggtgaagttggatcttccacaatgcctcacaaagtcaatcccattgatttcgaaaatagtgacggcaatttgactatagccaatggtacattgtcttctttaagcatgaagctaccaatttctcggatgcagcgtgatctcacagactcgactgttttgagaaatttgggtgttggattagggcattcactcttggcttacaaagctacattgcgaggaatcaataaggttcaggtgaatgaatcccggttatctgaagacttggatcaaacatgggaggtccttgcagagccaatacagacagtgatgcgaaggtatggaatccctgaaccttatgagaagctgaaggaaatgaccagagggcaggctgtcaccaaggacagcatacggcaattcattgaagatctagacttgccagaggcggcacgatcgtcgcttctgaagctaacaccacattcttatatcggagaggcagaatttttggctagaaatatcgaagaggtggttgatctaaaatctggatttaagatcgagtga

SEQ ID NO: 144814 - protein, 484 aa, Oryza sativa subsp
MDWATRSLEEMQRAEDFDSFCLMGLSPLDGRYERFTRDLKPFFSEFGLIRYRVIVEVKWLLKLSQIPEINEVPPFSKEAQLFLDAIIQDFSVADAKEVKKIEKTTNHDVKAVEYFLKQKCSSNPEIAKVLEFFHFGCTSEDINNLSHALALKEGVNTVMFPVMMDICKAMCSLATQNSTIPMLSRTHGQPASPTTLGKEMANFAARLSSIGNSFSEVKILGKFAGAVGNYNADVVAYPEVDWPKVAEDFVKSLGLEFNPYVTQIEPHDYISKLFNLFVQFNNVLTDFDRDMWTYISLGYFKQIVKAGEVGSSTMPHKVNPIDFENSDGNLTIANGTLSSLSMKLPISRMQRDLTDSTVLRNLGVGLGHSLLAYKATLRGINKVQVNESRLSEDLDQTWEVLAEPIQTVMRRYGIPEPYEKLKEMTRGQAVTKDSIRQFIEDLDLPEAARSSLLKLTPHSYIGEAEFLARNIEEVVDLKSGFKIE

SEQ ID NO: 144815 - DNA, 1287 bp, Streptomyces ambofaciens
  CDS (1)..(1287): transl_table=11
atgattcctcgctacacgctgcccgagatggcggacctgttcgcggaccagtcccgctacgcgacctgggtcaaggtcgagatcctcgcctccgaggcacaggcccgcctgggcctggtccccgagcgggccgtgcaggacatgcgccgcgcccgggtgccgctggccgcacgcgtcgccgagatcgagaaggaacgcgaccacgaggtcctgtccttcctcgccgcctactgcgaggacatccccgaggactccgcccgctgggtccaccacggcatgaccagctacgacctcgtcgacaccgccctgggccacaccctggcccgcgccaccgacctgctcctggccgccgcccgccgcctgcgcaccaccctggtcacccgcgccctggaacactgggacaccgccatggtgggccgcacccacggcgtgcacgccgaacccaccaccttcggccacaaactcggcgtccacgccttcgccgtccaccgctccctggcccggctcaccgccgcccgcgaagccgtcgccgtgggcaccgtctccggctccgtgggcacctacgccctcatcgaccccgccgtcgaacgccacgtctgcgacgccctgggcctgggcatcgaaccggtgcccagccaggtcgtcgcccgcgaccggcacgcccagctgatgcaggccgtcgccgcgctgggcgcctgcatcgaacagatcgccctcgaactgcggctgctgcagcgcaccgaggtccgcgaggtcgaagaacaccgcaccggcgcctaccagggctccagcgccatgccccacaaacgcaaccccaccaccagcgagcggctgtgcggactggcccggctgctgcgcggctacgccgacaccgccctggagaacgtcgccctgtggcacgaacgcgacctcgcccaccagtccgtggaacgcgtcatcctgcccgacagcctgtccgtgggacacttccagacggtcgcggccaccgacctgatcgacaccctcaccgtgcaccccgaccggatgcgcgcccacatcgacaccaccgacggcctcgtccacagctcccgggtcctggccgacctcctcacccgcggggtggaacgcgagcacgcctaccgttcggtgcaggccgccgccacccacaccctcaccaccggcgagcacttcgccaccggcctggcccgccagggcatcgaccccggaagcctcgaggccgaacgcttcctcacccgacacgacgtgatccgcacccgattggagaccctccgtgaactggacgactga

SEQ ID NO: 144816 - protein, 428 aa, Streptomyces ambofaciens
MIPRYTLPEMADLFADQSRYATWVKVEILASEAQARLGLVPERAVQDMRRARVPLAARVAEIEKERDHEVLSFLAAYCEDIPEDSARWVHHGMTSYDLVDTALGHTLARATDLLLAAARRLRTTLVTRALEHWDTAMVGRTHGVHAEPTTFGHKLGVHAFAVHRSLARLTAAREAVAVGTVSGSVGTYALIDPAVERHVCDALGLGIEPVPSQVVARDRHAQLMQAVAALGACIEQIALELRLLQRTEVREVEEHRTGAYQGSSAMPHKRNPTTSERLCGLARLLRGYADTALENVALWHERDLAHQSVERVILPDSLSVGHFQTVAATDLIDTLTVHPDRMRAHIDTTDGLVHSSRVLADLLTRGVEREHAYRSVQAAATHTLTTGEHFATGLARQGIDPGSLEAERFLTRHDVIRTRLETLRELDD

SEQ ID NO: 144817 - DNA, 1464 bp, Xanthomonas oryzae pv
  CDS (1)..(1464): transl_table=11
gtgggcttggcgacccacttcgccgcccaccgggcctgcccgcagcgctggcggcgtagaatgctgaccccaccgtcaccgctgcctctcttgcccatgtcggattccgccctgctcgccctgtccccgctcgacggccgctacgcctccaaagtggatgcgctgcgcccgatcttctccgaatacggcctgatcaaggcgcgggtcaaggtcgaaatcgaatggctgctggcactggccgccgagccgggcatcgccgagctggcgccgttctcggccgctgccacgcagcgcctgcgcgccctggccgacggcttcaacgttgcccatgcagcgcgggtcaaggagatcgagcgcaccaccaaccatgacgtcaaggcggtggaatacttcatcaaggagcagctcaaggacgacgccgagctgggtccggcgctggaattcgtgcactttgcctgcaccagcgaagacatcaataacctcagctacggcctgatgctggagcaggcgcgccgcgaggtgttgttgcccagcctggacggcattaccgccgcgttgcgcacccttgcccacgcccaggccgcccagccgatgctttcgcgtacccacggccagagcgcctcgcccaccacgctgggcaaggagatcgccaatgtggtagcgcgccttgaacgtcagcgcaagcagatcgcggcggtggagctgaccggcaagatcaatggcgcggtgggtaattacaacgcgcatctggtcgcctacccggacctggactgggctgcattcgcgcagcgtttcgtggaaagcctgggcctggtgttcaacccctacaccacacagatcgagccgcacgacaatgtggccgaaatcggcgatgccagccgtcgcgtcaataccatcctgatcgacctggcacgcgacatctggggctatatctcgctgggctatttcaagcagaagctgaaggaaggcgaagtcggttcctcgaccatgccgcacaaggtcaaccccatcgacttcgaaaatgccgaaggcaatttcggcatcgccaacgcgctgttcgaacacttttccgccaagttgccgatcagccgctggcagcgcgacctcaccgattccaccgtgctgcgcgcgctcggcaccgccttcggccacacccaggtcgcgctggattcgctggccaagggcctgggcaaactgaccgtcaaccccgagcgtctggatgccgatctggatgcggcctgggaagtgctggccgaagccgtgcagacggtgatgcgtcgccatggtctgcccaatccgtacgaacaactcaaggcgctgacccgcggccagggcatcaccgccgtctcgatgcaggccttcgtggaaagcctgccattgccggaagacgacaagcagcgcctgcgcgcgctcactccgggtgcctacaccggcctggccgagcagctggcgcgcgcgatctga

SEQ ID NO: 144818 - protein, 487 aa, Xanthomonas oryzae pv
MGLATHFAAHRACPQRWRRRMLTPPSPLPLLPMSDSALLALSPLDGRYASKVDALRPIFSEYGLIKARVKVEIEWLLALAAEPGIAELAPFSAAATQRLRALADGFNVAHAARVKEIERTTNHDVKAVEYFIKEQLKDDAELGPALEFVHFACTSEDINNLSYGLMLEQARREVLLPSLDGITAALRTLAHAQAAQPMLSRTHGQSASPTTLGKEIANVVARLERQRKQIAAVELTGKINGAVGNYNAHLVAYPDLDWAAFAQRFVESLGLVFNPYTTQIEPHDNVAEIGDASRRVNTILIDLARDIWGYISLGYFKQKLKEGEVGSSTMPHKVNPIDFENAEGNFGIANALFEHFSAKLPISRWQRDLTDSTVLRALGTAFGHTQVALDSLAKGLGKLTVNPERLDADLDAAWEVLAEAVQTVMRRHGLPNPYEQLKALTRGQGITAVSMQAFVESLPLPEDDKQRLRALTPGAYTGLAEQLARAI

SEQ ID NO: 144819 - DNA, 1778 bp, Vigna unguiculata
  CDS (6)..(1619)
ctttcatggagttcgcggcactctctagcgctgcccaacttgggagcttcaaccctcttagaaccaaacttcaaagttcagcacaacacaaccctcttcaattttcctatgcttctttcccttcttcctttcccagagtttgctcctgcaaagccatcctcagcacccacacacccacctccacccacaaaatgtttggactccaatcagatgattttgaactctctgctttgacggcgttgtccccattggatggtcgttattggggcaaagtcaaggaactgtctccttatttgagtgaatctgccttaatctactttcgggttcttgttgagataaaatggttgctgcagctgtctgtgattcctgaaattgttgaggttcccagtttcagtgagagtgccaagactttcctacaaagcctgattgatgactttagtattgatgatgccttggaggttaaaaacattgagagggtcacaaatcatgatgtcaaagcggtggagtacttcttgaaacagaaatgtcaatccaatgctgaagtggctaaggtgcttgagtttttccactttgcttgcacatctgaggatataaataatcttgcccatgccttgatgctgaaggaatcaatcaattctgtaatgtttcctgtcatggataaaataatcaaagctttgtgtgacatggctaaagataatgcacatgttccaatgctttctaggactcatgggcagccagcttcaccaactactttgggcaaggaactggctatctttgctgtaagattaagcagagaaaggaaggatctatctcagattgagatattggggaaatttgctggtgcagttggaaattacaacgcacatgttgttgcatatcccaatgttaactggcctcaggttgccgaacagtttgtacattctcttggattaagttttaatccttacgttgctcagattgaaacccatgactacatggcaaagctttttcagtcgctcattcggttcaataatatattaattgactttgatagagatgtatggggctatatatctttgagctactttaagcagattactaaggctggggaaattgggtcatcaactatgcctcacaaagttaatcctattgattttgagaacagtgaaggtaatctaggtgtagctaatggagttctgtctcatctgagcatgaagttgccgatttcacgttggcagagggacttgactgattcaactgtcataaggaacatccctataggtatcggtcattctcttcttgcctacaaaagcacacttcaaggaatggggaagcttcaggttaatgaagctcgcttgagggaagacttgaaccagtgctgggaggtgcttgctgaaccaatacagactgttatgcgaagatatggtgttcccgagccttatgagaagctaaaagaactaaccagagggagagccgttaacaaagagagcataagagacttcattgaaggcttagatattccagaagaagcaaagacgaatctgttgaagttaacacctgacacttatgttggagcagctgttgaattggccagaacagtagaaaatgtggtgaacattgtgaatggatcgaatatttagtaaacaagtgatcgaagcagttttctgatttgtcaattagtttatgagactcttgggaagacaattttgcatcctcgccgtccattcacaccatgtggttattattagttgatatatgaagtctaaaataagatgttccatttgaaaaaaaaaaaaaaa

SEQ ID NO: 144820 - protein, 537 aa, Vigna unguiculata
MEFAALSSAAQLGSFNPLRTKLQSSAQHNPLQFSYASFPSSFPRVCSCKAILSTHTPTSTHKMFGLQSDDFELSALTALSPLDGRYWGKVKELSPYLSESALIYFRVLVEIKWLLQLSVIPEIVEVPSFSESAKTFLQSLIDDFSIDDALEVKNIERVTNHDVKAVEYFLKQKCQSNAEVAKVLEFFHFACTSEDINNLAHALMLKESINSVMFPVMDKIIKALCDMAKDNAHVPMLSRTHGQPASPTTLGKELAIFAVRLSRERKDLSQIEILGKFAGAVGNYNAHVVAYPNVNWPQVAEQFVHSLGLSFNPYVAQIETHDYMAKLFQSLIRFNNILIDFDRDVWGYISLSYFKQITKAGEIGSSTMPHKVNPIDFENSEGNLGVANGVLSHLSMKLPISRWQRDLTDSTVIRNIPIGIGHSLLAYKSTLQGMGKLQVNEARLREDLNQCWEVLAEPIQTVMRRYGVPEPYEKLKELTRGRAVNKESIRDFIEGLDIPEEAKTNLLKLTPDTYVGAAVELARTVENVVNIVNGSNI

SEQ ID NO: 144821 - DNA, 1488 bp, Pichia angusta
  CDS (1)..(1488)
atgcagagtcaaattaatttaattaatttttatttttctaccatgtccaacgacacctatgccaccccgctgtcgtcgcggtacgcgtccaaggagatgtcgcagatcttctctctgcggaacaggttctccacgtggagaaagctgtggtacaacttggcaattgccgagaaatcgctggggctttctgtcgtcaccgatgaagctatcgagcagatgtccaagcacctcgaaatcacggacgaggaaatcgaggccgccaaaaaggaggaggccattgtcagacacgacgtgatggcccacgtccacgttttcggcgaaacctgtcctgctgctgccggaatcatccatttgggagccacctcgtgctacgttacagataacgcggatctgatttttctcagggacgcgtacgacgttttgatccccaaacttgtgaatgttatcaacagactggccaaatttgctctggaccacaaagacctgccagtgcttggctggactcatttccagcccgcccagctgacgactgtcgggaaaagagcaactctgtggctccaagagctgctctgggacctcagaaacatgcagcgtgccagaaatgacatcggactgcgcggagtcaagggaactaccggtacccaggcctctttcctgtctcttttccacggagaccatgacaaggtcgaggccttggacgaaaaggtggtggagctactaggattcgagtacgcgtacccttgcacggggcagacctactcacgtaaaatcgacatcgacgccctgcacccactatcgtctttgggcgcctcgtgtcacaagatggccaccgatataagattgctggccaacctaaaagaaatggaagagccgtttgaaaaaagccagatcgggtcgtctgccatggcctacaaaaggaacccgatgaggtgcgagcgtgtgtgttcgctgtcgcgtcacttgggttcgttgtaccaggacgcattccagacggcgtccgtgcagtggtttgagagaacgctggacgactctgccatcagaagaatctcaattccagaggcttttctgacggcagacattttgctttcgacgctgctgaatattacttccggcctcgtggtgtacccgaaagtgattgagcgccgtattaaggcagaactgcccttcatggcgaccgagaacatcatcatggcgatggtggagcagggtgcttcgcggcaggagtgccacgaggagatccgcgtgctctcgcaccaggcatcggcagtggtcaagcaggaaggcggcgacaacgacttgattgagagaattaagagcacagactacttcaagcctatttggtcgcaattggacaaattactcgacccgtccacttttgttggtcgtgccccacaacaaactgaaaaattcgtaaacgtcactgttgcaaacgcactggaaccataccggtcgcttatcaacgaggagcacgttcaattggccgtctag

SEQ ID NO: 144822 - protein, 495 aa, Pichia angusta; identical to SEQ ID NO: 67281

SEQ ID NO: 144823 - DNA, 1557 bp, Arabidopsis thaliana
  CDS (1)..(1557)
atggccaccaaaatcccttgttccggccttatacccataagaagtcttttaaacccatcaaaatctctgtctcatcttccaagagtttcattctctgtttcttctcctcattctctcaagctaatgacttcaacaaagttgatagcaatggctagtgcaagttccagagactttgagatgtcgaatttaacagcattatcgcctttggatggacgttattggggaaaagttaaggacttggcttcttctatgagcgagtttggattgatctatttccgagtacttgtcgagatcaaatggcttattaagctttcaaatatacctcaagtcactgaagttccaagctttagcaaagaagctcataagtacttgcaaggtataatcgatggatttagtatggatgatgcattgcaagttaagaagattgagagagtgacaaatcacgatgtgaaagcagtggagtattttttgaaacaaaagtgtgaatcacatccagagattgctaaggttctagagtttttccatttcgcttgtacgtctgaggacatcaacaatctttcccatgctttgatgcttcaagaagcacttagttcggttatacttcctaccatggatgagttgatcaagtctatctctctgatggctaagagctttgcatatgtacctatgctttcacgaactcatgggcagccagcttcacctacaacattggggaaggaaatggcgatttttgctgtgaggttaagtgtagaaaggagatatctttcagaaactaagattaaggggaaatttgcgggtgctgttggaaactacaacgcgcatatttccgcgtattctaatattgactggcctcatgttgcagaggagtttgttacttctcttggattaacatttaacccatacgtgactcagattgaaccacatgactatatggctagactttttaatacaattagccaattcaacaatgtcttgattgattttgacagagatatatggagctacatatctctaggttactttaagcaggcaacgggtgaaatcggatcatcgacaatgcctcacaaagtgaatcctattgactttgagaacagcgaagggaatctaggtaaagcaaatgcagagcttgcttttctcagcatgaagcttcccatttcacgaatgcagcgtgatttaacagattcaactgtcttgagaaacatgggtggagctttaggacactctcttctggcttacaagagcgcgatacagggaattgggaagcttcaggttaatgaagctcggttaaaagacgatttggatcatacttgggaagtcctcgctgaaccgatacaaactgtgatgaggagatatggtgttccagagccgtatgagaagctgaaggagctaacaagaggaagagctgtgaatgaagaaagcattagaaagtttattaaaagtttggaattgcctgaagaagcaaaagaccaacttttgaagctaactccacacacatatgttggcgctgctgctgcattggcactagccgtggatgatgctgtgcacttgggacattaa

SEQ ID NO: 144824 - protein, 518 aa, Arabidopsis thaliana
MATKIPCSGLIPIRSLLNPSKSLSHLPRVSFSVSSPHSLKLMTSTKLIAMASASSRDFEMSNLTALSPLDGRYWGKVKDLASSMSEFGLIYFRVLVEIKWLIKLSNIPQVTEVPSFSKEAHKYLQGIIDGFSMDDALQVKKIERVTNHDVKAVEYFLKQKCESHPEIAKVLEFFHFACTSEDINNLSHALMLQEALSSVILPTMDELIKSISLMAKSFAYVPMLSRTHGQPASPTTLGKEMAIFAVRLSVERRYLSETKIKGKFAGAVGNYNAHISAYSNIDWPHVAEEFVTSLGLTFNPYVTQIEPHDYMARLFNTISQFNNVLIDFDRDIWSYISLGYFKQATGEIGSSTMPHKVNPIDFENSEGNLGKANAELAFLSMKLPISRMQRDLTDSTVLRNMGGALGHSLLAYKSAIQGIGKLQVNEARLKDDLDHTWEVLAEPIQTVMRRYGVPEPYEKLKELTRGRAVNEESIRKFIKSLELPEEAKDQLLKLTPHTYVGAAAALALAVDDAVHLGH

SEQ ID NO: 144825 - DNA, 1440 bp, Corynebacterium ammoniagenes; identical to SEQ ID NO: 67282
  CDS (1)..(1440): transl_table=11

SEQ ID NO: 144826 - protein, 479 aa, Corynebacterium ammoniagenes; identical to SEQ ID NO: 67283

SEQ ID NO: 144827 - DNA, 1335 bp, Archaeoglobus fulgidus; identical to SEQ ID NO: 67284
  CDS (1)..(1335): transl_table=11

SEQ ID NO: 144828 - protein, 444 aa, Archaeoglobus fulgidus; identical to SEQ ID NO: 67285

SEQ ID NO: 144829 - DNA, 1296 bp, Bacillus subtilis
  CDS (1)..(1296): transl_table=11
atgatcgaacgttattcaagacctgaaatgtccgcgatttggacggatgaaaacagatttcaagcatggttagaggttgaaattcttgcctgtgaagcgtgggcggagcttggcgtcattccgaaagaagatgtaaaggttatgcgcgaaaacgcgtcatttgacatcaaccgcattttagaaatcgaaaaggacacgcgccatgacgttgtcgcttttacgcgcgctgtatccgaatcactgggcgaagaaagaaaatgggtgcattacggcttaacgtcaactgacgttgttgatacggctctttcctacttattaaaacaggcaaacgatattttgctcaaggatcttgagagatttgttgacattataaaagaaaaagcgaaagaacataaatacacagtcatgatggggcgcacacacggcgtacacgctgagcctacaacattcggcttaaaacttgcgctttggcatgaagaaatgaaacgtaatcttgagcgcttcaaacaagcgaaagcaggcatcgaggttggaaagatttccggtgctgtcggcacatatgcgaacattgatccatttgttgaacaatatgtctgtgagaagctcggattgaaagcagcaccgatttccactcaaacccttcagcgtgaccgccatgctgactatatggcaacacttgctttgatcgcgacaagcatcgagaaattcgctgtggaaatccgcggactgcaaaagagtgaaacacgtgaagtagaggaatttttcgcgaaagggcaaaagggttcatctgcaatgccgcataaacgaaatccgattggctctgaaaacatgacaggcatggcgcgcgtgatccgcggctacatgatgacagcttacgaaaatgttccattatggcatgagcgcgatatttctcattcttcagcagaacgaattattcttccggatgcgacaattgcgctgaactacatgctgaaccgcttctccaacatcgtgaagaacttaacggtcttcccggaaaacatgaagcgcaacatggaccgcactctcggccttatctattctcagcgtgtgctccttgctttgattgacacaggcctgactcgtgaagaagcctatgatacagttcagccgaaagcaatggaagcgtgggaaaaacaagtgccgttccgcgagcttgtggaagcggaagagaaaatcacgtcacgtctttctccagaaaaaattgctgactgctttgattacaattaccatctgaaaaatgttgatctgatctttgaacgtttaggtttagcatag

SEQ ID NO: 144830 - protein, 431 aa, Bacillus subtilis
MIERYSRPEMSAIWTDENRFQAWLEVEILACEAWAELGVIPKEDVKVMRENASFDINRILEIEKDTRHDVVAFTRAVSESLGEERKWVHYGLTSTDVVDTALSYLLKQANDILLKDLERFVDIIKEKAKEHKYTVMMGRTHGVHAEPTTFGLKLALWHEEMKRNLERFKQAKAGIEVGKISGAVGTYANIDPFVEQYVCEKLGLKAAPISTQTLQRDRHADYMATLALIATSIEKFAVEIRGLQKSETREVEEFFAKGQKGSSAMPHKRNPIGSENMTGMARVIRGYMMTAYENVPLWHERDISHSSAERIILPDATIALNYMLNRFSNIVKNLTVFPENMKRNMDRTLGLIYSQRVLLALIDTGLTREEAYDTVQPKAMEAWEKQVPFRELVEAEEKITSRLSPEKIADCFDYNYHLKNVDLIFERLGLA

SEQ ID NO: 144831 - DNA, 1371 bp, Buchnera aphidicola subsp
  CDS (1)..(1371): transl_table=11
atggaattaacctctttaacagccatctctcctgttgatggtcgatacagcaatttaacaatattattaagaaatatttttagtgaatttggttttttaaaatatcgtttgaacattgaagttcagtggctaaaaaaaatcattagtatgtctcaaatattagatattaataatattgaatataaagaaatattatttcttgatagtattgttgaagaatttaatgaaaaagatgcaattcttattaagaatatagaaaaagaaaccaatcatgacattaaggctttagagtattttttaaaaaacaagatcgctcaatctaaaaatcttttaactatttcagagttcgtacattttggatgtacttcggaagacattaacaatatagcatactcattaatgattaaagatgctcgtgataaaataattttaccattatggtataaaattataagtactttaaaaaaaatggtttttaaatatcaacactatcctttattatctttaactcatggacaacccgctactccatcaactatgggaaaagagattgctaatttttattaccgaatgaaacggcagtatatcatactcaaaaaaatagaaatattaggaaaaattaatggaagtactggtaattataatgcacatttagcagcatatcctgatattaactggcataagataagtaaagatttcatcacgtcatttggtattaattggaacccatatactactcagatcgaacctcatgattatattgcagaattttttagttgcatgtctctatttaatacaatattaattaattttaatcgcgacatgtggggttatatttcacttaattattttaaacaaagaacaatagattatgaaataggttcttcaataatgccccacaaagtcaatcctattgattttgaaaattctgaaggtaatttaggactttctaatgctcttatgaatcatatgattacaaaattacctatttctagatggcagcgtgatttaagtgattctacggtattaagaaatataggtgtggctatttcttatgcaataattgcatataattctgtattatcaggaattaataaattagaaattaatgaatctgaattattaaaaaatttggataaaaattggtctattttatcggaacctattcagactattatgcgtcgttatggaattaaaaacgcatatgaaaaattaaaaaaattgactcgaggaaaagaaataaatagaaatgtcatacatacatttatttctagtttaaatattcctgaagaagaaaaaaaacgtttaaaaaatatgactcctttcaactatattggagcagcgagtcaaattatcaatgaaatagaataa

SEQ ID NO: 144832 - protein, 456 aa, Buchnera aphidicola subsp
MELTSLTAISPVDGRYSNLTILLRNIFSEFGFLKYRLNIEVQWLKKIISMSQILDINNIEYKEILFLDSIVEEFNEKDAILIKNIEKETNHDIKALEYFLKNKIAQSKNLLTISEFVHFGCTSEDINNIAYSLMIKDARDKIILPLWYKIISTLKKMVFKYQHYPLLSLTHGQPATPSTMGKEIANFYYRMKRQYIILKKIEILGKINGSTGNYNAHLAAYPDINWHKISKDFITSFGINWNPYTTQIEPHDYIAEFFSCMSLFNTILINFNRDMWGYISLNYFKQRTIDYEIGSSIMPHKVNPIDFENSEGNLGLSNALMNHMITKLPISRWQRDLSDSTVLRNIGVAISYAIIAYNSVLSGINKLEINESELLKNLDKNWSILSEPIQTIMRRYGIKNAYEKLKKLTRGKEINRNVIHTFISSLNIPEEEKKRLKNMTPFNYIGAASQIINEIE

SEQ ID NO: 144833 - DNA, 1371 bp, Haemophilus influenzae
  CDS (1)..(1371): transl_table=11
atgcaactctctacactgaccgcactttcccctcttgatggtcgttatcaagataaagtaacgccattacgtgctatttttagcgaattcgggttaatgaaattccgtgtagctgtggaagttcgttggttacaaaaattagcttcaacggcagacattaccgaagtaccgccattttctacgcaagcaaatgcttttttagatggaattgtggctaattttaatgaggccgatgctgcgcgtattaaagaaattgaacgcacaactaatcacgatgtgaaagccgttgagtattttctgaaagagaaaattcaaaacgaagtggaactagtgaaggtttctgaatttattcacttcgcttgcacctcagaagatattaacaatctctctcacgcattaatgttaagcaccgctcgtgacgaagtgattttaccagaatggcaaaaactgattgatgaaattactcgtcttgcagaagaatataaaacgattccattactttctcgcacacatggccagccagcttcaccaagcaccgtgggcaaagaaatggcgaatgtcgtttaccgcctaaaacgtcaatttaaacaactccaaaatgcggaaatcttaggtaaaatcaatggtgcagtaggtaactacaatgcgcatttatcggcatatcctaatattgattggcataaattcagcgaagaatttgtcacttcattaggtattcaatggaatccttataccacacaaattgagccgcacgattacatcactgaattttttgatgctgtagttcgctttaataccattatcattgattttgatcgtgatttatggggatacattgcattaaatcactttaaacaacgaacgattgcaggcgaaattggttcttctaccatgccacacaaagtcaatccaattgattttgaaaactcagaaggcaatctaggattagccaatgcagtgatgacccatttaggtcaaaaattaccaatttctcgctggcagcgtgacttaacagattcaactgtattacgtaatttaggcgtaggattaggttattgtttgatcgcttatgcttcaacacgcaaaggcatcagtaaacttgaagtaaatcaaccgcacttattagaagaactcaatcaaaactgggaagttttggctgaaccaattcaaaccgtaatgcgccgctatggaatagaaaaaccttacgaaaaattaaaagaattaacgcgaggtaaacgagtgacagaacaggctatgcgtgaatttattgataagttggatattccacaagaagaaaaattacgtttacaaaaattaacacctgctacttatattggggctgcagtggaattagtagaaaaactatcatag

SEQ ID NO: 144834 - protein, 456 aa, Haemophilus influenzae
MQLSTLTALSPLDGRYQDKVTPLRAIFSEFGLMKFRVAVEVRWLQKLASTADITEVPPFSTQANAFLDGIVANFNEADAARIKEIERTTNHDVKAVEYFLKEKIQNEVELVKVSEFIHFACTSEDINNLSHALMLSTARDEVILPEWQKLIDEITRLAEEYKTIPLLSRTHGQPASPSTVGKEMANVVYRLKRQFKQLQNAEILGKINGAVGNYNAHLSAYPNIDWHKFSEEFVTSLGIQWNPYTTQIEPHDYITEFFDAVVRFNTIIIDFDRDLWGYIALNHFKQRTIAGEIGSSTMPHKVNPIDFENSEGNLGLANAVMTHLGQKLPISRWQRDLTDSTVLRNLGVGLGYCLIAYASTRKGISKLEVNQPHLLEELNQNWEVLAEPIQTVMRRYGIEKPYEKLKELTRGKRVTEQAMREFIDKLDIPQEEKLRLQKLTPATYIGAAVELVEKLS

SEQ ID NO: 144835 - DNA, 1389 bp, Methanococcus jannaschii
  CDS (1)..(1389): transl_table=11
ttggaacttaatcaaataataaagtcaggtgaaaaaatggctgtgcatccaattgattatagatatggaacaccagagatgagaaaagtttgggaagaagaaaataaattggaaaaaatgttaaaggtagaggctgcattagctaaagctcaggcagaactcggcttaattccaaaagaagccgctgaagagataaacaaaaaagcatcaacaaaatatgtaaaattggagagagttaaagaaattgagaaacaaacaaaacatgatgttgttgcaatgattagagctttagctgaagtatgtgaaggaaatgctggagaatacatacacttcggagctacatcaaacgatattgttgatactgccaactccctactaataaaagaatccattgaaattatagaagataagttaaagcagttaagagatatattattagacaaagcagaagagcataaatacactgtctgtgtaggaagaacacatggacagcatgcaattccaacaacctatgggatgagatttgctctatgggcggctgagattgacagacacttagagagattaaaagaagcaaaaaagagaatatgcgtctctatgattactggagctgttggaacaatggcggctatgggagagaagggtttggaagtgcataaaagagttgctgaaatcttaggcttagaaccagttttaatctcaaaccaagttattcagagagacagacatgctgaattcgtctttttattagctttaattgctcagacattaaacaagattggagttactgttagaagtatgcagagaactgaaattggagagctagaagaagagttcgaccctacaaagcaaactggttcatcaacaatgcctcacaagagaaatccaataacctttgagcaaatctgcggtttatcaagggttataaaatcactatgtatagctgaaatggacaatatcccattatgggaagagagggatttaacaaactcatcagctgagagatgtatatttgcagaggtttgcgttttaacagaccacatcttaacattagcaattaaaggagttaaaaagctaaaagtaaataaagaaaatgttgagagaaacttagaattaacaaaaggactgataatggctgagagaataatgattgaattggctaagagaggtatgggcagacaaacagctcatgaaatagtaaggcagtgtgcaatgaaagcctatgaagagaaaaggcatttaaaagatattttattagaaaatgaggaagttatgaagtatataacaaaagaagagttagaggaattgatgaatcctaaaacttacataggtttagctccacagatagttgatgaagttattaaaactctaaagaataaaaagtactaa

SEQ ID NO: 144836 - protein, 462 aa, Methanococcus jannaschii
MELNQIIKSGEKMAVHPIDYRYGTPEMRKVWEEENKLEKMLKVEAALAKAQAELGLIPKEAAEEINKKASTKYVKLERVKEIEKQTKHDVVAMIRALAEVCEGNAGEYIHFGATSNDIVDTANSLLIKESIEIIEDKLKQLRDILLDKAEEHKYTVCVGRTHGQHAIPTTYGMRFALWAAEIDRHLERLKEAKKRICVSMITGAVGTMAAMGEKGLEVHKRVAEILGLEPVLISNQVIQRDRHAEFVFLLALIAQTLNKIGVTVRSMQRTEIGELEEEFDPTKQTGSSTMPHKRNPITFEQICGLSRVIKSLCIAEMDNIPLWEERDLTNSSAERCIFAEVCVLTDHILTLAIKGVKKLKVNKENVERNLELTKGLIMAERIMIELAKRGMGRQTAHEIVRQCAMKAYEEKRHLKDILLENEEVMKYITKEELEELMNPKTYIGLAPQIVDEVIKTLKNKKY

SEQ ID NO: 144837 - DNA, 1350 bp, Methanobacterium thermoautotrophicum
  CDS (1)..(1350): transl_table=11
atggccattcatccagttgaattcaggtacgggacacctgaaatgagggttatctgggaggctgaaaataagctccagaagatgcttgacgttgaggcggcccttgcacaggcagagggcgaacttggaatcatacctgctgaagcggcctctgagatagtcaggaaggccagcacagaatttgtaacccttgaaagggttaatgagattgagagggacacaaagcatgatattgcatcccttgtaaaggcccttgcagagcagtgtgagggtgacgcaggggaatatgtgcacttcggtgcaacatccaatgacattgttgacacatccaattccctgcttctcagggactcaatctcggttctcagggataaactcaccagggtacttgaggttctccttgctctggcggatgaaaacagggacagggtctgcatcggaaggacccatggacagcacgccctcccaaccacctatggcatgaaattcgccatctgggcagatgagatccaccggcagctggagcgccttgatgcgtgcagtgaaaggctctgtgtcgggatgatgacaggagccgtcggaaccacagcggccctgggggaggagggcctggaggtccatgagagggtctcagagatactgggactcagaccggtcctgatatccaaccaggtcgtccagagggataaccatgcagagttcataatggtccttgccaacatagccacaacccttgataagatagccctcgagatcaggaaccttcagaggacagagataatggaggttggagagaaatttgaccctgagaaacaggtgggcagcagtaccatgcctcataagatgaacccaataactgcagagaggatatgtggtattgcgcgtgttataaggtcctatgttgtcgcggccctggagaacaacccattatggcatgagagggacctcacaaattcatcatccgaacgcataatccttcctgaggcatgcatcctcacggactacatacttaaactgacactggatgtcctctgcaacctcgtcttctaccctgagaatattaagaggaaccttgaattcacaggaggcctgataatggcggagaggctcatggctgagctaacaaggaggggcatgggtcggcagacagcatatgcagctgtgcgccagtgtgccattgaggccagcaggacaggaagaagcctaagggatgtggtccttgagaggtccgagatcatggattaccttacagtggaggaccttgaggagataatgaaccctgagacctacatcggatcagccaggaggatggttgagagggtccttgaggaatcacaaaaatggctctga

SEQ ID NO: 144838 - protein, 449 aa, Methanobacterium thermoautotrophicum
MAIHPVEFRYGTPEMRVIWEAENKLQKMLDVEAALAQAEGELGIIPAEAASEIVRKASTEFVTLERVNEIERDTKHDIASLVKALAEQCEGDAGEYVHFGATSNDIVDTSNSLLLRDSISVLRDKLTRVLEVLLALADENRDRVCIGRTHGQHALPTTYGMKFAIWADEIHRQLERLDACSERLCVGMMTGAVGTTAALGEEGLEVHERVSEILGLRPVLISNQVVQRDNHAEFIMVLANIATTLDKIALEIRNLQRTEIMEVGEKFDPEKQVGSSTMPHKMNPITAERICGIARVIRSYVVAALENNPLWHERDLTNSSSERIILPEACILTDYILKLTLDVLCNLVFYPENIKRNLEFTGGLIMAERLMAELTRRGMGRQTAYAAVRQCAIEASRTGRSLRDVVLERSEIMDYLTVEDLEEIMNPETYIGSARRMVERVLEESQKWL

SEQ ID NO: 144839 - DNA, 1353 bp, Pyrococcus abyssi; identical to SEQ ID NO: 67286
  CDS (1)..(1353): transl_table=11

SEQ ID NO: 144840 - protein, 450 aa, Pyrococcus abyssi; identical to SEQ ID NO: 67287

SEQ ID NO: 144841 - DNA, 1353 bp, Pyrococcus horikoshii
  CDS (1)..(1353): transl_table=11
atggcggttcacccaatagattaccgctacggtagtgaggagatgaggaagatatgggatgaaaagaacaagttgcaaaagctacttgacgttgaagctgccctagcaagggctcatgctaaggtaggaaacattccggaagagagcgctaaggttatttcggaaagggctaatacaaagtgggttaagcttgagagggttaaggagatagaggccgagatccatcatgatataatggccgtcgttaaagcgttaagcgaggtttgcggagaacatggaaagtacgttcatcttggggcaacttctaatgatataatagatacggccaatgcattgttaatcaaggaaagccttgagatagttgaaagggatcttaaagagcttagatccattttgaagcagcttgcggaaaagcatataggtacggtatgcatagggaggacccatggccaacatgcagttccgacgacttatggaatgaagttcgccctgtggcttgatgagatccagaggcatatagagaggttataccagcttaaggagagggttctcgttggtaagatgagaggggccgtgggaactgcggcctcatttggagaaaaagcctttgaaattgagagattggtgatggaagatcttggtctcaagcctgcaaggataacgaatcaaatagtgcaaagggatgtctacgctgaactacttttcttcctggctttagtggcttcaactctggataagatggggttggagataaggaacctgcagaggactgaaatacttgaggtaagcgaacccttcggggagaagcaagtaggttcatctacgatgccccacaagaggaaccccataagaactgaaaaggtctgtggacttgcgagggttttgtactccaacgttattccggcgttgctaaataacccactctggcatgagagggatttgacgaattcttccgttgagagggttatccttccagagagctttgtattgcttgatgagatgctcaagaccatgaagaaggttttaactggactggagttcttccccgagaacataaggaggaacttgtatttaacaaagaacttgatcatggccgagccccttatgttaaagcttgccgagaaaggaatgggaagacaggaagctcatgaagtagtaaggcaacttgcaatgaaagctttccgtgaaaacagagacctcctggaagttgcaaaggaaagtagagaaataactaagtatctaaccgagagagatcttgaggagctaaaaccagaaaattacattggcaaagcaagggaaatagtcaaaaaagtcattgaatatgttgaggagatggaaagaaggggattataa

SEQ ID NO: 144842 - protein, 450 aa, Pyrococcus horikoshii
MAVHPIDYRYGSEEMRKIWDEKNKLQKLLDVEAALARAHAKVGNIPEESAKVISERANTKWVKLERVKEIEAEIHHDIMAVVKALSEVCGEHGKYVHLGATSNDIIDTANALLIKESLEIVERDLKELRSILKQLAEKHIGTVCIGRTHGQHAVPTTYGMKFALWLDEIQRHIERLYQLKERVLVGKMRGAVGTAASFGEKAFEIERLVMEDLGLKPARITNQIVQRDVYAELLFFLALVASTLDKMGLEIRNLQRTEILEVSEPFGEKQVGSSTMPHKRNPIRTEKVCGLARVLYSNVIPALLNNPLWHERDLTNSSVERVILPESFVLLDEMLKTMKKVLTGLEFFPENIRRNLYLTKNLIMAEPLMLKLAEKGMGRQEAHEVVRQLAMKAFRENRDLLEVAKESREITKYLTERDLEELKPENYIGKAREIVKKVIEYVEEMERRGL

SEQ ID NO: 144843 - DNA, 1632 bp, Hordeum vulgare
  CDS (1)..(1632)
atgtcggcgccgccctttctcaagtcccctgccaccgccgccttcctcgcctccccacgcgtgactgctgctccgagagccgccgtgctcggcgccaccgcgcagccgccacggcgcctacgctgctctgcagccgttggagccggagccagggatttcggggtgatgagtgctcccctgggctgggcggcgaggtcggtggaggagctggagcaagcgacggacctggacagtttctgtatgatggcgctatcacctctggacggccggtacatcagatttatcaaggacttgatgcccttcttcagcgagttcggtctcatcagataccgcgtcttagtcgaggtcaaatggttgctgaagctttcacaaattcctgaggtcaaggaggtgccaccgtttagccaggaggctcagctctttctggatgcagttatccaagattttagcatcaatgatgctaaagaagtgaaacaaattgagaaaataactaaccatgacgtgaaggctgttgagtactatctgaagcagaaatgcagctcaaatccagaggttgcaaaggttttggaattcttccattttggatgtacttctgaagatatcaacaacctgtcacatgcattagctctaaaagagggggtaaacacaattatgttccctgtgatgatcgatgtatgcagtgcaatatgttccttggcaacagaaaatgcacacgtccctttgttgtctaaaactcacggacagccagcatcaccaacaactctggtaaaagagatggcaaattttgcagccagattatctgatatcgggaagagtttttctgaggtcaagatactagggaaatttgctggcgctgttggaaattacaatgctgatgtagttgcatatccggaaattgactggcctaagatgacagaagagtttgtcagatccttaggtttggagttcaatccttacgttactcagattgaacctcatgactatatctcaaagctcttcaatctatttgtccagttcaacattgtcttgactgactttgacagagacatgtggtcttacatatcagcaggctacttcaagcagatagcaaaggctggtgaagttggatcctccaccatgcctcacaaaatcaatcccatcaactttgaaaatagtgaaggcaattttagtgtgtcgaatggtcttttatgtactttaagtatgaagctaccaatatcaaggttgcagcgtgatctcacagattcaactgttttgagaaacttgggtgttggattagggcattcactcttggcttacaaagcaacaatgcagggaatcaagaagctagaggtgaacaaagtccgtttggatgaagacttggagcaaacatgggaagtccttgcagagccaatacagactgtgatgcgaaggtatgggatccccgaaccctatgagaaactgaaggaaatgactagaggccaggctgtgaccaaagacagcatacgccagttcattgaaggtcttgacctaccggaggatgcccggtcaagtcttttgaagttaacaccacactcttacactggagaggcagagaatctggctgcaaatatttggaatgtggttgacctgaaatctggatttaagatcaagtga

SEQ ID NO: 144844 - protein, 543 aa, Hordeum vulgare
MSAPPFLKSPATAAFLASPRVTAAPRAAVLGATAQPPRRLRCSAAVGAGARDFGVMSAPLGWAARSVEELEQATDLDSFCMMALSPLDGRYIRFIKDLMPFFSEFGLIRYRVLVEVKWLLKLSQIPEVKEVPPFSQEAQLFLDAVIQDFSINDAKEVKQIEKITNHDVKAVEYYLKQKCSSNPEVAKVLEFFHFGCTSEDINNLSHALALKEGVNTIMFPVMIDVCSAICSLATENAHVPLLSKTHGQPASPTTLVKEMANFAARLSDIGKSFSEVKILGKFAGAVGNYNADVVAYPEIDWPKMTEEFVRSLGLEFNPYVTQIEPHDYISKLFNLFVQFNIVLTDFDRDMWSYISAGYFKQIAKAGEVGSSTMPHKINPINFENSEGNFSVSNGLLCTLSMKLPISRLQRDLTDSTVLRNLGVGLGHSLLAYKATMQGIKKLEVNKVRLDEDLEQTWEVLAEPIQTVMRRYGIPEPYEKLKEMTRGQAVTKDSIRQFIEGLDLPEDARSSLLKLTPHSYTGEAENLAANIWNVVDLKSGFKIK

SEQ ID NO: 144845 - DNA, 1611 bp, Glycine max
  CDS (1)..(1611)
atggagttcactgcactctctaacgctacccaacttgggagcttcaaccctcttagaaccaaccttcaaagttcaacacaacaccctcttcctttttcgtatgcttctttcccttcttcctctcgcagagattgctcatgcaaagcccttctcagcacccacacacccacctctacccacaacatgtttggaccccattccaccgattttgagctctctgctttgacggctctgtccccattggatggtcgttattggagcaaagttaaggaacttgctccttttttgagtgaatatggcttaatctactttcgggttcttgttgagataaaatggttgctgcagctgtctgtgattcctgaaattgtggaggttcccagtttcagtgacggtgctaaatctttcttacaaggcctgattgataactttagtgttgaggatgccttggaggttaaaaacattgagagggtcacgaatcatgatgtgaaagcggtggagtacttcttgaaacagaagtgtcaatccaatgctgaagtggctaaggtgcttgagtttttccactttgcttgcacatctgaggatataaataatcttgcccatgccttgatgctgaaggaaacaatgaattctatcatgtttcctgtcatggataaaataatgattgctttgtgtgacgtggctaaagataatgcggatgttcctatgctttctcgcactcatggacagccagcttcaccaactactttgggaaaggaaatggcgatctttgctgcaagattaagcagagaaaggaaagatctgtctcaggttgagatattggggaaatttgctggtgcagttggaaattacaatgcacatgttgttgcatatcccaatgttaactggcctcacattgcagaacagtttgtacactctcttggattaagttttaatccttacgttgctcagattgaaactcatgactacatggcaaagctttttcatttgctcatccagttcaataatatattaatcgattttgatagagatgtgtggggctatatatctttgggttactttaagcagaccactaaggctggggagattgggtcatcaactatgcctcacaaagtgaatcctattgattttgagaacagcgaaggtaatctaggtgtagctaatggaggtctgtctcatctaagcatgaagttgccgatttcacgttggcagagggacttgactgattcaactgtcttaaggaacatgggtataggtataggtcattctcttcttgcctacaaaagcacacttcaaggaatagggaagcttcaggttaatgaagctcgcttgagtgaagacttgaaccactgctgggaggtgcttgctgaaccaattcagactgttatgcgaagatatggtgttcctgagccttatgagaagttaaaagaactaaccagaggaagagcagttaccaaagagagcataagagatttcattaaaggcctagatattccagaagaagcaaagagtaatatgttgaagttaacacctgatacttatgttggagcagctgttgaattggccagaacagtggaaaatgtggtgaatactgtgattggaataaagatctag

SEQ ID NO: 144846 - protein, 536 aa, Glycine max
MEFTALSNATQLGSFNPLRTNLQSSTQHPLPFSYASFPSSSRRDCSCKALLSTHTPTSTHNMFGPHSTDFELSALTALSPLDGRYWSKVKELAPFLSEYGLIYFRVLVEIKWLLQLSVIPEIVEVPSFSDGAKSFLQGLIDNFSVEDALEVKNIERVTNHDVKAVEYFLKQKCQSNAEVAKVLEFFHFACTSEDINNLAHALMLKETMNSIMFPVMDKIMIALCDVAKDNADVPMLSRTHGQPASPTTLGKEMAIFAARLSRERKDLSQVEILGKFAGAVGNYNAHVVAYPNVNWPHIAEQFVHSLGLSFNPYVAQIETHDYMAKLFHLLIQFNNILIDFDRDVWGYISLGYFKQTTKAGEIGSSTMPHKVNPIDFENSEGNLGVANGGLSHLSMKLPISRWQRDLTDSTVLRNMGIGIGHSLLAYKSTLQGIGKLQVNEARLSEDLNHCWEVLAEPIQTVMRRYGVPEPYEKLKELTRGRAVTKESIRDFIKGLDIPEEAKSNMLKLTPDTYVGAAVELARTVENVVNTVIGIKI

SEQ ID NO: 144847 - DNA, 1632 bp, Zea mays
  CDS (1)..(1632)
atgtcagcgccgccgtcgctcaagaccccggcaaccgccgtagcggtctctcggcgctcggtcgccaccccgagagccaccgggcttcgcggcgcctgtgctcccccgactcggcgcctccggtgctcagcctccgccgccgtggccggggcttccaccgagatggctgatgctccgctggactgggcagagaggtcgctggaggagttacacagcttgccggaccacgacacgttctgcttgatggcgctctcgccgctggacgggcggtacgatcgcttcgtcaaggagctgatgccctttttcagcgagttcggcctaatcagataccgcgttctcatcgagatcaagtggctactgaaactttctcaaattcctgagatcactgaggtgcctcagttcagcaaggaagctcagtccttgttgaatgccattattgagaatttttgcatagatgatgcaaaagaagttaagaaaatcgagaaagtaaccaaccatgacgtgaaagccgtggagtactttctgaagcaaaggtgcagctcaaatccagagattgcaaaggtgtcggaattcttccattttggttgtacctctgaagatattaacaatctatcacatgcattggctttgaaagagggggtaaataaagttatgttccctgccatgatcgatctatgcagagcaatgtgttccttggcaacacaaaattcaggctaccctatgttggctcgaactcatgggcagccagcatcaccaacaactgtgggaaaggagatggcaaacttcgcggccagattatctgatataggaaagagtttctcagaggtgaagatactagggaaatttgctggcgctgttggcaattacaatgccgatgtggttgcatatcctgaagttgactggcctaaggtggcagaagagtttgttagatccttgggtttgcagtttaatccctatgttactcagattgagcctcatgactacatatcaaagctcttcaatctattcacccagtttaacaatgtgttgactgattttgatagagacatgtggtcctatatatcattaggctacttcaagcagataccaaaggctggtgaagttggttcttccactatgcctcataaaatcaaccccattgattttgaaaatagtgatggcaatttatgtcaggcgaattctatattgtctggtataagcatgaaactaccaatatcccggttgcagcgtgacctaacagactcgactgttttgagaaacctgggtatgggattaggtcattctctattggcttacaaagctaccatgcgtggaatcagcaaggttcagttgaatgaatcacgtttagctgaagacctggagcaaacttgggaggtccttgctgagccaatacagacagtgatgcgaagatatgggatacctgaaccttatgagaagctgaaggaactgacgagaggccaagctgtcaccaaggacagcatgcagcaattcattaatggtctagacataccggaggaggttcgatcgaagctttcgaagctaaccccgcattcctacactgggctagcggaggatttggccagagacatcgagaagtgggttgatcttgaatctggatttcagatcaagtga

SEQ ID NO: 144848 - protein, 543 aa, Zea mays
MSAPPSLKTPATAVAVSRRSVATPRATGLRGACAPPTRRLRCSASAAVAGASTEMADAPLDWAERSLEELHSLPDHDTFCLMALSPLDGRYDRFVKELMPFFSEFGLIRYRVLIEIKWLLKLSQIPEITEVPQFSKEAQSLLNAIIENFCIDDAKEVKKIEKVTNHDVKAVEYFLKQRCSSNPEIAKVSEFFHFGCTSEDINNLSHALALKEGVNKVMFPAMIDLCRAMCSLATQNSGYPMLARTHGQPASPTTVGKEMANFAARLSDIGKSFSEVKILGKFAGAVGNYNADVVAYPEVDWPKVAEEFVRSLGLQFNPYVTQIEPHDYISKLFNLFTQFNNVLTDFDRDMWSYISLGYFKQIPKAGEVGSSTMPHKINPIDFENSDGNLCQANSILSGISMKLPISRLQRDLTDSTVLRNLGMGLGHSLLAYKATMRGISKVQLNESRLAEDLEQTWEVLAEPIQTVMRRYGIPEPYEKLKELTRGQAVTKDSMQQFINGLDIPEEVRSKLSKLTPHSYTGLAEDLARDIEKWVDLESGFQIK

SEQ ID NO: 144849 - DNA, 23 bp, Artificial sequence
  primer
atggaattatcctcactgaccgc

SEQ ID NO: 144850 - DNA, 25 bp, Artificial sequence
  primer
ttatttcagctcatcaaccatcgtg

SEQ ID NO: 144851 - protein, 473 aa, Artificial sequence
  consensus sequence
  Variant (2)..(2): Xaa in position 2 is any amino acid
  Variant (4)..(4): Xaa in position 4 is any amino acid
  Variant (7)..(15): Xaa in position 7 to 15 is any amino acid
  Variant (16)..(17): Xaa in position 16 to 17 is any or no amino acid
  Variant (20)..(28): Xaa in position 20 to 28 is any amino acid
  Variant (31)..(64): Xaa in position 31 to 64 is any amino acid
  Variant (65)..(81): Xaa in position 65 to 81 is any or no amino acid
  Variant (84)..(85): Xaa in position 84 to 85 is any amino acid
  Variant (87)..(87): Xaa in position 87 is any amino acid
  Variant (91)..(91): Xaa in position 91 is any amino acid
  Variant (93)..(106): Xaa in position 93 to 106 is any amino acid
  Variant (107)..(119): Xaa in position 107 to 119 is any or no amino acid
  Variant (122)..(123): Xaa in position 122 to 123 is any amino acid
  Variant (126)..(126): Xaa in position 126 is any amino acid
  Variant (129)..(134): Xaa in position 129 to 134 is any amino acid
  Variant (136)..(158): Xaa in position 136 to 158 is any amino acid
  Variant (159)..(159): Xaa in position 159 is any or no amino acid
  Variant (161)..(170): Xaa in position 161 to 170 is any amino acid
  Variant (176)..(176): Xaa in position 176 is any amino acid
  Variant (178)..(178): Xaa in position 178 is any amino acid
  Variant (180)..(180): Xaa in position 180 is any amino acid
  Variant (182)..(182): Xaa in position 182 is any amino acid
  Variant (184)..(186): Xaa in position 184 to 186 is any amino acid
  Variant (188)..(194): Xaa in position 188 to 194 is any amino acid
  Variant (196)..(213): Xaa in position 196 to 213 is any amino acid
  Variant (215)..(233): Xaa in position 215 to 233 is any amino acid
  Variant (234)..(243): Xaa in position 234 to 243 is any or no amino acid
  Variant (246)..(253): Xaa in position 246 to 253 is any amino acid
  Variant (254)..(254): Xaa in position 254 is any or no amino acid
  Variant (257)..(259): Xaa in position 257 to 259 is any amino acid
  Variant (261)..(262): Xaa in position 261 to 262 is any amino acid
  Variant (264)..(299): Xaa in position 264 to 299 is any amino acid
  Variant (300)..(304): Xaa in position 300 to 304 is any or no amino acid
  Variant (313)..(313): Xaa in position 313 is any amino acid
  Variant (317)..(318): Xaa in position 317 to 318 is any amino acid
  Variant (321)..(322): Xaa in position 321 to 322 is any amino acid
  Variant (324)..(339): Xaa in position 324 to 339 is any amino acid
  Variant (341)..(344): Xaa in position 341 to 344 is any amino acid
  Variant (345)..(345): Xaa in position 345 is any or no amino acid
  Variant (350)..(350): Xaa in position 350 is any amino acid
  Variant (352)..(352): Xaa in position 352 is any amino acid
  Variant (354)..(354): Xaa in position 354 is any amino acid
  Variant (356)..(377): Xaa in position 356 to 377 is any amino acid
  Variant (378)..(378): Xaa in position 378 is any or no amino acid
  Variant (380)..(389): Xaa in position 380 to 389 is any amino acid
  Variant (391)..(413): Xaa in position 391 to 413 is any amino acid
  Variant (414)..(419): Xaa in position 414 to 419 is any or no amino acid
  Variant (422)..(452): Xaa in position 422 to 452 is any amino acid
  Variant (453)..(465): Xaa in position 453 to 465 is any or no amino acid
  Variant (467)..(468): Xaa in position 467 to 468 is any amino acid
  Variant (470)..(470): Xaa in position 470 is any amino acid
  Variant (472)..(472): Xaa in position 472 is any amino acid
PXDXRYXXXXXXXXXXXSEXXXXXXXXXVEXXXXXXXXXXXXXXXXXXXXXXXXXXXXXXXXXXXXXXXXXXXXXXXXXXXIEXXTXHDVXAXXXXXXXXXXXXXXXXXXXXXXXXXXXHFXXTSXDIXXXXXXLXXXXXXXXXXXXXXXXXXXXXXXXAXXXXXXXXXXRTHGQXAXPXTXGXXXAXXXXXXXRXXXXXXXXXXXXXXXXXXGXXXXXXXXXXXXXXXXXXXXXXXXXXXXXLGXXXXXXXXXQIXXXDXXAXXXXXXXXXXXXXXXXXXXXXXXXXXXXXXXXXXXXXXXXXGSSTMPHKXNPIXXENXXGXXXXXXXXXXXXXXXXPXXXXXRDLTXSXVXRXXXXXXXXXXXXXXXXXXXXXXXLXXXXXXXXXXLXXXXXXXXXXXXXXXXXXXXXXXXXXXXXYEXXXXXXXXXXXXXXXXXXXXXXXXXXXXXXXXXXXXXXXXXXXXPXXYXGXA

SEQ ID NO: 144852 - protein, 19 aa, Artificial sequence
  protein pattern
  Variant (9)..(9): Xaa in position 9 is any amino acid
  Variant (13)..(14): Xaa in position 13 to 14 is any amino acid
  Variant (16)..(18): Xaa in position 16 to 18 is any amino acid
  Variant (19)..(19): Xaa in position 19 is Ala, Gly or Ser
GSSTMPHKXNPIXXEXXXX

SEQ ID NO: 144853 - protein, 15 aa, Artificial sequence
  protein pattern
  Variant (5)..(5): Xaa in position 5 is any amino acid
  Variant (7)..(7): Xaa in position 7 is Ser, Thr or Val
  Variant (9)..(9): Xaa in position 9 is any or no amino acid
  Variant (11)..(11): Xaa in position 11 is any amino acid
  Variant (12)..(12): Xaa in position 12 is any or no amino acid
  Variant (14)..(14): Xaa in position 14 is any amino acid
  Variant (15)..(15): Xaa in position 15 is Glu or Lys
THGQXAXPXTXXGXX

SEQ ID NO: 144854 - protein, 15 aa, Artificial sequence
  protein pattern
  Variant (3)..(3): Xaa in position 3 is Ala or Gly
  Variant (4)..(4): Xaa in position 4 is Ala, Cys or Val
  Variant (7)..(7): Xaa in position 7 is any amino acid
  Variant (10)..(10): Xaa in position 10 is any amino acid
  Variant (11)..(11): Xaa in position 11 is Asp or Asn
  Variant (12)..(12): Xaa in position 12 is any amino acid
  Variant (13)..(13): Xaa in position 13 is Ala or Ser
  Variant (14)..(14): Xaa in position 14 is any amino acid
  Variant (15)..(15): Xaa in position 15 is Ala, Gly, Ser or Val
HFXXTSXDIXXXXXX

SEQ ID NO: 144855 - protein, 10 aa, Artificial sequence
  protein pattern
  Variant (5)..(5): Xaa in position 5 is Asp or Asn
  Variant (7)..(7): Xaa in position 7 is Ser or Thr
  Variant (8)..(8): Xaa in position 8 is Ala, Ser, Thr or Val
  Variant (9)..(9): Xaa in position 9 is any amino acid
RDLTXSXXXR

SEQ ID NO: 144856 - protein, 10 aa, Artificial sequence
  protein pattern
  Variant (2)..(2): Xaa in position 2 is Phe, Ile, Leu, Met or Val
  Variant (3)..(3): Xaa in position 3 is any amino acid
  Variant (6)..(6): Xaa in position 6 is Ser, Thr or Val
  Variant (8)..(8): Xaa in position 8 is Asn or Thr
  Variant (9)..(9): Xaa in position 9 is any amino acid
  Variant (10)..(10): Xaa in position 10 is Ala, Gly, Asn, Gln or Ser
KXXGAXGXXX

SEQ ID NO: 144857 - DNA, 810 bp, Escherichia coli
  CDS (1)..(810): transl_table=11
atgagatcgttagctgatttcgaatttaataaagcgccattgtgcgaaggcatgatcctggcttgcgaagcaatccgccgcgattttccctcgcaagatgtttacgacgaactggagcgtctcgttagtctggcgaaggaagaaatcagccagcttctgcctttagaagagcagttggaaaaactgatcgcgctgttttacggcgactggggatttaaagcctcacgcggtgtttatcgtctttccgatgcattatggctggaccaggtgttaaagaatcgacagggcagtgcggtatcattaggtgcggttttattatgggtcgcgaatcgtctcgatttgccgctgctgccggtgattttccctacgcagctgatattgcgcattgaatgtccggatggcgaaatttggctgattaatccttttaacggtgaatcgttaagcgaacatatgctggacgtatggttaaagggaaatatcagcccgtcggcggaactgttttatgaagaccttgatgaagctgataacattgaggtaatccgcaaattgctggatacactcaaagcctcgttgatggaagaaaatcagatggagctggcgttacgcaccagcgaagctttattacaattcaaccctgaagatccctatgaaattcgcgatcgcgggttgatttatgcgcaactggattgcgaacacgttgcgttgaacgatttaagttatttcgttgaacagtgtccggaagacccgatcagcgaaatgatccgtgcgcaaataaataacatcgcgcataaacatattgtgctgcattaa

SEQ ID NO: 144858 - protein, 269 aa, Escherichia coli
MRSLADFEFNKAPLCEGMILACEAIRRDFPSQDVYDELERLVSLAKEEISQLLPLEEQLEKLIALFYGDWGFKASRGVYRLSDALWLDQVLKNRQGSAVSLGAVLLWVANRLDLPLLPVIFPTQLILRIECPDGEIWLINPFNGESLSEHMLDVWLKGNISPSAELFYEDLDEADNIEVIRKLLDTLKASLMEENQMELALRTSEALLQFNPEDPYEIRDRGLIYAQLDCEHVALNDLSYFVEQCPEDPISEMIRAQINNIAHKHIVLH

SEQ ID NO: 144859 - DNA, 888 bp, Xylella fastidiosa 9a5c
  CDS (1)..(888): transl_table=11
ttgggcttgaataaagagacacttggcaccaccctgtgtttcatggtcgaacaactgctactacccctctggaacagcctcgccactgtcgacgatgaaacgctgccattgatgtcgacagcgttactgatcgctcgtgacgaatatccagacctggacgctaacctctacgacacgctggtacaaagctatgtcgaatacctccgctcagaagtggaagagatttctctgtggccactgaagatggccgcagtaaaccgttacttgttccaaaaattaggatattcaggaaaccacgacgaatattacgatccacgcaacagctacctcaatcaggtatttgagcgccgtcttggcaatccaatctccctggcagtcatacaaatagaggtagcacgacgccttggaattcctctagacggtgtatcatttcctgggcatttcttggtccggctgcctgtcgacgacggcatactcgtcatggatccattcaacggcggccgaccattagacgcagaagagttacgggagcgtgtccgcccacatctaggtggtgaagtgccagatgatcgcgcattagctcaaatcctcaatcccgcaccacaccgcacaatcctcgttcgtatcctacgcaacctacacagtgtgtacgctaacactaaccgctgggatcgcgcagcacgctgcgctgatcgcatcctcaaactggtgccgaaccaacctgaagcactccgcgaccgcggcttagcatatctgcaacttggacatcgcagcggtgcacggaacgacttgacgcgctacctgcagctctacccatccacacacaacgtcgacatggtgcgtggccatctagtagatctaagcaatgaacgcatccaaacgcattga

SEQ ID NO: 144860 - protein, 295 aa, Xylella fastidiosa 9a5c
MGLNKETLGTTLCFMVEQLLLPLWNSLATVDDETLPLMSTALLIARDEYPDLDANLYDTLVQSYVEYLRSEVEEISLWPLKMAAVNRYLFQKLGYSGNHDEYYDPRNSYLNQVFERRLGNPISLAVIQIEVARRLGIPLDGVSFPGHFLVRLPVDDGILVMDPFNGGRPLDAEELRERVRPHLGGEVPDDRALAQILNPAPHRTILVRILRNLHSVYANTNRWDRAARCADRILKLVPNQPEALRDRGLAYLQLGHRSGARNDLTRYLQLYPSTHNVDMVRGHLVDLSNERIQTH

SEQ ID NO: 144861 - DNA, 810 bp, Vibrio parahaemolyticus RIMD 2210633
  CDS (1)..(810): transl_table=11
atgcttgagttttttgacgaagattttgacaacatggcgctggtggaaggagcgttagagctcaataaatccgttaatccagaaaccaacgtccattgggctaagcaagagctagagcgtctgtaccaagaagcagaagcaacgcttatccatgaaacagatgaagagcagcgtttcgactctttcctacgtctgtttttccatgagtggggcttcaaaggtgacgaccaagagtactttatctctgacaacagctttatcgataaagtgctagagcgtaaaaaaggtataccggtcagcttaggtgcaattttattgtacttaggcaatcgccttggcttccctatgaaaggtgtgacattcccaactcagttcctaattaaagtggattggatgcacaaaacaccagactacattaacccgttcaacggggagtatgttggtgagaaaatccttcaagcttggttaatcggtcaagaaggaccgttagcgcaacttaaaccagaacattttgacgaagcggataatccgacagtgattggtcgctggttggcgttgattaaaagcgcgatgctgagagaagagcgttacacactggcgctgcgctgtactaatctggcgttgacctttgtgccagatgatccatacgagattcgtgatcgcggttttatcttccaacagcttgagtgtcatcaggtcgcggtatctgactttcagtactttattgaccaatgtcccgacgatcctgcgtctgagctactaaaatcacaagttaatgcgatgagtgaaaaacacgtcacgcttcactaa

SEQ ID NO: 144862 - protein, 269 aa, Vibrio parahaemolyticus RIMD 2210633
MLEFFDEDFDNMALVEGALELNKSVNPETNVHWAKQELERLYQEAEATLIHETDEEQRFDSFLRLFFHEWGFKGDDQEYFISDNSFIDKVLERKKGIPVSLGAILLYLGNRLGFPMKGVTFPTQFLIKVDWMHKTPDYINPFNGEYVGEKILQAWLIGQEGPLAQLKPEHFDEADNPTVIGRWLALIKSAMLREERYTLALRCTNLALTFVPDDPYEIRDRGFIFQQLECHQVAVSDFQYFIDQCPDDPASELLKSQVNAMSEKHVTLH

SEQ ID NO: 144863 - DNA, 810 bp, Photorhabdus luminescens subsp. laumondii TTO1
  CDS (1)..(810): transl_table=11
atgaaagccatagctgattatgaatttaataatgcatcgttaagtagcggtatcctgttaatttcccgaacattgcgttctgattttcctcagcattcagtggaaatgcagcttcaagcattgattgatgaagccagacgtgaaatatctccgcagttaactatagaagaacggttggaaaaattactgaggcttttttatcaaagctggaaattcggcggtgccggtggtgtttattgtctgtcggatacattatggctagataaagtactgcaaactcgccaaggttcctctgctgttttaggggtaattcttatccatattgctcaggctttagcgctaccgtttatgccggtggtttttccaacccagttgattttgcgtgttgattatccagataacacggcgaggtttattaatccactcaatggtgaagcgttaagtgaatatgtgcttgatgtgtggcttaaaggcaatattagtcagacagctaaattaacagccgatgatttgcaaggagcggataacgccagcattatacgtaaagtgctggatacaataaaagctgcattgatggacgaagggcagatggaattggcactgagaacgagcgaagctgtgctgatatttgatcccgataacccctatgaaatacgtgatagggggctgatttatgcggaacttgattgtaatcatattgcggtttctgatttaaattattttgtggagcactgcccggaggacccggtggcagaaatggtcagaatgcagatatatgctattcagcagcaatgcattgttttacattga

SEQ ID NO: 144864 - protein, 269 aa, Photorhabdus luminescens subsp. laumondii TTO1
MKAIADYEFNNASLSSGILLISRTLRSDFPQHSVEMQLQALIDEARREISPQLTIEERLEKLLRLFYQSWKFGGAGGVYCLSDTLWLDKVLQTRQGSSAVLGVILIHIAQALALPFMPVVFPTQLILRVDYPDNTARFINPLNGEALSEYVLDVWLKGNISQTAKLTADDLQGADNASIIRKVLDTIKAALMDEGQMELALRTSEAVLIFDPDNPYEIRDRGLIYAELDCNHIAVSDLNYFVEHCPEDPVAEMVRMQIYAIQQQCIVLH

SEQ ID NO: 144865 - DNA, 810 bp, Vibrio vulnificus YJ016
  CDS (1)..(810): transl_table=11
atgctggaattgtttgacgaagattttgacaacatggagctggtggaaggggcgttagagctcaataaagccattaatccagaaacagaagatctttgggtaaagcatgagttggctcgtttgttaaaagaagcggaaaacgaactgtttgtcgagcgagatgaaaagcaacgctttgacgcctttctacgcctatttttcatccaatggcagttccaaggtgatcgtgaagcctattttgattcagacaacagctttattgataaagtattgcagcgtcggaaaggcatccctgtcagtttaggagcgatactgctttatctgggtcgccagcttggcttcgacttgcatggtgtcacctttccaacccagtttcttttgcgagtggattggtgtgaagggggcgttcaatacatcaacccatttaatggtgagtttgttggcgagcgccttttacaagcttggttgattggccacgaagggccgttagcaacgttgaaacctgagcatcttgaggtggcggataaccctacggtgattggccgctggcttgccttattaaaaggcgcactacttcgagaagagcgctatactctggctttacgttgtaccaatctggcgttaacgtttgtgccagatgacccttatgaaattcgtgatcgcggctttatctatcaacaactagagtgtcatcaaattgcggtgtctgattttcaatattttattgatcagtgtcccgatgacccagcggcagagctgctaaaaaaacaagttaacgtgatgagtggcaaagcggtcactctacattga

SEQ ID NO: 144866 - protein, 269 aa, Vibrio vulnificus YJ016
MLELFDEDFDNMELVEGALELNKAINPETEDLWVKHELARLLKEAENELFVERDEKQRFDAFLRLFFIQWQFQGDREAYFDSDNSFIDKVLQRRKGIPVSLGAILLYLGRQLGFDLHGVTFPTQFLLRVDWCEGGVQYINPFNGEFVGERLLQAWLIGHEGPLATLKPEHLEVADNPTVIGRWLALLKGALLREERYTLALRCTNLALTFVPDDPYEIRDRGFIYQQLECHQIAVSDFQYFIDQCPDDPAAELLKKQVNVMSGKAVTLH

SEQ ID NO: 144867 - DNA, 810 bp, Erwinia carotovora subsp. atroseptica SCRI1043
  CDS (1)..(810): transl_table=11
atgagtgctattgctgattttgaattcaaccagtcactgctaagtgatggtgtcgtgttggtttcacaggctattcgccgcgactttcccgctcaggatgtgcggcaaaatctgcaacagctggttgagagcgcccgagccgttattcctgacggccttgagcaagatcttcagcttgaaaaactgattgagctgttttatcacacctggggattcggcggtgccggcggtgtttatcgcctgtctgatgcactatggctggatcaggtgctggaatctcgccagggcatgcccgtgtcgcttggcattatcttcctgcatatcgcaaacgaactcggcctgccgctgatgccggtgattttcccgacgcagttgattttgcgtgctgactggctcgatgaagagatgtggctgatcaatccgctcaatggcgatacgctgagtgagcatgtgctggaagtctggctgaaaggtaacatcggtccttcaacccgtttgttggatgaagatctggatgaagcagaaaatgtcatgatcgtgcgtaaaatgctcgatacgttgaaagttgctctgatggaagaaaaacagatggaactggcgttgagagccagtgaagctgtgctgcaatttgacccggacgatccgtatgaaattcgcgatcgcggcctgatttatgctcaactggattgcgaccatatcgcgctgtccgatctcaactatttcgttgaacagtgcccggaagatccagtgagtgaaatgataaaagtacagattcactcgatagagcaaaaacagattgtcttgcattaa

SEQ ID NO: 144868 - protein, 269 aa, Erwinia carotovora subsp. atroseptica SCRI1043
MSAIADFEFNQSLLSDGVVLVSQAIRRDFPAQDVRQNLQQLVESARAVIPDGLEQDLQLEKLIELFYHTWGFGGAGGVYRLSDALWLDQVLESRQGMPVSLGIIFLHIANELGLPLMPVIFPTQLILRADWLDEEMWLINPLNGDTLSEHVLEVWLKGNIGPSTRLLDEDLDEAENVMIVRKMLDTLKVALMEEKQMELALRASEAVLQFDPDDPYEIRDRGLIYAQLDCDHIALSDLNYFVEQCPEDPVSEMIKVQIHSIEQKQIVLH

SEQ ID NO: 144869 - DNA, 810 bp, Yersinia pseudotuberculosis IP 32953
  CDS (1)..(810): transl_table=11
atgagtagcattgctgatttcgaatttaataacgcgtccctgtgtgatggggtgttactggttacccaagagattcgacagacttttccgctggctgatgtccgtaacaaactgcagcagcttgttgatgatgcgcgggccgctatgcctgccgaacttaatcaagatcagcaattagaagtgcttatcgatctgttttaccgtcaatggaaatttggcggtgcaagtggtgtctatcgcctgtcagacgccatctggttagataaagtgttagataaacgccaggggacaccggtttctttgggggttatttttctgtatatcgcgcatcaactgggtttgccgctgatgccggttatcttcccaacccagttaattcttcgtgccgattggctagatgaagagatgtggctgattaatccgttgaacggtgaaacgctgaacgagcatgtgcttgaagtgtggatcaagggcaatctggggttgagcgccgagctggaagatgaagatctggaagaggcagagaatacccttattgtacgtaaaatgctcgatacgctgaaagcggcattaatggaagagaagcagatggaactggcattacgtgccagcgaagcggttttggctttcgaccccgatgacccgtatgaaatccgcgaccggggcctgatttatgcgcaattggattgcaaccacattgccatctctgatttaagctactttgtcgagcagtgcccggaagatccgattgctgaaatgataaaaatgcagatccactcaattgagcaacagcgagtgacattgcactga

SEQ ID NO: 144870 - protein, 269 aa, Yersinia pseudotuberculosis IP 32953
MSSIADFEFNNASLCDGVLLVTQEIRQTFPLADVRNKLQQLVDDARAAMPAELNQDQQLEVLIDLFYRQWKFGGASGVYRLSDAIWLDKVLDKRQGTPVSLGVIFLYIAHQLGLPLMPVIFPTQLILRADWLDEEMWLINPLNGETLNEHVLEVWIKGNLGLSAELEDEDLEEAENTLIVRKMLDTLKAALMEEKQMELALRASEAVLAFDPDDPYEIRDRGLIYAQLDCNHIAISDLSYFVEQCPEDPIAEMIKMQIHSIEQQRVTLH

SEQ ID NO: 144871 - DNA, 795 bp, Mannheimia succiniciproducens MBEL55E
  CDS (1)..(795): transl_table=11
atgaagtattatcaaaaagccttatatgacgaaatgacctctttttatctcattacctgtgatgatgaaggggataaattggggcgtatccgttcgttaataggcggtttggttcgaaaagcccgtcaggttatcgggcaagagggtgacgataaagtccgaatccatcaattattacagcttttctacggcgactggggatttcattgcgatccggaacattattttgaagcggagaatctatatctcgcctatgtactggaaactcattccggtatgcccgttagtttgggcgcattgctgttgtatctggcagacagcttaaagctaccgctttatccggtaaattttccgacccagttgattttacgggctgaagttgataatgaagtggcgtttatcgacccttggaacggtcattacctatcgcaagctcatttgcagaaattatacgaaggcgcgttcggttttggggcggaaatcagtagtgaagaacttgagcgagcggatgtaaatacattgcttaaccgctttagacagctggctaaaaacgccttgattcgggaaaaccgtaatgatgcggcataccgatatattgcctcgttgctgcgttatcacccggaagacccttatgaaatccgtgaccgtgggctagtgttggcgcaaatgggttgctatcaggcggcggcggaggatttgcagtattttgtggatcaatgtccgcaggaccccacctcatttttattaacggcgcaacttgccgaattaaaagatcatttttctgaactccactaa

SEQ ID NO: 144872 - protein, 264 aa, Mannheimia succiniciproducens MBEL55E
MKYYQKALYDEMTSFYLITCDDEGDKLGRIRSLIGGLVRKARQVIGQEGDDKVRIHQLLQLFYGDWGFHCDPEHYFEAENLYLAYVLETHSGMPVSLGALLLYLADSLKLPLYPVNFPTQLILRAEVDNEVAFIDPWNGHYLSQAHLQKLYEGAFGFGAEISSEELERADVNTLLNRFRQLAKNALIRENRNDAAYRYIASLLRYHPEDPYEIRDRGLVLAQMGCYQAAAEDLQYFVDQCPQDPTSFLLTAQLAELKDHFSELH

SEQ ID NO: 144873 - DNA, 822 bp, Colwellia psychrerythraea 34H
  CDS (1)..(822): transl_table=11
atgaatgaattgtttttatcagaattaaagtctgccgataaagatttactacagaaacttgtactaattgaagagcatgtttttgccgatagtgctcaagaacctgtgcaaactgaagcatctttggatagcttagaattaattatcagccagtgtattgccatcataagtgaaatagaatcaccattagaaaaagcagaagctttacttaatgaattatattttcagcacttatttatagaccgttatcagacccgctggcctatttctgcttatagtgtcgcaaaaggtctgaatcaacgtgctatgtcacctgttgttaaggcggctttagttaaagaaatcattaccgcttgtggctttgagacagacttagtatttatccccaataaaattatggtacgcctgtgctgtgatgagcagtacgctattatttttgatgcaataacaggagagtcactcgattggactgagcttgatgtgcgtttagatgagttagatggcgatcctggagagcaagaattaaaagcaatcgatgacagtgtcgctttggtagaacacctatcagcactgaaaaacgttttgatccatgaacaggcctttgataaagcattaacatgcgttgatgttatcttgtcattaaatcctgacgatccattgcaacgtagagaccgtggtttcttgctgcaccagcttgattgttttaaagtggcggttgatgattaccgttatttcgtagagcaatgccctaaagatcccgcagcgaaaatattaaaaattcaacttgaaaaaattgatgttggtaataacgtacttcactag

SEQ ID NO: 144874 - protein, 273 aa, Colwellia psychrerythraea 34H
MNELFLSELKSADKDLLQKLVLIEEHVFADSAQEPVQTEASLDSLELIISQCIAIISEIESPLEKAEALLNELYFQHLFIDRYQTRWPISAYSVAKGLNQRAMSPVVKAALVKEIITACGFETDLVFIPNKIMVRLCCDEQYAIIFDAITGESLDWTELDVRLDELDGDPGEQELKAIDDSVALVEHLSALKNVLIHEQAFDKALTCVDVILSLNPDDPLQRRDRGFLLHQLDCFKVAVDDYRYFVEQCPKDPAAKILKIQLEKIDVGNNVLH

SEQ ID NO: 144875 - DNA, 849 bp, Ralstonia metallidurans CH34
  CDS (1)..(849): transl_table=11
atgacctccacgaaagtcctggactacttcgccagcctcgtggccgacgacgacgcgatcccgctcaccgagaccgcgctggcgatcgcccaggacgcctatcctgacctggacctgcaagccgaactggcagccctggatgttctggccctgcgcctgaagcgccggatcgcggagggaacagcggccatccagcgcctgcgcctgctcaatcatttcttctatcgcgatctcggcttcggccccaacgcgaacgactactacgatccggacaactcatatctgaacatggtgctcaagcagcgccggggtattccgatctcgctggccatcctctacatggaactcggccaacagatcggcctgccgctcaagggtgttgccttccccagccactttctggttcgcatgacgattccggcgggcgaggttgtgctcgacccgctgactggcgagacgctttcgaaggaacagttgcaggaaatgctcgacccctacctcgagcgcgaggggatcactaattcgagcgaagtgccgctcggcctgtttctgcaaacggccagccatcgcgagatcatcgcgcggatgctacgcaacttgaaggcgatctatttgcaggagtcacgctggcagcggctgctggcggtgcagaaccgcctggtgatcctgctgccggactcgatcgaggaagtacgcgaccgggggctggcgtatgccaacctggaatgcttccgcccggcactggaggatctggaagcctatgtccaggcccgcccggatgcggccgactccacgcagattcgcgatcggatgccagccttgcggatgatgagccgcagcctcaactaa

SEQ ID NO: 144876 - protein, 282 aa, Ralstonia metallidurans CH34
MTSTKVLDYFASLVADDDAIPLTETALAIAQDAYPDLDLQAELAALDVLALRLKRRIAEGTAAIQRLRLLNHFFYRDLGFGPNANDYYDPDNSYLNMVLKQRRGIPISLAILYMELGQQIGLPLKGVAFPSHFLVRMTIPAGEVVLDPLTGETLSKEQLQEMLDPYLEREGITNSSEVPLGLFLQTASHREIIARMLRNLKAIYLQESRWQRLLAVQNRLVILLPDSIEEVRDRGLAYANLECFRPALEDLEAYVQARPDAADSTQIRDRMPALRMMSRSLN

SEQ ID NO: 144877 - DNA, 795 bp, Haemophilus somnus 2336
  CDS (1)..(795): transl_table=11
atgaagtattatcataaagcattatatgatgaaatgacctctttttatcttattacgcatgacaatagtagtaaagaaatacggcgtattcgaggcatgattggcggtttggttcgtgaagctcgtaaaaaaattgattctaattgggaaactaaaagaaaaattcatcatttattgcagttgatgtatggagaatggggatttttttgtgatcccgaacggtattttgcgttggagaatttatatttggatcaagtgttaacgcaacgaagaggaatgccggtaacactgggagcaatagttttatacttggctgaaaggttgaatttgcccatttatccggtcaattttcctacgcaattaattttgcgtgctgatgttgatgaagaggttgcctttattgatccttggaatggtcaatatatgacatattctcagctaaaaaagttatatgaaggagcatttggttttggtactgaattaagcttggagatattagaagttgcagatgtgcaagaattaacgaatcggttttgtcaattagcaaagcatgcgttaattcgtgaatttagaaataatgaggcatatcaatatattgatatgctcttgtccagaaatcctgatgatccttatgaaattcgtgatcgtggggtggtattaactcaaatggggtgtatgcaagcggcattgaatgactttgaatattttttagaaaaatgtccggaagatccgaccgcacttttattattacctcaattggaatatttacaattagaaattgaatctattcattag

SEQ ID NO: 144878 - protein, 264 aa, Haemophilus somnus 2336
MKYYHKALYDEMTSFYLITHDNSSKEIRRIRGMIGGLVREARKKIDSNWETKRKIHHLLQLMYGEWGFFCDPERYFALENLYLDQVLTQRRGMPVTLGAIVLYLAERLNLPIYPVNFPTQLILRADVDEEVAFIDPWNGQYMTYSQLKKLYEGAFGFGTELSLEILEVADVQELTNRFCQLAKHALIREFRNNEAYQYIDMLLSRNPDDPYEIRDRGVVLTQMGCMQAALNDFEYFLEKCPEDPTALLLLPQLEYLQLEIESIH

SEQ ID NO: 144879 - DNA, 867 bp, Actinobacillus pleuropneumoniae serovar 1 str. 4074
  CDS (1)..(867): transl_table=11
atggacgatgtgattgaagaattattaaaagaattagatctgccgaaagttgaaatcagcccgaaagaattacaaaaatatttatatcgtgaaatggttcgcttaacgttactggtggatgattccttaaccgaaccgcaagtattcggcttaatgtcggcattagtgaaaaaagcacgctatcaagtgaatgccgaatccgatgcggacagaatccgacaattgcttactttagtttatcaggaatggggatttaactgtaattatcagcaatactttcatacggataatctgttactcaataaagtgattcgcacgcattcaggtatgccggtttcggttggcgcaatcgtgctttatttagcggcgtcgcttgatttaccgatttatccggttaatttcccgactcagttaattctgcgtgccgagatgaaagatgagaaaggtaaaaccaccgtacgttttattaatccgtgggacggcagttttatgccgttggaattgctcggtaaatggcttgagggcgaaatcggttacggtacggagcttacccctgaattactccgccgagcaaaaccttcagaattattggaacgagtggaaaccgtgtttaaaatggcactcactcgtgaagggaaatatgaagaaaccttacgtttaattgaatatcgtttagtattcagcccggaagatccgtatgaaattcgtgatcgcggtatggtgctggcaagtatggattgcttccaggctgcttatgaagatctcagttattttatcgatcaatgtccggaagatccttccgccgtaatgctcaaactcgaaataaaaggtttggaacaaaaaagtaaagaaagtcgattacattaa

SEQ ID NO: 144880 - protein, 288 aa, Actinobacillus pleuropneumoniae serovar 1 str. 4074
MDDVIEELLKELDLPKVEISPKELQKYLYREMVRLTLLVDDSLTEPQVFGLMSALVKKARYQVNAESDADRIRQLLTLVYQEWGFNCNYQQYFHTDNLLLNKVIRTHSGMPVSVGAIVLYLAASLDLPIYPVNFPTQLILRAEMKDEKGKTTVRFINPWDGSFMPLELLGKWLEGEIGYGTELTPELLRRAKPSELLERVETVFKMALTREGKYEETLRLIEYRLVFSPEDPYEIRDRGMVLASMDCFQAAYEDLSYFIDQCPEDPSAVMLKLEIKGLEQKSKESRLH

SEQ ID NO: 144881 - DNA, 804 bp, Haemophilus influenzae R2846
  CDS (1)..(804): transl_table=11
atgaaatattatcgacgtgcgttatacgatcaatttatgcatttttatcttgttatctctgatgatggcagtttagaagcacaacttcggggaaaaatgggtgggcttgtgcgtaaagcgcgtaaagaaatttcgccagattggtcgaaagaagagcagattcatcagttactacagctattttatggtgattggggctttcattgcgatccagaagattatttttatgctcgcaatttatatttgccttatgtgtttcaaaatcgccaaggtatgccagtgactcttggggcgatagtgctttatttagctgacgtattagatttaccaatttatcctgtcaatttcccaacacagctaattttacgtgccgaagtaagagatgaagtggcttttattgatccttgggatggcacttatatatcgcaagaaaaattgcagcaactttatgaaggtgcatttggatttggggcgaaaattcaacccgaagaacttgatagagccgatctttctttactttattctcgctttgagcaactggcgaaaaatacgcttattcgtgaagagcataacgatatggcataccactatattaagaatttaatgattactgatgctgaaaatccttatcatatccgtgaccgtggcttagttttagctcaaatgggggcttatccttcagcattgaaagatttagaattttttgtggaacattgtccaaaagatccaacggcggcgtttatccgcacgcaatttttagaacttaaaggcgagattaataaagatacttttcccctccattga

SEQ ID NO: 144882 - protein, 267 aa, Haemophilus influenzae R2846
MKYYRRALYDQFMHFYLVISDDGSLEAQLRGKMGGLVRKARKEISPDWSKEEQIHQLLQLFYGDWGFHCDPEDYFYARNLYLPYVFQNRQGMPVTLGAIVLYLADVLDLPIYPVNFPTQLILRAEVRDEVAFIDPWDGTYISQEKLQQLYEGAFGFGAKIQPEELDRADLSLLYSRFEQLAKNTLIREEHNDMAYHYIKNLMITDAENPYHIRDRGLVLAQMGAYPSALKDLEFFVEHCPKDPTAAFIRTQFLELKGEINKDTFPLH

SEQ ID NO: 144883 - DNA, 807 bp, Photobacterium sp. SKA34
  CDS (1)..(807): transl_table=11
atgctgtttaatgaagacgaattaaattcgcggccattagtttatggtgctattgatatgatgaaggacgtcgtgcctgaatttccaactcagtgggcggaattaaagttatctcaattagcgcaggaagctgagcaaacattaatggaagaagttaatcctcgtttacggttagaggggcttttacgcctgttttatcgagagtgggggtttcaaggcgatcaccagcaatacttttcgtcagataatgcatttttagataaagtactggagcgtcgaaaggggattcctgtaagccttggtgctttatttctttatttatctcagcaccttgatctgccgattgaaagcgtaggctttccgacccagtttttattaaaagcgacgtggtctgaaagcgatgttcagtatattaacccgtttgatggtgaatttgttagcacgcatacattacgtagctggttgattggtcaccgtggcccatttacagaacttaaacctgaatatcttaaaacgcagcagaatcatgaaattttaacgcgttggttaacggtaatgaaaagtgcacttcttcgtgaagaacactttactgatgctttgcgttgtagtgatcttgcactgttatttagcccaggtgatccgcatgagatccgtgaccgaggctatatttatcagcagcttgattgtaatcacgcagcagcgatggattactcatactttattgagcaatgccctgaagatccagccgctgatttactcaaaactcaagtagagacgctctttgatgagcctctaattctacactag

SEQ ID NO: 144884 - protein, 268 aa, Photobacterium sp. SKA34
MLFNEDELNSRPLVYGAIDMMKDVVPEFPTQWAELKLSQLAQEAEQTLMEEVNPRLRLEGLLRLFYREWGFQGDHQQYFSSDNAFLDKVLERRKGIPVSLGALFLYLSQHLDLPIESVGFPTQFLLKATWSESDVQYINPFDGEFVSTHTLRSWLIGHRGPFTELKPEYLKTQQNHEILTRWLTVMKSALLREEHFTDALRCSDLALLFSPGDPHEIRDRGYIYQQLDCNHAAAMDYSYFIEQCPEDPAADLLKTQVETLFDEPLILH

SEQ ID NO: 144885 - DNA, 813 bp, Vibrio cholerae
  CDS (1)..(813): transl_table=11
atgctgaatttatgtgatgaagattttgatgcgatggagttggtggaaggggcgcttgcgctcaacaaagccattaatcccgaaacgcagctagaatgggctcacatcgagttagcacgtctgctaaaagaagccgaactggcactggtacatgagcgtgatgagaaagcgcgtttcgaggcttttttgcgcctgttttatcaagagtggggctttagcggcgatcgcgaagcctactttgattctcgcaatgcctttattgatcaagtgttgcagcggcgcaaaggtattcctgtcagtttaggctcattactgctctacctaggacacaaactcggctttccactcaatggcataagtttcccgactcagtttctgctgtcgctcaattggtcgggagagcggccgatttatctcaatccatttaatggcgagatcgtgtcacaacatacactgcaagcttggttagttgggcacaaaggcccactggccaagcttaagccacagcatttacaaagtgtcgataatccgaccattattgggcgttggttggcgctactcaaaagtgccttactgcgtgaagagcgctatactctggcgctaagatgtaccgatttggcactcacttttgtgcccgatgacccatacgaaatccgtgatcgtggctttatttatcaacagctacagtgccatcaaattgctatttcggactatcaatattttattgagcactgtccgaacgatccggcggctgaattgttaaaaacgcaagtcaatgcactcagtcacgacagtcaagtgacgctgcattaa

SEQ ID NO: 144886 - protein, 270 aa, Vibrio cholerae
MLNLCDEDFDAMELVEGALALNKAINPETQLEWAHIELARLLKEAELALVHERDEKARFEAFLRLFYQEWGFSGDREAYFDSRNAFIDQVLQRRKGIPVSLGSLLLYLGHKLGFPLNGISFPTQFLLSLNWSGERPIYLNPFNGEIVSQHTLQAWLVGHKGPLAKLKPQHLQSVDNPTIIGRWLALLKSALLREERYTLALRCTDLALTFVPDDPYEIRDRGFIYQQLQCHQIAISDYQYFIEHCPNDPAAELLKTQVNALSHDSQVTLH

SEQ ID NO: 144887 - DNA, 795 bp, Pasteurella multocida
  CDS (1)..(795): transl_table=11
atgaactatgtgaaaaaagccctatatgatgaaatgttgagtttttaccatacaacactcggtatggaacatgaagatcggttacgtcttcgtgggcagataggccatttagtccgtgtagcaagaaaagaaattccagataccttggaaactaaagcgaaaattcatcttcttttgcagctattttatggcgagtggggatttcattgtgatccagagtcgtattttttatcgtccaatttatacctcaatgatgttttagaaacacgtcgcggtatgccggtgagtctaggtgcaattttgttatatattgcagataagctcaatttaccgctttacccggtcaatttcccaacccaattagtgattcgtgcggaagtagaaggagaagttgcctttattaacccatgggatgggcaatatatttcgcaagcgttattacataaatggtacgaaggagcgatgggatttggtatgacattgacacccactgaattagcgattgcgaatgtgggcgatttactagggcgttttcgtcaacttgccaagaatgcgttaattcgggaagaaaaaaatgatgaagccttttgttatattgcacgtttaattcattataatcctgaagatccttatgaaattcgtgatagaggattggttttagcgcaaatgggctgctaccatgtggcaacagaggattttcagtattttatcgatcaatgccctcaggacccaaccgcgcttttactgaaaaatcagttagaagagttaaaacaagatacttatcctatacattaa

SEQ ID NO: 144888 - protein, 264 aa, Pasteurella multocida
MNYVKKALYDEMLSFYHTTLGMEHEDRLRLRGQIGHLVRVARKEIPDTLETKAKIHLLLQLFYGEWGFHCDPESYFLSSNLYLNDVLETRRGMPVSLGAILLYIADKLNLPLYPVNFPTQLVIRAEVEGEVAFINPWDGQYISQALLHKWYEGAMGFGMTLTPTELAIANVGDLLGRFRQLAKNALIREEKNDEAFCYIARLIHYNPEDPYEIRDRGLVLAQMGCYHVATEDFQYFIDQCPQDPTALLLKNQLEELKQDTYPIH

SEQ ID NO: 144889 - DNA, 23 bp, Artificial sequence
  primer
atgagatcgttagctgatttcga

SEQ ID NO: 144890 - DNA, 26 bp, Artificial sequence
  primer
ttaatgcagcacaatatgtttatgcg

SEQ ID NO: 144891 - protein, 276 aa, Artificial sequence
  consensus sequence
  Variant (2)..(27): Xaa in position 2 to 27 is any amino acid
  Variant (28)..(32): Xaa in position 28 to 32 is any or no amino acid
  Variant (34)..(36): Xaa in position 34 to 36 is any amino acid
  Variant (38)..(55): Xaa in position 38 to 55 is any amino acid
  Variant (56)..(56): Xaa in position 56 is any or no amino acid
  Variant (58)..(58): Xaa in position 58 is any amino acid
  Variant (60)..(61): Xaa in position 60 to 61 is any amino acid
  Variant (63)..(63): Xaa in position 63 is any amino acid
  Variant (65)..(70): Xaa in position 65 to 70 is any amino acid
  Variant (72)..(81): Xaa in position 72 to 81 is any amino acid
  Variant (84)..(85): Xaa in position 84 to 85 is any amino acid
  Variant (87)..(87): Xaa in position 87 is any amino acid
  Variant (89)..(89): Xaa in position 89 is any amino acid
  Variant (92)..(92): Xaa in position 92 is any amino acid
  Variant (95)..(103): Xaa in position 95 to 103 is any amino acid
  Variant (105)..(106): Xaa in position 105 to 106 is any amino acid
  Variant (108)..(110): Xaa in position 108 to 110 is any amino acid
  Variant (112)..(112): Xaa in position 112 is any amino acid
  Variant (117)..(119): Xaa in position 117 to 119 is any amino acid
  Variant (121)..(131): Xaa in position 121 to 131 is any amino acid
  Variant (132)..(136): Xaa in position 132 to 136 is any or no amino acid
  Variant (138)..(139): Xaa in position 138 to 139 is any amino acid
  Variant (141)..(147): Xaa in position 141 to 147 is any amino acid
  Variant (148)..(148): Xaa in position 148 is any or no amino acid
  Variant (150)..(154): Xaa in position 150 to 154 is any amino acid
  Variant (156)..(157): Xaa in position 156 to 157 is any amino acid
  Variant (159)..(164): Xaa in position 159 to 164 is any amino acid
  Variant (165)..(173): Xaa in position 165 to 173 is any or no amino acid
  Variant (175)..(176): Xaa in position 175 to 176 is any amino acid
  Variant (178)..(190): Xaa in position 178 to 190 is any amino acid
  Variant (192)..(193): Xaa in position 192 to 193 is any amino acid
  Variant (195)..(196): Xaa in position 195 to 196 is any amino acid
  Variant (198)..(202): Xaa in position 198 to 202 is any amino acid
  Variant (204)..(210): Xaa in position 204 to 210 is any amino acid
  Variant (212)..(214): Xaa in position 212 to 214 is any amino acid
  Variant (216)..(217): Xaa in position 216 to 217 is any amino acid
  Variant (219)..(219): Xaa in position 219 is any amino acid
  Variant (226)..(229): Xaa in position 226 to 229 is any amino acid
  Variant (231)..(232): Xaa in position 231 to 232 is any amino acid
  Variant (234)..(236): Xaa in position 234 to 236 is any amino acid
  Variant (238)..(239): Xaa in position 238 to 239 is any amino acid
  Variant (241)..(242): Xaa in position 241 to 242 is any amino acid
  Variant (245)..(247): Xaa in position 245 to 247 is any amino acid
  Variant (250)..(250): Xaa in position 250 is any amino acid
  Variant (253)..(259): Xaa in position 253 to 259 is any amino acid
  Variant (261)..(270): Xaa in position 261 to 270 is any amino acid
  Variant (271)..(274): Xaa in position 271 to 274 is any or no amino acid
LXXXXXXXXXXXXXXXXXXXXXXXXXXXXXXXLXXXAXXXXXXXXXXXXXXXXXXXLXYXXWXFXXXXXXYXXXXXXXXXXVLXXRXGXPVXLGXXXXXXXXXLXXPXXXVXFPTQXXXRXXXXXXXXXXXXXXXXPXXGXXXXXXXXLXXXXXGXXGXXXXXXXXXXXXXXXLXXAXXXXXXXXXXXXXKXXLXXEXXXXXAXXXXXXXLXXXPXXPXEIRDRGXXXXQXXCXXXAXXDXXYFXXXCPXDPXXXXXXXQXXXXXXXXXXXXXXLH

SEQ ID NO: 144892 - protein, 41 aa, Artificial sequence
  protein pattern
  Variant (2)..(4): Xaa in position 2 to 4 is any or no amino acid
  Variant (6)..(6): Xaa in position 6 is His or Tyr
  Variant (7)..(7): Xaa in position 7 is Glu or His
  Variant (13)..(13): Xaa in position 13 is any amino acid
  Variant (14)..(14): Xaa in position 14 is Ile or Val
  Variant (15)..(15): Xaa in position 15 is any amino acid
  Variant (16)..(16): Xaa in position 16 is Ala, Gln or Thr
  Variant (17)..(17): Xaa in position 17 is Glu, Gln or Ser
  Variant (18)..(18): Xaa in position 18 is Leu or Met
  Variant (19)..(19): Xaa in position 19 is Asp, Glu, Gly or Gln
  Variant (20)..(20): Xaa in position 20 is Ala or Cys
  Variant (21)..(23): Xaa in position 21 to 23 is any amino acid
  Variant (25)..(26): Xaa in position 25 to 26 is any amino acid
  Variant (28)..(28): Xaa in position 28 is any amino acid
  Variant (29)..(29): Xaa in position 29 is Glu, Asn, Gln or Ser
  Variant (30)..(30): Xaa in position 30 is Phe or Tyr
  Variant (32)..(32): Xaa in position 32 is Ile, Leu or Val
  Variant (33)..(33): Xaa in position 33 is Asp or Glu
  Variant (34)..(34): Xaa in position 34 is any amino acid
  Variant (37)..(37): Xaa in position 37 is any amino acid
  Variant (40)..(40): Xaa in position 40 is any amino acid
  Variant (41)..(41): Xaa in position 41 is Ala or Ser
DXXXPXXIRDRGXXXXXXXXXXXAXXDXXXFXXXCPXDPXX

SEQ ID NO: 144893 - protein, 36 aa, Artificial sequence
  protein pattern
  Variant (2)..(2): Xaa in position 2 is Phe, Ile or Leu
  Variant (3)..(4): Xaa in position 3 to 4 is any amino acid
  Variant (5)..(5): Xaa in position 5 is His, Lys or Arg
  Variant (6)..(6): Xaa in position 6 is any amino acid
  Variant (8)..(8): Xaa in position 8 is any amino acid
  Variant (9)..(9): Xaa in position 9 is Ala, Pro or Ser
  Variant (10)..(10): Xaa in position 10 is Ala or Val
  Variant (11)..(11): Xaa in position 11 is Ser, Thr or Val
  Variant (12)..(12): Xaa in position 12 is Leu or Val
  Variant (14)..(15): Xaa in position 14 to 15 is any amino acid
  Variant (16)..(16): Xaa in position 16 is any or no amino acid
  Variant (18)..(22): Xaa in position 18 to 22 is any amino acid
  Variant (23)..(23): Xaa in position 23 is any or no amino acid
  Variant (25)..(25): Xaa in position 25 is any amino acid
  Variant (26)..(26): Xaa in position 26 is Phe or Leu
  Variant (27)..(27): Xaa in position 27 is Asp or Pro
  Variant (28)..(28): Xaa in position 28 is Phe, Ile, Leu or Met
  Variant (29)..(29): Xaa in position 29 is any amino acid
  Variant (30)..(30): Xaa in position 30 is Gly, Pro or Ser
  Variant (31)..(31): Xaa in position 31 is Ile or Val
  Variant (32)..(32): Xaa in position 32 is any amino acid
VXXXXXGXXXXXGXXXLXXXXXXLXXXXXXXXFPTQ

SEQ ID NO: 144894 - DNA, 540 bp, Escherichia coli
  CDS (1)..(540): transl_table=11
atgaagcagtttcttgattttttaccgctggttgtctttttcgcgttttacaagatttatgacatctatgcggctactgcggcgctgatcgtcgccacggcgattgtgcttatctatagctgggttcgctttcgtaaggttgagaagatggccctgatcacttttgttctggtggtcgtcttcggtggcttgacgctgttcttccacaatgatgagtttattaaatggaaggttactgtcatttatgctctatttgcgggagccctgttagtcagccaatgggtgatgaaaaagccgctaattcagcggatgctgggtaaagaactcacgctgccgcaaccggtatggtcgaagctgaatctggcctgggctgttttctttatcctttgcggtctggcaaacatctacatcgcattctggctgccgcaaaatatttgggtcaactttaaagtctttggcctgaccgcccttaccttaatcttcacattgttaagcggtatctatatctaccgccacatgccgcaggaagataaatcctaa

SEQ ID NO: 144895 - protein, 179 aa, Escherichia coli
MKQFLDFLPLVVFFAFYKIYDIYAATAALIVATAIVLIYSWVRFRKVEKMALITFVLVVVFGGLTLFFHNDEFIKWKVTVIYALFAGALLVSQWVMKKPLIQRMLGKELTLPQPVWSKLNLAWAVFFILCGLANIYIAFWLPQNIWVNFKVFGLTALTLIFTLLSGIYIYRHMPQEDKS

SEQ ID NO: 144896 - DNA, 663 bp, Brucella suis 1330
  CDS (1)..(663): transl_table=11
atggagcatcccgtttttgaacgcgatccgtctgagaaaagcgaaaccgaacgccgggaagtgccgccgctcctgaagctggcgctggaactggggccgcttctggtcttcttcttcgccaatgcgcgcggcgaaatgctgatcgaacgctttccgattctgggttccatcggcgcaccgatctttctggcaaccgccctgttcatggccgcaaccgtgattgcgcttgccatttcatggtcgatgacacgcacgctgcccatcatgccgctggtttccggcatcgtggttctggtgttcggcgcgctcacgctctggctgcacaacgataccttcatcaagatgaagcccaccatcgtcaacacgctgttcggcggcattcttctgggggggcttttcttcggcaaatccctgctcggctatgtgttcgattccgctttccggctcgatgccgagggctggcggaaactgacgctgcgctggggcctgttcttcatctttctggccattgtgaacgagattgtctggcgcaatttctccaccgatacctgggtatcgttcaaggtctggggcatcatgcccatcaccattgtcttcacgcttttacaaatgccgcttatccagaagcattcgttgactgatgaggaaaacaccgcatcataa

SEQ ID NO: 144897 - protein, 220 aa, Brucella suis 1330
MEHPVFERDPSEKSETERREVPPLLKLALELGPLLVFFFANARGEMLIERFPILGSIGAPIFLATALFMAATVIALAISWSMTRTLPIMPLVSGIVVLVFGALTLWLHNDTFIKMKPTIVNTLFGGILLGGLFFGKSLLGYVFDSAFRLDAEGWRKLTLRWGLFFIFLAIVNEIVWRNFSTDTWVSFKVWGIMPITIVFTLLQMPLIQKHSLTDEENTAS

SEQ ID NO: 144898 - DNA, 756 bp, Bradyrhizobium japonicum USDA 110
  CDS (1)..(756): transl_table=11
atgcgatcgccggaatcgagtcataggtttctttcgtcatgccccgcgcaggcggggcatccagtacgccgcgccgccggttgtcgatcacaggtgccacggaatactggatcccccgcattcgcgggggatgacatcaacgaaagtcagggaatggacaagacccagccgcatccgctgttcaagcttgcgaccgaactcggtccgctgctcgtcttcttcttcgtgaatgcgaagttcaatctgttcgccgcgaccggcgcgttcatggtcgcgatcgtggcggcgatgatcgcctcctatgtggtgacgcgccatatcccgatcatggcgatcgtgacgggcgtgatcgtgctggtgttcggcacgctgacgctggtgctgcacgacgagaccttcatcaaggtcaagccgaccatcatctacggcctgttcgccgcaatcctcggcggcgggctgctgttcggccgctccttcatcgccgtgatgttcgaccagatgttcaacctgacgccgcagggctggcgtatcctgacgctgcgctgggcgctgttcttcgccggcatggcggtgctgaacgagatcgtctggcgcacccagagcacggatttctgggtgaacttcaaggtgttcggcgtgacgccgatcacgatgatcttcgccatcgcccagatgccgctgaccaagcgctatcacctcgagccggtctcgctggaagcgagcgaggcggatgcgggggatgtgaggaaggggtga

SEQ ID NO: 144899 - protein, 251 aa, Bradyrhizobium japonicum USDA 110
MRSPESSHRFLSSCPAQAGHPVRRAAGCRSQVPRNTGSPAFAGDDINESQGMDKTQPHPLFKLATELGPLLVFFFVNAKFNLFAATGAFMVAIVAAMIASYVVTRHIPIMAIVTGVIVLVFGTLTLVLHDETFIKVKPTIIYGLFAAILGGGLLFGRSFIAVMFDQMFNLTPQGWRILTLRWALFFAGMAVLNEIVWRTQSTDFWVNFKVFGVTPITMIFAIAQMPLTKRYHLEPVSLEASEADAGDVRKG

SEQ ID NO: 144900 - DNA, 534 bp, Chromobacterium violaceum ATCC 12472
  CDS (1)..(534): transl_table=11
atgaaattttttaccgatctccttcccgtcctgctgttcttcggcgcctactggctgacgcgcgacatgttcgtcgcgaccggcgtggccatcgccgccaccgcggtgatggtggcctgggcctggttcaagcaccgcaaggtcgacaccatgcaatggatcagcctcgggctgatcgtcgtgctgggcggcgccacgctgctgctgcacgacaagcacttcatcatgtggaagcccactgtgctgtactgggtgatgggcgccggtctgctgatcagcgaattcgccggcaagaacggcttgcgcctgatgatgggcaagcagatcgaaatgcccgatccggtctggcgcaagctcacctgggcctggagcggcttcttcgccttcatgggcgcgctcaacctgttcgtcgcctaccacttcagcgaggacgtctgggtcaacttcaagctgttcggcggcatgggcctgatgctgctgttcgtgatcgcccagagcctgttcctggccaagtacatcgaggaaaagaaataa

SEQ ID NO: 144901 - protein, 177 aa, Chromobacterium violaceum ATCC 12472
MKFFTDLLPVLLFFGAYWLTRDMFVATGVAIAATAVMVAWAWFKHRKVDTMQWISLGLIVVLGGATLLLHDKHFIMWKPTVLYWVMGAGLLISEFAGKNGLRLMMGKQIEMPDPVWRKLTWAWSGFFAFMGALNLFVAYHFSEDVWVNFKLFGGMGLMLLFVIAQSLFLAKYIEEKK

SEQ ID NO: 144902 - DNA, 621 bp, Vibrio vulnificus YJ016
  CDS (1)..(621): transl_table=11
ttgagccagttttgtttagactgtgggcaattcaatcgacaggaacatttttgccacatgaagcaaatacttgattttattcctctaattatctttttcgccctctacaagatgtatgatatctatgttgcaacaggcgctttgattgcagcaacagccattcagatcgttgtcacctacgccttgtacaagaaagttgagaagatgcagttaattaccttcttaatggtggccatttttggtggcatgaccattttcctgcatgacgacaactttattaagtggaaagtgaccatcgtctacgccgtatttgccattggtttgacggtcagccatgttatgggcaaatcggccatcaaaggcatgttggggaaagagatcaccttgcctgagtcagtatgggcaaacattaactgggcgtgggttggctttttcaccttttgtgcagggctgaatatctatgtggcctaccagcttcctttagatgtttgggtgaattttaaagtctttggtttattagcggcgacgttggtttttaccgtcctcactggcggctatatttataaacatctccctaaagaacaaaatggccagtcatcggacgtgccaacggatgaataa

SEQ ID NO: 144903 - protein, 206 aa, Vibrio vulnificus YJ016
MSQFCLDCGQFNRQEHFCHMKQILDFIPLIIFFALYKMYDIYVATGALIAATAIQIVVTYALYKKVEKMQLITFLMVAIFGGMTIFLHDDNFIKWKVTIVYAVFAIGLTVSHVMGKSAIKGMLGKEITLPESVWANINWAWVGFFTFCAGLNIYVAYQLPLDVWVNFKVFGLLAATLVFTVLTGGYIYKHLPKEQNGQSSDVPTDE

SEQ ID NO: 144904 - DNA, 618 bp, Rhodopseudomonas palustris CGA009
  CDS (1)..(618): transl_table=11
atgacggacgacctgctcaagcccaatcggccgcacccgctgttcaagctggcgaccgagctcgggccgctgctggtgttcttcatcgtcaacgccaagtttcatctgttcgccgcgaccggcgccttcatggtggcggtggtcgcggccgtgatcgcgtcctacgtcgtcacccggcatgtgccggtgatggcgctggtcaccgctgtggtggtgctggtgttcggcaccctgacgctggtgctgcacgacgagaccttcatcaagatgaagccgaccatcgtgtactcgctgttcggcgcggtgctcgccggcgggctgctgttcggccgcagcttcatcgccatcatgttcgatcaggtgttcaacctgacggcggcgggctggcgcaagctgacgctgcgctgggcgctgttcttctttgcgatggcgctgctgaacgaagcggtgtggcggacgcagtcgaccgacttctgggtcaacttcaaggtgttcggcgtggtgccgcttaccatgctgttcgcgctgctgcagatgccgctgaccaagcgctacgcggctgaacccgccacgctcgaacagagcgcagccgacgaaggcgacgtgtcggggcggtga

SEQ ID NO: 144905 - protein, 205 aa, Rhodopseudomonas palustris CGA009
MTDDLLKPNRPHPLFKLATELGPLLVFFIVNAKFHLFAATGAFMVAVVAAVIASYVVTRHVPVMALVTAVVVLVFGTLTLVLHDETFIKMKPTIVYSLFGAVLAGGLLFGRSFIAIMFDQVFNLTAAGWRKLTLRWALFFFAMALLNEAVWRTQSTDFWVNFKVFGVVPLTMLFALLQMPLTKRYAAEPATLEQSAADEGDVSGR

SEQ ID NO: 144906 - DNA, 621 bp, Herminiimonas arsenicoxydans
  CDS (1)..(621)
atgaaatttctgttcgacctgttccctgtcattctttttttcgccgtcttcaaatggggcgaaggcaacgccgatgctgcacaggcattcggccagcaatttctgtccgggctggtttccggcggacaagtcacggtcacgcaagcacccatcctgcttgccaccgcaatcgccatcatcgccaccattttacaaatcggctacctgctgtcgcgccggaaaaaagtcgatggcacgctatggctatcgctggcaattatcgtgttttttggcggtgcaacgatttacttccacaatgaaactttcatcaagtggaaacctaccgtgctctactggtgctttgccgctgccctgttattcagccagattttcctgaataaaaacctgatccgcaccatgatggaaaaacagatgtcgctgccggatggcgtatggcgtcgtgtcaatctgtcctgggtcgccttcttcatcacgatgggtttgctgaatctctatgtcgccttcaatttctccaccgccgcatgggtgaatttcaagttgttcggcggcatgggattgatgtttgcattcatcatcatacaaagtttgctgttgtctaaatacctgaaagaaccgcaatga

SEQ ID NO: 144907 - protein, 206 aa, Herminiimonas arsenicoxydans
MKFLFDLFPVILFFAVFKWGEGNADAAQAFGQQFLSGLVSGGQVTVTQAPILLATAIAIIATILQIGYLLSRRKKVDGTLWLSLAIIVFFGGATIYFHNETFIKWKPTVLYWCFAAALLFSQIFLNKNLIRTMMEKQMSLPDGVWRRVNLSWVAFFITMGLLNLYVAFNFSTAAWVNFKLFGGMGLMFAFIIIQSLLLSKYLKEPQ

SEQ ID NO: 144908 - DNA, 531 bp, Burkholderia vietnamiensis G4
  CDS (1)..(531): transl_table=11
atgaaattcctgttcgatctgtttccgatcatcctgtttttcgccgccttcaaggtctggggcatcttcaccgccaccgccgtcgcgatcgtggcaacgctggcccaggtcgcgtgggtcgcgttccggcaccggaaagtcgacacgatgctgtgggtcagtctcggtgtgatcgtcgtgttcggcggcgccaccctcgtcctgcatgacgagaaattcattcaatggaaaccgactgtgctgtactggctgtttgcgatcgggctgctcgccgcgcgctatgcgttcggcaacaacctgatcgagaaaatgatgggcaagcagctcacgctgccgcaccccgtgtgggacaagctgaacgtcgcatgggcgctgttcttcgcggtgctcggcctcgcgaacctgtacgtggtgcacaacttcaccgaatcgcaatgggtgaacttcaagctgttcggcacgaccggcgcgatggtcgtgttcatcatcctgcagagcctgtggctcacgaaatatctgaaggacgagtga

SEQ ID NO: 144909 - protein, 176 aa, Burkholderia vietnamiensis G4
MKFLFDLFPIILFFAAFKVWGIFTATAVAIVATLAQVAWVAFRHRKVDTMLWVSLGVIVVFGGATLVLHDEKFIQWKPTVLYWLFAIGLLAARYAFGNNLIEKMMGKQLTLPHPVWDKLNVAWALFFAVLGLANLYVVHNFTESQWVNFKLFGTTGAMVVFIILQSLWLTKYLKDE

SEQ ID NO: 144910 - DNA, 603 bp, Bradyrhizobium sp. ORS278
  CDS (1)..(603): transl_table=11
atggacaagacccagccgcatccgctgttcaagctcgcgaccgaactcggtccgctgatcgtgttcttcttcgtcaacgccaagttcaatctgttcgccgcgactggcgccttcatggtcgcgatcatcgcggcgctgatcgcgtcctatgtcgtgactaggcacattccgctgatggcgctggtcactgccgtggtcgtgatcgtgttcggcacgctgacgctggtgctgcacgacgagaccttcatcaaggtcaagccgaccatcatctacggcctgttcgcggccgtgctcggcggcgggctggtgttcaaccgctcgttcatcgcgatcatgttcgatcagatgttcaacctgacgccggccggctggcgcatcctcaccttccgctgggcgctgttctttgccggaatggcggtgctgaacgagatcatctggcgcacgcagagcacggatttctgggtcggcttcaaggcgttcggcgtgctgccgctgaccatgatcttcgccatcgcccagatgccgctgatcaagcgctaccatcaggacccggcctcgctggaagccagcgacgcggcggaaggcgatgtgagcaaggggtag

SEQ ID NO: 144911 - protein, 200 aa, Bradyrhizobium sp. ORS278
MDKTQPHPLFKLATELGPLIVFFFVNAKFNLFAATGAFMVAIIAALIASYVVTRHIPLMALVTAVVVIVFGTLTLVLHDETFIKVKPTIIYGLFAAVLGGGLVFNRSFIAIMFDQMFNLTPAGWRILTFRWALFFAGMAVLNEIIWRTQSTDFWVGFKAFGVLPLTMIFAIAQMPLIKRYHQDPASLEASDAAEGDVSKG

SEQ ID NO: 144912 - DNA, 561 bp, Dichelobacter nodosus VCS1703A
  CDS (1)..(561): transl_table=11
atgcaagattttttgccggttgtcgcttttattgcggcttatgtcggcgcgcgattattgggcagtgcgcaagcgatgtatatcgccactgccgttttaatgctggttagcgtattacaaattatttattttaaatggcgccaaaaacccattgaaaaacgccactggctgactttagccgtgattttattgttgggcagcattaccttaattttccacaacgatttatttatcaaactcaaacccacgattttaaatattttaattgcaatcgtttttctgggttcgcaatttttcggacaaaaaaacctcaccaaagccatgttacacagcgtttttgatatgccggaacttttgtggcgcaaactcaattttgcgtgggtagggttctttttatttgaagcgggactgaatagcttcgtcgcgcttcgtttttctaatgatgtttacgttgcttttaaattttggggattattgttgttaacaatgctatttatgacggcgcaaatttttgttttaaaagattatttacgccgtgaaaacaatgatgatcacgcgtga

SEQ ID NO: 144913 - protein, 186 aa, Dichelobacter nodosus VCS1703A
MQDFLPVVAFIAAYVGARLLGSAQAMYIATAVLMLVSVLQIIYFKWRQKPIEKRHWLTLAVILLLGSITLIFHNDLFIKLKPTILNILIAIVFLGSQFFGQKNLTKAMLHSVFDMPELLWRKLNFAWVGFFLFEAGLNSFVALRFSNDVYVAFKFWGLLLLTMLFMTAQIFVLKDYLRRENNDDHA

SEQ ID NO: 144914 - DNA, 690 bp, Bartonella henselae str. Houston-1
  CDS (1)..(690): transl_table=11
atgaaaaaatctttttttgagcataattcatacaataaccacgattcaaaaaatatcaatactaatcaaaaagcacctctttcaccaacacttaaatttctcttagaaatggggccattagttattttttttcttgctaattataaaggcgaatggctgataaacaatattgaaatttttaaaagatttaataaacctctttttccggccacagctattttcatgatggcaattattgttgctttagtcttatcatggatacttgcgcgaaaaattcctattatgcctcttatctctgggatatttgttttggtctttggatctttaactctttggcttcataacgatacttttatcaaaatgaaaccgacaatcattaatagtttgtttgctcttgttctctttggtggtctgttttttaaaaaaccacttttgcgttatatttttgattccacttttaaacttgatgatttagggtggaaaaaacttacttatcgctgggcattttttttcatttttctcgctgttttaaatgaagtaatttggcgcaattttagcgataatttttggacaaattttaaagtctttgccattatgcctataacagttttttttatgttaacacaaatgcctcttataatgaaacattcaaaagatctttttaaagaagaggataaaactaattcttaa

SEQ ID NO: 144915 - protein, 229 aa, Bartonella henselae str. Houston-1
MKKSFFEHNSYNNHDSKNINTNQKAPLSPTLKFLLEMGPLVIFFLANYKGEWLINNIEIFKRFNKPLFPATAIFMMAIIVALVLSWILARKIPIMPLISGIFVLVFGSLTLWLHNDTFIKMKPTIINSLFALVLFGGLFFKKPLLRYIFDSTFKLDDLGWKKLTYRWAFFFIFLAVLNEVIWRNFSDNFWTNFKVFAIMPITVFFMLTQMPLIMKHSKDLFKEEDKTNS

SEQ ID NO: 144916 - DNA, 666 bp, Acinetobacter sp. ADP1
  CDS (1)..(666): transl_table=11
atgcatcttctatactatgctatccgtttgatctggtttagatactctaacatgaaagcacttttagactttgtgcccattattattttttattacttgttgaaaacagtagatcctaaagatagtcatcatccactactacagttgattggatatacaggcggaagtaataacaacgaagttttagtcgctacaacaggcttaatcatctcaatgatcgtgatttatggcgggttgtttatttatcaaaaattcaaactggaaaaacaacagtggattattttgatactgacgattgtgttaggtggtgtaactttagcattacgtgacgatacttacatcaaacttaaagcagtcctactcaatctcgcttttgctggtgcattcctactttcaccttacttcggtaaagataaaaaacctttaattcaacgtttatttgatccagttttagaattgactgcatcaggctggaaaaacttaaactatatttgggcagtaatgttcattgtcatgtccctgttgcattttttcttcgcatttattttcatgcaaggaaaatattggggagaatttactgcttttggtgacatgattgtcatgttttcctttattattattcagtttattgtgcttcgtaaacattttaaatcaccagatgcctaa

SEQ ID NO: 144917 - protein, 221 aa, Acinetobacter sp. ADP1
MHLLYYAIRLIWFRYSNMKALLDFVPIIIFYYLLKTVDPKDSHHPLLQLIGYTGGSNNNEVLVATTGLIISMIVIYGGLFIYQKFKLEKQQWIILILTIVLGGVTLALRDDTYIKLKAVLLNLAFAGAFLLSPYFGKDKKPLIQRLFDPVLELTASGWKNLNYIWAVMFIVMSLLHFFFAFIFMQGKYWGEFTAFGDMIVMFSFIIIQFIVLRKHFKSPDA

SEQ ID NO: 144918 - DNA, 612 bp, Silicibacter pomeroyi DSS-3
  CDS (1)..(612): transl_table=11
atggcagcggacaaagacatcaaccccatcctcaagcaggtgctggaactgggccccaccgtggcctttttcctgatctacctgaggctcaaggaaaagacctttcagatcgcgggcaccgattattccgggttcatcgtggcaacgctggtcttcatcccgatcctgctggcggcgatgggggtgctctgggcactgacgggcaagctcagccggatgcagatcttcaccgccttcatggtgatcttctttggtgggctcaccgcctggttcaatgacgagcggttcttcaagatgaagacgacgctggtctatggtgtcttcgcgatcctgctgggcatcgggctgatgcgggggcgctcttacctggcctatgtgctgggcgatgtgctgccgatgcgcgacgaaggctggatgatcctgacccggcggctgtgcggcgccttcaccgggctggcggtggcaaacgagctggtctggcgcaacatgtccaccgatctctgggtcaagatcgagaccttcggctttccgatcctcttgatgggcttcatcatgctgcaattcggcctgctgcaggcccatatgatcgaccccgaccaggaacagggctga

SEQ ID NO: 144919 - protein, 203 aa, Silicibacter pomeroyi DSS-3
MAADKDINPILKQVLELGPTVAFFLIYLRLKEKTFQIAGTDYSGFIVATLVFIPILLAAMGVLWALTGKLSRMQIFTAFMVIFFGGLTAWFNDERFFKMKTTLVYGVFAILLGIGLMRGRSYLAYVLGDVLPMRDEGWMILTRRLCGAFTGLAVANELVWRNMSTDLWVKIETFGFPILLMGFIMLQFGLLQAHMIDPDQEQG

SEQ ID NO: 144920 - DNA, 531 bp, Neisseria gonorrhoeae FA 1090
  CDS (1)..(531): transl_table=11
atgaaatttgtcagcgaccttttgtccgtcatcttgttttttgctacttataccgttaccaaaaatatgattgccgctgcggcggttgccttggttgcaggcgtggttcaggcggctttcctgtattggaagcataaaaggctggatacgatgcagtgggtcggactggtgctgattgtcgtattcggcggcgcaaccattgttttgggcgacagccgcttcattatgtggaagccgacagtattgttctggtgcggggcgttattcctgctgggcagccaccttgcgggtaaaaacggcttgaaagcgagtatcggcagggagattcagcttccggatgccgtatggggaaaattgacatatatgtgggtcggttttctgatttttatgggtattgccaactggtttgtgtttactaggtttgaagcgcaatgggttaactataagatgttcggttcgactgcgctgatgctttttttctttattattcagggtatttatctgagtacctatctgaaaaaggaggattga

SEQ ID NO: 144921 - protein, 176 aa, Neisseria gonorrhoeae FA 1090
MKFVSDLLSVILFFATYTVTKNMIAAAAVALVAGVVQAAFLYWKHKRLDTMQWVGLVLIVVFGGATIVLGDSRFIMWKPTVLFWCGALFLLGSHLAGKNGLKASIGREIQLPDAVWGKLTYMWVGFLIFMGIANWFVFTRFEAQWVNYKMFGSTALMLFFFIIQGIYLSTYLKKED

SEQ ID NO: 144922 - DNA, 636 bp, Pseudomonas syringae pv. syringae B728a
  CDS (1)..(636): transl_table=11
ttgttattatgccgccacatcctgcttctggctgccattgtgaaacaattcatcgacttcatcccgctgctgctgttcttcatcgtttacaaaaccgagccgcgtgccgtggatatcctcggcaatacctatatggtaggcggcattttcagtgcaacggcgatgctgatcatcagttcggtggtggtctacggcattctctacgtcaaacagcgcaagctggaaaaaagccagtggctcaccctggtggcgtgcctggtgttcggcagcctgaccctggccttccacagcgaaaccttccttaaatggaaagcgccggtggtcaactggctgtttgcagtcgccttcgccggcagtcatttcatcggcgaccgtccgcttatccagcgcatcatgggtcatgcactgaccctgccggcggcgatctggacgcggctcaacatcgcctggatcatattcttcctgttctgtggcgcagccaacctgtatgtggcgttcacttatcaggaattctgggtcgacttcaaagtattcggcagtctgggcatgaccctgatcttcctggtcggccaggggatctacctgtcacgccacctgcatgacaccactcccaatacgcccaaatccgaggactga

SEQ ID NO: 144923 - protein, 211 aa, Pseudomonas syringae pv. syringae B728a
MLLCRHILLLAAIVKQFIDFIPLLLFFIVYKTEPRAVDILGNTYMVGGIFSATAMLIISSVVVYGILYVKQRKLEKSQWLTLVACLVFGSLTLAFHSETFLKWKAPVVNWLFAVAFAGSHFIGDRPLIQRIMGHALTLPAAIWTRLNIAWIIFFLFCGAANLYVAFTYQEFWVDFKVFGSLGMTLIFLVGQGIYLSRHLHDTTPNTPKSED

SEQ ID NO: 144924 - DNA, 552 bp, Psychrobacter arcticus 273-4
  CDS (1)..(552): transl_table=11
atgaaagccttattagacttcattcctttaatcgcattttttattgctgctcgttacaatggtattttggcggcagccggcgcattgctcgttgccactatcgtcgtctatgcgattcactttgtgcgtcaaaaaggtaaattcgataaacaacaatgggtcgttttattgttaaccatcgttttttgcggtggcaccttgctgttacgtgacgatatttacctacgctggaaatcaccgattattaacggtatttttgcgctcacactattggtcagtgcagcgatcaataagcctctgatgcaattggcaatgaaagatgtcttctcactcacgatgagtggttggaaaaaactgaccatcgcatgggcggtgttttttgccatcatggctgtactacattatatcacggcatttactatgtctgatgaggcttggattaactttaaaacttatggctggattccgcttatgctggtatttgtggtcgctcagtttttgttattaaaaaagcatctgaaccctgcattaactgataagtctgctaaataa

SEQ ID NO: 144925 - protein, 183 aa, Psychrobacter arcticus 273-4
MKALLDFIPLIAFFIAARYNGILAAAGALLVATIVVYAIHFVRQKGKFDKQQWVVLLLTIVFCGGTLLLRDDIYLRWKSPIINGIFALTLLVSAAINKPLMQLAMKDVFSLTMSGWKKLTIAWAVFFAIMAVLHYITAFTMSDEAWINFKTYGWIPLMLVFVVAQFLLLKKHLNPALTDKSAK

SEQ ID NO: 144926 - DNA, 597 bp, Pseudomonas syringae pv. phaseolicola 1448A
  CDS (1)..(597): transl_table=11
atgaaacaattcatcgacttcatcccgctgctcctgtttttcatcgtttacaaaaccgagccgcgtgccgtggatatcctcggcaatacctatatggtaggcggcattttcagcgcaacggcgatgctgatcatcagttcggtggtggtctacggcattctttacctcaaacagcgcaagctggaaaaaagccagtggctcacactggtcgcctgtctggtgtttggcagtctgacactggccttccacagcgaaaccttcctgaaatggaaagccccggtggtcaactggctatttgccgtggctttcgccggcagtcatttcatcggtgaccgcccgattatccagcgcatcatgggccacgcattgaccctgccagcggcgatctggacccggctcaacatcgcctggatcgtattcttcctgttctgcggcgcggccaacctgtacgtggccttcacctatcaggaattctgggtcgacttcaaagtattcggcagcctgggcatgaccctgatcttcctggtcggccaggggatatacctgtcacgccatctgcacgacaccgcacccaatacgaccaaatccgaggactga

SEQ ID NO: 144927 - protein, 198 aa, Pseudomonas syringae pv. phaseolicola 1448A
MKQFIDFIPLLLFFIVYKTEPRAVDILGNTYMVGGIFSATAMLIISSVVVYGILYLKQRKLEKSQWLTLVACLVFGSLTLAFHSETFLKWKAPVVNWLFAVAFAGSHFIGDRPIIQRIMGHALTLPAAIWTRLNIAWIVFFLFCGAANLYVAFTYQEFWVDFKVFGSLGMTLIFLVGQGIYLSRHLHDTAPNTTKSED

SEQ ID NO: 144928 - DNA, 633 bp, Thiobacillus denitrificans ATCC 25259
  CDS (1)..(633): transl_table=11
atgaagaaactgctattcgacctctttcccgtcatcgtctttttcgtcgcctacaaaatcggtgacgcgaacgccgaagcgacgcgcgccttcctcggcggactcgggctgccgcaaccgacgggcggcgatcagaaaccgggaatctacctcgccacgctggtcgcgatcgtcgcgagcttcggtcagatcggctgggtcaagctgcgcggaggcaaggtcgagaccatgctctgggtcagtctcggcatcatcgtcgtcttcggtggcgccacgctctggctgcacgacgaaagcttcatcaagtggaagccgacggtgctgtactggatcttcgcgggcaccattttcggcgcggcgctcttcggccgcaacgtcatcaaaagcctgatggcgacgcagatggaacttcctgacccggtatggagtcggttgaacgcgagctggggaggattcttcgcgttcatgggggtggcaaacctgctggtcgcgttcaatttctcgaccgacgcctgggtcaacttcaagctgttcggaagcctggggctgatgctggtattcgtgatcggtcaaagcgtcatgctgacgcgctacctcgataaagccccgctggataaggaagaaaagccataa

SEQ ID NO: 144929 - protein, 210 aa, Thiobacillus denitrificans ATCC 25259
MKKLLFDLFPVIVFFVAYKIGDANAEATRAFLGGLGLPQPTGGDQKPGIYLATLVAIVASFGQIGWVKLRGGKVETMLWVSLGIIVVFGGATLWLHDESFIKWKPTVLYWIFAGTIFGAALFGRNVIKSLMATQMELPDPVWSRLNASWGGFFAFMGVANLLVAFNFSTDAWVNFKLFGSLGLMLVFVIGQSVMLTRYLDKAPLDKEEKP

SEQ ID NO: 144930 - DNA, 597 bp, Pseudomonas fluorescens PfO-1
  CDS (1)..(597): transl_table=11
atgaaacaattcatcgatttcatcccgcttctgctgttcttcatcgtctacaaactcgatccacgcaccgtcgacgttgccggccatgaactgacggtaggcggcatttacagtgccaccgccatgctgatcatcagctccctggtggtgtacggcgcgctcttcatcaagcagcgcaagctggagaagagccagtggctgaccctgattgcctgcctggtgttcggcagcctgacactggcctttcacagcgaaaccttcctgaaatggaaagccccggtggtcaactggctgttcgccctggccttcatcggcagccatttcatcggtgaccgcctgctgatcaagcgcatcatgggccacgcactgaccctgccggatccggtctggacccgactgaacatcgcctggatcgcctttttcctgttctgcggggccgccaacctgttcgtcgccttcaccttccagagcatctgggtggacttcaaggtgttcggcagcctgggcatgaccgtgctgttcctggtcggtcagggcatttacctgtcccgtcacctgcacgacgccgataccacaacgccaaaaaccgaggactga

SEQ ID NO: 144931 - protein, 198 aa, Pseudomonas fluorescens PfO-1
MKQFIDFIPLLLFFIVYKLDPRTVDVAGHELTVGGIYSATAMLIISSLVVYGALFIKQRKLEKSQWLTLIACLVFGSLTLAFHSETFLKWKAPVVNWLFALAFIGSHFIGDRLLIKRIMGHALTLPDPVWTRLNIAWIAFFLFCGAANLFVAFTFQSIWVDFKVFGSLGMTVLFLVGQGIYLSRHLHDADTTTPKTED

SEQ ID NO: 144932 - DNA, 603 bp, Rhodobacter sphaeroides 2.4.1
  CDS (1)..(603): transl_table=11
atggcagagcgcatcaacccggtggtcaaggcggtgctggaatggggcccgatcgcggccttcttcctcggctacgtcaagctgaaggacgagaccttcaccgtcgccggcaccgactatcaggggttcatcatcgtcacggcggccttcattccgctgatggtgatctgcaccggcctgctctggtggctctcgggcaagctctcgaagatgcaggtggccaccgtcgtgctggtcgtggtcttcggcggcctgtcggtctggctgaacgacgaccgcttcttcaagatgaagcccaccatgatctacctgctgttcggcgtgctgctcggaatcgggctcctgcgcgggcagagctggctccggctcgtgctggaagaggcgatcccgctgcaggacgagggctggatgatcctcacgcgccgggtcatggccttcttcttcgctctggccatcgccaacgaggcggtctggcggctgatgagcaccgacgcctgggtgaatttcaagaccttcggcctgcccttggcgatcttcgtcttcttcatgacccagagcggcctcttcaagcgctacaatccggagcggaaggacgaggcctga

SEQ ID NO: 144933 - protein, 200 aa, Rhodobacter sphaeroides 2.4.1
MAERINPVVKAVLEWGPIAAFFLGYVKLKDETFTVAGTDYQGFIIVTAAFIPLMVICTGLLWWLSGKLSKMQVATVVLVVVFGGLSVWLNDDRFFKMKPTMIYLLFGVLLGIGLLRGQSWLRLVLEEAIPLQDEGWMILTRRVMAFFFALAIANEAVWRLMSTDAWVNFKTFGLPLAIFVFFMTQSGLFKRYNPERKDEA

SEQ ID NO: 144934 - DNA, 531 bp, Burkholderia sp. 383
  CDS (1)..(531): transl_table=11
atgaaattcctgttcgatctgtttccgatcatcctgttttttgccgccttcaaggtctggggcatctttaccgctaccgccgtcgcgatcgtcgcgacgctggcccaggtcgcatgggttgccttccggcaccggaaggtcgacacgatgctgtgggtcagcctcggcgtgatcgtcgttttcggtggcgccaccctcgtcctgcatgacgagaaattcattcaatggaaaccgactgtgctgtactggctgtttgcgatcgggctgctcgccgcgcgctatgcgttcggcaacaacctgatcgagaagatgatgggcaagcagctcacgctgccgcaccccgtgtgggacaagctgaacgtcgcctgggcgctgttcttcgcggtgctcggcgtcgcgaacctgtacgtggtgcacaacttcaccgaatcgcaatgggtgaacttcaagctgttcggcacgacgggcgcgatggtcgtattcatcatcctgcaaagcctgtggctcacgaaatacctgaaggacgagtga

SEQ ID NO: 144935 - protein, 176 aa, Burkholderia sp. 383
MKFLFDLFPIILFFAAFKVWGIFTATAVAIVATLAQVAWVAFRHRKVDTMLWVSLGVIVVFGGATLVLHDEKFIQWKPTVLYWLFAIGLLAARYAFGNNLIEKMMGKQLTLPHPVWDKLNVAWALFFAVLGVANLYVVHNFTESQWVNFKLFGTTGAMVVFIILQSLWLTKYLKDE

SEQ ID NO: 144936 - DNA, 573 bp, Rhodospirillum rubrum ATCC 11170
  CDS (1)..(573): transl_table=11
atgaaccaattctccaaactggccctggaagcggggccgctgatcatcttcttcgtcgccaatgcgacgacgaatctgatcaccgccaccgcgatcttcgttgcggcgaccctggcctcgctggccctgtcgtgggcgttgctgcgcaaggtgccggtgatgccgctggtcggcggcgtgttcgtcgtcgtcttcggtggcctgacggtgtttcttggcgatgatctgttcatcaagatcaagccgaccatcgtcaatctgctgttcgccgccatcttgttcgtcggactggccaccggccgcctgttcatcaagctggtgctcgaaagcgccctggcgatgtccgaagccggctggcgggcgctgacctggcgctgggcgatctttttcgtcgttctggcgatcatcaatgaagcggtctggcggaacttcagttccgatacctgggtcgctttcaaggtctggggcatgatgcctttgaccatcgtcttcagcgccgcccagatccctttgctgctgcgccaccaacttcccgctccgccggccggccccgagggcgacggccgggcctga

SEQ ID NO: 144937 - protein, 190 aa, Rhodospirillum rubrum ATCC 11170
MNQFSKLALEAGPLIIFFVANATTNLITATAIFVAATLASLALSWALLRKVPVMPLVGGVFVVVFGGLTVFLGDDLFIKIKPTIVNLLFAAILFVGLATGRLFIKLVLESALAMSEAGWRALTWRWAIFFVVLAIINEAVWRNFSSDTWVAFKVWGMMPLTIVFSAAQIPLLLRHQLPAPPAGPEGDGRA

SEQ ID NO: 144938 - DNA, 531 bp, Burkholderia thailandensis E264
  CDS (1)..(531): transl_table=11
atgaaattcctgttcgatctgttcccgatcattctgttcttcgccgccttcaagctatggggcatcttcacggccaccgccgtcgcgattgccgcaacgctcgcgcaagtggcgtgggtcgcgttccgccaccgcaaggtcgacacgatgctgtgggtgagcctcggcgtgatcgtcgtgttcggcggcgcgacgctcgtgctgcatgacgaaaagttcatccagtggaagccgaccgtcctctactggctgttcgcggtcggcctcgtcgccgcgcgctacgcgttcggcaagaacctgatcgagaagatgatgggcaagcaactgacgctgcccgagcccgtctgggacaagctgaatctcgcatgggccgcgttcttcgcggcgctcggcgtgacgaacctgtacgtcgtgcgcaacttcaccgaatcgcagtgggtcaacttcaagctgttcggcacgacgggcgcgatcatcgtcttcgtgatcctgcaaagcctctggctcgcgaaatacctgaagggagaatga

SEQ ID NO: 144939 - protein, 176 aa, Burkholderia thailandensis E264
MKFLFDLFPIILFFAAFKLWGIFTATAVAIAATLAQVAWVAFRHRKVDTMLWVSLGVIVVFGGATLVLHDEKFIQWKPTVLYWLFAVGLVAARYAFGKNLIEKMMGKQLTLPEPVWDKLNLAWAAFFAALGVTNLYVVRNFTESQWVNFKLFGTTGAIIVFVILQSLWLAKYLKGE

SEQ ID NO: 144940 - DNA, 531 bp, Francisella tularensis subsp. holarctica
  CDS (1)..(531): transl_table=11
atgaataaaatgattaatgatttgcttccagcgattgtgttttttggtatctataagatatatgatattttttttgctgcagcagcactaattatagtaacgatagcacaagttatttgggaatatatagcccacagaaaagttgctaaaacacaaatttttatagctattttagtcgctatttttgggggtgctaccctatattttcataacgaagagtttataaaatggaaagtaagtataattaactggttaatggggattggtctaataattacgacgtatacaatgaaagaaacaccaatgcaaaaaattctcaaagacactatcgatctaaaagaacataaatggaaagaaatcaacaatatgtggggagcttattttaccgttctaggcacacttaatttatttgtagcgtatttcttctctactgatatttggatggattttaaactttttggtcttttaggcataacttttgtattcttaataatacaatctatctatttatccaaacatattaaaagataa

SEQ ID NO: 144941 - protein, 176 aa, Francisella tularensis subsp. holarctica
MNKMINDLLPAIVFFGIYKIYDIFFAAAALIIVTIAQVIWEYIAHRKVAKTQIFIAILVAIFGGATLYFHNEEFIKWKVSIINWLMGIGLIITTYTMKETPMQKILKDTIDLKEHKWKEINNMWGAYFTVLGTLNLFVAYFFSTDIWMDFKLFGLLGITFVFLIIQSIYLSKHIKR

SEQ ID NO: 144942 - DNA, 540 bp, Ralstonia metallidurans CH34
  CDS (1)..(540): transl_table=11
atgaaatttcttttcgacctgttcccggtcatcctttttttcgtcgccttcaagctgttcggcatctatcccgcgacggccgtggcgatcggcgcgacggtggtccagattgcctgggttcatttccgtcacggcaaggccgagcccatgcaatgggtcagcctggcgatcatcgccgtattcggtggcgccacgatcctgctgcacaacgagaccttcatcaagtggaaaccgacggtgctctactggctgttcgcggtcaccctgatcggctcggtcatcggatggcgcaagaaccttatccgcgccatgatggaaaagcaggtgacgctgcccgaaccgatgtggggccgcctcaacgtcgcatgggcgggctttttcgccgtgatgggcgtgctcaacctgtatgtggcgtaccagttttcgaccgacacctgggtcaacttcaagctgttcggcagcatgggcctgatgctggtgttcattgtggcgcagagtatctggctgtcgcgccatatccaggaaaccccgtccgagtaa

SEQ ID NO: 144943 - protein, 179 aa, Ralstonia metallidurans CH34
MKFLFDLFPVILFFVAFKLFGIYPATAVAIGATVVQIAWVHFRHGKAEPMQWVSLAIIAVFGGATILLHNETFIKWKPTVLYWLFAVTLIGSVIGWRKNLIRAMMEKQVTLPEPMWGRLNVAWAGFFAVMGVLNLYVAYQFSTDTWVNFKLFGSMGLMLVFIVAQSIWLSRHIQETPSE

SEQ ID NO: 144944 - DNA, 663 bp, Mesorhizobium sp. BNC1
  CDS (1)..(663): transl_table=11
atggcggacgagaatacgatcttcgagcgcgatccgtctgatcccaagcgcaaggaaatgaattcgctgctcaagctggcgcttgagctcgggccgctgctcgtcttttttttcgccaacacgcgcggcgagtggctggtggagcgcatcccggcgcttggcagcctcggcggaccgcttttcatcgccactgcacttttcatggcggcgacggccatctcgctcacggtctcatgggcgctcacgcgcacgctgcccatcatgccgctcgtgtccggcatcgtggtgttcgtgttcggcgcgttgacgctctacctgcacaacgaaaccttcatcaaaatgaagcccactatcgtcaacgcgctgtttgccacggtgcttctgggtgggctcgccttcggaaagtccctgcttggctatgtcttcgattccgccttcaagctcgactcggaaggctggcgcaagctcacgctgcgctgggggctgttcttcatcttcctggcggttaccaacgaggtggtctggcgctccttttcgaccgacgcctgggtggccttcaaggtgtggggcatcatgcccattaccatcatcttcaccatgagccagatgccgctgatcatgcggcactcgctggaggagcggagtaagggagtaggggagtag

SEQ ID NO: 144945 - protein, 220 aa, Mesorhizobium sp. BNC1
MADENTIFERDPSDPKRKEMNSLLKLALELGPLLVFFFANTRGEWLVERIPALGSLGGPLFIATALFMAATAISLTVSWALTRTLPIMPLVSGIVVFVFGALTLYLHNETFIKMKPTIVNALFATVLLGGLAFGKSLLGYVFDSAFKLDSEGWRKLTLRWGLFFIFLAVTNEVVWRSFSTDAWVAFKVWGIMPITIIFTMSQMPLIMRHSLEERSKGVGE

SEQ ID NO: 144946 - DNA, 594 bp, Magnetococcus sp. MC-1
  CDS (1)..(594): transl_table=11
atgcgctttgcactggaactgttggccattgtggtcttttttgtggtttataagctcgatggtatctatagcgccaccgctgctttgatcatcatggtgctgctgaatgtcttttaccactggtttaaacaccgccatgtaccctcgatgatgtggatcaccctgattttggtgatgctgtttggcggtgccacgctgattttccacgatcccctgtttatcaagtggaagccctcgattttacaatgggtgttggcctctggttttctggcaagccatctgattggtaaacgggtgctggtggcacgcatgctggataaccagatcagcatgccgagcctacattggcgtcgtctgaacgcagcttgggtgctatttttgctcttttcaggtgcgcttaacctgtacgtcgcctacaccttctccgaagagatttgggtcagttttaagctgtttgggttgatgggcctaaccatcctctttttaatcggccaagccttctatatgtcccgtcatggtagtgaggtgagggtggaagagcgcaaagaggggatgatcgaggcagaagagacggtggaaaatcggccagaatag

SEQ ID NO: 144947 - protein, 197 aa, Magnetococcus sp. MC-1
MRFALELLAIVVFFVVYKLDGIYSATAALIIMVLLNVFYHWFKHRHVPSMMWITLILVMLFGGATLIFHDPLFIKWKPSILQWVLASGFLASHLIGKRVLVARMLDNQISMPSLHWRRLNAAWVLFLLFSGALNLYVAYTFSEEIWVSFKLFGLMGLTILFLIGQAFYMSRHGSEVRVEERKEGMIEAEETVENRPE

SEQ ID NO: 144948 - DNA, 609 bp, Azoarcus sp. BH72
  CDS (1)..(609): transl_table=11
atgaagttctttctcgacctccttccggtcattcttttcttcgtcgcctacaagtttgccggggcggcgccggatgactcccacgccctcgtcgcccagttcctcggcgcagggatttcacctagccaggcccccatcctgatcgccaccgcggtcgcgatcgcggcaacgctggcccaggtgctcatcgtctggttgcgccatggcaaggtggacaagatgctgtgggtgagcctggccatcatcaccctgttcggcggcgccaccctggtcttccacaatccgaccttcatcaagtggaagcccaccgtcttctactggacctttgccggtgcgctcgcggtgtcggcgctgctcttccgccgcaacctcgtacaaaagatgctcgaagcccagatccgtctgcccgcccccgtctggcagcgtctcaacctggcgtggatcggcttcttcacgctaatgggcttcctcaacctttacgtcgcctacggctattccgaagaggcctgggtcaatttcaaactgttcggggccatgggcttgatgctggcctttttccttggacagggtttctatctgtcgagacacctcgaagaggacgcgaaataa

SEQ ID NO: 144949 - protein, 202 aa, Azoarcus sp. BH72
MKFFLDLLPVILFFVAYKFAGAAPDDSHALVAQFLGAGISPSQAPILIATAVAIAATLAQVLIVWLRHGKVDKMLWVSLAIITLFGGATLVFHNPTFIKWKPTVFYWTFAGALAVSALLFRRNLVQKMLEAQIRLPAPVWQRLNLAWIGFFTLMGFLNLYVAYGYSEEAWVNFKLFGAMGLMLAFFLGQGFYLSRHLEEDAK

SEQ ID NO: 144950 - DNA, 549 bp, Neisseria meningitidis FAM18
  CDS (1)..(549): transl_table=11
ttgctttctcatttggatatgaaattcgtcagcgaccttttgtctgtcatcttgttttttgctacttataccgttaccaaaaatatgattgccgctacggcggttgccttggttgccggtgtggttcaggcggcttttctgtattggaaatataaaaagctggatacgatgcagtgggtcggactggtgctgattgtcgtattcggcggcgcaaccattgttttgggcgacagccgcttcattatgtggaagccgagcgttttgttttggctgggtgcgctgttcctgtggggcagccacctcgccggtaaaaacggcttgaaggcgagtatcggcagggagattcagcttccggatgccgtatgggcgaaattgacgtatatgtgggtcggtttcctgatttttatgggtatcgccaactggtttgtgtttacccggttcgagtcgcaatgggtcaactataaaatgttcggctcgactgcactgatgcttgttttctttattattcagggtatttatctgagtacctgtctgaaaaaggaggattga

SEQ ID NO: 144951 - protein, 182 aa, Neisseria meningitidis FAM18
MLSHLDMKFVSDLLSVILFFATYTVTKNMIAATAVALVAGVVQAAFLYWKYKKLDTMQWVGLVLIVVFGGATIVLGDSRFIMWKPSVLFWLGALFLWGSHLAGKNGLKASIGREIQLPDAVWAKLTYMWVGFLIFMGIANWFVFTRFESQWVNYKMFGSTALMLVFFIIQGIYLSTCLKKED

SEQ ID NO: 144952 - DNA, 621 bp, Magnetospirillum magnetotacticum MS-1
  CDS (1)..(621): transl_table=11
atgaaggtcgagagcattccgccgcgccggcaattgccgccgctcctcaagctggcgctggagatgggaccgctcgtggttttcttcctcggcaatgcctatgccgagcgcctcggcgtaccggcggagagcaagctcttcgtcgccaccggcgtcttcatcgtcgccaccatgatcgcgctcgccgtgcacttcgcactgctgcggcggttgccgatcatgccgctcgtctccggcgccgtcgtcctcgtcttcggcgggctgacgctggccttgcaggacaagaccttcatcatgatgaagccgaccatcgtgaactcgctgttcggcctcgtcctgctcggggggctcgtcttcaacaagtcgttgctctcggtgctgctcgacagcatgttcgccctcaccgaggagggctggcgcaagctcaccttccgctgggggctgttcttcctggcgctcgccgccctcaacgaggtcgtctggcggacgcagacggaagatttctgggtgagcttcaaggtgttcggcatcatgccgctcaccatcgtcttcgccctggcccagacaccgctgctgttgcgccacgagcgcaaggacgaggcggcggcgcgggcgaactga

SEQ ID NO: 144953 - protein, 206 aa, Magnetospirillum magnetotacticum MS-1
MKVESIPPRRQLPPLLKLALEMGPLVVFFLGNAYAERLGVPAESKLFVATGVFIVATMIALAVHFALLRRLPIMPLVSGAVVLVFGGLTLALQDKTFIMMKPTIVNSLFGLVLLGGLVFNKSLLSVLLDSMFALTEEGWRKLTFRWGLFFLALAALNEVVWRTQTEDFWVSFKVFGIMPLTIVFALAQTPLLLRHERKDEAAARAN

SEQ ID NO: 144954 - DNA, 573 bp, Magnetospirillum magnetotacticum MS-1
  CDS (1)..(573): transl_table=11
atgagcgcgccgcaggcccccaaatggctgaagcccgccgtggatttcggtccgctggcggtgtttctggggctttactggcttaagggcctgttgcccgccaccgcggcgctgatggcggccacggcggtggctttggtcctgtcctatgtcttcacccgcaaggtcgccttgatgccgctggtcaccgccttggtggtgggcgtgttcggcgggctgaccctgtggctgaatgacgaaaccttcatcatgatgaagccgaccatcgtctatgccctcttcgccctggtgctgggcggcgggctggccctgaaccgtcccacggtcaaggtggtgctgggcgaggcgctgcatctggacgatgacggctggcgggtcttgtcgctgcgcttttgcctgttctttctggccatggccgggctcaacgaggtggtgcgcagagtggcgtcgctcgacacctgggtcttgtggaaggtgccgggcagcatggccttgaccttcatcttcatgatgttccagatgccgctgatccgccgccacatgcccgacgagaaggccccgaccgggcaataa

SEQ ID NO: 144955 - protein, 190 aa, Magnetospirillum magnetotacticum MS-1
MSAPQAPKWLKPAVDFGPLAVFLGLYWLKGLLPATAALMAATAVALVLSYVFTRKVALMPLVTALVVGVFGGLTLWLNDETFIMMKPTIVYALFALVLGGGLALNRPTVKVVLGEALHLDDDGWRVLSLRFCLFFLAMAGLNEVVRRVASLDTWVLWKVPGSMALTFIFMMFQMPLIRRHMPDEKAPTGQ

SEQ ID NO: 144956 - DNA, 609 bp, Roseovarius nubinhibens ISM
  CDS (1)..(609): transl_table=11
atggccgagaagaaaatcaacggcgccctgaagaccgcgctcgaactgggcccgatcgcggcgttcttcgtcgcctatctctggctcaaggacgaggtcttcatcatcggcggcactgaatacgacggctttgtcgtggtcaccgcgggctttatcccggtcttcctcgcctctatcgcggcgctctggtggctcaccggtcacctgtcgcggatgcaggtggtcacggcggtgctcatcgtcgtctttggcgggctcagtgtctggttcaacgatccccgcttcttcaagatgaagccgacgatcatctacctcctcttcggcggcgtgctcggcgcgggcctcctgcgcggccaatcctacctgcaatcgctgatggacgggctgatgccgctcacccatgaaggctggatgatcctgacccgccggctgatgatctttttcttcggcctcgccatcctcaacgaagtgatctggcgcagcatgaccgaagaaacctgggtctatttcaagaccttcggcctgacggcggcgatctttctcttcttcatcacccagggcaaggtcttctcagcccattccaccgaagagaaaaaagagggcgactaa

SEQ ID NO: 144957 - protein, 202 aa, Roseovarius nubinhibens ISM
MAEKKINGALKTALELGPIAAFFVAYLWLKDEVFIIGGTEYDGFVVVTAGFIPVFLASIAALWWLTGHLSRMQVVTAVLIVVFGGLSVWFNDPRFFKMKPTIIYLLFGGVLGAGLLRGQSYLQSLMDGLMPLTHEGWMILTRRLMIFFFGLAILNEVIWRSMTEETWVYFKTFGLTAAIFLFFITQGKVFSAHSTEEKKEGD

SEQ ID NO: 144958 - DNA, 609 bp, Oceanicola batsensis HTCC2597
  CDS (1)..(609): transl_table=11
atgaccgagaaacgaaatgtgaatccgtggctgaagaccgggctcgaactggggcccatcgtgctcttcttcgtggcctacctccggctcaaggaccggaccttcctgatcggcggggccgagtatgacgggttcatcctcgtcaccgcggccttcattccgctgatcctgctgacgaccgcgatcctgtggaagctgacgggccacctgtcgcggatgcagatcgtgacggcggtgctggtgaccgtcttcggcgggctctcggtctggctgaacgacgaccggttcttcaagatgaaaccgacgctgatctacctgatcttcggcgggctgctgggcgcggggctgctgcgcggccagagctggctgcgcatggtgatggaggaactgatgccgctggatcacgagggctggatgaagttgacccgccggctctgcgccttcttcctggcgctggcgctcgccaacgaggtcgtctggcggacccagaccaccgaaatctgggtctacttcaaaaccttcggcctgaccgcggcgctctttgtcttcttcatggcgcaggggcggctcttcaaggagcatgcgctgcccgaggaggacaggagatga

SEQ ID NO: 144959 - protein, 202 aa, Oceanicola batsensis HTCC2597
MTEKRNVNPWLKTGLELGPIVLFFVAYLRLKDRTFLIGGAEYDGFILVTAAFIPLILLTTAILWKLTGHLSRMQIVTAVLVTVFGGLSVWLNDDRFFKMKPTLIYLIFGGLLGAGLLRGQSWLRMVMEELMPLDHEGWMKLTRRLCAFFLALALANEVVWRTQTTEIWVYFKTFGLTAALFVFFMAQGRLFKEHALPEEDRR

SEQ ID NO: 144960 - DNA, 648 bp, Erythrobacter sp. NAP1
  CDS (1)..(648): transl_table=11
atggcgagcgaagaagccaagaaagccggatcaagctggctcaacgtcgcggtcgattacgggccgttgctggtgtttctcggcgtctatcgctggaacgcgcctgccgatcccaatccagcgggtgaactgctcgcgatcatgtacggcaccggtgccttcatggtcgcagcgattgccgcgctgctcatctccaagtggcggctcggcaaggtttcaccgatgctgtggttctcgaccgcgctgatcgtcggcttcggcgcgctgacgatcttcttcggcgatccggtgttcgtgcagctcaagcccacgatcatctacgcggtcttcggcgtcgcgctgctcgcagggttctacatgggccgcgcgttgctcaagatcctgctcgaagccgcgttcgaggggctatccgacaaaggctggctcaagctgtcgcgcaactggggggtgtttttcctcgtgctcgcggtcctcaacgaagtcctgcgcgcccagatgagctttgaaggctggctttgggcaaaattctgggtgttcatgccgctgagcttccttttcaccttcacccagttgccgatgctcatgaagcacgggctgagccttgagggtgaggaagaagcgatcaaggacgaaccgcccacggcgtga

SEQ ID NO: 144961 - protein, 215 aa, Erythrobacter sp. NAP1
MASEEAKKAGSSWLNVAVDYGPLLVFLGVYRWNAPADPNPAGELLAIMYGTGAFMVAAIAALLISKWRLGKVSPMLWFSTALIVGFGALTIFFGDPVFVQLKPTIIYAVFGVALLAGFYMGRALLKILLEAAFEGLSDKGWLKLSRNWGVFFLVLAVLNEVLRAQMSFEGWLWAKFWVFMPLSFLFTFTQLPMLMKHGLSLEGEEEAIKDEPPTA

SEQ ID NO: 144962 - DNA, 564 bp, Vibrio sp. Ex25
  CDS (1)..(564): transl_table=11
atgaagcaaatcctagattttatcccactcatcgtcttcttcgctttgtacaagatgtacgacatctacgcagcaacaggagcgctgatcgttgcaacggcaattcagcttgtcgtcacctatgctctgtataaaaaagtcgagaaaatgcagctaattacgttcgttatcgtgacgatatttggcagcatgacccttttcttccacgacgacaatttcataaaatggaaagtcaccatcatttatgtgattctagctatcggtttagcagcgagtcacgcaatggggaaatcggccattaaaggcatgttgggcaaagaaatttcactacctgatgctatttgggcgaagatcaactgggcttgggtcggcttcttctcattctttgctggtctgaacatttatatcgcttacgagctaccactggatgtttgggtcaacttcaaagtattcggaatgttgattgcgacatttgcctacatgattgcgactggcttctacatttacaaacacatgccaaaagaacaaaaaaataactcatccgatgtgtcgactgatgattaa

SEQ ID NO: 144963 - protein, 187 aa, Vibrio sp. Ex25
MKQILDFIPLIVFFALYKMYDIYAATGALIVATAIQLVVTYALYKKVEKMQLITFVIVTIFGSMTLFFHDDNFIKWKVTIIYVILAIGLAASHAMGKSAIKGMLGKEISLPDAIWAKINWAWVGFFSFFAGLNIYIAYELPLDVWVNFKVFGMLIATFAYMIATGFYIYKHMPKEQKNNSSDVSTDD

SEQ ID NO: 144964 - DNA, 600 bp, marine gamma proteobacterium HTCC2080
  CDS (1)..(600): transl_table=11
atgaaacagctggccgaattcgttcccattgttctattttttgtcatttaccaaatggatgggagcacgattaaccttctgggctggtcgcatacagttgatgggatatacagcgcgaccaaggccttgcttatggcgacgcttctcatactgccgctgcaatggtggttaacagggtatctggaaaagcgcctgctatggacgagtgctgccgtgttcgtttttggcggcgctacgttgttttttaaaaacgagcttttcattcagtggaagccgaccgtctttaattggggcatggcaatcgctttcgccatttcacaattttggggcgacaaaaatctaattgagcggcttatgggcgcgcaaattcagatacctcaggctatttggcaacgaatttgctgggtatgggtgggacatttttctatggttggcgcactcaacttatttgtggcttaccaattttcagagtcgacctgggtatcctacaagttgtggtcgggtataggctttacgttatttataatggtcatcacaatgatcatgatcgggccttgggtcaaagctgagagtgtccgtcaagaccgcggtgaatcatga

SEQ ID NO: 144965 - protein, 199 aa, marine gamma proteobacterium HTCC2080
MKQLAEFVPIVLFFVIYQMDGSTINLLGWSHTVDGIYSATKALLMATLLILPLQWWLTGYLEKRLLWTSAAVFVFGGATLFFKNELFIQWKPTVFNWGMAIAFAISQFWGDKNLIERLMGAQIQIPQAIWQRICWVWVGHFSMVGALNLFVAYQFSESTWVSYKLWSGIGFTLFIMVITMIMIGPWVKAESVRQDRGES

SEQ ID NO: 144966 - DNA, 663 bp, Pseudomonas putida GB-1
  CDS (1)..(663): transl_table=11
atgggggagcgctttcgctggattcgatgtttgttattatgccgtcacatcccgattctggctgccattgtgaaacaattcatcgatttcatcccgctgctgctgttcttcatcgtctacaagctcgacccgcgccccatggaggtcgccggccacagcttcgaattcggcggtatctacagcgccacggccatgctgatcatcagctcgctggtggtgtacggtgcgctgttcctgcgccagcgcaagctgaaaaagggccagtggctgaccctgatcgcctgcctggtgtttggcggcctgaccctgaccttccacagcgaaaccttcctcaagtggaaagcacccgtggtgaactggttgttcgccctgggctttgccggcagccacttcatcggcgaccgggtgctgatcaagcgcatcatgggccatgccctgaccctgccggatgccatctggtcgcgcttgaacctggcgtggatcgctttcttcctgttctgcggcgcggccaacctgttcgtcgccttcaccttccaggacttctgggtggacttcaaggtgttcggcagcctgggcatgaccgtgatcttcctggtggcgcaaggcgtgtacctgtcgcgccacctgcacgacgacccttctacctccaaacccaaggattga

SEQ ID NO: 144967 - protein, 220 aa, Pseudomonas putida GB-1
MGERFRWIRCLLLCRHIPILAAIVKQFIDFIPLLLFFIVYKLDPRPMEVAGHSFEFGGIYSATAMLIISSLVVYGALFLRQRKLKKGQWLTLIACLVFGGLTLTFHSETFLKWKAPVVNWLFALGFAGSHFIGDRVLIKRIMGHALTLPDAIWSRLNLAWIAFFLFCGAANLFVAFTFQDFWVDFKVFGSLGMTVIFLVAQGVYLSRHLHDDPSTSKPKD

SEQ ID NO: 144968 - DNA, 546 bp, Coxiella burnetii RSA 493
  CDS (1)..(546): transl_table=11
atgaaatttttatttgattattttcccatcatttgttttttcgttgcttataaattctggggtatctatatcgccacagcagcggcaatggtggtttctgctttacaagtcgccatttactggattcgcttccgccgctttgaaaaatttcatgtaattaccttaatctttatcttattgctcggcagtttcacactggtttttcacaatgctattttcattaagtggaaacccacgattgtttattggatatttgccattgtgttattcggtagccatttttttggaaagcatacactcgtgcatcgaatgctaaaagaaaaaatcgagctgcctgcgaaaacgtggtcacgcttaaatttaagctgggctttattttttttaattctcggggttttgaatctatttgtggtttataattttgatactaacacgtgggtcaattttaaattgtttggcactctagtgctgacgttagtttttatcctcgggcaagctttttatattgcccgacatgcccaaaacttaaaaatgaatagcagataa

SEQ ID NO: 144969 - protein, 181 aa, Coxiella burnetii RSA 493
MKFLFDYFPIICFFVAYKFWGIYIATAAAMVVSALQVAIYWIRFRRFEKFHVITLIFILLLGSFTLVFHNAIFIKWKPTIVYWIFAIVLFGSHFFGKHTLVHRMLKEKIELPAKTWSRLNLSWALFFLILGVLNLFVVYNFDTNTWVNFKLFGTLVLTLVFILGQAFYIARHAQNLKMNSR

SEQ ID NO: 144970 - DNA, 546 bp, Nitrosomonas europaea ATCC 19718
  CDS (1)..(546): transl_table=11
atgaagtttctttttgatctttttccggtaatcctgtttttcattacgtataaagtctacggtatttataacgcgacagcggttgcaatcattgccacattcgtacaaattggctgggtgtggttgcgccatcgcaaggttgacaatatgttgtgggtgagccttgccatcattgtcgtttttggaggggcaacactgatttttcaggatgaaacttttatcaaatggaaaccgactgtgctttattggctgtttgccgcggttctatttctggcaaatcagattttcgaaaaaaatctgatccgggtcatgatgaaagatcaaatcaggttgcctgagccggtatggcctcgtctaaacgccagttgggcagtattttttagtgtcatggggatcatcaatctttatgtggcctataactattcgacggatacctgggtaaatttcaagttgtttggttttatgggactcatgtttgctttcgttatcctgcaggcaatattgctggggaagtacgtggaaaaaagtgatgatcaggaaatctga

SEQ ID NO: 144971 - protein, 181 aa, Nitrosomonas europaea ATCC 19718
MKFLFDLFPVILFFITYKVYGIYNATAVAIIATFVQIGWVWLRHRKVDNMLWVSLAIIVVFGGATLIFQDETFIKWKPTVLYWLFAAVLFLANQIFEKNLIRVMMKDQIRLPEPVWPRLNASWAVFFSVMGIINLYVAYNYSTDTWVNFKLFGFMGLMFAFVILQAILLGKYVEKSDDQEI

SEQ ID NO: 144972 - DNA, 570 bp, Bordetella bronchiseptica RB50
  CDS (1)..(570): transl_table=11
atgaagaagttcctgtttgacctgtttccgctgatactgtttttcgttgcctatcggtacgccgatatttatgcggccacggccgtggcgattaccgcgtccatcgcccagatactctggctgcgcctcaccggcaaggccatcgagggcatgcactggataaacctgtcggtcatcgtgattttcggcggcgccaccctgtggctgcacagcgacgtcttcatcaagtggaagcccaccgtgctgtactggctgttcggcggcgcgctgctgggcgcgcggtacctgttcgggcgcaacctggtccgccgcctgctgggcaagcagatcgcgttgcccgatccggtctgggagcgcctgaacctgagctgggcgctgttcttcgtggcggccggcgcggtcaacctgtatgtggccttctccggccacttcaccgaatcccaatgggtcaatttcaaggtcttcggcctgatgggcctgctggtcgctttcgtcatcgcccagtcgctgtggctgggcaagcatctgcaggcgtcggacacacccgatcaagatcgaaacgaagactga

SEQ ID NO: 144973 - protein, 189 aa, Bordetella bronchiseptica RB50
MKKFLFDLFPLILFFVAYRYADIYAATAVAITASIAQILWLRLTGKAIEGMHWINLSVIVIFGGATLWLHSDVFIKWKPTVLYWLFGGALLGARYLFGRNLVRRLLGKQIALPDPVWERLNLSWALFFVAAGAVNLYVAFSGHFTESQWVNFKVFGLMGLLVAFVIAQSLWLGKHLQASDTPDQDRNED

SEQ ID NO: 144974 - DNA, 537 bp, Photorhabdus luminescens subsp. laumondii TTO1
  CDS (1)..(537): transl_table=11
atgaaacaacttttagactttctacctctagtcgtcttttttgtcgtatacaagatgtatgacattttctacgcttccggggcgttgatcgccgctaccggtttagctgtcgcgatgacttatttcatctaccggaaagtagagaaagcctccctgatcacgtttatcatggttgctgttttcggtacgttaactttagctttccacagtgatctatttatcaaatggaaagtcactgtaatttatgcattattcgcattagctttgctaggcagccagtggtttatgaaaaaaccacttattcagaaaatgctaggaaaagagttaattttacccgatcttgtctggaataaactcaatatggcatgggcgctgttttttacagcctgcgcgctggctaatatttatgtcgcattctggttaccacaagatgtctgggttaattttaaagtatttggtctgactgccctgactctggttttcaccgtgctcagtgtagtatatatttaccgtcacctgccacgcgaacagaagtaa

SEQ ID NO: 144975 - protein, 178 aa, Photorhabdus luminescens subsp. laumondii TTO1
MKQLLDFLPLVVFFVVYKMYDIFYASGALIAATGLAVAMTYFIYRKVEKASLITFIMVAVFGTLTLAFHSDLFIKWKVTVIYALFALALLGSQWFMKKPLIQKMLGKELILPDLVWNKLNMAWALFFTACALANIYVAFWLPQDVWVNFKVFGLTALTLVFTVLSVVYIYRHLPREQK

SEQ ID NO: 144976 - DNA, 690 bp, Bartonella quintana str. Toulouse
  CDS (1)..(690): transl_table=11
atgaatcagcatttttctgaacctaatttatctaataatctcgattcgaaaaatattgacggttatcaaaaaccgtctctttcaccaatatttaaatttttcttggaaatgggtccattggtcatcttttttcttgccaattataagggtgaatggctcataaacaatattggattttttaaaagctttgataaacctatttttccggcaacagcttttttcatggtagcaattctttttactctgagcttatcgtggttccttatacgaaaaattcctataatgcctcttatttcagggatatttgttttggtctttggatttttaacccttttgcttcacaacgatatttttatcaagatgaaaccgacaatcattaatagcttattcgctcttattctctttagtggtatgttttttaagaaaccacttttgcgttatatttttgattctacttttaaacttgatgatttggggtggcaaaaacttacccatcgttgggcattttttttcatttttcttgctgttttgaatgaagtcatttggcgcaattttagcgataatttttggactagttttaaagtgtttggtatcatacctataacaattttcttcatgtttacacagatgcccattatacttaaacattcaaaggatcttttgaaagaagaggaaaaattcgattcttaa

SEQ ID NO: 144977 - protein, 229 aa, Bartonella quintana str. Toulouse
MNQHFSEPNLSNNLDSKNIDGYQKPSLSPIFKFFLEMGPLVIFFLANYKGEWLINNIGFFKSFDKPIFPATAFFMVAILFTLSLSWFLIRKIPIMPLISGIFVLVFGFLTLLLHNDIFIKMKPTIINSLFALILFSGMFFKKPLLRYIFDSTFKLDDLGWQKLTHRWAFFFIFLAVLNEVIWRNFSDNFWTSFKVFGIIPITIFFMFTQMPIILKHSKDLLKEEEKFDS

SEQ ID NO: 144978 - DNA, 567 bp, Erwinia carotovora subsp. atroseptica SCRI1043
  CDS (1)..(567): transl_table=11
atgaagcaacttcttgattttataccgttggtcgttttttttgcggcctataaactttatgacatctatatcgcatcgggtgcactgattgcggcaaccgcgctgtcactcgtggtcacctgggtgatgtatcgtaaaatagagaaaatgacgctagtcacctttgcgatggtcgtcattttcggttcgctaacgctggtgttccataacgacctgttcatcaagtggaaagtcaccatcatctacggcttgttcgccgttgccctgctggttagccaatttgttatgaaacagaccctaattcagaagatgctgggtaaagaactcactttgccgcagcccgtctggggaaaattgaatttcgcgtgggccatgttctttctggtgtgtgggttggttaacatctatattgctttctggctaccgcaaagcgtttgggtaaatttcaaagtctttgggctgaccggtgtgacgctgctgtttacgctgatttgtggcgtctatatttatcgccacttgcctaacgaccaagagaaatcagaagaagaaaaaagcgagcaaccgtaa

SEQ ID NO: 144979 - protein, 188 aa, Erwinia carotovora subsp. atroseptica SCRI1043
MKQLLDFIPLVVFFAAYKLYDIYIASGALIAATALSLVVTWVMYRKIEKMTLVTFAMVVIFGSLTLVFHNDLFIKWKVTIIYGLFAVALLVSQFVMKQTLIQKMLGKELTLPQPVWGKLNFAWAMFFLVCGLVNIYIAFWLPQSVWVNFKVFGLTGVTLLFTLICGVYIYRHLPNDQEKSEEEKSEQP

SEQ ID NO: 144980 - DNA, 543 bp, Mannheimia succiniciproducens MBEL55E
  CDS (1)..(543): transl_table=11
atgaaacaacttcttgaattcattcctttaattctcttttttgtagtttataaattagccggcatccgggaggctgcgatcgcgttaatcattgcgacaatcttccaaatgctcatattaaaattaaaatacggcaaaattgaaaaacagcaaatcatcatgggaatcgccgttgttttctttggtacgttaacggcatattttaataaagtggaatatctgcaatggaaagtcactattgtatatgcgctatttgcattgattcttttaatcagtcaatacggctttaaaaaaccgcttatagaaaaattactcggcaaagaaattcagttgccggaaaaaatatggaataagttaaacttagcttgggcgggcttttttattctttgtatgttaattaatatctacatcagccaatattgttcggaagaagtttgggtggatttcaaatccttcggcattatcgctatgacatttattgcaaccttattcaccggcatttatgtttaccgctatttgccgaaagacgatcaaaataaatag

SEQ ID NO: 144981 - protein, 180 aa, Mannheimia succiniciproducens MBEL55E
MKQLLEFIPLILFFVVYKLAGIREAAIALIIATIFQMLILKLKYGKIEKQQIIMGIAVVFFGTLTAYFNKVEYLQWKVTIVYALFALILLISQYGFKKPLIEKLLGKEIQLPEKIWNKLNLAWAGFFILCMLINIYISQYCSEEVWVDFKSFGIIAMTFIATLFTGIYVYRYLPKDDQNK

SEQ ID NO: 144982 - DNA, 546 bp, Legionella pneumophila subsp. pneumophila str. Philadelphia 1
  CDS (1)..(546): transl_table=11
atgaaattactattcgatttttttcctatcgttttattttttatagtctataaattttttggcatttataccgctactgctgttgctatggtagcttcattaactcaagttgcgttttacagattaaagtttcagcattatgaaaaaatgcatttgtttagtctggctatcattatggtcttgggaggagcgacgttattctttcaaaacccttggtttatcaaatggaagcctacaggaatctactggttatctgctcttgtcttttatggttcaagttatataggatctaagccactaatacaaaaaatgatggaagcaaacatcaatttaacaacaaaaatttggtatcgacttaatttagcatggacattattttttatagtaatgggggcattaaatttatatgttgcctatcattatgacactgatgtatgggttaattttaaattatttggtggtgttgggtttactttactttttgtgttgattcaagctttttatttaacaaaacacacagatgaaaaaagctttgaaaaacaatag

SEQ ID NO: 144983 - protein, 181 aa, Legionella pneumophila subsp. pneumophila str. Philadelphia 1
MKLLFDFFPIVLFFIVYKFFGIYTATAVAMVASLTQVAFYRLKFQHYEKMHLFSLAIIMVLGGATLFFQNPWFIKWKPTGIYWLSALVFYGSSYIGSKPLIQKMMEANINLTTKIWYRLNLAWTLFFIVMGALNLYVAYHYDTDVWVNFKLFGGVGFTLLFVLIQAFYLTKHTDEKSFEKQ

SEQ ID NO: 144984 - DNA, 534 bp, Methylococcus capsulatus str. Bath
  CDS (1)..(534): transl_table=11
ttgtccgatttctttcccatcgtcctgttttttgtcgcctacaagtttcagggcatcttcatcgccacggcggtggccatcgcagcgaccttgttgcaggttggcgtcgcctggtaccggacgcgcaaggttgaaccgatgcacctcgtgacgctgggtctgatcgtcgtgttcggcggagccaccctggtgttccgggacgagctgttcatcaaatggaagccgaccgtgctcaactgggcattcggtctgggcttcctgctcagccgcttcgtcggcgagcgcaccctgatcgaacggatcatggggcagcagatcgacctgcccaaggaaatctggcagcggctcaatctggcctgggttctgttcttcctgaccgtgggcgcagccaacctgtttgtcgtctatagtttcgacaccgagacctgggttaacttcaagttgttcggcatggtgggcttgaccctggtgttcgtcgtggcccaatcgatcttcctggcccgccatgttcccgatgccaagaccgaggagtga

SEQ ID NO: 144985 - protein, 177 aa, Methylococcus capsulatus str. Bath
MSDFFPIVLFFVAYKFQGIFIATAVAIAATLLQVGVAWYRTRKVEPMHLVTLGLIVVFGGATLVFRDELFIKWKPTVLNWAFGLGFLLSRFVGERTLIERIMGQQIDLPKEIWQRLNLAWVLFFLTVGAANLFVVYSFDTETWVNFKLFGMVGLTLVFVVAQSIFLARHVPDAKTEE

SEQ ID NO: 144986 - DNA, 609 bp, Azoarcus sp. EbN1
  CDS (1)..(609): transl_table=11
atgaaaattctcttcgatctgctcccggtcatcctcttcttcgtcgcctacaagatcgctggcggaaaccaggctttcgcgcacgagctcgcgtcgcgctggctcggcgacggcattgccgtcacgcaggcgccgatcctgctggcaaccgcggtggcgatcctggctacgattgcccagatcggctgggtatggatgcggcaccgcaaggtggacacgatgctgtggatcagccttgccataatcgcggtgttcgggggcgcgacgctgtttttccacaacccgacgttcatcaagtggaagccgaccgcactgtactggctgttcggcggcaccttgaccgtatcggccgtgatattccgccgcaacctgatccggaagatgctcgaagcccagattcggctgccggagcccgtctggaaacgcctcaaccttgcatgggccgggtttttcatcctcatgggttttctcaacctgtacgttgcatacaatttttccgaagaggcctgggtcaatttcaaacttttcggcggcatgggcctgatgctgctgttcgttcttggccagggcttctatctgtcccgacatatccaggaggaaaccacctga

SEQ ID NO: 144987 - protein, 202 aa, Azoarcus sp. EbN1
MKILFDLLPVILFFVAYKIAGGNQAFAHELASRWLGDGIAVTQAPILLATAVAILATIAQIGWVWMRHRKVDTMLWISLAIIAVFGGATLFFHNPTFIKWKPTALYWLFGGTLTVSAVIFRRNLIRKMLEAQIRLPEPVWKRLNLAWAGFFILMGFLNLYVAYNFSEEAWVNFKLFGGMGLMLLFVLGQGFYLSRHIQEETT

SEQ ID NO: 144988 - DNA, 597 bp, Pseudomonas fluorescens Pf-5
  CDS (1)..(597): transl_table=11
gtgaaacaattcatcgacttcatcccgctgttcctgtttttcatcgtctataaaattgatccccgcgtcgtcgaccttgccggtcacgaagtcaccctgggcggcatctacagcgccacagcggtgctgatcatcagttccctggtggtgtatggcgccctgttcatctcccagcgcaagctggaaaaaagccagtggctgaccctgatcgcctgcctggtcttcggtagcctgaccctggccttccacagcgaaaccttccttaaatggaaagctccggtggtcaactggctgttcgccctggccttcatcggcagccacttcgttggcgaccgcctgctgatcaagcgcatcatgggccacgccctgacgttgccagacccggtatggacccgcttgaacatcgcctggatcgccttcttcctgttctgcggcgccgccaacctgtttgtcgccttcaccttccagagcatctgggtcgacttcaaggtcttcggcagcctgggcatgaccgtattgttcctggtgggccagggtatctacctctcgcgccacctgcatgacgccgatcccaccaccccgaaaaccgaggactga

SEQ ID NO: 144989 - protein, 198 aa, Pseudomonas fluorescens Pf-5
MKQFIDFIPLFLFFIVYKIDPRVVDLAGHEVTLGGIYSATAVLIISSLVVYGALFISQRKLEKSQWLTLIACLVFGSLTLAFHSETFLKWKAPVVNWLFALAFIGSHFVGDRLLIKRIMGHALTLPDPVWTRLNIAWIAFFLFCGAANLFVAFTFQSIWVDFKVFGSLGMTVLFLVGQGIYLSRHLHDADPTTPKTED

SEQ ID NO: 144990 - DNA, 585 bp, Colwellia psychrerythraea 34H
  CDS (1)..(585): transl_table=11
atgcaactgtttattgaatactttcctcttctaattttctttatcattaattcaatcgccggaatttactgggctactggcagtttaattgtcgccgctttcgtgcaaattttttactataaaatcaagaaagaaaaaattcccgctaaacaatggataatttttggtttgattgttgtttttggcggcctaacaatatacttgcaaaatgatgcttttctcaaatggaaagtaaccattattaatgcttttttcgctgctgcattattagtgagtaatacctttttcaacaaaaatattattaaagaatttttagctgagtcgttatcactaccagaaaacatttggtcaagattaaacctcgcttgggctttattctttctattttgctcgggactaaattattatatagcctttaattacgaccttgatacttgggtaaactttaaagtctttggtctaaccggcttaatgtttcttttctctatcacttctattttatttctatacaagtacttagaggtagaagaagagataaatgataccgataccattaacaatgaaaaaactaaagaatctacttaa

SEQ ID NO: 144991 - protein, 194 aa, Colwellia psychrerythraea 34H
MQLFIEYFPLLIFFIINSIAGIYWATGSLIVAAFVQIFYYKIKKEKIPAKQWIIFGLIVVFGGLTIYLQNDAFLKWKVTIINAFFAAALLVSNTFFNKNIIKEFLAESLSLPENIWSRLNLAWALFFLFCSGLNYYIAFNYDLDTWVNFKVFGLTGLMFLFSITSILFLYKYLEVEEEINDTDTINNEKTKEST

SEQ ID NO: 144992 - DNA, 609 bp, Dechloromonas aromatica RCB
  CDS (1)..(609): transl_table=11
atgaaacttctcttcgacctattccctgtcatcctctttttcgccactttcaagtatgcggaaaagagcccggaacttgctgccagctggatgggctcactgctcggtttcgtaccggacgacatcaagctcgctccaatcctgctcgccaccgtcgtcgtcatcgccgctactgtcgcccagatcatctgggtgcacttccgtcacggcaaggtcgacaagatgctttgggtcagcctggtactcgtcgtcgtcttcggcggcctgacgctggctttccagaacgaagccttcatcaagtggaaaccgaccattctttactgggtgttcgccggcagcatgatcttcagcgccttcatcctgaaaaaaaacccgatcaaggccatgcttggcgagcagctgacgctacccgagccggtctggggcaaggtcaatctgtcgtggatcggtttcttcctgttcatgggcgccttgaacctgttcgtcgctttcaatttcccgaccgatacctgggtcaatttcaaactattcggcggcatgggcttgatgctcgtcttcgtgctcggccagggcatgctgctgtccaaatacgttgaggaagaaaaataa

SEQ ID NO: 144993 - protein, 202 aa, Dechloromonas aromatica RCB
MKLLFDLFPVILFFATFKYAEKSPELAASWMGSLLGFVPDDIKLAPILLATVVVIAATVAQIIWVHFRHGKVDKMLWVSLVLVVVFGGLTLAFQNEAFIKWKPTILYWVFAGSMIFSAFILKKNPIKAMLGEQLTLPEPVWGKVNLSWIGFFLFMGALNLFVAFNFPTDTWVNFKLFGGMGLMLVFVLGQGMLLSKYVEEEK

SEQ ID NO: 144994 - DNA, 612 bp, Ralstonia eutropha JMP134
  CDS (1)..(612): transl_table=11
atgcgcctggcccgtgcagccggcccgcgggccaggcacgctgccaggcccgccaaccagaatcattcctgcatgaaattcctgttcgacctgtttccggtcatccttttctttgccgccttcaagctggccggcatctataccgccaccgccgtggccatcggcgccacgctggtccagatcggctgggtgtggctgcgccaccgcaaggtcgaaccgatgcagtgggtcagcctgctgatcatcggcgtgttcggcggcgccacgctggtgctgcacaacgagaccttcatcaagtggaagccgaccgtcctctactggatgttcacggcagcgctgatgggctcggtgctcggctggcgcaagaacctgatccgcgccatgatggaaaagcaggtcacgctgccggacgccgtctgggcgcgcctcaatctcgcctgggccagcttcttcgccgtcatggggctgctgaacctctatgtggcgtaccagttctccaccgacgcctgggtgaactttaagctgttcggcagcatggggctcatgctcgtcttcatcatcgtgcaaagcgtctggctgtcgcgccacatgcaggaaaacgcgcaggattga

SEQ ID NO: 144995 - protein, 203 aa, Ralstonia eutropha JMP134
MRLARAAGPRARHAARPANQNHSCMKFLFDLFPVILFFAAFKLAGIYTATAVAIGATLVQIGWVWLRHRKVEPMQWVSLLIIGVFGGATLVLHNETFIKWKPTVLYWMFTAALMGSVLGWRKNLIRAMMEKQVTLPDAVWARLNLAWASFFAVMGLLNLYVAYQFSTDAWVNFKLFGSMGLMLVFIIVQSVWLSRHMQENAQD

SEQ ID NO: 144996 - DNA, 540 bp, Methylobacillus flagellatus KT
  CDS (1)..(540): transl_table=11
atgaagtttctttacgatctattcccggtgatcctgtttttcatcgtttacaagctgttcggcatttacgaagccactgccgctgcaattgccgcgaccattgcccagattgcctgggccaagatcacgaccggcaaggtggacaatgcgctcatcatgagcggcgtcatcatcgtggtgtttggcggcgccaccttgtggctacaggatgaaagcttcatcaagtggaagcccaccattctctactgggtgttcaccgtcggcctgctgggcagccaatggctgttcaagcgcaacctgatccgcggcctcatggaaaagcagattaccatgccagatccgatctggagccgcctcaacctggcatgggcgatattcttcctgctgctgggattcctcaacctgtatgtcgcctacaactactccactgacctatgggtcgatttcaagttgtttggcaccatggggctgatgttcgtgttcgtgatcggccagacgttgttgctcaacaaacacatcaccgaacaggacaagaaataa

SEQ ID NO: 144997 - protein, 179 aa, Methylobacillus flagellatus KT
MKFLYDLFPVILFFIVYKLFGIYEATAAAIAATIAQIAWAKITTGKVDNALIMSGVIIVVFGGATLWLQDESFIKWKPTILYWVFTVGLLGSQWLFKRNLIRGLMEKQITMPDPIWSRLNLAWAIFFLLLGFLNLYVAYNYSTDLWVDFKLFGTMGLMFVFVIGQTLLLNKHITEQDKK

SEQ ID NO: 144998 - DNA, 531 bp, Burkholderia xenovorans LB400
  CDS (1)..(531): transl_table=11
atgaaattcctgttcgatctgttcccgatcatcctgtttttcgtcgccttcaagatctggggcattttcacggcgacggcagtggcgatcgtcgccacgctggtgcagatcgcatgggtggcgttccgccaccgcaaggtcgacccgatgctgtgggtgagcctcggcgtcgtcaccgtgttcggcggcgccacgctcgtgctgcacaacgataccttcatcaaatggaagccgaccgtgctgtactgggcgttctcggtcgcgctgatcgtctcgcaactggccttcaacaagaacctgatcgaagcgatgatgggcaagcagatcacgctgccgcacgcgatctggggcaagctgaatgtggtgtggggggtgtttttcgtgctgctcgggctcgtcaatctgttcgtcgcgtacaactacacgaccgaccagtgggtcaatttcaagctgttcggcgcgaccggctgtctcgtggtgtttatcgtcgggcagagcttgtggctgtcgaagtatatgaaggaagaatga

SEQ ID NO: 144999 - protein, 176 aa, Burkholderia xenovorans LB400
MKFLFDLFPIILFFVAFKIWGIFTATAVAIVATLVQIAWVAFRHRKVDPMLWVSLGVVTVFGGATLVLHNDTFIKWKPTVLYWAFSVALIVSQLAFNKNLIEAMMGKQITLPHAIWGKLNVVWGVFFVLLGLVNLFVAYNYTTDQWVNFKLFGATGCLVVFIVGQSLWLSKYMKEE

SEQ ID NO: 145000 - DNA, 540 bp, Haemophilus somnus 129PT
  CDS (1)..(540): transl_table=11
atgaaacaactattagaatttatcccattgatcttattctttgctgtttacaaattacaaggtattcaagccgctgccattacgctgattattgcaacgttaattcaactcatgattttaaaacttaaatatggaaaaattgagaaacagcaacttattatgggaagtgcggtagtttttttcggttctctaagtgcctattttaatgaattggaatttttaaaatggaaagttaccgttgtttatgcccttttttccttgattttgcttgtcagccaatatggttttaaaaaacctttaatccaacaattattaggcaaagaaattcagcttcccacttatgtttggcataacctcaatttaggttgggcagtctttttcttactttgtatgctgattaatctttacataagccagtatctttctgatgacatctgggttgattttaaaaccttcggcattctcggcatgacactgattgcaacattagtaaccggtgtttatatttatcgttatttacctaaatcagaacaagaataa

SEQ ID NO: 145001 - protein, 179 aa, Haemophilus somnus 129PT
MKQLLEFIPLILFFAVYKLQGIQAAAITLIIATLIQLMILKLKYGKIEKQQLIMGSAVVFFGSLSAYFNELEFLKWKVTVVYALFSLILLVSQYGFKKPLIQQLLGKEIQLPTYVWHNLNLGWAVFFLLCMLINLYISQYLSDDIWVDFKTFGILGMTLIATLVTGVYIYRYLPKSEQE

SEQ ID NO: 145002 - DNA, 546 bp, Shewanella sp. MR-4
  CDS (1)..(546): transl_table=11
atgaaacaactgcttgattttctgcccctcattatcttttttgccgtctataaatttttcgatatttatatcgccagtggcgccttaatcgcagccactgcactgcaattagtcgtgacctatgcgctgtacaaaaaattggagaagatgcaccttattactttcgctatggtgacagtgtttggcaccctcaccttagtgttccatgacgatgcctttatcaagtggaaagtcactattatttatgctttatttgccctagccctaggcgtgagccagctactcaacaagtcgattttaaagtccatgttgggtaaagagatgaaggtagccgataagatttgggcacacgtaacttggtactgggtaagcttttttgccatctgtggcctagtcaatatctatgtcgcctttaaactgccgttagaaacttgggtgaactttaaagtgtttggcctcaccgccttaaccctgattaataccgttatcaccgtcttttacctttataaacatcttcccgaagatcaacgcaaggaactcaaataa

SEQ ID NO: 145003 - protein, 181 aa, Shewanella sp. MR-4
MKQLLDFLPLIIFFAVYKFFDIYIASGALIAATALQLVVTYALYKKLEKMHLITFAMVTVFGTLTLVFHDDAFIKWKVTIIYALFALALGVSQLLNKSILKSMLGKEMKVADKIWAHVTWYWVSFFAICGLVNIYVAFKLPLETWVNFKVFGLTALTLINTVITVFYLYKHLPEDQRKELK

SEQ ID NO: 145004 - DNA, 561 bp, Acidovorax sp. JS42
  CDS (1)..(561): transl_table=11
atgaaactgctcatcgacttctttccgatcatcctgttcttcgccgcattcaaggtctggggcatctacgtggccacggccgtggcgattgccgccaccgtcgtgcagatcggctacatccgcctcaagcacggcaaggtcgaacccctgcaatggctgagcctgggcgtcatcgtgctgttcggcggcgccaccctgctggcacacagcgaaaccttcatcaaatggaagcccaccgtgctctactggctcatgggcggcaccttgctcgtcggccagttggtgttccgcaaaaacttcatccagtcactcatgggcgctcagatcgatctgcccgcgcccgtctggcgcaacctgaactggggctggacgggctttttcgccaccatgggtgtactcaatctgtgggtggcctacaacttcgacacggacacctgggtgaacttcaaactgttcggtggcatcggcctgatgttcgccttcgtcattgcccaggcgctgtacctgagccgccacgtcaaggatgagggcgatgccgcgcccaaggacctgcaaccatga

SEQ ID NO: 145005 - protein, 186 aa, Acidovorax sp. JS42
MKLLIDFFPIILFFAAFKVWGIYVATAVAIAATVVQIGYIRLKHGKVEPLQWLSLGVIVLFGGATLLAHSETFIKWKPTVLYWLMGGTLLVGQLVFRKNFIQSLMGAQIDLPAPVWRNLNWGWTGFFATMGVLNLWVAYNFDTDTWVNFKLFGGIGLMFAFVIAQALYLSRHVKDEGDAAPKDLQP

SEQ ID NO: 145006 - DNA, 552 bp, Actinobacillus pleuropneumoniae serovar 1 str. 4074
  CDS (1)..(552): transl_table=11
atgaaacagttacttgaatttattccgctcattctattttttacggtatataaattatacggcgtacagcaagcggcaattactttagtgatcgctaccgtcatacaattaatcgtcttaaaagtgttgtataagaagatcgaaaaatcccaatggattatgggcatttttgtggttttcttcgggattttgaccgcttattttaacgatttaaatttcttaaaatggaaagtgactatcattaacggtttattcgccgccgtattattagtcagccaatttgttttcaaaaagccgattattcaaatgttgttaggcaaggaattaaaattaccgaccaatgtctggaatcgtctcaatttaggttgggcgggcttttttattatctgtatgttactcaatatcgtgatcagctattatttttcggatgacgtatgggcaacatttaaaaccttcggatttaccggattgagtttaatcgccgcgattgcaaccggcgtttatctctatccgcatcttaaaaacgtggagaataccaatgagcaagcataa

SEQ ID NO: 145007 - protein, 183 aa, Actinobacillus pleuropneumoniae serovar 1 str. 4074
MKQLLEFIPLILFFTVYKLYGVQQAAITLVIATVIQLIVLKVLYKKIEKSQWIMGIFVVFFGILTAYFNDLNFLKWKVTIINGLFAAVLLVSQFVFKKPIIQMLLGKELKLPTNVWNRLNLGWAGFFIICMLLNIVISYYFSDDVWATFKTFGFTGLSLIAAIATGVYLYPHLKNVENTNEQA

SEQ ID NO: 145008 - DNA, 558 bp, Haemophilus influenzae R2866
  CDS (1)..(558): transl_table=11
atgaaacaactccttgactttatccctttaattttattttttatcacttacaaactcggtggtgtacgtgaagcagccatcgtattagtggttgcaacaattttgcagatcgtgattttaaaatggaaatacggaatggttgaaaaacaacaaaaaattatggcaagtgcggtcgttttttttggacttttaaccgcttactttaatgaaatccgctatttgcaatggaaagtgacaattatcaatggcttatttgctattgttttgctcgtcgcacaatttcaatttaaaaccccattaatcaaaaagttacttggtaaagagctacaactgcccgaaaaggcttggaatacacttaaccttggctgggcaatattctttattatttgtatgttggtaaatatttatatcagccataatatgtcggaagaggcttgggttgatttcaaatcttttggaattattggtatgacagtgattgcaaccattatttcgggagtttatatttatcgttatttgcctaaagatggctcaaattcaaaagacggagagaaataa

SEQ ID NO: 145009 - protein, 185 aa, Haemophilus influenzae R2866
MKQLLDFIPLILFFITYKLGGVREAAIVLVVATILQIVILKWKYGMVEKQQKIMASAVVFFGLLTAYFNEIRYLQWKVTIINGLFAIVLLVAQFQFKTPLIKKLLGKELQLPEKAWNTLNLGWAIFFIICMLVNIYISHNMSEEAWVDFKSFGIIGMTVIATIISGVYIYRYLPKDGSNSKDGEK

SEQ ID NO: 145010 - DNA, 540 bp, Photobacterium sp. SKA34
  CDS (1)..(540): transl_table=11
atgaaacaattaatagattttattccccttataattttctttattttattcaaaacgagtggcatttttatcgccacaggcgctttaattgcagcaacagcggttcaggtagctttgacttggtttatctataaaaaagtcgaaaaaatgcaacttgttactttcatattagtggctgtttttggagggttaaccattttcctccatgacgaaaacttcattaagtggaaagtcaccatcatctacgccatctttgccctagcattacttattagccaatttatgggtaaaccactgatcaaaagtatgctaggtaaagaaattaccttacctgaatcaatttggttacgaattaaccttgcttggagtgtgttttttgttgtctgcgctatagtaaacatctatattgcattcaatttccctttagatatatgggtagactttaaggtatttgggctattagcattaacgctgctctttaccttcctcaccggtggctacatttatcgccacttaccgaaaagtgacaataaccagtaa

SEQ ID NO: 145011 - protein, 179 aa, Photobacterium sp. SKA34
MKQLIDFIPLIIFFILFKTSGIFIATGALIAATAVQVALTWFIYKKVEKMQLVTFILVAVFGGLTIFLHDENFIKWKVTIIYAIFALALLISQFMGKPLIKSMLGKEITLPESIWLRINLAWSVFFVVCAIVNIYIAFNFPLDIWVDFKVFGLLALTLLFTFLTGGYIYRHLPKSDNNQ

SEQ ID NO: 145012 - DNA, 549 bp, Oceanospirillum sp. MED92
  CDS (1)..(549): transl_table=11
atgaagcttttattagattttttaccgattattattttctttgctgtttataaaacaacaaatgacattattttagcgacagctatcttgattccagcgacacttctccagatgctttacacttggttcaagacccacaagattgaaaaaatgcagctggtcacacttgtccttgtcgtgctactaggtggagcgaccgttctatttcaggataagaccttcatccagtggaagcccactattgtaaattggttatttggtattgcctttttgggcagccagttcattggcgaaaagaccattgtagaaaggcttatgggaggaagcatttccatgcctgcatttgcctggaaaaaacttaacatagcctgggtaatcttctttatcgtcctgggtattgtgaacctttttgtagcctatacgtttagtgaagaaatctgggtagaatttaaactctttggcatgcttggcctaacacttgtctttgtgatcgcgcaggggttttacctttcgcgacacatggaaaataccgaacagaacgaaaaataa

SEQ ID NO: 145013 - protein, 182 aa, Oceanospirillum sp. MED92
MKLLLDFLPIIIFFAVYKTTNDIILATAILIPATLLQMLYTWFKTHKIEKMQLVTLVLVVLLGGATVLFQDKTFIQWKPTIVNWLFGIAFLGSQFIGEKTIVERLMGGSISMPAFAWKKLNIAWVIFFIVLGIVNLFVAYTFSEEIWVEFKLFGMLGLTLVFVIAQGFYLSRHMENTEQNEK

SEQ ID NO: 145014 - DNA, 588 bp, Xanthobacter autotrophicus Py2
  CDS (1)..(588): transl_table=11
atgacgcaatccaccgcacccgcccgtcccaagatgagcccctggctcaagatcggcctcgaaatcggcccgctggtgctgttcttcgccgccaacggctatggcggcatctatgtggccaccggcgtgttcatggtggcgacgctggcggcgctgctcgcaatgtgggtgctggcgcggcgcattgcggtgatgccgctggtgtcggcgctggtggtgatggtgttcggcggcctcaccctgtggctgcaggacgaccacttcatcaagctcaagcccaccatggtgaatgccctgttcggcgtgctgctgctgggggggctctatttcaaaaagccgctgctgccttacgtgttcgacggcatggtgaagctcaccgaggagggctggcgcgtcctgaccatccgctggggggtgttcttcctggtcatggcggtgctgaacgaaatcgtgtggcgctcggtctccaccgatacctgggtggccttcaagaccttcggctacctcccgctcacctttgccttcgccatggcccaggctccgctcatggcccgccacgagttgaaggacggcccgcaggaggactga

SEQ ID NO: 145015 - protein, 195 aa, Xanthobacter autotrophicus Py2
MTQSTAPARPKMSPWLKIGLEIGPLVLFFAANGYGGIYVATGVFMVATLAALLAMWVLARRIAVMPLVSALVVMVFGGLTLWLQDDHFIKLKPTMVNALFGVLLLGGLYFKKPLLPYVFDGMVKLTEEGWRVLTIRWGVFFLVMAVLNEIVWRSVSTDTWVAFKTFGYLPLTFAFAMAQAPLMARHELKDGPQED

SEQ ID NO: 145016 - DNA, 540 bp, Rickettsiella grylli
  CDS (1)..(540): transl_table=11
atgcgtctactttttgattttttgcccattgttattttctttatcgcttacaagttttttggcatctatgtcgccactgccgcggcgattattattagtttgctacaagtcattggttactttatcaaacatcgtaaggtacctagtatacaacttattagcttagtcctcatcctcttatttggtggcggcacattatttttacataatgaattatttatcaaatggaagccaactgcactttattggctgcttgcgcttggcgctttaatcacccattacgttggcaaaaaacctttcattcagcatctattagaaaccaatatcgtcttaccctctcatctgtggtcatcgttaaatagaaattggattatctttttcattttaatgggggctattaatttatgggttgcctatacgtttaataccaacacctgggttaattttaaattgtttggcttgctgggaatgacttttttatttatagtcgcacaagctatttatttagcacgctatattcattctgatgaaaagacataa

SEQ ID NO: 145017 - protein, 179 aa, Rickettsiella grylli
MRLLFDFLPIVIFFIAYKFFGIYVATAAAIIISLLQVIGYFIKHRKVPSIQLISLVLILLFGGGTLFLHNELFIKWKPTALYWLLALGALITHYVGKKPFIQHLLETNIVLPSHLWSSLNRNWIIFFILMGAINLWVAYTFNTNTWVNFKLFGLLGMTFLFIVAQAIYLARYIHSDEKT

SEQ ID NO: 145018 - DNA, 657 bp, Agrobacterium tumefaciens
  CDS (43)..(657): transl_table=11
ttgagtatggatatcgaaagcaattccaaggaaagcgaaaagatggtggcggaaatcagcccgctcttgaaattcgtgctcgagcttggtccgcttatggtgttctttttcgccaattcccggggcgaatggctcgcttccaccttcccggtgctgacggaattcggcggtccgatcttcatcgccaccgggctcttcatgatcgcgaccgccactgccttgaccgtgtcctggattttgacgcggaagctgccgatcatgccgctgatatctggcatcgtggtgtttgtgttcggcgcgctgacgctgtggctgcagaacgataccttcatcaagatgaaaccgaccatcgtcaacacgctgttcggtgtcattctactgggcggcctgttctttggccagtcgctgctgggttacgtcttcaattcggccttcaagctgacggacgagggctggcgcaaactgacgctgcgctggggcgtgtttttcctctttctcgcggtgctgaacgaggtggtgtggcgcatgttcaccaccgatacctgggtggccttcaaggtgtggggcacgatgccgatcaccatcatcttcaccatggcgcaaatgccgttcgtcatgcgccattctgtcgaacctctcggcaaggacgaaaaatga

SEQ ID NO: 145019 - protein, 204 aa, Agrobacterium tumefaciens
MVAEISPLLKFVLELGPLMVFFFANSRGEWLASTFPVLTEFGGPIFIATGLFMIATATALTVSWILTRKLPIMPLISGIVVFVFGALTLWLQNDTFIKMKPTIVNTLFGVILLGGLFFGQSLLGYVFNSAFKLTDEGWRKLTLRWGVFFLFLAVLNEVVWRMFTTDTWVAFKVWGTMPITIIFTMAQMPFVMRHSVEPLGKDEK

SEQ ID NO: 145020 - DNA, 756 bp, Bradyrhizobium japonicum
  CDS (154)..(756): transl_table=11
gtgcgatcgccggaatcgagtcataggtttctttcgtcatgccccgcgcaggcggggcatccagtacgccgcgccgccggttgtcgatcacaggtgccacggaatactggatcccccgcattcgcgggggatgacatcaacgaaagtcagggaatggacaagacccagccgcatccgctgttcaagcttgcgaccgaactcggtccgctgctcgtcttcttcttcgtgaatgcgaagttcaatctgttcgccgcgaccggcgcgttcatggtcgcgatcgtggcggcgatgatcgcctcctatgtggtgacgcgccatatcccgatcatggcgatcgtgacgggcgtgatcgtgctggtgttcggcacgctgacgctggtgctgcacgacgagaccttcatcaaggtcaagccgaccatcatctacggcctgttcgccgcaatcctcggcggcgggctgctgttcggccgctccttcatcgccgtgatgttcgaccagatgttcaacctgacgccgcagggctggcgtatcctgacgctgcgctgggcgctgttcttcgccggcatggcggtgctgaacgagatcgtctggcgcacccagagcacggatttctgggtgaacttcaaggtgttcggcgtgacgccgatcacgatgatcttcgccatcgcccagatgccgctgaccaagcgctatcacctcgagccggtctcgctggaagcgagcgaggcggatgcgggggatgtgaggaaggggtga

SEQ ID NO: 145021 - protein, 200 aa, Bradyrhizobium japonicum
MDKTQPHPLFKLATELGPLLVFFFVNAKFNLFAATGAFMVAIVAAMIASYVVTRHIPIMAIVTGVIVLVFGTLTLVLHDETFIKVKPTIIYGLFAAILGGGLLFGRSFIAVMFDQMFNLTPQGWRILTLRWALFFAGMAVLNEIVWRTQSTDFWVNFKVFGVTPITMIFAIAQMPLTKRYHLEPVSLEASEADAGDVRKG

SEQ ID NO: 145022 - DNA, 534 bp, Buchnera aphidicola subsp
  CDS (1)..(534): transl_table=11
atgaaaaaaatactaaatttattaccgatatttactttcttcatattttatagattttatgatatttttatagcatcgaaatctttaatttttatatcaggtttaacttgtttactttattggattatttataaagaaatagataaaattaatttatttagttttattacaattgctatttttggttctttaacaataatctttcataacagtcaatttattaaatggaaaataacaataatttatatgatattttctgtaatattatttattagtcaatttttcatgaaaaaacctataatacaaagatttttagaaaaagatataaaaatttctgatttgtattggaaaaaaattaattttttttgggcattgttttttttattttgcagtatcttaaatatttatgtagcactttgtttaccagaaaaaatttgggtaaattttaaagtctttggactttcatttttaatgtttctttcaattttaattacaagtatttatataaatttcaaaatgttaaaagaaaaataa

SEQ ID NO: 145023 - protein, 177 aa, Buchnera aphidicola subsp
MKKILNLLPIFTFFIFYRFYDIFIASKSLIFISGLTCLLYWIIYKEIDKINLFSFITIAIFGSLTIIFHNSQFIKWKITIIYMIFSVILFISQFFMKKPIIQRFLEKDIKISDLYWKKINFFWALFFLFCSILNIYVALCLPEKIWVNFKVFGLSFLMFLSILITSIYINFKMLKEK

SEQ ID NO: 145024 - DNA, 537 bp, Buchnera aphidicola subsp
  CDS (1)..(537): transl_table=11
atgaaattcctattaaattcaattcctacaatttcattttttattttttataaattttatgacatttttattgcatctttctctttaatgatagcatcattatttacatttataattacaagcattctttttaattcaatcaataaacacgatttaattaatttaatttttgttatagtatttggatttttaaccttattttatcataatagcagttatataaaatggaaagttaccataatatattttctaatttctatcgtttttttaataaattatttatttataaaaaataatttattaaatataatttttaaaaatacaattcaattatctaaaaacgtttggcggaaattaagtttgttttggtctatattttttttaatttgtgctgtttctaacacatatattattttatatttttcagaacaaacgtgggttacatttaaaatatttgggctaactattttaacattaatagctgtaataattaatggattttatatatattttttaaaatcaaaaataatacaataa

SEQ ID NO: 145025 - protein, 178 aa, Buchnera aphidicola subsp
MKFLLNSIPTISFFIFYKFYDIFIASFSLMIASLFTFIITSILFNSINKHDLINLIFVIVFGFLTLFYHNSSYIKWKVTIIYFLISIVFLINYLFIKNNLLNIIFKNTIQLSKNVWRKLSLFWSIFFLICAVSNTYIILYFSEQTWVTFKIFGLTILTLIAVIINGFYIYFLKSKIIQ

SEQ ID NO: 145026 - DNA, 567 bp, Caulobacter crescentus
  CDS (1)..(567): transl_table=11
gtgcggaccgtcgtcgactacggtgcggcgatcgccttcggcgtggcctattttgtcaccaaggacttccagaaggcgacctgggttctggtcgccgcttcggccgccgccctggcgatcggctatgcggtcgagcggcgcctggccatgctgccgctgttcttcggtggcatggcgctggttttcgggaccctgggcctgatcttcggttccgacgtattcgtgaagatcaaggtgacggtgatcaatctggccctggccagcttcctggtcggcggcgtgctgctgaagcgtcagccgctcaaggtcatcatgggcgaggccctgcatctgccggacgcggcctggcgcaccctgaccctgcgctacggggcctatttcgcgtttgtcgccatcatcaatgaggtggtgcgcaacacccaggataccgacacctgggtgaagttccgcctggcccttctgccggtggccctggtgttcgtcgccacccagctgccgttcatgatgaaacatatggccaagggcgacgacgccaaggccgtcgagcccccggacgccggcttttag

SEQ ID NO: 145027 - protein, 188 aa, Caulobacter crescentus
MRTVVDYGAAIAFGVAYFVTKDFQKATWVLVAASAAALAIGYAVERRLAMLPLFFGGMALVFGTLGLIFGSDVFVKIKVTVINLALASFLVGGVLLKRQPLKVIMGEALHLPDAAWRTLTLRYGAYFAFVAIINEVVRNTQDTDTWVKFRLALLPVALVFVATQLPFMMKHMAKGDDAKAVEPPDAGF

SEQ ID NO: 145028 - DNA, 540 bp, Escherichia coli O6
  CDS (1)..(540): transl_table=11
atgaagcagtttcttgattttttaccgctggttgtctttttcgcgttttacaagatttatgacatctatgcggctactgcggcgctcatcgtcgccacggcgattgtgcttatatatagctgggttcgctttcgtaaggttgagaagatggccctgatcacttttgttctggtggtcgtcttcggtggcttaacgctgttcttccacaatgatgagtttattaaatggaaggttactgtcatttatgccctgtttgcgggtgccctgttagtcagccaatgggtgatgaaaaagccgctaattcagcggatgctgggtaaagaactcaccctgccgcaatcggtatggtcgaagctgaatctggcctgggctgttttctttatcctttgcggcctggcaaacatctacatcgcattctggctgccgcaaaatatttgggtcaactttaaagtctttggcctgaccgcccttaccttaatcttcacattgttaagcggtatctatatctaccgccacatgccgcaggaagataaatcctaa

SEQ ID NO: 145029 - protein, 179 aa, Escherichia coli O6
MKQFLDFLPLVVFFAFYKIYDIYAATAALIVATAIVLIYSWVRFRKVEKMALITFVLVVVFGGLTLFFHNDEFIKWKVTVIYALFAGALLVSQWVMKKPLIQRMLGKELTLPQSVWSKLNLAWAVFFILCGLANIYIAFWLPQNIWVNFKVFGLTALTLIFTLLSGIYIYRHMPQEDKS

SEQ ID NO: 145030 - DNA, 552 bp, Haemophilus ducreyi
  CDS (1)..(552): transl_table=11
atgaaacaattattagaatttatcccgctaattttattttttgctgtatataaattggttggcgtgcaagctgcggcgattacgctagtattagccacgattttgcaattaattttagtccgtattttatttaaaaaacttgaaacctcacaatggatagtggggctatcggtcattattttcggaatattgaccgcgtatttcgatgatttagcctttctgaaatggaaagttactattatcaatgggctttttgcggcggtattgttgattagtcaatatgtttttcataagccggtggtcaaaatgttattggcaaaagaattgagcctgccaacacaagtttggaacagacttaatcttggttgggcgattttctttattatttgtatgttgattaatattattattagtcaattattttcagatgatacttgggcgacatttaaaacctttggttttactggtttaagtcttgtggcagtaattataacgggtatttatctttatccatatattaaaaagttggagaataacaatgaacaaaaataa

SEQ ID NO: 145031 - protein, 183 aa, Haemophilus ducreyi
MKQLLEFIPLILFFAVYKLVGVQAAAITLVLATILQLILVRILFKKLETSQWIVGLSVIIFGILTAYFDDLAFLKWKVTIINGLFAAVLLISQYVFHKPVVKMLLAKELSLPTQVWNRLNLGWAIFFIICMLINIIISQLFSDDTWATFKTFGFTGLSLVAVIITGIYLYPYIKKLENNNEQK

SEQ ID NO: 145032 - DNA, 558 bp, Haemophilus influenzae
  CDS (1)..(558): transl_table=11
atgaaacaactccttgactttatccctttaattttattttttatcacttacaaactcggtggtgtacgtgaagcagccatcgtattagtggttgcaacaattttgcagatcgtgattttaaaatggaaatacggaatggttgaaaaacaacaaaaaattatggcaagtgcggtcgttttttttggacttttaaccgcttactttaatgaaatccgctatttgcaatggaaagtgacaattatcaatggcttatttgctattgttttgctcgtcgcacaatttcaatttaaaaccccattaatcaaaaagttacttggtaaagagctacaattgcccgaaaaggcttggaatacattgaattttggttgggcaatattctttattatttgtatgttggtaaatatttatatcagccataatatgtcggaagaggcttgggttgatttcaaatctttcggaattattggtatgacagtgattgcaaccattatttcgggagtttatatttatcgttatttgcctaaagatggctcaaattcaaaagacggagagaaataa

SEQ ID NO: 145033 - protein, 185 aa, Haemophilus influenzae
MKQLLDFIPLILFFITYKLGGVREAAIVLVVATILQIVILKWKYGMVEKQQKIMASAVVFFGLLTAYFNEIRYLQWKVTIINGLFAIVLLVAQFQFKTPLIKKLLGKELQLPEKAWNTLNFGWAIFFIICMLVNIYISHNMSEEAWVDFKSFGIIGMTVIATIISGVYIYRYLPKDGSNSKDGEK

SEQ ID NO: 145034 - DNA, 531 bp, Neisseria meningitidis serogroup A
  CDS (1)..(531): transl_table=11
atgaaattcgtcagcgaccttttgtctgtcatcttgttttttgctacttataccgttaccaaaaatatgattgccgctacggcggttgccttggttgccggtgtggttcaggcggcttttctgtattggaaatataaaaagctggatacgatgcagtgggtcggactggtgctgattgtcgtattcggcggcgcaaccattgttttgggcgacagccgcttcattatgtggaagccgagcgttttgttttggctgggcgcgctgttcctgtggggcagccacctcgccggtaaaaacggcttgaaggcgagtatcggcagggagattcagcttccggatgccgtatgggcgaaattgacgtatatgtgggtcggtttcctgatttttatgggtatcgccaactggtttgtgtttacccggttcgagtcgcaatgggtcaactataaaatgttcggctcgactgcactgatgcttgttttctttattattcagggtatttatctgagtacctgtctgaaaaaggaggattga

SEQ ID NO: 145035 - protein, 176 aa, Neisseria meningitidis serogroup A
MKFVSDLLSVILFFATYTVTKNMIAATAVALVAGVVQAAFLYWKYKKLDTMQWVGLVLIVVFGGATIVLGDSRFIMWKPSVLFWLGALFLWGSHLAGKNGLKASIGREIQLPDAVWAKLTYMWVGFLIFMGIANWFVFTRFESQWVNYKMFGSTALMLVFFIIQGIYLSTCLKKED

SEQ ID NO: 145036 - DNA, 555 bp, Pasteurella multocida
  CDS (1)..(555): transl_table=11
atgaaacaattattagaatttattccacttattttgttctttgcggtgtacaagctcgtgggcatccgcgaagccgcaattaccttgatcatcgcgaccctcattcaattactgattctaaaaatcaaatatggcaaagttgaaaaacaacaactgttcatggggatcgctgtggtattttttggtacattaacggcgtattttaatcaacttgaatacttaaaatggaaagtgaccattgtctatgccatttttgccttggttttacttgttagccaatatggctttaataaaaatctgataaaactaatgttaggcaaagaagatgcgcttgagttaccggaacaggtatggaatcgactcaatctcggttgggcacttttcttcttactctgcatgttaattaatctttatattagccaatatttatcggacgatttgtgggtggattttaagacgttcggtattctcggtatgactctcattgccacaataatcaccggcatctatatttaccgctatcttccgcaaaccaaaagcaacaataaggaatga

SEQ ID NO: 145037 - protein, 184 aa, Pasteurella multocida
MKQLLEFIPLILFFAVYKLVGIREAAITLIIATLIQLLILKIKYGKVEKQQLFMGIAVVFFGTLTAYFNQLEYLKWKVTIVYAIFALVLLVSQYGFNKNLIKLMLGKEDALELPEQVWNRLNLGWALFFLLCMLINLYISQYLSDDLWVDFKTFGILGMTLIATIITGIYIYRYLPQTKSNNKE

SEQ ID NO: 145038 - DNA, 588 bp, Pseudomonas aeruginosa
  CDS (1)..(588): transl_table=11
atgaagcaattcatcgatttcatcccactgatcctgttcttcatcgtctacaagatagaccctcagaacgtcgagttcgccgggttcaatctgagtggcatctacggcgcgaccgcgaccctgatcctcgcctcggtgatcgtctacggcgccctctggctcaagcaccgccacctggaaaagagccagtggttcaccctcggcgcctgcctggtcctcggcggcctgaccctggccttccacgaggacaccttcctcaagtggaaggcgccgctggtcaactggctgttcgccctggccttcgccggcagtcacttcatcggcgacaagccgatgatccagcgcatcatgggccatgccatccagttgccgcagggcctctgggtgcgcctgaacatcgcctgggtggtgttcttcctggtgtgcggcttcgccaacctgtacgtggtcttcacctatccgaacttctgggtggacttcaaggtgttcggcagcctcggcatgaccttgctgttcctgatcggccagggcctgttcctggctcgccacctgcacgacgccgataccggcgaaaagcccaaggactga

SEQ ID NO: 145039 - protein, 195 aa, Pseudomonas aeruginosa
MKQFIDFIPLILFFIVYKIDPQNVEFAGFNLSGIYGATATLILASVIVYGALWLKHRHLEKSQWFTLGACLVLGGLTLAFHEDTFLKWKAPLVNWLFALAFAGSHFIGDKPMIQRIMGHAIQLPQGLWVRLNIAWVVFFLVCGFANLYVVFTYPNFWVDFKVFGSLGMTLLFLIGQGLFLARHLHDADTGEKPKD

SEQ ID NO: 145040 - DNA, 594 bp, Pseudomonas putida
  CDS (1)..(594): transl_table=11
gtgaaacaattcatcgatttcatcccgctgctgctgttcttcatcgtctacaagctcgacccgcgccccatggaagtcgccggccatcacttcgaatttggcggcatctacagcgccacggccatgctgatcatcagctcgctggtcgtgtacggcgcactgttcctgcgccagcgcaagctggagaagggccagtggctgacgctgatcgcctgcctggtgttcggtggcctgaccctgacctttcacagcgaaaccttcctcaaatggaaagcccccgtcgtgaactggctgttcgccctgggttttgccggcagccacttcatcggcgatcgggtgctgatcaagcgcatcatgggccacgccctgaccctgcctgatgccatctggacgcgcctgaatctggcctggatcgctttcttcctgttctgcggcgcggccaacctgttcgtcgccttcaccttccaggacttctgggtggacttcaaggtgttcggcagcctgggcatgaccgtgatcttcctggtggcgcaaggcgtgtacctgtcgcgccacctgcacgatgacccttctacctccaaacccaaggattga

SEQ ID NO: 145041 - protein, 197 aa, Pseudomonas putida
MKQFIDFIPLLLFFIVYKLDPRPMEVAGHHFEFGGIYSATAMLIISSLVVYGALFLRQRKLEKGQWLTLIACLVFGGLTLTFHSETFLKWKAPVVNWLFALGFAGSHFIGDRVLIKRIMGHALTLPDAIWTRLNLAWIAFFLFCGAANLFVAFTFQDFWVDFKVFGSLGMTVIFLVAQGVYLSRHLHDDPSTSKPKD

SEQ ID NO: 145042 - DNA, 561 bp, Ralstonia solanacearum
  CDS (1)..(561): transl_table=11
atgaaattcctgttcgatctgttcccggtcatcctgttctttgccgccttcaaggtggcgggcatctatgtggcgaccacggtcgcgatggtcgccaccgtggcgcagatcgcgtgggtgtggttcaagcaccgcaaggtcgatgccatgcagtggctgtcgctgctcatcatcgtggtgttcggcggggcgacgctgatcttccacaacgacaccttcatcaagtggaagccgacggtgctgtactggatgttcggcgtggtgctgctgggcagcgccgtgctgctgcgcaagaacctgatccgcgccatgatggagcagcaggtgtcgctgcccgagccgatgtggggccggctgaacctggtctggagcctgttcttcctcgccatgggcggcctcaacctctacgtggcctaccacttcgacaccgacgtctgggtcaatttcaagctgttcggctcgatgggcctgatggtggtgttcatcctggtgcagagcgtctggctggcgcgccacatgcaggagcgccccgccggcgccaacccgcaggacgaccgctga

SEQ ID NO: 145043 - protein, 186 aa, Ralstonia solanacearum
MKFLFDLFPVILFFAAFKVAGIYVATTVAMVATVAQIAWVWFKHRKVDAMQWLSLLIIVVFGGATLIFHNDTFIKWKPTVLYWMFGVVLLGSAVLLRKNLIRAMMEQQVSLPEPMWGRLNLVWSLFFLAMGGLNLYVAYHFDTDVWVNFKLFGSMGLMVVFILVQSVWLARHMQERPAGANPQDDR

SEQ ID NO: 145044 - DNA, 633 bp, Rhizobium meliloti
  CDS (1)..(633): transl_table=11
atgtcgacgatcgaggccgccaagccgaagacagaggtaagcccgctgctcaagctcgtgctggaactcggccccctgatggtcttcttcttcgccaattcgcggggcgagtggctggctggccgctttcctgcgctggccgagctcggcgggccgatcttcatagcgacgggcctcttcatggcggcaacggcggcggcgctgattgcttcatggatcatgacacgcacgctgccgatgatgccgctcgtctccggtatcgtcgtcttcgtcttcggcgcgctgacgctctggctgcagaacgacaccttcatcaagatgaagccgaccatcgtcaacacgctcttcggcgcgatcctgctcggcgggctcctgttcggcaaatcgctgctcggctacgtcttccacgccgccttcaagctggacgaggagggatggcggaagctgacgatccgctggggtgtgttcttcctgttcctcgccgtgctcaacgaggtgatctggcgctccttctcgacggatttctgggtcgccttcaaggtctggggcaccatgccgatcaccatcctcttcacgctcgcccagatgccgctgatcatgaagcactcgctcgaacaggatagcgcggagtga

SEQ ID NO: 145045 - protein, 210 aa, Rhizobium meliloti
MSTIEAAKPKTEVSPLLKLVLELGPLMVFFFANSRGEWLAGRFPALAELGGPIFIATGLFMAATAAALIASWIMTRTLPMMPLVSGIVVFVFGALTLWLQNDTFIKMKPTIVNTLFGAILLGGLLFGKSLLGYVFHAAFKLDEEGWRKLTIRWGVFFLFLAVLNEVIWRSFSTDFWVAFKVWGTMPITILFTLAQMPLIMKHSLEQDSAE

SEQ ID NO: 145046 - DNA, 546 bp, Shewanella oneidensis
  CDS (1)..(546): transl_table=11
atgaaacaactgcttgattttctacccctcgttatcttttttgccgtctataagtttttcgatatttatatcgccagtggtgctttaatcgctgctacggcactgcaattggtcgtgacctacgcgctatacaaaaaactcgagaaaatgcacctgattaccttcgctatggtgacagtgtttggcacgctcaccttagtgttccatgacgatgcctttattaagtggaaagtcaccattatttatgcgttatttgcgttagcgctcggcgtgagtcagttactcaacaagtcaattttaaagtcgatgttgggtaaagagatgaaggttgccgataatatttgggcgcatgtaacttggtattgggtgagcttttttgccatctgtggcctagtcaatatctatgtcgcctttagtctgccgttagaaacctgggtgaactttaaagtatttggcctcaccgccttaaccctgattaataccgttatcaccgtcttttacctttataaacatcttcccgaagatcaacgcaaggaactcaaataa

SEQ ID NO: 145047 - protein, 181 aa, Shewanella oneidensis
MKQLLDFLPLVIFFAVYKFFDIYIASGALIAATALQLVVTYALYKKLEKMHLITFAMVTVFGTLTLVFHDDAFIKWKVTIIYALFALALGVSQLLNKSILKSMLGKEMKVADNIWAHVTWYWVSFFAICGLVNIYVAFSLPLETWVNFKVFGLTALTLINTVITVFYLYKHLPEDQRKELK

SEQ ID NO: 145048 - DNA, 540 bp, Shigella flexneri
  CDS (1)..(540): transl_table=11
atgaagcagtttcttgattttttaccgctggttgtctttttcgcgttttacaagatttatgacatctatgcggctactgcagcgctgatcgtcgccacggcgattgtgcttatctatagctgggttcgctttcgtaaggttgagaagatggccctgatcacttttgttctggtggtcgtcttcggtggcttgacgctgttcttccacaatgatgagtttattaaatggaaggttacagtcatttatgctctgtttgcgggagccctgttagtcagccaatgggtgatgaaaaagccgctaattcagcggatgctgagtaaagaactcacgctgccgcaaccggtatggtcgaagctaaatctggcctgggctgttttctttatcctttgcggtctggcaaacatctacatcgcattctggctgccgcaaaatatttgggtcaactttaaagtctttggcctgaccgcccttaccttaatcttcacattgttaagcggtatctatatctaccgccacatgccgcaggaagataaatcctaa

SEQ ID NO: 145049 - protein, 179 aa, Shigella flexneri
MKQFLDFLPLVVFFAFYKIYDIYAATAALIVATAIVLIYSWVRFRKVEKMALITFVLVVVFGGLTLFFHNDEFIKWKVTVIYALFAGALLVSQWVMKKPLIQRMLSKELTLPQPVWSKLNLAWAVFFILCGLANIYIAFWLPQNIWVNFKVFGLTALTLIFTLLSGIYIYRHMPQEDKS

SEQ ID NO: 145050 - DNA, 546 bp, Vibrio cholerae
  CDS (1)..(546): transl_table=11
atgaaacaactgctcgactttattccactgatcatttttttcgctttatataagttttatgacatctacgtagcaacaggggcgctgatcgccgccacgacagttcaagtgattgtcacttatgctatgtacaaaaaagtggagaaaatgcagctcatcacattcgtgatggttgctctgtttggtggcatgaccttagccctgcatgacgataacttcatcaaatggaaagtgacgattgtgtatgtggtttttgcgctcggtctaaccatcagccagatcatgggtaaacctgcgatcaaagggatgctcggtaaagagctcaccttgccagatgcggtatggtcaaccattaactgggcatgggtgatgtttttcagcggctgcgctgcactcaatctttatgttgcctaccacctaccgcttgatgtctgggttaatttcaaggtatttggtctgttggcggcaaccttagtgtttactctgctcacggggggctacatctacaaacaccttccccatgaacccaaacagaaaaaccaataa

SEQ ID NO: 145051 - protein, 181 aa, Vibrio cholerae
MKQLLDFIPLIIFFALYKFYDIYVATGALIAATTVQVIVTYAMYKKVEKMQLITFVMVALFGGMTLALHDDNFIKWKVTIVYVVFALGLTISQIMGKPAIKGMLGKELTLPDAVWSTINWAWVMFFSGCAALNLYVAYHLPLDVWVNFKVFGLLAATLVFTLLTGGYIYKHLPHEPKQKNQ

SEQ ID NO: 145052 - DNA, 564 bp, Vibrio parahaemolyticus
  CDS (1)..(564): transl_table=11
atgaagcaaatccttgattttattcctctcattatcttcttcgctctatacaagatgtacgacatctatgtagcgactggagcactcatcgttgcaacggcagttcaacttatcgtgacctacgcgctgtataagaaagtagagaagatgcaactgatcacgtttgtcatcgtcacgatattcggtagcatgaccattttcttccatgacgacaacttcataaaatggaaagtcactatcatttacgtggtgcttgccgttggcttaaccgccagccacttaatgggaaaatcggtcgtcaaaggcatgttgggtaaagagatcacgctacctgacgcaatttgggcgaagataaactgggcatgggtaggcttcttctcattttttgcaggcctaaacatttacatcgcttacgagctacctctggatgtttgggttaacttcaaagtatttggaatgctgatcgccaccttcgcctacatgattgctactggtgtctacatttacaagcacatgccaaaggaagagaaaaataactcctccgatgtctcggttgatgattaa

SEQ ID NO: 145053 - protein, 187 aa, Vibrio parahaemolyticus
MKQILDFIPLIIFFALYKMYDIYVATGALIVATAVQLIVTYALYKKVEKMQLITFVIVTIFGSMTIFFHDDNFIKWKVTIIYVVLAVGLTASHLMGKSVVKGMLGKEITLPDAIWAKINWAWVGFFSFFAGLNIYIAYELPLDVWVNFKVFGMLIATFAYMIATGVYIYKHMPKEEKNNSSDVSVDD

SEQ ID NO: 145054 - DNA, 564 bp, Vibrio vulnificus
  CDS (1)..(564): transl_table=11
atgaagcaaatacttgattttattcctctaattatctttttcgccctctacaagatgtatgatatctatgttgcaacaggcgctttgattgcagcaacagccattcagatcgttgtcacctacgccttgtacaagaaagttgagaagatgcagttaattaccttcttaatggtggccatttttggtggcatgaccattttcctgcatgacgacaactttattaagtggaaagtgaccatcgtctacgccgtgtttgccattggtttgacggtcagccatgttatgggcaaatcggccatcaaaggcatgttgggcaaagagatcaccttgcctgagtcagtatgggcaaacattaactgggcatgggttggctttttcaccttttgtgcagggctgaatatctatgtggcctaccagcttcctttagatgtttgggtgaattttaaagtctttggtttattagcggcgacgttggtttttaccgtcctcactggcggctatatttataaacatctccctaaagaacaaaatggccagtcatcggacgtgccaacggatgaataa

SEQ ID NO: 145055 - protein, 187 aa, Vibrio vulnificus
MKQILDFIPLIIFFALYKMYDIYVATGALIAATAIQIVVTYALYKKVEKMQLITFLMVAIFGGMTIFLHDDNFIKWKVTIVYAVFAIGLTVSHVMGKSAIKGMLGKEITLPESVWANINWAWVGFFTFCAGLNIYVAYQLPLDVWVNFKVFGLLAATLVFTVLTGGYIYKHLPKEQNGQSSDVPTDE

SEQ ID NO: 145056 - DNA, 582 bp, Vitreoscilla sp
  CDS (1)..(582): transl_table=11
atgaacgcgaaaactttggatgctatcaagccgtttttggattggattccattaattgtctttttttacatttataaaacgactgagggcgagggcagcgagcatattattgcagcgacgacaggcttattaattgctactttgattgtgtatggcttgatgtttgtgttgcaaaaattcacattggaaaaacgccagtggttggtggtggtgttgacggtggtgtttggtggcttgacgatggcattccaagacgatttttacattcgtttgaaagcaccgattatcaatgcggtgtttgcgtttggcttggcgatgagtccattgtttttaggcggtactccgggcatccaaaaaatgttaggtccaatttttgagatgacgccgaaacaatggatgaaactcaattgggtctgggttggatttttcacactgatggcggttttacaagcgttgtttgcctttgtatgggtggaatattgggcgatgttcaccgcttttggtgacatgattgtgatggtggtgtttatggtggcgcaattttggtttttgcgtggttttatgcgcaaagacatcaaataa

SEQ ID NO: 145057 - protein, 193 aa, Vitreoscilla sp
MNAKTLDAIKPFLDWIPLIVFFYIYKTTEGEGSEHIIAATTGLLIATLIVYGLMFVLQKFTLEKRQWLVVVLTVVFGGLTMAFQDDFYIRLKAPIINAVFAFGLAMSPLFLGGTPGIQKMLGPIFEMTPKQWMKLNWVWVGFFTLMAVLQALFAFVWVEYWAMFTAFGDMIVMVVFMVAQFWFLRGFMRKDIK

SEQ ID NO: 145058 - DNA, 543 bp, Yersinia pestis
  CDS (1)..(543): transl_table=11
atgaagcaacttttagattttctcccattagtcgtgttctttattttttataagatgtacgacatttttgtcgcttccggggcactcattgttgccaccttggtagctctggcctttacctggctgaaatatcgcaaagtcgaaaaaatgacattggttactgcagcgatggtactggtgttcggtacattaacactcgcattccacagtgacttgtttattaaatggaaagtgactgttttatatgtgctgttcgctttggctttattagtcagtcaatgggtgatgaagaagccgttgattcaacggatgttgggtaaagagttaaccttacctgacaaggtttggtcaacattgaacctgtcgtgggccattttctttctggtctgtgggctactgaatatttatgtcgcgttttggttgcctcaggatatttgggtcaactttaaagttttcggcttaaccgctctgacactgatatttacgttgatcagtggcgtttatatttatcgccatatgccggaagagcagaagaagtcttaa

SEQ ID NO: 145059 - protein, 180 aa, Yersinia pestis
MKQLLDFLPLVVFFIFYKMYDIFVASGALIVATLVALAFTWLKYRKVEKMTLVTAAMVLVFGTLTLAFHSDLFIKWKVTVLYVLFALALLVSQWVMKKPLIQRMLGKELTLPDKVWSTLNLSWAIFFLVCGLLNIYVAFWLPQDIWVNFKVFGLTALTLIFTLISGVYIYRHMPEEQKKS

SEQ ID NO: 145060 - DNA, 26 bp, Artificial sequence
  primer
atgaagcagtttcttgattttttacc

SEQ ID NO: 145061 - DNA, 22 bp, Artificial sequence
  primer
ttaggatttatcttcctgcggc

SEQ ID NO: 145062 - protein, 194 aa, Artificial sequence
  consensus sequence
  Variant (2)..(7): Xaa in position 2 to 7 is any amino acid
  Variant (9)..(11): Xaa in position 9 to 11 is any amino acid
  Variant (14)..(23): Xaa in position 14 to 23 is any amino acid
  Variant (24)..(52): Xaa in position 24 to 52 is any or no amino acid
  Variant (54)..(88): Xaa in position 54 to 88 is any amino acid
  Variant (89)..(89): Xaa in position 89 is any or no amino acid
  Variant (92)..(93): Xaa in position 92 to 93 is any amino acid
  Variant (95)..(101): Xaa in position 95 to 101 is any amino acid
  Variant (103)..(105): Xaa in position 103 to 105 is any amino acid
  Variant (107)..(107): Xaa in position 107 is any amino acid
  Variant (109)..(113): Xaa in position 109 to 113 is any amino acid
  Variant (115)..(138): Xaa in position 115 to 138 is any amino acid
  Variant (139)..(141): Xaa in position 139 to 141 is any or no amino acid
  Variant (143)..(146): Xaa in position 143 to 146 is any amino acid
  Variant (148)..(149): Xaa in position 148 to 149 is any amino acid
  Variant (151)..(153): Xaa in position 151 to 153 is any amino acid
  Variant (155)..(156): Xaa in position 155 to 156 is any amino acid
  Variant (159)..(164): Xaa in position 159 to 164 is any amino acid
  Variant (166)..(175): Xaa in position 166 to 175 is any amino acid
  Variant (176)..(178): Xaa in position 176 to 178 is any or no amino acid
  Variant (181)..(181): Xaa in position 181 is any amino acid
  Variant (184)..(184): Xaa in position 184 is any amino acid
  Variant (187)..(193): Xaa in position 187 to 193 is any amino acid
KXXXXXXPXXXFFXXXXXXXXXXXXXXXXXXXXXXXXXXXXXXXXXXXXXXXAXXXXXXXXXXXXXXXXXXXXXXXXXXXXXXXXXXXXFGXXTXXXXXXXFXXXKXTXXXXXFXXXXXXXXXXXXXXXXXXXXXXXXXXXLXXXXWXXLXXXWXXFFXXXXXXNXXXXXXXXXXXXXWVXFKXFGXXXXXXXF

SEQ ID NO: 145063 - protein, 35 aa, Artificial sequence
  protein pattern
  Variant (2)..(3): Xaa in position 2 to 3 is any or no amino acid
  Variant (6)..(6): Xaa in position 6 is any amino acid
  Variant (7)..(7): Xaa in position 7 is Ala or Leu
  Variant (8)..(8): Xaa in position 8 is Gly, Ser or Thr
  Variant (9)..(15): Xaa in position 9 to 15 is any amino acid
  Variant (16)..(16): Xaa in position 16 is Phe or Tyr
  Variant (17)..(17): Xaa in position 17 is Phe, Ile, Leu or Val
  Variant (18)..(19): Xaa in position 18 to 19 is any amino acid
  Variant (21)..(21): Xaa in position 21 is Ala, Pro, Thr or Val
  Variant (22)..(22): Xaa in position 22 is Pro, Ser or Thr
  Variant (23)..(23): Xaa in position 23 is any amino acid
  Variant (24)..(24): Xaa in position 24 is Phe, Ile, Leu or Val
  Variant (25)..(28): Xaa in position 25 to 28 is any amino acid
  Variant (29)..(29): Xaa in position 29 is Ala, Gly, Ser or Thr
  Variant (30)..(31): Xaa in position 30 to 31 is any amino acid
  Variant (32)..(32): Xaa in position 32 is Phe, Ile, Leu or Met
  Variant (33)..(34): Xaa in position 33 to 34 is any amino acid
  Variant (35)..(35): Xaa in position 35 is Ala, Gly, Asn, Ser or Thr
VXXFGXXXXXXXXXXXXXXKXXXXXXXXXXXXXXX

SEQ ID NO: 145064 - protein, 43 aa, Artificial sequence
  protein pattern
  Variant (2)..(3): Xaa in position 2 to 3 is any amino acid
  Variant (5)..(6): Xaa in position 5 to 6 is any amino acid
  Variant (7)..(7): Xaa in position 7 is Phe or Leu
  Variant (8)..(8): Xaa in position 8 is any amino acid
  Variant (9)..(9): Xaa in position 9 is Asp, Asn or Ser
  Variant (10)..(11): Xaa in position 10 to 11 is any amino acid
  Variant (13)..(13): Xaa in position 13 is Phe, Ile or Leu
  Variant (14)..(15): Xaa in position 14 to 15 is any amino acid
  Variant (17)..(17): Xaa in position 17 is any amino acid
  Variant (18)..(18): Xaa in position 18 is Pro, Ser or Thr
  Variant (19)..(19): Xaa in position 19 is any amino acid
  Variant (20)..(20): Xaa in position 20 is Phe, Ile, Leu or Val
  Variant (21)..(24): Xaa in position 21 to 24 is any amino acid
  Variant (25)..(25): Xaa in position 25 is Ala, Gly, Ser or Thr
  Variant (26)..(30): Xaa in position 26 to 30 is any amino acid
  Variant (31)..(31): Xaa in position 31 is Ala, Gly, Ser or Thr
  Variant (32)..(42): Xaa in position 32 to 42 is any amino acid
  Variant (43)..(43): Xaa in position 43 is Phe, Ile, Leu or Met
GXXTXXXXXXXFXXXKXXXXXXXXXXXXXXXXXXXXXXXXXXX

SEQ ID NO: 145065 - protein, 15 aa, Artificial sequence
  protein pattern
  Variant (2)..(2): Xaa in position 2 is Ala or Val
  Variant (3)..(3): Xaa in position 3 is any amino acid
  Variant (6)..(6): Xaa in position 6 is any amino acid
  Variant (7)..(7): Xaa in position 7 is Phe or Trp
  Variant (9)..(10): Xaa in position 9 to 10 is any amino acid
  Variant (11)..(11): Xaa in position 11 is Ala, Gly, Ile, Leu, Pro or Val
  Variant (12)..(13): Xaa in position 12 to 13 is any amino acid
  Variant (14)..(14): Xaa in position 14 is Phe, Ile, Leu, Met or Val
  Variant (15)..(15): Xaa in position 15 is Ala, Ile, Leu or Val
WXXFKXXGXXXXXXX

SEQ ID NO: 145066 - DNA, 297 bp, Escherichia coli
  CDS (1)..(297): transl_table=11
atgaaaaaagagaactattcattcaagcaagcttgtgctgttgtcggtgggcaatcagcaatggctaggcttttaggtgtatcacctccaagcgtaaatcaatggatcaaaggggtacgtcaattgcctgccgagagatgtccagcaattgaacgtgcaacaagaggtgaggttctgtgcgaagaacttcgtcctgatattgactggtcatatttacgacgttcggcatgttgttcgcagaatatgtcagtgaagcaactaaatgacagtaacaaatcctcatttgatcatacctaa

SEQ ID NO: 145067 - protein, 98 aa, Escherichia coli
MKKENYSFKQACAVVGGQSAMARLLGVSPPSVNQWIKGVRQLPAERCPAIERATRGEVLCEELRPDIDWSYLRRSACCSQNMSVKQLNDSNKSSFDHT

SEQ ID NO: 145068 - DNA, 324 bp, Escherichia coli O157:H7 EDL933
  CDS (1)..(324): transl_table=11
atgaaaaaagataactattcattcaaacgagcttgtgctgttgtcggtgggcaatcagcaatggctaggcttttaggtgtatctcctccaagcgtaaatcaatggatcaaaggtgtacgtcagttgcctgctgagagatgtcctgcgattgaacgagcaacaaaaggtggtgtcctgtgtgaagaacttcgtcctgatgttgattggacatacttacgacgctcgtcatgttattcgcagaatatgtcgatgaagcaaccaaatgacgaaaacgatcatacccgaagcatcaagaggcaaatgattcatgaaaatcaaacatga

SEQ ID NO: 145069 - protein, 107 aa, Escherichia coli O157:H7 EDL933
MKKDNYSFKRACAVVGGQSAMARLLGVSPPSVNQWIKGVRQLPAERCPAIERATKGGVLCEELRPDVDWTYLRRSSCYSQNMSMKQPNDENDHTRSIKRQMIHENQT

SEQ ID NO: 145070 - DNA, 315 bp, Xylella fastidiosa 9a5c
  CDS (1)..(315): transl_table=11
atgcctaaaaatgtttgcatgaatgaaccgattgccatcaatgttgcgtgtcaactggttggcggccagtctgcacttgctggcttgcttggtgtttcgtcgccaaccgtgaaccagtggtgtaatggtgtcagaccagtgcccgctgagcgatgtccttccattgagcgcgtcaccagtggcgaagttacctgtgaagaactgcgcccagacgtggattgggaatatctgcgtggcacagtcgccgcaggtcaagcggaatccgacgcctgcatcacagaccacaggccggaggcatccaatgccgcggcctaa

SEQ ID NO: 145071 - protein, 104 aa, Xylella fastidiosa 9a5c
MPKNVCMNEPIAINVACQLVGGQSALAGLLGVSSPTVNQWCNGVRPVPAERCPSIERVTSGEVTCEELRPDVDWEYLRGTVAAGQAESDACITDHRPEASNAAA

SEQ ID NO: 145072 - DNA, 294 bp, Burkholderia vietnamiensis G4
  CDS (1)..(294): transl_table=11
ttgttatacaagaaaaacttgtataggattgacgcatctgcttgtccctctgggaatgtcatgaacgattcgattgatcgtgctgttaagcacttcgggtctatgtcggcgatggcccggcatctcggcctgtccagctatacggtgatccagcaatggaagatcgccggtcgcgtcccggctgagcattgcccgaacattgagcgcctttgtggtggcgtggtccgctgtgaagatctgaacgatcgcgtcgattgggctttcgttcgcgcatcagcacaggtgacgtcatga

SEQ ID NO: 145073 - protein, 97 aa, Burkholderia vietnamiensis G4
MLYKKNLYRIDASACPSGNVMNDSIDRAVKHFGSMSAMARHLGLSSYTVIQQWKIAGRVPAEHCPNIERLCGGVVRCEDLNDRVDWAFVRASAQVTS

SEQ ID NO: 145074 - DNA, 411 bp, Azoarcus sp. EbN1
  CDS (1)..(411): transl_table=11
atgaaccgaaacccgatccttttggcgtgcgaatccgtaggcggccaagcaaccttggcccgtgctctcggcgtgacgcctgctgcggtcagccagtgggttactggcgttcgaccgatccccgccgagcgctgcccggccatcgagcgcgccacagccggcgccgtccgctgcgaagaactccgccccgacgtggattgggggtatctgcgcgggactggcgacgtggaaagcgaaaccacgctccccgccttcgtgccaactccggttgatgtggccgagcgaacctatgtcgagcccgtccatgacgaccgccgcgcggtggaacgtcgcgatggtgaccggcgcgtgcggagcgagcagcggcggaaggatcgtcgggcggtggatcggcgggatgggagggcgtga

SEQ ID NO: 145075 - protein, 136 aa, Azoarcus sp. EbN1
MNRNPILLACESVGGQATLARALGVTPAAVSQWVTGVRPIPAERCPAIERATAGAVRCEELRPDVDWGYLRGTGDVESETTLPAFVPTPVDVAERTYVEPVHDDRRAVERRDGDRRVRSEQRRKDRRAVDRRDGRA

SEQ ID NO: 145076 - DNA, 240 bp, Haemophilus influenzae R2866
  CDS (1)..(240): transl_table=11
atgaataattctattgaaaaagctatttttatttgcggaacacaagttaaattggcaagtatgtgcaaagtttcacagcaagctgtaaatctttggctaaatggctcaaagatggatgtgaaatacatcccattcatcatccaagccacaaaatttgaagtaaacccaaccgaactaagacccgatgtagattggccaacaatttacgaaagtttgaaacaggtgtttgaagggaattaa

SEQ ID NO: 145077 - protein, 79 aa, Haemophilus influenzae R2866
MNNSIEKAIFICGTQVKLASMCKVSQQAVNLWLNGSKMDVKYIPFIIQATKFEVNPTELRPDVDWPTIYESLKQVFEGN

SEQ ID NO: 145078 - DNA, 246 bp, Haemophilus somnus 2336
  CDS (1)..(246): transl_table=11
atggataaaaatataaaaaaaacaattaatttggttggtactcaaacgaaactagcgaaattatgtagtgttagtcagccttcaatttctatttggctaaaaggcggaaaaatggacgtgaaatatatcccgtcccttatcaaggcgactaatggcgaggtaacgcccgaggatttacgtcctgatgtggattgggaggttattcggcaatgctgggagcgtaaagatggcaaatatgaatcataa

SEQ ID NO: 145079 - protein, 81 aa, Haemophilus somnus 2336
MDKNIKKTINLVGTQTKLAKLCSVSQPSISIWLKGGKMDVKYIPSLIKATNGEVTPEDLRPDVDWEVIRQCWERKDGKYES

SEQ ID NO: 145080 - DNA, 297 bp, Xylella fastidiosa Dixon
  CDS (1)..(297): transl_table=11
atgaatgaaccgattgccatcaatgttgcgtgtcaactggttggtggccagtctgcactcgctggcttgcttggtgtttcgtcgccaaccgtgaaccagtggtgtaatggtgtcagaccagtgcccgctgagcgatgtccttccattgagcgggccaccagtggcgaagttacctgtgaagaactgcgcccagacgtggattgggaatatctgcgtggtgcagccgccgcaggtcaagcggaatccggtgcctgcatcacagaccacaggccggaggcatccaatgccgcggcctaa

SEQ ID NO: 145081 - protein, 98 aa, Xylella fastidiosa Dixon
MNEPIAINVACQLVGGQSALAGLLGVSSPTVNQWCNGVRPVPAERCPSIERATSGEVTCEELRPDVDWEYLRGAAAAGQAESGACITDHRPEASNAAA

SEQ ID NO: 145082 - DNA, 267 bp, Xylella fastidiosa Ann-1
  CDS (1)..(267): transl_table=11
atgtcactggttggtggccagtctgcactcgctggcttgcttggtgtttcgtcgccaaccgtgaaccagtggtgtaatggtgtcagaccagtgcccgctgagcgatgtccttccattgagcgggccaccagtggcgaagttacctgtgaagaactgcgcccagacgtggattgggaatatctgcgtggtgcagccgccgcaggtcaagcggaatccggtgcctgcatcacagaccacaggccggaggcatccaatgccgcggcctaa

SEQ ID NO: 145083 - protein, 88 aa, Xylella fastidiosa Ann-1
MSLVGGQSALAGLLGVSSPTVNQWCNGVRPVPAERCPSIERATSGEVTCEELRPDVDWEYLRGAAAAGQAESGACITDHRPEASNAAA

SEQ ID NO: 145084 - DNA, 306 bp, Xylella fastidiosa Ann-1
  CDS (1)..(306): transl_table=11
atgaacctaaccaagtggacaagccaagaacgcgggcgcgcatcccaattggcacggatgctttctgtaagctcgacgaccgtagccaactggatttctggaaaaaagcccatcccaccagaacgttgtccggcgattgagcgggcgacagtgcgagctgtgacctgtgaagaactccgccccgacgtggattgggaatacctgcgtggcacagccgccatagaccaagcgaaatcgaaatctggtgcagacatcttcggcgccccccccacaggccacctgccggaggtgtccgatgcggcgtga

SEQ ID NO: 145085 - protein, 101 aa, Xylella fastidiosa Ann-1
MNLTKWTSQERGRASQLARMLSVSSTTVANWISGKKPIPPERCPAIERATVRAVTCEELRPDVDWEYLRGTAAIDQAKSKSGADIFGAPPTGHLPEVSDAA

SEQ ID NO: 145086 - DNA, 27 bp, Artificial sequence
  primer
atgaaaaaagagaactattcattcaag

SEQ ID NO: 145087 - DNA, 28 bp, Artificial sequence
  primer
ttaggtatgatcaaatgaggatttgtta

SEQ ID NO: 145088 - protein, 59 aa, Artificial sequence
  consensus sequence
  Variant (2)..(2): Xaa in position 2 is any amino acid
  Variant (4)..(6): Xaa in position 4 to 6 is any amino acid
  Variant (8)..(9): Xaa in position 8 to 9 is any amino acid
  Variant (11)..(11): Xaa in position 11 is any amino acid
  Variant (14)..(16): Xaa in position 14 to 16 is any amino acid
  Variant (17)..(17): Xaa in position 17 is any or no amino acid
  Variant (19)..(20): Xaa in position 19 to 20 is any amino acid
  Variant (22)..(23): Xaa in position 22 to 23 is any amino acid
  Variant (25)..(27): Xaa in position 25 to 27 is any amino acid
  Variant (28)..(28): Xaa in position 28 is any or no amino acid
  Variant (30)..(30): Xaa in position 30 is any amino acid
  Variant (32)..(32): Xaa in position 32 is any amino acid
  Variant (35)..(35): Xaa in position 35 is any amino acid
  Variant (41)..(41): Xaa in position 41 is any amino acid
  Variant (43)..(43): Xaa in position 43 is any amino acid
  Variant (45)..(45): Xaa in position 45 is any amino acid
  Variant (56)..(58): Xaa in position 56 to 58 is any amino acid
GXQXXXAXXLXVSXXXXVXXWXXGXXXXPXEXCPXIERATXGXVXCEELRPDVDWXXXR

SEQ ID NO: 145089 - protein, 29 aa, Artificial sequence
  protein pattern
  Variant (2)..(2): Xaa in position 2 is any amino acid
  Variant (5)..(5): Xaa in position 5 is Ala, Asn or Ser
  Variant (9)..(9): Xaa in position 9 is Ala, Leu or Val
  Variant (10)..(10): Xaa in position 10 is Cys or Thr
  Variant (11)..(13): Xaa in position 11 to 13 is any amino acid
  Variant (15)..(15): Xaa in position 15 is any amino acid
  Variant (18)..(18): Xaa in position 18 is Asp or Glu
  Variant (20)..(20): Xaa in position 20 is Asn or Arg
  Variant (21)..(21): Xaa in position 21 is Asp or Pro
  Variant (22)..(22): Xaa in position 22 is Asp or Arg
  Variant (23)..(23): Xaa in position 23 is Ile or Val
  Variant (26)..(26): Xaa in position 26 is Ala, Glu, Gly, Ser or Thr
  Variant (27)..(27): Xaa in position 27 is Phe or Tyr
  Variant (28)..(28): Xaa in position 28 is Leu or Val
EXCPXIERXXXXXVXCEXLXXXXDWXXXR

SEQ ID NO: 145090 - protein, 21 aa, Artificial sequence
  protein pattern
  Variant (2)..(2): Xaa in position 2 is any amino acid
  Variant (3)..(3): Xaa in position 3 is Ala or Gln
  Variant (4)..(4): Xaa in position 4 is Ala, Ser or Thr
  Variant (5)..(5): Xaa in position 5 is any amino acid
  Variant (6)..(6): Xaa in position 6 is Leu or Met
  Variant (8)..(8): Xaa in position 8 is any amino acid
  Variant (9)..(9): Xaa in position 9 is any or no amino acid
  Variant (11)..(11): Xaa in position 11 is any amino acid
  Variant (12)..(12): Xaa in position 12 is any or no amino acid
  Variant (14)..(14): Xaa in position 14 is Ser or Thr
  Variant (15)..(15): Xaa in position 15 is Pro, Gln or Ser
  Variant (16)..(16): Xaa in position 16 is Ala, Pro or Thr
  Variant (17)..(17): Xaa in position 17 is Ala, Ser or Thr
  Variant (18)..(18): Xaa in position 18 is Ile or Val
  Variant (19)..(19): Xaa in position 19 is Ala, Asn or Ser
  Variant (20)..(20): Xaa in position 20 is any amino acid
GXXXXXAXXLXXVXXXXXXXW

SEQ ID NO: 145091 - DNA, 1758 bp, Escherichia coli
  CDS (1)..(1758): transl_table=11
atggaaaattcacgcatccctggggaacatttttttaccaccagtgataatacagcgttgttttatcggcactggcccgctttacagcccggggcgaaaaaggtcatcgtcttatttcatcgcgggcatgaacattctggtcgtctacaacatctcgttgatgaactggcgatgccagatactgctttttatgcctgggatgcccgagggcatggaaaaagttcggggccgcgtggttatagcccatctcttgcgcgttcagtgcgggatgtcgatgaatttgtccgttttgctgccagcgacagccaggttggactggaagaggtggtagtgatcgcgcaaagcgtcggcgcagtgctggttgccacatggattcatgattatgcacctgcaattcgcgggctggtgctggcttctccggcctttaaggttaaattgtatgtgccgctggcacgtcctgcgctggcgttatggcatcgtctgcgtggtctgttttttattaattcctatgtgaaaggacgctatttgacccacgatcggcaacggggggcgagtttcaataatgatccgctgatcacacgggcgattgccgttaatatcttgctcgatctctacaaaacgtctgaacgtattattagagatgcggcggcgattacgctccccacgcaacttctgatatcaggcgatgactatgtggtgcatcgccaaccgcagattgatttttatcagagattacgtagccctctgaaagagctgcatctgctgccaggcttttatcacgacacgttgggtgaagagaacagggcgctggcatttgaaaaaatgcaaagctttattagtcgtttatatgctaacaaatcgcaaaaatttgattatcagcatgaagactgcacaggaccatcagcggatcgatggcggctactttctggtggacccgtgccattatcgccggttgatttagcgtatcgctttatgcgaaaggcgatgaaattgttcgggacgcactcttcgggcctgcatctcggaatgagcaccggctttgattcaggcagttcgctggattatgtctatcaaaatcaaccgcaaggtagtaacgcattcgggcgtttagtcgacaaaatctacctgaacagtgttggctggcgcggtattcgccagcgcaaaacccatttacaaatactgattaaacaagccgttgccgatctccacgccaaaggtttagccgtccgcgtggttgacattgccgcagggcatgggcgctatgtactggatgcgctggcaaacgagcctgccgtaagcgatattttgttacgtgattacagcgagttaaatgttgcacaggggcaagagatgattgctcaacggggaatgtctgggcgggtgcgttttgaacagggcgatgcgtttaacccggaggaactcagcgcgttaactccgcggcctacgctggcgattgtctctggcctgtatgagctttttcccgaaaatgagcaggtaaaaaactcactcgcaggtcttgccaatgccatcgaaccgggcggcattctcatctacaccgggcagccgtggcaccctcaactggagatgattgccggggtgttaaccagtcataaagatggtaaaccgtgggtaatgcgcgtgcgttcgcaaggggagatggattcactcgtgcgtgatgccggatttgataaatgcacacaacggattgatgagtggggtatttttacggtttcgatggcggtgcgtcgtgataactaa

SEQ ID NO: 145092 - protein, 585 aa, Escherichia coli
MENSRIPGEHFFTTSDNTALFYRHWPALQPGAKKVIVLFHRGHEHSGRLQHLVDELAMPDTAFYAWDARGHGKSSGPRGYSPSLARSVRDVDEFVRFAASDSQVGLEEVVVIAQSVGAVLVATWIHDYAPAIRGLVLASPAFKVKLYVPLARPALALWHRLRGLFFINSYVKGRYLTHDRQRGASFNNDPLITRAIAVNILLDLYKTSERIIRDAAAITLPTQLLISGDDYVVHRQPQIDFYQRLRSPLKELHLLPGFYHDTLGEENRALAFEKMQSFISRLYANKSQKFDYQHEDCTGPSADRWRLLSGGPVPLSPVDLAYRFMRKAMKLFGTHSSGLHLGMSTGFDSGSSLDYVYQNQPQGSNAFGRLVDKIYLNSVGWRGIRQRKTHLQILIKQAVADLHAKGLAVRVVDIAAGHGRYVLDALANEPAVSDILLRDYSELNVAQGQEMIAQRGMSGRVRFEQGDAFNPEELSALTPRPTLAIVSGLYELFPENEQVKNSLAGLANAIEPGGILIYTGQPWHPQLEMIAGVLTSHKDGKPWVMRVRSQGEMDSLVRDAGFDKCTQRIDEWGIFTVSMAVRRDN

SEQ ID NO: 145093 - DNA, 1761 bp, Pseudomonas aeruginosa PAO1
  CDS (1)..(1761): transl_table=11
atgcgcgacgtacaggaattgcgtttcaccacccacgacggggtagagctcttctaccgccactggccggccagccgcccggcgccggacggcacgcgccaggcggtgctgctgttccaccgcggccatgagcactccgggcggatcgcccacctggtcgacgaactcgacctgccggaacacgacttcttcgcctgggacgcccgtggccacggcctctcgccaggcgcccgcggcgacagcccgagctttgccaccagcgtgcgcgacgtacagaccttcgtcgaccatatccaggccgtccacggtatcgccgaagagcggatggcggtggtggcgcagagcgtcggcgcggtgctggtttccacctgggcccacgactacgcgccgaaggtgcgcgcactggtgctggcttcgccggcgttccaggtcaagctctacgtgccgttcgcccgcagcgggctgaaactgatgcgcctgtggcgcggcaatttcttcgtcaacagctatgtcaaggcacgcttcctcagtcacgacccggagcggatcgcctcctacgacagcgacccgctgatcgccaaggcgatctcggtgaacgtcctgctcggcctctacgaagctgccgagcgggtggtagcggacgcacaggcgatccagattcccacccaactgctgatttccggggccgacttcgtcgtccatcgtgcgccgcaggagcgcttcttcgagcgtctcggcagcctgcgcaaggaaaagcacatcctgcccggcttcttccacgacacccttggcgagcgcgatcgtcacctggccgtcggccgtgcccggcgcttcctcctcgaggcattcgccacggcacctgaacgaccgagcctgcttgatgccgaccgcctgggtcatacctgcgccgaggccgaggcgctggccgcgccgttgccgaagaactcgccgcgcgatctctactggcgcgccacccgtgccgggctgcgcctgggcagcctgtggtcggacggggtcaagctgggcttcgacaccggcttcgattccggcagcaccctcgactatgtctaccgcaaccagccctgcggcagcggcccgctgggtcgcctgatcgaccgcaactacctggactccatcggctggcgcggcatccgccagcgcaagctgcacgtcgaggaactgctgcgcctggccatgcagcggttgcgcgaggagcagcgcgaggtgcgcatcgtcgacatcgccgccggccacggccgctacatcctcgaagccctgcaaggcgtcgagccgctgccggaaagcatcctcctgcgcgactacagcgagatcaacgtgcgtgacggcagcgccctgatcgaaagcaagggcctcgccggcatcgcccgcttcgtcaagggcgatgccttcgatcgcgccgacctggcggcgctgcaaccgaagccgagcctcggggtggtttccgggctctacgagctgttcgccgacaaccgcatggtcggcgactccctcgccggcctcggcgaggcgctggaggagggcggctacctggtctacaccggacagccctggcacccgcagctggaactgatcgcccgcgcgctgaccagccaccgccagggccaggcctgggtgatgcggcgccggacccaggcggaaatggaccagctggtggccgccgccggcttccgcaagatcacccagcgggtcgaccagtggggcatcttcagcgtatcgctggcgcagaaggtcgcccgctga

SEQ ID NO: 145094 - protein, 586 aa, Pseudomonas aeruginosa PAO1
MRDVQELRFTTHDGVELFYRHWPASRPAPDGTRQAVLLFHRGHEHSGRIAHLVDELDLPEHDFFAWDARGHGLSPGARGDSPSFATSVRDVQTFVDHIQAVHGIAEERMAVVAQSVGAVLVSTWAHDYAPKVRALVLASPAFQVKLYVPFARSGLKLMRLWRGNFFVNSYVKARFLSHDPERIASYDSDPLIAKAISVNVLLGLYEAAERVVADAQAIQIPTQLLISGADFVVHRAPQERFFERLGSLRKEKHILPGFFHDTLGERDRHLAVGRARRFLLEAFATAPERPSLLDADRLGHTCAEAEALAAPLPKNSPRDLYWRATRAGLRLGSLWSDGVKLGFDTGFDSGSTLDYVYRNQPCGSGPLGRLIDRNYLDSIGWRGIRQRKLHVEELLRLAMQRLREEQREVRIVDIAAGHGRYILEALQGVEPLPESILLRDYSEINVRDGSALIESKGLAGIARFVKGDAFDRADLAALQPKPSLGVVSGLYELFADNRMVGDSLAGLGEALEEGGYLVYTGQPWHPQLELIARALTSHRQGQAWVMRRRTQAEMDQLVAAAGFRKITQRVDQWGIFSVSLAQKVAR

SEQ ID NO: 145095 - DNA, 1758 bp, Escherichia coli O157:H7 EDL933
  CDS (1)..(1758): transl_table=11
atggaaaattcacgcatccctggggaacatttttttaccaccagtgataatacagcgttgttttatcggcactggcccgctttacagccaggggcgaaaaaggtcatcgtcttatttcatcgcggtcatgaacattctggtcgtctacaacatatcgttgatgaactggcgatgccagatactgctttttatgcatgggatgcccgagggcatggacaaacttcggggccccgtggttatagcccatctcttgcgcgttcagtgcgggatgtcgatgagtttgtccgttttgctgccagcgacagccaggtcgggctggaagaggtggtagtgatcgcgcagagcgtcggcgcagtgctggttgccacatgggttcatgattatgcgcctgcaattcgcgggctggtgctggcttctccggcctttaaggttaaattgtatgtgccgctggcacgtcctgcgctggcgttatggcatcgtctgcgtggtctgttttttattaattcctatgtgaaaggacgctatttgacccacgatcggcaacgggtggcgagtttcaataatgatccgctgatcacacgggcgattgccgttaatatcttgctcgatctttataaaacgtctgaacgtattgttagcgatgcggcggcgattacgctccccacgcaacttctgatatcaggcgatgactatgtggtgcatcgccaaccgcagattgatttttatcatagattacgtagccctctgaaagagctgcatctgctgccaggcttttatcacgacacgttgggtgaagagaacagggcgcaggcatttgaaaaaatgcaaagctttattagtcgtttatatgctaacaagtcacaaaaatttgattatcagcatgaagaccgcactggaccatcagcggatcgctggcggctcctttcaggtggacccgtgccattatcgccggttgatttggcgtatcgctttatgcgtaaagcgatgaaattgttcgggacgcactctgcgggcctgcatctcggaatgagcaccggctttgattcaggcagttcgctggattatgtctatcaaaatcaaccgcaaggtagtaacgcattcgggcgcttaatcgacaaaatctacctgaacagtgttggctggcgcggtattcgccagcgcaaaacccatttacaaatactgattaaacaagccgttgccgatctccacgccaaaggtttagccgtccgcgtggttgacattgccgcagggcatgggcgctatgtactggatgcgctggcaaacgagcctgccgtaagcgatattttgttacgtgattacagcgagttaaatgttgcacaggggcaagagatgattgctcaacggggaatgtctgggcgggtgcgttttgaacagggcgatgcgtttaacccggaggaactcagcgcgttaactccgcggcctacgctggcgattgtctctggactgtatgagctttttcccggaaatgagcaggtaaaaaactcactcgcaggtcttgccaatgccatcgaaccgggcggcattctcctctacaccgggcagccgtggcacccacaactggagctgattgccggggtgttaaccagtcataaagatggtaaaccgtgggtaatgcgcgtgcgttcgcaaggggagatggattcactcgtgcgtgatgccggatttgataaatgcacacaacggattgatgagtggggcatttttacggtttcgatggcggtgcgtcgtgataactga

SEQ ID NO: 145096 - protein, 585 aa, Escherichia coli O157:H7 EDL933
MENSRIPGEHFFTTSDNTALFYRHWPALQPGAKKVIVLFHRGHEHSGRLQHIVDELAMPDTAFYAWDARGHGQTSGPRGYSPSLARSVRDVDEFVRFAASDSQVGLEEVVVIAQSVGAVLVATWVHDYAPAIRGLVLASPAFKVKLYVPLARPALALWHRLRGLFFINSYVKGRYLTHDRQRVASFNNDPLITRAIAVNILLDLYKTSERIVSDAAAITLPTQLLISGDDYVVHRQPQIDFYHRLRSPLKELHLLPGFYHDTLGEENRAQAFEKMQSFISRLYANKSQKFDYQHEDRTGPSADRWRLLSGGPVPLSPVDLAYRFMRKAMKLFGTHSAGLHLGMSTGFDSGSSLDYVYQNQPQGSNAFGRLIDKIYLNSVGWRGIRQRKTHLQILIKQAVADLHAKGLAVRVVDIAAGHGRYVLDALANEPAVSDILLRDYSELNVAQGQEMIAQRGMSGRVRFEQGDAFNPEELSALTPRPTLAIVSGLYELFPGNEQVKNSLAGLANAIEPGGILLYTGQPWHPQLELIAGVLTSHKDGKPWVMRVRSQGEMDSLVRDAGFDKCTQRIDEWGIFTVSMAVRRDN

SEQ ID NO: 145097 - DNA, 1764 bp, Yersinia pestis CO92
  CDS (1)..(1764): transl_table=11
atgagtcaggaagtgcgtttatttcaagaaggcatgttcaccgccagcgatgaaacatcgttgtattttcgccactggtctgccacggaaggtaacagcaagaaagttattgtgttgtttcatcgcgggcatgaacactcggggcgtctgcaacatattgtggatgaactgatgatgcccgatacccatttttacgcgtgggatgcgcgtggacacgggcagtcgccaggggctcgtggctacagccccagccttgctcgctcggttttagacgtggatgagtttgtgcgttttgtggcacaggatgcgcaggtcaacctcgacgatatcgtggtgattgcgcaaagcgtgggggccgtgctggtatcaacctgggttcatgactacgcgccgaaaatccgtggcatggtgctggcgtccccggcatttaaggtcaagctgtatgtgccgtttgcccgcctggggctgggattaatgcagcgtatacgtggcctgttttacgtgaattcctacgtgaaagggaaattcctcagccacgaccccgagcgcatcgccagctttgagcaggacaaattaatcacgcgccagatcgccgtcaatattttgctcgatctctacaaaacggctgaacgtattgtttcagactcgacggcgattactctcccgacccagttgcttatttccggcgatgattttgtggtgcatgagaaaccgcaaaaacaattttatgccggtcttcgcagcgcgataaaagagcaacatattctgccgggtttctatcacgacacgctgggtgaaaaagaccgctctattgcttttgataaaatgaaaaactttatcgaccgactctatgcaactgcgccttatgcctttgattatagccatgaagatcgctggagtccgagtgccgatgcgtatcgtgaattgcaggctccaccaaaatcacgctcgctggaagggatgttttatgctgcgctaagtttcggcatgaagaccatcgggcgacagtccaaagggatgctcctgggttatgaaacaggttttgactccggcagtacgctggattacgtctatcgtaatcagcctgaaggtaatggcattctggggcgtatgattgaccacaactatctgaacagcgttggctggcgtggtattcgcgtgcgtaaagtgaatatccagcagatgattgaacaggccgttgcgaagattcagctcagtcacatgccggtgcgagtggtcgatatcgccgccggacatggccgctatgtgctggatgcactggaaaaacagcagggtatcgaaagtatactgctgcgtgattacagcgatttgaatgtagaaaaaggtcaggcgatgatcgaagagcgtgggctaagccacgtcgctcagttcagaaaaggcaacgccttcgactatgattcccttgccacgctcgatcctgctccgacgctgggcattgtttccgggctgtatgagctcttcccggataacgacttaatcaaaacgtcgttggccgggctggctgcggctattccaccaggcggcatgctggtatacaccgggcaaccgtggcacccacagttaaaaaccatcgcgtataccttaaccagccatcaaaacgggatcccgtggatgatgcgtgtgcgcagccagaaagagatggacacgctggtggagcaggccggctttgaaaaatgccatcaggtgattgatgagtttggcattttcaccgtgtcgctggcggtgagaaagcagcatggttga

SEQ ID NO: 145098 - protein, 587 aa, Yersinia pestis CO92
MSQEVRLFQEGMFTASDETSLYFRHWSATEGNSKKVIVLFHRGHEHSGRLQHIVDELMMPDTHFYAWDARGHGQSPGARGYSPSLARSVLDVDEFVRFVAQDAQVNLDDIVVIAQSVGAVLVSTWVHDYAPKIRGMVLASPAFKVKLYVPFARLGLGLMQRIRGLFYVNSYVKGKFLSHDPERIASFEQDKLITRQIAVNILLDLYKTAERIVSDSTAITLPTQLLISGDDFVVHEKPQKQFYAGLRSAIKEQHILPGFYHDTLGEKDRSIAFDKMKNFIDRLYATAPYAFDYSHEDRWSPSADAYRELQAPPKSRSLEGMFYAALSFGMKTIGRQSKGMLLGYETGFDSGSTLDYVYRNQPEGNGILGRMIDHNYLNSVGWRGIRVRKVNIQQMIEQAVAKIQLSHMPVRVVDIAAGHGRYVLDALEKQQGIESILLRDYSDLNVEKGQAMIEERGLSHVAQFRKGNAFDYDSLATLDPAPTLGIVSGLYELFPDNDLIKTSLAGLAAAIPPGGMLVYTGQPWHPQLKTIAYTLTSHQNGIPWMMRVRSQKEMDTLVEQAGFEKCHQVIDEFGIFTVSLAVRKQHG

SEQ ID NO: 145099 - DNA, 1701 bp, Fusobacterium nucleatum subsp. nucleatum ATCC 25586
  CDS (1)..(1701): transl_table=11
atggaaaatttctattttaatacttttgatggaaataaaattttttatagaatatggaatttcgagaaaaacaaaaaaactttaattatcattcatagaggacatgaacattcagagagattaagtgaattaacacaaaatgaaaaatttttaaaatataatatttttgcctatgatttaagaggacatggctatacagaagttaaatcttctcctaatgctatggattatgttagggatttagattcttttataaaacatctaaaaaatgaataccaaataaaagaagaagatattttcattgttgcaaatagtataggtggagtaatactttctgcctatgttcatgattttgcaccaaatatagcaggtatggctttacttgcacctgcttttgaaataaaactttatattccttttgctaaacaacttgttacattgcttactaaaataaaaaaagatgctaaagttatgagttatgtaaaagcaaaagttttaactcatgatattgaagaacaaaataaatataattctgataaacttatcaataaagaaattaatgctaaactattaattgatttagctgatatgggaaaaagattggttgaagattcaatggcaatagaattacctacaataatattttctgctgaaaaagattatgttgtaaaaaattctgccgaaaaaagatttttcttaaatttatcatctaaaaaaagagagtttatagaacttgaaaatttttatcatggaataatctttgaaaaagaaagagaaaaagtatataaaatgttggatgattttatacaagatattttcaaaaatcaaaatacttcacttgatgtttctcctagagaattttcaagaaaggagtatgagaggataggcttggaagaatatcctctaagtgaaaaaatattttattctattcaaaaattctctatgaaaacttttgggtttttaagcaaaggaatgagtttaggcttaaaatatggctttgactctgggatttctcttgattatatttataaaaatcaagctgatggaaaattattactaggaaaatttatagatagattttatctaaatcaaatcggatgggcaggtgtaagagaaagaaaaaagaacttgcttactttaatagaagaaaagataaataatttaggtgaagaaaatgttaaaatcttagatgtagctggtggaactggaaattatttatttgatataaaagaaaaatatccaaatgtacagattttaataaatgagtttaaaaaatcaaatattgaagttggagaagaagttattaagaaaaacaattgggaaaatatatcttttgtaaactatgattgttttaataaggaaacttataaaaaaataaattacacacccaatatagttataatctcaggagtttttgaactctttgaagataataatatgcttgaaaatactatatcaggagtggcagaaatcttagataaaaatggtactgttatttacacaggtcaaccttggcaccctcaattaaagcaaatagctttagttcttaatagccataaaggacatggtaaatcttggcttatgagaagaagaagtgaaaaagagttagatagcttatttgaaaattataatttaaagaaagaaaaaatgctaattgataatgatggaatttttacagtttcattagcagaattgaggtaa

SEQ ID NO: 145100 - protein, 566 aa, Fusobacterium nucleatum subsp. nucleatum ATCC 25586
MENFYFNTFDGNKIFYRIWNFEKNKKTLIIIHRGHEHSERLSELTQNEKFLKYNIFAYDLRGHGYTEVKSSPNAMDYVRDLDSFIKHLKNEYQIKEEDIFIVANSIGGVILSAYVHDFAPNIAGMALLAPAFEIKLYIPFAKQLVTLLTKIKKDAKVMSYVKAKVLTHDIEEQNKYNSDKLINKEINAKLLIDLADMGKRLVEDSMAIELPTIIFSAEKDYVVKNSAEKRFFLNLSSKKREFIELENFYHGIIFEKEREKVYKMLDDFIQDIFKNQNTSLDVSPREFSRKEYERIGLEEYPLSEKIFYSIQKFSMKTFGFLSKGMSLGLKYGFDSGISLDYIYKNQADGKLLLGKFIDRFYLNQIGWAGVRERKKNLLTLIEEKINNLGEENVKILDVAGGTGNYLFDIKEKYPNVQILINEFKKSNIEVGEEVIKKNNWENISFVNYDCFNKETYKKINYTPNIVIISGVFELFEDNNMLENTISGVAEILDKNGTVIYTGQPWHPQLKQIALVLNSHKGHGKSWLMRRRSEKELDSLFENYNLKKEKMLIDNDGIFTVSLAELR

SEQ ID NO: 145101 - DNA, 1761 bp, Xanthomonas axonopodis pv. citri str. 306
  CDS (1)..(1761): transl_table=11
atgcgcacagtgctagagcgcgagttcgtcagtttcgatggtgtgccgctgttctaccggcactggccgttgcacgatgccgtcgcgaccggcacgcccagggcggtggtgctgctgcatcgtggccatgagcactccggccgtgtgatgcatcttgccgaagaactcgacatgcccgatgcgcagttctttgcctgggatgcacgcggcaacggtcgctcgcccggcgtgcgtggcgatgcgccgggcttcgaggcgctggtgcgcgatctggacagcttcatcgcgcatcttcgcgccacccacggcatcgccgtgcaggacatcgtggtgattgcgcagagtgtgggcgcggtggtggctgccacctgggtacacgattacgccccgccgctgcgcgcgctggtgctggcatcgccggcgttcaaggtgaagttgtatgtgccgttcgcacgcgccgggttggcgttgctgcatgcgctgcgcggtaacttcttcgtcaacagctacgtcaagccgcaatggctgacgcatgatccggcgcgcgtggaaagctatcgcaccgatccgttgatcacccgcccgatttcggtgcgcgtattgctcggtctgtacgcggccgccgatcgcgtggtggacgatgcacaggcgatcaccgtgccgacccagttgctggtctccggcgcggatgttgtggtgcatcgcggcccgcaggatcgcttctacgaaaacctgcgctcgccgatcaagcagcgccactggctgccggggtttttccacgacaccctgggcgaacgcgatcgcgcgattgccatcgcgcacattcgccagttcgtccaagtgcggtttgcgcaaccgccggtgcgcgccgcgctgcgcaatgcccaccgtgccggccccagtttcgaagaggccgaacggctggcctggccaccgcagcgcaacagcctgcaggacctgcgctggcgcggcgtgcgtgccggcctgcgcctgggtggcaagctctccgagggcatcgcgcttggtctgcagaccggtttcgattccggcagcacattggactacatctaccgcaatcaggcgcatggtcgcgggccgctgggccgcatgatcgaccgcacgtatctcaacgcgatcggttggcgcggcatccgcatccgcggcagccatctgggcgaattgctgcgcgaggcagcggcgcgcttgcgtggcgccggcaagccggtacgcgtcctggacatcgctgccggacacggccgctatgtgctccaggcgctgggcagcggcgcacagcgtgccgatgcaatcgtgctgcgcgacttcagcccgcccaacgtgacccagggcactgcgctgatccaggcgctgggcgctggcgacatcgcccgtttcgaacaaggcgatgcgttcgacccggcagcattggcgtccgtgcaaccggctccgacgctggcggtggtctcgggcctgtacgaattgtttgccgataacgaccaggtcgcgcgctcgctggccggcctggccgcggcggtgcagccgggcggttatctgctttacaccggtcagccctggcatccgcagctggaattcattgcgcgcgcgctgaccagtcaccgcgatggcgtggcctgggtgatgcgccggcggagccagcaggagatggatggcctggtggaagcggcgggctttcgcaaggtggcgcaacgcatcgatgcgttcggcatcttcaccgtgtcgatggcgcagcgggtcgacgcatga

SEQ ID NO: 145102 - protein, 586 aa, Xanthomonas axonopodis pv. citri str. 306
MRTVLEREFVSFDGVPLFYRHWPLHDAVATGTPRAVVLLHRGHEHSGRVMHLAEELDMPDAQFFAWDARGNGRSPGVRGDAPGFEALVRDLDSFIAHLRATHGIAVQDIVVIAQSVGAVVAATWVHDYAPPLRALVLASPAFKVKLYVPFARAGLALLHALRGNFFVNSYVKPQWLTHDPARVESYRTDPLITRPISVRVLLGLYAAADRVVDDAQAITVPTQLLVSGADVVVHRGPQDRFYENLRSPIKQRHWLPGFFHDTLGERDRAIAIAHIRQFVQVRFAQPPVRAALRNAHRAGPSFEEAERLAWPPQRNSLQDLRWRGVRAGLRLGGKLSEGIALGLQTGFDSGSTLDYIYRNQAHGRGPLGRMIDRTYLNAIGWRGIRIRGSHLGELLREAAARLRGAGKPVRVLDIAAGHGRYVLQALGSGAQRADAIVLRDFSPPNVTQGTALIQALGAGDIARFEQGDAFDPAALASVQPAPTLAVVSGLYELFADNDQVARSLAGLAAAVQPGGYLLYTGQPWHPQLEFIARALTSHRDGVAWVMRRRSQQEMDGLVEAAGFRKVAQRIDAFGIFTVSMAQRVDA

SEQ ID NO: 145103 - DNA, 1764 bp, Yersinia pestis KIM
  CDS (1)..(1764): transl_table=11
atgagtcaggaagtgcgtttatttcaagaaggcatgttcaccgccagcgatgaaacatcgttgtattttcgccactggtctgccacggaaggtaacagcaagaaagttattgtgttgtttcatcgcgggcatgaacactcggggcgtctgcaacatattgtggatgaactgatgatgcccgatacccatttttacgcgtgggatgcgcgtggacacgggcagtcgccaggggctcgtggctacagccccagccttgctcgctcggttttagacgtggatgagtttgtgcgttttgtggcacaggatgcgcaggtcaacctcgacgatatcgtggtgattgcgcaaagcgtgggggccgtgctggtatcaacctgggttcatgactacgcgccgaaaatccgtggcatggtgctggcgtccccggcatttaaggtcaagctgtatgtgccgtttgcccgcctggggctgggattaatgcagcgtatacgtggcctgttttacgtgaattcctacgtgaaagggaaattcctcagccacgaccccgagcgcatcgccagctttgagcaggacaaattaatcacgcgccagatcgccgtcaatattttgctcgatctctacaaaacggctgaacgtattgtttcagactcgacggcgattactctcccgacccagttgcttatttccggcgatgattttgtggtgcatgagaaaccgcaaaaacaattttatgccggtcttcgcagcgcgataaaagagcaacatattctgccgggtttctatcacgacacgctgggtgaaaaagaccgctctattgcttttgataaaatgaaaaactttatcgaccgactctatgcaactgcgccttatgcctttgattatagccatgaagatcgctggagtccgagtgccgatgcgtatcgtgaattgcaggctccaccaaaatcacgctcgctggaagggatgttttatgctgcgctaagtttcggcatgaagaccatcgggcgacagtccaaagggatgcgcctgggttatgaaacaggttttgactccggcagtacgctggattacgtctatcgtaatcagcctgaaggtaatggcattctggggcgtatgattgaccacaactatctgaacagcgttggctggcgtggtattcgcgtgcgtaaagtgaatatccagcagatgattgaacaggccgttgcgaagattcagctcagtcacatgccggtgcgagtggtcgatatcgccgccggacatggccgctatgtgctggatgcactggaaaaacagcagggtatcgaaagtatactgctgcgtgattacagcgatttgaatgtagaaaaaggtcaggcgatgatcgaagagcgtgggctaagccacgtcgctcagttcagaaaaggcaacgccttcgactatgattcccttgccacgctcgatcctgctccgacgctgggcattgtttccgggctgtatgagctcttcccggataacgacttaatcaaaacgtcgttggccgggctggctgcggctattccaccaggcggcatgctggtatacaccgggcaaccgtggcacccacagttaaaaaccatcgcgtataccttaaccagccatcaaaacgggatcccgtggatgatgcgtgtgcgcagccagaaagagatggacacgctggtggagcaggccggctttgaaaaatgccatcaggtgattgatgagtttggcattttcaccgtgtcgctggcggtgagaaagcagcatggttga

SEQ ID NO: 145104 - protein, 587 aa, Yersinia pestis KIM
MSQEVRLFQEGMFTASDETSLYFRHWSATEGNSKKVIVLFHRGHEHSGRLQHIVDELMMPDTHFYAWDARGHGQSPGARGYSPSLARSVLDVDEFVRFVAQDAQVNLDDIVVIAQSVGAVLVSTWVHDYAPKIRGMVLASPAFKVKLYVPFARLGLGLMQRIRGLFYVNSYVKGKFLSHDPERIASFEQDKLITRQIAVNILLDLYKTAERIVSDSTAITLPTQLLISGDDFVVHEKPQKQFYAGLRSAIKEQHILPGFYHDTLGEKDRSIAFDKMKNFIDRLYATAPYAFDYSHEDRWSPSADAYRELQAPPKSRSLEGMFYAALSFGMKTIGRQSKGMRLGYETGFDSGSTLDYVYRNQPEGNGILGRMIDHNYLNSVGWRGIRVRKVNIQQMIEQAVAKIQLSHMPVRVVDIAAGHGRYVLDALEKQQGIESILLRDYSDLNVEKGQAMIEERGLSHVAQFRKGNAFDYDSLATLDPAPTLGIVSGLYELFPDNDLIKTSLAGLAAAIPPGGMLVYTGQPWHPQLKTIAYTLTSHQNGIPWMMRVRSQKEMDTLVEQAGFEKCHQVIDEFGIFTVSLAVRKQHG

SEQ ID NO: 145105 - DNA, 1758 bp, Pseudomonas syringae pv. tomato str. DC3000
  CDS (1)..(1758): transl_table=11
atgcgtgatgtgaatgatcagcgcttcaccacccacgatggcgtggagctgttctaccgccactggcctgttgcacacccgacgcccggtgcgccacggcaagcggtgttgctgtttcatcgcggccacgagcattccgggcgaattgcgcatctggttgatgaactggacctgccaggctttgattttttcgcctgggatgcccgcggtcacggccagtcgcccggggcccgtggtgacagcccgagctttgcgaccagcgttcgcgacgtgcagaccttcgtcgatcacctgcgcgtcacgtttgatattgccgaagagaacatggcggtgatcgcgcaaagcgtaggcgccgtcattgcagcgacatgggcgcacgactacgcaccgaagatccgcgcactggtcctcgcctcccccgccttcaaggtcaagctgtacgtacctttcgcccgcacggggctggcgctgctgcgcaggttcaagggcaatttcttcgtcaacagctacgtcaaggcgcgcttcctgagccacgatccgcaacgtatcgcgtcctacgacagcgacccgctgatcaccaaggccatttcagtgaatgtactgctgggcctgtatgaagccgccgaccgtgtggttgccgatgcccaggcgatccagatcccgacccaattgctgatttccggctcggatttcgtcgtgcatcgcgcgccgcaggagcgttttttcgaacaactgggcagcttgcgcaaggagaaacacatcctgccagggttcttccacgacacgttgggcgagcgcgaccgtcacttggcgctgagccgcgcgcggcgctttgttttgcagagttttgaaacgccgatgcaccgcccgtcgttgctggacgctgaccggctgggcgcaacctgtgcggagtccgaagagctggccgcgccgttgccgcacaattcgttgcgcgacctgtactggcgcatgacccacgccagcatgcgccttggcagcaagttatccacaggggtgaaactgggtttcgacactggtttcgattctggcagcacgcttgattacgtctatcgcaaccgacccgccggcaaaggcgcgctgggtcgcatgatcgacaagaactacctgcaatcgatcggctggcgtggcattcgccaacgcaagctgcatgccgaagaactgctgcgcctggccatggcgcatttgcgcaatcagggcaaaccggtacgcatcgtggacatcgccgccgggcacgggcgctacattctggagtcgttgcggggcgtagagccgctgccggaatccattctgctgcgcgactacagcgacatcaatgtgcgcgacggcagcctgctgatagagcagaaagatctggaagacatcgcgcgcttcgtcaagggcgatgcctttgaccgcaacgacctggcgacgctggaccccaaaccgacgctggcggtggtgtcggggctgtacgagttgttttccagcaaccagatggtcggcgattcgctggccgggctggcggcagccgtcgaaccgggcggttatctggtgtacaccgggcagccgtggcacccgcaactggagctgatcgcccgcgccctgaccagccatcgcgaaggccaggcctgggtaatgcgccgtcgcagtcagtcagagatggaccaactggtggaagccgcaggctttcgcaagatcacccagcgtgtggatgaatgggggattttcactgtgtccctcgcgcagcgcatccagtga

SEQ ID NO: 145106 - protein, 585 aa, Pseudomonas syringae pv. tomato str. DC3000
MRDVNDQRFTTHDGVELFYRHWPVAHPTPGAPRQAVLLFHRGHEHSGRIAHLVDELDLPGFDFFAWDARGHGQSPGARGDSPSFATSVRDVQTFVDHLRVTFDIAEENMAVIAQSVGAVIAATWAHDYAPKIRALVLASPAFKVKLYVPFARTGLALLRRFKGNFFVNSYVKARFLSHDPQRIASYDSDPLITKAISVNVLLGLYEAADRVVADAQAIQIPTQLLISGSDFVVHRAPQERFFEQLGSLRKEKHILPGFFHDTLGERDRHLALSRARRFVLQSFETPMHRPSLLDADRLGATCAESEELAAPLPHNSLRDLYWRMTHASMRLGSKLSTGVKLGFDTGFDSGSTLDYVYRNRPAGKGALGRMIDKNYLQSIGWRGIRQRKLHAEELLRLAMAHLRNQGKPVRIVDIAAGHGRYILESLRGVEPLPESILLRDYSDINVRDGSLLIEQKDLEDIARFVKGDAFDRNDLATLDPKPTLAVVSGLYELFSSNQMVGDSLAGLAAAVEPGGYLVYTGQPWHPQLELIARALTSHREGQAWVMRRRSQSEMDQLVEAAGFRKITQRVDEWGIFTVSLAQRIQ

SEQ ID NO: 145107 - DNA, 1770 bp, Burkholderia vietnamiensis G4
  CDS (1)..(1770): transl_table=11
atgagcgcacgcacggcccgcgaggccgacttcatcgcgcacgacggcaccgcgctgttctatcgtcactggcccgccaccgcgccgcgctgccgcggcgcgatcgtgctgctgcatcgcggtcacgagcattcggcgcgtgtagcgcacctcgtcgacgagctcgacctgcccgacttcgcgttcttcgcatgggacgcgcgcggccacggccgctcgcccggcacgcgcggctacagtccgggcgcggccgcgtcggtgcgcgatctgcagagcttcgtcgagcacattcgcgacacgcacggcgtcgcgatcgaggacatcgccgtcgtcggacagagcgtcggcgcggtgctcgcagccgcgtgggcgcacgactatgcgccgccgatccgctgcctcgtgctcgcgtcgcccgcgttccacatcaagctgtacgtaccgttcgcgcggccgggcttgcggctgatgcacaagctgcgcggcctgttctacgtgaacagctacgtgaagccgaaattcctcacgcacgacccgcagcggatcgcgagctatgcggccgatccgctggtcacgcggccgatcgcggtcaacatgctgctcgatctgcacgacaccgcgcagcggatcgtcgccgatgcggccgcgatcacggtgccgacccagctgctgatctcgggcgccgactgggtcgtgcatcgcgctccgcaggatcgcttcttcgagcggctcggcgccgcgcgcaaggagcgcatcgtgctgccgggcttctatcacgatacgctcggcgagcgcgaccgcacgcaggcgctcgcgccgctgcgcgcgttcgtgctgcgcgaattcgacacgccgggcccgcgcgtgtcgctcgccgacgccgaccggcgcggcgcgttccatgacgaatacgtggcgctccgcgccgcgccggcgagcccgttcgcgcgcgcgtactgggcgttcgtgcgggccggcctgaaggcgggcggcgcactgtcggacggcatcgcgctcgggctgcggctcggcttcgattcgggctcgacgctcgactacgtgtaccgcaatcgcgcgcaggggcgcttcggcatcggcgcgctgatcgatcgcacctatctagactcgccgggctgggccggcattcgccggcgcaagctgcacctgcaggagctgatcggtgcggcgatcggccggctgcgcagccggggcgaaccggtgcgcatcgtcgacatcgcggccggccacgggcgctacgtgctcgacgcgatcgcgacggccgccgagcgcgacggcgcggcgcccgacgacatcctgctgcgcgactacagcgcgccgaacgtcgatgccgggcgcgtgctgatcgcgcagcgcggcctcgagccgatcgcgcgcttcgagcgcggcgatgcgttcgacgacgcgtcgctcgcgacgctcgaaccgcgtccgacgctcgcgatcgtgtcgggactgtacgagctgttcggcgacaacgcgctcgtcgagcgctcgctgcgcgggctcgcgcaggccgtgccgcccggcgggtatctcgtctatacggggcagccgtggcatccgcagctcgaattcatcgcgcgcgtgttgaacaatcaccgcggcgaggcgacgtgggtgatgcgccgccgctcgcaggccgagatggacgagctcgtcgcgcgcgcgggctttcgcaagctcgaccagcgcatcgacgcgatgggcatcttcacggtcagcctggcccagcgggtcgacgcgcaatga

SEQ ID NO: 145108 - protein, 589 aa, Burkholderia vietnamiensis G4
MSARTAREADFIAHDGTALFYRHWPATAPRCRGAIVLLHRGHEHSARVAHLVDELDLPDFAFFAWDARGHGRSPGTRGYSPGAAASVRDLQSFVEHIRDTHGVAIEDIAVVGQSVGAVLAAAWAHDYAPPIRCLVLASPAFHIKLYVPFARPGLRLMHKLRGLFYVNSYVKPKFLTHDPQRIASYAADPLVTRPIAVNMLLDLHDTAQRIVADAAAITVPTQLLISGADWVVHRAPQDRFFERLGAARKERIVLPGFYHDTLGERDRTQALAPLRAFVLREFDTPGPRVSLADADRRGAFHDEYVALRAAPASPFARAYWAFVRAGLKAGGALSDGIALGLRLGFDSGSTLDYVYRNRAQGRFGIGALIDRTYLDSPGWAGIRRRKLHLQELIGAAIGRLRSRGEPVRIVDIAAGHGRYVLDAIATAAERDGAAPDDILLRDYSAPNVDAGRVLIAQRGLEPIARFERGDAFDDASLATLEPRPTLAIVSGLYELFGDNALVERSLRGLAQAVPPGGYLVYTGQPWHPQLEFIARVLNNHRGEATWVMRRRSQAEMDELVARAGFRKLDQRIDAMGIFTVSLAQRVDAQ

SEQ ID NO: 145109 - DNA, 1749 bp, Acinetobacter sp. ADP1
  CDS (1)..(1749): transl_table=11
atgatgcataacaatacacaacatcaatttataagtcacgatggaaccagtttattttatcaacgttgggctgcttctgataatcctgagcaaaaagcgattgtattatttcatcggggacatgaacattcgcaacgaatggcacatctggttgatgaattgaaacttccagattttgacttttttgcatgggatgcccgtggtcatggtcactcaccaggcgagcgtggtgatgcacccagtttttctgcctgtgtaaaagatattcagtctttcgttcaacatctcacagatacttatcagattcagccatccaatatggtcgtgattggacaaagcgtgggtgctgttctggctgcaacatgggtacatgattacgcacccaaaatacgtgccttatgtcttgcctcacccgctttcgatatcaaactgtatgtaccgttcgccaagccaggattaacactgctgagtaaattgcgtggtaatttctttatcaccagttatgtcaaagcaaaaatgctgactcatgatgaacaacgtgctgccgaatatgacaccgacacacaaattgccaaagctatttcagtacgcatgttacttggtttatatgatgcgtctaaacgtattgtagaggatgcacaaaatatttttgtacccacccaggtgctttgctctggttcagattatgttgttcatcaaaaaccacaacgtttattttacgagcgcttacctcatccacaaaaagagtttcatatcttagaaggtttttaccatgatactttgggtgaaaaacaccgaagtattgcatttgataagattcgtcgttttgtgcagcaaagttttgcagaaaatcatcagcccatcgagatcgttcatgcggataaaattggaccaagctgtgcaatcgccgaacaactgagtgcgcctttacctaaaaattcatggaaatactggttctggaatttaaccaaaaaaaatctaaaaattggtagtcgtttttcacaaggcctcaaaattggtgaagatacaggctatgattctgggagcacactcgactttgtataccgtgaccaacctgaaagcacaaatattcttggcaaaatgattgaccgacaatacttaaatgcgattggctggcgtggaattcgaattcgtaaacaacatatcgagcaattacttccagtctatgcagaaaaattgatcgcggcagatcaaccacttaaaattctggatatcgcagcaggacacggtcgctatattctcgacgcagtggcaaaaatctctaaacgtccgcaatcaattttactgagagattatagtgagcttaacgtagcatctggcaatagactcatccattccaaaggtttagaggatattgctacgtttcagcttggagatgcatttgatcaagcttcactggctagtattgagccacaagtcaacttagcagtggtatctggactgtatgagctatttagtgacaatgatctgttgcgtcaatctctgtctggtctttcccaagcgattgaaacaggtggctatctaatttataccggacaaatctggcatcctcagcaggagtttattgcacgtgcccttacctctcatcgaaagggtgaagcatgggtcatgcgtttaagatcacaggccgaaatggatgcactggttgaacaggctggatttaaaaagattgatcaatatattgatcaattcggaatctttactgtttcaattgcacaaaaaatataa

SEQ ID NO: 145110 - protein, 582 aa, Acinetobacter sp. ADP1
MMHNNTQHQFISHDGTSLFYQRWAASDNPEQKAIVLFHRGHEHSQRMAHLVDELKLPDFDFFAWDARGHGHSPGERGDAPSFSACVKDIQSFVQHLTDTYQIQPSNMVVIGQSVGAVLAATWVHDYAPKIRALCLASPAFDIKLYVPFAKPGLTLLSKLRGNFFITSYVKAKMLTHDEQRAAEYDTDTQIAKAISVRMLLGLYDASKRIVEDAQNIFVPTQVLCSGSDYVVHQKPQRLFYERLPHPQKEFHILEGFYHDTLGEKHRSIAFDKIRRFVQQSFAENHQPIEIVHADKIGPSCAIAEQLSAPLPKNSWKYWFWNLTKKNLKIGSRFSQGLKIGEDTGYDSGSTLDFVYRDQPESTNILGKMIDRQYLNAIGWRGIRIRKQHIEQLLPVYAEKLIAADQPLKILDIAAGHGRYILDAVAKISKRPQSILLRDYSELNVASGNRLIHSKGLEDIATFQLGDAFDQASLASIEPQVNLAVVSGLYELFSDNDLLRQSLSGLSQAIETGGYLIYTGQIWHPQQEFIARALTSHRKGEAWVMRLRSQAEMDALVEQAGFKKIDQYIDQFGIFTVSIAQKI

SEQ ID NO: 145111 - DNA, 1764 bp, Yersinia pseudotuberculosis IP 32953
  CDS (1)..(1764): transl_table=11
atgagtcaggaagtgcgtttatttcaagaaggcatgttcaccgccagcgatgaaacatcgttgtattttcgccactggtctgccacggaaggtaacagcaagaaagttattgtgttgtttcatcgcgggcatgaacactcggggcgtctgcaacatattgtggatgaactgatgatgcccgatacccatttttacgcgtgggatgcgcgtggacacgggcagtcgccaggggctcgtggctacagccccagccttgctcgctcggttttagacgtggatgagtttgtgcgttttgtggcacaggatgcgcaggtcaacctcgacgatatcgtggtgattgcgcaaagcgtgggggccgtgctggtatcaacctgggttcatgactacgcgccgaaaatccgtggcatggtgctggcgtccccggcatttaaggtcaagctgtatgtgccgtttgcccgcctggggctgggattaatgcagcgtatacgtggcctgttttacgtgacttcctacgtgaaagggaaattcctcagccacgaccccgagcgcatcgccagctttgagcaggacaaattaatcacgcgccagatcgccgtcaatattttgctcgatctctacaaaacggctgaacgtattgtttcagactcgacggcgattactctcccgacccagttgcttatttccggcgatgattttgtggtgcatgagaaaccgcaaaaacaattttatgccggtcttcgcagcgcgataaaagagcaacatattctgccgggtttctatcacgacacgctgggtgaaaaagaccgctctattgcttttgataaaatgaaaaactttatcgaccgactctatgcaactgcgccttatgcctttgattatagccatgaagatcgctggagtccgagtgccgatgcgtatcgtgaattgcaggctccaccaaaatcacgctcgctggaagggatgttttatgctgcgctaagtttcggcatgaagaccatcgggcgacagtccaaagggatgcgcctgggttatgaaacaggttttgactccggcagtacgctggattacgtctatcgtaatcagcctgaaggtaatggcattctggggcgtatgattgaccacaactatctgaacagcgttggctggcgtggtattcgcgtgcgtaaagtgaatatccagcagatgattgaacaggccgttgcgaagattcagctcagtcacatgccggtgcgagtggtcgatatcgccgccggacatggccgctatgtgctggatgcactggaaaaacagcagggtatcgaaagtatactgctgcgtgattacagcgatttgaatgtagaaaaaggtcaggcgatgatcgaaaagcgtgggctaagccacgtcgctcagttcagaaaaggcaacgccttcgactatgattcccttgccacgctcgatcctgctccgacgctgggcattgtttccgggctgtatgagctcttcccggataacgacttaatcaaaacgtcgttggccgggctggctgcggctattccaccaggcggcatgctggtatacaccgggcaaccgtggcacccacagttaaaaaccatcgcgtataccttaaccagccatcaaaacgggatcccgtggatgatgcgtgtgcgcagccagaaagagatggacacgctggtggagcaggccggctttgaaaaatgtcatcaggtgattgatgagtttggcattttcaccgtgtcgctggcggtgagaaagcagcatggttga

SEQ ID NO: 145112 - protein, 587 aa, Yersinia pseudotuberculosis IP 32953
MSQEVRLFQEGMFTASDETSLYFRHWSATEGNSKKVIVLFHRGHEHSGRLQHIVDELMMPDTHFYAWDARGHGQSPGARGYSPSLARSVLDVDEFVRFVAQDAQVNLDDIVVIAQSVGAVLVSTWVHDYAPKIRGMVLASPAFKVKLYVPFARLGLGLMQRIRGLFYVTSYVKGKFLSHDPERIASFEQDKLITRQIAVNILLDLYKTAERIVSDSTAITLPTQLLISGDDFVVHEKPQKQFYAGLRSAIKEQHILPGFYHDTLGEKDRSIAFDKMKNFIDRLYATAPYAFDYSHEDRWSPSADAYRELQAPPKSRSLEGMFYAALSFGMKTIGRQSKGMRLGYETGFDSGSTLDYVYRNQPEGNGILGRMIDHNYLNSVGWRGIRVRKVNIQQMIEQAVAKIQLSHMPVRVVDIAAGHGRYVLDALEKQQGIESILLRDYSDLNVEKGQAMIEKRGLSHVAQFRKGNAFDYDSLATLDPAPTLGIVSGLYELFPDNDLIKTSLAGLAAAIPPGGMLVYTGQPWHPQLKTIAYTLTSHQNGIPWMMRVRSQKEMDTLVEQAGFEKCHQVIDEFGIFTVSLAVRKQHG

SEQ ID NO: 145113 - DNA, 1758 bp, Pseudomonas fluorescens Pf-5
  CDS (1)..(1758): transl_table=11
atgcgcgacgctcaacaccagacgttccgaacccatgacggtgtcgaactgttctaccgccactggccagccactgaagtggcccctggcgaaccgcggcaagcggtgatgctgttccaccgcggtcacgaacactccgggcgcattgcccacctggtggaagagctgaacctgccccagttcgatttcttcgcctgggacgcccgtggccatggccagtcgccgggcgcccgtggcgacagcccgagcttcgctaccagcgtgcgcgacgtgcagaccttctgtgatcacctgggcagcgctcatgggatcgccgaggaaaacatcgccgtggtggcccagagtgtgggcgcggtgatcgcgtccacctgggtccacgactacgcgccgcgcatccgctccctggtgctggcctcgccggcgttcaaggtcaagctgtacgtgcccttcgcccggcccggcctggccctgatgcggcgctttcgtggcaacttcttcgtcaacagctacgtcaaggcgcgcttcctgagccacgacccggagcgggtccgcagctatgacagcgacccgctgatcaccaaggcgatctcggtgaatgtactgctgggcctgtatgaagcggcagaccgggtggtagccgacgcccaggcgatccaggtgccgacccagttgctgatctccggctccgacttcgtggtgcatcgcaagccccaggagcagttcttcgagcgcctgggcagcctgcacaaggaaaagcacatcctcccgggcttcttccacgacaccctgggggaaaagaaccgggcgccggccatggccagcatccgtcgcttcatcctgcagaatttcgagcgcccgctgaaccgccctgccctgctggacgccgaccgcctgggcgttacctgcgccgagtccgaagccctggccgcgccgctgccgcacaattccctgcgcgacctgtactggcgcgccacccgcgccagcatgcgcctgggcagccagctgtcggcgggggtcaagctgggcttcgacaccggtttcgactccggcagcaccctggactacgtctaccgcaaccgccccaccgggcattccgcactgggccggatgatcgaccagaactacctgaactccatcggctggcgcggcatccgccagcgcaagctgcatgtggaagaactgctgcgcctggccatggaaaaactccgtgagcaaaacagcgaagtgcgcatcgtcgatatcgccgccggccacggccgctacatcctcgaagccctgcaaggggtcagcccgctgccggaatcgatcctgctgcgcgactacagcgatatcaacgtgcgcgacggcagtgcgctgatccaggaaaaaggcctgggggacatcgcccgcttcgtcaaaggcaacgccttcgaccgcgaggacctcgcagccctggacccgaaacccaccctggcggtggtctccgggctctatgagctgttcgccgacaaccagatggtcggcggctccctggcgggcctggccagtgccgtggagcccggcggctacctggtgtacaccggccagccgtggcacccgcagctggaactgatcgcccgcgccctgaccagccaccgcgaaggccaggcctgggtcatgcgccgccgcacccaggcggagatggaccaactggtggaggccgccggctttcgcaaggtcaccatgcgtgtggatgaatgggggattttcagcgtatccctggcgcaacgggtgcaatga

SEQ ID NO: 145114 - protein, 585 aa, Pseudomonas fluorescens Pf-5
MRDAQHQTFRTHDGVELFYRHWPATEVAPGEPRQAVMLFHRGHEHSGRIAHLVEELNLPQFDFFAWDARGHGQSPGARGDSPSFATSVRDVQTFCDHLGSAHGIAEENIAVVAQSVGAVIASTWVHDYAPRIRSLVLASPAFKVKLYVPFARPGLALMRRFRGNFFVNSYVKARFLSHDPERVRSYDSDPLITKAISVNVLLGLYEAADRVVADAQAIQVPTQLLISGSDFVVHRKPQEQFFERLGSLHKEKHILPGFFHDTLGEKNRAPAMASIRRFILQNFERPLNRPALLDADRLGVTCAESEALAAPLPHNSLRDLYWRATRASMRLGSQLSAGVKLGFDTGFDSGSTLDYVYRNRPTGHSALGRMIDQNYLNSIGWRGIRQRKLHVEELLRLAMEKLREQNSEVRIVDIAAGHGRYILEALQGVSPLPESILLRDYSDINVRDGSALIQEKGLGDIARFVKGNAFDREDLAALDPKPTLAVVSGLYELFADNQMVGGSLAGLASAVEPGGYLVYTGQPWHPQLELIARALTSHREGQAWVMRRRTQAEMDQLVEAAGFRKVTMRVDEWGIFSVSLAQRVQ

SEQ ID NO: 145115 - DNA, 1776 bp, Ralstonia eutropha JMP134
  CDS (1)..(1776): transl_table=11
atggaacgtacgccgatcgagtcctcgtttgccacccatgacgggcaggaactgttctaccggcactggccggctgcgagtcgtcagccacgcggtgccgtgctgctgttccaccgcggacatgaacattccgggcgcgttgcgcatcttgtggacgagttggacttgcctgaccatgccttcttcgcgtgggatgcacgcggccacgggcgctcgcccggcgagcgtggctacagcccgggactcgcctgttcggtgcgcgatatccagaccttcgtcgaccatatcgcgaccatgcatggtatcggcgtggatcgcattgccgtggtggcgcaaagcgtcggtgccgtgcttgctgcgacctgggtgcacgactatgcgccgcgcatccgctgtctggtcgtggcgtcaccggcgttcaaggtcaagctctacgtgccattcgcgcggcccggcctgaagctgatgcagcagatgcgcggcaagttcttcgtcaacagctacgtcaaggcgaaattcctgacacacgatccgcagcgcgtggccagctacaacgctgatccgctcattactcggccaatcgcggtcaatatgctgctcgatctctacgatgccggcgagcgcatcgtggccgatgcagcggcgattacggttcccacgcaactgctgatttccggcgcggactgggtcgtgcatcgtggtccgcaggacgcgttcttcgatcggctgggggcgcgcgtgaaggagcgcatcgtgctcgatggtttctaccacgacacgcttggcgaacgcgatcgcgcatccgccgtggccgccgcgcggcgtttcatcgttcgcgagttcgatacaccgtcggagccggtgtcgctgctgggcgccgaccggcgggggcctttcaaggacgaggccgaccggctcgccgtgccgctgtccgctggcagtcctgcgggcctgtattggggcatggtgcgtggagggctgcgctttggcggcatgttgtccgaaggcgtacggctcggccaccagaccggttttgattcgggttcgacgctcgactacgtctatcgcaacaaggcgacgggccgcttcggcattggccaggcggtcgaccgcaactacctggacgcgattggctggcgtggcatccggcagcgcaagctgcatgtcgaggaactgatcggcgaggccattcgccgcctgcaggccatgggcgagccggtgcgcatcgtggatattgccgccggccacgggcgttatgtgctggaggcgctgacctcgcaaagcggcaacatcgacggcaacgcggtggagagcatcctgctgcgtgactacagcgacctcaatgtcgagcagggacggaacctgatccgccgcaagggcctcgatccgatcgcgcgcttcgaaaagggcgatgcgttcgatggcgacagccttgccgcgctgaatccggcgccgacgctggccatcgtttccgggctctatgaactgttcggggacaacgagatggtcggatgctcgctgcgcggactggcacaggcggtgcgtcccggcggctatctggtctatacgggacagccgtggcatccgcaactcgagttcatcgcacgcgcgctaaccagccaccgtgccggatccgcgtgggtcatgcgccgccgctcgcaggccgagatggatgaactcgtgcgccacgccggtttcgaaaagctcgcgcagcgcatcgacccgtggggcatcttcacggtcagcctggcgcgccggaaaggcgagggcgcctga

SEQ ID NO: 145116 - protein, 591 aa, Ralstonia eutropha JMP134
MERTPIESSFATHDGQELFYRHWPAASRQPRGAVLLFHRGHEHSGRVAHLVDELDLPDHAFFAWDARGHGRSPGERGYSPGLACSVRDIQTFVDHIATMHGIGVDRIAVVAQSVGAVLAATWVHDYAPRIRCLVVASPAFKVKLYVPFARPGLKLMQQMRGKFFVNSYVKAKFLTHDPQRVASYNADPLITRPIAVNMLLDLYDAGERIVADAAAITVPTQLLISGADWVVHRGPQDAFFDRLGARVKERIVLDGFYHDTLGERDRASAVAAARRFIVREFDTPSEPVSLLGADRRGPFKDEADRLAVPLSAGSPAGLYWGMVRGGLRFGGMLSEGVRLGHQTGFDSGSTLDYVYRNKATGRFGIGQAVDRNYLDAIGWRGIRQRKLHVEELIGEAIRRLQAMGEPVRIVDIAAGHGRYVLEALTSQSGNIDGNAVESILLRDYSDLNVEQGRNLIRRKGLDPIARFEKGDAFDGDSLAALNPAPTLAIVSGLYELFGDNEMVGCSLRGLAQAVRPGGYLVYTGQPWHPQLEFIARALTSHRAGSAWVMRRRSQAEMDELVRHAGFEKLAQRIDPWGIFTVSLARRKGEGA

SEQ ID NO: 145117 - DNA, 1770 bp, Burkholderia sp. 383
  CDS (1)..(1770): transl_table=11
atgagcgcacgcatggcccgcgaggccgacttcatcacgcacgacggcgaaacgctgttctatcgtcactggcccgccacgggcgcgcgctgccgcggcgcaatcgtgttgctgcatcgcggccacgaacactcggcgcgcgtcgcgcacctcgtcgacgagctcgacctgcccgatttcgcattcttcgcgtgggatgcgcgcggccacggccgctcgcccggcgcgcgcggctacagcccgagcgcggccgcgtcggtgcgcgacctgcagaccttcgttgaacatatccgcgacacgcacggcatcgcgatcgaggacatggccgtggtcggccagagcgtcggcgcggtgctcgcggccacctgggcgcacgattatgcgccgccgatccgcgcgctcgtcgtcgcgtcgccggcgttccacatcaagctctacgtaccgttcgcgcggccgggcctgcggctgatgcacaagctgcgcgggctgttctacgtgaacagctacgtgaagccgaaattcctcacgcacgatcccgagcggatcgcgagctatgcgtccgacccgctgatcacgcggccgatcgcggtcaacatgctgctcgacctgcacgataccgcgcagcggatcgtcgccgacgcggccgcgatcaccgtgccgacgcagctgctgatctcgggcgccgactgggtcgtgcatcgcggcccgcaggaccgcttcttcgagcgcctcggcgccgcgcgcaaggagcgcatcgtgctgccgggcttctatcacgacacgctcggcgaacgcgaccgcgcgcaggcgctcgcaccgctgcgtgcattcgtgctgcgggaattcgatgcgccgagcccgcgcgtgtcgctcgccgacgccgaccggcgcggcgcgttccacgacgaatacgcggcgctcggccgcccgcccgcgaatgcgttcgcgcgggcgtactgggcgctcacgcgcgccggcctgaaggccggcggcgcgctgtcggacggcatcgcgctcgggctgcggctcggcttcgattcgggctcgacgctcgactacgtgtaccgcaaccgcgcgcaggggcgtctcggcgtcggcgcgctgatcgatcgcacctatctcgattcgccaggctgggtcggcatccgccagcgcaaggtgcatctgcaggaactgatcggcgcggcgatcggccgcctgcgcggccacggcgcgccggtgcggatcgtcgacatcgcggccgggcacgggcgctacgtgctcgacgcgatcgcgtcggccgccgagcgcgacggcgcggcgcccgacgacatcacgctgcgcgactacagcccgccgaacgtcgaggccgggcgcgtgctgattgcgcagcgcggcctcgatccgattgcgcgcttcgagcgcggcgacgcgttcgacgaggcgtcgctcgcgacgctcgagccgcgtccgacgctcgcgatcgtgtcgggcctctacgagctgttcggcgagaacgcgctgatcgagcgctcgctgcgcgggctcgcgcaggccgtgccgccgggcggctatctcgtctatacggggcagccgtggcatccgcagctcgaattcatcgcgcgcgcgctgaacaatcaccgcggcgaagcgacctgggtgatgcgccggcgctcgcaggccgagatggacgaactcgtcgcgcgcgcgggcttccgcaagctcgaccagcggatcgacgaaatgggcatcttcacggtcagcctcgcgcagcgggtcgacgcgtcatga

SEQ ID NO: 145118 - protein, 589 aa, Burkholderia sp. 383
MSARMAREADFITHDGETLFYRHWPATGARCRGAIVLLHRGHEHSARVAHLVDELDLPDFAFFAWDARGHGRSPGARGYSPSAAASVRDLQTFVEHIRDTHGIAIEDMAVVGQSVGAVLAATWAHDYAPPIRALVVASPAFHIKLYVPFARPGLRLMHKLRGLFYVNSYVKPKFLTHDPERIASYASDPLITRPIAVNMLLDLHDTAQRIVADAAAITVPTQLLISGADWVVHRGPQDRFFERLGAARKERIVLPGFYHDTLGERDRAQALAPLRAFVLREFDAPSPRVSLADADRRGAFHDEYAALGRPPANAFARAYWALTRAGLKAGGALSDGIALGLRLGFDSGSTLDYVYRNRAQGRLGVGALIDRTYLDSPGWVGIRQRKVHLQELIGAAIGRLRGHGAPVRIVDIAAGHGRYVLDAIASAAERDGAAPDDITLRDYSPPNVEAGRVLIAQRGLDPIARFERGDAFDEASLATLEPRPTLAIVSGLYELFGENALIERSLRGLAQAVPPGGYLVYTGQPWHPQLEFIARALNNHRGEATWVMRRRSQAEMDELVARAGFRKLDQRIDEMGIFTVSLAQRVDAS

SEQ ID NO: 145119 - DNA, 1761 bp, Pseudomonas aeruginosa UCBPP-PA14
  CDS (1)..(1761): transl_table=11
atgcgcgacgtacaggaattgcgtttcaccacccacgacggggtagaactcttctaccgccactggccggccagccgcccggcgccggacggcacgcgccaggcggtgttgctgttccaccgcggccatgagcactccgggcggatcgcccacctggtcgacgaactcgacctgccggaacacgacttcttcgcctgggacgcccgtggccacggcctctcgccaggcgcccgcggcgacagcccgagcttcgccaccagcgtgcgcgacgtacagaccttcgtcgaccatatccaggccgtccacggtatcgccgaagagcggatggcggtggtggcgcagagcgtcggcgcggtgctggttgccacctgggcccacgactacgcgccgaaggtgcgcgcactggtgctggcttcgccggcgttccaggtcaagctctacgtgccgttcgcccgcagcgggctgaaactgatgcgcctgtggcgcggcaatttcttcgtcaacagctatgtcaaggcacgcttcctcagtcacgacccgcagcggatcgcctcctacgacagcgacccgctgatcgccaaggcgatctcggtgaacgtcctgctcggcctctacgaagctgccgagcgggtggtagcggacgcacaggcgatccagattcccacccaactgctgatttccggggccgacttcgtcgtccatcgtgcgccgcaggagcgcttcttcgagcgtctcggcagcctgcgcaaggaaaagcacatcctgcccggcttcttccacgacacccttggcgagcgcgatcgtcacctggccgtcggccgtgcccggcgcttcctcctcgaggcattcgccacggtccccgaacgaccgagcctgctcgatgccgaccgcctgggtcatacctgcgccgaggccgaggcgctggccgcgccgttgccgaagaactcgccgcgcgatctctactggcgcgccacccgtgccggcctgcgcctgggcagcctgtggtcggacggggtcaagctgggcttcgacaccggtttcgattccgggagcaccctcgactatgtctaccgcaaccagcccagcggcagcggcccgctgggtcgcctgatcgaccgcaactacctggactccatcggctggcgcggcatccgccagcgcaagctgcacgccgaggagctgctgcgcctggccatgcagcggttgcgcgaggagcagcgcgaggtgcgcatcgtcgacatcgccgccggccacggccgctacatcctcgaagccctgcaaggcgtcgagccgctgccggaaagcatccttctgcgcgactacagcgagatcaacgtgcgtgacggcagcgccctgatcgaaagcaagggcctcgccggcatcgcccgctttgtcaagggcgacgccttcgatcgcgccgacctggcggcgctgcaaccgaagccgagcctcggggtggtttccgggctctacgagctgttcgccgacaaccgcatggtcggcgactccctcgccggcctcggcgaggcgctggaggagggcgcctacctggtctacaccggacagccctggcacccgcagctggaactgatcgcccgcgcgctgaccagccaccgccagggccaggcctgggtgatgcggcgccggacccaggcggaaatggaccagctggtggccgccgccggcttccgcaagatcacccagcgggtcgaccagtggggcatcttcagcgtatcgctggcgcagaaggtcgcccgctga

SEQ ID NO: 145120 - protein, 586 aa, Pseudomonas aeruginosa UCBPP-PA14
MRDVQELRFTTHDGVELFYRHWPASRPAPDGTRQAVLLFHRGHEHSGRIAHLVDELDLPEHDFFAWDARGHGLSPGARGDSPSFATSVRDVQTFVDHIQAVHGIAEERMAVVAQSVGAVLVATWAHDYAPKVRALVLASPAFQVKLYVPFARSGLKLMRLWRGNFFVNSYVKARFLSHDPQRIASYDSDPLIAKAISVNVLLGLYEAAERVVADAQAIQIPTQLLISGADFVVHRAPQERFFERLGSLRKEKHILPGFFHDTLGERDRHLAVGRARRFLLEAFATVPERPSLLDADRLGHTCAEAEALAAPLPKNSPRDLYWRATRAGLRLGSLWSDGVKLGFDTGFDSGSTLDYVYRNQPSGSGPLGRLIDRNYLDSIGWRGIRQRKLHAEELLRLAMQRLREEQREVRIVDIAAGHGRYILEALQGVEPLPESILLRDYSEINVRDGSALIESKGLAGIARFVKGDAFDRADLAALQPKPSLGVVSGLYELFADNRMVGDSLAGLGEALEEGAYLVYTGQPWHPQLELIARALTSHRQGQAWVMRRRTQAEMDQLVAAAGFRKITQRVDQWGIFSVSLAQKVAR

SEQ ID NO: 145121 - DNA, 1767 bp, Azoarcus sp. BH72
  CDS (1)..(1767): transl_table=11
atgaccactacccgtccggtccagcaacaccatttcaccacccacgatggcgtcgccctgttctatcgctactggcccgccacggcgccgcggcgcggctgcgtggtgatgttccaccgtggccacgagcactcggggcgcatggcgcatctggccgatgaactggcgctgccggaattcgacatcttcgcctgggatgcccgcggccacggcatgtcgccgggcgcgcgcggcgactcccccagcctgggcagctcggtgcgcgacgtgcagaccttcatcgagcatatccgcgacacctggggcattgccgagcaggacatggcggtgctggcgcaaagcgtcggtgcggtgctggtgagcacctgggcgcacgactacgcgccgcgcgtgcgctgtctggtgctcgcgtcgccggcgttcaaggtcaagctctacgtgccgttcgcgcgcgccggtctggcgctgatgcggcgcctgcgcggcaatttcttcgtcaacagctacgtcaagtccaagttcctcacgcacgatccggcgcgccaggcgtcctacgacgccgatccgctgatcgcgcgcgcgatctcggtcaacatcctgcttgcgctgtacgaggccggcgagcgcgtggtcgccgacgcgcaggcgatcacggtgccgacgcagctgctgatctccggtgccgactgggtggtgcatcacgcgccccagcacgcgttcttcgaccgcctgggttccgccgtcaaggaaaagcacgtgctgcccggcttcttccacgacaccctgggcgagcgcgaccgcacgctcgcgatcgacaaggtgcgcgacttcatcctgcgccagttcgccgctgcgccccagcgcgtcggcctgctggaatcgcatcgccagggaccgagctttgaagaagcgcgcgcgctcgcggcgccgctgccggcgctcagcccgcgagggttgtactggaaggcctatcgcgccgggctgcgcgtgggcggctggctgtcggccggtgtccggctgggacacgacaccggcttcgattccggcagcacgctcgactatgtctatcgcaacacccctacgggccgtggcccgctcgcgccgctggggcggctggtggaccggcagtacctcgatgcgatcggttggcgcggtatccgccagcgcaagctgaacgtcgaagaactgctgcagaaggcgctcgcgctgctgcagcgcgacggccgcccggtgcgggtgctcgacatcgccgccggccacggccgttacgtgctcgagggcctggcgcgggcgccccagcgcgtggaagccatcctgctgcgcgacttcagcgagatcaacgtgcgcgacggcagcgccctgatcgccgcgaaggggctctcagacatcgcccgcttcgagcgcggcgacgcgttcgacgaggcgtcggtcgccacggtccgcccgcgtcccaccatcggcatcgtctccgggctctacgaactctttcccgacaacgatgcggtgcgccgctcgctcgccggcatggccgcggcggtcgaacccggtggctacctgatctacaccggccagccctggcacccgcagctcgaaatgatcgcccgcgcgctcaccagccatcgcggcggcgcggcctgggtaatgcggcggcgctcgcaggcggagatggaccagctggtggaggcggcgggcttcgacaagctggagcagcgggtggacgagtggggcatcttcaccgtctcgctggcgcgccggcgcgccgcatga

SEQ ID NO: 145122 - protein, 588 aa, Azoarcus sp. BH72
MTTTRPVQQHHFTTHDGVALFYRYWPATAPRRGCVVMFHRGHEHSGRMAHLADELALPEFDIFAWDARGHGMSPGARGDSPSLGSSVRDVQTFIEHIRDTWGIAEQDMAVLAQSVGAVLVSTWAHDYAPRVRCLVLASPAFKVKLYVPFARAGLALMRRLRGNFFVNSYVKSKFLTHDPARQASYDADPLIARAISVNILLALYEAGERVVADAQAITVPTQLLISGADWVVHHAPQHAFFDRLGSAVKEKHVLPGFFHDTLGERDRTLAIDKVRDFILRQFAAAPQRVGLLESHRQGPSFEEARALAAPLPALSPRGLYWKAYRAGLRVGGWLSAGVRLGHDTGFDSGSTLDYVYRNTPTGRGPLAPLGRLVDRQYLDAIGWRGIRQRKLNVEELLQKALALLQRDGRPVRVLDIAAGHGRYVLEGLARAPQRVEAILLRDFSEINVRDGSALIAAKGLSDIARFERGDAFDEASVATVRPRPTIGIVSGLYELFPDNDAVRRSLAGMAAAVEPGGYLIYTGQPWHPQLEMIARALTSHRGGAAWVMRRRSQAEMDQLVEAAGFDKLEQRVDEWGIFTVSLARRRAA

SEQ ID NO: 145123 - DNA, 1713 bp, Fusobacterium nucleatum subsp. vincentii ATCC 49256
  CDS (1)..(1713): transl_table=11
ttgggaggagacatggaaaatttattttttaatacttttgatggaaataaaattttttatagagtatggaattttgaaaaaaataaaaaaactttaattattattcatagagggcatgaacattcagagagattaagtgaattaacacaagatgaaaaatttttaaaatataatatttttgcttatgatttaagaggacatggctatacagaagctaagacttctcctaatgctatggattatgttagagatttagatttttttgtaaaacatataaaaagtgaatatcaaataaaagaagaagatatttttattgtagcaaatagcataggtggtgttatactttctgcctatgttcatgattttgcaccaaatatagcaggtattgcattacttgcacctgcttttgaaataaaactttatattccttttgcaaaacaacttataacattacttactaaaataaaaaaagatgctaaggttatgagttatgttaaagcaaaagttttaactcatgatgttgaagaacaaaataaatataataatgataaacttataaataaagaaattaatgccaaacttttaattgatttagctaatatgggcaaaagattggttgaagattctatggcaatagaactacctacaataatattttctgctgaaaaagactatgttgtaaaaaattctgcacaaaagaaattctttttaaatttatcatctaaaaaaagagaatttatagaacttgaaaatttttatcatggaataatttttgaaaaagaaaggcaaaaagtatataaaatgttggatgattttatacaagatgttttcaaaaataaaaatattacacttgatgtttctcccagagaattttcaagaaaggagtatgaaaggatagccttaggagaatatcctctaagtgaaaaaatattttattctatacaaaaattttcaatgaaaacttttggatttttaagtaaaggtatgagtttaggattaagatatggctttgactctggaatttctcttgattatatttataaaaatcaagctgatgaaaaattattactaggaaaatttatagatagattttatctaaatcaaattggctgggcaggtgttagggaaaggaaaaagaacttgcttactttaatagaagaaaagataaataatttaggtgaagaaaatgttaaaatcttagatgttgctggtggaactgggaattatttatttgatataaaagaaaaatatccaaagatacatattttaataaatgagtttaaaaaatcaaatattgaagttggagaagaagttattaagaaaaataattggaaaaatatatcttttgtaaactatgactgttttgatagagagacttataaaaaaatagattacacacctaatatagttataatctcaggagtttttgagctttttgaagataataatatgcttgaaaatactatttcaggagtagcagaaattttagagaaaaatggtgctgttatttacacaggtcagccttggcaccctcaattaaagcaaatagccttagttcttaatagccataaaggaaacgataaatcttggcttatgagaagaagaagtgaaaaagagctagatggtttatttgaaaaatataatttgaataaagaaaaaatgctaattgataataatggaatttttacagtttcattagcagaattgaggtag

SEQ ID NO: 145124 - protein, 570 aa, Fusobacterium nucleatum subsp. vincentii ATCC 49256
MGGDMENLFFNTFDGNKIFYRVWNFEKNKKTLIIIHRGHEHSERLSELTQDEKFLKYNIFAYDLRGHGYTEAKTSPNAMDYVRDLDFFVKHIKSEYQIKEEDIFIVANSIGGVILSAYVHDFAPNIAGIALLAPAFEIKLYIPFAKQLITLLTKIKKDAKVMSYVKAKVLTHDVEEQNKYNNDKLINKEINAKLLIDLANMGKRLVEDSMAIELPTIIFSAEKDYVVKNSAQKKFFLNLSSKKREFIELENFYHGIIFEKERQKVYKMLDDFIQDVFKNKNITLDVSPREFSRKEYERIALGEYPLSEKIFYSIQKFSMKTFGFLSKGMSLGLRYGFDSGISLDYIYKNQADEKLLLGKFIDRFYLNQIGWAGVRERKKNLLTLIEEKINNLGEENVKILDVAGGTGNYLFDIKEKYPKIHILINEFKKSNIEVGEEVIKKNNWKNISFVNYDCFDRETYKKIDYTPNIVIISGVFELFEDNNMLENTISGVAEILEKNGAVIYTGQPWHPQLKQIALVLNSHKGNDKSWLMRRRSEKELDGLFEKYNLNKEKMLIDNNGIFTVSLAELR

SEQ ID NO: 145125 - DNA, 23 bp, Artificial sequence
  primer
atggaaaattcacgcatccctgg

SEQ ID NO: 145126 - DNA, 24 bp, Artificial sequence
  primer
ttagttatcacgacgcaccgccat

SEQ ID NO: 145127 - protein, 589 aa, Artificial sequence
  consensus sequence
  Variant (2)..(7): Xaa in position 2 to 7 is any amino acid
  Variant (9)..(11): Xaa in position 9 to 11 is any amino acid
  Variant (13)..(15): Xaa in position 13 to 15 is any amino acid
  Variant (20)..(20): Xaa in position 20 is any amino acid
  Variant (22)..(31): Xaa in position 22 to 31 is any amino acid
  Variant (32)..(36): Xaa in position 32 to 36 is any or no amino acid
  Variant (38)..(38): Xaa in position 38 is any amino acid
  Variant (46)..(46): Xaa in position 46 is any amino acid
  Variant (48)..(49): Xaa in position 48 to 49 is any amino acid
  Variant (51)..(53): Xaa in position 51 to 53 is any amino acid
  Variant (56)..(57): Xaa in position 56 to 57 is any amino acid
  Variant (59)..(61): Xaa in position 59 to 61 is any amino acid
  Variant (63)..(63): Xaa in position 63 is any amino acid
  Variant (72)..(72): Xaa in position 72 is any amino acid
  Variant (74)..(74): Xaa in position 74 is any amino acid
  Variant (76)..(76): Xaa in position 76 is any amino acid
  Variant (79)..(79): Xaa in position 79 is any amino acid
  Variant (82)..(86): Xaa in position 82 to 86 is any amino acid
  Variant (88)..(88): Xaa in position 88 is any amino acid
  Variant (90)..(92): Xaa in position 90 to 92 is any amino acid
  Variant (94)..(109): Xaa in position 94 to 109 is any amino acid
  Variant (111)..(111): Xaa in position 111 is any amino acid
  Variant (119)..(121): Xaa in position 119 to 121 is any amino acid
  Variant (124)..(124): Xaa in position 124 is any amino acid
  Variant (130)..(131): Xaa in position 130 to 131 is any amino acid
  Variant (133)..(134): Xaa in position 133 to 134 is any amino acid
  Variant (142)..(143): Xaa in position 142 to 143 is any amino acid
  Variant (152)..(153): Xaa in position 152 to 153 is any amino acid
  Variant (155)..(155): Xaa in position 155 is any amino acid
  Variant (157)..(160): Xaa in position 157 to 160 is any amino acid
  Variant (163)..(163): Xaa in position 163 is any amino acid
  Variant (165)..(165): Xaa in position 165 is any amino acid
  Variant (167)..(167): Xaa in position 167 is any amino acid
  Variant (172)..(174): Xaa in position 172 to 174 is any amino acid
  Variant (176)..(176): Xaa in position 176 is any amino acid
  Variant (179)..(180): Xaa in position 179 to 180 is any amino acid
  Variant (182)..(183): Xaa in position 182 to 183 is any amino acid
  Variant (185)..(187): Xaa in position 185 to 187 is any amino acid
  Variant (189)..(189): Xaa in position 189 is any amino acid
  Variant (192)..(194): Xaa in position 192 to 194 is any amino acid
  Variant (196)..(196): Xaa in position 196 is any amino acid
  Variant (198)..(199): Xaa in position 198 to 199 is any amino acid
  Variant (202)..(202): Xaa in position 202 is any amino acid
  Variant (204)..(208): Xaa in position 204 to 208 is any amino acid
  Variant (210)..(210): Xaa in position 210 is any amino acid
  Variant (212)..(212): Xaa in position 212 is any amino acid
  Variant (214)..(215): Xaa in position 214 to 215 is any amino acid
  Variant (218)..(219): Xaa in position 218 to 219 is any amino acid
  Variant (225)..(225): Xaa in position 225 is any amino acid
  Variant (228)..(228): Xaa in position 228 is any amino acid
  Variant (230)..(230): Xaa in position 230 is any amino acid
  Variant (234)..(235): Xaa in position 234 to 235 is any amino acid
  Variant (238)..(239): Xaa in position 238 to 239 is any amino acid
  Variant (241)..(243): Xaa in position 241 to 243 is any amino acid
  Variant (245)..(248): Xaa in position 245 to 248 is any amino acid
  Variant (251)..(253): Xaa in position 251 to 253 is any amino acid
  Variant (255)..(255): Xaa in position 255 is any amino acid
  Variant (258)..(258): Xaa in position 258 is any amino acid
  Variant (265)..(266): Xaa in position 265 to 266 is any amino acid
  Variant (268)..(269): Xaa in position 268 to 269 is any amino acid
  Variant (271)..(276): Xaa in position 271 to 276 is any amino acid
  Variant (278)..(303): Xaa in position 278 to 303 is any amino acid
  Variant (304)..(306): Xaa in position 304 to 306 is any or no amino acid
  Variant (308)..(313): Xaa in position 308 to 313 is any amino acid
  Variant (314)..(314): Xaa in position 314 is any or no amino acid
  Variant (316)..(333): Xaa in position 316 to 333 is any amino acid
  Variant (334)..(334): Xaa in position 334 is any or no amino acid
  Variant (336)..(336): Xaa in position 336 is any amino acid
  Variant (338)..(339): Xaa in position 338 to 339 is any amino acid
  Variant (342)..(344): Xaa in position 342 to 344 is any amino acid
  Variant (351)..(351): Xaa in position 351 is any amino acid
  Variant (357)..(357): Xaa in position 357 is any amino acid
  Variant (359)..(361): Xaa in position 359 to 361 is any amino acid
  Variant (363)..(366): Xaa in position 363 to 366 is any amino acid
  Variant (367)..(369): Xaa in position 367 to 369 is any or no amino acid
  Variant (371)..(372): Xaa in position 371 to 372 is any amino acid
  Variant (375)..(376): Xaa in position 375 to 376 is any amino acid
  Variant (379)..(381): Xaa in position 379 to 381 is any amino acid
  Variant (384)..(384): Xaa in position 384 is any amino acid
  Variant (388)..(388): Xaa in position 388 is any amino acid
  Variant (391)..(395): Xaa in position 391 to 395 is any amino acid
  Variant (397)..(399): Xaa in position 397 to 399 is any amino acid
  Variant (401)..(403): Xaa in position 401 to 403 is any amino acid
  Variant (405)..(408): Xaa in position 405 to 408 is any amino acid
  Variant (409)..(410): Xaa in position 409 to 410 is any or no amino acid
  Variant (413)..(414): Xaa in position 413 to 414 is any amino acid
  Variant (424)..(424): Xaa in position 424 is any amino acid
  Variant (426)..(435): Xaa in position 426 to 435 is any amino acid
  Variant (436)..(442): Xaa in position 436 to 442 is any or no amino acid
  Variant (448)..(448): Xaa in position 448 is any amino acid
  Variant (450)..(451): Xaa in position 450 to 451 is any amino acid
  Variant (454)..(455): Xaa in position 454 to 455 is any amino acid
  Variant (457)..(459): Xaa in position 457 to 459 is any amino acid
  Variant (461)..(463): Xaa in position 461 to 463 is any amino acid
  Variant (465)..(469): Xaa in position 465 to 469 is any amino acid
  Variant (470)..(470): Xaa in position 470 is any or no amino acid
  Variant (472)..(473): Xaa in position 472 to 473 is any amino acid
  Variant (475)..(475): Xaa in position 475 is any amino acid
  Variant (479)..(481): Xaa in position 479 to 481 is any amino acid
  Variant (483)..(486): Xaa in position 483 to 486 is any amino acid
  Variant (488)..(488): Xaa in position 488 is any amino acid
  Variant (490)..(490): Xaa in position 490 is any amino acid
  Variant (492)..(493): Xaa in position 492 to 493 is any amino acid
  Variant (502)..(503): Xaa in position 502 to 503 is any amino acid
  Variant (505)..(509): Xaa in position 505 to 509 is any amino acid
  Variant (512)..(512): Xaa in position 512 is any amino acid
  Variant (516)..(516): Xaa in position 516 is any amino acid
  Variant (518)..(520): Xaa in position 518 to 520 is any amino acid
  Variant (523)..(523): Xaa in position 523 is any amino acid
  Variant (525)..(525): Xaa in position 525 is any amino acid
  Variant (536)..(537): Xaa in position 536 to 537 is any amino acid
  Variant (540)..(541): Xaa in position 540 to 541 is any amino acid
  Variant (543)..(543): Xaa in position 543 is any amino acid
  Variant (546)..(547): Xaa in position 546 to 547 is any amino acid
  Variant (548)..(548): Xaa in position 548 is any or no amino acid
  Variant (550)..(551): Xaa in position 550 to 551 is any amino acid
  Variant (553)..(553): Xaa in position 553 is any amino acid
  Variant (556)..(556): Xaa in position 556 is any amino acid
  Variant (560)..(560): Xaa in position 560 is any amino acid
  Variant (564)..(564): Xaa in position 564 is any amino acid
  Variant (567)..(568): Xaa in position 567 to 568 is any amino acid
  Variant (572)..(572): Xaa in position 572 is any amino acid
  Variant (574)..(575): Xaa in position 574 to 575 is any amino acid
  Variant (577)..(578): Xaa in position 577 to 578 is any amino acid
  Variant (580)..(581): Xaa in position 580 to 581 is any amino acid
  Variant (588)..(588): Xaa in position 588 is any amino acid
RXXXXXXFXXXDXXXLFYRXWXXXXXXXXXXXXXXXLXHRGHEHSXRXXHXXXELXXPXXXFXAWDARGHGXSXGXRGXSPXXXXXVXDXXXFXXXXXXXXXXXXXXXXVXAQSVGAVXXXTWXHDYAPXXRXXVLASPAFXXKLYVPFARXXLXLXXXXRGXFXVXSYVKXXXLXHDXXRXXSXXXDXLIXXXIXVXXLLXLXXXXXRXVXDXXAIXXPTQLLXSGXDXVVHXXPQXXFXXXLXXXXKEXXXLXGFXHDTLGEXXRXXAXXXXXXFXXXXXXXXXXXXXXXXXXXXXXXXXXXXXLXXXXXXXSXXXXXXXXXXXXXXXXXXXSXGXXLGXXXGFDSGSXLDYVYXNXXXGXXXXXXXGXXIDXXYLXXXGWXGIRXRKXXXXXLXXXAXXXLXXXXXXVRXXDIAAGHGRYXLXXXXXXXXXXXXXXXXXILLRDXSXXNVXXGXXXIXXXGXXXXXXFXXGXAFDXXXLXXXXPXPXLXXVSGLYELFXXNXXXXXSLXGLAXAXXXGGXLXYTGQPWHPQLXXIAXXLXSHXXXGXXWXMRXRSQXEMDXLVXXAGFXKXXQXXDXXGIFTVSXA

SEQ ID NO: 145128 - protein, 62 aa, Artificial sequence
  protein pattern
  Variant (3)..(3): Xaa in position 3 is Ala, Ile or Val
  Variant (9)..(9): Xaa in position 9 is any amino acid
  Variant (10)..(10): Xaa in position 10 is Ile, Leu or Val
  Variant (12)..(12): Xaa in position 12 is any amino acid
  Variant (13)..(14): Xaa in position 13 to 14 is any or no amino acid
  Variant (16)..(17): Xaa in position 16 to 17 is any or no amino acid
  Variant (23)..(23): Xaa in position 23 is any amino acid
  Variant (24)..(24): Xaa in position 24 is Ile or Val
  Variant (30)..(30): Xaa in position 30 is Phe or Leu
  Variant (32)..(32): Xaa in position 32 is Lys or Arg
  Variant (33)..(33): Xaa in position 33 is any amino acid
  Variant (34)..(34): Xaa in position 34 is Ala or Gly
  Variant (36)..(36): Xaa in position 36 is any amino acid
  Variant (38)..(41): Xaa in position 38 to 41 is any amino acid
  Variant (42)..(42): Xaa in position 42 is Lys or Arg
  Variant (44)..(44): Xaa in position 44 is any amino acid
  Variant (46)..(46): Xaa in position 46 is Phe or Tyr
  Variant (47)..(47): Xaa in position 47 is Ile or Val
  Variant (48)..(48): Xaa in position 48 is Asn or Thr
  Variant (53)..(53): Xaa in position 53 is Ala, Gly, Pro or Ser
  Variant (54)..(55): Xaa in position 54 to 55 is any amino acid
  Variant (57)..(57): Xaa in position 57 is Ser or Thr
  Variant (60)..(60): Xaa in position 60 is any amino acid
  Variant (61)..(61): Xaa in position 61 is Ala, Glu or Gln
TWXHDYAPXXRXXXLXXASPAFXXKLYVPXAXXXLXLXXXXXGXFXXXSYVKXXXLXHDXXR

SEQ ID NO: 145129 - protein, 34 aa, Artificial sequence
  protein pattern
  Variant (2)..(2): Xaa in position 2 is any or no amino acid
  Variant (4)..(4): Xaa in position 4 is any amino acid
  Variant (5)..(6): Xaa in position 5 to 6 is any or no amino acid
  Variant (8)..(8): Xaa in position 8 is any amino acid
  Variant (12)..(12): Xaa in position 12 is Ala, Glu, Gly, Gln, Ser or Thr
  Variant (15)..(16): Xaa in position 15 to 16 is any amino acid
  Variant (20)..(20): Xaa in position 20 is Asp, Glu, Lys or Arg
  Variant (22)..(23): Xaa in position 22 to 23 is any amino acid
  Variant (25)..(25): Xaa in position 25 is any amino acid
  Variant (26)..(26): Xaa in position 26 is Ile or Val
  Variant (28)..(29): Xaa in position 28 to 29 is any amino acid
  Variant (33)..(33): Xaa in position 33 is Ser or Thr
VXRXXXQXEMDXLVXXAGFXKXXQXXDXXGIFXV

SEQ ID NO: 145130 - protein, 61 aa, Artificial sequence
  protein pattern
  Variant (2)..(2): Xaa in position 2 is any amino acid
  Variant (3)..(3): Xaa in position 3 is Pro or Val
  Variant (4)..(4): Xaa in position 4 is Asn, Ser or Thr
  Variant (6)..(6): Xaa in position 6 is Ala or Gly
  Variant (7)..(7): Xaa in position 7 is Ile or Val
  Variant (16)..(16): Xaa in position 16 is Ala, Gly, Pro or Ser
  Variant (17)..(17): Xaa in position 17 is Asp, Glu, Gly or Ser
  Variant (19)..(20): Xaa in position 19 to 20 is any amino acid
  Variant (21)..(21): Xaa in position 21 is Ile, Leu or Val
  Variant (22)..(23): Xaa in position 22 to 23 is any amino acid
  Variant (26)..(26): Xaa in position 26 is any amino acid
  Variant (29)..(30): Xaa in position 29 to 30 is any or no amino acid
  Variant (32)..(34): Xaa in position 32 to 34 is any amino acid
  Variant (35)..(36): Xaa in position 35 to 36 is any or no amino acid
  Variant (38)..(38): Xaa in position 38 is Ala or Gly
  Variant (39)..(39): Xaa in position 39 is any amino acid
  Variant (41)..(41): Xaa in position 41 is Ile, Leu or Val
  Variant (46)..(46): Xaa in position 46 is Ile or Pro
  Variant (51)..(51): Xaa in position 51 is any amino acid
  Variant (52)..(52): Xaa in position 52 is Glu or Lys
  Variant (53)..(53): Xaa in position 53 is any amino acid
  Variant (56)..(56): Xaa in position 56 is any amino acid
  Variant (57)..(57): Xaa in position 57 is Ala, Thr or Val
  Variant (59)..(59): Xaa in position 59 is Asn or Thr
  Variant (60)..(60): Xaa in position 60 is Asn or Ser
PXXXLXXVSGLYELFXXNXXXXXSLXGLXXAXXXXXGXXLXYTGQXWHPQXXXIAXXLXXH

SEQ ID NO: 145131 - protein, 38 aa, Artificial sequence
  protein pattern
  Variant (2)..(2): Xaa in position 2 is any amino acid
  Variant (6)..(6): Xaa in position 6 is Ala, Gly or Gln
  Variant (8)..(8): Xaa in position 8 is Ile, Leu, Met or Val
  Variant (9)..(9): Xaa in position 9 is any amino acid
  Variant (11)..(11): Xaa in position 11 is Ile or Leu
  Variant (12)..(12): Xaa in position 12 is Ala or Val
  Variant (13)..(13): Xaa in position 13 is Asp or Glu
  Variant (16)..(16): Xaa in position 16 is any amino acid
  Variant (17)..(17): Xaa in position 17 is Leu or Met
  Variant (19)..(19): Xaa in position 19 is Asp, Glu, Gly or Gln
  Variant (20)..(21): Xaa in position 20 to 21 is any amino acid
  Variant (23)..(23): Xaa in position 23 is Phe or Tyr
  Variant (30)..(30): Xaa in position 30 is any amino acid
  Variant (32)..(32): Xaa in position 32 is any amino acid
  Variant (33)..(33): Xaa in position 33 is Ser or Thr
  Variant (34)..(34): Xaa in position 34 is Pro or Ser
  Variant (36)..(36): Xaa in position 36 is any amino acid
GXEHSXRXXHXXXELXXPXXXFXAWDARGXGXXXGXRG

SEQ ID NO: 145132 - protein, 38 aa, Artificial sequence
  protein pattern
  Variant (2)..(3): Xaa in position 2 to 3 is Ile or Val
  Variant (4)..(4): Xaa in position 4 is any amino acid
  Variant (6)..(6): Xaa in position 6 is Ala or Ser
  Variant (7)..(7): Xaa in position 7 is Ala, Gln or Thr
  Variant (10)..(10): Xaa in position 10 is Gln or Thr
  Variant (11)..(11): Xaa in position 11 is Ile, Leu or Val
  Variant (17)..(17): Xaa in position 17 is Ile or Val
  Variant (20)..(20): Xaa in position 20 is any or no amino acid
  Variant (22)..(22): Xaa in position 22 is any amino acid
  Variant (26)..(26): Xaa in position 26 is Glu, His or Arg
  Variant (27)..(27): Xaa in position 27 is any amino acid
  Variant (30)..(31): Xaa in position 30 to 31 is any amino acid
  Variant (33)..(33): Xaa in position 33 is Phe or Tyr
  Variant (34)..(35): Xaa in position 34 to 35 is any amino acid
  Variant (37)..(37): Xaa in position 37 is any amino acid
  Variant (38)..(38): Xaa in position 38 is Ala or Ser
RXXXDXXAIXXPTQLLXSGXDXVVHXXPQXXFXXXLXX

SEQ ID NO: 145133 - protein, 32 aa, Artificial sequence
  protein pattern
  Variant (2)..(3): Xaa in position 2 to 3 is any amino acid
  Variant (4)..(4): Xaa in position 4 is any or no amino acid
  Variant (6)..(6): Xaa in position 6 is any amino acid
  Variant (8)..(8): Xaa in position 8 is Ile, Leu, Met or Val
  Variant (9)..(9): Xaa in position 9 is any amino acid
  Variant (12)..(12): Xaa in position 12 is any amino acid
  Variant (13)..(13): Xaa in position 13 is Asp, Glu, Gln, Arg or Ser
  Variant (14)..(14): Xaa in position 14 is any amino acid
  Variant (21)..(21): Xaa in position 21 is Ser or Thr
  Variant (25)..(25): Xaa in position 25 is Ile or Val
  Variant (27)..(27): Xaa in position 27 is Gln or Arg
  Variant (29)..(29): Xaa in position 29 is any amino acid
  Variant (30)..(30): Xaa in position 30 is Ala or Pro
  Variant (31)..(31): Xaa in position 31 is any amino acid
GXXXSXGXXLGXXXGFDSGSXLDYXYXNXXXG

SEQ ID NO: 145134 - protein, 24 aa, Artificial sequence
  protein pattern
  Variant (2)..(3): Xaa in position 2 to 3 is any amino acid
  Variant (6)..(6): Xaa in position 6 is Asp, Asn or Gln
  Variant (7)..(7): Xaa in position 7 is Ala or Ser
  Variant (8)..(8): Xaa in position 8 is Ile, Pro or Val
  Variant (11)..(11): Xaa in position 11 is any amino acid
  Variant (15)..(15): Xaa in position 15 is any amino acid
  Variant (18)..(19): Xaa in position 18 to 19 is any amino acid
  Variant (20)..(20): Xaa in position 20 is Ala, Ile, Leu or Val
  Variant (21)..(21): Xaa in position 21 is Glu or Gln
  Variant (22)..(22): Xaa in position 22 is any amino acid
  Variant (23)..(23): Xaa in position 23 is Leu or Met
  Variant (24)..(24): Xaa in position 24 is Ile or Leu
DXXYLXXXGWXGIRXRKXXXXXXX

SEQ ID NO: 145135 - protein, 37 aa, Artificial sequence
  protein pattern
  Variant (3)..(4): Xaa in position 3 to 4 is any amino acid
  Variant (5)..(5): Xaa in position 5 is Ile, Leu or Val
  Variant (7)..(7): Xaa in position 7 is Asp, Glu or Pro
  Variant (10)..(10): Xaa in position 10 is Phe or Tyr
  Variant (17)..(18): Xaa in position 17 to 18 is any or no amino acid
  Variant (20)..(21): Xaa in position 20 to 21 is any amino acid
  Variant (22)..(23): Xaa in position 22 to 23 is any or no amino acid
  Variant (25)..(25): Xaa in position 25 is Phe, Ile, Leu, Met or Val
  Variant (26)..(26): Xaa in position 26 is Ala, Asp, Glu, Gly or Ser
  Variant (27)..(30): Xaa in position 27 to 30 is any amino acid
  Variant (32)..(32): Xaa in position 32 is Ile, Leu or Val
  Variant (33)..(33): Xaa in position 33 is any amino acid
  Variant (34)..(34): Xaa in position 34 is Glu, Gln or Arg
  Variant (35)..(35): Xaa in position 35 is any amino acid
  Variant (36)..(36): Xaa in position 36 is Phe or Tyr
  Variant (37)..(37): Xaa in position 37 is Ala, Asp or Glu
KEXXXLXGFXHDTLGEXXRXXXXAXXXXXXFXXXXXX

SEQ ID NO: 145136 - protein, 29 aa, Artificial sequence
  protein pattern
  Variant (2)..(2): Xaa in position 2 is any amino acid
  Variant (4)..(4): Xaa in position 4 is Ile, Leu or Val
  Variant (5)..(5): Xaa in position 5 is Asp or Gln
  Variant (6)..(6): Xaa in position 6 is Glu, Ser or Thr
  Variant (8)..(8): Xaa in position 8 is Ile or Val
  Variant (9)..(9): Xaa in position 9 is any amino acid
  Variant (10)..(10): Xaa in position 10 is Phe or His
  Variant (11)..(11): Xaa in position 11 is Ala, Ile, Leu or Val
  Variant (12)..(15): Xaa in position 12 to 15 is any amino acid
  Variant (16)..(16): Xaa in position 16 is Asp, Gly or Gln
  Variant (17)..(17): Xaa in position 17 is Ile or Val
  Variant (18)..(18): Xaa in position 18 is Ala, Gly, Asn or Gln
  Variant (19)..(19): Xaa in position 19 is any amino acid
  Variant (20)..(20): Xaa in position 20 is Asp, Glu, Gln or Ser
  Variant (21)..(21): Xaa in position 21 is Asp, Glu, Asn or Arg
  Variant (22)..(22): Xaa in position 22 is Ile, Met or Val
  Variant (23)..(23): Xaa in position 23 is Ala or Val
  Variant (25)..(25): Xaa in position 25 is Ile, Leu or Val
  Variant (26)..(26): Xaa in position 26 is Ala or Gly
VXDXXXFXXXXXXXXXXXXXXXXVXXQSV

SEQ ID NO: 145137 - protein, 27 aa, Artificial sequence
  protein pattern
  Variant (2)..(2): Xaa in position 2 is any amino acid
  Variant (6)..(6): Xaa in position 6 is Phe or Tyr
  Variant (8)..(8): Xaa in position 8 is any amino acid
  Variant (9)..(9): Xaa in position 9 is Ile, Leu or Pro
  Variant (12)..(13): Xaa in position 12 to 13 is any amino acid
  Variant (15)..(16): Xaa in position 15 to 16 is any amino acid
  Variant (17)..(17): Xaa in position 17 is Leu or Met
  Variant (19)..(21): Xaa in position 19 to 21 is any amino acid
  Variant (23)..(23): Xaa in position 23 is any amino acid
  Variant (24)..(24): Xaa in position 24 is Ala, Asp, Glu, Gly or Ser
  Variant (25)..(26): Xaa in position 25 to 26 is any amino acid
  Variant (27)..(27): Xaa in position 27 is Ala or Val
IXLRDXSXXNVXXGXXXIXXXGXXXXX

SEQ ID NO: 145138 - protein, 29 aa, Artificial sequence
  protein pattern
  Variant (2)..(4): Xaa in position 2 to 4 is any amino acid
  Variant (6)..(9): Xaa in position 6 to 9 is any amino acid
  Variant (10)..(11): Xaa in position 10 to 11 is any or no amino acid
  Variant (14)..(14): Xaa in position 14 is Ile or Val
  Variant (15)..(15): Xaa in position 15 is Leu or Val
  Variant (25)..(25): Xaa in position 25 is Ile or Val
  Variant (27)..(27): Xaa in position 27 is Asp, Glu or Gln
  Variant (28)..(28): Xaa in position 28 is Ala, Gly or Ser
  Variant (29)..(29): Xaa in position 29 is Ile or Leu
AXXXLXXXXXXVRXXDIAAGHGRYXLXXX

SEQ ID NO: 145139 - protein, 25 aa, Artificial sequence
  protein pattern
  Variant (2)..(2): Xaa in position 2 is any amino acid
  Variant (3)..(3): Xaa in position 3 is Ala, Ser or Thr
  Variant (4)..(4): Xaa in position 4 is any amino acid
  Variant (6)..(6): Xaa in position 6 is Glu, Gly or Asn
  Variant (7)..(8): Xaa in position 7 to 8 is any amino acid
  Variant (10)..(10): Xaa in position 10 is any or no amino acid
  Variant (12)..(12): Xaa in position 12 is any or no amino acid
  Variant (14)..(14): Xaa in position 14 is His or Tyr
  Variant (16)..(16): Xaa in position 16 is Pro or Ser
  Variant (17)..(17): Xaa in position 17 is Ala, Leu or Val
  Variant (18)..(24): Xaa in position 18 to 24 is any amino acid
  Variant (25)..(25): Xaa in position 25 is Ala, Pro, Thr or Val
FXXXDXXXLXFXRXWXXXXXXXXXX

SEQ ID NO: 145140 - protein, 21 aa, Artificial sequence
  protein pattern
  Variant (2)..(2): Xaa in position 2 is Phe or Tyr
  Variant (3)..(3): Xaa in position 3 is any amino acid
  Variant (4)..(4): Xaa in position 4 is Ala, Asn, Gln, Ser or Thr
  Variant (6)..(6): Xaa in position 6 is any amino acid
  Variant (8)..(8): Xaa in position 8 is Ile or Val
  Variant (9)..(9): Xaa in position 9 is Ala or Thr
  Variant (10)..(10): Xaa in position 10 is Lys or Arg
  Variant (11)..(11): Xaa in position 11 is any amino acid
  Variant (13)..(13): Xaa in position 13 is Ala or Ser
  Variant (15)..(15): Xaa in position 15 is Asn or Arg
  Variant (16)..(16): Xaa in position 16 is Ile, Met or Val
  Variant (19)..(19): Xaa in position 19 is Ala, Asp or Gly
  Variant (21)..(21): Xaa in position 21 is His or Tyr
SXXXDXLXXXXIXVXXLLXLX

SEQ ID NO: 145141 - protein, 14 aa, Artificial sequence
  protein pattern
  Variant (2)..(3): Xaa in position 2 to 3 is any amino acid
  Variant (5)..(5): Xaa in position 5 is Asp or Asn
  Variant (8)..(8): Xaa in position 8 is Asp or Asn
  Variant (9)..(9): Xaa in position 9 is any amino acid
  Variant (10)..(10): Xaa in position 10 is Ala, Asp, Glu or Asn
  Variant (11)..(11): Xaa in position 11 is Ala, Asp, Glu or Ser
  Variant (13)..(13): Xaa in position 13 is any or no amino acid
FXXGXAFXXXXLXA

SEQ ID NO: 145142 - DNA, 291 bp, Escherichia coli K12
  CDS (1)..(291): transl_table=11
atgctgtcaaaactaccccgtagactccgatcttttcaaacatattgcaccatccgtgtacatcggggtgaggatatgaaatcaatggataagttaacaacaggtgttgcctatggcacatcggcgggtaatgctggtttctgggcattgcagttactcgataaagtaactccgtcacagtgggctgcaatcggtgtgctgggtagcctggtttttggcctgctgacgtatctgacaaatctttatttcaagattaaagaagacaggcgtaaggctgcgagaggagagtaa

SEQ ID NO: 145143 - protein, 96 aa, Escherichia coli K12
MLSKLPRRLRSFQTYCTIRVHRGEDMKSMDKLTTGVAYGTSAGNAGFWALQLLDKVTPSQWAAIGVLGSLVFGLLTYLTNLYFKIKEDRRKAARGE

SEQ ID NO: 145144 - DNA, 216 bp, Escherichia coli; 0157:H7
  CDS (1)..(216)
atgtaccagatggaaaaaatcacaacgggtgtgtcatacaccacgtcagcggtggggacgggatactggttactgcagctgctggacaaagtctctccgtcccagtgggtggcgataggcgtgctggggagtctgctgtttgggctgctgacatatctgacgaacctgtatttcaagattaaagaagaccggcgtaaggcggcgcggggagagtaa

SEQ ID NO: 145145 - protein, 71 aa, Escherichia coli; 0157:H7
MYQMEKITTGVSYTTSAVGTGYWLLQLLDKVSPSQWVAIGVLGSLLFGLLTYLTNLYFKIKEDRRKAARGE

SEQ ID NO: 145146 - DNA, 207 bp, Escherichia coli O157:H7 EDL933
  CDS (1)..(207): transl_table=11
atggaaaaaatcacaacaggtgtgtcatacaccacgtcagcggtggggacgggatactggttactgcagctgctggacaaagtctctccgtcccagtgggtggcgataggcgtgctggggagtctgctgtttgggctgctgacatatctgacgaacctgtatttcaagattaaagaagaccggcgtaaggcggcgcggggagagtaa

SEQ ID NO: 145147 - protein, 68 aa, Escherichia coli O157:H7 EDL933
MEKITTGVSYTTSAVGTGYWLLQLLDKVSPSQWVAIGVLGSLLFGLLTYLTNLYFKIKEDRRKAARGE

SEQ ID NO: 145148 - DNA, 315 bp, Escherichia coli O157:H7 EDL933
  CDS (1)..(315): transl_table=11
gtgggtcgtctgagacgcctgcatgagttatcagagccatcagtagttaactggtggcttttttattgttgtcagcttccggataacgggagacggggtatgtaccagatggaaaaaatcacaacaggtgtgtcatacaccacgtcagcggtagggacgggatactggttactgcaactgctggacaaagtctctccgtcccagtgggtggcaataggtgtactggggagtctgctgtttggcctgctgacgtatctgactaacctgtatttcaaaatcagggaggaccgccgtaagacggcgcggggagactaa

SEQ ID NO: 145149 - protein, 104 aa, Escherichia coli O157:H7 EDL933
MGRLRRLHELSEPSVVNWWLFYCCQLPDNGRRGMYQMEKITTGVSYTTSAVGTGYWLLQLLDKVSPSQWVAIGVLGSLLFGLLTYLTNLYFKIREDRRKTARGD

SEQ ID NO: 145150 - DNA, 207 bp, Escherichia coli O157:H7 EDL933
  CDS (1)..(207): transl_table=11
atggaaaaaatcacaacaggtgtgtcatacaccacgtcagcggtggggacggaatactggttactgcagctgctggacaaagtctctccgtcccagtgggtggcaataggagtgctgggaagtctgctgtttggcctgctgacgtatctgactaacctgtatttcaaaatcagagaggaccgtcgtaaggtggcgcggggagagtag

SEQ ID NO: 145151 - protein, 68 aa, Escherichia coli O157:H7 EDL933
MEKITTGVSYTTSAVGTEYWLLQLLDKVSPSQWVAIGVLGSLLFGLLTYLTNLYFKIREDRRKVARGE

SEQ ID NO: 145152 - DNA, 207 bp, Escherichia coli O157:H7 EDL933
  CDS (1)..(207): transl_table=11
atggaaaaaatcacaacaggtgtgtcatacaccacgtcagcggtggggacgggatactggttactgcagctgctggacaaagtctctccgtcccagtgggtggcaatcggtgtgctggggagtctgctgtttggcctgctgacgtatctgactaacctgtatttcaaaatcagagaggaccgtcgtaaggcggcgcggggggagtaa

SEQ ID NO: 145153 - protein, 68 aa, Escherichia coli O157:H7 EDL933
MEKITTGVSYTTSAVGTGYWLLQLLDKVSPSQWVAIGVLGSLLFGLLTYLTNLYFKIREDRRKAARGE

SEQ ID NO: 145154 - DNA, 315 bp, Escherichia coli O157:H7 EDL933
  CDS (1)..(315): transl_table=11
gtgggtcgtctgagacgcctgcatgagttatcagagccatcagtagttaactggtggcttttttattgttgtcagcttccggataacgggagacggggtatgtaccagatggaaaaaatcacaacgggtgtgtcatacaccacgtcagcggtggggacgggatactggttactgcagctgctggacaaagtctctccgtcccagtgggtggcgataggcgtgctggggagtctgctgtttgggctgctgacatatctgacgaacctgtatttcaagattaaagaagaccggcgtaaggcggcgcggggagagtaa

SEQ ID NO: 145155 - protein, 104 aa, Escherichia coli O157:H7 EDL933
MGRLRRLHELSEPSVVNWWLFYCCQLPDNGRRGMYQMEKITTGVSYTTSAVGTGYWLLQLLDKVSPSQWVAIGVLGSLLFGLLTYLTNLYFKIKEDRRKAARGE

SEQ ID NO: 145156 - DNA, 273 bp, Escherichia coli O157:H7 EDL933
  CDS (1)..(273): transl_table=11
gtgtgtgccggtggtcttttttattgttgtgagcttccggattgcgggagacggggtatgtaccagatggaaaaaatcacaacaggtgtgtcatacaccacgtcagcggtgggaacgggctactggttcctgcagttgctggacagggtttccccgtctcagtgggcggcaataggcgtgctggggagtctgctgtttgggctgctgacatatctgacgaacctgtatttcaagattaaagaagaccggcgtaaggcggcacggggagagtaa

SEQ ID NO: 145157 - protein, 90 aa, Escherichia coli O157:H7 EDL933
MCAGGLFYCCELPDCGRRGMYQMEKITTGVSYTTSAVGTGYWFLQLLDRVSPSQWAAIGVLGSLLFGLLTYLTNLYFKIKEDRRKAARGE

SEQ ID NO: 145158 - DNA, 216 bp, Shigella flexneri 2a str. 301
  CDS (1)..(216): transl_table=11
atgaaatccatggacaaaatttcaacgggcattgcctacggcacctccgccggcagtgccggctactggtttttgcagtggttggatcaggtcaggccatcacagtgggctgcgattggtgtgctgggaagtctgcttctggggcttctgacttatctgacgaatctgtatttcaaaataagagaagacaagcgtaaggctgcacggggagagtaa

SEQ ID NO: 145159 - protein, 71 aa, Shigella flexneri 2a str. 301
MKSMDKISTGIAYGTSAGSAGYWFLQWLDQVRPSQWAAIGVLGSLLLGLLTYLTNLYFKIREDKRKAARGE

SEQ ID NO: 145160 - DNA, 216 bp, Shigella flexneri 2a str. 301
  CDS (1)..(216): transl_table=11
atgaaatccatggacaaaatttcaacgggcattgcctacggcacctccgcaggcagtgctggctactggtttttacagtggcttgatcaggtcagtccgtcacagtgggctgcgattggtgtactggggagtctggttctgggcttcctgacttatctgacaaatctgtacttcaaaatcagagaagacaagcgtaaggctgcgagaggtgaataa

SEQ ID NO: 145161 - protein, 71 aa, Shigella flexneri 2a str. 301
MKSMDKISTGIAYGTSAGSAGYWFLQWLDQVSPSQWAAIGVLGSLVLGFLTYLTNLYFKIREDKRKAARGE

SEQ ID NO: 145162 - DNA, 321 bp, Escherichia coli CFT073
  CDS (1)..(321): transl_table=11
gtgtcagtgggtcgtctgagacgcttgcatgagttatcagagccatcagtagttaactggtggcttttttattgttgtcagcttccggataacgggagacggggtatggaccagatggaaaaaatcacaacaggtgtgtcatacaccacgtcagcggtgggaacgggctactggttcctgcagttgctggacagggtttccccgtctcagtgggcggcaataggcgtgctgggaagtctgctgtttgggctgctgacatatctgactaacctgtatttcaaaatcagagaggaccgtcgtaaggcggcacggggagagtaa

SEQ ID NO: 145163 - protein, 106 aa, Escherichia coli CFT073
MSVGRLRRLHELSEPSVVNWWLFYCCQLPDNGRRGMDQMEKITTGVSYTTSAVGTGYWFLQLLDRVSPSQWAAIGVLGSLLFGLLTYLTNLYFKIREDRRKAARGE

SEQ ID NO: 145164 - DNA, 216 bp, Escherichia coli CFT073
  CDS (1)..(216): transl_table=11
atgaaatcaatggataagttaacaacaggtatcgcctatggcacatcggctggtaatgctggtttctgggcattgcagttactcgataaagtaactccgtcacagtgggctgcaatcggtgtgctgggtagtctggtttttggcctgctgacgtatctgacaaacctttatttcaagattaaagaagacaggcgtaaggttgcgagaagagagtaa

SEQ ID NO: 145165 - protein, 71 aa, Escherichia coli CFT073
MKSMDKLTTGIAYGTSAGNAGFWALQLLDKVTPSQWAAIGVLGSLVFGLLTYLTNLYFKIKEDRRKVARRE

SEQ ID NO: 145166 - DNA, 216 bp, Shigella flexneri 2a str. 2457T
  CDS (1)..(216): transl_table=11
atgaaatccatggacaaaatttcaacgggcattgcctacggcacctcctcaggcagtgctggctactggtttttacagtggcttgatcaggtcagtccgtcacagtgggctgcgattggtgtactggggagtctggttctgggcttcctgacttatctgacaaatctgtacttcaaaatcagagaagacaagcgtaaggctgcacggggagagtaa

SEQ ID NO: 145167 - protein, 71 aa, Shigella flexneri 2a str. 2457T
MKSMDKISTGIAYGTSSGSAGYWFLQWLDQVSPSQWAAIGVLGSLVLGFLTYLTNLYFKIREDKRKAARGE

SEQ ID NO: 145168 - DNA, 213 bp, Yersinia pseudotuberculosis IP 32953
  CDS (1)..(213): transl_table=11
atgaaaatggagaggctcacaaccggtatctcttataccgcgagcggtggcggcgcactgttttggtttaaacaattactgaatggatttgcccctgagcaatgggcggctattggtgtgctgggtagcttgatgtttgctttcctaacattcctaaccaacctatatttcaaggtgcgcgaagataagcggaaagcggcgaagggggaataa

SEQ ID NO: 145169 - protein, 70 aa, Yersinia pseudotuberculosis IP 32953
MKMERLTTGISYTASGGGALFWFKQLLNGFAPEQWAAIGVLGSLMFAFLTFLTNLYFKVREDKRKAAKGE

SEQ ID NO: 145170 - DNA, 216 bp, Escherichia coli
  CDS (1)..(216): transl_table=11
atgaaatccatggacaaaatttcaacgagcattgcctacggcacctccgcaggcagtgctggctactggtttttacagtggcttgatcaggtcagtccgtcacagtgggctgcgattggtgtactggggagtctggttctgggcttcctgacttatctgacaaatctgtacttcaaaatcagagaagacagaagaaaggctgcgagaggtgaataa

SEQ ID NO: 145171 - protein, 71 aa, Escherichia coli
MKSMDKISTSIAYGTSAGSAGYWFLQWLDQVSPSQWAAIGVLGSLVLGFLTYLTNLYFKIREDRRKAARGE

SEQ ID NO: 145172 - DNA, 216 bp, Escherichia coli O6
  CDS (1)..(216): transl_table=11
atgaaatccatggataagttaacaacgggtgtcgcctatggtacctcagcaggtagtgccgggtactggtttttacagttgctcgataaagtcacgccctcacagtgggcggcaataggtgtgctgggtagcctggtatttggcctgctgacgtacctgacaaacctttatttcaagattaaagaagataagcgcaaggctgcgagaggtgaataa

SEQ ID NO: 145173 - protein, 71 aa, Escherichia coli O6
MKSMDKLTTGVAYGTSAGSAGYWFLQLLDKVTPSQWAAIGVLGSLVFGLLTYLTNLYFKIKEDKRKAARGE

SEQ ID NO: 145174 - DNA, 291 bp, Escherichia coli
  CDS (76)..(291): transl_table=11
gtgctgtcaaaactaccccgtagactccgatcttttcaaacatattgcaccatccgtgtacatcggggtgaggatatgaaatcaatggataagttaacaacaggtgttgcctatggcacatcggcgggtaatgctggtttctgggcattgcagttactcgataaagtaactccgtcacagtgggctgcaatcggtgtgctgggtagcctggtttttggcctgctgacgtatctgacaaatctttatttcaagattaaagaagacaggcgtaaggctgcgagaggagagtaa

SEQ ID NO: 145175 - protein, 71 aa, Escherichia coli
MKSMDKLTTGVAYGTSAGNAGFWALQLLDKVTPSQWAAIGVLGSLVFGLLTYLTNLYFKIKEDRRKAARGE

SEQ ID NO: 145176 - DNA, 24 bp, Artificial sequence
  primer
atgctgtcaaaactaccccgtaga

SEQ ID NO: 145177 - DNA, 23 bp, Artificial sequence
  primer
ttactctcctctcgcagccttac

SEQ ID NO: 145178 - protein, 71 aa, Artificial sequence
  consensus sequence
  Variant (2)..(2): Xaa in position 2 is any amino acid
  Variant (3)..(3): Xaa in position 3 is any or no amino acid
  Variant (5)..(5): Xaa in position 5 is any amino acid
  Variant (7)..(8): Xaa in position 7 to 8 is any amino acid
  Variant (11)..(12): Xaa in position 11 to 12 is any amino acid
  Variant (14)..(14): Xaa in position 14 is any amino acid
  Variant (18)..(20): Xaa in position 18 to 20 is any amino acid
  Variant (22)..(22): Xaa in position 22 is any amino acid
  Variant (24)..(24): Xaa in position 24 is any amino acid
  Variant (27)..(27): Xaa in position 27 is any amino acid
  Variant (30)..(30): Xaa in position 30 is any amino acid
  Variant (32)..(32): Xaa in position 32 is any amino acid
  Variant (37)..(37): Xaa in position 37 is any amino acid
  Variant (46)..(47): Xaa in position 46 to 47 is any amino acid
  Variant (49)..(49): Xaa in position 49 is any amino acid
  Variant (61)..(61): Xaa in position 61 is any amino acid
  Variant (64)..(64): Xaa in position 64 is any amino acid
MXXMXKXXTGXXYXTSAXXXGXWXLQXLDXVXPSQWXAIGVLGSLXXGXLTYLTNLYFKIXEDXRKAARGE

SEQ ID NO: 145179 - protein, 60 aa, Artificial sequence
  protein pattern
  Variant (2)..(3): Xaa in position 2 to 3 is any amino acid
  Variant (6)..(6): Xaa in position 6 is any or no amino acid
  Variant (8)..(8): Xaa in position 8 is any amino acid
  Variant (9)..(9): Xaa in position 9 is any or no amino acid
  Variant (11)..(11): Xaa in position 11 is Phe or Tyr
  Variant (13)..(13): Xaa in position 13 is any amino acid
  Variant (16)..(16): Xaa in position 16 is any amino acid
  Variant (19)..(19): Xaa in position 19 is any amino acid
  Variant (21)..(21): Xaa in position 21 is any amino acid
  Variant (26)..(26): Xaa in position 26 is Ala or Val
  Variant (35)..(35): Xaa in position 35 is Leu or Val
  Variant (36)..(36): Xaa in position 36 is Phe or Leu
  Variant (38)..(38): Xaa in position 38 is Phe or Leu
  Variant (50)..(50): Xaa in position 50 is Lys or Arg
  Variant (53)..(53): Xaa in position 53 is Lys or Arg
  Variant (56)..(56): Xaa in position 56 is Ala, Thr or Val
  Variant (59)..(59): Xaa in position 59 is any amino acid
  Variant (60)..(60): Xaa in position 60 is Asp or Glu
YXXSAXGXXGXWXLQXLDXVXPSQWXAIGVLGSLXXGXLTYLTNLYFKIXEDXRKXARXX

SEQ ID NO: 145180 - DNA, 1362 bp, Escherichia coli
  CDS (1)..(1362): transl_table=11
atgaagacgttatctcccgctgtgattactttactctggcgtcaggacgccgctgaattttatttctcccgcttaagccacctgccgtgggcgatgcttttacactccggctatgccgatcatccgtatagccgctttgatattgtggtcgccgagccgatttgcactttaaccactttcggtaaagaaaccgttgttagtgaaagcgaaaaacgcacaacgaccactgatgacccgctacaggtgctccagcaggtgctggatcgcgcagacattcgcccaacgcataacgaagatttgccatttcagggcggcgcactggggttgtttggctacgatctgggccgccgttttgagtcactgccagaaattgcggaacaagatatcgttctgccggatatggcagtgggtatctacgattgggcgctcattgtcgaccaccagcgtcatacagtttctttgctgagtcataatgatgtcaatgcccgtcgggcctggctggaaagccagcaattctcgccgcaggaagatttcacgctcacttccgactggcaatccaatatgacccgcgagcagtacggcgaaaaatttcgccaggtacaggaatatctgcacagcggtgattgctatcaggtgaatctcgcccaacgttttcatgcgacctattctggcgatgaatggcaggcattccttcagcttaatcaggccaaccgcgcgccatttagcgcttttttacgtcttgaacagggtgcaattttaagcctttcgccagagcggtttattctttgtgataatagtgaaatccagacccgcccgattaaaggcacgctaccacgcctgcccgatcctcaggaagatagcaaacaagcagtaaaactggcgaactcagcgaaagatcgtgccgaaaatctgatgattgtcgatttaatgcgtaatgatatcggtcgtgttgccgtagcaggttcggtaaaagtaccagagctgttcgtggtggaacccttccctgccgtgcatcatctggtcagcaccataacggcgcaactaccagaacagttacacgccagcgatctgctgcgcgcagcttttcctggtggctcaataaccggggctccgaaagtacgggctatggaaattatcgacgaactggaaccgcagcgacgcaatgcctggtgcggcagcattggctatttgagcttttgcggcaacatggataccagtattactatccgcacgctgactgccattaacggacaaattttctgctctgcgggcggtggaattgtcgccgatagccaggaagaagcggaatatcaggaaacttttgataaagttaatcgtatcctgaagcaactggagaagtaa

SEQ ID NO: 145181 - protein, 453 aa, Escherichia coli
MKTLSPAVITLLWRQDAAEFYFSRLSHLPWAMLLHSGYADHPYSRFDIVVAEPICTLTTFGKETVVSESEKRTTTTDDPLQVLQQVLDRADIRPTHNEDLPFQGGALGLFGYDLGRRFESLPEIAEQDIVLPDMAVGIYDWALIVDHQRHTVSLLSHNDVNARRAWLESQQFSPQEDFTLTSDWQSNMTREQYGEKFRQVQEYLHSGDCYQVNLAQRFHATYSGDEWQAFLQLNQANRAPFSAFLRLEQGAILSLSPERFILCDNSEIQTRPIKGTLPRLPDPQEDSKQAVKLANSAKDRAENLMIVDLMRNDIGRVAVAGSVKVPELFVVEPFPAVHHLVSTITAQLPEQLHASDLLRAAFPGGSITGAPKVRAMEIIDELEPQRRNAWCGSIGYLSFCGNMDTSITIRTLTAINGQIFCSAGGGIVADSQEEAEYQETFDKVNRILKQLEK

SEQ ID NO: 145182 - DNA, 2027 bp, Arabidopsis thaliana
  CDS (120)..(1880)
actaatcaaatttactcatttagccgtcacctctgaatcttcttctccgatcttcaaacattccggccgccaccgagttcttagccgttacaatgtcttcctctatgaacgtagcgacgatgcaagcactgactttctctcgccggcttctcccttctgttgcttctcgttatctctcttcttcttctgtgaccgttactggatactccggtagaagctcggcttacgcgccttctttccgttcgattaaatgcgtctctgtttctccggaagcttcaatagtaagtgatacaaagaagttggcagatgcttctaagagtacaaaccttataccaatttaccgctgtatattctctgatcagcttactcctgttcttgcttaccgttgtttggtcaaagaagatgaccgtgaagctcctagctttcttttcgagtccgttgagcctggttctcagatgtctagcgttggtcgttatagcgttgttggggctcagcctgcgatggagatcgtggcaaaggagaataaagttattgtaatggatcacaacaatgaaaccatgactgaggaattcgtcgaagatccaatggagatcccaagaaaaatctctgagaaatggaaccctgatcctcaactagttcaggaccttccagatgcgttttgtggtgggtgggttggttttttctcgtacgacactgttcgttatgttgagaagaggaaattgccattttcaaaggcccctgaggatgataggaacttgccagacatgcatcttggtctgtacgacgatgtagttgtatttgatcacgtggaaaagaaagcatatgtcattcactggattagactagatgggagccttccttacgaaaaggcatacagtaatggaatgcaacatttggagaacttggtggccaagttacatgatattgagccgccaaaactggctgcaggtaacgtgaatcttcagacacgacaatttgggccatctttggataattcaaacgtgacatgcgaagagtacaaggaggctgtggtcaaggccaaagaacatatacttgcaggagacatatttcagatcgtgctgagtcaacgttttgagcggcgaacatttgcagacccctttgaagtttatagagcactaagagttgtgaatccaagtccgtatatgggttatttgcaggctagaggatgcattttggtagcatcaagtccagaaattctcaccaaagtaaagcagaacaagatagtgaatcggccattggcaggaaccagcaagagagggaagaatgaagttgaggataagagattagaaaaggaactgctagagaatgaaaagcaatgtgctgagcacatcatgttggttgatctcggtcgcaacgatgttggaaaggttacgaaatacggatcagtgaaagtagagaagcttatgaacatcgaacgttattcccatgttatgcatataagctccacggtgacaggagaattacaagatggtttgacttgctgggacgtactacgtgcggctttaccagtgggaacagttagtggtgcaccaaaggtcaaagctatggaactaatcgatgagctagagccaacgaggcgtggaccatacagtggcggttttggtggagtctccttcactggtgacatggacattgctttatcccttaggacaatcgtttttccgacagcatgtcaatacaatacaatgtactcttacaaggatgctaacaaacggcgtgagtgggtggcttatcttcaagctggagctggtgtagtagctgatagtgacccgcaagacgaacactgtgagtgccagaacaaagccgctggtcttgctcgagccatcgacttggctgaatctgcatttgtgaaaaaatgattgtgcccaagaacagaggctggctttctttgaactccgagttcatgtgtataaaacagttacaagcagaacaaagttttttctttttcttgattttgtgagaattgcaattagactccattaatgaagctctgaaaaatgttacaa

SEQ ID NO: 145183 - protein, 586 aa, Arabidopsis thaliana
MQALTFSRRLLPSVASRYLSSSSVTVTGYSGRSSAYAPSFRSIKCVSVSPEASIVSDTKKLADASKSTNLIPIYRCIFSDQLTPVLAYRCLVKEDDREAPSFLFESVEPGSQMSSVGRYSVVGAQPAMEIVAKENKVIVMDHNNETMTEEFVEDPMEIPRKISEKWNPDPQLVQDLPDAFCGGWVGFFSYDTVRYVEKRKLPFSKAPEDDRNLPDMHLGLYDDVVVFDHVEKKAYVIHWIRLDGSLPYEKAYSNGMQHLENLVAKLHDIEPPKLAAGNVNLQTRQFGPSLDNSNVTCEEYKEAVVKAKEHILAGDIFQIVLSQRFERRTFADPFEVYRALRVVNPSPYMGYLQARGCILVASSPEILTKVKQNKIVNRPLAGTSKRGKNEVEDKRLEKELLENEKQCAEHIMLVDLGRNDVGKVTKYGSVKVEKLMNIERYSHVMHISSTVTGELQDGLTCWDVLRAALPVGTVSGAPKVKAMELIDELEPTRRGPYSGGFGGVSFTGDMDIALSLRTIVFPTACQYNTMYSYKDANKRREWVAYLQAGAGVVADSDPQDEHCECQNKAAGLARAIDLAESAFVKK

SEQ ID NO: 145184 - DNA, 1734 bp, Oryza sativa
  CDS (1)..(1734)
atggccagcctcgtgctctccctgcgcatcgcccgttccacgccgccgctggggctgggcggggggcgattccgcggccgacgaggggccgtcgcctgccgcgccgccacgttccagcagctcgacgccgtcgcggtgagggaggaggagtccaagttcaaggcgggggcggcggagggttgcaacatcctgccgctcaagcgatgcatcttctccgaccacctcacgccggtgctcgcgtaccgctgcctcgtcagggaggacgaccgcgaggcgcccagcttcctgtttgagtccgtcgagcagggatccgagggcaccaatgtggggaggtacagtgtggttggggcacagcctgcgatggagatcgtagccaaggccaaccatgtgactgtcatggatcataagatgaagtctaggagggagcaatttgcgcctgacccgatgaagataccaaggagcattatggaacagtggaacccacagattgttgaaggcctccctcatgcattttgtggaggatgggttggattcttctcttacgacacagtgcgttatgttgaaacaaagaagcttccattttctaacgcgccagaggatgataggaaccttcctgacatccatttaggcctctacaatgacatagttgtgtttgatcatgttgaaaagaaaacacatgttatacattgggtgagggtagattgccatgagtcagttgacgaagcgtatgaggacgggaagaatcagctggaagctttgttatcaagattacatagtgttaatgtgccaactcttactgctggttctgtaaaacttaacgttgggcaatttgggtcagcactacagaaatcatcaatgtcaagggaggactataagaaagctgttgttcaagcaaaagagcacattctagctggtgacatttttcaagtagtcttaagccagcgttttgagaggcgtacatttgctaacccctttgaggtgtaccgtgcattgcgtattgtcaatcctagtccttatatggcctatctacaggctcgtggttgtattctggtagcatcaagtcctgaaattcttacccgggtggaaaagaggacaattgtcaacaggccacttgctggaacaattagaagaggaaaatcgaaagcagaagacaaagttttagaacaactgctgttgagtgatggaaagcagtgtgctgagcatattatgttagtagatcttggacggaatgatgttggaaaggtgtccaaaccaggttcagtaaaggtggagaaactgatgaacgttgaacgatattcacatgtcatgcacattagctcaacagttactggagagttgcgtgatgatctgacttgttgggatgctcttcgagcagcattgcccgttggaacagttagtggtgcaccaaaggtgagagcgatggagctgattgaccagatggaagggaagatgcgtgggccgtacagtggtggctttggaggggtttctttccgtggagacatggacatcgcacttgctctccgtaccatcgtcttccccacgggatctcgcttcgacaccatgtactcctacactgacaagaatgctcgtcaggagtgggtggctcaccttcaggctggagctgggatcgtcgctgacagcaagcctgacgatgagcatcaggagtgcttgaacaaggctgctggccttgctcgtgccatcgatcttgccgagtctacattcgtagatgagtag

SEQ ID NO: 145185 - protein, 577 aa, Oryza sativa
MASLVLSLRIARSTPPLGLGGGRFRGRRGAVACRAATFQQLDAVAVREEESKFKAGAAEGCNILPLKRCIFSDHLTPVLAYRCLVREDDREAPSFLFESVEQGSEGTNVGRYSVVGAQPAMEIVAKANHVTVMDHKMKSRREQFAPDPMKIPRSIMEQWNPQIVEGLPHAFCGGWVGFFSYDTVRYVETKKLPFSNAPEDDRNLPDIHLGLYNDIVVFDHVEKKTHVIHWVRVDCHESVDEAYEDGKNQLEALLSRLHSVNVPTLTAGSVKLNVGQFGSALQKSSMSREDYKKAVVQAKEHILAGDIFQVVLSQRFERRTFANPFEVYRALRIVNPSPYMAYLQARGCILVASSPEILTRVEKRTIVNRPLAGTIRRGKSKAEDKVLEQLLLSDGKQCAEHIMLVDLGRNDVGKVSKPGSVKVEKLMNVERYSHVMHISSTVTGELRDDLTCWDALRAALPVGTVSGAPKVRAMELIDQMEGKMRGPYSGGFGGVSFRGDMDIALALRTIVFPTGSRFDTMYSYTDKNARQEWVAHLQAGAGIVADSKPDDEHQECLNKAAGLARAIDLAESTFVDE

SEQ ID NO: 145186 - DNA, 1371 bp, Photorhabdus luminescens
  CDS (1)..(1371): transl_table=11
atgagcatttcactacaaaaacggcaattaccctatcaaccagacgctgccatcaactattttgcgccgatttcaaatcagtcttgggcaatgctgctccattctggtgctgccaaccatcctcataatcggttcgatattctggttgcagaaccacggataacactgcttagtcataataaatcaactgaaataaatgaagatggcgatagctatattactgaggaagatcccttttacctgctaaaaagacaactagaaaaattaaatattacagcaaagcgtgatcctgatttgccatttcagggcggtgcgctaggtctatggggatatgatcttgggcgttaccttgaagagttaccattacaagccaaaaatgagttgtcatttccagatatggcaatcggtatttatgactgggcgctgattgttgatcatcacaaaaaagaggtgattttattcagctacagtgatgttgacacgcgcctgaactggcttacttctcaccaagtttcgccaaaaatggcttttacgttgaccagtgaatggcaatcaaatatgagtgccaaacaatatcatgagaaaattaactgcattcatcactatctgttaagtggtgattgttatcaagttaacctggcacaacgattttgcgctgattaccaaggagatgaatggcaagcattcataaaacttaatgagaacaaccgtgcacctttttccgcctttattcgtttaccggaaaacagcgttatcagcgtctctcctgaacgttttttactcctggagaataaacaaattcaaactcgcccgattaagggaacattaccgcgcttaagtgatacagaaaaggacgtactgcaagctgtaaaactggccgcctcgaaaaaagaccaggctgaaaatttgatgatcgtcgatttattgcgtaatgatattggccgggtagccacaccggggtcagttaaagttcctgaattgtttttagttgaacaattccctgccgttcatcatctggttagcacaatcaccgcaacactgccaaatgaacaacatgctacggatttattacgcgcctgctttcccggtggttctattaccggagcgcctaaaatcagagcaatggaaataatagaagagcttgaacctcaccgccgacatggatattgtggttcaattggctatattagtttctgtggcacaatggacagcaatatcaccatacgtaccctcttaactgagaaagaaaaaatatattgctgggccggtggcggaatcgttgccgacagcactgctgaaaaagagtatcaggaaacatttgataagttgaatcgtatcttaccgcaactagggaaaataaaagtaatatga

SEQ ID NO: 145187 - protein, 456 aa, Photorhabdus luminescens
MSISLQKRQLPYQPDAAINYFAPISNQSWAMLLHSGAANHPHNRFDILVAEPRITLLSHNKSTEINEDGDSYITEEDPFYLLKRQLEKLNITAKRDPDLPFQGGALGLWGYDLGRYLEELPLQAKNELSFPDMAIGIYDWALIVDHHKKEVILFSYSDVDTRLNWLTSHQVSPKMAFTLTSEWQSNMSAKQYHEKINCIHHYLLSGDCYQVNLAQRFCADYQGDEWQAFIKLNENNRAPFSAFIRLPENSVISVSPERFLLLENKQIQTRPIKGTLPRLSDTEKDVLQAVKLAASKKDQAENLMIVDLLRNDIGRVATPGSVKVPELFLVEQFPAVHHLVSTITATLPNEQHATDLLRACFPGGSITGAPKIRAMEIIEELEPHRRHGYCGSIGYISFCGTMDSNITIRTLLTEKEKIYCWAGGGIVADSTAEKEYQETFDKLNRILPQLGKIKVI

SEQ ID NO: 145188 - DNA, 1377 bp, Yersinia pestis; identical to SEQ ID NO: 76306
  CDS (1)..(1377): transl_table=11

SEQ ID NO: 145189 - protein, 458 aa, Yersinia pestis; identical to SEQ ID NO: 76307

SEQ ID NO: 145190 - DNA, 2142 bp, Glycine max
  CDS (1)..(2142)
atgctagtttttgtcatctcttcaaaaggcatttgtcttcagctgttgcttaagtgctgggatattcctattctgggtgtttgcctaggacaccaggcattaggttatgtgcatggagctcaagttgtccatgcatctgaaccaatccatggtcgtttgagtgaagttgagcacaacggctgccagctttttcgtgatataccttctggtaaaaattatggattcaaggtggttcgatatcattcactggttatagattctgaatcacttcctgcagagctcattccaatagcatggacctcttccactagcacacttccatttattgggtccaaagattttggcaagtccaatactcatgaagctcagccagatcaaagcatttccattgatcctcttttagctaaagtaggaaatggaagttcaaaccattttgattatggaaaaactagaagtgcaagagttcttatgggaatcaggcattctacaagaccacactatggtgtgcagtttcatcctgaaagtgttgcaacctgctatgggagtcaaatattcaagaattttagggagattacagatgattattggctgagatttaggtcatcattcaaggaaacacatgcatattctgatgcatgcatgcaggtttcaagtgctaatagactctacagagaggtttgcagaagtattagcacagagaataatgcagtggatcagttaaaagaaatagttcatgcagatagacatttggaatataataaagctgagatgaagcatttagaaatgttcaacatggtaaatactcatcatgcaaccactggttataagtgtttgaagttgaaatggaggaaatttggtcacttggctggtcaagttggtggagcaaaaggtatattttgtgggttgtttggacttgaagctgaaaacaccttttggttggatagttcctccacagagaaggagcttcaatcatatcgttatgataaaaatgaatatgaaggcttgccatttgattttcacggtggatatattggttacattgggtataacctcaaagttgagtgtggtgtgaaatcgaaccgtcacaaatctaaaactcctgatgcatgctttttctttgctgataatcttgtagctattgaccacaaaaatgatgatgtttatatattggctatacatgaagaaagttcaagtattacacagtggttgaatgacacagaggagaaacttctgagcttaaatggctctgtgagaatggctttggaaagacaaaagtctcttcctttaactttttcctcatgtaaggttggttttgcagctgaaaaatctaaagagcagtacattgaggatgttaagaagtgtctaaactacattaaagatggagaaagctatgagttatgcctcacaactcagataaggaaatcgattgaggaattgaattcccttgaactttatctgcatttgagagaaaggaatccggcaccttatgctgcttggcttaatttttcaaaggtggatctgagtatttgctgttcttctcctgagaggttcctgcagttggataggaagaatatactagaagctaagcccatcaagggaacgatagctcgtggtgctactgaagaggaagatgagcaactaaaatttaaattacagttcagcgaaaaggatcaggctgaaaacctgatgattgttgaccttctaaggaatgaccttggccgtgtttgtgatcctggatctgttcatgtgccacgtctcatggatgtggaatcatatgcaactgttcacacaatggtgagtactattcgtgggaagaagcggtcagatgtcagtgctgtagactgtgtcaaagctgcatttcctggtggttcaatgacaggtgcacctaagttgagatcaatggaacttcttgattctattgaaagttgttctcgaggtatctactcaggctgtattggatttttctcatataatcaagcatttgatctaaatattgtgataagaacagtcattgtacacgagggtgaagcttcaataggagctggaggggcaattgttgctctgtcaaaccctgaagacgagtatgaagagatggttttgaagacaaaagccccaacaagggctgtgatgcattttgcttag

SEQ ID NO: 145191 - protein, 713 aa, Glycine max
MLVFVISSKGICLQLLLKCWDIPILGVCLGHQALGYVHGAQVVHASEPIHGRLSEVEHNGCQLFRDIPSGKNYGFKVVRYHSLVIDSESLPAELIPIAWTSSTSTLPFIGSKDFGKSNTHEAQPDQSISIDPLLAKVGNGSSNHFDYGKTRSARVLMGIRHSTRPHYGVQFHPESVATCYGSQIFKNFREITDDYWLRFRSSFKETHAYSDACMQVSSANRLYREVCRSISTENNAVDQLKEIVHADRHLEYNKAEMKHLEMFNMVNTHHATTGYKCLKLKWRKFGHLAGQVGGAKGIFCGLFGLEAENTFWLDSSSTEKELQSYRYDKNEYEGLPFDFHGGYIGYIGYNLKVECGVKSNRHKSKTPDACFFFADNLVAIDHKNDDVYILAIHEESSSITQWLNDTEEKLLSLNGSVRMALERQKSLPLTFSSCKVGFAAEKSKEQYIEDVKKCLNYIKDGESYELCLTTQIRKSIEELNSLELYLHLRERNPAPYAAWLNFSKVDLSICCSSPERFLQLDRKNILEAKPIKGTIARGATEEEDEQLKFKLQFSEKDQAENLMIVDLLRNDLGRVCDPGSVHVPRLMDVESYATVHTMVSTIRGKKRSDVSAVDCVKAAFPGGSMTGAPKLRSMELLDSIESCSRGIYSGCIGFFSYNQAFDLNIVIRTVIVHEGEASIGAGGAIVALSNPEDEYEEMVLKTKAPTRAVMHFA

SEQ ID NO: 145192 - DNA, 1362 bp, Pseudomonas aeruginosa PAO1
  CDS (1)..(1362): transl_table=11
atgcccagttgtcatgttcaccccctgccctaccatagcgacccaagctgtctctttgccatcatccatgaggcgcccggtgcggtgatgctcgattcgggtcgccccatcgctacccgtggacgctatgaccttatgagcgcctggccattggcagaactggcgccgctgcccgacgaatcggccaaccgcttcttcgcccgcctacgcgaagcggccggaagcctgggccccgcgcagctgccagcgccgtacgaactgcccttcgccggcggtctgctgggctatttatcctacgacctgggtcggcgcatcgagcgcatcggcgaacacgcccgcgatgacctgggcctgccgctggcctccgtcggcctgtatgcctgggcgctgatcagcgaccaccaggccggcaccagccaactggtattccacccgcgattggacgagcgcgaacgccagcgcctgatcgccctgttcagcgaggaagcgcaaggcacggccggcaacttcaagcttctgggaaaattccgacggagcatcagcgcatccgactatcggcaggcgatccgccgcatccaggactacatccaggcaggcgactgctaccaggtgaactatagccagcgcttccaggccgcttgcagcggctcgccgtggccggcctatcgcgccctgcgcgaggcctgcccgacgccgttctccggctacctgcgactggccgacggcgcgatcctcagcctgtcgccggagcgcttcctcaagctcggcaagggcaaggtggaaacccggccgatcaagggcacccgcccgcgcggcaagacccccgaggaggacatggcgctggcggcgtcgctgctggccagccccaaggaccgcgcggaaaacctgatgatcgtcgacctgctgcgcaacgacatcggacgcagttgccaacctggcagcgtacgggtaccggagctgtttgccctggaaagctatcccaacgtgcatcacctggtgagcagcgtcaccggcgaactggcgccgggcaaggacgccctcgacctgctggaaggcagcttccccggcggctcgatcaccggcgcgccgaagattcgcgccatgcagatcatcgacgagctggaaccgagccgacgcggcatctactgcggcagcctgttctacctcgacgtgcgcggcgagatggacagctcgatcgccatccgcaccctgctggtcagggacggccaggtcagttgctggggcggcggcggcatcgtcgccgactcgcactgggaggacgagtaccaggaaaccctggacaaggtccgggtgctgctggaaaccctggaaggaatggccgggacagcgtccccggaatag

SEQ ID NO: 145193 - protein, 453 aa, Pseudomonas aeruginosa PAO1
MPSCHVHPLPYHSDPSCLFAIIHEAPGAVMLDSGRPIATRGRYDLMSAWPLAELAPLPDESANRFFARLREAAGSLGPAQLPAPYELPFAGGLLGYLSYDLGRRIERIGEHARDDLGLPLASVGLYAWALISDHQAGTSQLVFHPRLDERERQRLIALFSEEAQGTAGNFKLLGKFRRSISASDYRQAIRRIQDYIQAGDCYQVNYSQRFQAACSGSPWPAYRALREACPTPFSGYLRLADGAILSLSPERFLKLGKGKVETRPIKGTRPRGKTPEEDMALAASLLASPKDRAENLMIVDLLRNDIGRSCQPGSVRVPELFALESYPNVHHLVSSVTGELAPGKDALDLLEGSFPGGSITGAPKIRAMQIIDELEPSRRGIYCGSLFYLDVRGEMDSSIAIRTLLVRDGQVSCWGGGGIVADSHWEDEYQETLDKVRVLLETLEGMAGTASPE

SEQ ID NO: 145194 - DNA, 1362 bp, Escherichia coli O157:H7 EDL933
  CDS (1)..(1362): transl_table=11
  misc_feature (829)..(829): n is a, g, c or t
  misc_feature (845)..(845): y is t or c
  misc_feature (848)..(848): y is t or c
  misc_feature (1247)..(1247): m is a or c
atgaagacgttatctcccgctgtgattactttaccctggcgtcaggacgccgctgaattttatttctcccgcttaagccacctgccgtgggcgatgcttttacactccggctatgccgatcatccgtatagccgctttgatattgtggtcgccgatccgatttgcactttaaccactttaggtaaagaaaccgttgttagtgaaagcgaaaaacgcacaacgaccactgatgacccgctacaggtgctccagcaggtgctggatcgcgcagacattcgcccaacgcataacgaagatttgccatttcagggcggcgcactggggttgtttggctacgatctgggccgccgttttgagtcactgccagaaattgcggaacaagatatcgttctgccggatatggcagtgggtatctacgattgggcgctcattgtcgaccaccagcgtcatacagtttctttgctgagtcataatgatgtcaatgcccgtcgggcctggctggaaagccagcaattctcaccgcaggaagatttcacgctcacttccgactggcaatccaatatgacccgcgagcagtacggcgaaaaatttcgccgggtacaggaatatctgcacagcggtgattgctatcaggtgaatctcgcccagcgttttcatgcgacctattctggcgatgaatggcaggcattccttcagcttaatcaggccaaccgcgcgccatttagcgcttttttacgtcttgaacagggtgcaattttaagcctttcgccagagcggtttattctttgtgataatagtgaaatccagacccgcccgattaaaggcacgntaccacgcctgcccgytcytcaggaagatagcaaacaagcagaaaaactggcgaactcagcgaaagatcgtgccgaaaatctgatgattgtcgatttaatgcgtaatgatatcggtcgtgttgccgtagcaggttcggtaaaagtaccagagctgttcgtggtggaacccttccctgccgtgcatcatctggtcagcaccataacggcgcaactaccagaacagttacacgccagcgatctgctgcgcgcagcttttcctggtggctcaataaccggggctccgaaagtacgggctatggaaattatcgacgaactggaaccgcagcgacgtaatgcctggtgcggcagcattggctatttgagcttttgcggcaacatggataccagcattactatccgcacgctgactgccattamcggacaaatatactgctctgcgggaggtggaattgtcgccgatagccaggaagaagcggaatatcaggaaacttttgataaagttaataagatattacgccaactggagaagtaa

SEQ ID NO: 145195 - protein, 453 aa, Escherichia coli O157:H7 EDL933
  misc_feature (277)..(277): The Xaa at location 277 stands for Ile, Leu, or Val.
  misc_feature (282)..(282): The Xaa at location 282 stands for Ala, or Val.
  misc_feature (283)..(283): The Xaa at location 283 stands for Leu, or Pro.
  misc_feature (416)..(416): The Xaa at location 416 stands for Asn, or Thr.
MKTLSPAVITLPWRQDAAEFYFSRLSHLPWAMLLHSGYADHPYSRFDIVVADPICTLTTLGKETVVSESEKRTTTTDDPLQVLQQVLDRADIRPTHNEDLPFQGGALGLFGYDLGRRFESLPEIAEQDIVLPDMAVGIYDWALIVDHQRHTVSLLSHNDVNARRAWLESQQFSPQEDFTLTSDWQSNMTREQYGEKFRRVQEYLHSGDCYQVNLAQRFHATYSGDEWQAFLQLNQANRAPFSAFLRLEQGAILSLSPERFILCDNSEIQTRPIKGTXPRLPXXQEDSKQAEKLANSAKDRAENLMIVDLMRNDIGRVAVAGSVKVPELFVVEPFPAVHHLVSTITAQLPEQLHASDLLRAAFPGGSITGAPKVRAMEIIDELEPQRRNAWCGSIGYLSFCGNMDTSITIRTLTAIXGQIYCSAGGGIVADSQEEAEYQETFDKVNKILRQLEK

SEQ ID NO: 145196 - DNA, 2145 bp, Nostoc sp. PCC 7120
  CDS (1)..(2145): transl_table=11
atggccgatatcaaaacattaattattgacaactacgactcttatacttttaatctctaccagatgattgctgaagtcaacggagagttgccccttgttattcataatgacaaattagattggtatgaattaaaacaacttgtttttgataatatagtcatttctcctgggcctggtcgtcctgaaaaccctaaagatttcggtatttgtcaacagatactacaaaactatttagatgttcccttgcttggtgtttgtcttggtcaccaaggaattggtcattattatggtggtaaggtcatccacgcaccagaacctaaacatggtcgattgagtcatgtttatcataatggtggtgatttattccaagaaattcctacaccttttcaagttgtccgctatcattctttgctggttgcggaagaattgcccagttgtttagaaaaagtagcctggactgaagacgggttggtaatggggttgcgtcatcgtcatttgccattgtggggggtgcagtttcacccagaatctatctgtagtgagtatggatataaattgctggaaaacttccaagccattacggaaggattcatccgccaaaatggtagacatcgccccaaattagaaagcaaaagtttctctatttctcctaactcacctattccagcgccatcccaagaatttactgtttgtagccaaaaactagattattaccttgatacagaacagacatttgttcatctttttggtgaagatcctcatgctttttggcttgatagtagccttgtagaaccaggattatcccgtttctcttttatgggaggaagcggggggataaacagtttactcgtttcttactgcacccaatctcaagaattgacgattacacaatcgggtaaggtgacacgcactcaagagagtatttttgactatctcaaacgcgaaattaatcgtcgccgttgcccatctgatgagctaccttttgattttaactgtggttttgtgggctactttggttatgaactgaaggcaaaatccgggtctgggttagagcatccctcattatttcccgatgctatcttgattttaagcgatcgcctgattgcttttgaccaccaagagcaaaccacttacttagtttacctcgcccctgtgggtgaaacagcaccagcccaagcctggtttgaactaactgaaaaacgtctgcggacactcccgcctcttcctcccctcgttcctagtactacatctcaccccgttactttccgtttaagtcggtcataccagacatataaagatgatatttctagatgtctcaaagaaattcgtgagggggaaacttaccaagtttgcctgactaatcgattatgcacagacacaattgctgatccattggaattttatcgccgattacgccaagttaatccggctccctactctgcttttctacggtttggtgagatggcgatcgcctgttcttccccggagcgatttctgcaaattgaccgtcaaggctgggtagaaaccaagccgatcaagggaactgtacgccggggagagactcccgaagaagattttttactccgggaaagtttgcgtagcagcgaaaaagagcgatccgaaaacttaatgattgttgatttattacgcaacgatttagggcgagtttgccaagtcgggagtatccatgttcccaaattaatggatgtagaaagttatgcaacggtgcatcaacttgtcagcactatccgtggtttattatcccccgacatggacgcaaccgactgcattcgtctggcatttccgggcggctcgatgacaggtgcgcctaaactgagaacgatggagattattgatcaacttgagcaagaggcgcggggagtttattcaggggcgatcggttttttgggtgtaaacggtacagccgacttgaatattgtcatccgtaccgccgtactgacaccaaatcaaacttctattggtatagggggtgggattgtcgcactctctgatgtggaaatggaatttcaagaaactatcctcaaagctaatgcgctaattcaggcgatgctcttgactgttcacggagaatatcatcctagtctttaccgtattttaggaatgcccacagaggttttctgttga

SEQ ID NO: 145197 - protein, 714 aa, Nostoc sp. PCC 7120
MADIKTLIIDNYDSYTFNLYQMIAEVNGELPLVIHNDKLDWYELKQLVFDNIVISPGPGRPENPKDFGICQQILQNYLDVPLLGVCLGHQGIGHYYGGKVIHAPEPKHGRLSHVYHNGGDLFQEIPTPFQVVRYHSLLVAEELPSCLEKVAWTEDGLVMGLRHRHLPLWGVQFHPESICSEYGYKLLENFQAITEGFIRQNGRHRPKLESKSFSISPNSPIPAPSQEFTVCSQKLDYYLDTEQTFVHLFGEDPHAFWLDSSLVEPGLSRFSFMGGSGGINSLLVSYCTQSQELTITQSGKVTRTQESIFDYLKREINRRRCPSDELPFDFNCGFVGYFGYELKAKSGSGLEHPSLFPDAILILSDRLIAFDHQEQTTYLVYLAPVGETAPAQAWFELTEKRLRTLPPLPPLVPSTTSHPVTFRLSRSYQTYKDDISRCLKEIREGETYQVCLTNRLCTDTIADPLEFYRRLRQVNPAPYSAFLRFGEMAIACSSPERFLQIDRQGWVETKPIKGTVRRGETPEEDFLLRESLRSSEKERSENLMIVDLLRNDLGRVCQVGSIHVPKLMDVESYATVHQLVSTIRGLLSPDMDATDCIRLAFPGGSMTGAPKLRTMEIIDQLEQEARGVYSGAIGFLGVNGTADLNIVIRTAVLTPNQTSIGIGGGIVALSDVEMEFQETILKANALIQAMLLTVHGEYHPSLYRILGMPTEVFC

SEQ ID NO: 145198 - DNA, 1347 bp, Clostridium perfringens str. 13
  CDS (1)..(1347): transl_table=11
ttgaattttgaaattaaggaaatagaaaataagcttaagccacatgaagtatattttttatttaaagatgaaataaacagtatatttttagatagttcaaaggaagatagcgaattttctttatattcattcataggattaaatccttttaaaaagtttatctctaagggaaatgagatttttatagatgaaaaactagtcttaggagatccttttaaaaaattagaagagcttattttagaatataaaataaattataatagtgagataccttttttaggaggtgctatgggatatttttcttatgatataggaagagttattgaagatatgcctaaaagtgctaaggatgatgtgtgtattccagatagttattttttattttatgataatgtaataatatttgatttgagaaatcaaaaaacatatataacagccctaggaattaaggaagagtcagaaaaaagtatagctaatatttatgagaggataaaagataaggatataaatttaaatatcagcttagataaaaatactgagtttagttcaaatttttcaagagaagaatacataaattcagtaaaaaaggttaaagagtacataaaagaagggcatacatatattgcaaacctaacacagagattttcctgtgattttaattctgatccttttgatacatatataagtttgagaagtataaataaagcccctttttcctgttatttaaatttagatggttttcaaattataagttcttctccagagaggtttttaaaagtgtttaataataaggttgaaacaagaccaattaaaggcacaagaccaagaggaaaagataaattagaagatgaaaagaataaaaaagaacttttaaatagtgaaaaggataagtcagagcttttaatgattgttgatttagagagaaatgatttaagtaaggtatgcaaacctttttctgtgaaggttacagaattatttaaattagaggaatatgctacagtatttcacttagtttccacagttataggagaactaaaggaagatgttagttctgtaaaatgtataagagaatgttttccaggaggttctataacaggcgctcctaaaataagaagtatggagataatagaggaactagaaggcattagaagagggatatatactgggtccataggttattttgatttaagaggaaattgtgattttaatatagtaataagaactatattagcaaaagataataaggcttattttggagtaggtggaggcataactattgaatcagaagaagagatggaatatgaggaaactttagataaggcaaaggctttaatgagagtattataa

SEQ ID NO: 145199 - protein, 448 aa, Clostridium perfringens str. 13
MNFEIKEIENKLKPHEVYFLFKDEINSIFLDSSKEDSEFSLYSFIGLNPFKKFISKGNEIFIDEKLVLGDPFKKLEELILEYKINYNSEIPFLGGAMGYFSYDIGRVIEDMPKSAKDDVCIPDSYFLFYDNVIIFDLRNQKTYITALGIKEESEKSIANIYERIKDKDINLNISLDKNTEFSSNFSREEYINSVKKVKEYIKEGHTYIANLTQRFSCDFNSDPFDTYISLRSINKAPFSCYLNLDGFQIISSSPERFLKVFNNKVETRPIKGTRPRGKDKLEDEKNKKELLNSEKDKSELLMIVDLERNDLSKVCKPFSVKVTELFKLEEYATVFHLVSTVIGELKEDVSSVKCIRECFPGGSITGAPKIRSMEIIEELEGIRRGIYTGSIGYFDLRGNCDFNIVIRTILAKDNKAYFGVGGGITIESEEEMEYEETLDKAKALMRVL

SEQ ID NO: 145200 - DNA, 1509 bp, Streptomyces coelicolor A3(2); identical to SEQ ID NO: 76292
  CDS (1)..(1509): transl_table=11

SEQ ID NO: 145201 - protein, 502 aa, Streptomyces coelicolor A3(2); identical to SEQ ID NO: 76293

SEQ ID NO: 145202 - DNA, 1404 bp, Shewanella oneidensis MR-1
  CDS (1)..(1404): transl_table=11
atggtaaatagggcgtcaaaacagcttgcatcacgccaacttgactggacattaagcacggcagacctctttgaacactttgcggcagaaccttgggcaatactgctcgactcggccaatgccccccatctggatgctaagttcgatatcatttgcgtaaatcccattgccacccttatcacccatggtgaactgaccgaaattaaggttcagttgcccgaattaaccattcccacccaaatgagtgcaaccgatgatccctttacgctggtcaaccagttattgcgccactggtatccgcaatcctttgcttgtgaactcccctttagtggcggcgccatgggcagctttagctacgatttaggccgtcgtgttgaagctatccccaatattgcggcgcaagatattcaacttggggagatgaatattggtttttacgactgggccctaatttttgactatcagcaacaatgctggcatttagtgcattatttgggtgaaaccgcgctagaaactcaattgaaaataattgaagcaaaaatggctaaaactgtaaaaatagccgaattcaccctcgttaccccttgggctgcacaactcaaaaaggctgattacgttaaaaaattcaatcaagttcaagcctacctgcatagcggcgattgctatcaaattaatttaacgcaacgatttgaagcacaatatcaaggcgatgaatggagcgcctattgcaaactgcgcagtgccaatcaggcgcccttctctgcctttatgcggcttaatgacaatacgattttatcgatttcgcctgagcgttttattcagctgcgcggggatgatattcaaaccaaaccgattaaaggcactctgccgcgccataacgaccctgcgctagataagcaagcggcgcaaatactcgccaactccccaaaggatcgcgccgaaaacgtgatgattgtggatttgctacgtaatgatatcggcaaagtcgcggcgcccggctcagtgcaagtgccgcatctatttgccgtcgaaagctttccggctgtgcatcatttagtgagtaccgtcaccgctaaactcgatccacaataccaagcctgtgatttgctgcgggcagcctttcccggtggttcaattaccggcgcccccaaaattcgcgctatggaaattattgaagaattggaaccctcacgccgcagcctgtattgtggttcaataggctatatcagccaagatgggcaaatggatactagcattaccatccgcaccattgttgccgagcgcggcaagctctattgttgggcaggcgggggcatcgtcgccgactccgatgtcgatgcggaatatcaagaaagcttcgacaaggtgagccgaattttacccctgttagaaaatcagcgataa

SEQ ID NO: 145203 - protein, 467 aa, Shewanella oneidensis MR-1
MVNRASKQLASRQLDWTLSTADLFEHFAAEPWAILLDSANAPHLDAKFDIICVNPIATLITHGELTEIKVQLPELTIPTQMSATDDPFTLVNQLLRHWYPQSFACELPFSGGAMGSFSYDLGRRVEAIPNIAAQDIQLGEMNIGFYDWALIFDYQQQCWHLVHYLGETALETQLKIIEAKMAKTVKIAEFTLVTPWAAQLKKADYVKKFNQVQAYLHSGDCYQINLTQRFEAQYQGDEWSAYCKLRSANQAPFSAFMRLNDNTILSISPERFIQLRGDDIQTKPIKGTLPRHNDPALDKQAAQILANSPKDRAENVMIVDLLRNDIGKVAAPGSVQVPHLFAVESFPAVHHLVSTVTAKLDPQYQACDLLRAAFPGGSITGAPKIRAMEIIEELEPSRRSLYCGSIGYISQDGQMDTSITIRTIVAERGKLYCWAGGGIVADSDVDAEYQESFDKVSRILPLLENQR

SEQ ID NO: 145204 - DNA, 1341 bp, Pseudomonas putida KT2440
  CDS (1)..(1341): transl_table=11
atgccgacctgcacgctacaccccctgccctaccagcccgaccctgccgcctatttcgcccacctgcgccaggcccccggtgcgatcctgctcgacagcgctcgccccggcgccgaacgcgggcgtttcgacctgctcagcgcctggccgctgcaacaactgcaggcgcagcccgatgaagatggccgcgtcttcctccagcgcctgcgcgctggcctggcacaactgggccacgccgacttgcccaacggtgtagagctgcccttcgccgggggcctgatcggctacctgagctacgacttcggccgccgcctggaacacctgccaagcctggccgtggacgacctgggcctgccagacgcacaactgggcctgtatgcctgggcactggtcagcgatcacttgctcggcaccagccagctggtgttccaccctagcctggccggcgacgagcgcgaacgcctgatcagcctgttccaggacaccagcgccaccaccggcgacttccggctgctcgcgccgatggccggtgacctggagccggagcaatacaaaaccgctttcgaccaggtacaacgctacatccaggccggtgactgctaccagatcaacctcacccaacgctttcgcgcaccctgccaaggcgatccatggcgggcctaccaggccctgcgccaggcctgcccgacccccttctccggctaccagcaactggccgacggcagtaccctgctgagcttttcgcccgagcgcttcatccgcgtcagccagggccaggtggaaacccggccgatcaagggcacccgcccacgcgccagtgacccggcgcaagaccagcgtaatgcccaggagctgctgcacagcccgaaggaccgctcggaaaacctgatgatcgtcgacctgctgcgcaacgacctggggcgcacgtgcgagattggctcagtgaaggtaccggaactgttcagcctggagagttaccccaacgtgcaccatctggtcagcagcatcaccggccagctggccagcgacaaggatgcgctggacctgatcggcgacagcttccctggcggctcgatcaccggcgcaccgaagatccgcgccatgcagatcatcgacgaactggagcccgcgcgccgcgcgctgtactgcggctcgctgctgtatgtggatgtgcgcggcgaaatggacagttcgatcgccattcgcagcttgctgatcaaagatggccaggtcagttgctggggcggcggcgcggtggtagccgactcgcagtggcaggccgagtatgaagagtcgatcgccaaagtgcgggtgctgatgcagaccctgcagggcttgtga

SEQ ID NO: 145205 - protein, 446 aa, Pseudomonas putida KT2440
MPTCTLHPLPYQPDPAAYFAHLRQAPGAILLDSARPGAERGRFDLLSAWPLQQLQAQPDEDGRVFLQRLRAGLAQLGHADLPNGVELPFAGGLIGYLSYDFGRRLEHLPSLAVDDLGLPDAQLGLYAWALVSDHLLGTSQLVFHPSLAGDERERLISLFQDTSATTGDFRLLAPMAGDLEPEQYKTAFDQVQRYIQAGDCYQINLTQRFRAPCQGDPWRAYQALRQACPTPFSGYQQLADGSTLLSFSPERFIRVSQGQVETRPIKGTRPRASDPAQDQRNAQELLHSPKDRSENLMIVDLLRNDLGRTCEIGSVKVPELFSLESYPNVHHLVSSITGQLASDKDALDLIGDSFPGGSITGAPKIRAMQIIDELEPARRALYCGSLLYVDVRGEMDSSIAIRSLLIKDGQVSCWGGGAVVADSQWQAEYEESIAKVRVLMQTLQGL

SEQ ID NO: 145206 - DNA, 1401 bp, Vibrio vulnificus CMCP6
  CDS (1)..(1401): transl_table=11
atgcagcaatcgaactctttgtcacaaattaaacaaatgaataacagcataaatacggccatttcttcaaaaacactgccttatcaaacggacctttcccaacagtggtttgacaccatccaacatcaaccttgggcaatgctgttgcgttcggcatcaccaacacatgttgacagccgttttgacattctcgtcgcaaagcccgttgcgacattagaaacacgtggtgcggtgactgagatcaacaccaatgacgaagtcattgaaagtaaagatgatcctttcacgcttcttgcgcgttatcaacagcgttttacccctgctctatccagtgatgaagagattccttttattggtggcgctctgggttactttagctacgatttaggtcgttgcgttgaaaaactgcctgagattgcaacacaagatatcgctgcgcccgacatggcagtgggcatctacacatgggcgttgattgtcgatcatcagacgcagaccgcgcaactggttggccaagacgtagaacaagcttatcaatggctaagcacgcaaacaaaagcggatgatgcgacgtttgccctgaccagtgattggcaatccaacatgaatcgtcgtgattaccaaagtaagttcgattgcgtacaggagtacttgctcagtggtgactgctaccaaattaacttagcgcagcgctttcatgccaattaccaaggcagcgaatggcaagcttaccagaagctagagcagagcaaccaagcaccattttctgctttcattcgtttgaaggacgcggcgattttaagtgtgtcgccggagcgttttctcgagctcaaaaaacgtgtcattgaaaccaagccgatcaaaggaactcgtcctcgtcataatgatgaacaacaggacaaacaggcggcacttgagcttgccaatgccgaaaaagatcaagcggaaaatctgatgatcgtcgatctgctgcgcaacgatattggccgtgtcgccaaaccgggcagcgtgcatgttcctaaactgtttgacatcgaaagctttcccgccgtgcatcacttagtcagcacgattcgagctgagttggcagcgcagtatactgccgctgacttactgcgagcgtgtttcccgggaggctcgattaccggcgcgccgaaagtgcgcgcaatggaaatcattgaagagcttgagcctcatcgacgctcagcctattgcggtagtatcggttacatcagtcgccatggtcgcatggataccagcattacaattcgtaccttagtggcggagcaaggtaagttgttcgcttgggctgggggcggtgtagtggctgacagtcaatgcgatgcggaatatcaagagacgttagataaactgtcgaaaattctaccaacattgcaataa

SEQ ID NO: 145207 - protein, 466 aa, Vibrio vulnificus CMCP6
MQQSNSLSQIKQMNNSINTAISSKTLPYQTDLSQQWFDTIQHQPWAMLLRSASPTHVDSRFDILVAKPVATLETRGAVTEINTNDEVIESKDDPFTLLARYQQRFTPALSSDEEIPFIGGALGYFSYDLGRCVEKLPEIATQDIAAPDMAVGIYTWALIVDHQTQTAQLVGQDVEQAYQWLSTQTKADDATFALTSDWQSNMNRRDYQSKFDCVQEYLLSGDCYQINLAQRFHANYQGSEWQAYQKLEQSNQAPFSAFIRLKDAAILSVSPERFLELKKRVIETKPIKGTRPRHNDEQQDKQAALELANAEKDQAENLMIVDLLRNDIGRVAKPGSVHVPKLFDIESFPAVHHLVSTIRAELAAQYTAADLLRACFPGGSITGAPKVRAMEIIEELEPHRRSAYCGSIGYISRHGRMDTSITIRTLVAEQGKLFAWAGGGVVADSQCDAEYQETLDKLSKILPTLQ

SEQ ID NO: 145208 - DNA, 1344 bp, Pseudomonas syringae pv. tomato str. DC3000
  CDS (1)..(1344): transl_table=11
atgcccacctgttcgatacatcccctgccctatagcgccgacccggccgtgtttttctcgcggatctgtcaggcgccgggggccgtgctgctcgacagcggcagaccggttgccgagcgcggccgctacgacctgctcagcgcctggccacggcaggaactgacgattgcggatggcgagagcggcacggcttacctgcaacgattgcgcgacagcctggcgtcgctgggaacggcgaccttgccggcgggctgcgagctgccctttgccggcgggctgatcggctacctgagttacacgttcgggcgacgcctcgaaccgctgcccgatcaggccatcgacgacctgcaattgcccgaagcgcggctggggctctacgcctgggcgctgatcagtgatcatcaggcgcagaccagccaactgatgtttcatccagacttggccgacaccgagcgcgagcggctggttgacctgttcactggcagcatcagcgaggcgccatcgcacttcaggctcagccaaccgtttcaggccagtatcagcgccgacgactaccaggacgccttcgagcgaattcaggcttatattcaggcaggcgactgttatcaggtcaatttcgcacaacgctttcaggcgcagtgcactggcgatccgtgggcagcttattgcgcgcttcgagcagcctgcccgacgccgttttccggctacctgggcctgtcgggcgccgatgcggttttgagcctttcgccggagcgtttcgtcaagatcagcgcgaggcaggtggaaacccgcccgatcaaaggcacgcgcccgcgcagccaggacgctgtgcaagacgccgctttcgcccaagagctgctgaacagcgagaaggatcgcgccgaaaacctgatgattgtcgacctgctgcgcaacgacctggggcgcagctgcacaacaggctcggtgaaagtgcccgagttgttcagcctggaaagctaccccaacgtgcaccatctggtgagcagcgtgaccggcgagctggcggccggcaacgatgctctggacctgatcgccggcagcttccccggcggctccatcacgggtgcgccgaagatccgcgccatgcagatcatcgacgaactggaaccgactcgccgcagcctgtactgcgggtcgctgctgtatgtggatgtacgcggcgagatggacagctccatcgccatccgcagcctgctggtcaaggacgggcgcatttcctgttggggcggcggcggcattgtggcggactctcactgcgaggccgaatatcaggaaaccttcaccaaggtccgcgtgctgctagaaacgcttgaggcactttga

SEQ ID NO: 145209 - protein, 447 aa, Pseudomonas syringae pv. tomato str. DC3000
MPTCSIHPLPYSADPAVFFSRICQAPGAVLLDSGRPVAERGRYDLLSAWPRQELTIADGESGTAYLQRLRDSLASLGTATLPAGCELPFAGGLIGYLSYTFGRRLEPLPDQAIDDLQLPEARLGLYAWALISDHQAQTSQLMFHPDLADTERERLVDLFTGSISEAPSHFRLSQPFQASISADDYQDAFERIQAYIQAGDCYQVNFAQRFQAQCTGDPWAAYCALRAACPTPFSGYLGLSGADAVLSLSPERFVKISARQVETRPIKGTRPRSQDAVQDAAFAQELLNSEKDRAENLMIVDLLRNDLGRSCTTGSVKVPELFSLESYPNVHHLVSSVTGELAAGNDALDLIAGSFPGGSITGAPKIRAMQIIDELEPTRRSLYCGSLLYVDVRGEMDSSIAIRSLLVKDGRISCWGGGGIVADSHCEAEYQETFTKVRVLLETLEAL

SEQ ID NO: 145210 - DNA, 1554 bp, Rhodopirellula baltica SH 1
  CDS (1)..(1554): transl_table=11
gtgtgcctcggcgagccaaccctcgccgaggcattttttttgcaccaatggcccgatatcactcgggcaaattttcgatccgaattgatcgcgatgcagcagactgccaagaacgcccactccgctatcaacaaacagaagatccctctgtggacgcattcgctcggccgggtcggtgatctggaagacctgttcggaaggcttgcgggaacgaaacatcggctctggttcgactcagcgtccgaccacgaacacgaccgagggcgatactcgttcctggcagcagacccggtcggctggctccacgcctccctcacagatcccgatccgtggcccaaactccacaactggtgttctcgaatcgcggacttcggccactctgccgaactgcctcccttttgcggcgggctggcgggactgattccgtatgaagcggcttggtggttggaaccaacgacccgaatgccggagagttttttaggtggtcgacctcaacttggaatggcgatcggaatctacgactggaccatcgcggtggaccactcctccggcgaagcaacgttgatcagcaacggcctggatagctcgctgaacgctgatttcgaacgagcacgccgtcgtggcgaagacgtgctgaaacgcttgagccgaaccgcccaagcacctcgcaccggtgcaccgccaccgaacgagaacctcgaatcgataggccatccaacaagagaagccggcgtccgaagcaacttcgaatcacaacgctacgtcgaggcggtcgccgagatcatcgaccgaatccgcgcgggcgactctttccaagtcaatctggctcagacactttcgcatcctgcgatgtgcgaagcaaatgagctctaccgtcgcctacgtcaatccaatccggcaccttactccgtcttctttgatgttggcaccgagcaaatcctgagctcctcaccggaaggatttttgcaggtacgcgatcgccacgttgtcacgcggccgatcaagggaaccgtgccgcgcaccggagacgagatcgaagacgaacgcttggctcaggttctcggtggtagcgcaaaggaccgagctgaaaacatcatgatcgtggatctgatgcgaaacgatctatccatcgtctgcaaagacgacagcgttcgcgtctccggactttgcgagattgaatgctaccaaagtgttcaacacctcgtatcgaccgtcaaaggcgacttgcgtgccgacgtcaccatcagcgagttgttggcagcttgcttcccaggtggaagcatcaccggcgctccaaaaatcgaagcgatgaaaaccatcgcccgactcgaaaggcaaccacgcggagcctactgcggatcgatcggttacatcagcgtttccggcaacgctgatttcaacattttgattcgaaccgtcactcaacgagatggccggtggcactttcccgtcggcggaggcgttaccgctcgcagcgaaccccaaagcgaactcgaggaaacctggaccaaagccgcgggtcttttgcgtgcaattcgaccggcggaaagctaa

SEQ ID NO: 145211 - protein, 517 aa, Rhodopirellula baltica SH 1
MCLGEPTLAEAFFLHQWPDITRANFRSELIAMQQTAKNAHSAINKQKIPLWTHSLGRVGDLEDLFGRLAGTKHRLWFDSASDHEHDRGRYSFLAADPVGWLHASLTDPDPWPKLHNWCSRIADFGHSAELPPFCGGLAGLIPYEAAWWLEPTTRMPESFLGGRPQLGMAIGIYDWTIAVDHSSGEATLISNGLDSSLNADFERARRRGEDVLKRLSRTAQAPRTGAPPPNENLESIGHPTREAGVRSNFESQRYVEAVAEIIDRIRAGDSFQVNLAQTLSHPAMCEANELYRRLRQSNPAPYSVFFDVGTEQILSSSPEGFLQVRDRHVVTRPIKGTVPRTGDEIEDERLAQVLGGSAKDRAENIMIVDLMRNDLSIVCKDDSVRVSGLCEIECYQSVQHLVSTVKGDLRADVTISELLAACFPGGSITGAPKIEAMKTIARLERQPRGAYCGSIGYISVSGNADFNILIRTVTQRDGRWHFPVGGGVTARSEPQSELEETWTKAAGLLRAIRPAES

SEQ ID NO: 145212 - DNA, 1401 bp, Vibrio vulnificus YJ016
  CDS (1)..(1401): transl_table=11
atgcagcaatcgaactctttgtcacaaattaaacaaatgaataacagcataaatacggccatttcttcaaaaacactgccttatcaaacggaccttgcccaacagtggtttgacgccatccaacatcaaccttgggcaatgctgttgcgttcggcatcaccaacacatgttgacagccgttttgacattctcgtcgcaaagcccgttgcgacattagaaacacgtggtgcggtaactgagatcaataccaatgacgaagtcattgaaagtaaagatgatcctttcacgcttcttgcgcgttatcaacagcgttttacccctgctctatcctgtgatgaagagattccttttatgggtggtgctctgggttactttagctacgatttaggtcgtcgcgttgaaaaactgcctgagattgcaacacaagatattgctgcgcccgacatggcggtgggcatctacacatgggcattgattgtcgacaatcagacgcagacagcgcaactggttggccaagacgtagaacaagcttatcaatggctgagcacgcaaacaaaagcaaacgaagcgacgtttgcccttaccagtgattggcaatccaacatgaatcgtcgcgattaccaaggtaagtttgattgcgtacaggagtacttgctcagtggtgactgctaccaaattaacttagcgcagcgctttcatgccaattaccaaggcagcgaatggcaagcttaccagaagctagagcagagcaaccaagcaccattttctgctttcattcgtttggaggacgcggcgattttaagtgtgtcgccggagcgttttctcgagctcaaaaaacgtgtcattgaaaccaagccgatcaaaggaactcgtcctcgtcataatgatgaacaacaggacaaacaggcggcacttgagcttgccaatgccgaaaaagatcaagcggaaaatctgatgatcgtcgatctgctgcgcaacgatattggccgtgtcgccaaaccgggcagtgtgcatgttcctaaactgtttgacatcgaaagctttcccgccgtgcatcacttagtcagcacgattcgagcggagttggcagcgcagtatactgccgctgacttactgcgagcgtgtttcccgggaggctcgattaccggcgcgccgaaagtgcgcgcaatggaaatcattgaagagcttgagcctcatcgacgctcagcctattgcggtagtatcggttacatcagtcgccatggtcgcatggataccagcattacaattcgtaccttagtggcggagcaaggtaagttgttcgcttgggctgggggcggtgtagtggctgacagtcaatgcgatgcggaatatcaagagacgttagataaactgtcgaaaattctgcctacgttgcaataa

SEQ ID NO: 145213 - protein, 466 aa, Vibrio vulnificus YJ016
MQQSNSLSQIKQMNNSINTAISSKTLPYQTDLAQQWFDAIQHQPWAMLLRSASPTHVDSRFDILVAKPVATLETRGAVTEINTNDEVIESKDDPFTLLARYQQRFTPALSCDEEIPFMGGALGYFSYDLGRRVEKLPEIATQDIAAPDMAVGIYTWALIVDNQTQTAQLVGQDVEQAYQWLSTQTKANEATFALTSDWQSNMNRRDYQGKFDCVQEYLLSGDCYQINLAQRFHANYQGSEWQAYQKLEQSNQAPFSAFIRLEDAAILSVSPERFLELKKRVIETKPIKGTRPRHNDEQQDKQAALELANAEKDQAENLMIVDLLRNDIGRVAKPGSVHVPKLFDIESFPAVHHLVSTIRAELAAQYTAADLLRACFPGGSITGAPKVRAMEIIEELEPHRRSAYCGSIGYISRHGRMDTSITIRTLVAEQGKLFAWAGGGVVADSQCDAEYQETLDKLSKILPTLQ

SEQ ID NO: 145214 - DNA, 1521 bp, Candida glabrata CBS 138; identical to SEQ ID NO: 76406
  CDS (1)..(1521)

SEQ ID NO: 145215 - protein, 506 aa, Candida glabrata CBS 138; identical to SEQ ID NO: 76407

SEQ ID NO: 145216 - DNA, 1545 bp, Debaryomyces hansenii CBS767; identical to SEQ ID NO: 76410
  CDS (1)..(1545)

SEQ ID NO: 145217 - protein, 514 aa, Debaryomyces hansenii CBS767; identical to SEQ ID NO: 76411

SEQ ID NO: 145218 - DNA, 1524 bp, Yarrowia lipolytica CLIB122; identical to SEQ ID NO: 76412
  CDS (1)..(1524)

SEQ ID NO: 145219 - protein, 507 aa, Yarrowia lipolytica CLIB122; identical to SEQ ID NO: 76413

SEQ ID NO: 145220 - DNA, 1569 bp, Candida albicans SC5314; identical to SEQ ID NO: 76416
  CDS (1)..(1569): transl_table=12

SEQ ID NO: 145221 - protein, 522 aa, Candida albicans SC5314; identical to SEQ ID NO: 76417

SEQ ID NO: 145222 - DNA, 1569 bp, Candida albicans SC5314; identical to SEQ ID NO: 76418
  CDS (1)..(1569): transl_table=12
  misc_feature (462)..(462): n is a, g, c or t

SEQ ID NO: 145223 - protein, 522 aa, Candida albicans SC5314; identical to SEQ ID NO: 76419

SEQ ID NO: 145224 - DNA, 1536 bp, Ustilago maydis 521; identical to SEQ ID NO: 76420
  CDS (1)..(1536)

SEQ ID NO: 145225 - protein, 511 aa, Ustilago maydis 521; identical to SEQ ID NO: 76421

SEQ ID NO: 145226 - DNA, 1359 bp, Clostridium difficile 630
  CDS (1)..(1359): transl_table=11
atgtgtaatatgataagagagataaatactaaattaaattcttttgagatatttactatttttagaaatgaacatgacagttttatattagacagtgctatggataaagaaaaattgggaagatattcttttataagtagccaaccatttaaggtattaaagtataaagatactgatgaaaatcctttagaagttttaaaagaagaactacataagtatagggttgtaaatgatactaatcttccatttgtaggaggtgctgtgggatatttatcttatgatttaggtaattacatagaaaatttacctagaactgctgtagatgatattgagatgcctgatatgtattttggattttataatcatgtaatagttatagaccatcttgtgcaaaaaacttatatagctactccaaacatagatatcgaattagaagaaaagataatagataatatagaacaaagaatattaaaagaagagaaaaaaggtatagatagcatatgttatgaagaaaaagaagtaacacctataagacttaaatctaattttacaaaggaagaatttaaaaatgcagttcaaagtgttagagagtacataagacaaggagatatatatcaagctaatttaacacaaaggttcagtggagaaacagaacttacaagctttgaattgtatagggacttaagaagatttagcccggcaccatttggggcattcttaaactttgaagatgcacatatattatcaaattctccagaaagatttataagatgtgttaataagagaatagaaactagaccaataaaaggtactcgtccaagagggaaagataaaaaagaagatttaagacttcaacaagaacttagaaatagtgaaaaagatagagctgaactacttatgatagtagatttagaaagaaatgatattggcagaatatctaaaactggaagtgttaaagttccagagctatttgtaattgaaccatatgcaaatgtaaatcacttagtttccacagttgtaggtgagttaaaagatgataaagatgctactgatgtaataaaagcaacttttccaggggggtctataacaggagcacctaagattagagcaatggaaattatagacgaattagagccaacgcaaagaaatgtatatactggttcaataggttatataggttttaatggtgatatggattttaatatagcaattagaacaataatcaaaaatgacaaaaaagtctactttcaagttggaggaggaatgacttgggattctgacccagatgaagaatatcaagaaacacttgataaagctaaatccataatgaaggctttgaggggatattatgaagaataa

SEQ ID NO: 145227 - protein, 452 aa, Clostridium difficile 630
MCNMIREINTKLNSFEIFTIFRNEHDSFILDSAMDKEKLGRYSFISSQPFKVLKYKDTDENPLEVLKEELHKYRVVNDTNLPFVGGAVGYLSYDLGNYIENLPRTAVDDIEMPDMYFGFYNHVIVIDHLVQKTYIATPNIDIELEEKIIDNIEQRILKEEKKGIDSICYEEKEVTPIRLKSNFTKEEFKNAVQSVREYIRQGDIYQANLTQRFSGETELTSFELYRDLRRFSPAPFGAFLNFEDAHILSNSPERFIRCVNKRIETRPIKGTRPRGKDKKEDLRLQQELRNSEKDRAELLMIVDLERNDIGRISKTGSVKVPELFVIEPYANVNHLVSTVVGELKDDKDATDVIKATFPGGSITGAPKIRAMEIIDELEPTQRNVYTGSIGYIGFNGDMDFNIAIRTIIKNDKKVYFQVGGGMTWDSDPDEEYQETLDKAKSIMKALRGYYEE

SEQ ID NO: 145228 - DNA, 1398 bp, Bacillus thuringiensis serovar konkukian str. 97-27
  CDS (1)..(1398): transl_table=11
atgcaacgaagaaaatctttagcgctttctattccatatcagttagatttctttaagcaatataaatttctttctaaggataaaccgcaacacattttgttagagagtggacgtggcggtcgttataacatcgtgggattaaacccagtagcggtaatccgagggaagggtgaagcgttacatataagtgaaagtggtaaggaaacaataaagcaaggaaacccattggatttaatgcaggaatatatggagcgatggaaaacggattataatccggaatacccgccttttcaaggtggtgcaattggttactttagttatgattgcatccgttatattgaaaaacttccttctcttgcggaggatgatattaatatacctgatatattctttttattatttgatgatgtgtttgtgtatgatcaaaaagaaaaagtattatggattattacacattatgtagataagcatgaagaggcaaaagagcgattaaatgaatggaagattctttgggcgacagaagcgccggaagtgactataccgtttgcgtgccctgaaaagaaaaatgaagcagttgcttttactgaagaaagctttatgaaggcggttgaatgtattcaagaatatattggggctggtgatgtgttccaagtaaacttgtcgacaagacaagaaagaacgttacaaacacacccactagaaatatatacaagtcttcgtgaaattaatccatctccatatatgggttacttggagctcggggattttcaaattgtaagtggatcgccagagttgctaattaagaaacagggaactgaagtaagtacaagaccaattgctggaacgagatctagaggggcaaatgaacaagaggatgaagaattggcaagggaattaattgagaatgaaaaagaaagagcagagcacgtcatgcttgtggatttagaacgaaatgatttaggacgtgtttgtaaatatggcactgtagaagtagacgagtttatggtaattgagaaatactcacatgttatgcatattgtttctaatgtgcgtggtgaggtggaagaagataaagatgctttcgatttagtgaaggctgtattccctggaggaacaattacgggtgctccgaaaatacgtacgatggaaattattgaagaattagaacctgttcgccgagggatttatacaggttcaatcggttggattggttattctggagatacagaattgaatattgtaattaggacacttcttgctaaagacggaaaagcgcatgtacaagcaggggcgggaattgtaattgattcaaatccggaaaatgaatataaagagtcgttaaaaaaggcgattgctttatggcgtgcaaaagaacgtagcgaagaaacggttaggtga

SEQ ID NO: 145229 - protein, 465 aa, Bacillus thuringiensis serovar konkukian str. 97-27; identical to SEQ ID NO: 76359

SEQ ID NO: 145230 - DNA, 1398 bp, Bacillus cereus E33L; identical to SEQ ID NO: 76466
  CDS (1)..(1398): transl_table=11

SEQ ID NO: 145231 - protein, 465 aa, Bacillus cereus E33L; identical to SEQ ID NO: 76467

SEQ ID NO: 145232 - DNA, 1398 bp, Synechococcus elongatus PCC 6301
  CDS (1)..(1398): transl_table=11
atgaccgcgatcgcccgtcgagtcgtgcaacccttggtgcgggaaattgcttggtgcgatccgcagcaggcctttgcgcccttcgctcaagatccccatgcagtcctgctcgatctgggggagccagcaacgcccgaaagccgttacgcctacctctgtctgtcgccctatgccacccagcgaggcgatcgcttggtaactgaggctgatcctttccaggctttggcaacgtcactggccacagtagattggcagacgaattctgactctgacctgcctccatttcagagcggtatctgcggatttctgtcctatgaatgtggggcttggctggagcggctcccgacaccgaaaccggttgaacctcgactgccgctctggtcgttgagcctctatgacttggtggttgcctgcgatcgccagcaacggcgcacctggattttctcctcgggattgccgctgcaggatccgcgcgatcgccagcaacgggcggaacaacgactgcaatgggtctgcgatcgcctgcagtcagctctaccttcacagtctcctgattggcagcctcaggctgattggcaagccctgcaaactgaagctgacttttgtcaggctgtggatcaggtcaaatgccacattcgcgctggcgatatttttcaggccaacttaaccacggcttttcgcgccagtcagccaaaggatctgagcccttggcaactctatcgacggctctatcagctcagccccgaacctttttcggcctacttcgcagggggcgattttcagttgctctcggtgtcgccggagcgttttctgcgcctcgaccgcgatggctgggtagaaacgcgcccgattaagggaactcgtcctcgtagtgccgatccggctcacgatcgccagttagcgacggagttgcaggccagtgagaaggatcgggcagaaaacgtaatgatcgtcgacctcctgcgcaacgacttgggtcgcgttcgtcgtccccgctcgattcaggtgccccaactctgccaattggaaagctacgagcacgtccatcacctcacctcgcaggtgattggtcaactgcgatcgggcttgacggcggtggatttactgcgggcaacgttcccgggcggatcgattacgggagcgcctaaaatccgctcgatggaaattattcacgagcttgaaccgattccccgccaagcctactgtggcagtctcttttggctgggctttgacggcagcttagatgccagcattttgattcggacgctgcaaatcagccaaggccaagtccttgctcaagccggttgcggcatcgtcgctgactccgatccgctagacgaatgcgctgagatgcaggtcaaggtgcaacccctgttgcgatcgctccagccctcatga

SEQ ID NO: 145233 - protein, 465 aa, Synechococcus elongatus PCC 6301
MTAIARRVVQPLVREIAWCDPQQAFAPFAQDPHAVLLDLGEPATPESRYAYLCLSPYATQRGDRLVTEADPFQALATSLATVDWQTNSDSDLPPFQSGICGFLSYECGAWLERLPTPKPVEPRLPLWSLSLYDLVVACDRQQRRTWIFSSGLPLQDPRDRQQRAEQRLQWVCDRLQSALPSQSPDWQPQADWQALQTEADFCQAVDQVKCHIRAGDIFQANLTTAFRASQPKDLSPWQLYRRLYQLSPEPFSAYFAGGDFQLLSVSPERFLRLDRDGWVETRPIKGTRPRSADPAHDRQLATELQASEKDRAENVMIVDLLRNDLGRVRRPRSIQVPQLCQLESYEHVHHLTSQVIGQLRSGLTAVDLLRATFPGGSITGAPKIRSMEIIHELEPIPRQAYCGSLFWLGFDGSLDASILIRTLQISQGQVLAQAGCGIVADSDPLDECAEMQVKVQPLLRSLQPS

SEQ ID NO: 145234 - DNA, 1434 bp, Bacillus clausii KSM-K16; identical to SEQ ID NO: 76490
  CDS (1)..(1434): transl_table=11

SEQ ID NO: 145235 - protein, 477 aa, Bacillus clausii KSM-K16; identical to SEQ ID NO: 76491

SEQ ID NO: 145236 - DNA, 1344 bp, Pseudomonas syringae pv. syringae B728a
  CDS (1)..(1344): transl_table=11
atgccgatctgctcgatacaccccctgccctacagcgccgacccgatcgcgttcttcgcgcgaatccgcgaagcgccgggtgcggtgctgctcgatagcggcaggccggcagccgtgcggggccgacatgacctgctcagtgcatggccgttgcaggaactgaccgtcgccgatggtgagaacggagcgacctatctccagcgcttgcgcgacagtctcaaggccctcggcccagcacagctacctgacgggtgcgagctgcccttcgctggcggcctgatcggttatctgagctatgagtttggtcgacgcctggagcctttgccggatcaggccattgatgacctgcaactgcccgaggcccgtctggggctctacgcctgggcgctgatcagtgatcatcaggagcagaccagccagctgatttttcatccgtccctggccgtaagcgaacgcgaacggctgattgagctgttctctgtcgatatccctgagccgcgcacggagttccgtctcagccagccgtttcaggccagtatcagcgcggataactatcgccaggcgttcgaacgaattcaggcctacatccaggccggtgactgctaccaggtcaactttgcacaacgctttcaggcgcagtgcgtcggtgacccatgggccgcctatcgtgcgctgcgagcggcttgtccgacgccattcgccggctacctgagcctgccgggggccgatgcaatgctgagtctttctcccgagcgctttgtgcgggtcagcacccggcaggtcgaaacccgcccgatcaaaggcacacggccgcgtagcgcggacccggcgcaggatgccgccttggccgccgaactgctggccagcgagaaggaccgcgcagaaaacctgatgatcgtcgacctgctgcgcaacgacctgggccgcagctgccgcatcggctcggtgaaagtcccagagctgttcagcctggaaagctaccccaacgtgcaccatctggtgagcagcgtgaccggggagctggccgccggcaacgatgcactggacctgatcggcggcagctttcctggcggatccatcacgggcgcgccgaagatccgcgccatgcagatcatcgacgagctggagccgacccgccgcagcctgtattgcggttcgttgatgtacctggacgtgcgtggcgaaatggacagctcgatcgccatccgcagcctgctggtcaaggacggacagatttcctgctggggcggtggcggcatcgtcgccgactcggactgcgaggcggaatatcaggaaaccttcaccaaagtccgtgtactgctggagacgcttgaagcactgtga

SEQ ID NO: 145237 - protein, 447 aa, Pseudomonas syringae pv. syringae B728a
MPICSIHPLPYSADPIAFFARIREAPGAVLLDSGRPAAVRGRHDLLSAWPLQELTVADGENGATYLQRLRDSLKALGPAQLPDGCELPFAGGLIGYLSYEFGRRLEPLPDQAIDDLQLPEARLGLYAWALISDHQEQTSQLIFHPSLAVSERERLIELFSVDIPEPRTEFRLSQPFQASISADNYRQAFERIQAYIQAGDCYQVNFAQRFQAQCVGDPWAAYRALRAACPTPFAGYLSLPGADAMLSLSPERFVRVSTRQVETRPIKGTRPRSADPAQDAALAAELLASEKDRAENLMIVDLLRNDLGRSCRIGSVKVPELFSLESYPNVHHLVSSVTGELAAGNDALDLIGGSFPGGSITGAPKIRAMQIIDELEPTRRSLYCGSLMYLDVRGEMDSSIAIRSLLVKDGQISCWGGGGIVADSDCEAEYQETFTKVRVLLETLEAL

SEQ ID NO: 145238 - DNA, 1344 bp, Pseudomonas syringae pv. phaseolicola 1448A
  CDS (1)..(1344): transl_table=11
atgccgatctgctcgatacaccccctgccctacagcgccgacccgatcgcgttctttgcgcgaatccgcgaagcgccaggcgcggtgctgctcgacagtggcaggcccgccgccgagcgcggccgatatgacctgctcagcgcctggccgctgcaggaactgaccgctgccgatgacgagaatggggccgcctatctccagcggttgcgcgacagtctcaaagcgctcggcacagcgcaattgcctgacgggtgcgaactgcccttcgctggcggcctgatcggttatctgggttacgagttcggtcgacgcctagaaccgctgccggatgaagccgtcgacgacctgcaactgcccgaagcgcgcctggggctctacgcctgggcgctgatcagtgatcatcaggagcagaccagtcagctgatttttcacccgtccctacacgcaagcgagcgcaaacggctgattgatctgttctctgtctatatccctgagccgcacacggagttccgcctcagccagccgtttcaggccagcatcagcgcggatcactatcgacaggctttcgaacatattcaggcctacatccaggcgggtgactgttatcaggtcaacttcgcgcaacgttttcaggcgcagtgtacgggcgacccgtgggccgcttattgtgcactgcgagcggcttgcccgacgccgttcgccggttacctgagcctgccggggcacgatgcaatcctgagcctttctccggaacgcttcgtgcgggtcagcgccagacaggtcgaaacccgccccatcaaaggcacgcggccgcgcagcccggacgccacagaggatgccgcgttcgccaacgagctgttggccagcgagaaggaccgcgctgaaaacctgatgattgtcgacctgctgcgcaatgacctgggccgcagctgtagaatcggttcggtaaaggtccctgagctgttcagcctggaaagctaccccaatgtgcatcatctggtgagcagcgtgaccggggagctggccgctggcaacgatgcactggacctgattgcgggcagcttccctggcggctccataaccggcgcgccgaagatccgcgccatgcagatcattgacgaactggaaccgacccgacgcagcctgtattgcggctcgttgatgtacctggacgtacgcggcgaaatggacagttcaatcgccatccgcagcttgctggtcaaggatgggcgcatttcctgttggggcggcggcggcattgtggcggactccagctgcgaggctgaatatcaggaaaccttcaccaaggtccgcgtgctgctgaaaacgcttgaggcgctctga

SEQ ID NO: 145239 - protein, 447 aa, Pseudomonas syringae pv. phaseolicola 1448A
MPICSIHPLPYSADPIAFFARIREAPGAVLLDSGRPAAERGRYDLLSAWPLQELTAADDENGAAYLQRLRDSLKALGTAQLPDGCELPFAGGLIGYLGYEFGRRLEPLPDEAVDDLQLPEARLGLYAWALISDHQEQTSQLIFHPSLHASERKRLIDLFSVYIPEPHTEFRLSQPFQASISADHYRQAFEHIQAYIQAGDCYQVNFAQRFQAQCTGDPWAAYCALRAACPTPFAGYLSLPGHDAILSLSPERFVRVSARQVETRPIKGTRPRSPDATEDAAFANELLASEKDRAENLMIVDLLRNDLGRSCRIGSVKVPELFSLESYPNVHHLVSSVTGELAAGNDALDLIAGSFPGGSITGAPKIRAMQIIDELEPTRRSLYCGSLMYLDVRGEMDSSIAIRSLLVKDGRISCWGGGGIVADSSCEAEYQETFTKVRVLLKTLEAL

SEQ ID NO: 145240 - DNA, 1344 bp, Pseudomonas fluorescens PfO-1; identical to SEQ ID NO: 76524
  CDS (1)..(1344): transl_table=11

SEQ ID NO: 145241 - protein, 447 aa, Pseudomonas fluorescens PfO-1; identical to SEQ ID NO: 76525

SEQ ID NO: 145242 - DNA, 1362 bp, Carboxydothermus hydrogenoformans Z-2901
  CDS (1)..(1362): transl_table=11
atgacatattttcagataattgaagttccaaaatttgatcttatagcattagctgaagtttttcccaaaaaagagtggttttttctcgattcttccctttcccccagtacctatggtcgttactcgttcctgggctttaatccggagtttaccgttaaaagtcggggaaatcttataattaagtcctatgataaccgggaagaaaagttatatagccatccattttcttttttaaagtccttattagccgaaattaaaaaacctgctttaaacctgccgtttccctttaaaggcgggcttgtggggtattttgcctatgacctgggtcggatgctcgaagttttacccagcaccgccatcgatgatttaaatctttatgacttttaccttggttactacgataccttcgtagcagtcgaccacataaatgaccggtactacgccgtaagctaccgggaagataaattaaaagagctcttagaatacatcgaaaaatcccggaatttagaagttaaacctccgttttatcctccggcgggagagttttattctaatttcacccgggaaagttacgaggaaatcgttcggcgggctattgagtacatcaaagccggtgatatctttgtggtaaacctctcccagcgctttaccgctgactttacaggagacccctgggagctttataagtatttaagaaagattaatcccgctccttttgcggcctatctccattacccggaattcgccgtcctcagttcttcgccggagcggtttttagagcttaaatctggcaaagtccagacccggccgattaaaggtacccgccctcggggaaagaccattgccgaagacctcgcaaacagagatgagctttacaacagccaaaaagaccgggcggagttaaccatgattgtagacctggagcgaaacgatctgggcaaagtagccaaagtgggcacggtaaaggtaccggaactgtacgtcctcgaacagtacgctaccgtttaccatctggtttccaccgttaccgctgagctcgctgaaggtaaagacgctatcgaccttttagccgctacttttcccggcggctccattaccggggctcccaaaatccgggccatggaaattatcgaggagttggaaggactacggcggggaatttacaccggctgcatcggctatatagatgtaaacggcgacatggatttaaacatcgttataagaacgatcctggtaaaaaataaaaaagcctactttggcgtaggcggaggtattacggtggactcagaccccaccgcagaatatttggaaaccctggataaagcttatgccttaatgaaagcgttaaaatttctcggctaa

SEQ ID NO: 145243 - protein, 453 aa, Carboxydothermus hydrogenoformans Z-2901
MTYFQIIEVPKFDLIALAEVFPKKEWFFLDSSLSPSTYGRYSFLGFNPEFTVKSRGNLIIKSYDNREEKLYSHPFSFLKSLLAEIKKPALNLPFPFKGGLVGYFAYDLGRMLEVLPSTAIDDLNLYDFYLGYYDTFVAVDHINDRYYAVSYREDKLKELLEYIEKSRNLEVKPPFYPPAGEFYSNFTRESYEEIVRRAIEYIKAGDIFVVNLSQRFTADFTGDPWELYKYLRKINPAPFAAYLHYPEFAVLSSSPERFLELKSGKVQTRPIKGTRPRGKTIAEDLANRDELYNSQKDRAELTMIVDLERNDLGKVAKVGTVKVPELYVLEQYATVYHLVSTVTAELAEGKDAIDLLAATFPGGSITGAPKIRAMEIIEELEGLRRGIYTGCIGYIDVNGDMDLNIVIRTILVKNKKAYFGVGGGITVDSDPTAEYLETLDKAYALMKALKFLG

SEQ ID NO: 145244 - DNA, 1425 bp, Rhodospirillum rubrum ATCC 11170
  CDS (1)..(1425): transl_table=11
ttgtcccttcatatccgccccatcgcctttgccgacccgctgaccctggtcccggccttggccaaggatccggtcttcgcctttctcgacagcgccgccgccgatcccggcgcgggcgacgaggatcgcggccgttacagctatctctgcgccgatccctggcgggtgatcaccgccgatgacaccacggtccgggtcgatagccggccggtcgccggcgatcccttcgccgttctcgccgccaccctggccgaaatcgccgaggacgagcccgtcgcttgcccggtgcccttcgccaccggcctatgcggtgtccttggttacggcctgggtgcttggctggaacggctggcccccgccccggccgatcggctggccctgccggcgatgaccctgggcgtctatgactgcgtcgccgccttcgacctgcgcgcgcgcaaggcctggatcgtttccagcggccggcccgaacgcgatccgcggcgccgcgccgcccgcgccctggcccgcgccgaagccctggaacggcgcttggccgcggtttcccttgtccctgacgagaccgccgccgcttatgaaaagaccgggtcctggcgcgccgagcgaccgcgcgcggcgatcttggcggcgatcggcaagaccatcgacgccatcgaagccggcgagctgttccaggccaatatcacccagcgcttcctggccgaccttccgcccggcctcgacgacctcaccttgtatcgccgcctgcgccggctgagcccggcccccttcgccgccctggtcggctgcggcgccgaccaccgcctgatcggcgcctcgcccgaacgcttcttgcgcctgggcgccgagggccgggtcgagacgcggccgatcaagggcacccgccggcgcgacgccgatccggcgcgcgacgccgcccaggccgccgctctggtggccagcgaaaaggaccgggccgagaacctgatgatcgtcgatctgatgcgcaacgacctgggccgggtctgcgccatcggcagcgtccgtgtgccccggctgatcgccctggaaagcttcgccagcgtccaccatctggtctcggcggtcgaagggcggctgcgccccggcctgggggcgatcgacctgctgcgcgcctgttttcccggcggctcggtcaccggggcgccgaagatccgcgccatggacctgatcaccgccctggagccggcccggcgcggctggtattgcggatcggtggcctggatcggcgccgatggggcgatggattccaacatcgtcatccgcagcctcacccgggccggtgccaccctgatcgcccaggccggcggcgccatcaccgcgccctccgatccggccgaggaatacgaggaaagcctgatcaaaatggcccccctgctcagcgccctggatgggatcgagcgatga

SEQ ID NO: 145245 - protein, 474 aa, Rhodospirillum rubrum ATCC 11170
MSLHIRPIAFADPLTLVPALAKDPVFAFLDSAAADPGAGDEDRGRYSYLCADPWRVITADDTTVRVDSRPVAGDPFAVLAATLAEIAEDEPVACPVPFATGLCGVLGYGLGAWLERLAPAPADRLALPAMTLGVYDCVAAFDLRARKAWIVSSGRPERDPRRRAARALARAEALERRLAAVSLVPDETAAAYEKTGSWRAERPRAAILAAIGKTIDAIEAGELFQANITQRFLADLPPGLDDLTLYRRLRRLSPAPFAALVGCGADHRLIGASPERFLRLGAEGRVETRPIKGTRRRDADPARDAAQAAALVASEKDRAENLMIVDLMRNDLGRVCAIGSVRVPRLIALESFASVHHLVSAVEGRLRPGLGAIDLLRACFPGGSVTGAPKIRAMDLITALEPARRGWYCGSVAWIGADGAMDSNIVIRSLTRAGATLIAQAGGAITAPSDPAEEYEESLIKMAPLLSALDGIER

SEQ ID NO: 145246 - DNA, 1500 bp, Moorella thermoacetica ATCC 39073; identical to SEQ ID NO: 76548
  CDS (1)..(1500): transl_table=11

SEQ ID NO: 145247 - protein, 499 aa, Moorella thermoacetica ATCC 39073; identical to SEQ ID NO: 76549

SEQ ID NO: 145248 - DNA, 1401 bp, Moorella thermoacetica ATCC 39073; identical to SEQ ID NO: 76550
  CDS (1)..(1401): transl_table=11

SEQ ID NO: 145249 - protein, 466 aa, Moorella thermoacetica ATCC 39073; identical to SEQ ID NO: 76551

SEQ ID NO: 145250 - DNA, 1335 bp, Saccharophagus degradans 2-40
  CDS (1)..(1335): transl_table=11
atgccagaagtacaattgtcagccttaccctacctaccctctagcctgccatttttcagtgagctcgcagacgagcgtgtgcctgtttggttagatagcggcaaaccattatctaattacggccggtacgacattatttcggccaacccagtagcagttctatcggccacgcattcaagcccttctgctcagttcttaaaagaagtagaagaatctctcgcgcaccacttcacaacggtaagtgcgccacaggggttggatattccctttattggtggtgccatagggtatttgaattacgagttccaacacgaccaatacaaactgccttgcacacataacaaccccgttgccgaggtgggtatctacgattgggcggttgtgcaagatcaccacttaaaacagagttatttgattacccacccaaactggcccctgcaaaaagtacagcacttgcacgctcgcctaagtgcttgtgcacaggctgaacaagccaaacagcgcccgccttttgttattgataagtggaacgctaccactaaagcgcaagattatttaacggccattgcaaccatacaagattacatttcagccggtgacgcctatcaggtgaattactcgcagcaattttctgccaattacaccggccacccactgaatgcttacatcaaaatgcgtcaggcggtacccagcccctactccgcctgcttgatgtttccaactgtaaatattctgagtgtttcaccagaaaaatttgtatcggtaaaaaacaacgcagcaataactcaacccataaaaggcactgctgcacgtggcgatacaccacaagcagatgaacaactcgctaatgagttattactaagcgaaaaaaaccgtgcagaaaacttaatgattgtagatttactacgcaatgacttcagtaaaaactgcgaaccacattcggttaaaaccactaaactgttcgacttagaaagttatgccaatgtgcaccatctggtaagcaccgttacaggcaaagtaaaaactggggtatctgcattaaattttttaagtgattgcttccctggcgggtcaattaccggcgccccaaaaaaacgctcgatggaaattattaatcaactcgaaccccatgcgcgacatatctattgcggcagtattttctacctcagcgcgcacggcgatttagactcaaatatagctattcgaactgcacttttggataacaacacaatttactgttgtggcggtggcgggatagtcgcggactcggacgctagcgccgaatttgacgaaagcattcaaaaaatagataagtttttagccattctcaaataa

SEQ ID NO: 145251 - protein, 444 aa, Saccharophagus degradans 2-40
MPEVQLSALPYLPSSLPFFSELADERVPVWLDSGKPLSNYGRYDIISANPVAVLSATHSSPSAQFLKEVEESLAHHFTTVSAPQGLDIPFIGGAIGYLNYEFQHDQYKLPCTHNNPVAEVGIYDWAVVQDHHLKQSYLITHPNWPLQKVQHLHARLSACAQAEQAKQRPPFVIDKWNATTKAQDYLTAIATIQDYISAGDAYQVNYSQQFSANYTGHPLNAYIKMRQAVPSPYSACLMFPTVNILSVSPEKFVSVKNNAAITQPIKGTAARGDTPQADEQLANELLLSEKNRAENLMIVDLLRNDFSKNCEPHSVKTTKLFDLESYANVHHLVSTVTGKVKTGVSALNFLSDCFPGGSITGAPKKRSMEIINQLEPHARHIYCGSIFYLSAHGDLDSNIAIRTALLDNNTIYCCGGGGIVADSDASAEFDESIQKIDKFLAILK

SEQ ID NO: 145252 - DNA, 1530 bp, Rubrobacter xylanophilus DSM 9941; identical to SEQ ID NO: 76580
  CDS (1)..(1530): transl_table=11

SEQ ID NO: 145253 - protein, 509 aa, Rubrobacter xylanophilus DSM 9941; identical to SEQ ID NO: 76581

SEQ ID NO: 145254 - DNA, 1347 bp, Clostridium perfringens ATCC 13124; identical to SEQ ID NO: 76586
  CDS (1)..(1347): transl_table=11

SEQ ID NO: 145255 - protein, 448 aa, Clostridium perfringens ATCC 13124; identical to SEQ ID NO: 76587

SEQ ID NO: 145256 - DNA, 1404 bp, Shewanella sp. MR-4
  CDS (1)..(1404): transl_table=11
atggcaaatagggcggcattaccgctggcagtacgccaacttgactggactttcagcacagcagcaatcttcgaacactttgcggctgaaccttgggcgatactgctcgactcggccaatgcgtcccatcaggacgctaaattcgatatgatttgcgcaggtcccatcgccaccctcatcacccaaggcgagctgactgacattcaagttcatcagcctgaattagccaaaccgactcacctcagcccgcaggatgacccttttaccctggtcaaacagctgctgcgccattggtatccacactcttttgcctgcgatttgccctttagtggcggcgccatgggcagctttagttatgatttaggccgtcgaattgagcagctcccctgcactgcggcgcaggatattcacctcggcgagatgaatattggcttttacgactgggcattgattttcgattatcagcagcaaagctggtttttagtgcactatttgggtgatgccgccctcgatactcaattgaaaataattgaatctaaaatagccaaagccacaaaacaggccgaatttaatctcacaagcccttggtcatcgcaactcaccaaagccaagtacatttcaaaattcaatgaagtacaggcatatctgcatagcggcgattgctatcaaattaatttgacccagcgctttgaagcagagtatcaaggcgatgaatggcgcgcttactgcaagctacgaagtgccaatcaagcgcccttctccgcctttatgcggcttgatgccaacgcgattttatcgatttcgcccgagcgttttattcagctgcacggtgacgatattcaaaccaaaccgattaaaggcacgctgccgcgccatagcgacccgatgctagataagcgagcagcgcaagcccttgcccattcacccaaggatcgcgccgaaaacgtgatgattgtggatttactgcgcaatgacataggtaaagtcgccgcgcccggcactgtacaagtgccacatctatttgccgtcgaaagctttcctgcggtgcaccatttagtcagtaccgttaccgccaaactcgacccacaataccacgcctgtgacttactgcgcgcagcctttcccggcggttcaataaccggagcgcctaaaatccgcgccatggaaattattgaagagctggaaccctcacgccgcagtctgtattgtggctccatgggttacatcagccaagatgggcaaatggatactagcatcaccattcgcactatcgtggctgagcaaggtaaactctattgctgggcgggcggcggcatagtcgcggactctaatgtcgatgccgagtaccaagaaagcttcgataagataagccgtatcttacccttactcgatagccctcaataa

SEQ ID NO: 145257 - protein, 467 aa, Shewanella sp. MR-4
MANRAALPLAVRQLDWTFSTAAIFEHFAAEPWAILLDSANASHQDAKFDMICAGPIATLITQGELTDIQVHQPELAKPTHLSPQDDPFTLVKQLLRHWYPHSFACDLPFSGGAMGSFSYDLGRRIEQLPCTAAQDIHLGEMNIGFYDWALIFDYQQQSWFLVHYLGDAALDTQLKIIESKIAKATKQAEFNLTSPWSSQLTKAKYISKFNEVQAYLHSGDCYQINLTQRFEAEYQGDEWRAYCKLRSANQAPFSAFMRLDANAILSISPERFIQLHGDDIQTKPIKGTLPRHSDPMLDKRAAQALAHSPKDRAENVMIVDLLRNDIGKVAAPGTVQVPHLFAVESFPAVHHLVSTVTAKLDPQYHACDLLRAAFPGGSITGAPKIRAMEIIEELEPSRRSLYCGSMGYISQDGQMDTSITIRTIVAEQGKLYCWAGGGIVADSNVDAEYQESFDKISRILPLLDSPQ

SEQ ID NO: 145258 - DNA, 1362 bp, Pseudomonas aeruginosa UCBPP-PA14
  CDS (1)..(1362): transl_table=11
atgcccagttgtcatgttcaccccctgccctaccatagcgacccaagctgtctctttgccatcatccatgaggcgcccggtgcggtgatgctcgattcgggtcgccccatcgctacccgtggacgctatgaccttatgagcgcctggccattggcagaactggcgccgctgcccgacgaatcggccaaccgcttcttcgcccgcctacgcgaagcggccggaagcctgggccccgcgcagctgccagcgccgtacgaactgcccttcgccggcggtctgctgggctatttatcctacgacctgggtcggcgcatcgagcgcatcggcgaacacgcccgcgatgacctgggcctgccgctggcctccgtcggcctgtatgcctgggcgctgatcagcgaccaccaggccggcaccagccaactggtattccacccgcgattggacgagcgcgaacgccagcgcctgatcgccctgttcagcgaggaaacgcaaggcacggccggcaacttcaagcttctgggaaaattccgacggagcatcagcgcatccgactatcggcaggcgatccgccgcatccaggactacatccaggcaggcgactgctaccaggtgaactatagccagcgcttccaggccgcttgcagcggctcgccgtggccggcctatcgcgccctgcgcgaggcctgcccgacgccgttctccggctacctgcgactggccgacggcgcgatcctcagcctgtcgccggagcgcttcctcaagctcggcaagggcaaggtggaaacccggccgatcaagggcacccgcccgcgcggcaagacgcccgaggaggacatggcgctggcggcgtcgctgctggccagccccaaggaccgcgcggaaaacctgatgatcgtcgacctgctgcgcaacgacatcggacgcagttgccaacctggcagcgtacgggtaccggagctgtttgccctggaaagctatcccaacgtgcatcacctggtgagcagcgtcaccggcgaactggcgccgggcaaggacgccctcgacctgctggaaggcagcttccccggcggctcgatcaccggcgcgccgaagattcgcgccatgcagatcatcgacgagctggaaccgagccgacgcggcatctactgcggcagcctgttctacctcgacgtgcgcggcgagatggacagctcgatcgccatccgcaccctgctggtcagggacggccaggtcagttgctggggcggcggcggcatcgtcgccgactcgcactgggaggacgagtaccaggaaaccctggacaaggtccgggtgctgctggaaaccctggaaggaatggccgggacagcgtccccggaatag

SEQ ID NO: 145259 - protein, 453 aa, Pseudomonas aeruginosa UCBPP-PA14
MPSCHVHPLPYHSDPSCLFAIIHEAPGAVMLDSGRPIATRGRYDLMSAWPLAELAPLPDESANRFFARLREAAGSLGPAQLPAPYELPFAGGLLGYLSYDLGRRIERIGEHARDDLGLPLASVGLYAWALISDHQAGTSQLVFHPRLDERERQRLIALFSEETQGTAGNFKLLGKFRRSISASDYRQAIRRIQDYIQAGDCYQVNYSQRFQAACSGSPWPAYRALREACPTPFSGYLRLADGAILSLSPERFLKLGKGKVETRPIKGTRPRGKTPEEDMALAASLLASPKDRAENLMIVDLLRNDIGRSCQPGSVRVPELFALESYPNVHHLVSSVTGELAPGKDALDLLEGSFPGGSITGAPKIRAMQIIDELEPSRRGIYCGSLFYLDVRGEMDSSIAIRTLLVRDGQVSCWGGGGIVADSHWEDEYQETLDKVRVLLETLEGMAGTASPE

SEQ ID NO: 145260 - DNA, 1404 bp, Shewanella sp. ANA-3
  CDS (1)..(1404): transl_table=11
atggcaaatagggcggcattaccgctggcagtacgccaacttgactggactttcagcacagcagcaatcttcgaatactttgcggcagaaccttgggccatattgctcgactcggccaatgcgccccatcaggacgctaaattcgatatgatttgcgcaggtcccattgccaccctcatcacccaaggcgaactgactgacattcaagttcatcagcctgaattaaccaaaccgactcacctctgcccgcaggatgacccttttaccctggtcaaacagctgctgcgccattggtatccacactcttttgcctgcgatttgccctttagtggcggcgccatgggcagctttagttatgacttaggccgccggattgagcagctcccgagcacagcagcgcatgatattcacctcggcgagatgaatattggcttttacgactgggcattgattttcgattatcagcagcaaagctggtttatggtgcactatttgggggatgccgtcctcgatactcaattgaaaataattgaagcaaaaatagccaaacccacaaagcaggccgaatttcgtctcacaagcccttggtcggcgcagaccaccaaagcccagtacgccgcaaaatttactcaagtacaggcgtatctgcatagcggcgattgctatcaaattaatttaacccagcgctttgaagcagagtatcaaggcgatgaatggcgcgcttactgcaagctacgaagtgccaatcaagcgcccttctccgcctttatgcggcttgatgccaacgcgattttatcgatttcgcccgagcgttttattcagctacgcggtgacgacattcaaaccaaaccgattaaaggcacgctgccgcgccatagcgacccgatgctagataagcaagcagcgcaagcccttgcccattcgcccaaggatcgcgccgaaaacgtgatgattgtggatttactgcgcaatgacataggtaaagtcgcggcgcccggcactgtacaagtgccacatctatttgccgttgaaagctttcctgcggtgcaccatttagtcagtaccgtcacggccaaactcgacccacattaccacgcctgcgacttgttgcgggcggcctttcccggcggttcaataaccggtgcgcctaaaatccgcgccatggaaattattgaagagctggaaccctcacgccgcagtctgtattgtggctccatggggtatatcagccaagatgggcaaatggacaccagtatcaccatccgcactatcgtggcagagcaaggtaaactctattgctgggcgggcggcggcatagtcgcggactctaatgtcgatgccgagtaccaagaaagcttcgataagataagccgcatcttacccttgctcgatagccctcaataa

SEQ ID NO: 145261 - protein, 467 aa, Shewanella sp. ANA-3
MANRAALPLAVRQLDWTFSTAAIFEYFAAEPWAILLDSANAPHQDAKFDMICAGPIATLITQGELTDIQVHQPELTKPTHLCPQDDPFTLVKQLLRHWYPHSFACDLPFSGGAMGSFSYDLGRRIEQLPSTAAHDIHLGEMNIGFYDWALIFDYQQQSWFMVHYLGDAVLDTQLKIIEAKIAKPTKQAEFRLTSPWSAQTTKAQYAAKFTQVQAYLHSGDCYQINLTQRFEAEYQGDEWRAYCKLRSANQAPFSAFMRLDANAILSISPERFIQLRGDDIQTKPIKGTLPRHSDPMLDKQAAQALAHSPKDRAENVMIVDLLRNDIGKVAAPGTVQVPHLFAVESFPAVHHLVSTVTAKLDPHYHACDLLRAAFPGGSITGAPKIRAMEIIEELEPSRRSLYCGSMGYISQDGQMDTSITIRTIVAEQGKLYCWAGGGIVADSNVDAEYQESFDKISRILPLLDSPQ

SEQ ID NO: 145262 - DNA, 1362 bp, Vibrio sp. Ex25
  CDS (1)..(1362): transl_table=11
atggacaatcaattcattgattttaaagcgctggaatacgcaccagagtttgctcttcacctcttttctcgcattcaacaccagccttgggcgatgttgctgcgttctgcatcagaaacgcatatcgatagccgcttcgatgtgttggttgccaacccaattgcaacgttagaaaccgttgccgacaacacacaagttgaaacgccatcgaatgcctattcaactcaagatgacccatttgcgctgcttcatcagttgcaagaacagtggcttcctcacgttgagttaaataaagaattggatttgccttttgtcggcggagcgctcggttacttcagttacgatttaggtcgccgcgtagaaacgatgccagaagtggcagaaaaggacctcaacacgccggatatggcggtaggtctgtatgaatgggccgttgttgttgaccaccagctaaaaaaagcatgcctagttggtcagaatatcgagcaagcttggcagtggttagaaaaacaagaagcggagcaaagcgttgactttgctctgtctggtgattggcagtcaaacatgacgaaagagagctacgccactcgctttgacaaggtacaagaatacttgttgagcggtgactgctatcagatcaatttggcgcagcgctttaacgcaccgtatcaaggcagtgagtggcaagcgtatctgaaattggagtccgccaaccaagcgccattctcagcatttatccgtatgcctgagtcttcaattttgagtatctctccagagcgctttttagagctcaaagatcgcgtcattgaaacgaaaccaatcaaaggtactcgcccacgcagcgaagattcaaaacaagataacgctaatgcccatgacttgcagacagcagaaaaagatcaagcagagaacctgatgattgtcgatttgctgcgtaatgacattggtcgagttgcatcaccggggagcgttcacgtgccaaagctgtttgaaattgaaagcttccccgcagtgcatcatttggtgagcaccattcgtgcgaatttggatgaacaatactctcctgcagatttgctgcgagcgtgttttccaggcggttcaattacgggcgcacctaaagttcgcgcaatgcagatcattgaagagttggagccgcatcgacgcagcgcgtattgcggcagtattggctacatttctcgccatggtcgtatggataccagcatcaccatccgcactctcgtagcggaaaatcacaaactgtacgcttgggctggcggcggcgtcgttgcagatagcgattgtgcttctgaatatcaagaaacgttggataagctctcaaagattttaccagcgctgcaatag

SEQ ID NO: 145263 - protein, 453 aa, Vibrio sp. Ex25
MDNQFIDFKALEYAPEFALHLFSRIQHQPWAMLLRSASETHIDSRFDVLVANPIATLETVADNTQVETPSNAYSTQDDPFALLHQLQEQWLPHVELNKELDLPFVGGALGYFSYDLGRRVETMPEVAEKDLNTPDMAVGLYEWAVVVDHQLKKACLVGQNIEQAWQWLEKQEAEQSVDFALSGDWQSNMTKESYATRFDKVQEYLLSGDCYQINLAQRFNAPYQGSEWQAYLKLESANQAPFSAFIRMPESSILSISPERFLELKDRVIETKPIKGTRPRSEDSKQDNANAHDLQTAEKDQAENLMIVDLLRNDIGRVASPGSVHVPKLFEIESFPAVHHLVSTIRANLDEQYSPADLLRACFPGGSITGAPKVRAMQIIEELEPHRRSAYCGSIGYISRHGRMDTSITIRTLVAENHKLYAWAGGGVVADSDCASEYQETLDKLSKILPALQ

SEQ ID NO: 145264 - DNA, 1362 bp, Escherichia coli C str. ATCC 8739
  CDS (1)..(1362): transl_table=11
atgaagacgttatctcccgctgtgattactttaccctggcgtcaggacgccgctgaattttatttctcccgcttaagccacctgccgtgggcgatgcttttacactccggctatgccgatcatccgtatagccgctttgatattgtggtcgccgagccgatttgcactttaaccactttcggtaaagaaaccgttgttagtgaaagcgaaaaacgcacaacgaccactgatgacccgctacaggtgctccagcaggtgctggatcgcgcagacattcgcccaacgcataacgaagatttgccatttcagggcggcgcactggggttgtttggctacgatctgggccgccgttttgagtcactgccagaaattgcggaacaagatatcgttctgccggatatggcagtgggtatctacgattgggcgctcattgtcgaccaccagcgtcatacagtttctttgctgagtcataatgatgtcaatgcccgtcgggcctggctggaaagccagcaattctcgccgcaggaagatttcacgctcacttccgactggcaatccaatatgacccgcgagcagtacggcgaaaaatttcgccaggtacaggaatatctgcacagcggtgattgctatcaggtgaatctcgcccaacgttttcatgcgacctattctggcgatgaatggcaggcattccttcagcttaatcaggccaaccgcgcgccatttagcgcttttttacgtcttgaacagggtgcaattttaagcctttcgccagagcggtttattctttgtgataatagtgaaatccagacccgcccgattaaaggcacgctaccacgcctgcccgatcctcaggaagatagcaaacaagcagtaaaactggcgaactcagcgaaagatcgtgccgaaaatctgatgattgtcgatttaatgcgtaatgatatcggtcgtgttgccgtagcaggttcggtaaaagtaccagagctgttcgtggtggaacccttccctgccgtgcatcatctggtcagcaccataacggcgcaactaccagaacagttacacgccagcgatctgctgcgcgcagcttttcctggtggctcaataaccggggctccgaaagtacgggctatggaaattatcgacgaactggaaccgcagcgacgcaatgcctggtgcggcagcattggctatttgagcttttgcggcaacatggataccagtattactatccgcacgctgactgccattaacggacaaattttctgctctgcgggcggtggaattgtcgccgatagccaggaagaagcggaatatcaggaaacttttgataaagttaatcgtatcctgaagcaactggagaagtaa

SEQ ID NO: 145265 - protein, 453 aa, Escherichia coli C str. ATCC 8739
MKTLSPAVITLPWRQDAAEFYFSRLSHLPWAMLLHSGYADHPYSRFDIVVAEPICTLTTFGKETVVSESEKRTTTTDDPLQVLQQVLDRADIRPTHNEDLPFQGGALGLFGYDLGRRFESLPEIAEQDIVLPDMAVGIYDWALIVDHQRHTVSLLSHNDVNARRAWLESQQFSPQEDFTLTSDWQSNMTREQYGEKFRQVQEYLHSGDCYQVNLAQRFHATYSGDEWQAFLQLNQANRAPFSAFLRLEQGAILSLSPERFILCDNSEIQTRPIKGTLPRLPDPQEDSKQAVKLANSAKDRAENLMIVDLMRNDIGRVAVAGSVKVPELFVVEPFPAVHHLVSTITAQLPEQLHASDLLRAAFPGGSITGAPKVRAMEIIDELEPQRRNAWCGSIGYLSFCGNMDTSITIRTLTAINGQIFCSAGGGIVADSQEEAEYQETFDKVNRILKQLEK

SEQ ID NO: 145266 - DNA, 1734 bp, Oryza sativa (japonica cultivar-group); identical to SEQ ID NO: 76246
  CDS (1)..(1734)

SEQ ID NO: 145267 - protein, 577 aa, Oryza sativa (japonica cultivar-group); identical to SEQ ID NO: 76247

SEQ ID NO: 145268 - DNA, 1377 bp, Vibrio cholerae O1 biovar eltor str. N16961
  CDS (1)..(1377): transl_table=11
atgaataacaaccaaactttgtcaattgaacacaaaaaattaacttatcaccctgatattgctaaacaatttttcacatccattgagcagcaaccttgggcaatgctgctgcgctctgcgtctaccacccatatggatagccgctttgatattctggtcgccaatcctttcgccactttagtgacttttggtgatgaaactgaaattcacgcccagaacggcgtgacattgtcacgagaagatccttttgcgcttcttgctgacatccaagagcagtatcttcctcaagtgactgatgagtcggagttaccttttgttggcggtgctctggggtatttttcctatgatttaggacgccgagtcgaagtcctccctagcttagcagaacaagatattgctatgcccgatatggccgtgggcatctattcttgggcgctcgtggtcgatcaccaacagcacaccgcgcaattggtcggacaaaatgttgaagacgcttggggttggttaaaccaacaagaggcgataaagccaagcgaagtaactgactttgctctcacatcgccttggcgatccaatatgagctataccgcctatcaagataaatttgctcgtgtacaggactatttacgctcgggagactgttaccagatcaacctcgcgcagcgttttcaggctcactacactggtagtgaatggcaagcgtatttgaagctggaaaaaggtaatcaagcgcccttctccgcctttttgcgtttgccacaaggcgcaattttgagtgtttctccagaacgttttctgcaagtttgtgatcgagtgattgaaaccaaaccgatcaaaggcacacgtccacgccatgccgacaagcaacaagatgccctactcaagcaagatttagtcagcgcagaaaaagatcaggccgagaatttaatgattgtcgatctgctgcgtaatgatattggtcgtgtggcaaagccgggtagcgtgcatgtacctaagttgtttgatgtcgaaagctttcccgccgtgcaccatctggtgagcacgattcgcgcaacactggatgagcaataccaagccgccgatctgttacgcgcctgttttcccggcggttcgattacgggagcgcccaaagtgcgggcaatggaaatcattgaggagctcgagccgcatcgccgtagcgcttattgtggctcaattggctatctcagccgtcatggaaaaatggataccagcatcacgatccgcactttagtggcctatcagcagcagctttacgcttgggcgggtggcggcttggtggctgacagcgaaggcgctgcggagtatcaagaaacgctagataagttaagccgaattcttccaaccctagaatcctaa

SEQ ID NO: 145269 - protein, 458 aa, Vibrio cholerae O1 biovar eltor str. N16961
MNNNQTLSIEHKKLTYHPDIAKQFFTSIEQQPWAMLLRSASTTHMDSRFDILVANPFATLVTFGDETEIHAQNGVTLSREDPFALLADIQEQYLPQVTDESELPFVGGALGYFSYDLGRRVEVLPSLAEQDIAMPDMAVGIYSWALVVDHQQHTAQLVGQNVEDAWGWLNQQEAIKPSEVTDFALTSPWRSNMSYTAYQDKFARVQDYLRSGDCYQINLAQRFQAHYTGSEWQAYLKLEKGNQAPFSAFLRLPQGAILSVSPERFLQVCDRVIETKPIKGTRPRHADKQQDALLKQDLVSAEKDQAENLMIVDLLRNDIGRVAKPGSVHVPKLFDVESFPAVHHLVSTIRATLDEQYQAADLLRACFPGGSITGAPKVRAMEIIEELEPHRRSAYCGSIGYLSRHGKMDTSITIRTLVAYQQQLYAWAGGGLVADSEGAAEYQETLDKLSRILPTLES

SEQ ID NO: 145270 - DNA, 1575 bp, Caulobacter crescentus CB15
  CDS (1)..(1575): transl_table=11
gtggttacaaggtcggccataggccctccaacaatccagccgtctttcgtcattgccctgtccggagggagcgtacccactcaccctcccaccgcttcgcggtgggcccctccctctctccgtgagagaggggttccgtgtggcgtcccctcagggtcgggaaccgtaagcgctcgccacccacccccaaaccgcccgaggggcctcgcactggtctccgtccgtcgagcccgctatcaccacgccatgcggcatgtcgctctcctcaccgccccgtggcgcgagccggtctgggcgttggcgcccttccgggacgagccttacgcctgcgcgctggtcaccggcggggcggggcggtggtcgtatctgttgcgcgcgcccgacgcgacgatgagcctgtcggacaaggacccagccgatcccttcgcggccctcgccgcgctggtcggcccgcgcctgcccagccatcccgaaggcccgccgttccagggcggggtggtgggcctgggcgcctatgagctgggcgaccgggtcgaggacctggggctttcgcgcaccgactggccggacctgacctgcgcccgctaccccgccctgctggccttcgaccatcacgcgcgtcaggtgatcgcggtggggcgcggcgaggctgaggccgaggcgaacgcgcgcgccgccgacgccctggcctggctggaggtcgccgcgcctgagcgcgccgaacccgccggcccgctctgcgccgatctcgtcgccagcgaccccgccacctatgaaaccgccgtggcgcaggtggtcgcgcggatcgtcgggggcgagatcttccaggccaatatcgcccgcgcctggacggggcggctggcggcgggcgttgacccgttcgacctgttcgtgcgcctgcgcgcgcagagccccgcgccgttctcggcctattggcgcctgcccggccgggcgctggtctccaactcgcccgagcggttcctgaagctggatgcggcgggggcgatccagacccagccgatcaagggcacccgcccccggggccgcgatcctgtcgaggaccgcgccctggccgccgagctgctggccagcgacaaggaccgggccgagaacctgatgatcgtggatctgatgcgcaatgacctggcgcgggtgtcgccggccggcagcgtccgcgcgccggaactgttcaaggtcgagagcttcgccaacgtccatcacctggtctcgaccgtcaccgcgcgtctggcgccgggacgcggcgtcgccgacctgctgcgggccagcttcccgccgggctcgatcaccggcgcgccgaaggtccaggccatgaaggtgatcgccgagcttgagccgccgcgcgggccctattgcggcagcctgttctgggccggggtcgacggagcgttcgactccagcgtcctgatccgcaccgtcggccttgtgcaggacggcgcgggctggcgactggaggcccgggcgggggcggggatcgtcgccgacagcgatccgcgcggcgagcgcctggagaccgaggccaagatcgcggccctgaagacggcgctgacccaatga

SEQ ID NO: 145271 - protein, 524 aa, Caulobacter crescentus CB15
MVTRSAIGPPTIQPSFVIALSGGSVPTHPPTASRWAPPSLRERGVPCGVPSGSGTVSARHPPPNRPRGLALVSVRRARYHHAMRHVALLTAPWREPVWALAPFRDEPYACALVTGGAGRWSYLLRAPDATMSLSDKDPADPFAALAALVGPRLPSHPEGPPFQGGVVGLGAYELGDRVEDLGLSRTDWPDLTCARYPALLAFDHHARQVIAVGRGEAEAEANARAADALAWLEVAAPERAEPAGPLCADLVASDPATYETAVAQVVARIVGGEIFQANIARAWTGRLAAGVDPFDLFVRLRAQSPAPFSAYWRLPGRALVSNSPERFLKLDAAGAIQTQPIKGTRPRGRDPVEDRALAAELLASDKDRAENLMIVDLMRNDLARVSPAGSVRAPELFKVESFANVHHLVSTVTARLAPGRGVADLLRASFPPGSITGAPKVQAMKVIAELEPPRGPYCGSLFWAGVDGAFDSSVLIRTVGLVQDGAGWRLEARAGAGIVADSDPRGERLETEAKIAALKTALTQ

SEQ ID NO: 145272 - DNA, 1362 bp, Shigella flexneri 2a str. 301
  CDS (1)..(1362): transl_table=11
atgaagacgttatctcccactgtgattactttaccctggcgtcaggacgccgctgaattttatttctcccgcttaagccacctgccgtgggcgatgcttttacactccggctatgccgatcatccgtatagccgctttgatattgtggtcgccgatccgatttgcactttaaccactttaggtaaagaaaccgttgttagtgaaagcgaaaaacgcacaacgaccactgatgacccgctacaggtgctccagcaggtgctggatcgcgcagacattcgcccaacgcataacgaagatttgccatttcagggcggcgcactggggttgtttggctacgatctgggccgccgttttgagtcactgccagaaattgcggaacaagatatcgttctgccggatatggcagtgggtatctacgattgggcgctcattgtcgaccaccagcgtcatacagtttctttgctgagtcataatgatgtcaatgcccgtcgggcctggctggaaagccagcaattctcgccgcaggaagatttcacgctcacttccgactggcaatccaatatgacccacgagcagtacggcgaaaaatttcgccaggtacaggaatatctgcacagcggtgattgctatcaggtgaatctcgcccagcgttttcatgcgacctattctggcgatgaatggcaggcattccttcagcttaatcaggccaaccgcgcgccatttagcgcttttttacgtcttgaacagggtgcaattttaagcctttcgccagagcggtttattctttgtgataatagtgaaatccagacccgcccgattaaaggcacgctaccacgcctgcccgatcctcaggaagatagcaaacaagcagaaaaactggcgaactcagcgaaagatcgtgccgaaaatctgatgattgtcgatttaatgcgtaatgatatcggtcgtgttgccgtagccggttcggtaaaagtaccagagctcttcgtggtggaacccttccctgccgtgcatcatctggtcagcactataacggcgcgactaccagaacagttacacgccagcgatctgctgcgcgcagcttttcctggtggctcaataaccggggctccgaaagtacgggctatggaaattatcgacgaactggaaccgcagcgacgtaatgcctggtgcggcagcattggctatttgagcttttgcggcaacatggataccagcattactatccgcacgctgactgccattaacggacaaatatactgctctgcgggcggtggaattgtcgccgatagccaggaagaagcggaatatcaggaaacttttgataaagttaataagatattacgccaactggagaagtaa

SEQ ID NO: 145273 - protein, 453 aa, Shigella flexneri 2a str. 301
MKTLSPTVITLPWRQDAAEFYFSRLSHLPWAMLLHSGYADHPYSRFDIVVADPICTLTTLGKETVVSESEKRTTTTDDPLQVLQQVLDRADIRPTHNEDLPFQGGALGLFGYDLGRRFESLPEIAEQDIVLPDMAVGIYDWALIVDHQRHTVSLLSHNDVNARRAWLESQQFSPQEDFTLTSDWQSNMTHEQYGEKFRQVQEYLHSGDCYQVNLAQRFHATYSGDEWQAFLQLNQANRAPFSAFLRLEQGAILSLSPERFILCDNSEIQTRPIKGTLPRLPDPQEDSKQAEKLANSAKDRAENLMIVDLMRNDIGRVAVAGSVKVPELFVVEPFPAVHHLVSTITARLPEQLHASDLLRAAFPGGSITGAPKVRAMEIIDELEPQRRNAWCGSIGYLSFCGNMDTSITIRTLTAINGQIYCSAGGGIVADSQEEAEYQETFDKVNKILRQLEK

SEQ ID NO: 145274 - DNA, 1362 bp, Escherichia coli CFT073
  CDS (1)..(1362): transl_table=11
atgaagacgttatctcccgctgtgattactttaccctggcgtcaggacgccgctgaattgtatttctcccgcttaagccacctgccgtgggcgatgcttttacactccggctatgccgatcatccatatagccgctttgatattgtggtcgccgagccgatttgcactttaaccactttcggtaaagaaaccgttgttagtgaaagcgaaaaacgcacaacgaccactgatgacccgctacaggtgctccagcaggtgctggatcgcgcagacattcgcccagcgcataacgaagatttgccatttcagggcggcgcgctggggttgtttggctacgatctgggccgccgttttgagtcactgccagaaattgcacagcaagatatcgttctgccggatatggctgtgggtatctacgactgggcgctggttgttgaccaccagcgtcaaacagtttctttgctgagtcataatgatgtcaatgctcgtcgggcctggctggaaagccagcaattctcgccgcaggaagatttcacgctcacttccgactggcaatccaatatgacccgcgagcagtacggcgaaaaatttcgccaggtacaggaatatctgcacagcggtgattgctatcaggtgaatctcgcccagcgttttcatgcgacctattctggcgatgaatggcaggcattccttcagcttaatcaggccaaccgcgcgccatttagcgcttttttacgtcttgaacagagtgcaattttaagcctttcgccagagcggtttattctttgtgataatagtgaaatccagacccgcccgattaaaggcacgctaccacgcctgcccgatcctcaggaagatagcaaacaagcagaaaaactggcgaactcagcgaaagatcgtgccgaaaatctgatgattgtcgatttaatgcgtaatgatatcggtcgtgttgccgtagcaggttcggtaaaagtaccagagctgttcgtggtggaacccttccctgccgtgcatcatctggtcagcaccataacggcgcaactaccagaacagttacacgccagcgatctgctgcgcgcggcttttcctggtggctcaataaccggggctccgaaagtacgggctatggaaattatcgacgaactggaaccgcagcgacgcaatgcctggtgcggcagcattggctatttgagcttttgcggcaacatggacaccagcattactatccgcacgctgactgccattaacggacaaatttactgctctgcggggggtggaattgtcgccgatagccaggaagaagcggaatatcaggaaacttttgataaagttaataagatattacgccaactggagaagtaa

SEQ ID NO: 145275 - protein, 453 aa, Escherichia coli CFT073
MKTLSPAVITLPWRQDAAELYFSRLSHLPWAMLLHSGYADHPYSRFDIVVAEPICTLTTFGKETVVSESEKRTTTTDDPLQVLQQVLDRADIRPAHNEDLPFQGGALGLFGYDLGRRFESLPEIAQQDIVLPDMAVGIYDWALVVDHQRQTVSLLSHNDVNARRAWLESQQFSPQEDFTLTSDWQSNMTREQYGEKFRQVQEYLHSGDCYQVNLAQRFHATYSGDEWQAFLQLNQANRAPFSAFLRLEQSAILSLSPERFILCDNSEIQTRPIKGTLPRLPDPQEDSKQAEKLANSAKDRAENLMIVDLMRNDIGRVAVAGSVKVPELFVVEPFPAVHHLVSTITAQLPEQLHASDLLRAAFPGGSITGAPKVRAMEIIDELEPQRRNAWCGSIGYLSFCGNMDTSITIRTLTAINGQIYCSAGGGIVADSQEEAEYQETFDKVNKILRQLEK

SEQ ID NO: 145276 - DNA, 1410 bp, Bradyrhizobium japonicum USDA 110
  CDS (1)..(1410): transl_table=11
gtgaccgataacccgatgtacgttcgcgagttgcagtgggttgaacctgtcacagcgatgcgacgtcttgggcatcgatcgcatctcacgtttctcgatagcgcagcaaggcacgagctgcttgggcgctactcatatctaacgtgcgaccccttcagcacctacagggtcgcgaacggccaagccagttggaacggactgactctcgaggccgatccatggaaggtccttcgcacgctactcgcgaagtacccgcaagagcatcgtcccgatctcccgccattccagggaggagcggcaggctaccttgcctacgacatgaacaggacattggagcgattgtctgccccgccaattgccggtctgggtttgccccaatccatcctgcatttctatgacgtggtcatcagcttcgcccaccgggataacaaatgctggatcgtctcgaccggatggccggagcaggatcgcgtgcgacggagcgaacgagcgcttcgtcgagccgacgagtttgcagcattgcttgccggtccaaacgcgccacagaagggttgtcccagcaaagcgggcgcgtggcgctcgaacttcagccgcgacggctacattgcggcggtacaacgcgtgatcgacttgattctcgcgggtgacgtgttccagacaaatattgcgcagcgtttcagcacccgcctgtcgacctcgtttgatccgctcgccttctattgccagctacgatcattgaatccggcgccttttgcggccctgctgcgatggggaaagctgaccatcgcatcaagttcgccggaacgattcctgaaacttgaggggcgacaagtcgagacacgccccatcaagggcacgatagcgcgttcgcctgatcccaaggaagaccaccgccgtgcggctgctctcctcgcttccgaaaaggatcaggccgagaacacgatgattgtcgaccttttgcgtaacgatctgtcacgcgtttgcactgcgcattcggtcggggttccggccctatgcaatctcgagtcctatgcctcggtgcaccatctcgtgtcgatcgttacggggaaacttgccggagacgaagacgccgttagcctgctccgcgcttgctttcccggcggctccattacgggagcgccaaagccgcggtcgatggaaattattacagaaatcgagcgcatagcgcgagaggtctattgtggggcgatcggcttcatcggcttcaacgggcacatggacaccagtattgcgatccgcactgtcacgatcgacggcgacctggctgtgtttcatgcgggcagcggtataacggccctgtcgaagcccgaggccgaatacgaggaaacgctcaccaaggcagagcgaatctttgatgcatttggtactgaaccagctggtgcattttga

SEQ ID NO: 145277 - protein, 469 aa, Bradyrhizobium japonicum USDA 110
MTDNPMYVRELQWVEPVTAMRRLGHRSHLTFLDSAARHELLGRYSYLTCDPFSTYRVANGQASWNGLTLEADPWKVLRTLLAKYPQEHRPDLPPFQGGAAGYLAYDMNRTLERLSAPPIAGLGLPQSILHFYDVVISFAHRDNKCWIVSTGWPEQDRVRRSERALRRADEFAALLAGPNAPQKGCPSKAGAWRSNFSRDGYIAAVQRVIDLILAGDVFQTNIAQRFSTRLSTSFDPLAFYCQLRSLNPAPFAALLRWGKLTIASSSPERFLKLEGRQVETRPIKGTIARSPDPKEDHRRAAALLASEKDQAENTMIVDLLRNDLSRVCTAHSVGVPALCNLESYASVHHLVSIVTGKLAGDEDAVSLLRACFPGGSITGAPKPRSMEIITEIERIAREVYCGAIGFIGFNGHMDTSIAIRTVTIDGDLAVFHAGSGITALSKPEAEYEETLTKAERIFDAFGTEPAGAF

SEQ ID NO: 145278 - DNA, 1365 bp, Vibrio parahaemolyticus RIMD 2210633
  CDS (1)..(1365): transl_table=11
atggacaatcaattcattgattttaaagcgctggaatacgcaccagagtttgctcttcatctattttctcgcattcaacaccagccttggacgatgttgctgcgttctgcatcaaaaacgcatatcgatagtcgcttcgatgtattggttgccaacccaattgcaacgttagaaaccattgccgacagcacacaagttgaaacgccatcgaatgcctattcaattcaagatgacccattcacgctacttcatcagttgcaagaacagtggcttcctcacgttgagttaaataaagaattggatttgccttttgtcggcggagcgctcggttacttcagttacgatttaggtcgacgcgtagaaacaatgccagaacaggccgaaaaggatctcaacacgcctgatatggcggtaggtctgtatgaatgggccgtcgttgttgaccacaagcttaaaaaagcatgcttagtcggtcagaatatagagcaagcttggcaatggttagacaaacaagaagcggagcaaagtgtagacttcgctctgtccggcgattggcagtcaaacatgacgaaagagagctacgccactcgctttgacaaggtgcaagaatacttgttgagcggtgactgctatcagatcaatttggcgcaacgctttaacgcaccatatctaggcagcgagtggcaagcgtatctgaaattggagtccgccaaccaagcgccattctcagcgtttatccgtatgcctgagtcttcgattttgagtatctctccagagcgctttttagaactcaaagatcgcgtcattgaaacgaaaccaatcaaaggtactcgaccacgcagcgaagatccaaagcaagataacgctaatgcccatgacttgcagacagcggaaaaagatcaggcagaaaacctgatgattgtcgatttgctgcgtaatgacattggtcgagttgcatcaccgggtagcgttcacgtgccaaagctgtttgatattgaaagcttccctgccgtgcatcatttggtgagcaccattcgtgcgaatttggacgagcaatattctcctgcagatttgctacgagcgtgcttcccgggcggttcaattacgggcgcacctaaagttcgcgcaatgcagatcattgaagagttggagccacatcgacgcagcgcgtattgcggcagtattggctacatttctcgccatggtcgtatggataccagcatcaccatccgtactctcgtcgcggaaaatcacaaactgtacgcttgggctggcggcggcgtcgttgcagatagcgattgtgcctctgaatatcaagaaacgttggataagctttcaaagattttgccagcgctgcaatcgtag

SEQ ID NO: 145279 - protein, 454 aa, Vibrio parahaemolyticus RIMD 2210633
MDNQFIDFKALEYAPEFALHLFSRIQHQPWTMLLRSASKTHIDSRFDVLVANPIATLETIADSTQVETPSNAYSIQDDPFTLLHQLQEQWLPHVELNKELDLPFVGGALGYFSYDLGRRVETMPEQAEKDLNTPDMAVGLYEWAVVVDHKLKKACLVGQNIEQAWQWLDKQEAEQSVDFALSGDWQSNMTKESYATRFDKVQEYLLSGDCYQINLAQRFNAPYLGSEWQAYLKLESANQAPFSAFIRMPESSILSISPERFLELKDRVIETKPIKGTRPRSEDPKQDNANAHDLQTAEKDQAENLMIVDLLRNDIGRVASPGSVHVPKLFDIESFPAVHHLVSTIRANLDEQYSPADLLRACFPGGSITGAPKVRAMQIIEELEPHRRSAYCGSIGYISRHGRMDTSITIRTLVAENHKLYAWAGGGVVADSDCASEYQETLDKLSKILPALQS

SEQ ID NO: 145280 - DNA, 1365 bp, Salmonella enterica subsp. enterica serovar Typhi Ty2
  CDS (1)..(1365): transl_table=11
atgatgaagacgttatctcccactgttatcaccttaccctggcgtccggacgccgctgaacactattttgcgcccgtaaaccatttgccctgggcgatgctgctgcattcaggtgatgctattcatccctataaccgttttgatattctggtcgccgatcctgtcaccacactgaccacgcgcgcccaggaaaccacggtatgtactgcgcgcacgactaccgtcactctcgacgatccgttacacgttttgcagactcaactggaggcgctgccttttcatcctcagcctgaccctgacttaccctttcagggcggcgcgctgggtctgtttggttatgatttagggcggcgtttcgaaattctgcccgatactgccgcgcgcgatatcgctttacccgatatggcgattggcctttacgactgggcgctgattgtcgatcaccataaacaggtagtgtcgctgataagctatcacgatgcagacgcccgatatcgctggctcaccggccagcgcgcgccgacccgaacgcccttcaggcttacctcggcctggcaatccaatatgacgcgttgcgagtatggcgagaagtttcgtcaggtgcaggcctggctgcacagcggggactgctatcaggtcaatctttcccagcgttttcaggcgagctacgagggtgatgaatggcaggctttcgaacgccttaaccgcgcaaatcgcgccccgttcagcgcctttcttcgtttacatgacggcgccatattgagcctttctcccgagcgttttatccaactggagaacggtcatattcagacgcgcccgatcaaaggtacgcttccacggcttaacgatccgcaggcggatcgtcagcaggcgcagaaactggctaattcaatgaaagatcgcgctgaaaatttgatgattgtcgatttgatgcgtaacgacattggccgggtcgccgtaccaggttcggtgaaagtgccggaactgttcgtcgtcgaaccatttcctgccgttcaccatctggttagcaccattactgcccgtttaccagactcgcttcatgccaccgatctgctgcgcgcggctttccccggcggctccattaccggcgcgcctaaagtgcgggcaatggaaattatcgacgaactggagccgcagcgacgcaacgcctggtgcggtagcatcggttatctgagtttctgcggcaagatggataccagtattactatccgcaccgtcacggcaacgcagggccaactctattgctcagccggcggcggtatcgtggccgatagcaacgaagaagcggaatatcaggaaacttttgataaagttaatcgtatcctgcacccactggagaactaa

SEQ ID NO: 145281 - protein, 454 aa, Salmonella enterica subsp. enterica serovar Typhi Ty2
MMKTLSPTVITLPWRPDAAEHYFAPVNHLPWAMLLHSGDAIHPYNRFDILVADPVTTLTTRAQETTVCTARTTTVTLDDPLHVLQTQLEALPFHPQPDPDLPFQGGALGLFGYDLGRRFEILPDTAARDIALPDMAIGLYDWALIVDHHKQVVSLISYHDADARYRWLTGQRAPTRTPFRLTSAWQSNMTRCEYGEKFRQVQAWLHSGDCYQVNLSQRFQASYEGDEWQAFERLNRANRAPFSAFLRLHDGAILSLSPERFIQLENGHIQTRPIKGTLPRLNDPQADRQQAQKLANSMKDRAENLMIVDLMRNDIGRVAVPGSVKVPELFVVEPFPAVHHLVSTITARLPDSLHATDLLRAAFPGGSITGAPKVRAMEIIDELEPQRRNAWCGSIGYLSFCGKMDTSITIRTVTATQGQLYCSAGGGIVADSNEEAEYQETFDKVNRILHPLEN

SEQ ID NO: 145282 - DNA, 1293 bp, Coxiella burnetii RSA 493
  CDS (1)..(1293): transl_table=11
atgaaagcaaaaattatcgagctgccttactttgaggatggggctgaatgtttttcgcattttgcgcatttgccttatgctgtttttttagatggttgcgaacgttaccatgtcataacagcacagccgcgtaaaactattaccgacaatatatttattcaaactcgcgctgctttacacgaattaaaatcgactgtacaaattcctccgtcagtttcgcatttgccttttaaaatcggcgctatcgggtatttaagttacgatttagcgcgacattattttcccttaaaggcacaaactaaaatcgatatcacgcttcctttggcggtcatggggatatacgattggagcttagtcatcgaccatcatgagcaaaaaacatgggcaattgcattttcggatgaacagttacgccatatccaaacgcaattaattacgccagcacacattgacctcttccacctgcttaacgattttcattccaacatgacccgcgacgattacgcctttgcctttaaaaaaatccaacaccacttgaggcagggcgattgctatcaagtaaatctttgccaacgttttagtgccacgtatcaaggttcaccttggtacgcctatcgatatctgcgacaaacgcaccctactcccttttcgacgtactttaaccttgacaatcagagggcgattttaagcttttctccagaacggtttttgcgagtagaaaaaaaccaagtggaaacaaaacccattaaaggcaccgcacctcgatttaaagatccatttgaagaccagcgctcagcagaaagtttattaaatagtgaaaaagaccgtgctgaaaatttaatgattgtcgatttattacgaaatgatctgtcaaaatgctgcaaacctaactccattcgtgtacctaaattagttgcgctggaaagtttccccaatgtccatcatctcgttagcaccattacaggacatttgcaggataatcaagatgcgcttgatttattgcggcattgctttccgggcggctctatcacgggcgcgcctaaattgagcgcaatgcaaattattgaaagtctcgaaacgcatcaccgttccgtttattgtggtgcgctgggttatctcgatatcagcggcgatttggattgcaatattatgattcgcaccttaatttgtgatcgcaaccgaatacattgctatggcggtggcggcattgttgctgattctgaactggaaagtgaatatcaagagtctcaattaaaagtcgaaaaactgattaatcaagtgagccgtttatga

SEQ ID NO: 145283 - protein, 430 aa, Coxiella burnetii RSA 493
MKAKIIELPYFEDGAECFSHFAHLPYAVFLDGCERYHVITAQPRKTITDNIFIQTRAALHELKSTVQIPPSVSHLPFKIGAIGYLSYDLARHYFPLKAQTKIDITLPLAVMGIYDWSLVIDHHEQKTWAIAFSDEQLRHIQTQLITPAHIDLFHLLNDFHSNMTRDDYAFAFKKIQHHLRQGDCYQVNLCQRFSATYQGSPWYAYRYLRQTHPTPFSTYFNLDNQRAILSFSPERFLRVEKNQVETKPIKGTAPRFKDPFEDQRSAESLLNSEKDRAENLMIVDLLRNDLSKCCKPNSIRVPKLVALESFPNVHHLVSTITGHLQDNQDALDLLRHCFPGGSITGAPKLSAMQIIESLETHHRSVYCGALGYLDISGDLDCNIMIRTLICDRNRIHCYGGGGIVADSELESEYQESQLKVEKLINQVSRL

SEQ ID NO: 145284 - DNA, 1488 bp, Nitrosomonas europaea ATCC 19718; identical to SEQ ID NO: 76356
  CDS (1)..(1488): transl_table=11

SEQ ID NO: 145285 - protein, 495 aa, Nitrosomonas europaea ATCC 19718; identical to SEQ ID NO: 76357

SEQ ID NO: 145286 - DNA, 1386 bp, Candidatus Blochmannia floridanus
  CDS (1)..(1386): transl_table=11
atgactgcaaatcttatagaatttccttatcatcctcattcttcattaaaactttttaaatctctatcttctaatccatggtctatattattatattccggttatgataataaacatccagatagtcgttttgatatattagtaactaatccgagtttaacactaactacatatgataaaatcactaccatttcatacaataacaaaaataaaactagcaatcaagatccttttttattattaaaaaaatatacacaaatctaccaattaaaaacagatcacaattatcctatcccattccaaggaggattcataggtgtgtttggatacgatttagtaagaaatatcgaattaataccaaccctcgcccaaaaagacattcatttaccagatatggcaataggtttttataaatgggctatcatttctgaccacaagactctaaaaaattatttagttacacataacgatcctaaaccaattttaaattggattcatcaacaatatgcatataatgataaacatatgcaatcatttcaactattaaatgcatggcaaagtaatattacaataaatgagtactcaaaaaaatttaaaatcattaaaaaacatttaaaaatgggtaattgttatcaaatatgcctatctcaacgttttaaagctccatacatagggcatgaatggacagcttttcgttatttattaaattacaatacagctcctttttctgcatttattagattaccaaattattcaagtatattaagtttttctccagaacgtttcataaaattaaaaaattcaaacattattacccagccaatcaaaggcacattagtgaaattaaaaaataccaaagaagatcaaaaacaaaaacaaaaattatcgcaatctagcaaggaccaatcagaaaacctcatgatagttgacttattaagaaatgatattggaaaagtagccattccaggtagtattcaagttactcgattatttgaaatccaatcattttctcaagtacatcatatggttagtacaattattggaaaacttgataataaattttcagctatagatttactaaaagcatgttttccaggaggatccattacaggagctccaaaaatccaagctatgaaattaatcgaaacacttgaaccacatcgtagaagtgtatggtccggtagcataggatatttaagttgctgtggcaatatggatactaatatcagtattagaactttattaactaataaatacaatcttttttgtactgttggcagcggaattatatttgaaagcaaacaagatctcgaatatcaggaaatgcaagataaaatctctactctgttaacaccattatcacaatataaccataaaaaatcttag

SEQ ID NO: 145287 - protein, 461 aa, Candidatus Blochmannia floridanus
MTANLIEFPYHPHSSLKLFKSLSSNPWSILLYSGYDNKHPDSRFDILVTNPSLTLTTYDKITTISYNNKNKTSNQDPFLLLKKYTQIYQLKTDHNYPIPFQGGFIGVFGYDLVRNIELIPTLAQKDIHLPDMAIGFYKWAIISDHKTLKNYLVTHNDPKPILNWIHQQYAYNDKHMQSFQLLNAWQSNITINEYSKKFKIIKKHLKMGNCYQICLSQRFKAPYIGHEWTAFRYLLNYNTAPFSAFIRLPNYSSILSFSPERFIKLKNSNIITQPIKGTLVKLKNTKEDQKQKQKLSQSSKDQSENLMIVDLLRNDIGKVAIPGSIQVTRLFEIQSFSQVHHMVSTIIGKLDNKFSAIDLLKACFPGGSITGAPKIQAMKLIETLEPHRRSVWSGSIGYLSCCGNMDTNISIRTLLTNKYNLFCTVGSGIIFESKQDLEYQEMQDKISTLLTPLSQYNHKKS

SEQ ID NO: 145288 - DNA, 1443 bp, Bacillus cereus ATCC 10987; identical to SEQ ID NO: 76400
  CDS (1)..(1443): transl_table=11

SEQ ID NO: 145289 - protein, 480 aa, Bacillus cereus ATCC 10987; identical to SEQ ID NO: 76401

SEQ ID NO: 145290 - DNA, 1527 bp, Kluyveromyces lactis NRRL Y-1140; identical to SEQ ID NO: 76408
  CDS (1)..(1527)

SEQ ID NO: 145291 - protein, 508 aa, Kluyveromyces lactis NRRL Y-1140; identical to SEQ ID NO: 76409

SEQ ID NO: 145292 - DNA, 1470 bp, Aspergillus nidulans FGSC A4; identical to SEQ ID NO: 76414
  CDS (1)..(1470)

SEQ ID NO: 145293 - protein, 489 aa, Aspergillus nidulans FGSC A4; identical to SEQ ID NO: 76415

SEQ ID NO: 145294 - DNA, 1455 bp, Erwinia carotovora subsp. atroseptica SCRI1043; identical to SEQ ID NO: 76456
  CDS (1)..(1455): transl_table=11

SEQ ID NO: 145295 - protein, 484 aa, Erwinia carotovora subsp. atroseptica SCRI1043; identical to SEQ ID NO: 76457

SEQ ID NO: 145296 - DNA, 1497 bp, Desulfotalea psychrophila LSv54; identical to SEQ ID NO: 76460
  CDS (1)..(1497): transl_table=11

SEQ ID NO: 145297 - protein, 498 aa, Desulfotalea psychrophila LSv54; identical to SEQ ID NO: 76461

SEQ ID NO: 145298 - DNA, 1377 bp, Yersinia pseudotuberculosis IP 32953
  CDS (1)..(1377): transl_table=11
atgtgtgagaaatttttaaccgtcaaagagttaccttatcaccctgatgccctgcttcaacaattcaccccacttgccaaccaagcttgggcgatgttgttgcactcaggatttgctcaacacccccatagtcgctttgatatcttggtcgctgatccaaaaataacgctgacaactcatggggataaaacggttattgtcagtgatcaggggcaggaaacctccctcgcggatcccttctctttgctgcagcagcaactggataaattcgccccagcgatgcctgctcaccctgatctgccgtttcagggcggagcgttagggctatttggttacgacttaggccgccgagttgaaaaattgcctgaactggcggcgcacgatatcgccttgccggatatggccattggcctgtatgactgggcgctcattgctgaccactctcggcagaagctcacgctggtatcccttggcgatgccgaacagcgcttgcattggctgcatcagcaaacaaccgatgagaacctcgtccccttcaaactcacggttccatggcaggcagatatgtcacgggagcagtacggcgaaaaattccgccaaattcaagcgtatctgcgtagcggtgactgttaccaaatcaatctggcacaaagattcagcgcagagtatcagggggatgaatggcaagcatttctgtcactgagtcgtagcaatcaagcccccttttcagcttttattcgcttacccgacaacgccatattgagtgtttcaccagaacgtttcttgtggttggagaatcatcaggttcaaacccggccgattaaaggtacgctaccccgtttggccgatcctgagcaggatcgccagcaagctgagcgattggcgaattcagccaaagatcaggctgaaaatctcatgattgtggacttgctgcgtaacgatattggccgtgtcgcacgtccgggtagcgtccgcgtaccagagctgtttgtggtggagccttttcctgcggtgcaccacttagtcagtacaattaccgcaatacttcccccaaaatgttcgccgaccgaattactgcgcgcctgtttccccggcgggtcaattactggtgcccccaaggtccgagcaatggaaattattgaacaactcgaaccctatcgacgcaatgcttattgcggtaacattggctacataagttgctgcggcaccatggataccaatattactatccgtaccctgatgacagagaacggtaagatatattgttctgccggaggggggattgtcgccgacagccaagagcaagctgaatatcaagaaacgttcgataaggtcgcccgtattttaccgcaactgggggagtgtgttatttcgtga

SEQ ID NO: 145299 - protein, 458 aa, Yersinia pseudotuberculosis IP 32953
MCEKFLTVKELPYHPDALLQQFTPLANQAWAMLLHSGFAQHPHSRFDILVADPKITLTTHGDKTVIVSDQGQETSLADPFSLLQQQLDKFAPAMPAHPDLPFQGGALGLFGYDLGRRVEKLPELAAHDIALPDMAIGLYDWALIADHSRQKLTLVSLGDAEQRLHWLHQQTTDENLVPFKLTVPWQADMSREQYGEKFRQIQAYLRSGDCYQINLAQRFSAEYQGDEWQAFLSLSRSNQAPFSAFIRLPDNAILSVSPERFLWLENHQVQTRPIKGTLPRLADPEQDRQQAERLANSAKDQAENLMIVDLLRNDIGRVARPGSVRVPELFVVEPFPAVHHLVSTITAILPPKCSPTELLRACFPGGSITGAPKVRAMEIIEQLEPYRRNAYCGNIGYISCCGTMDTNITIRTLMTENGKIYCSAGGGIVADSQEQAEYQETFDKVARILPQLGECVIS

SEQ ID NO: 145300 - DNA, 1323 bp, Legionella pneumophila subsp. pneumophila str. Philadelphia 1
  CDS (1)..(1323): transl_table=11
ttgattgatagtactcttattacacttgactaccatgatttttcatctgaatcctatgaaaaattcagtcgtttacctggatttgtcctgcttcagagtacagacaagtcaacggggcgttatgatattttaagtgcttatccatatgagaggatggttattgagaataatgtacatgataaagatttagtattaacagaattaaaaaataaactaaaaatagaggagtcagaatttgatcttccttttcagggcggggccataggctacgtttcttacgactttggttcactcttacataatcatgaacaatattcacaaaaagatctggcgcatatacctgttttaaatttcggattttatgattgggctatcatagttgatcaccatttaaaaaaggccactttatttgcgagaaatagccattcttcaacaaaaagcgttgtagataaaataaagaatatattgaatgatcaacccatgaaatcggtacaattttcagttcaagctgaatttttgcctttaatatcaaaagagaactacaggagctcattcaatgccattcaacaagccctgagagcaggacgctcttatcaggttaatttcacgcaaccgtttcaaacaaaattcaccggggatctctgggatatgtaccaaagggttaacaaaaataaccctgtcccctatgctgcttttatcagaactgaggaagctgacatattgagcttttctcctgagcgatttttactttatgacaacggtgaaatgttaacttcgcccataaaaggcactatccaccgatcgaaagatcctgttgtagataaaaaattaaaagaacagttattgaaatgccctaaaaacaaggctgaaaatgtcatgattgtcgatttgctaagaaacgatctagggaaacttgccaaggctggcagtgtaaaggtaatgaatctttgccacatccagagcttcaatgcagtacatcatttggtttccgacataagagctctatgcaaagaggatattcatccaattgaagcatttttctcctgttttccaggtggttcaattaccggggcgcctaaattagagacgatgaaaattatcagtgaacaggaaacctataaaagaggggtctattgcggttgcatagcctatttttcacaacatggccgtttcgatgccaatatcgcgatacgtacggtgacagccaaagataatgttttatatttggcagcaggagggggaatagttattgactccgattgggaagatgaatatcgtgaatgtttcacaaaaattactgcaattatcaatggaatcaaataa

SEQ ID NO: 145301 - protein, 440 aa, Legionella pneumophila subsp. pneumophila str. Philadelphia 1
MIDSTLITLDYHDFSSESYEKFSRLPGFVLLQSTDKSTGRYDILSAYPYERMVIENNVHDKDLVLTELKNKLKIEESEFDLPFQGGAIGYVSYDFGSLLHNHEQYSQKDLAHIPVLNFGFYDWAIIVDHHLKKATLFARNSHSSTKSVVDKIKNILNDQPMKSVQFSVQAEFLPLISKENYRSSFNAIQQALRAGRSYQVNFTQPFQTKFTGDLWDMYQRVNKNNPVPYAAFIRTEEADILSFSPERFLLYDNGEMLTSPIKGTIHRSKDPVVDKKLKEQLLKCPKNKAENVMIVDLLRNDLGKLAKAGSVKVMNLCHIQSFNAVHHLVSDIRALCKEDIHPIEAFFSCFPGGSITGAPKLETMKIISEQETYKRGVYCGCIAYFSQHGRFDANIAIRTVTAKDNVLYLAAGGGIVIDSDWEDEYRECFTKITAIINGIK

SEQ ID NO: 145302 - DNA, 1407 bp, Methylococcus capsulatus str. Bath; identical to SEQ ID NO: 76482
  CDS (1)..(1407): transl_table=11

SEQ ID NO: 145303 - protein, 468 aa, Methylococcus capsulatus str. Bath; identical to SEQ ID NO: 76483

SEQ ID NO: 145304 - DNA, 1362 bp, Pseudomonas fluorescens Pf-5
  CDS (1)..(1362): transl_table=11
atggctgatttgccccgcatgttgacctgttccgtacacccgctcccctaccgcaccaaccccgccgagtatttcgcggcaatcgagcacgcccccggcgccgtgctgctggacagcggccggcccagcgccgagcgcgggcgctatgacctgctcagcgcctggcccctggcgcagttgaccgtggccgccgcagaaagcggcaggggctttctccagcgcctgcgggacaacctggggcaactgggcccggcgcaactacccgcgccttatgaactgcccttcgccggcggcctgatcggctacctcagctatgacttcggccgccatctggagcgcctgccaagccaggcccgggatgacctgcaactgcccgacgcacgctttggcctgtatgcctgggcgctgatcaacgaccaccaggcaggcaccagccagctggtgttccaccccagcctggatgacaccgagcgccagcgcctgattcaactgttcagccagccgctgcccgcgtcgcagccggcattcaagctgaccggcgccatgctggctgatctgagcgccgaggactaccgccaggcgttccagcgcatccagcactacattcaggccggcgactgctaccaggtgaacttcgcccagcgctttcgcggccagtaccagggtgatccctgggcggcctattgcgccctgcgcgccgcctgcccgaccccgttctcgggtttccagcggctgcccgaaggcggtgcggtgctgagcctgtcgccggagcgctttgtccacgtcagccagggccgggtggaaacccgcccgatcaaaggcacacgcccccgcggccgggatgccgcgcaagacgcggccaatgccgccgagctgctggccagccccaaggaccgggcggaaaacctgatgatcgtcgacctgctgcgcaacgacctggggcgcacctgccgcataggctcggtacgggtaccggagctgttcagcctggaaagctaccccaacgtgcaccacctggtgagcagcgtcactggcgagctggcggatggcaaggacgccctggacctgatcgccggcagctttcccggcggctcgatcaccggagcaccgaagatccgctcgatgcagatcatcgatgagctggaacccacgcggcgtgcgctgtactgcggttcgctgctgtacctggacgtgcgcggagaaatggacagttcgatcgccatccgcagcctgctggccaaggatgggcagatctgttgctggggcggcggcggaatagtcgcggattccgactggcaggaggaataccaggaatccatcaccaaggtgcgggtgttgctggaaacgctgcaggggctttag

SEQ ID NO: 145305 - protein, 453 aa, Pseudomonas fluorescens Pf-5
MADLPRMLTCSVHPLPYRTNPAEYFAAIEHAPGAVLLDSGRPSAERGRYDLLSAWPLAQLTVAAAESGRGFLQRLRDNLGQLGPAQLPAPYELPFAGGLIGYLSYDFGRHLERLPSQARDDLQLPDARFGLYAWALINDHQAGTSQLVFHPSLDDTERQRLIQLFSQPLPASQPAFKLTGAMLADLSAEDYRQAFQRIQHYIQAGDCYQVNFAQRFRGQYQGDPWAAYCALRAACPTPFSGFQRLPEGGAVLSLSPERFVHVSQGRVETRPIKGTRPRGRDAAQDAANAAELLASPKDRAENLMIVDLLRNDLGRTCRIGSVRVPELFSLESYPNVHHLVSSVTGELADGKDALDLIAGSFPGGSITGAPKIRSMQIIDELEPTRRALYCGSLLYLDVRGEMDSSIAIRSLLAKDGQICCWGGGGIVADSDWQEEYQESITKVRVLLETLQGL

SEQ ID NO: 145306 - DNA, 1494 bp, Colwellia psychrerythraea 34H
  CDS (1)..(1494): transl_table=11
ttgttccagacaatcactgccaaacacccaactactgttatctcagctaaagaactgtccctaaaaagtggcactacagcagaagccatatttgcccctatggctcaacaagcttgggctatgtggctagattcaggtaatagtgaacatattgatagccgttttgatattttagtgtggcagcccattgcaaccctaactgcacaaggtaatagcaccgaaatctgttttcctgatgtctatacccctgaaaagagtattagtgaaaaaagtactaaagacccactattattgcttaagcagcttcaggcacagttatttacaacacttcagtctccacatgagttcctgccttttttaggtggtgcattaggttatttctcctatgatttaggtcgtcgatttgagcaactacctaatttagcaaaacaggacattgatttacctgagatggccgttggtctttatgatcgcgccgttatttttgataaaaactcagcaaagttttacttagtttgccctgatgacaagcgagccgagattgaagtagcacttattaattcaactgtgagttcaaatataccgccagcaaaagctgatgtcacaactgataattttcacttaaccagtagctggcaatcaaacatggataaagccgattacattgaaaaatttgataaggtgcaaatttatttattgagcggtgattgttaccaaattaatttagcgcaacgctttagtgcccaataccaaggtgatgagtttgaagcttacttagccttaaaatcggcaaataaagcgccattctctgcttttattcgcttagaccatgctgccattttaagtgtatcccctgagcgatttttacagttatcgcaaggtaaggtacaaagtaaacccattaaaggcacaatgccgcgtagtgatgataaagttcaagatgctaaaaatgccgaaatactaaggcattcaagtaaagataatgctgaaaacttaatgattgttgatttactgcgtaatgacatcagtaaaagttgtcaagctggctcggtcaaggtacctaaactttttgatattgaaagcttccctgcggtacatcatttagtgagtaccgttgaaggcatacttgctagtgataaacatgccactgatttactgcgcggtgcctttccgggaggctctattacaggtgctcctaaaatacgcgcgatggaaatcattgaagagctagagccacaccgtcgcagtgtttattgcggctcaattggctacctctccaattgtggcactatggataccagtattaccattcgtaccttaatttgtcagccaagcgaaaagacttcaaaggaatcgtctaacagcgagaagacgattcattgctgggctggtggcgggttggtcgctgattcaactgcagaaagtgagtatcaagaaacttttgacaaagttaattgcattttaccggtattatcaaaactcaatcaggtgtag

SEQ ID NO: 145307 - protein, 497 aa, Colwellia psychrerythraea 34H
MFQTITAKHPTTVISAKELSLKSGTTAEAIFAPMAQQAWAMWLDSGNSEHIDSRFDILVWQPIATLTAQGNSTEICFPDVYTPEKSISEKSTKDPLLLLKQLQAQLFTTLQSPHEFLPFLGGALGYFSYDLGRRFEQLPNLAKQDIDLPEMAVGLYDRAVIFDKNSAKFYLVCPDDKRAEIEVALINSTVSSNIPPAKADVTTDNFHLTSSWQSNMDKADYIEKFDKVQIYLLSGDCYQINLAQRFSAQYQGDEFEAYLALKSANKAPFSAFIRLDHAAILSVSPERFLQLSQGKVQSKPIKGTMPRSDDKVQDAKNAEILRHSSKDNAENLMIVDLLRNDISKSCQAGSVKVPKLFDIESFPAVHHLVSTVEGILASDKHATDLLRGAFPGGSITGAPKIRAMEIIEELEPHRRSVYCGSIGYLSNCGTMDTSITIRTLICQPSEKTSKESSNSEKTIHCWAGGGLVADSTAESEYQETFDKVNCILPVLSKLNQV

SEQ ID NO: 145308 - DNA, 1476 bp, Geobacter metallireducens GS-15; identical to SEQ ID NO: 76536
  CDS (1)..(1476): transl_table=11

SEQ ID NO: 145309 - protein, 491 aa, Geobacter metallireducens GS-15; identical to SEQ ID NO: 76537

SEQ ID NO: 145310 - DNA, 1398 bp, Synechococcus elongatus PCC 7942
  CDS (1)..(1398): transl_table=11
atgaccgcgatcgcccgtcgagtcgtgcaacccttggtgcgggaaattgcttggtgcgatccgcagcaggcctttgcgcccttcgctcaagatccccatgcagtcctgctcgatctgggggagccagcaacgcccgaaagccgttacgcctacctctgtctgtcgccctatgccacccagcgaggcgatcgcttggtaactgaggctgatcctttccaggctttggcaacgtcactggccacagtagattggcagacgaattctgactctgacctgcctccatttcagggcggtatctgcggatttctgtcctatgaatgtggggcttggctggagcggctcccgacaccgaaaccggttgaacctcgactgccgctctggtcgttgagcctctatgacttggtggttgcctgcgatcgccagcaacggcgcacctggattttctcctcgggattgccgctgcaggatccgcgcgatcgccagcaacgggcggaacaacgactgcaatgggtctgcgatcgcctgcagtcagctctaccttcacagtctcctgattggcagcctcaggctgattggcaagccctgcaaactgaagctgacttttgtcaggctgtggatcaggtcaaatgccacattcgcgctggcgatatttttcaggccaacttaaccacggcttttcgcgccagtcagccaaaggatctgagcccttggcaactctatcgacggctctatcagctcagccccgaacctttttcggcctacttcgcagggggcgattttcagttgctctcggtgtcgccggagcgttttctgcgcctcgaccgcgatggttgggtagaaacgcgcccgattaagggaactcgtcctcgtagtgccgatccggctcacgatcgccagttagcgacggagttgcaggccagtgagaaggatcgggcagaaaacgtaatgatcgtcgacctcctgcgcaacgacttgggtcgcgtttgtcgtccccgctcgattcaggtgccccaactctgccaattggaaagctacgagcacgtccatcacctcacctcgcaggtgattggtcaactgcgatcgggcttgacggcggtggatttactgcgggcaacgttcccgggcggatcgattacgggagcgcctaaaatccgctcgatggaaattattcacgagcttgaaccgattccccgccaagcctactgtggcagtctcttttggctgggctttgacggcagcttagatgccagcattttgattcggacgctgcaaatcagccaaggccaagtccttgctcaagccggttgcggcatcgtcgctgactccgatccgctagacgaatgcgctgagatgcaggtcaaggtgcaacccctgttgcgatcgctccagccctcatga

SEQ ID NO: 145311 - protein, 465 aa, Synechococcus elongatus PCC 7942
MTAIARRVVQPLVREIAWCDPQQAFAPFAQDPHAVLLDLGEPATPESRYAYLCLSPYATQRGDRLVTEADPFQALATSLATVDWQTNSDSDLPPFQGGICGFLSYECGAWLERLPTPKPVEPRLPLWSLSLYDLVVACDRQQRRTWIFSSGLPLQDPRDRQQRAEQRLQWVCDRLQSALPSQSPDWQPQADWQALQTEADFCQAVDQVKCHIRAGDIFQANLTTAFRASQPKDLSPWQLYRRLYQLSPEPFSAYFAGGDFQLLSVSPERFLRLDRDGWVETRPIKGTRPRSADPAHDRQLATELQASEKDRAENVMIVDLLRNDLGRVCRPRSIQVPQLCQLESYEHVHHLTSQVIGQLRSGLTAVDLLRATFPGGSITGAPKIRSMEIIHELEPIPRQAYCGSLFWLGFDGSLDASILIRTLQISQGQVLAQAGCGIVADSDPLDECAEMQVKVQPLLRSLQPS

SEQ ID NO: 145312 - DNA, 1485 bp, Syntrophus aciditrophicus SB; identical to SEQ ID NO: 76554
  CDS (1)..(1485): transl_table=11

SEQ ID NO: 145313 - protein, 494 aa, Syntrophus aciditrophicus SB; identical to SEQ ID NO: 76555

SEQ ID NO: 145314 - DNA, 1383 bp, Methylobacillus flagellatus KT
  CDS (1)..(1383): transl_table=11
atgctgaggcacgagcttccctaccaggttgatagtgctcccctgtttgcgaaaatagcgcaacgcccctgggccatataccttgatagcggtcgccccggcaacgaatacgggcgttacgatatcatggtcgccgatcctgtgatgacattcaccacccatgcgggcgtgacagaggtgcgtggccaagaaggggtgcaagcgtcacgtgaagatccgttttttctgttgaagcaggcgttgcagcaatatccgcgactgcagtcggatctaccttttactggcggggcagtcggatattttggctatgacctggcacggcatatcgaatccctgcccaatctggcgcaggatggcgaacacattccggagatgatggtcggcatctatgactgggctgtcattgtcgatcacgagaaacagcaagcctggctggtatgctgtgccattgccgaagagcgcaaagctggctggaagtcgctatgcgcattgtttgacggacatttcacgcagcaggccagtagctttgctattgaaacaccagtgcgctcgaattttgatgctgcaagctatcaacatgcgtttgaacgcatccagcgttatatccacgaaggtgattgctaccaggtgaacctggcgcaacggtttagcgcagcggccagtggtgacgcctggcaggcctatcaatacttgcgcagcatcggaccggcgccattcatggcattcatgaacctgcccggcttgcaggtgctctcagattcgccggagcgctttcttcaggtcaccggccgtcatgtggaaacccgtccgatcaaaggcacccggcctcgctcatctgatgccgatgaagatgagcgccaggcagccgacctgaaaagcagccttaaagacagggctgagaatctcatgatcgtggacttgctgcgcaacgatatcggcaagagttgcgcgatcggttccgtcagagccgaccgcctgttcgtgctggaaagctatgccaatgtgcaccatctggtcagcgccgtgaccgggaagctggccgatcaatttgaggctgttgatctattgcgcggcgcatttcccggtggttccatcacaggggcacccaagctcagagccatggaaatcatcgaagagctcgagccgcaccggcgcggtatctactgcggcgccattggatatatcgggtttgacggcaatatggataccaatattgccattcgtacggcagtttattctcacagggaaatccgtttctgggctggaggtggtatcgtagcggattcggaagcggataaagaatatcgcgaaacctgggacaaggcatcaaccatgctgaaactcgttgaacattttcggggtgaccaagatgtgggtaattaa

SEQ ID NO: 145315 - protein, 460 aa, Methylobacillus flagellatus KT
MLRHELPYQVDSAPLFAKIAQRPWAIYLDSGRPGNEYGRYDIMVADPVMTFTTHAGVTEVRGQEGVQASREDPFFLLKQALQQYPRLQSDLPFTGGAVGYFGYDLARHIESLPNLAQDGEHIPEMMVGIYDWAVIVDHEKQQAWLVCCAIAEERKAGWKSLCALFDGHFTQQASSFAIETPVRSNFDAASYQHAFERIQRYIHEGDCYQVNLAQRFSAAASGDAWQAYQYLRSIGPAPFMAFMNLPGLQVLSDSPERFLQVTGRHVETRPIKGTRPRSSDADEDERQAADLKSSLKDRAENLMIVDLLRNDIGKSCAIGSVRADRLFVLESYANVHHLVSAVTGKLADQFEAVDLLRGAFPGGSITGAPKLRAMEIIEELEPHRRGIYCGAIGYIGFDGNMDTNIAIRTAVYSHREIRFWAGGGIVADSEADKEYRETWDKASTMLKLVEHFRGDQDVGN

SEQ ID NO: 145316 - DNA, 1443 bp, Rubrobacter xylanophilus DSM 9941
  CDS (1)..(1443): transl_table=11
atgggcggggtgctgaggtcgcgaggggttgcgccgctggtagtcccggtggggctctccccggtggaggcgatgccgcgggtgctgggcctgcggcgtccggtgctgctggacgggggcatgccgggcggctgggacgaggggcgctcctacctcgcggcggagccctttctggtggtgcgcagccgggggcggtgggtcgaggtggagggcccggaggggcggcgggctatggaggccgaccccttcgcggtgctctcggggctgctcgcccgctacagggtggagcgccggcccgggctaccgccgctcgccggcggcgcgatagggtacttcgggtacgacctggggaggcttctggagaggctgccggagctcaacgcggacgacgcgccgcttccggagatggaggtggggttctacgactgggtgctggcgttcgaggggggtgcggggaggggctgcatcgtctccaccggcctgccgcagggcacggaggaggcggcccgggggaggctggaggaggtggtggcgctgctggagggaagggctggtagcctgcggggaggggcggaggcgactccgcccctgcgctttcgctccgacaccgggagggggacgtacgagggggcggtggagcgggcccgggagtacatccgggccggggacgtcttccaggtcaacctctcgcaccggctgcgggcggaggcgccgcggccggtggaaggctggggggtcggggcctggccgctgtacaggaggctcagggagcgctccccggtcccccacggggcatacctggggctgggggaggccgcggtgctcagcgcctccccggagcggtttctgcgcctcgcggggcggggcgtacagacccggcccatcaaggggacccgtccgcgcggccgcaaccccgaggaggaccggcgcatggcgcggctgctggcctccagcgccaaggaccgggcggagaacgtgatgatcgtggatttgctgcgcaacgacatcggcaaggtctgccgcaccggctcggtacgggtgccggagctctgcggcctcgaggggcacgcctccgtctggcacctggtcagcaccgtcgttggcgagctgcggcccggggcgggggtggtggagctgctcgcggcgtgcttcccggggggttcggtcacgggggcgcccaagatccgggcgatggagatcatcgaggagctcgagccggtgcggcggggggtgtactgcggggccatagggtacatcagcttctgcggggagatggacacgaacatcgccatccgcacgctggtgctggcggggaacgaggcgcacctgcaggtcggcggcgcggtggtcgccgactccgatccgcgggccgagtacgacgagacgctggccaaggcccgggcggtggtggaggggctgggcgcgcggctggaggagcgatga

SEQ ID NO: 145317 - protein, 480 aa, Rubrobacter xylanophilus DSM 9941
MGGVLRSRGVAPLVVPVGLSPVEAMPRVLGLRRPVLLDGGMPGGWDEGRSYLAAEPFLVVRSRGRWVEVEGPEGRRAMEADPFAVLSGLLARYRVERRPGLPPLAGGAIGYFGYDLGRLLERLPELNADDAPLPEMEVGFYDWVLAFEGGAGRGCIVSTGLPQGTEEAARGRLEEVVALLEGRAGSLRGGAEATPPLRFRSDTGRGTYEGAVERAREYIRAGDVFQVNLSHRLRAEAPRPVEGWGVGAWPLYRRLRERSPVPHGAYLGLGEAAVLSASPERFLRLAGRGVQTRPIKGTRPRGRNPEEDRRMARLLASSAKDRAENVMIVDLLRNDIGKVCRTGSVRVPELCGLEGHASVWHLVSTVVGELRPGAGVVELLAACFPGGSVTGAPKIRAMEIIEELEPVRRGVYCGAIGYISFCGEMDTNIAIRTLVLAGNEAHLQVGGAVVADSDPRAEYDETLAKARAVVEGLGARLEER

SEQ ID NO: 145318 - DNA, 1404 bp, Shewanella sp. MR-7
  CDS (1)..(1404): transl_table=11
atggcaaatagggcggcattaccgctggcagtacgccaacttgactggactttcagcacagcagcaatcttcgagcaatttgcggcagaaccttgggccatattgctcgactcggccaatgcgccccatcaggacgctaaattcgatatgatttgcgcaggtcccatcgccaccctcatcacccaaggcgagctgactgacattcaagttcatcagcctgaattagccaaaccgactcacctcaccccgcaggatgacccttttacgctggtcaagcagttgctgctccattggtatccacactcttttggctgcgatttgccctttagtggcggcgccatgggcagctttagttatgatttaggccgccgaattgaacagcttccctgcacagctgcgcaggatattcacctcggcgagatgaatattggcttttacgactgggcattgattttcgattatcagcagcaaagctggtttatggtgcactatttaggggatgcagccctcgatactcaattgaaaataattgaatctaaaatagccaaacccacaaagcaggccgaatttcgtctcacaagcccttggtcggcgcagctcaccaaagcccagtacgccgcgaaatttaatcaagtacaggcgtatctgcatagcggcgattgctatcaaattaatttgacccagcgctttgaagcagagtatcaaggcgatgaatggcgcgcttactgcaagctgcgaagtgccaatcaagcccccttctccgcctttatgcggcttgatgccaacgcgattttatcgatttcgcccgagcgttttattcagctacgcggtgacgacattcaaaccaaaccgattaaaggcactctaccgcgccatagcgacccgatgctagataagcaagcggcgcaagcccttgcccattcgcccaaggatcgcgccgaaaacgtgatgattgtggatttactgcgcaatgacataggtaaagtcgcagcgcccggcactgtgcaagtgccacatctatttgccgtcgaaagctttcctgcggtgcaccatttagtcagtaccgttactgccaaactcgactcacaataccacgcctgtgacttgctgcgggcggcctttcctggcggctcgattaccggtgcgcctaaaatccgcgccatggaaattattgaagagctggaaccctcacgtcgcagtctgtattgtggctccatggggtatatcagccaagacggacaaatggacaccagtatcaccatccgcactatcgtggctgagcaaggtaaactctattgctgggcgggtggcggtatagtcgcggactctaatgtcgatgccgaatatcaagaaagcttcgataaagtcagtcgcatcttacccttgctagatagccatcaataa

SEQ ID NO: 145319 - protein, 467 aa, Shewanella sp. MR-7
MANRAALPLAVRQLDWTFSTAAIFEQFAAEPWAILLDSANAPHQDAKFDMICAGPIATLITQGELTDIQVHQPELAKPTHLTPQDDPFTLVKQLLLHWYPHSFGCDLPFSGGAMGSFSYDLGRRIEQLPCTAAQDIHLGEMNIGFYDWALIFDYQQQSWFMVHYLGDAALDTQLKIIESKIAKPTKQAEFRLTSPWSAQLTKAQYAAKFNQVQAYLHSGDCYQINLTQRFEAEYQGDEWRAYCKLRSANQAPFSAFMRLDANAILSISPERFIQLRGDDIQTKPIKGTLPRHSDPMLDKQAAQALAHSPKDRAENVMIVDLLRNDIGKVAAPGTVQVPHLFAVESFPAVHHLVSTVTAKLDSQYHACDLLRAAFPGGSITGAPKIRAMEIIEELEPSRRSLYCGSMGYISQDGQMDTSITIRTIVAEQGKLYCWAGGGIVADSNVDAEYQESFDKVSRILPLLDSHQ

SEQ ID NO: 145320 - DNA, 1353 bp, Alkalilimnicola ehrlichei MLHE-1
  CDS (1)..(1353): transl_table=11
atgcccgcgtattaccccatgccatatctggcggatggcacccggctgctacggcggatcgggcgccagccctggtgtcagtggctggacagcggctggccgggcagtggcgccggacggttcgacatcctggtgatgcgcccgcggatcaccctggaatcggccggtggccggacccgggtggccggtcggggcccggtgcaacaaaccgacgaggatccgctggcggtgttgcagcgctgcctgggtgaggccggtggtggcagccccagcgcgcactggcccttctcgggcggggcggtgggctacttcagttacgacctgggccggcggctgcacggcctgccggtgcggtccggggccggtccggagatgcgggtggggctgtacgactgggcactggtgaccgaccaccaccagcggttgaccgctgtgctgggcgaaatcgacgaggcctccctgctctggttgcggcaccaggtgttcgccgcccgggacggcgccgccccggcctttgccctgcgcgggccgttgcggcgggcgccggatgccgaacactacgggcgggcctttcaccgggtgcgcgattatctgcacgccggtgattgctaccaagtcaatctcgcccgccggtttcacgccgcctaccggggcgatccgctgggggcctggttgcgcatgcgtcgccgggcgcaggggccgttcggggcctggcagtgcttccccgacgagcaggtcctgtgtctgtcaccagagcggtttctacgcctgcaggggggcgaggtggatacccgccccatcaaggggacgcgcccccgtggcggggacccgcagcaggatcgccgcctggccgaggccctgcagcagagcccgaaggatcgggcggagaacgtcatgatcgtcgatctgctgcgcaatgacatcggccaggtgtgcgagaccggctcggtgcgggtaccggtcctctgccggctggagagttacccggcggtgcaccacctggtcagccacgtcagcggccggctggcgccgggacgcaccgccaccgacctgttgcgcgcctgcctaccgggcggctccatcaccggggccccgaaacggcgcgccatggagattatcgacgagctggagcccgggccccgcggtgtctactgtggggcgatcggttacatcggttggaatggcgacatggacaccaacatcgccatccggaccgccgtgtgccgcgatggcgagatccgctactgggccggtggtggcgtggtggccgactccgaggagcaggcagaactgtgtgaaacggtcgacaaggcccggccctttctgctgctggcggatgatggccggcggtag

SEQ ID NO: 145321 - protein, 450 aa, Alkalilimnicola ehrlichei MLHE-1
MPAYYPMPYLADGTRLLRRIGRQPWCQWLDSGWPGSGAGRFDILVMRPRITLESAGGRTRVAGRGPVQQTDEDPLAVLQRCLGEAGGGSPSAHWPFSGGAVGYFSYDLGRRLHGLPVRSGAGPEMRVGLYDWALVTDHHQRLTAVLGEIDEASLLWLRHQVFAARDGAAPAFALRGPLRRAPDAEHYGRAFHRVRDYLHAGDCYQVNLARRFHAAYRGDPLGAWLRMRRRAQGPFGAWQCFPDEQVLCLSPERFLRLQGGEVDTRPIKGTRPRGGDPQQDRRLAEALQQSPKDRAENVMIVDLLRNDIGQVCETGSVRVPVLCRLESYPAVHHLVSHVSGRLAPGRTATDLLRACLPGGSITGAPKRRAMEIIDELEPGPRGVYCGAIGYIGWNGDMDTNIAIRTAVCRDGEIRYWAGGGVVADSEEQAELCETVDKARPFLLLADDGRR

SEQ ID NO: 145322 - DNA, 1344 bp, Pseudoalteromonas tunicata D2
  CDS (1)..(1344): transl_table=11
atgataaacgaacaaatatcgtgcaaaaaattagacattcggctcaatacaactgaattgtttagtaaatttgcagatcaagcatgggcaatcttactcgattcagccaatccgaccaataaaaatgaccaatttgatatcatcagctttgcgccgattaatgtcgttgaagcaaaagaaggtcaatgtttcattgatggaaaagtggctaaagagtcgccttttagtgcgttaaaaaatctattagcccgttttagccaagccaaagcccctgagcacttaccttttacaggaggtttactcggttacttcgcttatgacttgggccgttacttagaaaccatgccaacactttgttgtcatgatattagcttacctgatatggctgtcgggctttaccctgatgcgcttgtttaccatcatggtcagcaatgctggttctatatcagccaaccaggttttgataggttggcactttatcaaacacagctcaatcacacagtgcaaaccgcatcttttagtctatgtagcgcttggttatcaaacatggataaaaccagttacagccaaaagtttagtcaaatacaggattacttacgctctggcgattgctatcaaatcaatctggctcagcgttttagtgcgcaattttgtggtgccccttggcaagcctatttaacgcttagagataaaaaccaagcgccattttccgcttatattaaccacccagatgggcaaattgcttctatttctcctgaacgctttattaaagtaaaagagggattagtcgaaaccaaacccataaaaggcactttagcgagaagctcagatccaattgaagataaacaacgggctgaacaactaaaacattcggctaaagatcgcgccgaaaatgtcatgattgttgatttattacgcaatgatttaggcaaagtcgccgcgcccggctctgtattagtgccacatttgtttgaaattgagagttatcctgccgtccatcaccttgtcagtactgtgacgtctattctggctgatgataagactgccttagatcaactcgaagctgcgtttccaggcgggtcaattacgggtgctccaaaaattcgcgccatggaaattattgaagaactcgaaccccatcagcgctcagtttattgtggctcgattggctatatctcagcgtgtggcaatatggataccagtatcaccattcgtacgttagtctttaatcaagcaaaagttcattgttgggctggtggcggaattgttgcagattcaaaagtagactctgagtatcaagaaacgtacgataaggtaaataaaattttacctgtactactgtga

SEQ ID NO: 145323 - protein, 447 aa, Pseudoalteromonas tunicata D2
MINEQISCKKLDIRLNTTELFSKFADQAWAILLDSANPTNKNDQFDIISFAPINVVEAKEGQCFIDGKVAKESPFSALKNLLARFSQAKAPEHLPFTGGLLGYFAYDLGRYLETMPTLCCHDISLPDMAVGLYPDALVYHHGQQCWFYISQPGFDRLALYQTQLNHTVQTASFSLCSAWLSNMDKTSYSQKFSQIQDYLRSGDCYQINLAQRFSAQFCGAPWQAYLTLRDKNQAPFSAYINHPDGQIASISPERFIKVKEGLVETKPIKGTLARSSDPIEDKQRAEQLKHSAKDRAENVMIVDLLRNDLGKVAAPGSVLVPHLFEIESYPAVHHLVSTVTSILADDKTALDQLEAAFPGGSITGAPKIRAMEIIEELEPHQRSVYCGSIGYISACGNMDTSITIRTLVFNQAKVHCWAGGGIVADSKVDSEYQETYDKVNKILPVLL

SEQ ID NO: 145324 - DNA, 1497 bp, Photobacterium sp. SKA34
  CDS (1)..(1497): transl_table=11
ttgcatgcacatctttgggcgtcgttctctgaatatgatactcttgcacttattattgcgctacgcgccaatcaaacttttgtcacaaaaaagaaaatgatttgtaaatcacatccagaattaagcattacatcgctcgcctactcaaaagatgcggcattaacatggtttgcaccactctcttctttgccatgggcaatgatattacgctcggcagcagagaatcatccagataaccgttttgacattgtcgttgccgatcctttagccactattgaatctgaaaatgggataagcaaggtctgttatgcaaatggtacagaagaaacgtataccggtgatccatttgcattcatacaatcagtacaagcgcaattattaccagcagttagtccaattacggcactgccatttattggtggagcgttaggctattttagttacgatttaggtcgtcaggttgaaaatatctcaacaatttctgaacatgatattccgctacctgatttagcattagggatctatgactgggcattaattgttgatcatcaagaacaaaccgtaacgctagtagaaccacaagggactaagcgtcaaacatggcttgaacaacaccttacggcattatcacaacaacaatccgcaacagatttaaaccctgtcgatagcttttccttaacatctacttggtcatccaatatgaccaaagaagattactgtaacaaatttaacaaaatccaagattatctgttgtctggtgattgttatcaaatcaacttggcgcagcgtttttctgccagctacactggtaatgaatggcaagcatatctaactcttgaagcagaaaacggagcgccattctctggttttatccgtttaaaacaaggtgcgattttatcggtatctccagagcgttttttacaacttcgtgatggactgattgaaactaaaccgattaaaggaactcgaccacgtagcaagaataccgttcaagataatgccaacgccctagcgcttcaaaatgctgaaaaagatcgtgcagaaaacttaatgattgtagatttactgcgtaacgatattggtcgcgttgccacacccggtactgttcgagtaccacacctttttaagattgaaagtttccctgccgtacatcacttagttagtacagtctcaggcgaattaccagcggatcacagtgcgacagatctattaaaagcatgtttccccggtggttcgataacaggtgctccaaaagtacgagcaatggaaattattgaagagttagaaccgcaccgccgcagcatttattgtggcagcatcggttatatcagtcgttgtggcacaatggataccagtattacgattcgtacattggtcactaatgaacataaaattcatgcgtgggctggaggcggaatagttgctgatagtgatccagatagcgaatatcaagaaacactcgacaaattgagtaagattctgccaaccttacaatag

SEQ ID NO: 145325 - protein, 498 aa, Photobacterium sp. SKA34
MHAHLWASFSEYDTLALIIALRANQTFVTKKKMICKSHPELSITSLAYSKDAALTWFAPLSSLPWAMILRSAAENHPDNRFDIVVADPLATIESENGISKVCYANGTEETYTGDPFAFIQSVQAQLLPAVSPITALPFIGGALGYFSYDLGRQVENISTISEHDIPLPDLALGIYDWALIVDHQEQTVTLVEPQGTKRQTWLEQHLTALSQQQSATDLNPVDSFSLTSTWSSNMTKEDYCNKFNKIQDYLLSGDCYQINLAQRFSASYTGNEWQAYLTLEAENGAPFSGFIRLKQGAILSVSPERFLQLRDGLIETKPIKGTRPRSKNTVQDNANALALQNAEKDRAENLMIVDLLRNDIGRVATPGTVRVPHLFKIESFPAVHHLVSTVSGELPADHSATDLLKACFPGGSITGAPKVRAMEIIEELEPHRRSIYCGSIGYISRCGTMDTSITIRTLVTNEHKIHAWAGGGIVADSDPDSEYQETLDKLSKILPTLQ

SEQ ID NO: 145326 - DNA, 1338 bp, Oceanospirillum sp. MED92
  CDS (1)..(1338): transl_table=11
ttgatcacgcaacgctcccttccttacctgacctcaagcgaaccttattttgaaaaggttcgagaactggggcaggccgtgtttctcgatagtggccgcccaaaatgtccgtgggggcgatttgatatcattgcggctgccccagtagaaagcctcgagttggacgccaacaacccagacaatgctttcgaccagttagaagcgctttatcagcgctatgcgattgatcttgatgaaaacccagacctgccctttcagggcggaatcattggccactttgcctatgacctgggccgctgtgcggaaacgctaccaacttgcgctgaggattttgccaagctacctgatatgcgggtgggtatgtacctgtgggccgttgtggtggatcatcataagcaaacagctgttcttgtagctgattcaagagtttctgttgatcagatcgatgcacttgaaagccgtttactaaaagagagcaacgccaaaaagcagccatttagtttgcgggcaccttttaaggccaatatggacgaggcgggctatcgggtaaaactaaataaggttgatgagtacattcacgcgggtgattgctatcaggtgaattttgcccaacgctggaacagcgaatatcagggagatagctggcaagcctacaaacaacttcgtagtgctgccccaacaccttactctgcctttattgatagcgggaaagatcagattctttcactctcgcctgagcagtttcttgaaacactgaatggccaggtcaccacaaagccgatcaaaggcacccgaccgcgctcccaggacaccgataccgataaccaactcaaacaggagctcgccgagtcgctcaaagatcgtgctgagaacctgatgattgttgacctgctcagaaacgacttgagcaaagtttgcgaacacaacagtgttaaggttcctaaactgttcaatatcgagtcctatgccaacgtccaccataaggtcagcacggtgaccggcaaactctctgataaatacacgcccatcgcgcttctaaagcattgctttcccggtggctctatcacgggtgcaccaaaaatcagagcaatggagatcattgaagaactggaaccccatcgtcgttctatctattgtggttcaataggctatatcagcctgtgcggccgtatggacaccagcattaccattagaaccctgctctgcgaggataatcatatctattgctgggcaggcggcgggatcgttgcagactcagtgtcatccatggaatataaagaaaccttcgataaggtgaataacttgctccattgcctggaagcaactattcctaaataa

SEQ ID NO: 145327 - protein, 445 aa, Oceanospirillum sp. MED92
MITQRSLPYLTSSEPYFEKVRELGQAVFLDSGRPKCPWGRFDIIAAAPVESLELDANNPDNAFDQLEALYQRYAIDLDENPDLPFQGGIIGHFAYDLGRCAETLPTCAEDFAKLPDMRVGMYLWAVVVDHHKQTAVLVADSRVSVDQIDALESRLLKESNAKKQPFSLRAPFKANMDEAGYRVKLNKVDEYIHAGDCYQVNFAQRWNSEYQGDSWQAYKQLRSAAPTPYSAFIDSGKDQILSLSPEQFLETLNGQVTTKPIKGTRPRSQDTDTDNQLKQELAESLKDRAENLMIVDLLRNDLSKVCEHNSVKVPKLFNIESYANVHHKVSTVTGKLSDKYTPIALLKHCFPGGSITGAPKIRAMEIIEELEPHRRSIYCGSIGYISLCGRMDTSITIRTLLCEDNHIYCWAGGGIVADSVSSMEYKETFDKVNNLLHCLEATIPK

SEQ ID NO: 145328 - DNA, 1425 bp, Xanthobacter autotrophicus Py2
  CDS (1)..(1425): transl_table=11
ttgtgcccagcgtttcgaatcggtcgccctgccgtgcttatcgttgaaattccgtaccgcgacccgttcgccgtcctccacgccttcgccgatgcgccctattgcgccttcctcgacagcgccgcggagggggacgcgcgggcacgctggtcctatctgggggccgatccgttccaggtcatcaccagcgcggccgatggcgtgcgcgtggacggacggctcgtgcccggcactccgttcgaggttctgtctgtggcgctggccgccaatgcggcgccggccgaaccctccccggtgccgtttcgcggcggcgccatggggtatctcggctatgagctgggccgccatctggagcgcctgcccgccccccgcccggcagccccggccattcccgagctggttctcggcctctacgacacggtgctcgccttcgaccgtctggagcgccgcgcctacatcgtttccaccggccggccggagcatggcgccgccgccaaggcgcgcgcgcaggtccgggccgaggcgatccgccgccggctggagacggcccccgccatcgcgccggcgccggatttttcccgcaccggccgcttcgtgccggagcagccgcgcgcccaggtggaagccgccatcgcgcgggtgatcgaatacatccgcgccggcgacatcttccaggccaacctcacccagcagatgcgcgcggcgcggccccaggggctcagcgatctagccctctacacccgcctgcgcgcgctctccccctcccccttcgccgccttcctgcgcgccggaccggagcttgccgtgctcagcgcctcaccggagcgcttcctctccctcgatcccgacgggcgggtggagacgcggcccatcaagggcacccgccgccgcagcccggacccgcaggaggacgcgcggcttgccgccgccctcctcgcctcgcccaaggaccgggcggaaaacctgatgatcgtggacctgctgcgcaacgacctctcgcgggtctgcaaggtgggcagcgtgaaggtgccggccctgtgcgcgctggagaccttcgccagtgtgcatcacctggtctcggtggtggaaggccggctgaaagacggcctcggcccggtggacctgctcaccgcctgctttcccggcgggtccatcacgggagcgccgaagatccgcgccatggagatcatccacgagctggaaccggtgccgcgcggggtctattgcggctcggtgtgctggatcggcttcgacggggcgatggattcctccatcgtcatccgcaccataacccgggccggggagacgctgctggcccaggcgggcggcggcatcgtggcggattccgatccggcggacgaatatgaggagagcctggtgaagctctcgcccatgctgcgggccttgtcgggggagacatcgtga

SEQ ID NO: 145329 - protein, 474 aa, Xanthobacter autotrophicus Py2
MCPAFRIGRPAVLIVEIPYRDPFAVLHAFADAPYCAFLDSAAEGDARARWSYLGADPFQVITSAADGVRVDGRLVPGTPFEVLSVALAANAAPAEPSPVPFRGGAMGYLGYELGRHLERLPAPRPAAPAIPELVLGLYDTVLAFDRLERRAYIVSTGRPEHGAAAKARAQVRAEAIRRRLETAPAIAPAPDFSRTGRFVPEQPRAQVEAAIARVIEYIRAGDIFQANLTQQMRAARPQGLSDLALYTRLRALSPSPFAAFLRAGPELAVLSASPERFLSLDPDGRVETRPIKGTRRRSPDPQEDARLAAALLASPKDRAENLMIVDLLRNDLSRVCKVGSVKVPALCALETFASVHHLVSVVEGRLKDGLGPVDLLTACFPGGSITGAPKIRAMEIIHELEPVPRGVYCGSVCWIGFDGAMDSSIVIRTITRAGETLLAQAGGGIVADSDPADEYEESLVKLSPMLRALSGETS

SEQ ID NO: 145330 - DNA, 1374 bp, marine gamma proteobacterium HTCC2207
  CDS (1)..(1374): transl_table=11
atgccgactctaagtatccaagaaatcccctaccagactagcagcgaaagcctatttgctgccgtccgtgatctgccggatgcggtttggctagacagtggcacgccccacagtattcaaggtcggtttgatattatctctgcctgccctgacgggattgtcgagacccaaggtgctatctccaccattgtcgatcagcatggcagtcgcagtagcgaggaggatccatttacccttgctgagcaacttcttgagccactggtggaccaaactatcagcagtgattacccctttgtaggcggcctgattggttattttggctatgatctaggccgccgcttaatcgatattcccaataccgcagcacagatcacaaagctgccggatatgcgtgtaggtcgctttctctgggctctggttgtagatcatcaggaacagcgcagcgaattgatttttcacgctaagtgctcggaagaattaagagcgctaatccgctctcgactgagcgacttgaagggaaaagagagcactgacaaatttacacttagacagaaatttgccgccaccctttcagagtccgagtacaaagaggcgattcgcgcgattaaacgctatatagactccggagactgctaccaaaccaactttacccaacacttctcagcccagttctccggtgatctctggcccgcttacttggccctgcgtgaggcggtgggttcgccctactccgccttttggcaatggcgcgaccaggcactgctctgtgtctcaccggagcgttttatacgcctcaaggacaagcacgctgaaactaaaccgatcaagggcaccattaagcgcggcagcgatcctaagcaggatcagcagcgcgccgagcagcttgttgccagcaccaaagatcgtgcggaaaatttgatgattgtggatttgctgcgcaatgatttaagcagaaactctgaacccggcagcatccgcgtacccaaactatttgaattggaaagctttgccaatgtgcatcatctggtgagcaccgtcaccggggtgctagcacagaattcaacaccactggatatgcttcgagacagttttcccggcggttcgattaccggtgcaccgaaaaagcgtgccatggaaattattgagcaattggaacccgtgcggcgctcggtttactgcggcagtattggttatattagcgccaatcaaaatatggacagcaatatcgccattcgcactctgatagctgacggcgacaaactgcattgctggggcggtggcggcatagtggcagactcagaggactctcaggagtaccaggaatccatcgataagattaaagcgctactggaagccttggagcgctttatctag

SEQ ID NO: 145331 - protein, 457 aa, marine gamma proteobacterium HTCC2207
MPTLSIQEIPYQTSSESLFAAVRDLPDAVWLDSGTPHSIQGRFDIISACPDGIVETQGAISTIVDQHGSRSSEEDPFTLAEQLLEPLVDQTISSDYPFVGGLIGYFGYDLGRRLIDIPNTAAQITKLPDMRVGRFLWALVVDHQEQRSELIFHAKCSEELRALIRSRLSDLKGKESTDKFTLRQKFAATLSESEYKEAIRAIKRYIDSGDCYQTNFTQHFSAQFSGDLWPAYLALREAVGSPYSAFWQWRDQALLCVSPERFIRLKDKHAETKPIKGTIKRGSDPKQDQQRAEQLVASTKDRAENLMIVDLLRNDLSRNSEPGSIRVPKLFELESFANVHHLVSTVTGVLAQNSTPLDMLRDSFPGGSITGAPKKRAMEIIEQLEPVRRSVYCGSIGYISANQNMDSNIAIRTLIADGDKLHCWGGGGIVADSEDSQEYQESIDKIKALLEALERFI

SEQ ID NO: 145332 - DNA, 1317 bp, Oceanobacter sp. RED65
  CDS (1)..(1317): transl_table=11
atgaaaccggattttttcagcatcccttatttaccagatacatcatttctactcgaacagctcaagggagaaacccacttggttgcgcttgaaagtgctaacccaaaacatccaaatggtcgctggagtatcatctctgcgagccccactgaatggataactctacacaaaaaagtagaagcacatgtattagaagaagatatcgcaaaacttgctaacaaactccctaccatagatagtgattttccattcactggcggggttctgggcttgctgagttatgagcttggcgaatcccatatcgtgagcaagaacaattgcgtagagcactctccaccgattgcggtttacggtttatatacttgggcctttttatttgaccaccaagcagaggccgggtacttggtttattggtcagagttgagtcacgtcaaggccgaacaacttataaagacttacgaagaggcttactcaaaaaccaaactgagcgaatttaatttaacatctgacattacaccggcatggacgaaagcccaatatctaaataaatttgattccatcaagcgttacattaatagcggagactgctaccaaataaatctcacgcaattgtttcgcggtaaatacaacggttcatctttaactgcatacagcaagattaaggccgcagcgaaagcaccttatgccacgtatttcgatttaggtgattgtcaattggcgagcgcgtctccagaattattcattgaatttagtggtggaaaggcaacgacaaaaccaataaagggcactcgcccgagatcgattgattttgcgatagacagtaaaaataaactagatctatcacagagcgaaaaagatcgatcagaaaatataatgattgtcgatttactaagaaatgatctttctaagcatggaaatgaagtgaacgtcgaaaagctctgtgaggttgaaacatttgaaactgttcatcatttagtcagcacagtgtcagcaaaggtcgaacctgagcgttacttgagagtattgctggatgcatttcctggtggctctatcactggtgcacccaaaacgcgcgcgatggaaataattgacgagcttgaggattttgatcgccgcttctattgcgggtcatgctttgccatatccagcagccaaaaggtaatgtccaatattctaatacgatcgtttatatttgatcagaagaactccattgtaacctgctgggccggaggtggaattgtcgcagactccgaaggagaagaagagtatcaagagagcttagacaaaatatccaagctcattgaagccatttcttag

SEQ ID NO: 145333 - protein, 438 aa, Oceanobacter sp. RED65
MKPDFFSIPYLPDTSFLLEQLKGETHLVALESANPKHPNGRWSIISASPTEWITLHKKVEAHVLEEDIAKLANKLPTIDSDFPFTGGVLGLLSYELGESHIVSKNNCVEHSPPIAVYGLYTWAFLFDHQAEAGYLVYWSELSHVKAEQLIKTYEEAYSKTKLSEFNLTSDITPAWTKAQYLNKFDSIKRYINSGDCYQINLTQLFRGKYNGSSLTAYSKIKAAAKAPYATYFDLGDCQLASASPELFIEFSGGKATTKPIKGTRPRSIDFAIDSKNKLDLSQSEKDRSENIMIVDLLRNDLSKHGNEVNVEKLCEVETFETVHHLVSTVSAKVEPERYLRVLLDAFPGGSITGAPKTRAMEIIDELEDFDRRFYCGSCFAISSSQKVMSNILIRSFIFDQKNSIVTCWAGGGIVADSEGEEEYQESLDKISKLIEAIS

SEQ ID NO: 145334 - DNA, 1350 bp, Alteromonadales bacterium TW-7
  CDS (1)..(1350): transl_table=11
atgctaaacaataaaaataattgtataaaattatcaataacacaaaattgtattgatgtattttcgcatttttctcatctgcctcatgccatactgctcgactctgctaatagcgaccatgtaaatagtcgctacgacataatttccatagaacctgaacacttgcttgaagtgagcgataacaaaacattattcaatggcgagccaagtgagctaacctgctttgagataatgaatacccatttgcgcaaactcagcgacacaaaagcaccttttgacttgccctttaatggaggttggttaggttatttcggctatgacttgggtcgtataattgaaaaaatgccaaccatagcagagcaagatatacacttaccgcaaatggctgtaggcctttatttagatgcactcatttttgatagacagcaaaatgcgtggttttatgtttcacagccacatgttgaaagacgcgcgctttacgagaaatatctagcatcaactccgattgacgcaaagtttgagttaacgtctgagtggttttctaatatgagccaaacacaatacgccaaaaagtttgctgtaattgaagactatttaaaaagcggtgattgttatcaaattaatctagcgcagcgctttaaggcccaatatagcggtgacccttggtcagcgtatgttaaattacgcgaagctaataaagcgcctttttcaagttttattaatcatcctgcaggcgctattttgtcaatttcgcctgagcgctttatatcgatccaaaacaatattgtagaaactaaaccaataaaagggacacttgcacgtaaagctgacgcccacgaagatagtgcacaagcgttaaaacttgcaaactcatccaaagatcgcgcagaaaacgtgatgattgtagatttacttcgtaacgacttaggtaaagtagccaaacccggcagcgttaaagtgccttccttatttgcaattgaaagttttccggccgtacaccatttagtaagtacagtgaccgccgaacttgatattaataaaacagccgttgatcaactcgaggccgcttttcctggggggtctattactggagcacccaaaatacgcgcgatggaaattatagaagaactagaacctcatcagcgcagcgtttactgtggctctataggttatttaagtgcctgcggtaatatggataccagtattactattcgtactttagtttgctataagcagcatatttactgttgggccggaggcggaattgtcgctgattctaaagtcgaattggaataccaagagacttacgataaggtaaataaaattttacctttattaaagagtaggtga

SEQ ID NO: 145335 - protein, 449 aa, Alteromonadales bacterium TW-7
MLNNKNNCIKLSITQNCIDVFSHFSHLPHAILLDSANSDHVNSRYDIISIEPEHLLEVSDNKTLFNGEPSELTCFEIMNTHLRKLSDTKAPFDLPFNGGWLGYFGYDLGRIIEKMPTIAEQDIHLPQMAVGLYLDALIFDRQQNAWFYVSQPHVERRALYEKYLASTPIDAKFELTSEWFSNMSQTQYAKKFAVIEDYLKSGDCYQINLAQRFKAQYSGDPWSAYVKLREANKAPFSSFINHPAGAILSISPERFISIQNNIVETKPIKGTLARKADAHEDSAQALKLANSSKDRAENVMIVDLLRNDLGKVAKPGSVKVPSLFAIESFPAVHHLVSTVTAELDINKTAVDQLEAAFPGGSITGAPKIRAMEIIEELEPHQRSVYCGSIGYLSACGNMDTSITIRTLVCYKQHIYCWAGGGIVADSKVELEYQETYDKVNKILPLLKSR

SEQ ID NO: 145336 - DNA, 1377 bp, marine gamma proteobacterium HTCC2143
  CDS (1)..(1377): transl_table=11
atgcgtcaactagtcatcgaggagctatcctatgcagtcgattcagcaccgcttttcgagcagatgctggacttggaactacctatttacctcgatagttctcgaccttactccacccgtggacgctatgatattttcagtgcagatccggtaaaaatattatccaataaatcaacaggatcatgtacttacgagaataacctaacctttttccacgagctcgatgaggcccttaaggaactcacccctcgcatcgacaatgaccaccatctaccttttgttggtggcgcactgggttacttcggctacgacctcggcaggcagctggagcaactcccgcagcgcgccccaaaagatctacagcttgatgactcctgcattggcatttatagctgggccgtgattgtcgatcatcgccaacaacgaacccttttggtcgcacacccctgcacagacggcgctcggctaaacgacgtgagggcccgattgaagagcctaaaagccaaaccagaaacgcgcttcagactgaactcaacattccagtcaaatatgagcagacaggactacacgaacgcctttgaaaaagttcagcagtacataatagctggcgattgttatcagattaacctagcacagcggttcagcgccgcctgcgaaggagatccatggcaggcgtatttatcactgcgcgaggcagctgcggcgccgttttctggatatattaagatgccctccagcagtattcttagcctatcaccagaacggttcctgcacgcgcacaatcaacgagtgtctacctccccaatcaaaggcaccatagctcgaggcaaagacaaaaaatcagacatggctcttgctgcccagctgctgagcagcagcaaggatcgggctgaaaacctgatgattgttgacttattgcgcaacgatttaggtaaggcttgtgttcccggcagcatccaagtcgatgaactcttccaactgcaaagcttccagacagttcaccatcttgtaagcaccattagcggtcaattgctggatggtatagaaccactagacttactggctcggtgctttcccggaggttcgatcaccggcgcacccaaagtgcgcgccatggaaattatcgaagagctagagccctgtcgccgtggggtttattgcggctcactgggctacatcagctgcgacgggcaaatggacacaaacatagctattcgtacaatggtctgtgaggaccaacagatacactgctgggctggcggcggcattgttgctgactcaaactgtgacagtgagtaccaggaatgtatgacgaagatcgacaagttgctggcagcactggagtcgcaaccaccacccttgcctaccgctaactaa

SEQ ID NO: 145337 - protein, 458 aa, marine gamma proteobacterium HTCC2143
MRQLVIEELSYAVDSAPLFEQMLDLELPIYLDSSRPYSTRGRYDIFSADPVKILSNKSTGSCTYENNLTFFHELDEALKELTPRIDNDHHLPFVGGALGYFGYDLGRQLEQLPQRAPKDLQLDDSCIGIYSWAVIVDHRQQRTLLVAHPCTDGARLNDVRARLKSLKAKPETRFRLNSTFQSNMSRQDYTNAFEKVQQYIIAGDCYQINLAQRFSAACEGDPWQAYLSLREAAAAPFSGYIKMPSSSILSLSPERFLHAHNQRVSTSPIKGTIARGKDKKSDMALAAQLLSSSKDRAENLMIVDLLRNDLGKACVPGSIQVDELFQLQSFQTVHHLVSTISGQLLDGIEPLDLLARCFPGGSITGAPKVRAMEIIEELEPCRRGVYCGSLGYISCDGQMDTNIAIRTMVCEDQQIHCWAGGGIVADSNCDSEYQECMTKIDKLLAALESQPPPLPTAN

SEQ ID NO: 145338 - DNA, 1557 bp, Aspergillus niger
  CDS (1)..(1557)
atggcgccacctatcaccgtcgtgccgtccctcgagaccgccagcgaagttatcgcccagtcgaagaatgcgcaatttcctcctaacctacttccgttgactacgtcgattccggccgaccttttgacccccacattggcttatctgaagatcgcggagaaatctaaattgtccttcctctacgagagtgctgcgacgaccgagacgattggcagatacagtttcgtcggtgctggtccccgcaaaatcatcaaaaccggtcccggtcatggtcccgagtgcgaccccatgcccatcctggaggaggaactctccgggtttcgggttgcgacggtgcctggcttgacactgcccccgctcactggtggtgccattggatacgtgggatatgactgcgtgcggtacttcgagcccaagacggctcggccgatgaaggatatccttcaaattccggagtcgctgttcatgctgttcgacaccattgtcgccttcgatcactttttccaggtcgtcaaggtcatcacatacatttccattcccggcaatgactcggaactggagtccgtctaccgccaaggacaagaggtgctccagcggaccattgacgtcctccttcgacccgactacactcttccgccccaaggcccgatcattcagaaccaggagtacacatcgaacatcggacgggaaggatacgagcgccatgttacacggctcaaggagcacatctccaagggtgatattttccagactgtgccgtcgcagcggttgtcccggccgacgtcgctccatcccttcaatctctttcgacacctgcgcacggtcaacccgtcgccgtatctcttctacatcgactgcgaagacttccagctggtgggcgccagtcccgagctgctggtcaaggaggagaagggacggatcatcacgcacccgattgcgggcacagtgaagcggggcaagacgccggaggaagacgcggcgctggccaacgagctgaccagcagcgtcaaggaccgggcggaacacgtgatgctggtcgacctggcgcgcaacgatgtgaaccgggtgtgcgacccgataacgacgcaggtggaccggttgatggtggtggagaagttctcgcacgtgcagcatctggtgtcgcaggtgtccggcatcctgcggccggagaagacacggttcgatgcgttccggtcgatcttcccggcgggcacggtgtcgggagcgcccaaggtgcgggcgatgcagttgattgcggagctggagggcgagaagcgcggagtgtatgcgggtgcggttggctacttcgggtataacattgccagcgcggatggcaagacggagatgccgggcgcgatggatacctgcattgcgctgcggacgatgatggtgaagaacggggtggcctacctgcaggcgggcggaggcattgtatttgactcggacccgtacgacgagtacgtggagacgttgaacaagctgggggcgaacattgcatgcatcaagggggcggaggcgaagtatttgagtctggaagaggagagtcgccgtgcgtag

SEQ ID NO: 145339 - protein, 518 aa, Aspergillus niger
MAPPITVVPSLETASEVIAQSKNAQFPPNLLPLTTSIPADLLTPTLAYLKIAEKSKLSFLYESAATTETIGRYSFVGAGPRKIIKTGPGHGPECDPMPILEEELSGFRVATVPGLTLPPLTGGAIGYVGYDCVRYFEPKTARPMKDILQIPESLFMLFDTIVAFDHFFQVVKVITYISIPGNDSELESVYRQGQEVLQRTIDVLLRPDYTLPPQGPIIQNQEYTSNIGREGYERHVTRLKEHISKGDIFQTVPSQRLSRPTSLHPFNLFRHLRTVNPSPYLFYIDCEDFQLVGASPELLVKEEKGRIITHPIAGTVKRGKTPEEDAALANELTSSVKDRAEHVMLVDLARNDVNRVCDPITTQVDRLMVVEKFSHVQHLVSQVSGILRPEKTRFDAFRSIFPAGTVSGAPKVRAMQLIAELEGEKRGVYAGAVGYFGYNIASADGKTEMPGAMDTCIALRTMMVKNGVAYLQAGGGIVFDSDPYDEYVETLNKLGANIACIKGAEAKYLSLEEESRRA

SEQ ID NO: 145340 - DNA, 2144 bp, Nicotiana tabacum
  CDS (90)..(1940)
gtcaaaaatccccatttcaccgtttcctcgtttctcctcctcactaattttgtctctttctcttggtttgctattgtgctcttgtaggaatgcagtcgttacctatctcataccggttgtttccggccacccaccggaaagttctgccattcgccgtcatttctagccggagctcaacttctgcacttgcgcttcgtgtccgtacactacaatgccgctgccttcactcttcatctctagttatggatgaggacaggttcattgaagcttctaaaagcgggaacttgattccgctgcacaaaaccattttttctgatcatctgactccggtgctggcttaccggtgtttggtgaaagaagacgaccgtgaagctccaagctttctctttgaatccgttgaacctggttttcgaggttctagtgttggtcgctacagcgtggtgggggctcaaccatctatggaaattgtggctaaggaacacaatgtgactatattggaccaccacactggaaaattgacccagaagactgtccaagatcccatgacgattccgaggagtatttctgagggatggaagcccagactcattgatgaacttcctgataccttttgtggtggatgggttggttatttctcatatgacacagttcggtatgtagagaacaggaagttgccattcctaagggctccagaggatgaccggaaccttgcagatattcaattaggactatacgaagatgtcattgtgtttgatcatgttgagaagaaagcacatgtgattcactgggtgcagttggatcagtattcatctcttcctgaggcatatcttgatgggaagaaacgcttggaaatattagtgtctagagtacaaggaattgagtctccaaggttatctcccggttctgtggatttctgtactcatgcttttggaccttcattaaccaagggaaacatgacaagtgaggagtacaagaatgctgtcttacaagcaaaggagcacattgctgcaggagacatatttcaaatcgttttaagtcaacgctttgagagaagaacatttgctgacccatttgaagtgtacagagcattaagaattgtgaatccaagcccatatatgacttacatacaagccagaggctgtattttagttgcatcgagcccagaaattttgacacgtgtgaagaagagaagaattgttaatcgaccactggctgggacaagcagaagagggaagacacctgatgaggatgtgatgttggaaatgcagatgttaaaagatgagaaacaacgcgcagagcacatcatgctggttgatttaggacgaaatgatgtaggaaaggtgtcaaaacctggttctgtgaatgtcgaaaagctcatgagcgttgagcggtattcccatgtgatgcacataagctccacggtctctggagagttgcttgatcatttaacctgttgggatgcactacgtgctgcattgcctgttgggaccgtcagtggagcaccaaaggtaaaggccatggagttgattgatcagctagaagtagctcggagagggccttacagtggtgggtttggaggcatttccttttcaggtgacatggacatcgcactagctctaaggacgatggtattcctcaatggagctcgttatgacacaatgtattcatatacagatgccagcaagcgtcaggaatgggttgctcatctccaatccggggctggaattgtggctgatagtaatcctgatgaggaacagatagaatgcgagaataaagtagccggtctgtgccgagccattgacttggccgagtcagcttttgtaaagggaagacacaaaccgtcagtcaagataaatggttctgtgccaaatctattttcaagggtacaacgtcaaacatctgttatgtcgaaggacagagtacatgagaaaagaaactagcgaatatgaagatgtacataaattctaaagtggttttcttgttcagtttaatcttttactggattgagactgtagttgctgaagatagttgtttagaatgaccttcattttggtgttcctgaaaggacagtgcacatatatagcaaattgatcaaatgtttaatccttgtatgcgggtgagaatcaatgccatcagcaatttgg

SEQ ID NO: 145341 - protein, 616 aa, Nicotiana tabacum; identical to SEQ ID NO: 76711

SEQ ID NO: 145342 - DNA, 1836 bp, Avena sativa; identical to SEQ ID NO: 76714
  CDS (1)..(1836)

SEQ ID NO: 145343 - protein, 611 aa, Avena sativa; identical to SEQ ID NO: 76715

SEQ ID NO: 145344 - DNA, 1990 bp, Avena sativa
  CDS (62)..(1894)
ctcgagacaactgataaactgttgactagggagcggaagtccggctacatcaaaatctgcaatggaatccctagccgcctcggcgttctcgccctcacgtctcgccgcccgcccctcccgggcggcggcggcggcggcggttcctgccagggcaagagcggtggcatcagcaggagggaggaggaggaggagcgggaaggggagcggcgccgtgcggtgctgcgccgggagtagcgcgagcgcgagcgcggtgatcaacgggagcgccgcggcgaaggcggagcaggaggacaggcagcgcttcttcgaggcggcggcgcggggcagcggcaagggcaacctggtgcccctctgggagtgcatcgtgtccgaccacctcacccccgtgctcgcctaccgctgcctcgtcggcgaggacgacatggacacccccagcttcctcttcgagtccgtcgagcaggggctcgagggcaccaccaacgtcggtcgctacagcatggttggagcccacccggtgatggagatcgtggccaaggaggacaaggtcaccaccatggaccacgagaagggcaccgtcacggagcagatcgtggacgatcctatggaggttcccaggagcataatggagggatggcacccgcagcagatcgacgatctccctgaaaccttcagcggtggatgggttggattcttttcctacgacacagtccgctatgtcgaaaagaagaagatacccttctctggtgctcctcaggatgacaggaaccttcccgatgttcacttgggcctctacgatgatgttcttgtctttgacagtgtggagaagaaagtatatgtcatccactgggtaagtctggaccgccatgcatccactgaggaagcataccaatatggcaggtcccggctgagacggtttctttctaaagttcacaacacaaatgtgcccaaactctctccaggatttgtgaagctgcatactaagcagtttggtacagcattgaccaaatcaaccatgacaagtgatgagtacaagagtgctgttctgcaggccaaggagcatattctggccggtaatattttccagattgttttaagccagcgttttgagaggcggacatatgccaccccttttgaggtttatcgagcactacgaattgtgaacccgagtccatacatggcatacgtacaggctagaggctgtatcctggtagcatccagtcctgaaattcttacaaaagttcagaagggaaagattattaacaggccacttgctgggactacccgaaggggcaagacagagaatgaagataaattgcaggaggaagaactattaagtgataaaaaacaacgtgctgaacacattatgcttgtagacctgggaaggaacgatgttggcagggtctccaaacctggatctgtgaaggtggaaaagttgatgaacatcgagcggtactcccatgtcatgcacatcagctcaacggttagtggagagttagatgataatctccaaagctgggatgccttgcgagcagcgttgcctgtaggaacagtcagtggagcaccaaaggtgaaagccatggagctgatagatcagttggaggtgacaaggcggggaccatacagtggcgggttaggagggatatcatttaacggcgacatgatgatcgctcttgctctccgcaccattgtgttctcaacagctccaagccacaacacgatgttctcatacaaaaactcagataggcgccgagagtgggttgctcacctgcaggctggtgcaggcattgttgctgatagtatcccagaagatgagcaaaaagaatgcgagaacaaggcggctgctctagctcgggctattgatcttgccgagtcagcttttgtagacaaggaatagagtgtctttttgtgaattcattgttaattcttgtccatggtatcttcacccagttcatgtggggaagaaaatgtcatcagtcggtggaggaaagca

SEQ ID NO: 145345 - protein, 610 aa, Avena sativa; identical to SEQ ID NO: 76717

SEQ ID NO: 145346 - DNA, 1830 bp, Avena sativa; identical to SEQ ID NO: 76718
  CDS (1)..(1830)

SEQ ID NO: 145347 - protein, 609 aa, Avena sativa; identical to SEQ ID NO: 76719

SEQ ID NO: 145348 - DNA, 1551 bp, Aspergillus oryzae; identical to SEQ ID NO: 76726
  CDS (1)..(1551)

SEQ ID NO: 145349 - protein, 516 aa, Aspergillus oryzae; identical to SEQ ID NO: 76727

SEQ ID NO: 145350 - DNA, 2051 bp, Ruta graveolens
  CDS (43)..(1869)
ggcacactcaagtgccgtctcttctttattcagggaaccaaaatgattactctcaacgtggaaaccccacccctcacccgctctcagcttccgtcaactttccgtgtctcctccgccgcctccgttaactttaacgacagggttgctacctcgagatggcgccccaactccctctccctcaccacctccagctatcgtctccgcactcttaaatgcgccgcctccgcctccacctccgcctccacctccgcctcgccctctccctctccctcattggtcgaccagtcagcaaattttcacgaagcttcgaagaaggggaatttaattcctctataccggtgcatattctcggaccacttgactccagttcttgcgtacaggtgtttggttaaggaagatgatagagatgctccaagctttctgtttgagtcagttgagcctggttcacaagcttccagtattggaaggtatagtgttgttggagctcagccagccatagaaattgtggcaaaggagaacatggttacaattttggaccatgagggtgggcagagaacagagcaatttgtggaggatccaatggatgttcctaggagaatcatggagggatggaaaccccaacttattgatgaacttccagaagcattttgtggtggatgggttggttacttctcatatgacactgtccgctatgttgagaaaaaaaagctgcccttcttttctgccccaactgatgatagaaaccttcctgatgttcatctcggcctctatgacgatgtgatcgtgtttgatcacgtggagaagaaagcatttgttattcattgggtgcgattagatcaatattcttctgtggcggaggcatacaatgacggaatgaaccggttggaaaacctagtatctagagtgcatgatatagttccaccaaagctccgttcaggatcaataaagttacacactcgtcattttggtcctaaactggagaggtcaagcatgacaagtgaagcatacaaggaggcagtactggaggccaaggagcatatccttgctggtgacatattccagatcgtactaagtcagcgttttgaaaggcgaacgttcgcagacccatttgaaatctatagatcactgaggattgttaatccaagcccatatatgacttatttacaagctagaggatgtatattggttgcttctagtccagaaattcttacacgcgtgaagaagagaaagattactaatcgaccccttgctggcactattagaagagggaagacacgtaaggaagatttggtgtttgaaaaggagcttttgaatgatgagaagcaatgtgcggagcacattatgcttgttgacttggggaggaatgatgttggaaaggtctcagaacctggctctgtgaaggttgaaaagctcatgaatattgaacattattctcatgttatgcacattagctcaacagttactggagagttgcttgatcatttaactagctgggatgctttacgtgcagcactacctgttgggaccgtcagcggagcacccaaggtgaaagccatggagataattgataagctggaagtcacaaggcgtggcccatatggtggtggatttggaggcatttcatttactggtgatctggacattgcccttgctctcagaactatggtattccaaactgctacacgctatgacactatgtactcgtacaaagatgtggacaagagacgggaatggatcgctcatctccaagctggggctggaatcgtggccgacagtgatcctgctgatgagcagagagagtgtgagaacaaagctgcagctcttgctcgtgccattgatcttgcagaatcctcgttcattgagaaatgattaatagttttgccatatggagtgtctcggtcttcttgacattgcttcccttggtcacaagtgctagatttcttgccacgtggagaagaaacaaagcaccaatgtgatgataacttttcttggtgagtgtcaaccgtgactgaaatgttaaagaatgaaacagtttcttttcccgtttttgc

SEQ ID NO: 145351 - protein, 608 aa, Ruta graveolens; identical to SEQ ID NO: 76731

SEQ ID NO: 145352 - DNA, 1842 bp, Ruta graveolens; identical to SEQ ID NO: 76732
  CDS (1)..(1842)

SEQ ID NO: 145353 - protein, 613 aa, Ruta graveolens; identical to SEQ ID NO: 76733

SEQ ID NO: 145354 - DNA, 1815 bp, Zea mays; identical to SEQ ID NO: 76734
  CDS (1)..(1815)

SEQ ID NO: 145355 - protein, 604 aa, Zea mays; identical to SEQ ID NO: 76735

SEQ ID NO: 145356 - DNA, 1605 bp, Cryptococcus neoformans; identical to SEQ ID NO: 76422
  CDS (1)..(1605)

SEQ ID NO: 145357 - protein, 534 aa, Cryptococcus neoformans; identical to SEQ ID NO: 76423

SEQ ID NO: 145358 - DNA, 1866 bp, Arabidopsis thaliana; identical to SEQ ID NO: 76736
  CDS (1)..(1866)

SEQ ID NO: 145359 - protein, 621 aa, Arabidopsis thaliana; identical to SEQ ID NO: 76737

SEQ ID NO: 145360 - DNA, 1984 bp, Camptotheca acuminata
  CDS (68)..(1807)
tcgactgtaacgcatgttctgattcaccgtcaccggttggcttctccctctctcggtctgtctcagaatgcaatctttagccatgtctctccgtttgtctccgtcgactcactgcctatctcccattccggctaccgccatttccagtagaagctccggctctcttgcatgcgtcctttctatcaaatgctgctcactccagtctccgtctatagttgtagacgaaacgagattccttgaagcttcgaagaagggaaatttaattccgcttcacgcatgcatattctctgatcaactgactccggtgcttgcttaccggtgcttggttaaagaagacgatcgagaggctccgagctttctgtatgagtcgatcgaacctggttttcaagttttgactgttggtcgttatagtgtggtcggtgctcagccagcaatggaaattatggcgaaagaaaatgcggttaccattgtggaccatgagagtggtcgcgtgaccgagaaggttgttgatgatccaatgacgattccaagaagtatctccgaaagctggaaaccccaatttcttgatgaacttcctaatgcattttgtggtggatgggtaggtatttctcatatgatacagttcgttatgtggagaaaaaggagctgcccattcctaagggcaccacgagatgacagaaatcttgctgacattcatctaggactatatgatgatgtgattgtgtttgatcatgtagagaagaaagcatatgtgattcattgggtgagattggaccaatactcctctgctgagaaggcgtatgttgatggaatgaaacgcttggaaatattggtgtcaaaagtattggatattgattcaccaaggctgtctccaggttttgtggaattatgcactcaccagttcggtcgttctttgaacaaatcaaatatgacaagtgaagaatacaaggatgttgtactgcaggcaaaagaacatattcttgcaggggatatatttcagattgtattaagtcaacgctttgaacgcagaacatttgctgatccctttgaagtctacagagcattgagagttgtgaatccaagtccatacatgacttacttgcaagcaagaggatgtatactggttggttcgagcccagaagtccttacacgtgtaacaaagaagaagattattaatcgaccgctggctggaactgttagaagagggaggacaccacatgacgatgagattttaaaagtgcagctgctaaatgatcagaagcaatgtgctgaacacacaatgctggttgatttgggacggaacgatgttggaaaggtttcaaaatctggttctgtaaacgtggaaaagctaatgactgttgaacgatattcccatgtgatgcacatcagctccacggttactggggagttgcttgatcatctgacttgctgggatgccctgcgtgctgcattgcctgttggaacagttagtggagcaccaaaggtgaaagcgatggagttgattgatcagttggaaccaacaagacgggggccttacagtggtggattcggagctatttccttttctggtgatatggacattgcaatagctctcaggaccatggttttttcaaatgggccccgttatgacacaatgtactcatacaagaatggcaaaaggcgccaggaatgggttgcctacctacaagccggtgccggtattgttgctgacagcattcctgatgatgagcagaccgagtgcgagaacaaaattgctggtcttgcccgttcaattgacttggcagagtctgcatttgttaataaatgatgtttactttccaccaatatagttatagttacagttacagaaaggcaacctggtccattagggcttattaggtgagttgcttgagtaggggagaacaaattaaaattcaaacagaacttggtgtttatagtctaataaatattatattatgctttacctaaaaaaaaaaaaaaaaaa

SEQ ID NO: 145361 - protein, 579 aa, Camptotheca acuminata
MQSLAMSLRLSPSTHCLSPIPATAISSRSSGSLACVLSIKCCSLQSPSIVVDETRFLEASKKGNLIPLHACIFSDQLTPVLAYRCLVKEDDREAPSFLYESIEPGFQVLTVGRYSVVGAQPAMEIMAKENAVTIVDHESGRVTEKVVDDPMTIPRSISESWKPQFLDELPNAFCGGWVGISHMIQFVMWRKRSCPFLRAPRDDRNLADIHLGLYDDVIVFDHVEKKAYVIHWVRLDQYSSAEKAYVDGMKRLEILVSKVLDIDSPRLSPGFVELCTHQFGRSLNKSNMTSEEYKDVVLQAKEHILAGDIFQIVLSQRFERRTFADPFEVYRALRVVNPSPYMTYLQARGCILVGSSPEVLTRVTKKKIINRPLAGTVRRGRTPHDDEILKVQLLNDQKQCAEHTMLVDLGRNDVGKVSKSGSVNVEKLMTVERYSHVMHISSTVTGELLDHLTCWDALRAALPVGTVSGAPKVKAMELIDQLEPTRRGPYSGGFGAISFSGDMDIAIALRTMVFSNGPRYDTMYSYKNGKRRQEWVAYLQAGAGIVADSIPDDEQTECENKIAGLARSIDLAESAFVNK

SEQ ID NO: 145362 - DNA, 1991 bp, Camptotheca acuminata
  CDS (75)..(1820)
aagtgagtgagagcacggactgactcgcagtcgccgccaaggcctttttcactctatccgtgaaagctctgaaaatgcaaaccctatccaactctcactgtttgtgtccgacaaggcgccgcctatctccggttccggtcaccgccatttccagcagaagctttggctctcttgcatgcgtccgtactatcaaaatcaaatgctgttctctcaaatctccatctctagctacggatgaaacgaagttctttgaagcttcgaggaaaggaaatttaattccgctttacaaatgcatattatctgatcacttgactccggttcttgcttaccggtgcttagttaaagaggacgatcgagaagctcccagctttctatatgagtcggtcgagcctggttttcaagcttcgaatgtcggtcggtatagcgtggttggtgctcagccggcgatggaaattgtggccaaagaaaataaggttacgatagtagaccataggaacggttgccttactgagaagattgttgatgatccaatgacagttccaagaaacatatcagagagttggcaacctcaacttattgatgaacttcctgatgcattttgtggtggatgggttggttttttctcatatgatacagttcgttatgtggagaagaagaagctgccattcctaagggcaccgcaagatgacagaaatcttgctgacattcatctaggactttatgatgatgtgcttgtgtttgatcatgtagagaagaaagtttacgtgattcattgggtgagattggatcaatacctgtctgttgaaaaggcttatatggatggaatgaaacgcttggaaatgttggcatcgaaagtattggatattaatcccccaaggttgtctccgggttctgtggaattgtgcacccaacattacggtcctcctttgaagaagtcaaatatgacaagtgaacaatacaagaatgctgtactgcaagctaaagatcatattcttgcaggggatatattccagattgtattaagtcaacggtttgaacgccgaacatttgctgatccatttgaagtctacagggcattgagagtcgtgaatccaagtccatacatggcttacttgcaagctaaaggctgtattttggttgcttcaagtccagaaattcttacacgtgtaaacaagaggaagattgtcaatcggccattggccgggaccactagaagggggaggacacctcatgaagatgagatgttaaaaaagcagctgctaaatgataaaaaacaatgcgcagaacacataatgctggttgatttgggaaggaatgatgttggaaaggtctcgaaatctggttccgtgaatgtggaaaggcttatgaatgttgaacggtattcccatgtgatgcatatcagctccacagttacaggggagttgcttgatcatctgacttgctgggatgctctgcgtgctgccttgcctgttggaacagttagtggagcaccaaaggtgaaggctatggaattgattgatcagttggaagcaacaagacgtgggccttacagtggtggatttggagggatttccttttctggcgatctggatattgcattagctctcaggacaattgttttcccaaccggagcccgttatgatacaatgtactcgtacaagaatgccaacaagcgccaggaatgggttgcttacctacaagccggtgccggcattgtagcagacagtgatcctgatgacgagcagagagagtgtgagaacaaagctgctggtcttgctcgtgcaattgacttggcggagtccgcgtttgtggataaataatgtctacctttttcagctactatagtgtcagaaatgcaacccagtatattggggctaaagtgggttggagtaacaaaatgtaggcacaatacacagcaactttgcttttttacagtccaatctttaatggaatgttaacagatttattttataaaaaaaaaaaaaaaaaaa

SEQ ID NO: 145363 - protein, 581 aa, Camptotheca acuminata; identical to SEQ ID NO: 76741

SEQ ID NO: 145364 - DNA, 2709 bp, Solanum lycopersicum
  CDS (1)..(2709)
atgaattctgccatgtcttcgtcatcatcatttatggttgcctcttcctgctgccaaaatcttcaaaccagaaaatattttcttttagcacctgaaccttttgagaagattggtatgatagatgcactccaaaaatataaccgtaaggaaaggaaggtatttatttcaagtcatttagtgcctggacatttggatgcatcgggaacaagaaaaaagtttttacatgagccagttccgaagttagaatttgtacgcacactactaattgacaactatgacagttacacttacaatattttccaagagctctcaatcattaatggaatgcctccggtggtgattcggaatgatgagtggacatggaaagaagtttatcattacctgtacgaagaaaggacgtttgacaatattgttatatcacctggtcctggctctccaacatgtccatcagatataggaatttgcctgaggctcttgcttgaatgcattgatatcccgatactaggcgtctgccttggtcaccaggcattgggatatgtgcatggtgctgaagttgtacatgcacctgaacctttccatggtcgtttgagtgatattgagcacaatggttgtcaattattccatgaaattccttcaggaagaagttctggatttaaggtggtacggtaccattcccttgtaatagacccgaaatcacttccgaaggaactcattcctatagcttggacctcaacagctgagacactccctttccagggtgtcaaacgatccaattcattcttaaatgcgtccaaagaaaataaagatatttttaatgggatgtcggagctatcagatgattcaaaggatgtgaaaggtggaaaagtcctcatgggtatcatgcattctagtaggcctcactatggattgcagttccacccagaaagtgttgcaacatgttacggaagacagcttttcaagaatttccggaaaatcacagaggattattggctcctgctgatgtcaacctccttcaatgaaagaagggctcattatgctgcatgcatgcaggtgcctaatttagacccgctgtcccgaagtgttgcaaaacgtgggcatctggtgaataaattgattgagaggagaactgccgaagtggatggaaccttaaatctatcacatccaggtcacagtgtaaaatttttgaagatgacatggaaaaaacttgattgctctgcgagccaagtaggtggagcggataatattttctgtgaactatttggagatcaagaggctaaaaacagtttttggctggatagctcttcaatagagaaggaaagggctagattttcctttatggggggaaagggtggctccctctggaagcaacttagttttaggttgtcaaatcgaagtgacagaatgtgtaaaggaggtggccatctatcagttgaagatgctaatggtcatgttatttctaaatttttggaagatggattttttgattatttagataaggagctcctatcattttgtttcgatgagaaggattatgaaggattaccatttgatttttatggtggttacattggttatatcgggtatgatcttaaagctgaatgtggtgtggcatctaatcgtcatagatccaaaacaccagatgcttgtttattctttacagataacgttattgtcattgatcatcagtatgatgacatatatactttgtcattacacgatggcagcacaagtactacttctcgcttggaagatctggagcagaggctgctcaacttgagagcttttacgcccagaaggctacaatcgcaggcatctcgaggattttctgtagtcgaactaaaatcagggttttctgctgagaaatcaagagagcagtatatcaaagacgttgagaattgtcaagagttcataaaagaaggagaaagttatgagttgtgtcttacaactcagatgagaatgaagttggggggaatagattctctggaactttatcgtaatctcagaataagaaatcctgcaccatatgctgcctggcttaatttttcaagggaaaacctaagcatatgttgttcatcacctgaaaggttcctacgattggacaggaatgctattctagaagcaaaacccataaaagggactatagctcgtggttccaccccaaaggaagatgaatttctgaaactgcaattagaatgcagtgaaaaggatcaggcggaaaatttgatgattgttgacttgttgaggaatgaccttgggcgtgtatgtgagactggctctgttcatgtcccacatctcatggaaattgaatcctatgcaacagttcataccatggtcagtacgattcgggggaaaaagcgatcagatgcaagtgcaattgattgtgttagagctgcattccctggtgggtcaatgacaggtgcaccaaagttgagatcaatggaacttcttgatcatcttgaaaattgttcgaggggcatatactcgggctgcattggatttttttcttataaccaagcatttgatctcaatattgtgatacggacggttgtcatacacgagggagaagcttcagtaggagcaggaggagccatcactgctctttcagatcctaatgatgagtatgaagaaatgcttcttaaaactcgagcaccgattaaggctgttcttgaacatcagagcagcatcttctcatcagatgctcagaagtga

SEQ ID NO: 145365 - protein, 902 aa, Solanum lycopersicum
MNSAMSSSSSFMVASSCCQNLQTRKYFLLAPEPFEKIGMIDALQKYNRKERKVFISSHLVPGHLDASGTRKKFLHEPVPKLEFVRTLLIDNYDSYTYNIFQELSIINGMPPVVIRNDEWTWKEVYHYLYEERTFDNIVISPGPGSPTCPSDIGICLRLLLECIDIPILGVCLGHQALGYVHGAEVVHAPEPFHGRLSDIEHNGCQLFHEIPSGRSSGFKVVRYHSLVIDPKSLPKELIPIAWTSTAETLPFQGVKRSNSFLNASKENKDIFNGMSELSDDSKDVKGGKVLMGIMHSSRPHYGLQFHPESVATCYGRQLFKNFRKITEDYWLLLMSTSFNERRAHYAACMQVPNLDPLSRSVAKRGHLVNKLIERRTAEVDGTLNLSHPGHSVKFLKMTWKKLDCSASQVGGADNIFCELFGDQEAKNSFWLDSSSIEKERARFSFMGGKGGSLWKQLSFRLSNRSDRMCKGGGHLSVEDANGHVISKFLEDGFFDYLDKELLSFCFDEKDYEGLPFDFYGGYIGYIGYDLKAECGVASNRHRSKTPDACLFFTDNVIVIDHQYDDIYTLSLHDGSTSTTSRLEDLEQRLLNLRAFTPRRLQSQASRGFSVVELKSGFSAEKSREQYIKDVENCQEFIKEGESYELCLTTQMRMKLGGIDSLELYRNLRIRNPAPYAAWLNFSRENLSICCSSPERFLRLDRNAILEAKPIKGTIARGSTPKEDEFLKLQLECSEKDQAENLMIVDLLRNDLGRVCETGSVHVPHLMEIESYATVHTMVSTIRGKKRSDASAIDCVRAAFPGGSMTGAPKLRSMELLDHLENCSRGIYSGCIGFFSYNQAFDLNIVIRTVVIHEGEASVGAGGAITALSDPNDEYEEMLLKTRAPIKAVLEHQSSIFSSDAQK

SEQ ID NO: 145366 - DNA, 2088 bp, Streptomyces thioluteus
  CDS (1)..(2088): transl_table=11
  misc_feature (32)..(32): s is g or c
  misc_feature (33)..(33): s is g or c
  misc_feature (35)..(35): w is a or t
atgcgggtgctgttgatcgacaactacgactsstwcacctacaacctgttccagctcctcgccgaggtgtacggcaaggaaccgacggtcctcgtcaacgacgacccgtcgtggccggagctggacccggcgatgttcgactgcgtcgtcgtctcgcccggcccgggccgcccccagcacccggccgacctcggcttctgccaggaggtcctggaccgctggacggacaccccggtcctcggggtgtgcctggggcaccaggcgatcgcccaccaccacggcgcggacgtggccgagggcacgccgaagcacggtcacctggcgcgggtccggcacggcgggcgggacctcttcgacggcctgccgcagaacttcaccgcggtgcgctaccactcgctgcgggccgccgaacccctgccggaggagctggaggccaccgcctgggccgaggacggcaccgtcatggcgctgcggcaccgcacgctgccccgctggggcgtgcagttccacccggagtccatcgcgagcgagtggggcgcccaactgctccagaacttcgcgaagctcgtcggcgccgagtacgccgccgcgccccgggaacgggcgcggtgggccgccccgttggaggacgcccccgcggaggcgccggaactgcggcccgtgttcgaggtgatcgaccgggccgtggacaccgcggagctgttcaccacgctgtactccgcgagcgccggctgcttctggctcgacagcagcgcgccggggatcgggccggcccggttctcgttcctcggggacgactccggccccctcgccgagacgctgacgtaccggaccggggagaacacggtcgcggtgcgcgacgccgccggtgaacgggccgagcccggcaccatcttcgaggtgctccagcagcggctccgcgaccgccggctcagcacgccggagctgcccttcgacctcaacggcggctacgtcggctacttcggctacgagctcaagggcgagtgcggcagcccgaacgtccaccggtccgaaaccccggacgccgtctggacgttcgccgaccggctgatcgcggtggaccacctggaagagaagacctacgtcgtggccgtgagcggcaccgggccgggcgaggaggacgcggcccgggcctgggtgacggagaccgcccggcgggcccgcgaactgccggaccccgccccgtccgaggcacccgccccggccgccacggcgccgtccgaacaggtcgacatcgcccgcgaccgcggccagtacgtgagcgacatcaaggactgcctcgacgagctgcacagcggcgagagctacgagatctgcctgaccaaccggatccggctgcccgagctgaaggacccgctcggctaccacctcctgctccggcgcctcaaccccgccccctacggcgcgttcctgcgccacgagggcgtgagcgtcgtgtgctcctccccggagcggttcctgcggatcgaccgggacggcgtcgtggagagccggcccatcaagggaacggccccccggggcgaggacccggccgccgacgaggcgctccgggtgtcgctcgccgcctcggccaagacccgggccgagaacctcatgatcgtcgacctgctccgcaacgacctgggccgggtgtgcgaggtcggttccgtcgacgtccccgcctacatggtcaccgagacgtacgcgacggtgcaccagctggtcaccacggtccggggccgcctgcggcacgacgtggacccggtcgcctgcgtccgggcctgcttccccggcggctcgatgacgggcgccccgaagctgcggacgatggccatcatcgaccgcctggagcaggaggcccgcggcatctactccggcaccatcggctacttcgggctctccggcgccgcggacctcaacatcgtcatccgcaccgccgtctccaccggtacgggcacggtcatcggcaccggcggcgccatcgtcctcgactcggacccggacgaggagttcgacgaggtgctgctcaagggccacgcgctggtgcgggcgcacgggctgctggagggggccgcggaggccccgtag

SEQ ID NO: 145367 - protein, 695 aa, Streptomyces thioluteus
  misc_feature (11)..(11): The Xaa at location 11 stands for Cys, Ser, or Trp.
  misc_feature (12)..(12): The Xaa at location 12 stands for Phe, or Tyr.
MRVLLIDNYDXXTYNLFQLLAEVYGKEPTVLVNDDPSWPELDPAMFDCVVVSPGPGRPQHPADLGFCQEVLDRWTDTPVLGVCLGHQAIAHHHGADVAEGTPKHGHLARVRHGGRDLFDGLPQNFTAVRYHSLRAAEPLPEELEATAWAEDGTVMALRHRTLPRWGVQFHPESIASEWGAQLLQNFAKLVGAEYAAAPRERARWAAPLEDAPAEAPELRPVFEVIDRAVDTAELFTTLYSASAGCFWLDSSAPGIGPARFSFLGDDSGPLAETLTYRTGENTVAVRDAAGERAEPGTIFEVLQQRLRDRRLSTPELPFDLNGGYVGYFGYELKGECGSPNVHRSETPDAVWTFADRLIAVDHLEEKTYVVAVSGTGPGEEDAARAWVTETARRARELPDPAPSEAPAPAATAPSEQVDIARDRGQYVSDIKDCLDELHSGESYEICLTNRIRLPELKDPLGYHLLLRRLNPAPYGAFLRHEGVSVVCSSPERFLRIDRDGVVESRPIKGTAPRGEDPAADEALRVSLAASAKTRAENLMIVDLLRNDLGRVCEVGSVDVPAYMVTETYATVHQLVTTVRGRLRHDVDPVACVRACFPGGSMTGAPKLRTMAIIDRLEQEARGIYSGTIGYFGLSGAADLNIVIRTAVSTGTGTVIGTGGAIVLDSDPDEEFDEVLLKGHALVRAHGLLEGAAEAP

SEQ ID NO: 145368 - DNA, 2145 bp, Catharanthus roseus
  CDS (53)..(1879)
ctcattcattcattcagtggctgctcaacacagcacaattctcaatattgcaatgcaatctgtatcatcttcttcttcaatttctactttcaagtctggatcgctatctccggtaatggaaaccctagcatttttctcagaaaccgaacgtttgcccttctcttctccatgttccgtccagttacaaagctatttctttcgccaactcgcctgctgctctcttcacctcctcgtcttatcaagtccgctgctcgataaatgttctgccgtctcgccgccttcatttgtcgaccattcagcgaagttcaaggtggcggcgaagcatgggaacttgattcctttgtacaggcctatattttcagatcacttgacgccagttctagcttaccgttgcttggttaaggaagatgacagagaagctcccagctttctttttgagtccgttgagcctggcttgaaagtctccaacgttgggagatatagtgtgattggagctcaaccaactatggaaatagttgctaaagagaacatggtgactgtgatggatcaccgtcaaggtcgtcgtgtggagcagtatgaggaggatcccatggtagttcctcggagaattatggagaagtggaaaccccagcggaccgaggagctacctgaagctttttgtggtggctgggttggttatttctcatatgatacagtaaggtatgtagagaagaagaagttgccattctcaaatgctcctgtggatgatagagaccttcctgacattcatctaggactttatgatgatgtaattgtatttgaccatgtggagaagaaagcttatgtaatacattgggtgcggctggatcaattttcttctgttgaggaggcttataaagatggaatgaagcgcttggaatctttggtatcgagagtgcatgacatagtccctcctaagttgtccgcggggtcgattaatttacatactagtctttttggccctaaattgaagaattcgaccatgacaagtgaagaatatgagaaagccgtcttgcaggctaaggagcacatcctggctggggacatattccagcttgtcctaagtcagcgttttgaacggcgaacatttgcagatccatttgaagtctaccgagcattgagaattgtcaacccaagtccatatatgacttatttacaagcaagagggtgtattttggttgcttcaagtcctgaaattcttactcgagttaaacagggaacaataacaaatcggcccttagcagggactactcggagggggaaaacaccaaaagaagattatatgttggaacaacagctccttaatgatgaaaaacaatgtgcagaacacattatgcttgtagacttgggaaggaatgatgttggaaaggtatcaaaacctggttctgagaaggtggagaaactgatgaacattgaaccatattcacatgtcatgcacatcagctctacagttactggagagttacttgataacttaactagctgggacgttctacgtgcagcattgcctgttggaactgttagtggagcaccaaaggtcaaagctatggaattgatcgatgaactggaagttacaaggcgtggaccatatagtggtggatttggaggaatttccttttccggtgatatggatgttgcattagcattgagaaccattgtattctccattggaacaagatatgacactatgtactcttacaagacgaggttcaagcgccgagaatggatcgcccatctgcaagctggtgcaggtatagtagccgatagtgatccagctgacgagcagagagaatgtgaaaataaatctgcagctcttgctcgcgctattgatcttgcagagtcatcatttgttgataaatgatcggccaagaaagaagtcgtctccttgccacatcgcgatcgttgtgtgtatcaaaatggtaggagaaaactgtatgatttttgcaaggcagatttcttgatgatttttagcaaaatttggccttggagaagtccctagttagttgtggttagttagtcataataatccatgaatcatccattgtaggtcagtaaatttggtgtaatgttgtttttattggaaaccaataatgccaattgatgagccttaaaaaaaaaaaaaaaaaa

SEQ ID NO: 145369 - protein, 608 aa, Catharanthus roseus; identical to SEQ ID NO: 76747

SEQ ID NO: 145370 - DNA, 2172 bp, Streptomyces griseus
  CDS (1)..(2172): transl_table=11
atgcgcacccttctcgtcgacaactacgactcgttcacctacaacctcttccactacctctcccgggccaacggccgggaacccgaggtcatccgcaacgacgacccggcctggcggccgggtctgctcgacgcgttcgacaacgtggtgctctccccggggccgggcaccccgcaccgcccggccgacttcggcctgtgcgcccggatcgccgaggagggccggctgccggtgctcggcgtctgcctgggccaccagggcatggccctcgcccacggcgcccgggtgggccgggcccccgagccccgtcacggccgcacctcggcggtacggcacgacggcaccgggctcttcgaggggctgccgcagccgctggaggtggtgcggtaccactccctcgcggtgacggaactgccgccggagctggaggccaccgcctggtcggaggacggggtcctgatggcgctgcgccaccgcacgctgccgctgtggggagtgcagttccaccccgagtcgatcggcacccaggacggccaccggctgctggccaacttccgcgacctcaccgagcgccacggccgaacgcgccacggcggccgggcgggacacggcacgctcccgccccccgcgcccgcccgggagacgaaggccaccaccggcaccccacggcggctccgggtcatcgcaaagtcgctgcccacgcgctgggacgccgaggtcgccttcgactcgctgttccgcaccggcgaccaccccttctggctcgacagcagccgtcccgggggcgagctgggccagctctccatgatgggcgacgcctcaggtcccctcgcccggaccgccaaggccgacgtgcacgccggaaccgtcacggtgagagccgacggcgccagcagcacggtcgagagcgccttcctgacctggctggagaacgacctggcggggctgcgcaccgaggtgcccgaacttcccttcgcgttcgcgctcggctgggtcggctgcctgggctacgagttgaaggccgagtgcgacggcgacgccgcgcaccgctcgcccgatcccgacgccgtgctggtcttcgccgaccgggccctggtgctggaccaccgcacccgcaccacctacctgctggcgctggtggaggacgacgccgaggccgaggcgcgcgcctggctcgcggcggcctccgccaccctggacgccgtcgccgggcgggagcccgagccgtgccccgaggcgcccgtgtgcacgacgggtccggtggagctgcgccacgaccgggacggctacctgaagctgatcgacgtctgccagcaggagatagccgccggggagacctacgaggtctgcctgaccaacatggccgaggcggacaccgacctcaccccgtgggcggcctaccgcgcgctgcgccgggtgagccccgccccgttcgccgcgttcctggacttcggtcccatggccgtgctcagcagctctccggagcggttcctgcgcatcgaccggcacgggcggatggagtccaagccgatcaagggcacgcggccacgcggcgccaccccgcaggaggacgccgcgctcgtacgtgccctggccacctgcgagaaggaccgcgccgagaacctgatgatcgtcgacctggtccgccacgacctggggcggtgcgccgaggtcggctcggtcgtcgccgacccggtgttccaggtcgagacgtacgcgaccgtgcaccagctggtcagtaccgtcacggcgcggctgcgcgaggacagcagcccggtggcggcggtccgggcggccttccccggcgggtcgatgaccggggcgccgaagatccgcaccatgcagatcatcgaccggctggaaggcgggccgcgcggtgtctactcgggcgccatcggctacttctccctcaccggcgcggtagacctgtccatcgtgatccgcacggtggtgctcagcggcggcaggctgcgctacggcgtcggcggcgccgtcatcgcgctctccgacccggccgacgagttcgaggagacggcggtcaaggccgccccgctgctgcgtctcctcgacaccgccttcccgggccgtgaggctcccggcaaggacctcgacggtgaacccgacgacggcacggacgcgggtgctccgaaggacctcgtcctgcccgggtga

SEQ ID NO: 145371 - protein, 723 aa, Streptomyces griseus
MRTLLVDNYDSFTYNLFHYLSRANGREPEVIRNDDPAWRPGLLDAFDNVVLSPGPGTPHRPADFGLCARIAEEGRLPVLGVCLGHQGMALAHGARVGRAPEPRHGRTSAVRHDGTGLFEGLPQPLEVVRYHSLAVTELPPELEATAWSEDGVLMALRHRTLPLWGVQFHPESIGTQDGHRLLANFRDLTERHGRTRHGGRAGHGTLPPPAPARETKATTGTPRRLRVIAKSLPTRWDAEVAFDSLFRTGDHPFWLDSSRPGGELGQLSMMGDASGPLARTAKADVHAGTVTVRADGASSTVESAFLTWLENDLAGLRTEVPELPFAFALGWVGCLGYELKAECDGDAAHRSPDPDAVLVFADRALVLDHRTRTTYLLALVEDDAEAEARAWLAAASATLDAVAGREPEPCPEAPVCTTGPVELRHDRDGYLKLIDVCQQEIAAGETYEVCLTNMAEADTDLTPWAAYRALRRVSPAPFAAFLDFGPMAVLSSSPERFLRIDRHGRMESKPIKGTRPRGATPQEDAALVRALATCEKDRAENLMIVDLVRHDLGRCAEVGSVVADPVFQVETYATVHQLVSTVTARLREDSSPVAAVRAAFPGGSMTGAPKIRTMQIIDRLEGGPRGVYSGAIGYFSLTGAVDLSIVIRTVVLSGGRLRYGVGGAVIALSDPADEFEETAVKAAPLLRLLDTAFPGREAPGKDLDGEPDDGTDAGAPKDLVLPG

SEQ ID NO: 145372 - DNA, 2754 bp, Arabidopsis thaliana
  CDS (1)..(2754)
atgaatttttcgttttgttcaacatcttctgagttatcatatccaagtgagaatgttctgagattttctgttgcaagtcggctgttttctcctaaatggaagaaaagtttcattagtttaccttgtcgtagtaaaactacgaggaaggttttggcgtcaagccgttatgtgccagggaaattggaagatttgtcggttgttaagaagagtttaccgagaagagaacctgtggagaagcttggttttgtgaggactttgttgattgataattatgatagttatacattcaatatatatcaggctctgagtactattaatggagtgcctcctgtcgttattcggaatgatgagtggacgtgggaagaagcttaccattacttatatgaagatgttgcttttgataatattgttatatcgcctggacctggttcgcctatgtgtccagctgatataggaatatgtcttcgtcttttgcttgaatgccgtgatatcccaattctaggcgtctgccttggccaccaggcactaggttatgtccatggagctcatgtggtgcatgccccggaaccagtccatggacggttgagtgggattgaacatgatgggaacatattgttttctgatattccatccgggagaaactctgattttaaggttgttagataccattcactgatcatagataaggaatcactaccaaaggaacttgtaccaatagcgtggacgatttatgatgacactggctctttctctgagaagaattcctgtgttcctgtgaataacactgggagcccacttgggaacggatctgtcattcctgtttcagaaaagttagaaaatcgaagtcattggccttcgtcccatgttaatgggaaacaagatagacacattctcatgggcatcatgcattcttcttttccccattatggtttacagtttcatccagaaagtattgctactacctatggtagtcagttatttaaaaatttcaaggacataactgtgaattattggagtcggtgcaaatctacatccctgcgtcgaagaaacataaatgacactgcaaacatgcaggtgcctgatgctactcaattgctgaaagaactttctagaactagatgtacaggaaatggttctagctattttgggaaccctaagtctctgttttctgccaagacaaatggtgtagacgtctttgatatggtggattcatcatatccaaaaccacatacaaaattgctgaggttgaaatggaagaagcatgaacgtcttgcgcataaagttggtggagtaagaaatatatttatggaactctttggcaagaatagaggaaatgatactttttggctggatacttcttctagtgacaaggctagaggacgattttctttcatgggcggtaaaggtggatctctctggaagcaattgacatttagtttatctgatcaaagtgaggttacatcaaaacatgcgggacatcttctgattgaagattctcagagttctactgagaaacaattcttggaagaaggctttcttgattttctccgtaaggagctttcatctatctcttatgatgagaaggacttcgaagagttgccttttgatttttgcggtggatacgtaggttgtattgggtatgatattaaagtggaatgtggaatgccaattaatcgtcacaaatccaacgctccagatgcatgtttcttctttgcggataatgttgtcgccattgatcatcaactcgatgacgtttatatattatcgctttacgaagagggaactgcagaaacctctttcctgaatgatactgaagagaagctcattagcttgatgggtttgtccacaagaaagttggaggatcaaactcttccagttatagattcatctcaatccaaaacaagttttgttcctgacaaatcccgagagcagtatatcaacgatgttcagagctgtatgaagtatatcaaagacggggagagctacgagctttgtctcactactcaaaacagaaggaaaataggaaatgctgatcctttgggactttatctccacctgagagagaggaatccagcaccatatgcagcatttctcaacttctcaaatgcaaatctgtctttatgctcttcgtcccctgaaaggtttcttaagctggacagaaatggaatgcttgaagcaaagccgattaagggtactatagctcgtggctccacgcctgaagaagatgaatttcttaaattgcaattgaaactcagtgagaagaatcaagccgagaatctgatgattgttgaccttctaaggaatgatctcggtcgtgtctgtgagcctggctcagtccatgtacctaacctcatggatgtagaatcatacacaacagtacatacaatggtgagcacgatccgtggactgaaaaaaacagatattagtccagtggaatgtgtaagagctgctttccctggcggttcaatgactggtgccccaaaactaagatctgttgagattctcgattctctagagaactgttcgagaggcctttactctggctcaatcgggtatttctcgtataatggtacgtttgatctgaatattgtgataagaacagtaataatacatgaagatgaagcttccattggagcaggaggagctattgttgcattatcaagtccagaagatgagtttgaggaaatgattcttaagactagagctcctgctaatgcagtcatggagttttgtagtgatcagaggagacaatag

SEQ ID NO: 145373 - protein, 917 aa, Arabidopsis thaliana
MNFSFCSTSSELSYPSENVLRFSVASRLFSPKWKKSFISLPCRSKTTRKVLASSRYVPGKLEDLSVVKKSLPRREPVEKLGFVRTLLIDNYDSYTFNIYQALSTINGVPPVVIRNDEWTWEEAYHYLYEDVAFDNIVISPGPGSPMCPADIGICLRLLLECRDIPILGVCLGHQALGYVHGAHVVHAPEPVHGRLSGIEHDGNILFSDIPSGRNSDFKVVRYHSLIIDKESLPKELVPIAWTIYDDTGSFSEKNSCVPVNNTGSPLGNGSVIPVSEKLENRSHWPSSHVNGKQDRHILMGIMHSSFPHYGLQFHPESIATTYGSQLFKNFKDITVNYWSRCKSTSLRRRNINDTANMQVPDATQLLKELSRTRCTGNGSSYFGNPKSLFSAKTNGVDVFDMVDSSYPKPHTKLLRLKWKKHERLAHKVGGVRNIFMELFGKNRGNDTFWLDTSSSDKARGRFSFMGGKGGSLWKQLTFSLSDQSEVTSKHAGHLLIEDSQSSTEKQFLEEGFLDFLRKELSSISYDEKDFEELPFDFCGGYVGCIGYDIKVECGMPINRHKSNAPDACFFFADNVVAIDHQLDDVYILSLYEEGTAETSFLNDTEEKLISLMGLSTRKLEDQTLPVIDSSQSKTSFVPDKSREQYINDVQSCMKYIKDGESYELCLTTQNRRKIGNADPLGLYLHLRERNPAPYAAFLNFSNANLSLCSSSPERFLKLDRNGMLEAKPIKGTIARGSTPEEDEFLKLQLKLSEKNQAENLMIVDLLRNDLGRVCEPGSVHVPNLMDVESYTTVHTMVSTIRGLKKTDISPVECVRAAFPGGSMTGAPKLRSVEILDSLENCSRGLYSGSIGYFSYNGTFDLNIVIRTVIIHEDEASIGAGGAIVALSSPEDEFEEMILKTRAPANAVMEFCSDQRRQ

SEQ ID NO: 145374 - DNA, 1869 bp, Klebsiella aerogenes
  CDS (151)..(1506): transl_table=11
gaattcgttccactgctttttgctgctgctcgtggctcagcgaaggtaaacctgcaaacatgactgactcctgctacattgtggggcgtaattatttcacgccgtccgcgcgtataccagcggacgtaacgatcaggattgaagaagacgatgttgtcccccgcaatgatttccctgccctggcgcccggatgccgctgaatactattttagcccgttaagttcccagccctgggcgatgctgctgcattccggttttgccgaacatgcgcataaccgttttgacatcattgtcgcccagccgcgcgccacgctggtgactcacggtcaactaaccaccctacgcgaaggggaaaccgtctcaacctccgccgccgatccgcttacgctggtgcatcagcagctggcgcactgtaacctgcagccgcagcctcatccgcatctgccgtttctcggcggcgcgctgggactgttcggctacgatttgggtcgtcgttttgaacatctgccggcgcgggccgacgcggatatcgaactgccggatatggcggtaggtatttatgactgggcgttaatcgtcgatcatcagcgccgggaggtatcgttattcagctatgacgatccgcaggcgcgcctggcgtggctggaagcacagactgcgcctgtcgctgcaacctttaccctgacctcagcgtggcgcgctaatatgagccgcgaggagtatggcgagaagttccgccagattcaggcttatctgcacagcggcgactgctatcaggtcaacctggcgcagcggtttacggcgacgtatcgcggggatgagtggcaggccttccgtcagcttaaccgcgccaatcgcgcgccgttcagcgcctttattcgcctggatgaaggggccgtattaagcctgtcgcccgagcgttttattcagctccggcaaggcgacattcagacccggcccatcaaggggacattacccaggctggccgaccctgagcaggacgcgctgcagcagcaaaagctggcgaactcgccaaaagaccgcgccgaaaatctgatgatcgtcgatttaatgcgtaacgatattggccgggttgcggaacccggtagcgttcgcgttcctgagctgtttgtggtggagcccttccccgccgtgcatcatctggtgagcaccgtcaccgccaggctgcccgctcatctgcacgccgccgacctgctgcgcgcggcctttcccggcggctcaatcaccggcgcgccgaaggtcagagcgatggagatcatcgatgaactggaaccgcagcggcgcaacgcgtggtgcggcagcatcggctatctcagcttctgcggcaacatggatagcagtatcactatccgtacgctgacggcctggcagggacacctctactgctccgccggcggcggaattgtggccgatagcgaagaggcagcggaatatcaggaaacttttgataaagttaatcgtatcctgcatcaactggagagctagaacatggcggacagcgccctcgaacttgacgatttcctctcgcgttttcagcttctgcgtccgcagccccacgcgccaccgctcaaccagcgccaggccgcggtgctggtaccgatagttcgccgcccgcagccggggctgctgctgacccagcgttcgccgctgatgcgcaagcatgcgggtcaggtggccttccccggcggcgcggtagataacagcgatgcaacgctaatcgccgccgcgctgcgtgaagcgcaggaagaggtggcgatcccgccggagtcggttgaggtgattggcgttctgccgccggtcgatagcgtgaccggctttcaggttactccggtggtagggattatccca

SEQ ID NO: 145375 - protein, 451 aa, Klebsiella aerogenes
MLSPAMISLPWRPDAAEYYFSPLSSQPWAMLLHSGFAEHAHNRFDIIVAQPRATLVTHGQLTTLREGETVSTSAADPLTLVHQQLAHCNLQPQPHPHLPFLGGALGLFGYDLGRRFEHLPARADADIELPDMAVGIYDWALIVDHQRREVSLFSYDDPQARLAWLEAQTAPVAATFTLTSAWRANMSREEYGEKFRQIQAYLHSGDCYQVNLAQRFTATYRGDEWQAFRQLNRANRAPFSAFIRLDEGAVLSLSPERFIQLRQGDIQTRPIKGTLPRLADPEQDALQQQKLANSPKDRAENLMIVDLMRNDIGRVAEPGSVRVPELFVVEPFPAVHHLVSTVTARLPAHLHAADLLRAAFPGGSITGAPKVRAMEIIDELEPQRRNAWCGSIGYLSFCGNMDSSITIRTLTAWQGHLYCSAGGGIVADSEEAAEYQETFDKVNRILHQLES

SEQ ID NO: 145376 - DNA, 1413 bp, Lactococcus lactis subsp
  CDS (1)..(1413): transl_table=11
atgttcacaatcagtggagtagtattgataacaagaccagtatacgatgaaggaagtttgaattactgtcagagtggagcaatgaacaacggaatcttgttggaaagtgtagaaggaaacaagcctcgatacagtatcggaggagcagaacctatcggaactatcaacgcaaacgcagtattgactgcagcaacttacgcagaagatgtaaagttcactgatgcagatcctttgaacggaactagagtagcaatctgtaacggagaagatactcaacaagaagaaatgggattccaaggaggagcattgggatacttcgcatacgatgtaggaagaagattggaaggatacaacgatttgggaatcgaagattgggcaatcccagatttggcaggaagtagttacgaaatcggagtaagtgcagatcatcaaaacgatgtaatcgtattgatcgcacatgcaagtgcagatggaaacgatgtattcatcacaagtagtagacaattgagtatggtagcaggaccaacatgttgtgcaagtggagatgtagaaatcttgagaaacaagttgcattactacggagtaatcccattcagtcaagatgattgtggattcaacagattgaaggattacttgggaagtggagatatgtaccaagtaaacttgggaaacagaaacgtaggagcaatcgtaatgacattgttccaaggatacaaccaattgagattgatgaacccgggaccatacatggtattcttggatgaagcaaacatcatcatggcaagtccagaaatcgtattggcagatgaagcaaacgatttgaacacaagaccaatcgcaggaacattgatgagattgaacgagcaagatgaagatggagtaaacgcagcatgtctgggacaacatcataaggatagagcagaacatatgatgatcgtagatttggtaagaaacgatttgggaagagtgggaagattcggaagtgtaaacgtacaagaaatcgtaggagctgaaaactacagtgtagtaatgcatatcgtaagtagagtaacaggatccttgaacgaagcattcgaagcaatggaaatcatcagagcaggattcccaggaggaagtatcacaggagcaccaaaggtaagagcaatggaaatcatcgaagaattggaaccacaaagacgagatggatggggaggaagtatcggatacatcgcatacagaggaaacatcggttacagaatcgcaatcagaacattgttcgcttgtaacggacaattgttcgcaagtagtggagcaggattggtaggagatagtatggaagacggagaatacaacgaaacattcgaaaagatgagagcattgagaagtttcttctgtgcagcggtacatatgggaaagacaccatacttgagttaa

SEQ ID NO: 145377 - protein, 470 aa, Lactococcus lactis subsp
MFTISGVVLITRPVYDEGSLNYCQSGAMNNGILLESVEGNKPRYSIGGAEPIGTINANAVLTAATYAEDVKFTDADPLNGTRVAICNGEDTQQEEMGFQGGALGYFAYDVGRRLEGYNDLGIEDWAIPDLAGSSYEIGVSADHQNDVIVLIAHASADGNDVFITSSRQLSMVAGPTCCASGDVEILRNKLHYYGVIPFSQDDCGFNRLKDYLGSGDMYQVNLGNRNVGAIVMTLFQGYNQLRLMNPGPYMVFLDEANIIMASPEIVLADEANDLNTRPIAGTLMRLNEQDEDGVNAACLGQHHKDRAEHMMIVDLVRNDLGRVGRFGSVNVQEIVGAENYSVVMHIVSRVTGSLNEAFEAMEIIRAGFPGGSITGAPKVRAMEIIEELEPQRRDGWGGSIGYIAYRGNIGYRIAIRTLFACNGQLFASSGAGLVGDSMEDGEYNETFEKMRALRSFFCAAVHMGKTPYLS

SEQ ID NO: 145378 - DNA, 1815 bp, Salmonella typhimurium
  CDS (207)..(1571): transl_table=11
gcgcgaagttcgcccgccacctgggcaatcgcttctccgctactcataccttgcgacatcaattcctggatacgttctacggctttttgctgttgttcatgactgagtgaggtaaacctgcaaacatgattactcctgctaaattgttagcgctaattatttcacgctacccggcggtaagccagtagtgttgtaacgagtcaggaatgatgaagacgttatctcccactgttatcaccttaccctggcgtccggacgccgctgaacactattttgcgcccgtaaaccatttgccctgggcgatgctgctgcattcaggtgatgctattcatccctataaccgttttgatattctggtcgccgatcctgtcaccacactgaccacgcgcgcgcaggaaaccacggtatgtactgcgcgcacgactaccgtcactctcgacgatccgttacacgttttgcagactcaactggaggcgctgccttttcatcctcagcctgaccctgacttaccctttcagggcggcgcgctgggtctgtttggttatgatttagggcggcgtttcgaaattttgcccgatactgccgcgcgcgatatcgctttacccgatatggcgattggcctttacgactgggcgctgattgtcgatcaccaaaaacaggtggtgtcgctgataagctatcacgatgcagacgcccgatatcgctggctcaccagccagcgcgcgccgacccgcacgcccttcaggcttacctcagcctggcaatccaatatgacgcgttgcgagtatggcgagaagtttcgtcaggtgcaggcctggctgcacagcggggactgctatcaggtcaatctttcccagcgttttcaggcgagctacgagggtgatgaatggcaggctttcgaacgccttaaccgcgccaatcgcgccccgttcagcgcctttcttcgtttacatgacggcgccatattgagcctttctcccgagcgttttatccaactggagaatggtcatatccagacgcgcccgatcaaaggtacgcttccacggcttaacgatccgcaggcggatcgtcagcaggcgcagaaactggctaattcaatgaaagatcgcgctgaaaatttgatgattgtcgatttgatgcgtaacgatattggccgggtcgccgtaccaggttcggtgaaagtgccggaactgttcgtcgtcgaaccatttcctgccgttcaccatctggttagcaccattaccgcccgtttaccggactcgcttcatgctaccgacctgctgcgcgcggctttccccggcggctccattaccggcgcgcctaaagtgcgggcaatggaaattatcgacgaactggagccgcagcgacgcaacgcctggtgcggtagcatcggttatctgagtttctgcggcaagatggataccagtattactatccgcaccgtcacggcaacgcagggccaactctattgctcagccggcggcggtatcgtggccgatagcaacgaagaagcggaatatcaggaaacttttgataaagttaatcgtatcctgcacccactggagaactaatacgtggataccagccgtctgacgctcgatcatttcttatcgcgctttcagcttttgcgcccgcagatgactcatgaaacgttaaatcaacgtcaggccgccgtactgatccctgtggttcgccgcccccagccggggctgctgttgacccagcgggctattcatttgcgcaaacacgccggacaggtcgcctttcccggcggggccgtggacagtaccgatgcttcgcttatcgccgcagcgc

SEQ ID NO: 145379 - protein, 454 aa, Salmonella typhimurium
MMKTLSPTVITLPWRPDAAEHYFAPVNHLPWAMLLHSGDAIHPYNRFDILVADPVTTLTTRAQETTVCTARTTTVTLDDPLHVLQTQLEALPFHPQPDPDLPFQGGALGLFGYDLGRRFEILPDTAARDIALPDMAIGLYDWALIVDHQKQVVSLISYHDADARYRWLTSQRAPTRTPFRLTSAWQSNMTRCEYGEKFRQVQAWLHSGDCYQVNLSQRFQASYEGDEWQAFERLNRANRAPFSAFLRLHDGAILSLSPERFIQLENGHIQTRPIKGTLPRLNDPQADRQQAQKLANSMKDRAENLMIVDLMRNDIGRVAVPGSVKVPELFVVEPFPAVHHLVSTITARLPDSLHATDLLRAAFPGGSITGAPKVRAMEIIDELEPQRRNAWCGSIGYLSFCGKMDTSITIRTVTATQGQLYCSAGGGIVADSNEEAEYQETFDKVNRILHPLEN

SEQ ID NO: 145380 - DNA, 2172 bp, Streptomyces griseus
  CDS (1)..(2172): transl_table=11
atgcgcacccttctcgtcgacaactacgactcgttcacctacaacctcttccactacctctcccgggccaacggccgggaacccgaggtcatccgcaacgacgacccggcctggcggccgggtctgctcgacgcgttcgacaacgtggtgctctccccggggccgggcaccccgcaccgcccggccgacttcggcctgtgcgcccggatcgccgaggagggccggctgccggtgctcggcgtctgcctgggccaccagggcatggccctcgcccacggcgcccgggtgggccgggcccccgagccccgtcacggccgcacctcggcggtacggcacgacggcaccgggctcttcgaggggctgccgcagccgctggaggtggtgcggtaccactccctcgcggtgacggaactgccgccggagctggaggccaccgcctggtcggaggacggggtcctgatggcgctgcgccaccgcacgctgccgctgtggggagtgcagttccaccccgagtcgatcggcacccaggacggccaccggctgctggccaacttccgcgacctcaccgagcgccacggccgaacgcgccacggcggccgggcgggacacggcacgctcccgccccccgcgcccgcccgggagacgaaggccaccaccggcaccccacggcggctccgggtcatcgcaaagtcgctgcccacgcgctgggacgccgaggtcgccttcgactcgctgttccgcaccggcgaccaccccttctggctcgacagcagccgtcccgggggcgagctgggccagctctccatgatgggcgacgcctcaggtcccctcgcccggaccgccaaggccgacgtgcacgccggaaccgtcacggtgagagccgacggcgccagcagcacggtcgagagcgccttcctgacctggctggagaacgacctggcggggctgcgcaccgaggtgcccgaacttcccttcgcgttcgcgctcggctgggtcggctgcctgggctacgagttgaaggccgagtgcgacggcgacgccgcgcaccgctcgcccgatcccgacgccgtgctggtcttcgccgaccgggccctggtgctggaccaccgcacccgcaccacctacctgctggcgctggtggaggacgacgccgaggccgaggcgcgcgcctggctcgcggcggcctccgccaccctggacgccgtcgccgggcgggagcccgagccgtgccccgaggcgcccgtgtgcacgacgggtccggtggagctgcgccacgaccgggacggctacctgaagctgatcgacgtctgccagcaggagatagccgccggggagacctacgaggtctgcctgaccaacatggccgaggcggacaccgacctcaccccgtgggcggcctaccgcgcgctgcgccgggtgagccccgccccgttcgccgcgttcctggacttcggtcccatggccgtgctcagcagctctccggagcggttcctgcgcatcgaccggcacgggcggatggagtccaagccgatcaagggcacgcggccacgcggcgccaccccgcaggaggacgccgcgctcgtacgtgccctggccacctgcgagaaggaccgcgccgagaacctgatgatcgtcgacctggtccgccacgacctggggcggtgcgccgaggtcggctcggtcgtcgccgacccggtgttccaggtcgagacgtacgcgaccgtgcaccagctggtcagtaccgtcacggcgcggctgcgcgaggacagcagcccggtggcggcggtccgggcggccttccccggcgggtcgatgaccggggcgccgaagatccgcaccatgcagatcatcgaccggctggaaggcgggccgcgcggtgtctactcgggcgccatcggctacttctccctcaccggcgcggtagacctgtccatcgtgatccgcacggtggtgctcagcggcggcaggctgcgctacggcgtcggcggcgccgtcatcgcgctctccgacccggccgacgagttcgaggagacggcggtcaaggccgccccgctgctgcgtctcctcgacaccgccttcccgggccgtgagcgtcccggcaaggacctcgacggtgaacccgacgacggcacggacgcgggtgctccgaaggacctcgtcctgcccgggtga

SEQ ID NO: 145381 - protein, 723 aa, Streptomyces griseus
MRTLLVDNYDSFTYNLFHYLSRANGREPEVIRNDDPAWRPGLLDAFDNVVLSPGPGTPHRPADFGLCARIAEEGRLPVLGVCLGHQGMALAHGARVGRAPEPRHGRTSAVRHDGTGLFEGLPQPLEVVRYHSLAVTELPPELEATAWSEDGVLMALRHRTLPLWGVQFHPESIGTQDGHRLLANFRDLTERHGRTRHGGRAGHGTLPPPAPARETKATTGTPRRLRVIAKSLPTRWDAEVAFDSLFRTGDHPFWLDSSRPGGELGQLSMMGDASGPLARTAKADVHAGTVTVRADGASSTVESAFLTWLENDLAGLRTEVPELPFAFALGWVGCLGYELKAECDGDAAHRSPDPDAVLVFADRALVLDHRTRTTYLLALVEDDAEAEARAWLAAASATLDAVAGREPEPCPEAPVCTTGPVELRHDRDGYLKLIDVCQQEIAAGETYEVCLTNMAEADTDLTPWAAYRALRRVSPAPFAAFLDFGPMAVLSSSPERFLRIDRHGRMESKPIKGTRPRGATPQEDAALVRALATCEKDRAENLMIVDLVRHDLGRCAEVGSVVADPVFQVETYATVHQLVSTVTARLREDSSPVAAVRAAFPGGSMTGAPKIRTMQIIDRLEGGPRGVYSGAIGYFSLTGAVDLSIVIRTVVLSGGRLRYGVGGAVIALSDPADEFEETAVKAAPLLRLLDTAFPGRERPGKDLDGEPDDGTDAGAPKDLVLPG

SEQ ID NO: 145382 - DNA, 1788 bp, Arabidopsis thaliana; identical to SEQ ID NO: 76774
  CDS (1)..(1788)

SEQ ID NO: 145383 - protein, 595 aa, Arabidopsis thaliana; identical to SEQ ID NO: 76775

SEQ ID NO: 145384 - DNA, 1470 bp, Schizosaccharomyces pombe; identical to SEQ ID NO: 76832
  CDS (1)..(1470)

SEQ ID NO: 145385 - protein, 489 aa, Schizosaccharomyces pombe; identical to SEQ ID NO: 76833

SEQ ID NO: 145386 - DNA, 1524 bp, Saccharomyces cerevisiae; identical to SEQ ID NO: 76844
  CDS (1)..(1524)

SEQ ID NO: 145387 - protein, 507 aa, Saccharomyces cerevisiae; identical to SEQ ID NO: 76845

SEQ ID NO: 145388 - DNA, 1866 bp, Arabidopsis thaliana; identical to SEQ ID NO: 76846
  CDS (1)..(1866)

SEQ ID NO: 145389 - protein, 621 aa, Arabidopsis thaliana; identical to SEQ ID NO: 76847

SEQ ID NO: 145390 - DNA, 1821 bp, Oryza sativa; identical to SEQ ID NO: 76848
  CDS (1)..(1821)

SEQ ID NO: 145391 - protein, 606 aa, Oryza sativa; identical to SEQ ID NO: 76849

SEQ ID NO: 145392 - DNA, 1782 bp, Oryza sativa; identical to SEQ ID NO: 76850
  CDS (1)..(1782)

SEQ ID NO: 145393 - protein, 593 aa, Oryza sativa; identical to SEQ ID NO: 76851

SEQ ID NO: 145394 - DNA, 1545 bp, Oryza sativa; identical to SEQ ID NO: 76852
  CDS (1)..(1545)

SEQ ID NO: 145395 - protein, 514 aa, Oryza sativa; identical to SEQ ID NO: 76853

SEQ ID NO: 145396 - DNA, 1815 bp, Zea mays
  CDS (1)..(1815)
atggaatccctagccgccacctccgtgttcgcgccctcccgcgtcgccgtcccggcggcgcgggccctggttagggcggggacggtggtaccaaccaggcggacgagcagccggagcggaaccagcggggtgaaatgctctgctgccgtgacgccgcaggcgagcccagtgattagcaggagcgctgcggcggcgaaggcggcggaggaggacaagaggcggttcttcgaggcggcggcgcgggggagcgggaaggggaacctggtgcccatgtgggagtgcatcgtgtcggaccatctcacccccgtgctcgcctaccgctgcctcgtccccgaggacaacgtcgacgcccccagcttcctcttcgagtccgtcgagcaggggccccagggcaccaccaacgtcggccgctatagcatggtgggagcccacccagtgatggagattgtggccaaagaccacaaggttacgatcatggaccacgagaagagccaagtgacagagcaggtagtggacgacccgatgcagatcccgaggaccatgatggagggatggcacccacagcagatcgacgagctccctgaatccttctccggtggatgggttgggttcttttcctatgatacggttaggtatgttgagaagaagaagctaccgttctccagtgctcctcaggacgataggaaccttcctgatgtgcacttgggactctatgatgatgttctagtcttcgataatgttgagaagaaagtatatgttatccattgggtcaatgtggaccggcatgcatctgttgaggaagcataccaagatggcaggtcccgactaaacatgttgctatctaaagtgcacaattccaatgtccccacactctctcctggatttgtgaagctgcacacacgcaagtttggtacacctttgaacaagtcgaccatgacaagtgatgagtataagaatgctgttctgcaggctaaggaacatattatggctggggatatcttccagattgttttaagccagaggttcgagagacgaacatatgccaacccatttgaggtttatcgagcattacggattgtgaatcctagcccatacatggcgtatgtacaggcaagaggctgtgtattggttgcgtctagtcctgaaattcttacacgagtcagtaaggggaagattattaatcgaccacttgctggaactgttcgaaggggcaagacagagaaggaagatcaaatgcaagagcagcaactgttaagtgatgaaaaacagtgtgccgagcacataatgcttgtggacttgggaaggaatgatgttggcaaggtatccaaaccaggatcagtgaaggtggagaagttgatgaacattgagagatactcccatgttatgcacatcagctcaacggttagtggacagttggatgatcatctccagagttgggatgccttgagagctgccttgcccgttggaacagtcagtggtgcaccaaaggtgaaggccatggagttgattgataagttggaagttacgaggcgaggaccatatagtggtggtctaggaggaatatcgtttgatggtgacatgcaaattgcactttctctccgcaccatcgtattctcaacagcgccgagccacaacacgatgtactcatacaaagacgcagataggcgtcgggagtgggtcgctcatcttcaggctggtgcaggcattgttgccgacagtagcccagatgacgaacaacgtgaatgcgagaataaggctgctgcactagctcgggccatcgatcttgcagagtcagcttttgtagacaaagaatag

SEQ ID NO: 145397 - protein, 604 aa, Zea mays; identical to SEQ ID NO: 76857

SEQ ID NO: 145398 - DNA, 1797 bp, Brassica napus; identical to SEQ ID NO: 76854
  CDS (1)..(1797)

SEQ ID NO: 145399 - protein, 598 aa, Brassica napus; identical to SEQ ID NO: 76855

SEQ ID NO: 145400 - DNA, 1734 bp, Zea mays; identical to SEQ ID NO: 76858
  CDS (1)..(1734)

SEQ ID NO: 145401 - protein, 577 aa, Zea mays; identical to SEQ ID NO: 76859

SEQ ID NO: 145402 - DNA, 23 bp, Artificial sequence
  primer
atgaagacgttatctcccgctgt

SEQ ID NO: 145403 - DNA, 24 bp, Artificial sequence
  primer
ttacttctccagttgcttcaggat

SEQ ID NO: 145404 - protein, 744 aa, Artificial sequence
  consensus sequence
  Variant (2)..(5): Xaa in position 2 to 5 is any amino acid
  Variant (6)..(16): Xaa in position 6 to 16 is any or no amino acid
  Variant (18)..(24): Xaa in position 18 to 24 is any amino acid
  Variant (26)..(35): Xaa in position 26 to 35 is any amino acid
  Variant (36)..(110): Xaa in position 36 to 110 is any or no amino acid
  Variant (112)..(125): Xaa in position 112 to 125 is any amino acid
  Variant (126)..(332): Xaa in position 126 to 332 is any or no amino acid
  Variant (334)..(334): Xaa in position 334 is any amino acid
  Variant (337)..(338): Xaa in position 337 to 338 is any amino acid
  Variant (340)..(342): Xaa in position 340 to 342 is any amino acid
  Variant (345)..(348): Xaa in position 345 to 348 is any amino acid
  Variant (349)..(349): Xaa in position 349 is any or no amino acid
  Variant (351)..(353): Xaa in position 351 to 353 is any amino acid
  Variant (354)..(366): Xaa in position 354 to 366 is any or no amino acid
  Variant (368)..(378): Xaa in position 368 to 378 is any amino acid
  Variant (379)..(380): Xaa in position 379 to 380 is any or no amino acid
  Variant (382)..(426): Xaa in position 382 to 426 is any amino acid
  Variant (427)..(454): Xaa in position 427 to 454 is any or no amino acid
  Variant (456)..(467): Xaa in position 456 to 467 is any amino acid
  Variant (468)..(468): Xaa in position 468 is any or no amino acid
  Variant (471)..(472): Xaa in position 471 to 472 is any amino acid
  Variant (474)..(477): Xaa in position 474 to 477 is any amino acid
  Variant (480)..(491): Xaa in position 480 to 491 is any amino acid
  Variant (492)..(498): Xaa in position 492 to 498 is any or no amino acid
  Variant (500)..(501): Xaa in position 500 to 501 is any amino acid
  Variant (503)..(508): Xaa in position 503 to 508 is any amino acid
  Variant (510)..(522): Xaa in position 510 to 522 is any amino acid
  Variant (523)..(526): Xaa in position 523 to 526 is any or no amino acid
  Variant (530)..(542): Xaa in position 530 to 542 is any amino acid
  Variant (543)..(543): Xaa in position 543 is any or no amino acid
  Variant (546)..(546): Xaa in position 546 is any amino acid
  Variant (549)..(550): Xaa in position 549 to 550 is any amino acid
  Variant (552)..(557): Xaa in position 552 to 557 is any amino acid
  Variant (559)..(564): Xaa in position 559 to 564 is any amino acid
  Variant (566)..(569): Xaa in position 566 to 569 is any amino acid
  Variant (571)..(572): Xaa in position 571 to 572 is any amino acid
  Variant (575)..(576): Xaa in position 575 to 576 is any amino acid
  Variant (578)..(578): Xaa in position 578 is any amino acid
  Variant (582)..(582): Xaa in position 582 is any amino acid
  Variant (586)..(592): Xaa in position 586 to 592 is any amino acid
  Variant (593)..(594): Xaa in position 593 to 594 is any or no amino acid
  Variant (596)..(596): Xaa in position 596 is any amino acid
  Variant (598)..(599): Xaa in position 598 to 599 is any amino acid
  Variant (601)..(603): Xaa in position 601 to 603 is any amino acid
  Variant (605)..(608): Xaa in position 605 to 608 is any amino acid
  Variant (610)..(610): Xaa in position 610 is any amino acid
  Variant (612)..(613): Xaa in position 612 to 613 is any amino acid
  Variant (615)..(619): Xaa in position 615 to 619 is any amino acid
  Variant (621)..(626): Xaa in position 621 to 626 is any amino acid
  Variant (627)..(627): Xaa in position 627 is any or no amino acid
  Variant (629)..(634): Xaa in position 629 to 634 is any amino acid
  Variant (636)..(636): Xaa in position 636 is any amino acid
  Variant (638)..(640): Xaa in position 638 to 640 is any amino acid
  Variant (645)..(646): Xaa in position 645 to 646 is any amino acid
  Variant (649)..(650): Xaa in position 649 to 650 is any amino acid
  Variant (652)..(653): Xaa in position 652 to 653 is any amino acid
  Variant (656)..(657): Xaa in position 656 to 657 is any amino acid
  Variant (658)..(658): Xaa in position 658 is any or no amino acid
  Variant (660)..(661): Xaa in position 660 to 661 is any amino acid
  Variant (663)..(663): Xaa in position 663 is any amino acid
  Variant (665)..(666): Xaa in position 665 to 666 is any amino acid
  Variant (668)..(671): Xaa in position 668 to 671 is any amino acid
  Variant (672)..(672): Xaa in position 672 is any or no amino acid
  Variant (674)..(675): Xaa in position 674 to 675 is any amino acid
  Variant (676)..(686): Xaa in position 676 to 686 is any or no amino acid
  Variant (688)..(689): Xaa in position 688 to 689 is any amino acid
  Variant (691)..(692): Xaa in position 691 to 692 is any amino acid
  Variant (695)..(706): Xaa in position 695 to 706 is any amino acid
  Variant (707)..(724): Xaa in position 707 to 724 is any or no amino acid
  Variant (726)..(726): Xaa in position 726 is any amino acid
  Variant (730)..(730): Xaa in position 730 is any amino acid
  Variant (733)..(736): Xaa in position 733 to 736 is any amino acid
  Variant (738)..(739): Xaa in position 738 to 739 is any amino acid
  Variant (741)..(743): Xaa in position 741 to 743 is any amino acid
LXXXXXXXXXXXXXXXRXXXXXXXPXXXXXXXXXXXXXXXXXXXXXXXXXXXXXXXXXXXXXXXXXXXXXXXXXXXXXXXXXXXXXXXXXXXXXXXXXXXXXXXXXXXXXPXXXXXXXXXXXXXXXXXXXXXXXXXXXXXXXXXXXXXXXXXXXXXXXXXXXXXXXXXXXXXXXXXXXXXXXXXXXXXXXXXXXXXXXXXXXXXXXXXXXXXXXXXXXXXXXXXXXXXXXXXXXXXXXXXXXXXXXXXXXXXXXXXXXXXXXXXXXXXXXXXXXXXXXXXXXXXXXXXXXXXXXXXXXXXXXXXXXXXXXXXXXXXXXXXXXXXXXXXXXXXFXGGXXGXXXYDXXXXXEXXXXXXXXXXXXXXXXPXXXXXXXXXXXXXDXXXXXXXXXXXXXXXXXXXXXXXXXXXXXXXXXXXXXXXXXXXXXXXXXXXXXXXXXXXXXXXXXXXXXXXXXYXXXXXXXXXXXXXGDXXQXXXXQRXXXXXXXXXXXXXXXXXXXYXXLXXXXXXPXXXXXXXXXXXXXXXXXSPEXXXXXXXXXXXXXXPIXGTXXRXXXXXXDXXXXXXLXXXXKXXAEXXMXVDLXRNDXXXXXXXXXVXVXXLXXXEXXXXVXHXXSXXXXXLXXXXXXXDXXXXXXPXGXXXGAPKXXAMXXIXXLEXXXRXXYXGXXGXXXXXGXXXXXXXXXXXXXDXXIXXRTXXXXXXXXXXXXXXXXXXXXXXXXXXXXXXGXGIVXDSXXXXEXXEXXXK

SEQ ID NO: 145405 - protein, 23 aa, Artificial sequence
  protein pattern
  Variant (2)..(2): Xaa in position 2 is any amino acid
  Variant (3)..(3): Xaa in position 3 is Ala, Glu, Gly, Asn, Gln or Ser
  Variant (4)..(5): Xaa in position 4 to 5 is any amino acid
  Variant (7)..(7): Xaa in position 7 is Asp, Glu, Gln or Thr
  Variant (8)..(8): Xaa in position 8 is any amino acid
  Variant (9)..(9): Xaa in position 9 is Ala or Ser
  Variant (11)..(12): Xaa in position 11 to 12 is any amino acid
  Variant (14)..(14): Xaa in position 14 is Ile or Leu
  Variant (18)..(18): Xaa in position 18 is any amino acid
  Variant (22)..(22): Xaa in position 22 is Ile, Leu or Val
  Variant (23)..(23): Xaa in position 23 is Ala, Gly, Asn or Ser
LXXXXKXXXEXXMXVDLXRNDXX

SEQ ID NO: 145406 - protein, 23 aa, Artificial sequence
  protein pattern
  Variant (2)..(2): Xaa in position 2 is Ala, Gly or Val
  Variant (4)..(5): Xaa in position 4 to 5 is any or no amino acid
  Variant (7)..(8): Xaa in position 7 to 8 is any or no amino acid
  Variant (13)..(13): Xaa in position 13 is any amino acid
  Variant (14)..(14): Xaa in position 14 is Lys or Arg
  Variant (15)..(15): Xaa in position 15 is Ala, Ser or Thr
  Variant (17)..(17): Xaa in position 17 is Ala, Asp, Glu or Gln
  Variant (18)..(18): Xaa in position 18 is Ile or Leu
  Variant (20)..(21): Xaa in position 20 to 21 is any amino acid
PXGXXSXXGAPKXXXMXXIXXLE

SEQ ID NO: 145407 - protein, 26 aa, Artificial sequence
  protein pattern
  Variant (2)..(7): Xaa in position 2 to 7 is any amino acid
  Variant (8)..(9): Xaa in position 8 to 9 is any or no amino acid
  Variant (11)..(11): Xaa in position 11 is any amino acid
  Variant (12)..(12): Xaa in position 12 is Phe or Tyr
  Variant (13)..(13): Xaa in position 13 is Ala, Pro or Ser
  Variant (14)..(14): Xaa in position 14 is any amino acid
  Variant (16)..(16): Xaa in position 16 is any or no amino acid
  Variant (18)..(18): Xaa in position 18 is Ile or Leu
  Variant (19)..(19): Xaa in position 19 is Ser, Thr or Val
  Variant (21)..(21): Xaa in position 21 is any amino acid
  Variant (22)..(22): Xaa in position 22 is Ile or Val
  Variant (23)..(23): Xaa in position 23 is any amino acid
  Variant (24)..(24): Xaa in position 24 is Ala, Gly or Ser
  Variant (25)..(25): Xaa in position 25 is any amino acid
  Variant (26)..(26): Xaa in position 26 is Ile, Leu or Val
VXXXXXXXXEXXXXVXHXXSXXXXXX

SEQ ID NO: 145408 - protein, 20 aa, Artificial sequence
  protein pattern
  Variant (2)..(2): Xaa in position 2 is Ala or Gly
  Variant (4)..(4): Xaa in position 4 is Ile, Leu or Val
  Variant (6)..(6): Xaa in position 6 is any amino acid
  Variant (9)..(12): Xaa in position 9 to 12 is any amino acid
  Variant (14)..(15): Xaa in position 14 to 15 is any amino acid
  Variant (17)..(17): Xaa in position 17 is Cys, Ser or Thr
  Variant (18)..(19): Xaa in position 18 to 19 is any amino acid
GXGXVXDSXXXXEXXEXXXK

SEQ ID NO: 145409 - protein, 15 aa, Artificial sequence
  protein pattern
  Variant (2)..(3): Xaa in position 2 to 3 is any or no amino acid
  Variant (5)..(5): Xaa in position 5 is any amino acid
  Variant (8)..(9): Xaa in position 8 to 9 is any amino acid
  Variant (11)..(11): Xaa in position 11 is any amino acid
  Variant (12)..(12): Xaa in position 12 is Phe, Ile, Leu or Val
  Variant (13)..(13): Xaa in position 13 is Ala, Gly, Asn, Pro or Ser
  Variant (15)..(15): Xaa in position 15 is Asp, Glu, Asn or Thr
PXXFXGGXXGXXXYX

SEQ ID NO: 145410 - protein, 12 aa, Artificial sequence
  protein pattern
  Variant (2)..(2): Xaa in position 2 is Gly, Asn or Ser
  Variant (3)..(3): Xaa in position 3 is Ala, Ile, Leu, Pro or Val
  Variant (4)..(4): Xaa in position 4 is Trp or Tyr
  Variant (5)..(5): Xaa in position 5 is Ala, Cys, Gly, Ser or Thr
  Variant (7)..(7): Xaa in position 7 is Ala, Cys, Gly, Asn or Ser
  Variant (8)..(8): Xaa in position 8 is Phe, Ile, Leu, Met or Val
  Variant (10)..(11): Xaa in position 10 to 11 is any amino acid
  Variant (12)..(12): Xaa in position 12 is Asp, Glu, Gly or Ser
RXXXXGXXGXXX

SEQ ID NO: 145411 - DNA, 1425 bp, Escherichia coli
  CDS (1)..(1425): transl_table=11
atgagtcgtttagtcgtagtatctaaccggattgcaccaccagacgagcacgccgccagtgccggtggccttgccgttggcatactgggggcactgaaagccgcaggcggactgtggtttggctggagtggtgaaacagggaatgaggatcagccgctaaaaaaggtgaaaaaaggtaacattacgtgggcctcttttaacctcagcgaacaggaccttgacgaatactacaaccaattctccaatgccgttctctggcccgcttttcattatcggctcgatctggtgcaatttcagcgtcctgcctgggacggctatctacgcgtaaatgcgttgctggcagataaattactgccgctgttgcaagacgatgacattatctggatccacgattatcacctgttgccatttgcgcatgaattacgcaaacggggagtgaataatcgcattggtttctttctgcatattcctttcccgacaccggaaatcttcaacgcgctgccgacatatgacaccttgcttgaacagctttgtgattatgatttgctgggtttccagacagaaaacgatcgtctggcgttcctggattgtctttctaacctgacccgcgtcacgacacgtagcgcaaaaagccatacagcctggggcaaagcatttcgaacagaagtctacccgatcggcattgaaccgaaagaaatagccaaacaggctgccgggccactgccgccaaaactggcgcaacttaaagcggaactgaaaaacgtacaaaatatcttttctgtcgaacggctggattattccaaaggtttgccagagcgttttctcgcctatgaagcgttgctggaaaaatatccgcagcatcatggtaaaattcgttatacccagattgcaccaacgtcgcgtggtgatgtgcaagcctatcaggatattcgtcatcagctcgaaaatgaagctggacgaattaatggtaaatacgggcaattaggctggacgccgctttattatttgaatcagcattttgaccgtaaattactgatgaaaatattccgctactctgacgtgggcttagtgacgccactgcgtgacgggatgaacctggtagcaaaagagtatgttgctgctcaggacccagccaatccgggcgttcttgttctttcgcaatttgcgggagcggcaaacgagttaacgtcggcgttaattgttaacccctacgatcgtgacgaagttgcagctgcgctggatcgtgcattgactatgtcgctggcggaacgtatttcccgtcatgcagaaatgctggacgttatcgtgaaaaacgatattaaccactggcaggagtgcttcattagcgacctaaagcagatagttccgcgaagcgcggaaagccagcagcgcgataaagttgctacctttccaaagcttgcgtaa

SEQ ID NO: 145412 - protein, 474 aa, Escherichia coli
MSRLVVVSNRIAPPDEHAASAGGLAVGILGALKAAGGLWFGWSGETGNEDQPLKKVKKGNITWASFNLSEQDLDEYYNQFSNAVLWPAFHYRLDLVQFQRPAWDGYLRVNALLADKLLPLLQDDDIIWIHDYHLLPFAHELRKRGVNNRIGFFLHIPFPTPEIFNALPTYDTLLEQLCDYDLLGFQTENDRLAFLDCLSNLTRVTTRSAKSHTAWGKAFRTEVYPIGIEPKEIAKQAAGPLPPKLAQLKAELKNVQNIFSVERLDYSKGLPERFLAYEALLEKYPQHHGKIRYTQIAPTSRGDVQAYQDIRHQLENEAGRINGKYGQLGWTPLYYLNQHFDRKLLMKIFRYSDVGLVTPLRDGMNLVAKEYVAAQDPANPGVLVLSQFAGAANELTSALIVNPYDRDEVAAALDRALTMSLAERISRHAEMLDVIVKNDINHWQECFISDLKQIVPRSAESQQRDKVATFPKLA

SEQ ID NO: 145413 - DNA, 2601 bp, Oryza sativa (japonica cultivar-group)
  CDS (1)..(2601)
atggtttcgagatcctactccaacttgctggggcggcgacggattccgcgggtggtgacggcgtcgggcattgtcccggacctggactactccgacgacgacgcggcgtcggcggcgtcgtcgtccgaccactcctccgcccactcccacgcgccgcgcgagcgcgccatcatcgtcgccaaccagctgcccatccgcgcgtctcgccgcggcggcggcggcggcgggtgggagttctcctgggacgaggacagcctcctcctgcagctcagggacagcctccgcgcccacgccgaccgcgccgacgacatggagttcgtctacgtcggcggcctccgcgacgacgtgcccgcggcggagcacgacgaggtggcgcaccacctcctcgagggcttccgctgcgtgcccaccttcctccccgccgacctccggtcgcggttctaccacggattctgcaagcagcagctgtggccactgttccattacatgctcccgctgtcgccggagctcggcggccgcttcgaccgcgcgctgtggcaggcgtacgtgtccgtcaacaagatcttcgccgacaagatactggaggtgatcagccccgacgaggactacgtctgggtgcacgactaccatctcatgatcttgccgacgttcctgcggaagcggttcaaccgcgtcaagctcggcttcttcctccacagcccgttcccgtcgtcggagatctacaagaccctgcccgtccgcgaggagctgctccggtcgctcctgaacgccgatttgatcgggttccacaccttcgattatgccaggcatttcctgtcctgctgtggaaggatgctcgggttgaagtatgagtcgcagaggggctacattgcgctggagtattatggtcggacggttaccatcaagatattgccggtgggagttcatttggagcagctgcggtcggtgctcaatcttccggagacgggggtcaaggtggccgagcttctcaagcaattctgcgatcagaaccggctgatgttgcttggcgtagatgatatggacatctttaaaggaattagcttgaagcttttggcatttgagcagctcctgatgcaacatcccgaatggcgaggaagggtggttctagtacagattgccaatccagcgaggggacgggggaaagatgtgaaagaggtgcaggatgagagctatgcaatggtgaggcgtatcaatgaggcatttgggcagccaggttaccagccggttatattgatcgatcggccacttcagttctatgagagaatggcttactatgttgtcgctgagtgctgcctggtgaccgcagtgagagatggcatgaatcttatcccgtatgagtatgtaattgctaggcagggcaatgaaaaactagacgggatcttaggtcttggcccatcggcacggaagaagagcatgcttgttgtgtcagagttcatcggctgttcaccttccctaagtggtgcgattcgggtaaacccttggaacatcgatgctgtggctgatgcaatggactctgctttagagatgcctgaaggggagaaggtgctgagacatgagaagcaccacaaatatgtgagcacacatgatgttggatactgggcaaacagcttcttgcaagatctggagaggacttgtctggaccatagcaggaggcgttgttgggggataggattcgggctaaggtttagggttgtagcccttgatccaaacttcaagaagcttgcagttgagcaccttgtctcagcctaccggaggacgaccacgcgaatcattcttttggactatgacgggacgctgatgcctcaaacatcatttggtaagagcccaagctctaaaacgatagatatgctgaacagcctgtcccgtgatcagaacaacatggtcttccttgtgagcacaaagaagcggtcgactctagaagaatggttctcatcatgcgacaacctaggcttagctgctgagcatggatactttctcaggctgaagagagatgcagaatgggagacgtgtgtcccagtgacagacagaagctggaagcaaatcgcagagcctgtgatgaaaacatacaccgagacaacagatgggtcaacaattgaggacaaggagaccgcgatagtgtggagctacgaggatgctgatcctgattttggatcttgccaagccaaggagctccatgaccatctggagagtgtccttgcaaatgagccagttacagtaaaagctggcctgaaccatgtcgaggtgaagccacagggtgtaagcaagggccttgtggcaaaacggcttttgtcgataatacgggagaacagcctccttccggactttgtcctctgcatcggtgatgaccgctccgatgaagacatgttcgaggtgatcaccactgcagcacaggacaactgcctaagcccagacgccgaggtcttcgcctgcaccgttggtcgcaagcccagcaaggccaagtactacctggatgacctggccgacattgtgaggctgatccagggcctcgccaatgtctctgacgagatgcacagcacaatgcccacacctgtcgacgccgcagacaccgccctgaggtga

SEQ ID NO: 145414 - protein, 866 aa, Oryza sativa (japonica cultivar-group)
MVSRSYSNLLGRRRIPRVVTASGIVPDLDYSDDDAASAASSSDHSSAHSHAPRERAIIVANQLPIRASRRGGGGGGWEFSWDEDSLLLQLRDSLRAHADRADDMEFVYVGGLRDDVPAAEHDEVAHHLLEGFRCVPTFLPADLRSRFYHGFCKQQLWPLFHYMLPLSPELGGRFDRALWQAYVSVNKIFADKILEVISPDEDYVWVHDYHLMILPTFLRKRFNRVKLGFFLHSPFPSSEIYKTLPVREELLRSLLNADLIGFHTFDYARHFLSCCGRMLGLKYESQRGYIALEYYGRTVTIKILPVGVHLEQLRSVLNLPETGVKVAELLKQFCDQNRLMLLGVDDMDIFKGISLKLLAFEQLLMQHPEWRGRVVLVQIANPARGRGKDVKEVQDESYAMVRRINEAFGQPGYQPVILIDRPLQFYERMAYYVVAECCLVTAVRDGMNLIPYEYVIARQGNEKLDGILGLGPSARKKSMLVVSEFIGCSPSLSGAIRVNPWNIDAVADAMDSALEMPEGEKVLRHEKHHKYVSTHDVGYWANSFLQDLERTCLDHSRRRCWGIGFGLRFRVVALDPNFKKLAVEHLVSAYRRTTTRIILLDYDGTLMPQTSFGKSPSSKTIDMLNSLSRDQNNMVFLVSTKKRSTLEEWFSSCDNLGLAAEHGYFLRLKRDAEWETCVPVTDRSWKQIAEPVMKTYTETTDGSTIEDKETAIVWSYEDADPDFGSCQAKELHDHLESVLANEPVTVKAGLNHVEVKPQGVSKGLVAKRLLSIIRENSLLPDFVLCIGDDRSDEDMFEVITTAAQDNCLSPDAEVFACTVGRKPSKAKYYLDDLADIVRLIQGLANVSDEMHSTMPTPVDAADTALR

SEQ ID NO: 145415 - DNA, 1563 bp, Mesorhizobium loti MAFF303099
  CDS (1)..(1563): transl_table=11
gtgcaatggtcgcccgaaacgctgcgtcacatcctggcgaccgaacttcccgatgcccaggtgatcgtcgtctcaaaccgtgaaccgtatatccacaaccgcgagggcgacgacatccagctggtcgtacccgccagcgggctcgtctccgccctggagccgatcacgcgtgcctgcgcgggcacctggatcgcctatggcggtggttcggccgacaagctggttgtcgacaagaacgaccggatcgaggtgccgccggacaacccttcctacacgctgcgccgtgtctggctgagcgaggaagaacagcaaggctattatctcggctttgccaatgaaggcctctggccgctgtgccatatcgccttcacccggccgatattccgcgcctcggattgggaggcctacgaggcggtcaaccgcaaattcgccgacaccgtcgtcgcggaagcccgcaacgaacggcccatcgtgctggtccaggattatcatttcgcgctgctgccgcgaatgatccgtgaacggctgccggaggcgatcatcatcaccttctggcatattccgtggccgaattccgaggtgttcagcatctgcccatggcgcgaaaagattctcgacggcctgctcggcagttctatcgtcggtttccacacccagttccattgcaacaacttcatcgacagcgtcgaccgtttcctggaaagccggatcgagcgcgaggattcggccatttcctatggcggccagatcagcctggtccatgcctatccgatctcaatcgagtggccgccggcgcaattgggcaaactgcctgacgtggcgcaatgccgccggcaggttcgcgagaaattcggcctggccgaaaatgtcaagctgtgcgtgggcgtcgaacgtctcgactacaccaaaggcatcctcgatcgcttcaacgcgctcgacgaactgctgacgcttcatcccgaatggatcggcaaggtggcgttcctgcagatcgctgcgcccagccgcggcacgttgcctgcctatcaacaattgtacgaggagtgcctgcgccatgccgaggatctcaaccagcgctatggtcgcgaaggctacacaccagtcctgatgataacggaacatcactcgcagcagcaggtctacgaaatctaccgtgcagccgacgtttgcatggtcaccagtctgcatgacggcatgaacctggttgccaaggagtttgtcgcggcgcgtgaggacgaacagggcgtgctgttgctcagcatgttcgccggcgcctccaaagagctgctggacgcactgatcgtcaatccctatgacgcggctatgatgggagatgccttgctgcaggccttgaccatgtcgcaggaagagcaaagccagcgcatgcgacgcatgcgcgagatcgtacgcgacaacaacgtctatcggtgggccggcagcatgcttctcgatgcggcgcgcttgcgcaagcgcgacgcggtcgatcgcgccgtcagcgccgctccagcggccccagccaatgtcatatcgctgctcgatcgcagacgcgtggcggcgctatga

SEQ ID NO: 145416 - protein, 520 aa, Mesorhizobium loti MAFF303099
MQWSPETLRHILATELPDAQVIVVSNREPYIHNREGDDIQLVVPASGLVSALEPITRACAGTWIAYGGGSADKLVVDKNDRIEVPPDNPSYTLRRVWLSEEEQQGYYLGFANEGLWPLCHIAFTRPIFRASDWEAYEAVNRKFADTVVAEARNERPIVLVQDYHFALLPRMIRERLPEAIIITFWHIPWPNSEVFSICPWREKILDGLLGSSIVGFHTQFHCNNFIDSVDRFLESRIEREDSAISYGGQISLVHAYPISIEWPPAQLGKLPDVAQCRRQVREKFGLAENVKLCVGVERLDYTKGILDRFNALDELLTLHPEWIGKVAFLQIAAPSRGTLPAYQQLYEECLRHAEDLNQRYGREGYTPVLMITEHHSQQQVYEIYRAADVCMVTSLHDGMNLVAKEFVAAREDEQGVLLLSMFAGASKELLDALIVNPYDAAMMGDALLQALTMSQEEQSQRMRRMREIVRDNNVYRWAGSMLLDAARLRKRDAVDRAVSAAPAAPANVISLLDRRRVAAL

SEQ ID NO: 145417 - DNA, 1341 bp, Thermoplasma volcanium GSS1
  CDS (1)..(1341): transl_table=11
atgaggtacgtaatagcctccagtaggtgtcccttttcgcatgatgttgtaatgggtagagaacttgtcaaagagaatgttggcggcgtagctaccgcccttaaaagggcaatatctaaacatggtgggacgtggatatgctggggagacggaaaggcagataaccgatacgttaacgaggatgttgggacttataaaataaaaaggataatactgaccccacaagagaagagaggatattatgacatgtattcaaacagaactctgtggccgctcttccattattttagggagagagtacagtatacagataatggatacgagacatacagaaaggtaaatgaaaaatttgcagaggagatacttaataatacgtcacaggaagatatagtttgggtacacgattatcagctttctctcgtacctggaatactacggcaaaaaggccttaaaaacaggatcattttcacttggcacatcccgtgggtatctagagagatgtttgaaactcttactgaaagcgatgaaataaaggaaagcgttggttcagcggattttataacatttcacactgacctatacagaaagaactttgaaagcctctttgaaaatagaaaacatggtaagtctatagctgtgcctcttggtatagactaccgatacttcgaaaaggctaagtcaagtcaaattaaaagttacgctcttaaagacaaaataatgctattctctattgatagattagattacaccaaagggcttacaaatagagttctctctatagagagacttattcgaaatcatcctgaaacatcagggaaatttgtttacgtcatgatagttacaccaagcagaacttctgtatcggattacgtatcaatgaagagagaacttgaaatgaatataggtagagttaatggagaatttggaaccatttcctggatgccaatactatatatgtacagaaaaatttcagatcattcgctagtctcatactataagtccgccgatatcgctcttattaccccgcttatagatggcttaaacttggtcagcaaggaatttattgcatctactgagaaaggcatacttgtattatctaaattcgcaggagcttcaaattgcctcagaggtgcgcttatagttaacccaaatagcccggatgaggttgctgatgctatatacaaggcgatgaacatggaaagaaaggaagctgatgagaggcttttaaaaatgaaggccattgtcaaggcaagagacacggattggtggataaaaagaatatataggttagccatcgctaaagaacatgatagacgggttactaataacagaattgaataa

SEQ ID NO: 145418 - protein, 446 aa, Thermoplasma volcanium GSS1
MRYVIASSRCPFSHDVVMGRELVKENVGGVATALKRAISKHGGTWICWGDGKADNRYVNEDVGTYKIKRIILTPQEKRGYYDMYSNRTLWPLFHYFRERVQYTDNGYETYRKVNEKFAEEILNNTSQEDIVWVHDYQLSLVPGILRQKGLKNRIIFTWHIPWVSREMFETLTESDEIKESVGSADFITFHTDLYRKNFESLFENRKHGKSIAVPLGIDYRYFEKAKSSQIKSYALKDKIMLFSIDRLDYTKGLTNRVLSIERLIRNHPETSGKFVYVMIVTPSRTSVSDYVSMKRELEMNIGRVNGEFGTISWMPILYMYRKISDHSLVSYYKSADIALITPLIDGLNLVSKEFIASTEKGILVLSKFAGASNCLRGALIVNPNSPDEVADAIYKAMNMERKEADERLLKMKAIVKARDTDWWIKRIYRLAIAKEHDRRVTNNRIE

SEQ ID NO: 145419 - DNA, 2466 bp, Arabidopsis thaliana
  CDS (1)..(2466)
atggattatgatgatgcacgtggtgaaaggccaagattgcttgtggtggctaacaggcttccggtttctgcaaagaggaccggggaaaattcttggtctctggaaatgagtcctggtggtttagtcagtggtcttctaggtataacatctcaatttgataccaaatgggttggatggcccggagttgatgtgcatgatgaaattgaaaaaaatgcactcactgaatctctagccgaaatgaagtgtatccctgtgttccttaatggggtttttgatcagtactacaatggttattgcaatggtatcttgtggccaattcttcatcacatgggacttccacaagaagatcagcatgacacaaaccaaactttcgaaacacaatatgatgcatacaagaaagcaaatcgaatgtttcttgatgtcataatagacaactatgaagaaggagatattgtttggtgtcatgactatcatctcatgtttcttcctcaataccttaaagagtacaacaacaaaatcaaagttggatggtttctccattcaccatttccttcttctgaggtctacaaaacattgccctcgcggtcagagcttcttcgtgcgattcttgcagctgatttacttggcttccatacatatgattttgcaagacatttcttgagtacatgcactcgaattcttggagttgaaggaacacatgaaggagttgtgtatcaaggcagagtcactcgagtagctgtttttcccattggaatagatcctgatcggtttataagaacatgtaagctccctgaagtcacacagcaaatgaatgagcttcaagagaagtttgctggcaaaaaggtgatattaggtgttgatcgtcttgatatgatcaaagggatcccacaaaagtatcttgcatttgagaagtttctagaagaaaatccatattggcgtgataaagttgtgctagtgcaaattgcagtgccaacaagaaatgatgtccctgaatatcgaaagctcaaaagccaagtccatggactcgttggtcgcataaacggtcgttttggttctgtctcttctcttccaatccatcatctggattgttctgttgacttcaactacttatgtgcaatatacgcaattgcagatgtaatgcttgtaacatctttgagagatggaatgaatcttgttagttatgaatttgttgcttgtcaagaagccaaaaagggggttcttgttctcagtgagtttgcaggtgctggccagtctcttggtgttggagctcttattgtgaatccttgggatgttacagaagtttcttctgccattaaagaagctctaaatatgccagctgaagaaagagaaacaagacacagatctaattttcagtatgtgtgtactcattctgctgaaaaatggggattagatttcatgagtgaactcaatggcattattcctgaatccgagatgcaaatgaggaaaatcccacttcaacttccagaacaagatgtgattcaacaatattcgcaatctaacaatagactaataatattgggtttctttggaacactcgcagagccaatgaatagtggaactaaggaaatggatcttaaactaaacccagagctaaaaggaacactgaaagcattgtgcaatgatccaaaaacaacagtagttgtattgagtagaagtggcaaaaacatattaaacaagaattttggagagtctaatatatggctggctgcggaaaatggaatgttcgaaaagcagacaactggagaatgggtgacaaatatgcctcaaaacgtgaaccttgattgggtcgatggtgtaaagaatgtttttaagtatttcactgatcgaactccaagatcgtacttcgaagcaagcgagacttcgctcgtatggaattatgaatatgcagatgttgaatttgggagagcacaagcaagagacttgttacaatacctatgggcaggaccaatctctaatgcatcagttgatgttgttcgaggaaaccattctgttgaagtccatgccattggtgagactaagggggcagcaattggtcgtattttgggagaaatagtgcacagaaaatctatgaccacaccgattgattttgtcttttgtagtggttacttcttggagaaggacgaagacatttacacattcttcgaatcaaaaatcttgtcgtccaagtcaccgaacggtctcgacctcaagaaagagaattacttctctgcagccattggacaagctcgcacaaaagctcgctatgtcatagactcagctcacggtgttgtagatttgctccacaagcttgcagttgttgcagatacaacaatgactgactcattttctgatagcgaaatatatgagcctcgcgatgcaaatgcaaatgaaaattcgaaacgctggatcaattctgtcagaagaaggaaagtggaaattggagacactgggcaaatcggcatgtaa

SEQ ID NO: 145420 - protein, 821 aa, Arabidopsis thaliana
MDYDDARGERPRLLVVANRLPVSAKRTGENSWSLEMSPGGLVSGLLGITSQFDTKWVGWPGVDVHDEIEKNALTESLAEMKCIPVFLNGVFDQYYNGYCNGILWPILHHMGLPQEDQHDTNQTFETQYDAYKKANRMFLDVIIDNYEEGDIVWCHDYHLMFLPQYLKEYNNKIKVGWFLHSPFPSSEVYKTLPSRSELLRAILAADLLGFHTYDFARHFLSTCTRILGVEGTHEGVVYQGRVTRVAVFPIGIDPDRFIRTCKLPEVTQQMNELQEKFAGKKVILGVDRLDMIKGIPQKYLAFEKFLEENPYWRDKVVLVQIAVPTRNDVPEYRKLKSQVHGLVGRINGRFGSVSSLPIHHLDCSVDFNYLCAIYAIADVMLVTSLRDGMNLVSYEFVACQEAKKGVLVLSEFAGAGQSLGVGALIVNPWDVTEVSSAIKEALNMPAEERETRHRSNFQYVCTHSAEKWGLDFMSELNGIIPESEMQMRKIPLQLPEQDVIQQYSQSNNRLIILGFFGTLAEPMNSGTKEMDLKLNPELKGTLKALCNDPKTTVVVLSRSGKNILNKNFGESNIWLAAENGMFEKQTTGEWVTNMPQNVNLDWVDGVKNVFKYFTDRTPRSYFEASETSLVWNYEYADVEFGRAQARDLLQYLWAGPISNASVDVVRGNHSVEVHAIGETKGAAIGRILGEIVHRKSMTTPIDFVFCSGYFLEKDEDIYTFFESKILSSKSPNGLDLKKENYFSAAIGQARTKARYVIDSAHGVVDLLHKLAVVADTTMTDSFSDSEIYEPRDANANENSKRWINSVRRRKVEIGDTGQIGM

SEQ ID NO: 145421 - DNA, 2193 bp, Arabidopsis thaliana
  CDS (1)..(2193)
atgggttatgataatgtatgtggtgaaaggcaaacactgcttgtggtggctaaccggcttccagcttctgcaaagagaaccggggaacattcttggtctctggaaatgagtcctggtggcaaatttaatcttctagttgaaaaagatgcagtctctaaatctctggctgaaatgaagtgtatccctgtattccttaatgaggtttttgatcaatactacaatggttatagcaatggtatattgtggccaattcttcatcacatgggacttccacaagaatatgatcatgacacaatcaaaactttcgaaacccaatatgatgcatacaagaaagcaaatcgaatgtttcttgatgtcataaaagagaattataaagatggagatattgtttggtgccaagattatcatctcatgtttcttcctcaatatcttaaagagtacaacaataaaatcaaagttggatggtttctccattcaccatttccttcttccgagatttataaaacattgccctcacgatcagagcttcttcgttcggttcttgcagctgatttaattagttttcacacatatgattttgcaagacatttcgtgaatacatgcacccgaattcttggagttgaaggaacacatgaaggagttgtgtatcaaggaagagtcactcgagtggttgttcttcccatgggaatatatccaaatcggtttataaaaacatgtaagctccctgaagtaattcaacaaatgaatgagcttaaagatagattttctggcaaaaaggtgatattaggtgttgatcgtcttgatatgatcaaagggattccacaaaagtatcttggatttgagaaatttctggatgaaaatcctaattggcgcgataaaattgtgctagtgcaaattgcagtaccaacaagaaatgaagtccctgaatatcaaaagctcaaaaaccaagttcatagactggttggacgcataaacggtcgttttggttctgtctcttctcttccaattcaccacatggattgttctgttgactccaattacttatgcgcactttatgcgatttcagatgtaatgcttgtaacatctttgagagacggattgaatcttgttagtcatgaatttgttgcttgccaagaggccaaaagaggggttcttattctcagtgagtttgcaggtgctggacagtctcttggtgctggagctctacttgtgaatccttggaatgttacagaagtttcttctgcaattaaaaaagctctaaatatgccatatgaggaaagagaaacaagacacagagttaattttaagtatgtaaaaactcattctgctgaaaaatgggggtttgatttcttgagtgaactcaatgacgctttcgatgaatccgagttgcaaattaggaaaattccacatgaacttccacaacaagatgtgatacaacgatattcgttgtcgaacaatagactgataatcttgaactttggagagtataagatatggttggctgcggaaaatggaatgttcctaaagcatactactgaagaatgggtgacaaatatgcctcaaaacatgaaccttgattgggttgatggtctcaagaatgtttttaagtacttcactgatcgaactccaagatcgttcttcgaagcaagcaagacttcgcttgtatggaattacgaatatgcagatgttgaatttgggagagcacaagcaagagacttgttacaatacttatgggcaggaccaatctctaatgcatcagctgaagttgttcgaggaaaatattctgttgaagtccatgccattggtgtgactaaggaaccagaaattggtcatattttgggagaaatagtgcacaaaaaagctatgactacaccgattgattatgtattttgcagtggttacttcttggagaaggacgaagacatctatacattcttcgaatcagaaatcttgtcgcccaagttatctcatgaaacaagatcgaagtcttcttcaagtaaccactccctagagaagaaggtttcattgaacgttcttgacctcaagcaagagaattacttctctacagccataggacaagctcgcacaaaagctcgctatgtcgttgactcatctcacaatgttgtgaatttactccacaagcttgcagtagcaaatacaacaacaacaagtgtcaagaagccaaacgtttaa

SEQ ID NO: 145422 - protein, 730 aa, Arabidopsis thaliana
MGYDNVCGERQTLLVVANRLPASAKRTGEHSWSLEMSPGGKFNLLVEKDAVSKSLAEMKCIPVFLNEVFDQYYNGYSNGILWPILHHMGLPQEYDHDTIKTFETQYDAYKKANRMFLDVIKENYKDGDIVWCQDYHLMFLPQYLKEYNNKIKVGWFLHSPFPSSEIYKTLPSRSELLRSVLAADLISFHTYDFARHFVNTCTRILGVEGTHEGVVYQGRVTRVVVLPMGIYPNRFIKTCKLPEVIQQMNELKDRFSGKKVILGVDRLDMIKGIPQKYLGFEKFLDENPNWRDKIVLVQIAVPTRNEVPEYQKLKNQVHRLVGRINGRFGSVSSLPIHHMDCSVDSNYLCALYAISDVMLVTSLRDGLNLVSHEFVACQEAKRGVLILSEFAGAGQSLGAGALLVNPWNVTEVSSAIKKALNMPYEERETRHRVNFKYVKTHSAEKWGFDFLSELNDAFDESELQIRKIPHELPQQDVIQRYSLSNNRLIILNFGEYKIWLAAENGMFLKHTTEEWVTNMPQNMNLDWVDGLKNVFKYFTDRTPRSFFEASKTSLVWNYEYADVEFGRAQARDLLQYLWAGPISNASAEVVRGKYSVEVHAIGVTKEPEIGHILGEIVHKKAMTTPIDYVFCSGYFLEKDEDIYTFFESEILSPKLSHETRSKSSSSNHSLEKKVSLNVLDLKQENYFSTAIGQARTKARYVVDSSHNVVNLLHKLAVANTTTTSVKKPNV

SEQ ID NO: 145423 - DNA, 2586 bp, Arabidopsis thaliana
  CDS (1)..(2586)
atggggtcaaaatcatttggaaatctattagacttggcctctggggatcttttggacattcctcagactccgagatatcttccaagagtgatgactgttcctggcattatctctgacgttgatggatatggaattagtgatggcgattcagatgtcatttcattaccttgccgtgagcggaaaatcattgtggccaattttcttcctttgaatggtaaaaaggattcagaaactggaaagtggaaattcagtctcgacaatgattctcccctgttacatctcaaggatggtttttctccagagactgaagtcatttatgttggatcgctcaagacgcatgttgatgttagtgagcaagacgaggtttcccataatctttttgaggaattcaattgtgtagcgactttcctcccacaagatgtgcataaaaaattctaccttggcttttgtaaacagcaactatggccacttttccattacatgttacccatgtgtcctgatcatggtgaacggtttgatcgtggtctttggcaggcatatgtttctgccaacaagatatttgcagataaggtaatgggtgtgattaatcttgaagaagattatatctggattcatgactatcatttaatggttctcccaacatttttgagaaggcggtttcacagggttaagcttggtttcttcctccacagtccattcccttcttcagaaatttatcgaaccttacctgttcgagaggaactactaagagggctcttaaattgtgacttaattggttttcacacgtttgattatgcacggcatttcttgtcatgctgctgtagaatgcttggattggagtatgaatctaagagagggcatattgctcttgactacttgggacgtacagtttttctgaagattcttcctataggtattcacatgggaaggctggaatccgttctgaatcttcctgctacagctgaaaagctgaaagagattcaagaaaagtatcggggtaaaaagataattctcggtgttgatgacatggatatattcaaaggtttaagtcttaaaattttggcctttgaacacctccttcagcaatatcctagcatgctagggaaaatagttcttattcagattgtgaacccagccagaggctcaggtaaagacgttcaggaagcgaggaaagaaacgtatgatactgttaaaagaatcaacgagcgttatggttcacatgattatgagccagtggttctgattgatcgccctgttcctcggtttgagaagtctgcctattatgccctggcagaatgctgcatagtcaatgcagtgagggatgggatgaacttagttccgtacaagtacactgtttgtcggcagggaactcctagtatgaataagtctttgggagtaagtgatgatttgcctcgcacaagcacccttgttctgtccgagttcattggttgctcgccttctctaagtggtgcgattagggttaatccttgggacgttgacgcggtagccgattcactatattctgctattaccatgtctgattttgagaagcaactacgacataaaaaacactttcactacattagtacacatgatgtgggttattgggcgcgcagcttttcgcaggatttggagagggcatctcgagatcattacagtaaacggtgctggggtgtgggttggggtttgggtttcaggcttgtcgctctctctcctaatttcagaaggctatccattgagcaaactgttagtgcttacagaagatcgagcaagagagcaatatttcttgattatgatggtactttagttcctgagacctcgattgtaaaggacccaagtgctgaagttatatctgcgttgaaggcactgtgtagtgatcctaacaacactatatttattgttagcgggaggggaaaagtttctttgagcgagtggcttgcgccatgtgagaatcttggaatagcggctgaacatggttactttacaaggtggaataagtcttctgactgggaaacaagcggcttatctgatgaccttgagtggaagaaagttgtggaacctattatgagactttatacagagactactgatggatccaatatagaagcaaaagagagtgctttagtctggcatcaccaagatgctgacccagactttggttcttgtcaagccaaggaactactggaccatctagaaactgttcttgtgaatgaaccagttattgtgaacagaggccaccaaatcgttgaagttaagcctcagggagtaagcaaagggcttgtcaccgggaaaattcttagccgaatgcttgaagatgggatagcgccagattttgtggtatgcattggggatgatagatcagacgaggagatgtttgaaaacatatcaacaaccctctcagctcaatcatcgtcaatgtctacagagatattcgcgtgtactgtgggaagaaaaccgagcaaagccaaatacttcctcgatgaagtaagcgacgtggtgaagttgcttcaaggacttgccaacacttcgagcccaaagcctaggtacccttctcacctcagagtctccttcgaaagcgtggtatga

SEQ ID NO: 145424 - protein, 861 aa, Arabidopsis thaliana
MGSKSFGNLLDLASGDLLDIPQTPRYLPRVMTVPGIISDVDGYGISDGDSDVISLPCRERKIIVANFLPLNGKKDSETGKWKFSLDNDSPLLHLKDGFSPETEVIYVGSLKTHVDVSEQDEVSHNLFEEFNCVATFLPQDVHKKFYLGFCKQQLWPLFHYMLPMCPDHGERFDRGLWQAYVSANKIFADKVMGVINLEEDYIWIHDYHLMVLPTFLRRRFHRVKLGFFLHSPFPSSEIYRTLPVREELLRGLLNCDLIGFHTFDYARHFLSCCCRMLGLEYESKRGHIALDYLGRTVFLKILPIGIHMGRLESVLNLPATAEKLKEIQEKYRGKKIILGVDDMDIFKGLSLKILAFEHLLQQYPSMLGKIVLIQIVNPARGSGKDVQEARKETYDTVKRINERYGSHDYEPVVLIDRPVPRFEKSAYYALAECCIVNAVRDGMNLVPYKYTVCRQGTPSMNKSLGVSDDLPRTSTLVLSEFIGCSPSLSGAIRVNPWDVDAVADSLYSAITMSDFEKQLRHKKHFHYISTHDVGYWARSFSQDLERASRDHYSKRCWGVGWGLGFRLVALSPNFRRLSIEQTVSAYRRSSKRAIFLDYDGTLVPETSIVKDPSAEVISALKALCSDPNNTIFIVSGRGKVSLSEWLAPCENLGIAAEHGYFTRWNKSSDWETSGLSDDLEWKKVVEPIMRLYTETTDGSNIEAKESALVWHHQDADPDFGSCQAKELLDHLETVLVNEPVIVNRGHQIVEVKPQGVSKGLVTGKILSRMLEDGIAPDFVVCIGDDRSDEEMFENISTTLSAQSSSMSTEIFACTVGRKPSKAKYFLDEVSDVVKLLQGLANTSSPKPRYPSHLRVSFESVV

SEQ ID NO: 145425 - DNA, 2829 bp, Arabidopsis thaliana
  CDS (1)..(2829)
atgcctggaaataagtacaactgcagttcttctcatatcccactctctcgaacagaacgcctcttgagagatagagagcttagagagaagaggaagagcaaccgagctcgtaatcctaatgacgttgctggcagttccgagaactctgagaatgacttgcgtttagaaggtgacagttcaaggcagtatgttgaacagtacttggaaggggctgctgctgcaatggcgcacgatgatgcgtgtgagaggcaagaagttaggccttataataggcaacgactacttgtagtggctaacaggctcccagtttctgccgtgagaagaggtgaagattcatggtctcttgagatcagtgctggtggtctagtcagtgctctcttaggtgtaaaggaatttgaggccagatggataggatgggctggagttaatgtgcctgatgaggttggacagaaggcacttagcaaagctttggctgagaagaggtgtattcccgtgttccttgatgaagagattgttcatcagtactataatggttactgcaacaatattctgtggcctctgtttcactaccttggacttccgcaagaagatcggcttgccacaaccagaagctttcagtcccaatttgctgcatacaagaaggcaaaccaaatgttcgctgatgttgtaaatgagcactatgaagagggagatgtcgtctggtgccatgactatcatcttatgttccttcctaaatgccttaaggagtacaacagtaagatgaaagttggatggtttctccatacaccattcccttcgtctgagatacacaggacacttccatcacgatcagagctccttcgctcagttcttgctgctgatttagttggcttccatacatatgactatgcaaggcactttgtgagtgcgtgcactcgtattcttggacttgaaggaacacctgagggagttgaggatcaaggcaggctcactcgtgtagctgcttttccaattggcatagattctgatcggtttatacgagcacttgaggtccccgaagtcatacaacacatgaaggaattgaaagaaagatttgctggcagaaaggtgatgttaggtgttgatcgtcttgacatgatcaaagggattccacaaaagattctggcattcgaaaaatttctcgaggaaaatgcaaactggcgtgataaagtggtcttattgcaaattgcggtgccaacaagaactgacgttcctgagtatcaaaaactcacaagccaagttcatgaaattgttggacgcattaatggtcgttttgggacactgactgcagttccaatacatcatctggatcggtctctggactttcatgctttatgtgcactttatgccgtcacagatgttgcgcttgtaacatctttgagagatgggatgaatcttgtcagttatgagtttgttgcttgccaagaggccaaaaagggcgtcctcattctcagtgaatttgcaggtgctgcacagtctctgggtgctggagctattcttgtgaatccttggaacatcacagaagttgctgcctccattggacaagccctaaacatgacagctgaagaaagagagaaaagacatcgccataattttcatcatgtcaaaactcacactgctcaagaatgggctgaaacttttgtcagtgaactaaatgacactgtaattgaggcgcaactacgaattagtaaagtcccaccagagcttccacagcatgatgcaattcaacggtattcaaagtccaacaacaggcttctaatcctgggtttcaatgcaacattgactgaaccagtggataatcaagggagaagaggtgatcaaataaaggagatggatcttaatctacaccctgagcttaaagggcccttaaaggcattatgcagtgatccaagtacaaccatagttgttctgagcggaagcagcagaagtgttttggacaaaaactttggagagtatgacatgtggctggcagcagaaaatgggatgttcctaaggcttacgaatggagagtggatgactacaatgccagaacacttgaacatggaatgggttgatagcgtaaagcatgttttcaagtacttcactgagagaactcccaggtcacactttgaaactcgcgatacttcgcttatttggaactacaaatatgcagatatcgaattcgggagacttcaagcaagagatttgttacaacacttatggacaggtccaatctctaatgcatcagttgatgttgtccaaggaagccgctctgtggaagtccgtgcagttggtgtcacaaagggagctgcaattgatcgtattctaggagagatagtgcatagcaagtcgatgactacaccaatcgattacgtcttgtgcattggtcatttcttggggaaggacgaagatgtttacactttcttcgaaccagaacttccatccgacatgccagccattgcacgatccagaccatcatctgacagtggagccaagtcatcatcaggagaccgaagaccaccttcaaagtcgacacataacaacaacaaaagtggatcaaaatcctcatcatcctctaactctaacaacaacaacaagtcctcacagagatctcttcagtcagagagaaaaagtggatccaaccatagcttaggaaactcaagacgtccttcaccagagaagatctcatggaatgtgcttgacctcaaaggagagaactacttctcttgcgctgtgggtcgtactcgcaccaatgctagatatctccttggctcacctgacgacgtcgtttgcttccttgagaagctcgctgacaccacttcctcaccttaa

SEQ ID NO: 145426 - protein, 942 aa, Arabidopsis thaliana
MPGNKYNCSSSHIPLSRTERLLRDRELREKRKSNRARNPNDVAGSSENSENDLRLEGDSSRQYVEQYLEGAAAAMAHDDACERQEVRPYNRQRLLVVANRLPVSAVRRGEDSWSLEISAGGLVSALLGVKEFEARWIGWAGVNVPDEVGQKALSKALAEKRCIPVFLDEEIVHQYYNGYCNNILWPLFHYLGLPQEDRLATTRSFQSQFAAYKKANQMFADVVNEHYEEGDVVWCHDYHLMFLPKCLKEYNSKMKVGWFLHTPFPSSEIHRTLPSRSELLRSVLAADLVGFHTYDYARHFVSACTRILGLEGTPEGVEDQGRLTRVAAFPIGIDSDRFIRALEVPEVIQHMKELKERFAGRKVMLGVDRLDMIKGIPQKILAFEKFLEENANWRDKVVLLQIAVPTRTDVPEYQKLTSQVHEIVGRINGRFGTLTAVPIHHLDRSLDFHALCALYAVTDVALVTSLRDGMNLVSYEFVACQEAKKGVLILSEFAGAAQSLGAGAILVNPWNITEVAASIGQALNMTAEEREKRHRHNFHHVKTHTAQEWAETFVSELNDTVIEAQLRISKVPPELPQHDAIQRYSKSNNRLLILGFNATLTEPVDNQGRRGDQIKEMDLNLHPELKGPLKALCSDPSTTIVVLSGSSRSVLDKNFGEYDMWLAAENGMFLRLTNGEWMTTMPEHLNMEWVDSVKHVFKYFTERTPRSHFETRDTSLIWNYKYADIEFGRLQARDLLQHLWTGPISNASVDVVQGSRSVEVRAVGVTKGAAIDRILGEIVHSKSMTTPIDYVLCIGHFLGKDEDVYTFFEPELPSDMPAIARSRPSSDSGAKSSSGDRRPPSKSTHNNNKSGSKSSSSSNSNNNNKSSQRSLQSERKSGSNHSLGNSRRPSPEKISWNVLDLKGENYFSCAVGRTRTNARYLLGSPDDVVCFLEKLADTTSSP

SEQ ID NO: 145427 - DNA, 2388 bp, Arabidopsis thaliana
  CDS (1)..(2388)
atggcaaggccacgactgcttgtagtgtcgatgtcgcttccggtcactgcaaagaggactggagaagagtcttggtctttcacgatgagtcctggtggtctagttagtgctcttctaggtttgaaagaatttgagaccaaatggattggatggcctggagtagatgttcatgatgcgattggcaaaaagacactctccattaccctagctgaaaagggatgtatcccagtgtttttggaagaagtgtgtgatcaatactataatggctactgcaacaatattctgtggccgatttttcactacttgggaacgccaccagaatatcgtaacgatgcaaccataacataccagtcacagtatgaagcatacaagaaagcaaatcaaattttctttgatgttgtcaaagagcactatgaagaaggagatgtggtttggtgccatgattatcatgttatgcttcttcctcaatatcttaaggaatacaacagtaagatgaaagttggatggtttctccatacaccatttccttcttccgagatgtacaaaacattgccctcgcgatccgatctgcttcgttctgttcttactgctgatttagttggtttccatacctatgacttcgcaagacattttttgaatgcatgcatgtgtattcttggagtcgaagcaacatctgaaggaattgtggatcagggcaaagtcactcgagtagctgtttttcccattgggatagaacctgagaggtttataaacacaagtgaactctctgaagttgttcaatacatgaagaagttcaaaaacgattttggtgggagaaagttgatattaggtgttgatcgtctcgatacgatcaaagggattccacaaaaatatcaggcatttgagaagttcttagaggaaaatgcagagtggcgtggtaaagtcatgttacttcagattgcagtgccaacaaggaacggtattggtgaatatcaaaagatcaaagaccaatgtcattaccatgttggacgaattaatggtcgttttggttccatctcttctgttccaataattcacctggattgttctattgactttaatcaattatgcgcactttatgccatcacagatgtattacttgtaacatctctgagagatggaatgaaccttgtgagttctgaattcattgcctgccaaaaagcagaaaaaggggttctcattctaagcgagtttgcaggtgctggacagtcacttggtgccggagctattttagtgaatccttggaacattaaagaagtttcttctgccattggagaagctctaaatatgtcacatgaagaaaaggagagaaaacataaaatcaattttcagtatgtgaaaactcactccactcagcagtgggcagatgatttcatgaaattgactcttacaaacattttatgcagtaaacttattgagattacaaccagcgcggagctaggagctggattagccgccacacttgaacttccagaacatgatgtgattcaacaatactcaaagtctaacaatagactgctgattcttggattctatggaacgctcactcagccgatgaaaaatcaagagagaagaggcgacggaatgaatcttgaactgcatccacagctaaaagagagactcaaagaattatgcagtgatccaaaaacaacagtagttgtcctgagtagaagtgaaaaatgcatattggataaaaactttggagaatataacatgtggttggctgctgaaaatgggatgtttctaaggcatacaagtggagaatgggtgacaagaattccagaacacatgaatttggaatggattgatggtgttaagcatgttttcaagtacttcactgaaagaactccaggatcatatctcgaaacaagcgaggcttcgcttgtatggaactacgaaaatgcagatgctgaattcgggagagctcaagcaagagacatgttacaacacttgtgggcaggaccaatctctaatgcctcagtggatgttgttagaggaggccaatctgttgaagtccatgccgttggtgtgacaaagggaagtgcaatggagcgtattctcggagaaatagtgcataacaagtcaatggctacaccaattgactatgtcttgtgcattggttgtttcttggggaaagacgaagacgtttacacattcttcgagccagagttgaccaagaaagccaagtcgctttcttcttcaggtagtgactcccccaagaaggtatcatcgaccattgttgacctcaagggagagaattacttctccgtagctattggacaaacgcacacaaaggctcgctatttccttgactcatctgatgacgttgtgaaacttattggcaagctttgcacacacaacaatgcttga

SEQ ID NO: 145428 - protein, 795 aa, Arabidopsis thaliana
MARPRLLVVSMSLPVTAKRTGEESWSFTMSPGGLVSALLGLKEFETKWIGWPGVDVHDAIGKKTLSITLAEKGCIPVFLEEVCDQYYNGYCNNILWPIFHYLGTPPEYRNDATITYQSQYEAYKKANQIFFDVVKEHYEEGDVVWCHDYHVMLLPQYLKEYNSKMKVGWFLHTPFPSSEMYKTLPSRSDLLRSVLTADLVGFHTYDFARHFLNACMCILGVEATSEGIVDQGKVTRVAVFPIGIEPERFINTSELSEVVQYMKKFKNDFGGRKLILGVDRLDTIKGIPQKYQAFEKFLEENAEWRGKVMLLQIAVPTRNGIGEYQKIKDQCHYHVGRINGRFGSISSVPIIHLDCSIDFNQLCALYAITDVLLVTSLRDGMNLVSSEFIACQKAEKGVLILSEFAGAGQSLGAGAILVNPWNIKEVSSAIGEALNMSHEEKERKHKINFQYVKTHSTQQWADDFMKLTLTNILCSKLIEITTSAELGAGLAATLELPEHDVIQQYSKSNNRLLILGFYGTLTQPMKNQERRGDGMNLELHPQLKERLKELCSDPKTTVVVLSRSEKCILDKNFGEYNMWLAAENGMFLRHTSGEWVTRIPEHMNLEWIDGVKHVFKYFTERTPGSYLETSEASLVWNYENADAEFGRAQARDMLQHLWAGPISNASVDVVRGGQSVEVHAVGVTKGSAMERILGEIVHNKSMATPIDYVLCIGCFLGKDEDVYTFFEPELTKKAKSLSSSGSDSPKKVSSTIVDLKGENYFSVAIGQTHTKARYFLDSSDDVVKLIGKLCTHNNA

SEQ ID NO: 145429 - DNA, 1503 bp, Mycobacterium tuberculosis H37Rv
  CDS (1)..(1503): transl_table=11
atggctccctcgggaggccaggaggcgcagatttgcgattcggagaccttcggggactctgacttcgtggtggtagccaatcgactgcccgtcgatctggagcgtcttcccgacggcagcacaacctggaaacgcagccccggaggcttggtcaccgccttggagccggtgctgcggcgtcggcgcggggcctgggtcggctggcccggcgttaacgacgacggggccgaacccgacctccacgtgctggacggccccatcatccaagacgagctggaacttcatccggtacggctgagcaccacggacatagctcagtactacgagggattctccaacgccacactgtggccgctgtaccacgacgtcatcgtcaagccgctctaccaccgcgaatggtgggatcgctacgtcgacgtcaaccagcgctttgccgaggccgcgtcgcgcgccgccgcccacggcgcaaccgtgtgggtacaggactaccagctgcagctggtaccgaagatgctgcgcatgctgcggcccgatctgaccatcggtttctttttgcacatcccgttcccgccggtagagctgtttatgcagatgccgtggcgcaccgagatcatccagggcctactgggcgccgacctggtgggcttccatcttccgggcggtgcccagaatttcctgatcctgtcccggcgtctggtcggcaccgacacttcccgcggaaccgtcggtgtgcggtcgcggttcggtgcggcggtgctcgggtcccgcaccatacgagttggcgcctttcctatctcggttgactccggcgcgctcgaccacgctgcccgcgaccgcaacatcaggcgccgggcccgcgagattcgcaccgaactgggaaatccgcgcaagatcctgctcggtgttgaccggctcgactacaccaagggcatcgacgtacggctgaaggccttttccgagctgctggccgagggccgcgtcaaacgcgacgacaccgtcgtggtccagctggctaccccgagccgcgagcgggtggagagctaccagacgctgcgcaacgacatcgaacgccaggtcggccacattaacggcgagtacggtgaggttggccatccggtagtgcattacctgcatcgaccggctccgcgcgacgagcttatcgctttcttcgtggccagcgacgtcatgctggtcaccccactacgcgacgggatgaacctggtggccaaggagtacgtcgcttgccgcagcgatcttggcggtgccctggtgctcagcgaattcaccggggccgcagccgaactccggcacgcatacctggtcaacccgcacgacctggaaggcgtcaaggacgggatagaggaagcgctcaaccagacggaggaggcgggccggcggcgaatgcggtcgctgcgacgccaagtgctcgcccacgacgtggaccgctgggcacagtcgtttctcgacgctctcgccggggcacacccgaggggccaaggctaa

SEQ ID NO: 145430 - protein, 500 aa, Mycobacterium tuberculosis H37Rv
MAPSGGQEAQICDSETFGDSDFVVVANRLPVDLERLPDGSTTWKRSPGGLVTALEPVLRRRRGAWVGWPGVNDDGAEPDLHVLDGPIIQDELELHPVRLSTTDIAQYYEGFSNATLWPLYHDVIVKPLYHREWWDRYVDVNQRFAEAASRAAAHGATVWVQDYQLQLVPKMLRMLRPDLTIGFFLHIPFPPVELFMQMPWRTEIIQGLLGADLVGFHLPGGAQNFLILSRRLVGTDTSRGTVGVRSRFGAAVLGSRTIRVGAFPISVDSGALDHAARDRNIRRRAREIRTELGNPRKILLGVDRLDYTKGIDVRLKAFSELLAEGRVKRDDTVVVQLATPSRERVESYQTLRNDIERQVGHINGEYGEVGHPVVHYLHRPAPRDELIAFFVASDVMLVTPLRDGMNLVAKEYVACRSDLGGALVLSEFTGAAAELRHAYLVNPHDLEGVKDGIEEALNQTEEAGRRRMRSLRRQVLAHDVDRWAQSFLDALAGAHPRGQG

SEQ ID NO: 145431 - DNA, 1491 bp, Methanothermobacter thermautotrophicus str. Delta H
  CDS (1)..(1491): transl_table=11
gtgagtgagcttcagaaacgtgccatgaggtttcttgaagacaagaaccccgttattgtatccaacagggggcctgtggaattcttcaaggaaaatgatgaaactgttatgaagaggggtgccggtggccttgtctcaacactgctgcccctcgttgaaaggttcagtggtgtctggatttcaagtgcaatgacagttgaggatgcaagggtcgcctcagggtaccctgagaacagggttccactccctgaagatgatcccagattcacggtttcattcgttatagtggatcgtgaacgatatgagtcatactacagcattataagcaatcctcttctctggttcgtccagcactacatgtggaatactccctacgatcctcagatagatgataaagtttaccgtgcctgggaagatggctatgtccatgtcaataaaaaatttggggataaggtgatatctgaaattgagagaaatgaaaaggattccctgattatgttacaggattaccatctttatttatgtcctttcttcataaaaaaggaaattggtgacgtctttttaagtcacttcatacatataccctggccacaaagggattacttcaatatacttcctgaaaggatgagggctgacataataggaggccttctatcaaataccatcctcggcttccatatagagagatactgcgccaatttctttgagtgctgtgaggaccttggttatgaggttgacggggacagaggtatcgtgaggaacggggatgaaaaaacccttgttaaaagttatcccatatctgttgaccctgaaagcatggaaaggaccgtcagctcccccaccttcatggaaaaggatgaatttgttcggaaattaaaggggaacatgtttctcatataccgcacagatagggctgatctcagcaaaaacataatacgtggtttccgggcctatgaattatttttgagggatcatccagaatttcatggaaaggtaaagtttcttgcaaccggtaaaccaacaagacagcagataagagaatacaggaattactctgaggaggtcaaagatactgtagaggagatcaacgagaaatatggtacagatgaatggaaacccattgaatacatttaccgtgccgactacgaacttgttgcagccgccttcaagaactatgactgcctgattgtaaatcccattgcagatggtatgaacatcgtgccaaaggaggctgcgattatcaatagagaagatggtgccctgatactctcagaacgggctggatgctatgatgaacttgctgagcatgtaataggtgtaaacccctttgatataaaggaaactgcagatgcgatttacagtgccatgaaaatgagtcccgggaaaaggaagaagctttcagaaggtcttaagtcaagggtccttaaaagaacaatctaccactggatcaacgagcagttcgatgattttgaggatctatgggaaagttaa

SEQ ID NO: 145432 - protein, 496 aa, Methanothermobacter thermautotrophicus str. Delta H
MSELQKRAMRFLEDKNPVIVSNRGPVEFFKENDETVMKRGAGGLVSTLLPLVERFSGVWISSAMTVEDARVASGYPENRVPLPEDDPRFTVSFVIVDRERYESYYSIISNPLLWFVQHYMWNTPYDPQIDDKVYRAWEDGYVHVNKKFGDKVISEIERNEKDSLIMLQDYHLYLCPFFIKKEIGDVFLSHFIHIPWPQRDYFNILPERMRADIIGGLLSNTILGFHIERYCANFFECCEDLGYEVDGDRGIVRNGDEKTLVKSYPISVDPESMERTVSSPTFMEKDEFVRKLKGNMFLIYRTDRADLSKNIIRGFRAYELFLRDHPEFHGKVKFLATGKPTRQQIREYRNYSEEVKDTVEEINEKYGTDEWKPIEYIYRADYELVAAAFKNYDCLIVNPIADGMNIVPKEAAIINREDGALILSERAGCYDELAEHVIGVNPFDIKETADAIYSAMKMSPGKRKKLSEGLKSRVLKRTIYHWINEQFDDFEDLWES

SEQ ID NO: 145433 - DNA, 1497 bp, Mycobacterium leprae TN
  CDS (1)..(1497): transl_table=11
atgacttcgcggggtaaccatggctcgaagacctcaagtgacaagcacctcggggattccgactttgtagtggtcgccaatcgcctgccagttgatcaggtgcgacttcccgatggcactgcgatctggaagcgcagtccaggcgggttggtcacagcgctagagccgctgctgcgtcagcggcgcggggcctgggtcggctggccgggcgtaataaacgacaacgtggacctcgacttgaccatcaagtcgatcgtgcaggatggccttactctttatccggtacggctgaacacacatgatgtcgccgagtactacgaggggttctcgaacgccacgctgtggccgctataccacgacgtcatcgtaaagcccatttaccactgcgaatggtgggaacgctacgtcgatgtcaaccggcgcttcgccgaaacaacgtcacgcacagccgcctacggtgggaccgtatgggtgcaggactaccaactgcaattggtaccgaagatgctgcgcataatgcggcccgacttgaccatcggtttcttcttgcacatcccgttcccgccggtggagctgttcatgcagataccatggcgcaccgagatcatcgagggtctgctcggggccgacctagtgggattccatctgaccagcggtgcgcagaatttcctgttcctgtcccgacatctgctcggcgctaacacgtcgcgcggattggttggtgtgcgatcacggttcggtgaagtgcaattgaagtcccacacagtccaagtgggcgcgtttcccatctcgatcgactccaaagaaatcgaccaagccacccgcgaccgcaacgtccggcgccgcgcccgcgaaatccgggctgagctaggtaacccccgcaaaatcctgctcggcgttgaccgactcgactacaccaagggcatcgatgttcgattgagggccttcgctgaactgctcgccgagggtcgggcgaagcgcgacgacaccgttctagtccagctagcgacaccgagccgcgaacgagtagaaagctataagattttacgcaacgacatcgaacgccaagttggccatatcaacggcgaatacggcgaggtcggtcatcccgtggtgcactacttgcaccgcccaattccccgcgacgagctcatcgcgttctacgtggcaagtgatgtcatgttggtcaccccgctgcgggacgggatgaacctagtggccaaggaatacgtcgcgtgccgcaacgatctcggcggtgcgctcgtcctcagcgaattcaccggagcagccgcggaactccggcaggcctatctagtcaacccacacgacctagaaggggttaaggacacgatcgaagcggcgctcaaccagctggccgaagaagcacggcgccggatgcggtcgctgcgacgccaagtgctcgcccatgacgtcgatcgctgggcgcgatcatttctcgacgcgctcgccgaagcgccggcgcgcgacgcgacataa

SEQ ID NO: 145434 - protein, 498 aa, Mycobacterium leprae TN
MTSRGNHGSKTSSDKHLGDSDFVVVANRLPVDQVRLPDGTAIWKRSPGGLVTALEPLLRQRRGAWVGWPGVINDNVDLDLTIKSIVQDGLTLYPVRLNTHDVAEYYEGFSNATLWPLYHDVIVKPIYHCEWWERYVDVNRRFAETTSRTAAYGGTVWVQDYQLQLVPKMLRIMRPDLTIGFFLHIPFPPVELFMQIPWRTEIIEGLLGADLVGFHLTSGAQNFLFLSRHLLGANTSRGLVGVRSRFGEVQLKSHTVQVGAFPISIDSKEIDQATRDRNVRRRAREIRAELGNPRKILLGVDRLDYTKGIDVRLRAFAELLAEGRAKRDDTVLVQLATPSRERVESYKILRNDIERQVGHINGEYGEVGHPVVHYLHRPIPRDELIAFYVASDVMLVTPLRDGMNLVAKEYVACRNDLGGALVLSEFTGAAAELRQAYLVNPHDLEGVKDTIEAALNQLAEEARRRMRSLRRQVLAHDVDRWARSFLDALAEAPARDAT

SEQ ID NO: 145435 - DNA, 1437 bp, Mycobacterium tuberculosis CDC1551
  CDS (1)..(1437): transl_table=11
gtggtggtagccaatcgactgcccgtcgatctggagcgtcttcccgacggcagcacaacctggaaacgcagccccggaggcttggtcaccgccttggagccggtgctgcggcgtcggcgcggggcctgggtcggctggcccggcgttaacgacgacggggccgaacccgacctccacgtgctggacggccccatcatccaagacgagctggaacttcatccggtacggctgagcaccacggacatagctcagtactacgagggattctccaacgccacactgtggccgctgtaccacgacgtcatcgtcaagccgctctaccaccgcgaatggtgggatcgctacgtcgacgtcaaccagcgctttgccgaggccgcgtcgcgcgccgccgcccacggcgcaaccgtgtgggtacaggactaccagctgcagctggtaccgaagatgctgcgcatgctgcggcccgatctgaccatcggtttctttttgcacatcccgttcccgccggtagagctgtttatgcagatgccgtggcgcaccgagatcatccagggcctactgggcgccgacctggtgggcttccatcttccgggcggtgcccagaatttcctgatcctgtcccggcgtctggtcggcaccgacacttcccgcggaaccgtcggtgtgcggtcgcggttcggtgcggcggtgctcgggtcccgcaccatacgagttggcgcctttcctatctcggttgactccggcgcgctcgaccacgctgcccgcgaccgcaacatcaggcgccgggcccgcgagattcgcaccgaactgggaaatccgcgcaagatcctgctcggtgttgaccggctcgactacaccaagggcatcgacgtacggctgaaggccttttccgagctgctggccgagggccgcgtcaaacgcgacgacaccgtcgtggtccagctggctaccccgagccgcgagcgggtggagagctaccagacgctgcgcaacgacatcgaacgccaggtcggccacattaacggcgagtacggtgaggttggccatccggtagtgcattacctgcatcgaccggctccgcgcgacgagcttatcgctttcttcgtggccagcgacgtcatgctggtcaccccactacgcgacgggatgaacctggtggccaaggagtacgtcgcttgccgcagcgatcttggcggtgccctggtgctcagcgaattcaccggggccgcagccgaactccggcacgcatacctggtcaacccgcacgacctggaaggcgtcaaggacgggatagaggaagcgctcaaccagacggaggaggcgggccggcggcgaatgcggtcgctgcgacgccaagtgctcgcccacgacgtggaccgctgggcacagtcgtttctcgacgctctcgccggggcacacccgaggggccaaggctaa

SEQ ID NO: 145436 - protein, 478 aa, Mycobacterium tuberculosis CDC1551
MVVANRLPVDLERLPDGSTTWKRSPGGLVTALEPVLRRRRGAWVGWPGVNDDGAEPDLHVLDGPIIQDELELHPVRLSTTDIAQYYEGFSNATLWPLYHDVIVKPLYHREWWDRYVDVNQRFAEAASRAAAHGATVWVQDYQLQLVPKMLRMLRPDLTIGFFLHIPFPPVELFMQMPWRTEIIQGLLGADLVGFHLPGGAQNFLILSRRLVGTDTSRGTVGVRSRFGAAVLGSRTIRVGAFPISVDSGALDHAARDRNIRRRAREIRTELGNPRKILLGVDRLDYTKGIDVRLKAFSELLAEGRVKRDDTVVVQLATPSRERVESYQTLRNDIERQVGHINGEYGEVGHPVVHYLHRPAPRDELIAFFVASDVMLVTPLRDGMNLVAKEYVACRSDLGGALVLSEFTGAAAELRHAYLVNPHDLEGVKDGIEEALNQTEEAGRRRMRSLRRQVLAHDVDRWAQSFLDALAGAHPRGQG

SEQ ID NO: 145437 - DNA, 1326 bp, Thermoplasma acidophilum DSM 1728
  CDS (1)..(1326): transl_table=11
atgaagtacatagtcgtctccagcagatgcccattttcccatgataaggctgcaggaaaggagatcataaaggaaaatgttggcggggttgctacagccctgcggagagcgatggaaaaatacggtggcacttggatttgctggggagacggcaagctggatggcaaatatctggatgaggacgttgggaaatacagaatccgcagggtcatgctcagtgtgcctgaaaaacatggctattatgatctttactctaacagaacgctgtggccgctattccattacttcagggagagggtcaagtacacagacaatggctacgaaatctacaggcgtgtcaacgaaaaattcaccaacatgatcgttcagtcgttatctccggaggacgttatatggatacatgattaccagctttcccttgttcctaagatgctccgggatcgaggaataacaaaccggataatattcacctggcacataccatgggtttccaaggagatgttcgagacgctgcctgagagcagggatataatcgacagcctttcgagatctgacttcataacattccataccgaaacctacaggaagaactttacagatcttctggacgagaactcgagagcaaagagcctggttatacctctcggaatagattaccgctacttcagcaagacaaggggtacggacataaagagctatgcgctcatggacagaaagcttatattttccatagacagactggattacacgaagggcctggtgaatcgggttctttcaatcgaggagctgcttagaaggcaccccgatctcgtgggcaagttcgtttacgttatgatagtcacacccagcaggacaaccgtgtcagattatgtggccatgaagcgcgaactcgagatgcatataggcagaataaatggagagttcggatcgatcagctggatgccgatactatacatgtacaggaagatctccgataagatgctggtatcgtattacaagaatgcggatatagctctcataacaccactgatcgatggcctgaacctggtttcaaaggagtttgtagcatcatccgataagggtatcctgatactttcaagatttgccggtgcttcaaactgcctggacggagccgtggtcgtgaatccaaatagccttggcgaagttgcggaagcgatatacagcgccatgaatatgggcgaggatgagatccgggaaaggctcaggaagatgaaggaagaggtgtcaaggagagatactgactggtggatccgacgaatcaatgcgatagcaaagaggaagataaatgatagaacagtcacttga

SEQ ID NO: 145438 - protein, 441 aa, Thermoplasma acidophilum DSM 1728
MKYIVVSSRCPFSHDKAAGKEIIKENVGGVATALRRAMEKYGGTWICWGDGKLDGKYLDEDVGKYRIRRVMLSVPEKHGYYDLYSNRTLWPLFHYFRERVKYTDNGYEIYRRVNEKFTNMIVQSLSPEDVIWIHDYQLSLVPKMLRDRGITNRIIFTWHIPWVSKEMFETLPESRDIIDSLSRSDFITFHTETYRKNFTDLLDENSRAKSLVIPLGIDYRYFSKTRGTDIKSYALMDRKLIFSIDRLDYTKGLVNRVLSIEELLRRHPDLVGKFVYVMIVTPSRTTVSDYVAMKRELEMHIGRINGEFGSISWMPILYMYRKISDKMLVSYYKNADIALITPLIDGLNLVSKEFVASSDKGILILSRFAGASNCLDGAVVVNPNSLGEVAEAIYSAMNMGEDEIRERLRKMKEEVSRRDTDWWIRRINAIAKRKINDRTVT

SEQ ID NO: 145439 - DNA, 1392 bp, Sinorhizobium meliloti 1021
  CDS (1)..(1392): transl_table=11
atgagccgtctcgtcattgtttccaatcgtgtgcccgtccctgacaagggaggcattgcgcctgccggtgggctggcggtcgcgctgaaagtcgcccttgaagagcatggcggcatctggatgggctggtcgggacgatcgagcggagagaacgagccggagccgcttgctcagttgcaccagggcaatatcacctatgcgctcacggacctgactgataccgacgtcggagaatattaccacggcttcgccaaccgggttctttggccgatctgccactaccggcttgatcttgccgaatacggtcgcaaggagatggccgggtatttccgcgtcaaccgcttcttcgcccatcggctggcgccgctcgtcaggcccgatgacgtgatctgggtgcacgactaccatttgatccctctcgccgcagaactccgtcaaatgggcttgaagaaccggatcggcttctttctccacattccctggccgcctgccgacgtactcttcacgatgcccgttcacgaggagatcatgcgcggcctgtcgcactacgatgtcgtcggtttccagaccgatcatgatcttgagaacttcgccggctgtctcaggcgggaaggcattggcgatgaactcggtggaggccgcttcagtgcctatggtcgcgtattcaagggcggcatctatgcaatcggcatagagactgcggcctttgccgaatttgccaaaaaggcattgaccaacaagaccgtcaggaaagcgcgtgaaagtatcgagcaccggagcctgatcatcggtgtcgatcgcctcgattactcaaaagggatcacgcagcgcatcgacgcgttcgagcgcttcatcctggccaatccggcccagcaggggcgcgtcacctatctgcagatcacgccgaagtcgcggtccgaagtgccggaatacgaagccatgcagcgaactgtggccgaacaggccggcagggtgaacggcgcgctcggcgctgttgattgggtgcccatacgctatattaaccgttcggtaggccggcatattcttgcagggctttaccggcttggcaaagtcggcctggtgacgccgcttcgagacgggatgaatctggttgcgaaggaatatgtggccgcgcaggacccggacgatccgggcgtgctcgtgctttcgcgtttcgccggggccgcccgcgatctaaaaggcgccctgctcgtcaatccctacgatattgagggtaccgcaaacgctatggcgcgcgcgcttagcatgccgctcgaagagcggaaggatcgctggaagactatgatggatcacttgctggaacacgacgtctcgcgctggtgccgggactttctcaatgatctggcgacatcaccggatccgtcgggttag

SEQ ID NO: 145440 - protein, 463 aa, Sinorhizobium meliloti 1021
MSRLVIVSNRVPVPDKGGIAPAGGLAVALKVALEEHGGIWMGWSGRSSGENEPEPLAQLHQGNITYALTDLTDTDVGEYYHGFANRVLWPICHYRLDLAEYGRKEMAGYFRVNRFFAHRLAPLVRPDDVIWVHDYHLIPLAAELRQMGLKNRIGFFLHIPWPPADVLFTMPVHEEIMRGLSHYDVVGFQTDHDLENFAGCLRREGIGDELGGGRFSAYGRVFKGGIYAIGIETAAFAEFAKKALTNKTVRKARESIEHRSLIIGVDRLDYSKGITQRIDAFERFILANPAQQGRVTYLQITPKSRSEVPEYEAMQRTVAEQAGRVNGALGAVDWVPIRYINRSVGRHILAGLYRLGKVGLVTPLRDGMNLVAKEYVAAQDPDDPGVLVLSRFAGAARDLKGALLVNPYDIEGTANAMARALSMPLEERKDRWKTMMDHLLEHDVSRWCRDFLNDLATSPDPSG

SEQ ID NO: 145441 - DNA, 1674 bp, Ralstonia solanacearum GMI1000
  CDS (1)..(1674): transl_table=11
atgcgcccgattatttccacgccagccggcacgtcttccctggcgatccccgacacgcccggtgccgacgaagcccaacgcgccgatcctttccaaccggccagccggccgcgctcgcgccacccgcaattcgagcgattgccgtcgccgcccgttcgcacgcgctcacaggagttgcgcgccgcgcgcttgcggcgctgcgcctccgacgtttcggccacgcccgaggcgcggccgcggctggtcgtggtgtccaaccgcctgatcgatccgcagaggcccgccgccggcgggctcgccgtcgcgctgggcgacatgatgcgcgacaccgacggactatggttcggctggagcggcaagacggtcgacgaacccgacacggcctgcgtgcggaccgagccgttcgggcgcacgacgctggcccaggtcgatctcggccggaccgattacgagggctactacgcggggttctcgaattcggtgctctggcccatcttccacgagcgggtgaaatgggcggatttgaatccggcgtacttcaaggcgtacgaggccgtgaaccggatacttgcgtcccatctgcggcccatgctcagggacagcgacatcctgtgggtccacgactaccatctcatcccgttcgcgcaggcgctgcgcgcgctcggctgcacgcagcgcatgggtttcttcaaccatattccgctgccgtcgcccgacgtcatccggcgcattccgcagcatcggcaactgatgcgggccctggcgtcgtacgacctggtcggcatgcagagcccccgggatgtgctcaacctccagcggtactgggacgcggagaacatcgccgcgcagtccgagcgccgccatgacagcgtccacgccttcccgatcggcatcgatgtcgaaagcctgcgcgcgctggtgccgagccccgcgtcccaggccgtcatcgatgaagtccgcggtgcggccggcaggtgcgtgctgatgatcggcgtcgatcggctggattacagcaagggcatcccgacgcgcctgaaagcgtttcgccaattgctgcagacgcatgcccgcatgcggagcaaggtcacgctggtccagatcgccgcgccgacgcggcaaagcattcccgcctacgccaggctgcgcgacaagaccgagcagctggtgcgggagatcaaccgccggttcggcaccggcgactggacaccggtgatgtatttcagcgagtcggtggaccgcaccgccttgccgcagctgtaccggatgagccgggtcggcgtggtcacgcccgttgcggacggcatgaacctcgtcgccaaggaatacgtcgccgcgcaggccgccagggaccccggcgtcctggtgctgtccaggggcgcgggcgccgcgtcgcaactgcgcgacgcgctgctggttccctcgaaaaaccgggccgccaccgccgatgcctacgcgcaggccctgtccatgccgctcgaagagcgcaaggcgcggcatgccggcctgatgcgcaatatcgagaccgaagacctgcggtggtggcgcgacaactacctgaaggcgctggcctgcgcgccgtggcccgctggccccgagggcgcagaagacactcgcccggacgccgggggcgcatccgtgtccggcgcgtccgatgggggtctcacgcaggcgtag

SEQ ID NO: 145442 - protein, 557 aa, Ralstonia solanacearum GMI1000
MRPIISTPAGTSSLAIPDTPGADEAQRADPFQPASRPRSRHPQFERLPSPPVRTRSQELRAARLRRCASDVSATPEARPRLVVVSNRLIDPQRPAAGGLAVALGDMMRDTDGLWFGWSGKTVDEPDTACVRTEPFGRTTLAQVDLGRTDYEGYYAGFSNSVLWPIFHERVKWADLNPAYFKAYEAVNRILASHLRPMLRDSDILWVHDYHLIPFAQALRALGCTQRMGFFNHIPLPSPDVIRRIPQHRQLMRALASYDLVGMQSPRDVLNLQRYWDAENIAAQSERRHDSVHAFPIGIDVESLRALVPSPASQAVIDEVRGAAGRCVLMIGVDRLDYSKGIPTRLKAFRQLLQTHARMRSKVTLVQIAAPTRQSIPAYARLRDKTEQLVREINRRFGTGDWTPVMYFSESVDRTALPQLYRMSRVGVVTPVADGMNLVAKEYVAAQAARDPGVLVLSRGAGAASQLRDALLVPSKNRAATADAYAQALSMPLEERKARHAGLMRNIETEDLRWWRDNYLKALACAPWPAGPEGAEDTRPDAGGASVSGASDGGLTQA

SEQ ID NO: 145443 - DNA, 1398 bp, Ralstonia solanacearum GMI1000
  CDS (1)..(1398): transl_table=11
atgagccggctgatcgtggtctccaaccgcgtggcgcccatcgccgagggccaggcgagcgccggcgggctggcggtcggcgtgtacgacgcgctgcgcgataccggcggcgtgtggttcggctggagcggcgagatcgcgccgggcgcgtcgggcgagccgtccatcgccgccaagggcgccatcaccttcgccaccgtgggcctgagccgccgcgactacgaccagtactaccgcggcttcgccaatgccacgctgtggccggtgttccactaccgcgtcgatctggcgcgctacgagcgccaggagtaccacggctaccggcgcgtcaacacgcagttcgcgcatcagctcaaggcgctggtgcagcccgacgacatcctgtgggtgcacgactatcacctgatcccgttcgcagccgaatgccgggcgctggggctgcgcaaccgcatcggtttcttcctgcacattccgtttccgtcgccggagatcctgacgacgatcccgccgcacgaagagctgatgcgcgcgctgtgcgcctacgacctgctcggcttccagaccgagaccgatcgcgtcgccttctacgactacatcgaacgcgaggcgcgcggctacatcgagaacaaggagcacaacgggccggtgcacgcctacggcaacacgctgcgcgccgaggtctacccgatcggcgtgcatccggacgagatcgcgcggcaggcggtgtcgtcgctggcgcggcgcaatccgttcgcgcgcgaggccgatgcgagcggcggccgcccgctcaagctcatcatgagcgtggaccggctggactattccaagggcctgcccgaacgcttccgcgcgttcgagcagttgctggacgattttcccgaccaccggcggcacgtgaccttcgttcagatcgcgccgacctcgcggcaggatgtgcagagctaccagcagatccgccagcggctggaggccgaatcgggccgcatcaacggcaagcattcggaactggactggacaccgatccgctacatcaacaagcagtacgaccggcgcatgctgatggcgctgttccgcgcctcgcacatcggctatgtcacgccgctgcgcgacggcatgaacctggtggccaaggaatacgtggcggcgcaggacccggaggcgccgggcgtgctggtgctgtcgcgcttcgcgggcgcggcgcgcgagctcgatgccgcgctgatcgtcaatccgtatgacacgcgcggcatggccgaggcgctcaaccgcgcgctgacgatgccgctcgaagagcgcaaggcgcgccacgcccacatgatggaccggctgcgcgcggccgacctcacggcatggcgcgaacgctttctggccgatctgcgcggcgcatcggcccgctag

SEQ ID NO: 145444 - protein, 465 aa, Ralstonia solanacearum GMI1000
MSRLIVVSNRVAPIAEGQASAGGLAVGVYDALRDTGGVWFGWSGEIAPGASGEPSIAAKGAITFATVGLSRRDYDQYYRGFANATLWPVFHYRVDLARYERQEYHGYRRVNTQFAHQLKALVQPDDILWVHDYHLIPFAAECRALGLRNRIGFFLHIPFPSPEILTTIPPHEELMRALCAYDLLGFQTETDRVAFYDYIEREARGYIENKEHNGPVHAYGNTLRAEVYPIGVHPDEIARQAVSSLARRNPFAREADASGGRPLKLIMSVDRLDYSKGLPERFRAFEQLLDDFPDHRRHVTFVQIAPTSRQDVQSYQQIRQRLEAESGRINGKHSELDWTPIRYINKQYDRRMLMALFRASHIGYVTPLRDGMNLVAKEYVAAQDPEAPGVLVLSRFAGAARELDAALIVNPYDTRGMAEALNRALTMPLEERKARHAHMMDRLRAADLTAWRERFLADLRGASAR

SEQ ID NO: 145445 - DNA, 2214 bp, Pyrobaculum aerophilum str. IM2
  CDS (1)..(2214): transl_table=11
gtgagattgataatagtttccaataggttgcctgtggtcctaactgttggggagaggggcatggaaattagagaggcagtgggaggcttagcaacagctgtaaagtcttttataaaagctacagaaaacggcaaagctttaggcttctcagaggttgtatgggcaggttggtcagggataaaagctgagcaggagagtgaagatctaaagtcaagacttagagaaatgggcttgttacctgtatctctaactgctgaagaagtcaactttttctacgagggattttgtaactctacgctgtggcctctatttcacggctttactgtatacaccgtatttgagagtaagtactgggaagcctatgtaaaagtaaatcagaaatacgcagagactgtcgcctcagtggccaatacaggagactttgtctggatacatgattatcacctcatgttgatgcctgctatgctgagggaaatgtcgccagacgtcagcataggctttttcctacacatccccttccccccagctgagatgtatcaactaatgccgcctccttggcgtacagctttactcgacggcgttttagcctctgatttagtaggttttcacatccacgaatatgtgaataatttcgtacgcgcagtctcaaaattcctgggctatcggactgaggcaggtgtcatttacgcggggcgtaggaaagtacacgtaggcgcctttcctattggcattgacttcgactttttctacaactcttccctagaccccgaagtggcgggacagattgaagaacttagacaaaaacttaggggtttaaaaattatattttccattgacagactggattatacgaaaggcgttataaatagagtgcatgcatgggagagatttttaaaagagcatccccagtggagaggcaaggcatcgtttatccttatagttgtgccttcaagaattggagtgcctcaatatgacgccatgaagagagaaatagagagagaggtggggcgtataaatggagagctgggcgatgtaaattggactccgattgtatacatctcccgcttcatccccaccccaacgcttctcgcactgtataatatcgcagatgtcgcgttgataacgccacttagagacggcatgaacttagtgtctaaagagtacgtcgccactaagagagattgcaaaggcgttctaattctcagcgaaacggccggcgcctcccacgagttgcttgaagcactcatagttaacccaaatgacgaaagcggcgtggtagaggcaatagccaaggctctaaccatggagcctgaggagcagtgcagacgcataaaagccatgcaagaaaaacttaggcaacaaaacgtggtgaagtgggctgtggactttttacactcgctaatgttagcatatagagaaaatacagagagcttcactacatcttcaaaactattagaccgcgaggctattgaggagatcgtaaaaatatttcacggcgcaaggtcaaggctcctgcttctcgattacgacggcacgttagtgcctcactacccctatgcttaccaggctgtgccagacggcgaattaaaacgtttactcaactctttggcgtttcagcccaatacttatgttgctgtggtaagcggtagagggagggactttttggaagcttggctgggcgatttgcccatatatattgttgcagaacacggggcgtttattagagacccagggggcaattggtcccagctatttccatttgacacaagctggaagatctcagttagaaaaataatggaagagtttacaagactcactccaggatcatatatagaggaaaaagagatttcactcgcatggcactatagaaatgtagagcctgaaattggagaaaaagccgccaataggctagctgatgccctgacagggttgcttgagagctcgccggctaatattattcgcggagttaaagtagtggaagtgagggcggccggggtcaataaaggggttgcggctaaattgttgtatgacaagctgaggccagaattggtcataattgcaggagacgactatacagatgaggagatgatgaaggcgctacctgaggccattactataaaggtcggcaaaggcgaaacctcggcgaagtacatggcgccctcgtacaggaggatacgggagctactacaagcacttctaacggctcagcgttga

SEQ ID NO: 145446 - protein, 737 aa, Pyrobaculum aerophilum str. IM2
MRLIIVSNRLPVVLTVGERGMEIREAVGGLATAVKSFIKATENGKALGFSEVVWAGWSGIKAEQESEDLKSRLREMGLLPVSLTAEEVNFFYEGFCNSTLWPLFHGFTVYTVFESKYWEAYVKVNQKYAETVASVANTGDFVWIHDYHLMLMPAMLREMSPDVSIGFFLHIPFPPAEMYQLMPPPWRTALLDGVLASDLVGFHIHEYVNNFVRAVSKFLGYRTEAGVIYAGRRKVHVGAFPIGIDFDFFYNSSLDPEVAGQIEELRQKLRGLKIIFSIDRLDYTKGVINRVHAWERFLKEHPQWRGKASFILIVVPSRIGVPQYDAMKREIEREVGRINGELGDVNWTPIVYISRFIPTPTLLALYNIADVALITPLRDGMNLVSKEYVATKRDCKGVLILSETAGASHELLEALIVNPNDESGVVEAIAKALTMEPEEQCRRIKAMQEKLRQQNVVKWAVDFLHSLMLAYRENTESFTTSSKLLDREAIEEIVKIFHGARSRLLLLDYDGTLVPHYPYAYQAVPDGELKRLLNSLAFQPNTYVAVVSGRGRDFLEAWLGDLPIYIVAEHGAFIRDPGGNWSQLFPFDTSWKISVRKIMEEFTRLTPGSYIEEKEISLAWHYRNVEPEIGEKAANRLADALTGLLESSPANIIRGVKVVEVRAAGVNKGVAAKLLYDKLRPELVIIAGDDYTDEEMMKALPEAITIKVGKGETSAKYMAPSYRRIRELLQALLTAQR

SEQ ID NO: 145447 - DNA, 2589 bp, Arabidopsis thaliana
  CDS (1)..(2589)
atggtatcaagatcttattcaaacctcttggatcttgcttctggtaacttccattcgttttctcgagaaaagaagaggtttccaagagtagcaactgtcactggtgtcttatctgagctagatgatgataacaacagcaacagtgtctgctctgatgctccttcttccgtcacacaagatcgaatcatcatcgttggaaaccagcttcctattaaatcacatcggaactctgctggtaaattgagttttagttgggacaatgactcgcttctcttgcagcttaaagatggtatgcgtgaagatatggaagttgtctacattggttgccttaaggaacagattgatacagttgagcaagatgatgtttctcaaaggttgcttgagaatttcaaatgtgttcctgcttatatcccacctgagctattcactaagtactatcatggattctgtaagcaacatctatggcctttgtttcactacatgcttcccttaactcctgatcttggtggtagatttgatcgttctttatggcaagcttatctttcggttaacaagatctttgctgataaagtgatggaagtgattagtcctgatgatgattttgtttgggttcatgactatcacttaatggttttgcctacatttctaaggaagaggtttaatagagtaaagcttggttttttccttcatagcccgttcccttcctctgagatttaccgtactcttccagtgagaaatgagctcttacgtgcactcctcaacgctgatttgattggctttcatacctttgactatgcaagacacttcctttcttgttgtagcaggatgcttggtttatcctatcagtccaaacgtggaaccatagggcttgagtattatggtcgaacggttagtatcaagattcttcctgtggggattcatatcagccagcttcagtcaattttaaacctcccagagactcagaccaaagttgctgagctaagagatcagttcttggatcagaaagttcttctcggtgttgatgacatggacatcttcaaaggaatcagcctcaaactcttggcaatggaacaacttctcacacagcatcccgagaagagaggtcgagttgtacttgtccagattgcaaaccctgcaagaggtcgtgggaaagacgttcaggaggttcagtctgaaactgaagccacggttaaaaggatcaatgaaatgtttggaaggccgggctaccaacccgtggttctgattgatacaccgcttcaattctttgagaggattgcttactatgtcattgcagagtgttgtcttgttacagcggtaagagatggtatgaatcttataccttatgagtacattatctgcaggcaaggtaatccgaaactcaacgagactataggccttgacccttctgctgcaaagaagagtatgcttgttgtctctgagtttattggttgttctccttctttaagcggcgccattagagtaaatccgtggaacattgatgctgtgactgaagcaatggactatgcattgatagtttcagaagcagagaagcaaatgcgtcacgagaagcatcacaaatatgttagcacacatgatgttgcttattgggcgcgtagctttatacaagatcttgaaagggcttgcggggatcatgtgaggaagaggtgttgggggattggattcgggttaggctttagagttgtggcgcttgatccgagttttaaaaagctttcgattgagcacattgtctcagcttataagagaaccaagaaccgagccattttgttggattatgatggcacaatggtgcagccaggttccattaggacaacaccaacccgcgaaacaatcgaaatcttgaacaacctgtctagtgatcccaagaatatcgtgtacctcgtcagtgggaaagacagaaggacactaactgaatggttttcttcatgtgacgatctcggtttgggtgcagagcacgggtattttataaggccaaatgatggaacagactgggaaacgtcgagtttggtatcaggttttgagtggaaacaaatagcagagccagtgatgagactttacactgagactacagatggatcaacaatagagactaaagagactgctctcgtttggaattaccaattcgcagatcctgattttggatcttgtcaagccaaagagcttatggaacacctcgaaagcgtgcttaccaatgatccagtctctgtcaagactggacaacaactcgttgaagttaaaccacagggtgtgaacaaaggtcttgtggcagagaggcttctaacaacgatgcaagaaaaagggaaacttttggatttcattctctgcgtcggtgatgatcggtctgatgaggatatgtttgaggtgataatgagtgctaaagatggtccagctttgtctcctgtggctgagatattcgcttgcaccgttggacaaaagccaagcaaagcaaaatactatttagacgatactgcggagataatcagaatgctggacggtctagccgctaccaacacaactatctctgatcaaactgattcaaccgccactgttccaactaaagatctgttttaa

SEQ ID NO: 145448 - protein, 862 aa, Arabidopsis thaliana
MVSRSYSNLLDLASGNFHSFSREKKRFPRVATVTGVLSELDDDNNSNSVCSDAPSSVTQDRIIIVGNQLPIKSHRNSAGKLSFSWDNDSLLLQLKDGMREDMEVVYIGCLKEQIDTVEQDDVSQRLLENFKCVPAYIPPELFTKYYHGFCKQHLWPLFHYMLPLTPDLGGRFDRSLWQAYLSVNKIFADKVMEVISPDDDFVWVHDYHLMVLPTFLRKRFNRVKLGFFLHSPFPSSEIYRTLPVRNELLRALLNADLIGFHTFDYARHFLSCCSRMLGLSYQSKRGTIGLEYYGRTVSIKILPVGIHISQLQSILNLPETQTKVAELRDQFLDQKVLLGVDDMDIFKGISLKLLAMEQLLTQHPEKRGRVVLVQIANPARGRGKDVQEVQSETEATVKRINEMFGRPGYQPVVLIDTPLQFFERIAYYVIAECCLVTAVRDGMNLIPYEYIICRQGNPKLNETIGLDPSAAKKSMLVVSEFIGCSPSLSGAIRVNPWNIDAVTEAMDYALIVSEAEKQMRHEKHHKYVSTHDVAYWARSFIQDLERACGDHVRKRCWGIGFGLGFRVVALDPSFKKLSIEHIVSAYKRTKNRAILLDYDGTMVQPGSIRTTPTRETIEILNNLSSDPKNIVYLVSGKDRRTLTEWFSSCDDLGLGAEHGYFIRPNDGTDWETSSLVSGFEWKQIAEPVMRLYTETTDGSTIETKETALVWNYQFADPDFGSCQAKELMEHLESVLTNDPVSVKTGQQLVEVKPQGVNKGLVAERLLTTMQEKGKLLDFILCVGDDRSDEDMFEVIMSAKDGPALSPVAEIFACTVGQKPSKAKYYLDDTAEIIRMLDGLAATNTTISDQTDSTATVPTKDLF

SEQ ID NO: 145449 - DNA, 1458 bp, Corynebacterium glutamicum ATCC 13032
  CDS (1)..(1458): transl_table=11
atggatgattccaatagctttgtagttgttgctaaccgtctgccagtggatatgactgtccacccagatggtagctatagcatctcccccagccccggtggccttgtcacggggctttcccccgttctggaacaacatcgtggatgttgggtcggatggcctggaactgtagatgttgcacccgaaccatttcgaacagatacgggtgttttgctgcaccctgttgtcctcactgcaagtgactatgaaggcttctacgagggcttttcaaacgcaacgctgtggcctcttttccacgatctgattgttactccggtgtacaacaccgattggtggcatgcgtttcgggaggtaaacctcaagttcgctgaagccgtgagccaagtggcggcacacggtgccactgtgtgggtgcaggactatcagctgttgctggttcctggcattttgcgccagatgcgccctgatttgaagatcggtttcttcctccacattcccttcccttcccctgatctgttccgtcagctgccgtggcgtgaagagattgttcgaggcatgctgggcgcagatttggtgggattccatttggttcaaaacgcagaaaacttccttgcgttaacccagcaggttgccggcactgccgggtctcatgtgggtcagccggacaccttgcaggtcagtggtgaagcattggtgcgtgagattggcgctcatgttgaaaccgctgacggaaggcgagttagcgtcggggcgttcccgatctcgattgatgttgaaatgtttggggaggcgtcgaaaagcgccgttcttgatcttttaaaaacgctcgacgagccggaaaccgtattcctgggcgttgaccgactggactacaccaagggcattttgcagcgcctgcttgcgtttgaggaactgctggaatccggcgcgttggaggccgacaaagctgtgttgctgcaggtcgcgacgccttcgcgtgagcgcattgatcactatcgtgtgtcgcgttcgcaggtcgaggaagccgtcggccgtatcaatggtcgtttcggtcgcatggggcgtcccgtggtgcattatctacacaggtcattgagcaaaaatgatctccaggtgctgtataccgcagccgatgtcatgctggttacgccttttaaagacggtatgaacttggtggctaaagaattcgtggccaaccaccgcgacggcactggtgctttggtgctgtccgaatttgccggcgcggccactgagctgaccggtgcgtatttatgcaacccatttgatgtggaatccatcaaacggcaaatggtggcagctgtccatgatttgaagcacaatccggaatctgcggcaacgcgaatgaaaacgaacagcgagcaggtctatacccacgacgtcaacgtgtgggctaatagtttcctggattgtttggcacagtcgggagaaaactcatga

SEQ ID NO: 145450 - protein, 485 aa, Corynebacterium glutamicum ATCC 13032
MDDSNSFVVVANRLPVDMTVHPDGSYSISPSPGGLVTGLSPVLEQHRGCWVGWPGTVDVAPEPFRTDTGVLLHPVVLTASDYEGFYEGFSNATLWPLFHDLIVTPVYNTDWWHAFREVNLKFAEAVSQVAAHGATVWVQDYQLLLVPGILRQMRPDLKIGFFLHIPFPSPDLFRQLPWREEIVRGMLGADLVGFHLVQNAENFLALTQQVAGTAGSHVGQPDTLQVSGEALVREIGAHVETADGRRVSVGAFPISIDVEMFGEASKSAVLDLLKTLDEPETVFLGVDRLDYTKGILQRLLAFEELLESGALEADKAVLLQVATPSRERIDHYRVSRSQVEEAVGRINGRFGRMGRPVVHYLHRSLSKNDLQVLYTAADVMLVTPFKDGMNLVAKEFVANHRDGTGALVLSEFAGAATELTGAYLCNPFDVESIKRQMVAAVHDLKHNPESAATRMKTNSEQVYTHDVNVWANSFLDCLAQSGENS

SEQ ID NO: 145451 - DNA, 2430 bp, Drosophila melanogaster
  CDS (1)..(2430)
atgcccgacacggaaatcatcgttaccaatgccggggagccctccaccaaggcgagtctcatcgtggtatccaatcggttgccgtttgtgcttatccgagatccgaagaccgatgagttggaacgcagggccagtgccggtggcctggtgactgcagtgtgcccggtggtgatcaagggcagtggtctctgggtgggctggtcgggtatccacttgaaggatcctaacgaggccattcccgagtccaatcccaacgatcagactccgactgctggcctcaagtccgagcaggtggtgtccgtcaacatcgattcgaagatcttcgatagctactacaacggatgctgcaacaagatcttctggccactgttccactcgatgccgggaagagccaacttcggaggcgagcactggcacgactatgtcactgtcaacaagcacttcgccgtgcggaccatcgaggctctggagaagtgcctggccaaaaaccagggcagcgagaagagtccaccgattgtctggatccacgactaccatctcatgctggccgccaattgggtgcgcgagcacgccgaggagaagaacctgccctgccgactggctttcttcctgcacatcccattcccgccatgggacatcttccgcctgctgccctggtccgatgagatcctacagggtatgttgggttgtgacctggtaggcttccatattcaggactattgccttaactttgtggactgctgccagcgcaatctcggctgccgtgtggacagaaacaatctgctggtggaacatggcgggcgcaccgttcgcgtccgcccgcttcccattggtattccctacgaacgcttcgttaatttggccacgaccgcgcccaaggtgctaaagacatccaagatgcaaatcatcctgggagtggaccgactggactacaccaagggcctcgtccatcgccttatggcttttgaggcgctgctgctgaagtatccgcagcacaaggagaaggtgagcctgctgcagatctcggtgccgtcgcgaaccgatgtaaaagagtaccgggagctgaaggaggaggtggaccagctggtgggccgcatcaacggacgctttaccacagccaactgggcgcccatacgctacatctacgactatgtcagccaagacgagttggctgctttgtacagggatgcggctgtttgcctggtaactccacttcgcgatggcatgaacctggtggccaaggagttcgtggcctgccagatcaacgaggtgcccggcgtgctggtcatctcaccgttcgcaggagccggcgagatgatgcacgaggcgctgctctgcaatccgtacgaggtgaacgaggccgccgaggtgatccaccgagcactgaccatgcccgaggatgagcgcgtcctacgtatggctcggctgcgccgtcgtgaagccgagtgcgatgtgagccactggatgcgttgtttcctaaaggcggtgggcgctctggagatggatgatgtgggcaccaccattatgcagccagtgtccgtggacgatttcgatgactacttactgaaatacatcggctataaccacaagttggctctgctgctggactacgacggaaccttggcgcccattgctcctcatcctgatctggccacgctctcgcccgaaattaagaatgtactatataagctgtccaatcactcggacgtctacgtggccgtcatctcgggtcgcaacgtggacaatgtcaagaagatggttggcatcgagggcataacctatgcgggcaatcacggtctagagatccttcatccggacggcagcaagttcgtacaccccatgcccatggagtacgaaaagaaggtcagtgacctgctgaaggctctgcaggattccgtttgccgcgacggcgcttgggtggagaataagggggcgttgctaacgttccactaccgagagacgcccaatcatctgaggggagctatggttgacaaggcgcgctccttgatcgagaagtacggcttcaaggccacggaggcgcattgcgctctggaagctcgtccgccggtgcagtggaataagggtcgtgcctcgatctacatcctgcgcacatccttcggcgtggactggaacgaacgcatcaagattatctatgtgggtgacgatctaacagacgaggacgccatggtggctctgaagggtatggcgcgaactttccgtgtgacatcgtcggatattgtgaagaccgctgcggatcatcgactgccctccacagactccgtgtacaccctgctgaaatgggtggaacgacacttcatgggacgcaaggcgcgcgccaattcgctgacctacaggcccaccaagggcgacggtgtccagatgcagatgtccctggaggtggccgcttcagcgaacaatctggaggtgtga

SEQ ID NO: 145452 - protein, 809 aa, Drosophila melanogaster
MPDTEIIVTNAGEPSTKASLIVVSNRLPFVLIRDPKTDELERRASAGGLVTAVCPVVIKGSGLWVGWSGIHLKDPNEAIPESNPNDQTPTAGLKSEQVVSVNIDSKIFDSYYNGCCNKIFWPLFHSMPGRANFGGEHWHDYVTVNKHFAVRTIEALEKCLAKNQGSEKSPPIVWIHDYHLMLAANWVREHAEEKNLPCRLAFFLHIPFPPWDIFRLLPWSDEILQGMLGCDLVGFHIQDYCLNFVDCCQRNLGCRVDRNNLLVEHGGRTVRVRPLPIGIPYERFVNLATTAPKVLKTSKMQIILGVDRLDYTKGLVHRLMAFEALLLKYPQHKEKVSLLQISVPSRTDVKEYRELKEEVDQLVGRINGRFTTANWAPIRYIYDYVSQDELAALYRDAAVCLVTPLRDGMNLVAKEFVACQINEVPGVLVISPFAGAGEMMHEALLCNPYEVNEAAEVIHRALTMPEDERVLRMARLRRREAECDVSHWMRCFLKAVGALEMDDVGTTIMQPVSVDDFDDYLLKYIGYNHKLALLLDYDGTLAPIAPHPDLATLSPEIKNVLYKLSNHSDVYVAVISGRNVDNVKKMVGIEGITYAGNHGLEILHPDGSKFVHPMPMEYEKKVSDLLKALQDSVCRDGAWVENKGALLTFHYRETPNHLRGAMVDKARSLIEKYGFKATEAHCALEARPPVQWNKGRASIYILRTSFGVDWNERIKIIYVGDDLTDEDAMVALKGMARTFRVTSSDIVKTAADHRLPSTDSVYTLLKWVERHFMGRKARANSLTYRPTKGDGVQMQMSLEVAASANNLEV

SEQ ID NO: 145453 - DNA, 1389 bp, Streptomyces coelicolor A3(2)
  CDS (1)..(1389): transl_table=11
atggcttcaagcttcggtgctgctcaggtgctggtcgcctccaaccgggggccggtctcgtacgaggtgcgggaggacgggtcactgcacgccaaacggggcggtggcgggctcgtgtcgggactgtcggccatcgggcccgacgcgggggcgctgtgggtgtgctcggcgctgtccgacggggaccgcgaggcggtgcggcgcggggtcggcgaggacggcgtacggatgctggacgtgccggccgacgtgcacgcggacgcgtacaacgggatcgccaactcggtgctgtggttcgtgcaccacatgctctaccagacgcccctggaaccggtcttcgacgcggagttccggcggcagtgggcctcctacgaggcgtacaaccgggccttcgccgaggcgctggccgaggaggcggccgagggcgcggtcgcgatcgtgcaggactaccacctgacgctggtgcccgggatgctgcgcgagctgcgtccggatctgcgcatcggccacttctcgcacacgccctgggccccgctcgactacttccggctgctgccggacgacatcgccgagcaggtgctgcgcggcatgctgggcgccgaccggctcggcttcctcacccggcgctgggccgacgcgttcaccgcctgctgcgacgccgtggtgggcgggctcggcggcacggagatcggcgtgcacgggctcggcgccgacggggacttcctgcggaagcgctcgcacgaggccgacgtcgaggagcggatggcggagctgcgggagcagatcggggagggccgccgcaccatcgtgcgggtggaccgcaccgagctgtccaagaacatcgtgcgcggtctgctggcctaccgggagctgctggccgggcggccggagtggcgcgagcgggtcgtgcacgtcgcgttcgcctacccctcgcggcaggacctcgccgtgtaccgggagtacacggccgaggtggagcgggtcgcgaacgcggtcaacgaggagttcggcacgccggggtggacgccggtcgtgctgaatctcaaggacgacttcgcgcggtcgctggcggcgtaccggctggcggacgtggcgctcgtcaaccccgtccgggacgggatgaacctggtcgcgaaggaggtgccggtcgtctccgacacgggatgcgcgctggtgctgtcgcgggaggcgggcgcgtacgaggagctgggcgaggacgcggtggtggtcaacccgtacgacgtggtgggcacggcggacgcgctgcacgcggcgctcggtctgccggcgggggaccgggccgagcgctcgaagcggctggcggccgccggcaccgcgctgcccccggcccggtggttcctggagcagttggaggcgctgcggggctga

SEQ ID NO: 145454 - protein, 462 aa, Streptomyces coelicolor A3(2)
MASSFGAAQVLVASNRGPVSYEVREDGSLHAKRGGGGLVSGLSAIGPDAGALWVCSALSDGDREAVRRGVGEDGVRMLDVPADVHADAYNGIANSVLWFVHHMLYQTPLEPVFDAEFRRQWASYEAYNRAFAEALAEEAAEGAVAIVQDYHLTLVPGMLRELRPDLRIGHFSHTPWAPLDYFRLLPDDIAEQVLRGMLGADRLGFLTRRWADAFTACCDAVVGGLGGTEIGVHGLGADGDFLRKRSHEADVEERMAELREQIGEGRRTIVRVDRTELSKNIVRGLLAYRELLAGRPEWRERVVHVAFAYPSRQDLAVYREYTAEVERVANAVNEEFGTPGWTPVVLNLKDDFARSLAAYRLADVALVNPVRDGMNLVAKEVPVVSDTGCALVLSREAGAYEELGEDAVVVNPYDVVGTADALHAALGLPAGDRAERSKRLAAAGTALPPARWFLEQLEALRG

SEQ ID NO: 145455 - DNA, 2295 bp, Xanthomonas campestris pv. campestris str. ATCC 33913
  CDS (1)..(2295): transl_table=11
gtgatcctggccaccgacctggatggcaccttcctggccggctctgcagaacaccgtcaccagctgtatcgcctggtcgaccagcatcccgaaatccgcctgatcttcattaccgggcgcggactcgaagcggtgatgcccttgctcaccgaccccaccattccccggcccgactatgtggtgtgcgacgtgggtgccaccgtggtggacggccacacgctgcaaccgttgcagcccctgcaatcgatgatcgacgcgcactggcccggcgagcaggtggtggcgcaggcgatgcgcgcattcccgcaattgcagcgccaggacatgccgcaggagcgccgctgctcgtatttctgcgatccgcacacgctggcgccgctgcgtgcgcagatcgagcagaccgcgcgcgcgcttggttgcgacgtgctgtattcggccgaccgctatctggacattctgccgcccgataccgacaagggccgcaccctgggcgcgttggcacgccagctggagctgccgcgcgagcgcatcctggtggccggcgacacgctcaacgatctctccatgtatctggccggtttccgcggcgtctgcgtgggcgattcggaagcggccttgacgcaggccactgcgcagttggatgcgacctatcacgccagtgcgcccgggtgcggcggcatcctggaggcgattgcgcacttcggcctgcttgccgacgacgacccgcacgtgccggcggtgcaggccccgcgcaagggcggcgccgagctggtgatggtctatcaccgcctgccgtatgacgaagtggtcgagcacggcgagctggtgcgccgcgcgccgcgctcgcccaacggcatcattccctcgctgctgagcttcttcgaaggtggccagcgcggctcgtgggtggcctggagcgtggacgaccccaagcgcgggccgttccagacccacaccgaggtggatgcgcagcgctacccgacgctcaccgccgcacgcgtgccgctgagcaagagcgaggtggacatcttctacaagcggttttccaaggaagcgttctggccgatgctgcatgtgttctgggaacgcgcgcgcttccgcgaggacgactggcaggtatttcttgcagtcaaccgcaagtttgcacaggccacctcggccgaggccgcgcacggcgccacggtctggatccatgactacaacctgtggatggtgccggcgtacctgcgcgagctgcgcccggatctgaagatcgcgttcttccatcacacctacttcccctcggctgacgtgttcaatgtggtgccatggcgccgcgagatcatcggtagcctgatgtgctgcgattacgtgggcttccatatcccgcgccaggtggagaacttcgtggacgtggtgcgcggcgtgatgccggtggaacgactggcgcaggaaagctgcgcgccacggtttctcacctatggctgcgcggtgggcctggacaccatgaccacctgcctgcgtgttgccgatcgcgacgtggcgctgggcgcgcatccggtgggcaccgacctgcgccgcattcgcgccgcgctgagcaagccggacgtgcgcaacgacatcttcaagctgcgccgcgagatcggtgcgcgcaagctggtgttgtcggtggagcggctggattacaccaagggcacgctggcgaaactggaggcgttcgagcgcctgctcgacagccagcggcagctgctgggcaaggtcaccttgctgatggtgtgcgtgccggcggcgcgcgagatgaccatctaccgcaccttgcagacgcagatcgaacaggcggtgggccgcatcaacgggcggttctcgcggctggactggacgccggtgcgcttcttcgcacaggccctgccgttcgagcaggtggtggcgcattacgccgccgcgcaggtgatgtggatcacgccgctgcgcgatggcttgaatctggtggccaaggagttcgtggcggtgcaaggcatcgaaggcggcagcggcgtgctggtgctgagcgaatttgccggcgcggctgcagaactcaaaggcgcggtactgaccaacccgcacgacccggccgatctggcggccggcctgttgcaggcactggcgatgcccgatgacgaggcggccgggcgcctgcggcagctgtacgacagcgtggagtactacaacatcgaccactgggggcgcgacttcctggacgcggtggcacgtagccgtggcgcgcatgcccgtgtgcccttggcggcggccagcacggtggccgagccggtcgcctag

SEQ ID NO: 145456 - protein, 764 aa, Xanthomonas campestris pv. campestris str. ATCC 33913
MILATDLDGTFLAGSAEHRHQLYRLVDQHPEIRLIFITGRGLEAVMPLLTDPTIPRPDYVVCDVGATVVDGHTLQPLQPLQSMIDAHWPGEQVVAQAMRAFPQLQRQDMPQERRCSYFCDPHTLAPLRAQIEQTARALGCDVLYSADRYLDILPPDTDKGRTLGALARQLELPRERILVAGDTLNDLSMYLAGFRGVCVGDSEAALTQATAQLDATYHASAPGCGGILEAIAHFGLLADDDPHVPAVQAPRKGGAELVMVYHRLPYDEVVEHGELVRRAPRSPNGIIPSLLSFFEGGQRGSWVAWSVDDPKRGPFQTHTEVDAQRYPTLTAARVPLSKSEVDIFYKRFSKEAFWPMLHVFWERARFREDDWQVFLAVNRKFAQATSAEAAHGATVWIHDYNLWMVPAYLRELRPDLKIAFFHHTYFPSADVFNVVPWRREIIGSLMCCDYVGFHIPRQVENFVDVVRGVMPVERLAQESCAPRFLTYGCAVGLDTMTTCLRVADRDVALGAHPVGTDLRRIRAALSKPDVRNDIFKLRREIGARKLVLSVERLDYTKGTLAKLEAFERLLDSQRQLLGKVTLLMVCVPAAREMTIYRTLQTQIEQAVGRINGRFSRLDWTPVRFFAQALPFEQVVAHYAAAQVMWITPLRDGLNLVAKEFVAVQGIEGGSGVLVLSEFAGAAAELKGAVLTNPHDPADLAAGLLQALAMPDDEAAGRLRQLYDSVEYYNIDHWGRDFLDAVARSRGAHARVPLAAASTVAEPVA

SEQ ID NO: 145457 - DNA, 1368 bp, Xanthomonas campestris pv. campestris str. ATCC 33913
  CDS (1)..(1368): transl_table=11
atgagtcgtctggtggtagtatccaatcgtgtggccgtgcctggtgaaagccgtgccggcggcctggcagtgggcttgttggcggcgttgaaggagcgcggcggggtgtggttcggctggagcggcaagaccgtgcgcggcgacagcggcggcatgcacgagcagaccgacggtgacatcaagttcgtcaccatggacctcaacaagcgcgacatcgattcctactacaacggctttgccaaccgcacgctgtggccgctgctgcacttccgcctggacctggtcgattacgaccgcgccacgcgcgaaggctacctgcgcgtcaatcgcctgttcgccgagaagctggcgcccttgctcaaggacagcgacacgctgtggatccacgattaccacatgattccgctcggcgcgatgctgcgcgagctcggtgtgggctgcaagatgggcttcttcctgcatgtgccgatgccgtcggccgacctgatgcaggcgatgccggatcacgcgcgcttgttcagcacgttctacgcgtacgacctggttggcttccagacccagcgcgatgccgaacgcttcaaggcgtatgtgcgcctgttcggtggtgggcgcgtgctggagggcgatctggtggaaggcccgggtgggcgccgcttcagcgctgctgcgttcccgatcggcatcgacaccgatctgattgccaatcaggccaaggcgtcggtctccaagcaggcagtgcgcgatcttcgcgaaagcctgcgcgggcgccagctcgcgatcggcgtggatcgcctggattattccaagggtctgcccgagcgcttccagggctttgagcgctatctggagcgctacccggatcaatccggcagcctcacctatctgcagattgcaccggtctcgcgcggcgacgtcaacgaatatcgccagctgcgcgggcagcttgagcagatcgcaggccacatcaacggtggtcatgcggagccggattggacgccgctgcgttacgtcaaccagaacttcagccatgccacgttgaccggattttatcgcgctgcggccgtgggtttggtgacaccattgcgcgacggcatgaatctggtcgccaaggaatttgtggcagcgcaggatccggagaatccgggtgtgctggtgttgtcgttgctggccggtgcggccgatgagatgaaagaggcgctgttggtcaatccgcatgatctggatggtgtggccgatgcaattgcgacggcggcgagcatgccgttggcaacgcgggtggagcgttggcacgcgatgatggatcacttgcgcaagaacaacatcaatcattggcggcagcggtatttgcaggcgttggccgatatctga

SEQ ID NO: 145458 - protein, 455 aa, Xanthomonas campestris pv. campestris str. ATCC 33913
MSRLVVVSNRVAVPGESRAGGLAVGLLAALKERGGVWFGWSGKTVRGDSGGMHEQTDGDIKFVTMDLNKRDIDSYYNGFANRTLWPLLHFRLDLVDYDRATREGYLRVNRLFAEKLAPLLKDSDTLWIHDYHMIPLGAMLRELGVGCKMGFFLHVPMPSADLMQAMPDHARLFSTFYAYDLVGFQTQRDAERFKAYVRLFGGGRVLEGDLVEGPGGRRFSAAAFPIGIDTDLIANQAKASVSKQAVRDLRESLRGRQLAIGVDRLDYSKGLPERFQGFERYLERYPDQSGSLTYLQIAPVSRGDVNEYRQLRGQLEQIAGHINGGHAEPDWTPLRYVNQNFSHATLTGFYRAAAVGLVTPLRDGMNLVAKEFVAAQDPENPGVLVLSLLAGAADEMKEALLVNPHDLDGVADAIATAASMPLATRVERWHAMMDHLRKNNINHWRQRYLQALADI

SEQ ID NO: 145459 - DNA, 1368 bp, Xanthomonas axonopodis pv. citri str. 306
  CDS (1)..(1368): transl_table=11
atgagtcgtttggtggtggtatccaaccgcgttgcggtgcccggcgagaaccgcgccggtggcttggcggttggcttgttggcggcgctcaaggagcgcggcggtgtgtggtttggctggagcggcaagaccgtgcgcggcgacagcggcggcatgcacgagcagaccgaaggcgacatcaccttcgtcaccatggacctcaacaagcgcgacatcgattcgtactacaacggcttcgccaatcgcacgctgtggccattactgcacttccgcctggacctggtcgattacgaccgcgccacgcgcgaaggctacatgcgcgtcaatcggctgtttgccgaaaaactcgcgccgctgctgaaagacagcgacacgctgtggatccacgactaccacatgattccgctcggcgcgatgctgcgcgagctgggcgtgggctgcaagatgggcttcttcctgcacgtgccgatgccgtcggccgatctggtgcaggccatgcccgatcatgcgcgtttgttcagtaccttctacgcatacgacctggtcggcttccagacccagcgcgatgccgaacgtttcaaggcctatgtgcgcctattcggcggtggccgcattctggaaggcgatctggtggaaggcccgggtgggcgccgcttcaccgcctcttcgttcccgatcgggatcgataccgacctgattgcccaccaggccaaggcctctgccggcaagcaggcggtgcgtgatctgcgcgaaagcctgcgtggccgtcagttggccatcggtgtggaccgcctggattattccaagggattgccggagcgctttcagggtttcgagcgctacctggagcggtatccggatcaatccggcagcctgacctacctgcaaattgcgccggtttcgcgcggcgatgtcaccgaataccgtcaattgcgcagccagctcgaacagatcgccggccacatcaacggcggacatgcagagccggactggacgccgctgcgctacgtcaaccagaacttcagccatgccacgctgacaggcttctatcgtgcggcctcggtgtgtctggtcacgccattgcgcgacggcatgaacctggttgccaaggaattcgtggccgcgcaggatccggcagacccgggtgtgctggtgttgtcgctgtttgcaggtgcagccgacgaaatgaaggaagcgttgctggtcaacccgcacgatctggatggcgtggccgacgcgatcgccacagcggcaagcatgccgctggcaagccgcatcgaacgctggcacgcgatgatggatcacctgcgcaagaacaacatcaaccactggcgccagcgctatctgcaagcgctctctgaggtgtag

SEQ ID NO: 145460 - protein, 455 aa, Xanthomonas axonopodis pv. citri str. 306
MSRLVVVSNRVAVPGENRAGGLAVGLLAALKERGGVWFGWSGKTVRGDSGGMHEQTEGDITFVTMDLNKRDIDSYYNGFANRTLWPLLHFRLDLVDYDRATREGYMRVNRLFAEKLAPLLKDSDTLWIHDYHMIPLGAMLRELGVGCKMGFFLHVPMPSADLVQAMPDHARLFSTFYAYDLVGFQTQRDAERFKAYVRLFGGGRILEGDLVEGPGGRRFTASSFPIGIDTDLIAHQAKASAGKQAVRDLRESLRGRQLAIGVDRLDYSKGLPERFQGFERYLERYPDQSGSLTYLQIAPVSRGDVTEYRQLRSQLEQIAGHINGGHAEPDWTPLRYVNQNFSHATLTGFYRAASVCLVTPLRDGMNLVAKEFVAAQDPADPGVLVLSLFAGAADEMKEALLVNPHDLDGVADAIATAASMPLASRIERWHAMMDHLRKNNINHWRQRYLQALSEV

SEQ ID NO: 145461 - DNA, 1449 bp, Corynebacterium efficiens YS-314
  CDS (1)..(1449): transl_table=11
atggaagaactcaacagtttcgttgtcgttgccaaccgcctcccggtggacatgaccgcccaccccgatggcacctacagcatcacccccagccccggtgggctggtcaccgggttgtccccggtgctggagcagcaccggggatgctgggtcggatggcccggaacggtcgatgtcgcccctgaccccttccgcactgacaccggcatcctcctccaccccgtgcgtctcaccgcgagtgatttcgaggggttctacgaggggttctccaatgccaccctgtggccactgttccatgacctcatcgtgccacctgtctatgacgtcgactggtggcacgatttccgtgaggtcaatctcaagttcgccgaggccgtcaaccaggttgccgcggagaacgccaccgtctgggtgcaggactaccagctgctgctggtgccgggcatcctgcgtcagatgcggcccgacctgtgcatcggtttcttcctgcacatccccttccccaacccggagctgttccggcagttgccctggcgggaggagatcgtccgtggcatgctcggcgcggatctcatcggtttccacctcccccagaatgccgacaacttcctcagtctcacccggcaggtcgccggcaccgccggttcgcacaccggccagcccgatgaactcgaggtggagggtgaggcagccatccgtgaggtcaaagcccatgtgatcaccgccgacggcaggaaggtcggggtcggggcatttcccatctccattgataccggggcggtggagcaggcgtcgcaaagcagcgtggaggcgctacgcgccgacctgggctcaccggagatcgtcttcctcggcgtcgaccgcctcgattacaccaagggcatcctgcagcggctgctggccttcgaggagctgctggaatccggtggacttgatccggcaaccaccgtgtttctgcaggtggccaccccctcccgggaacgcatcgaacactaccgcgtgtcccgatcccaggtcgaggaggccgtgggccgcatcaacggccgcttcggtcgcatgggccatcccgtggtgcactatctccaccggtcactgcccaaggatgacctccagatcctctacacggctgctgatgtaatgctggtcaccccattcaaggacggtatgaacctggtggccaaggaatacgtggccgcccaccgctccgggacgggcgcactcatcctcagtgaattcgccggtgccgccgacgaactgaccgaggcctatctctgcaaccccttcgatctggagtccatcaaacgccagatgctcgctgcggtccacgacctgcgccacaacccggattatgcggccgaacgcatgcgtgccaacagtgagcaggtgctgtcccacgatgtcaatgtgtgggcgagcagcttcctgacctgcctggaggacttcaagtga

SEQ ID NO: 145462 - protein, 482 aa, Corynebacterium efficiens YS-314
MEELNSFVVVANRLPVDMTAHPDGTYSITPSPGGLVTGLSPVLEQHRGCWVGWPGTVDVAPDPFRTDTGILLHPVRLTASDFEGFYEGFSNATLWPLFHDLIVPPVYDVDWWHDFREVNLKFAEAVNQVAAENATVWVQDYQLLLVPGILRQMRPDLCIGFFLHIPFPNPELFRQLPWREEIVRGMLGADLIGFHLPQNADNFLSLTRQVAGTAGSHTGQPDELEVEGEAAIREVKAHVITADGRKVGVGAFPISIDTGAVEQASQSSVEALRADLGSPEIVFLGVDRLDYTKGILQRLLAFEELLESGGLDPATTVFLQVATPSRERIEHYRVSRSQVEEAVGRINGRFGRMGHPVVHYLHRSLPKDDLQILYTAADVMLVTPFKDGMNLVAKEYVAAHRSGTGALILSEFAGAADELTEAYLCNPFDLESIKRQMLAAVHDLRHNPDYAAERMRANSEQVLSHDVNVWASSFLTCLEDFK

SEQ ID NO: 145463 - DNA, 1485 bp, Bradyrhizobium japonicum USDA 110
  CDS (1)..(1485): transl_table=11
atgaacaggaggggacgacctgtgaacttagtcgtcgtttcgaatcgtgttgcgcgcggcaaacccaacgagcccatgacgggcggcttggctgcggcattgcttcccgttgtggaacattcgggtgccatctgggtggggtcttccggccgcgtgcgtgacggccatcagaaggagccgtttgccgagatcgaggcgctgggttcgggcgcgattgcgacgctggatctgccggcggcgcattacggcggctattacgaaggttttgccaattcggcgttgtggccggcgctgcattcgcgcagcgatctgatccgcgtttcgcgcgaagactatgtcagctatcgcgaggtcaacgccttcatggcgcgcgccttgatgcgcttccgtaaaccccggaccgcattctgggtgcaggactatcatttcctcgcactcggtgcggagctgcgcgatctcggcgtcgacgatccgatcggcttcttcctgcacacgccgtggccggtggccgcggtgacgcagggcgtacccaatcatcgcgaactgatcacggcgatgctcgcctacgatctcattggcttccagaccgaggaggatcgccagaatttcctcggttatgtcgccggcgagctcggtctcgtcatcgatgatggtgttgtgctgtcgcagcacggccgcacccgctgtgaagtcttccccatcggcatcgatgcggagaagttcgcgcagtatgccgccaagtccgcctcgcatccggatgtgtcgcggctgcgccgcagcctcaacggcgagcgtctggcgatcggtgtcgaccggctcgactattccaagggcctcgtcaaccgcatcagcgcgttcgaccggctctggaccgagcagccgcaattcttgcgcagcatctcgctgctccagatcgccaatccttcgcgcggtgccatcgaggcctatggcaatcttcagaacgaggtcgcgcgtctcgtcaccgacgtcaacggccgccacggcgaggtggactggacgccgatccgctatctcaacaagggcttcagccaggccgtgctcgcggggctctatcgcaccgcgcagatcggtgtggtgacgccgctgcatgacggcatgaacctcgtcgcaaaggagtatgtcgccgcgcagaacccggccgaccccggcgtgctggtgctgtcgaaattcgccggcgcggcgaatgagctcgacacggcgctgctggtcaatccgcacgacatcgacgccatggcacgcgcgatcgcgatcgccgccgcgatgccgctcaccgagcgcaagatgcgctgggacgcgatgatgaagaagctgcgcggccacaccatccagcaatggtccgccgatttcgtcgccgagctcgaaaagtgccggatcgagaaggccgccgtcgccccgctcgcagcccagcccccgcaagcgctgcgctggttgaagtcggcgatctcgggcgtgcggttgatttag

SEQ ID NO: 145464 - protein, 494 aa, Bradyrhizobium japonicum USDA 110
MNRRGRPVNLVVVSNRVARGKPNEPMTGGLAAALLPVVEHSGAIWVGSSGRVRDGHQKEPFAEIEALGSGAIATLDLPAAHYGGYYEGFANSALWPALHSRSDLIRVSREDYVSYREVNAFMARALMRFRKPRTAFWVQDYHFLALGAELRDLGVDDPIGFFLHTPWPVAAVTQGVPNHRELITAMLAYDLIGFQTEEDRQNFLGYVAGELGLVIDDGVVLSQHGRTRCEVFPIGIDAEKFAQYAAKSASHPDVSRLRRSLNGERLAIGVDRLDYSKGLVNRISAFDRLWTEQPQFLRSISLLQIANPSRGAIEAYGNLQNEVARLVTDVNGRHGEVDWTPIRYLNKGFSQAVLAGLYRTAQIGVVTPLHDGMNLVAKEYVAAQNPADPGVLVLSKFAGAANELDTALLVNPHDIDAMARAIAIAAAMPLTERKMRWDAMMKKLRGHTIQQWSADFVAELEKCRIEKAAVAPLAAQPPQALRWLKSAISGVRLI

SEQ ID NO: 145465 - DNA, 1392 bp, Streptomyces avermitilis MA-4680
  CDS (1)..(1392): transl_table=11
atggcttccacccgaggtgcccagatcctcgtcgcgtccaaccgcggcccggtctcgtacacgctggacgagaccggcacgctgaccagcaagcgcggcggcggcgggctggtgtccggactgtcggccatcggccccgacgcgggcgccctctgggtgtgctcggcgctcggcgaaggcgaccgcgaggcggtgcggcgcggagtcggcgagcccggcgtacggatgctggacgtcgacgcagaggtccacgcggacgcgtacaacggcatcgcgaactcggtcctgtggttcgtccaccacatgctgtaccagacgccgctggagccggtcttcgacgcggagttccggcgccagtgggcggcctacgagacgtacaaccacgccttcgccgcggcgctggccgaggaggcggccgagggcgccgcggtcctcgtccaggactaccacctgacgctggtcccgcggatgctccgcgaactgcgccccgacctgcggatcggccacttctcgcacacgccgtgggccccgtcggagtacttccggatgctgcccgacgacatcgcggcgcaggtgctgggcgggattctgggcgccgaccgggccgcgttcctcacccagcgctgggcggacgcgttcacggactgctgtcacgccgtgctgggccccgggattccctccggtacccggatcggcgtgcacggcctgggcgcggacgcggacttcctgcgggagcgggcgcaccggccggacgtcgaggagcggatggcggcgctgcgcgaggaggtcggcgagggccggaagacgatcgtgcgggtggaccgtacggagctgtcgaagaacatcgtgcggggtctgctcgcctaccgggagctgctggcgtcgcggccggactggcgcgagcgggtcgtccacgtcgccttcgcctacccgtcccgccaggacctggcggtctaccgggactacacggccgccgtgcagcgcctcgcggacgagatcaacgcggagtacgggacgccgggctggaccccggtcgtgctgcacgtcaaggacgacttcgcgcgctccctcgccgcgtaccggctggcggacgtggccctcgtgaaccccatccgcgacggcatgaacctggtcgccaaggaggtcccggtcgtctccgacgagggctgcgcgctggtgctgtcccgggaggcgggcgcgtacgaggagctgggcgaggacgcgatcacggtgaacccgtacgacgtcgtgggtacggccgtggccctccacgaggccctctcgatgccggccggcgagcgcgccgaacgcacgaagcggctggccggggcggcgacggcactgcccccggcccgctggttcctggatcagctgcacgcactggacacctga

SEQ ID NO: 145466 - protein, 463 aa, Streptomyces avermitilis MA-4680
MASTRGAQILVASNRGPVSYTLDETGTLTSKRGGGGLVSGLSAIGPDAGALWVCSALGEGDREAVRRGVGEPGVRMLDVDAEVHADAYNGIANSVLWFVHHMLYQTPLEPVFDAEFRRQWAAYETYNHAFAAALAEEAAEGAAVLVQDYHLTLVPRMLRELRPDLRIGHFSHTPWAPSEYFRMLPDDIAAQVLGGILGADRAAFLTQRWADAFTDCCHAVLGPGIPSGTRIGVHGLGADADFLRERAHRPDVEERMAALREEVGEGRKTIVRVDRTELSKNIVRGLLAYRELLASRPDWRERVVHVAFAYPSRQDLAVYRDYTAAVQRLADEINAEYGTPGWTPVVLHVKDDFARSLAAYRLADVALVNPIRDGMNLVAKEVPVVSDEGCALVLSREAGAYEELGEDAITVNPYDVVGTAVALHEALSMPAGERAERTKRLAGAATALPPARWFLDQLHALDT

SEQ ID NO: 145467 - DNA, 1503 bp, Mycobacterium bovis AF2122/97
  CDS (1)..(1503): transl_table=11
atggctccctcgggaggccaggaggcgcagatttgcgattcggagaccttcggggactctgacttcgtggtggtagccaatcgactgcccgtcgatctggagcgtcttcccgacggcagcacaacctggaaacgcagccccggaggcttggtcaccgccttggagccggtgctgcggcgtcggcgcggggcctgggtcggctggcccggcgttaacgacgacggggccgaacccgacctccacgtgctggacggccccatcatccaagacgagctggaacttcatccggtacggctgagcaccacggacatagctcagtactacgagggattctccaacgccacactgtggccgctgtaccacgacgtcatcgtcaagccgctctaccaccgcgaatggtgggatcgctacgtcgacgtcaaccagcgctttgccgaggccgcgtcgcgcgccgccgcccacggcgcaaccgtgtgggtacaggactaccagctgcagctggtaccgaagatgctgcgcatgctgcggcccgatctgaccatcggtttctttttgcacatcccgttcccgccggtagagctgtttatgcagatgccgtggcgcaccgagatcatccagggcctactgggcgccgacctggtgggcttccatcttccgggcggtgcccagaatttcctgatcctgtcccggcgtctggtcggcaccgacacttcccgcggaaccgtcggtgtgcggtcgcggttcggtgcggcggtgctcgggtcccgcaccatacgagttggcgcctttcctatctcggttgactccggcgcgctcgaccacgctgcccgcgaccgcaacatcaggcgccgggcccgcgagattcgcaccgaactgggaaatccgcgcaagatcctgctcggtgttgaccggctcgactacaccaagggcatcgacgtacggctgaaggccttttccgagctgctggccgagggccgcgtcaaacgcgacgacaccgtcctggtccagctggctaccccgagccgcgagcgggtggagagctaccagacgctgcgcaacgacatcgaacgccaggtcggccacattaacggcgagtacggtgaggttggccatccggtagtgcattacctgcatcgaccggctccgcgcgacgagcttatcgctttcttcgtggccagcgacgtcatgctggtcaccccactacgcgacgggatgaacctggtggccaaggagtacgtcgcttgccgcagcgatcttggcggtgccctggtgctcagcgaattcaccggggccgcagccgaactccggcacgcatacctggtcaacccgcacgacctggaaggcgtcaaggacgggatagaggaagcgctcaaccagacggaggaggcgggccggcggcgaatgcggtcgctgcgacgccaagtgctcgcccacgacgtggaccgctgggcacagtcgtttctcgacgctctcgccggggcacacccgaggggccaaggctaa

SEQ ID NO: 145468 - protein, 500 aa, Mycobacterium bovis AF2122/97
MAPSGGQEAQICDSETFGDSDFVVVANRLPVDLERLPDGSTTWKRSPGGLVTALEPVLRRRRGAWVGWPGVNDDGAEPDLHVLDGPIIQDELELHPVRLSTTDIAQYYEGFSNATLWPLYHDVIVKPLYHREWWDRYVDVNQRFAEAASRAAAHGATVWVQDYQLQLVPKMLRMLRPDLTIGFFLHIPFPPVELFMQMPWRTEIIQGLLGADLVGFHLPGGAQNFLILSRRLVGTDTSRGTVGVRSRFGAAVLGSRTIRVGAFPISVDSGALDHAARDRNIRRRAREIRTELGNPRKILLGVDRLDYTKGIDVRLKAFSELLAEGRVKRDDTVLVQLATPSRERVESYQTLRNDIERQVGHINGEYGEVGHPVVHYLHRPAPRDELIAFFVASDVMLVTPLRDGMNLVAKEYVACRSDLGGALVLSEFTGAAAELRHAYLVNPHDLEGVKDGIEEALNQTEEAGRRRMRSLRRQVLAHDVDRWAQSFLDALAGAHPRGQG

SEQ ID NO: 145469 - DNA, 1440 bp, Corynebacterium diphtheriae NCTC 13129
  CDS (1)..(1440): transl_table=11
gtgtctgcgatcgaatcgaatgagggcgagcagcttttcgactttgtcgtggttgctaatcggttgcctgttgacttaagcacgtctgctgatgggtcgccgcgttgggtggctagccctggcggtttggtcactgcgttaacgcctgttcttgctggcaaccgtggttgttgggtgggctggcatggcggtactggccctgcccctgatccgtttcgtactgacacgaacatttgggtgcatccggttgcgttgagcgaccatgattttgagggcttttacgagggcttttctaatgccaccctgtggccgttgtaccacgatttgattgtgtcgccggtgtataaccgcgattggtggacggcctaccgtgaggtgaatttgaagtttgcttcggcggttgctgaggttgccgccgagggcgctgtggtgtggattcaggattatcagttacagctggtacctggtattttgcgccagattcgccctgatcttacgatcggctttttcttgcatatcccgttcccgcattcggatttgttccgccagttgccgtggcgcgaggagattgtgcgtgggttgttgggggcggatttggttggtttccatctgacatccagcgcaaataatttcttggatttggctgcggctcttggtttagaggcacagggccgtgcgaaggtccgcgaggttagtgctacggtgacagctggcgacggccatgtggtgagcgtggcggcgtatccgatttccattgatgtggagccgttgattgcttcgcatagtaatcgtgatgagatccgtgctgagtttggctacccagagacgctgattttgggtgtggatcgcctcgattacacgaagggtattttgcagcgtctattggcctttgaggagctgctggaaagcggtgctatcgatccgaataccaccgtgtttgcgcaggtggctacgccttcgcgggagcgtatcgagcattataagcaggctcgttctgaggttgaagaggccgtgggtcgtattaatggccgttttggttccattggtcgttctgtggtgcattatcaccatcgtcacatggatcgtagtgagctgaataagctgtatcgtgccgcggacgttatgctggtcacgccgtttaaagatggtatgaatttggtggccaaggagtatgtgtcttgccacagcgatggttcaggcgcaatggttcttagcgagttcgctggtgccgccgtggagcttgagcaggcatttttgtgtaatccttttgatttggagtcgatcaagcgccagattgctggtgcggtgacaacgctgaagaatcatccggaagctgcacgagatcgtatgctggctatgcatcagcaagtagtcgaccatgatgtgaatgtgtgggcttcggcgtttttgcgtgatcttagtagtgcgcatacgtcgtaa

SEQ ID NO: 145470 - protein, 479 aa, Corynebacterium diphtheriae NCTC 13129
MSAIESNEGEQLFDFVVVANRLPVDLSTSADGSPRWVASPGGLVTALTPVLAGNRGCWVGWHGGTGPAPDPFRTDTNIWVHPVALSDHDFEGFYEGFSNATLWPLYHDLIVSPVYNRDWWTAYREVNLKFASAVAEVAAEGAVVWIQDYQLQLVPGILRQIRPDLTIGFFLHIPFPHSDLFRQLPWREEIVRGLLGADLVGFHLTSSANNFLDLAAALGLEAQGRAKVREVSATVTAGDGHVVSVAAYPISIDVEPLIASHSNRDEIRAEFGYPETLILGVDRLDYTKGILQRLLAFEELLESGAIDPNTTVFAQVATPSRERIEHYKQARSEVEEAVGRINGRFGSIGRSVVHYHHRHMDRSELNKLYRAADVMLVTPFKDGMNLVAKEYVSCHSDGSGAMVLSEFAGAAVELEQAFLCNPFDLESIKRQIAGAVTTLKNHPEAARDRMLAMHQQVVDHDVNVWASAFLRDLSSAHTS

SEQ ID NO: 145471 - DNA, 1482 bp, Rhodopseudomonas palustris CGA009
  CDS (1)..(1482): transl_table=11
gtgaacctggtcgtggtttcgaaccgagttgcccgagcgtcggggaacgaaccgatgacgggagggctggcagccgcgttgctgccagtggtggaaaaatccggggcgatatgggtcggctcgagcggtcgcgtccgtgatggcgttcaccgcgagccgttcgctgaaatcgaaccgctcggcgctggcgctctcgccatgctggatctgcccgccgcacattacggcggttactacgagggcttcgccaattcggcgctatggcctgcgctgcattcccgcccggatctgatccgggtgtcgcacgacgattatcgctcctatcgcgaagtcaacgccttcatggcgcgggcgctgctgcggttccgcaagccggataccgcgttctggattcaggactatcacttcctcgctttgggcgcggaactgcgtcagctcggcgtccagcatccgatcgggttcttcctgcatacgccatggccgtcgcgggcgacgattggatgcgtaccccatcaccgcgaactgatcgaagcgatgctgacctatgatctgatcgggttccagaccgaagaggatcgccgcaatttcctcggttacgttgaatcggaactcggcctgaagatcgacggcagcgaggtctcgaccacgcacggcaccgcgcgctgcgaggtgttcgcaatcagcatcgacgccgacgcattcgcccaacaagcacagaaggcgatgacccatcccgaagtctcccgcctccgcaagagtctgaacggcgaaaagctcgtaattggcgtcgatcgtctcgattattcgaaggggctgatcaaccgcgtcaaggcgttcgacaagatgttgaccgaccggcctgccttgcagcgggtagtgtcgctgctgcaaatcgcgaccccgtcccgcggcacgatcgaagcttacggcaatctacagggcgatctcgccaagctggtcagcgacgtcaacggccggctcggcgaggtcgactggaccccgatccgctatctcaacaaggggtatcgccagagtgtgctcgcgggcctgtaccgctcggctcatgtcgggttggtcacgccgctgcaagacgggatgaacctggtggccaaggaatacgttgcggcgcagaacccgctcgatcccggcgtgctggtgctgtcgaaattcgccggggccgccaatgagctcgacaccgccctgcaggtcaatccgcacgacatcgagggaatgtcgcgggtgatcgccaccgcgctggcgatgccgctgaccgagcggcggctgcgctgggaggcgatgatggccaagctgcgcgacaacagcatccgccgctggttcgcggacttcctcgccgcgctggaccaagcccacaccgccaatcgcagtgtcggcccgattccgctggcgccgccgccctcgatcatgatggcgggggggcggtcgcggctcgcgccgcgcgctgctggcgcagtgctgcaatag

SEQ ID NO: 145472 - protein, 493 aa, Rhodopseudomonas palustris CGA009
MNLVVVSNRVARASGNEPMTGGLAAALLPVVEKSGAIWVGSSGRVRDGVHREPFAEIEPLGAGALAMLDLPAAHYGGYYEGFANSALWPALHSRPDLIRVSHDDYRSYREVNAFMARALLRFRKPDTAFWIQDYHFLALGAELRQLGVQHPIGFFLHTPWPSRATIGCVPHHRELIEAMLTYDLIGFQTEEDRRNFLGYVESELGLKIDGSEVSTTHGTARCEVFAISIDADAFAQQAQKAMTHPEVSRLRKSLNGEKLVIGVDRLDYSKGLINRVKAFDKMLTDRPALQRVVSLLQIATPSRGTIEAYGNLQGDLAKLVSDVNGRLGEVDWTPIRYLNKGYRQSVLAGLYRSAHVGLVTPLQDGMNLVAKEYVAAQNPLDPGVLVLSKFAGAANELDTALQVNPHDIEGMSRVIATALAMPLTERRLRWEAMMAKLRDNSIRRWFADFLAALDQAHTANRSVGPIPLAPPPSIMMAGGRSRLAPRAAGAVLQ

SEQ ID NO: 145473 - DNA, 1461 bp, Geobacter sulfurreducens PCA
  CDS (1)..(1461): transl_table=11
gtgggggagcggatactggtcgtttccaaccgcgaaccctatatccatatccgcacgggcgacaccgtggaggtccatcgtccggccagcggcctggtcaccgccgtggagccggtcatgcgtgcctgctcgggaacctggatcgcccatggcagcggctccgccgaccgggagacggtcgactcccacgaccgggtccgggtgccgccccacaagcctgaatacaatctgcgacggatctggctcaccaaggaagaggaagaggggtactactacggcttcgccaacgaagggctctggcccctctgccatatcgcccacgtacgcccggtgttccgcaccagcgactggcaacagtacgtcaggatcaaccagcggttcgccgacgccgtggtcaaggaggcggacagcgacgatccggttgtgctggtacaggactaccacttcgcgcttctgcccgcgatgatccgcaaggccctgcccaaggccaccatcatcaccttctggcacattccgtggcccaacccggagtcgttcggcatctgcccctggcgggaggaactgctcaaggggatgctggggagcaccattctcggcttccacaccccgtaccattgcaagaacttcctggagacggtggaccgctacctggagacccggatcgagcatgaatcgtccaccatctcccggcgaggccaattgaccatggttgagagttacccaatctccatccagtggccgccggcctggcaggggaccctgccgccggtggacgtgacgcggagcgaaatccttggcgaactggggcttcccctggatcacctgatcggggtcggggttgaccggatggattataccaagggaatcccggagcgattcatggcggtggagcggctgttcgaactgcaccccgaactggtgggacgcttcacctttgtccagatcgccgcgccgagccggtcggccctggaggagtaccaggcgttcgaggcgagggtccattcccacgcggagcggatcaacgggcgtttcagccgcgacgggcgcccggccatcatcctcaaggccgagcaccacgaacccgagcaggtcaaccgttactaccgcgccgccgatgtctgcatggtcaccagcctccacgacggcatgaacctggtggccaaggagtacgtggcggcccgggacgacgagcggggcgccctggtgctgagccagttcaccggcgctgcccacgaactgcatgaggccctgatcgtcaacccctatcatgtggaacagaccgccgaggccctccaccgggccctcaccatgcccgattacgagcagcgggaacggatgcggagcatgcgcatgctggtgcgcgatttcaacgtctaccgctgggccggccggatgctgctggacgcggccagggtccgccagcgggagaaactggccgcccggatcgggggcgagtcgtga

SEQ ID NO: 145474 - protein, 486 aa, Geobacter sulfurreducens PCA
MGERILVVSNREPYIHIRTGDTVEVHRPASGLVTAVEPVMRACSGTWIAHGSGSADRETVDSHDRVRVPPHKPEYNLRRIWLTKEEEEGYYYGFANEGLWPLCHIAHVRPVFRTSDWQQYVRINQRFADAVVKEADSDDPVVLVQDYHFALLPAMIRKALPKATIITFWHIPWPNPESFGICPWREELLKGMLGSTILGFHTPYHCKNFLETVDRYLETRIEHESSTISRRGQLTMVESYPISIQWPPAWQGTLPPVDVTRSEILGELGLPLDHLIGVGVDRMDYTKGIPERFMAVERLFELHPELVGRFTFVQIAAPSRSALEEYQAFEARVHSHAERINGRFSRDGRPAIILKAEHHEPEQVNRYYRAADVCMVTSLHDGMNLVAKEYVAARDDERGALVLSQFTGAAHELHEALIVNPYHVEQTAEALHRALTMPDYEQRERMRSMRMLVRDFNVYRWAGRMLLDAARVRQREKLAARIGGES

SEQ ID NO: 145475 - DNA, 1479 bp, Mycobacterium avium subsp. paratuberculosis K-10
  CDS (1)..(1479): transl_table=11
atggctcccgggggagggcgaggctcgaagacggccggctacggcaactccgacttcgtcgtggtcgccaaccggctgccggtggatcaggagcggcttcccgacggcagcacggcctggaagcgcagccccggcggcttggtcaccgccctcgaaccgctgctgcgccgccagcgcggggcgtgggtgggctggcccgggatcgtcgacgaggacgtcgaccacgaggacgacccgatcgtccaggacgacctggagcttcggccggtcaagctgagcgccgacgacgtcgccgaatactacgagggcttctccaacgccacgctgtggccgctgtatcacgacgtcatcgtcaaaccgatctaccaccgcgaatggtgggaccgctacgtcgccgtgaaccgccgcttcgccgaggccacctcgcgcgccgccgcgcgcggcgcgaccgtgtgggtgcaggactaccagctgcagctggtgccggcgatgctgcgcgaactgcggcccgacctgaccatcggcttcttcctgcacatcccgttcccgccggtggagctgttcatgcagctgccgtggcggacggagatcgtcaagggcctgctcggcgccgatttggtcgggttccatctgaccggcggcgcccagaatttcctgttcctgtcccggcggttgatcggcgccaacacctcccgcggcgcggtggggatgcggtcacgctacggcgaggtggagctggagtcccgcgtggtccgggtgggcgccttccccatctccatcgactccacggcgctcgaccagacggcccggcaccgcgatatccggcgccgcgcccgcgagatccgggccgagctgggcaacccgcgcaaggtgctgctcggcgtcgaccggctggactacaccaagggcatcgacgttcggctgaaagccttttcggagctgctggccgagggccgcgccaagcgcgacgacaccgtgctggtgcagctggccaccccgagccgggagcgggtggacagttatcagcagctgcgcaacgacatcgaacgccaggtcggccacatcaacggcgagtacggcgaggtcgggcatccggtggtgcactacctgcaccggccggtcccccgcaacgaactcatcgcgttcttcgtggcggccgacgtcatgctggtcacgccgctgcgcgacgggatgaacctggtcgccaaggagtacgtggcctgtcgcagcgacctcggcggggcgctggtgctgtccgaattcaccggcgccgcagccgaactccggcaggcgtatctggtcaacccgcacgacctggagggcgtcaaggacaccgtcgaggccgcgctcaaccaatccgtcgaggagggccggcgccggatgcggtcgttgcgccggcaggtgctcgcgcacgacgtcgaccgctgggcgcgttcgttcctcgacgcgctcgccgagtcggggccgcgtgacggctga

SEQ ID NO: 145476 - protein, 492 aa, Mycobacterium avium subsp. paratuberculosis K-10
MAPGGGRGSKTAGYGNSDFVVVANRLPVDQERLPDGSTAWKRSPGGLVTALEPLLRRQRGAWVGWPGIVDEDVDHEDDPIVQDDLELRPVKLSADDVAEYYEGFSNATLWPLYHDVIVKPIYHREWWDRYVAVNRRFAEATSRAAARGATVWVQDYQLQLVPAMLRELRPDLTIGFFLHIPFPPVELFMQLPWRTEIVKGLLGADLVGFHLTGGAQNFLFLSRRLIGANTSRGAVGMRSRYGEVELESRVVRVGAFPISIDSTALDQTARHRDIRRRAREIRAELGNPRKVLLGVDRLDYTKGIDVRLKAFSELLAEGRAKRDDTVLVQLATPSRERVDSYQQLRNDIERQVGHINGEYGEVGHPVVHYLHRPVPRNELIAFFVAADVMLVTPLRDGMNLVAKEYVACRSDLGGALVLSEFTGAAAELRQAYLVNPHDLEGVKDTVEAALNQSVEEGRRRMRSLRRQVLAHDVDRWARSFLDALAESGPRDG

SEQ ID NO: 145477 - DNA, 2397 bp, Nasonia vitripennis
  CDS (1)..(2397)
atgacagagtccaggagctactcgtccaacggcagtatgatcgtcgtgagcaacaggttgcccttcgtcttgaagaggaatgagacttcggggaagctcgagcgcaaggccagcgccggtggccttgtcaccgcggtcgcaccagtggtgataaacggaaatggagtctgggtcggatggccaggaatgcacatggagaaccggaacgagccgatcccggaatccgatccgaacgacagaacgcccaccgctggtctattgtcgagaaaggtcgtggcagtgcacgtggagccgacaatcttcgactcgtattacaatggctgctgcaacggcactttctggccactattccactcgatgcccgacagagccacttttatcgccgaccactggaaggcttacagcgccgttaacgaggagtttgccgcgaaaacggtcggagctttggaacagatccacaaggagcaagcgggtcagggcaacggcacacccctggtctgggtgcacgactatcacctcatgctggccgccaactggatcagacaagccgccgacgagaagaacctaaagctcaagcttggtttcttccttcatattccattccctccatgggacatcttcagactcttcccctgggccgacgagatcctccagggaatgctaggatgcgacatggtgggcttccacatccaagactactgcctgaacttcgtagactgctgtcagcgcagcttgggctgcagagtcgaccgcaagaacctgctggtcgagcacggcggtcgtaccgtcagggtgagacctttgccaatcggtatacccttcgatcgtttcgtctcgctggccgagaccgcgccgaaggttatgctgaccaatcaaaagatcatccttggcgtcgaccgacttgactacaccaagggacttgtgcacagactcaaggccttcgagatgctgctggagaagcatccggaacaccgggaacaggtgacgatgctgcaaatcgccgtgccatctcgtacggacgtccgcgagtaccaggatctgaagctcgaaatggatcagctgatcggcagcataaacggccgctttaccacacccaattggtcgcccatacgctatatttacggctgtgtcagtcaagacgagttggctgctttttacagagatgccgccgtggctctagtgactccgctcagagatggcatgaacctcgtggctaaggagttcgtcgcctgccagatcaacactcctcctggtgtgcttatcgtttctcccttcgccggtgctggagagatgatgcacgaggcactcatttgtaacccatacgagatcgacgaggctgctgaagtcattcacagagcgttgactatgccagaggacgagcgcacgctgagaatgaaccacttgcgccgtcgcgagaaggcctacgatgtgaaccattggatgaaatcgttcttgcaggtgatgggctcgctcgaggagcgtgattccgttggtgctacggtcatgcagccggtgacaatggacgacttcgacgattacttgagcaagtacattggtgagaatcacaagctggcactgcttctggattacgatggtaccttggccccgatcgcaacccatccagacctcgcgaccctaccactcgagacgaagaacgtgctgcagaggctgtccaatcttccagacgtctacatcgccatcatctccggaagaaacgtcaacaacgtcaaatccatggttggaatcaatggtatcacctacgctggtaaccacggactggaaattctgcatccagacggcagcaaattcgttcatccgatgcctgcggtgttcgagagcaaggtcgctagtctcatgcaagcccttcaggatcagctgtgcaaagacggcgcctgggtagagaataagggagctctgctgactttccattaccgcgaaacgccgatggaacgtcgcccatcgatgatcgaacacgcaaagaagttgatagaagacgctggtttcaaggcatgttcagcgcattgcgccatcgaggccaaaccaccggtagaatggaacaaaggtcgcgcctctatttacatcttgcgcacagctttcggcctcgactggagcgagaggatcaggatcatctatgctggtgacgatgcgacagatgaggacgccatgaaggctctgaaaggtatggctgcgacattccgcgttgcctcatcgcacataattcgtacatcagcagaacgccgtctgcccagcaccgactccgtcctcacgatgcttaagtgggttgagagacacctaagccgcagaaagcctcgcaacaacaatgacgtatcatccaagttccgtcgcggacactccggcattaccatggaaatgtcctttacgcagccctcggcgtaa

SEQ ID NO: 145478 - protein, 798 aa, Nasonia vitripennis
MTESRSYSSNGSMIVVSNRLPFVLKRNETSGKLERKASAGGLVTAVAPVVINGNGVWVGWPGMHMENRNEPIPESDPNDRTPTAGLLSRKVVAVHVEPTIFDSYYNGCCNGTFWPLFHSMPDRATFIADHWKAYSAVNEEFAAKTVGALEQIHKEQAGQGNGTPLVWVHDYHLMLAANWIRQAADEKNLKLKLGFFLHIPFPPWDIFRLFPWADEILQGMLGCDMVGFHIQDYCLNFVDCCQRSLGCRVDRKNLLVEHGGRTVRVRPLPIGIPFDRFVSLAETAPKVMLTNQKIILGVDRLDYTKGLVHRLKAFEMLLEKHPEHREQVTMLQIAVPSRTDVREYQDLKLEMDQLIGSINGRFTTPNWSPIRYIYGCVSQDELAAFYRDAAVALVTPLRDGMNLVAKEFVACQINTPPGVLIVSPFAGAGEMMHEALICNPYEIDEAAEVIHRALTMPEDERTLRMNHLRRREKAYDVNHWMKSFLQVMGSLEERDSVGATVMQPVTMDDFDDYLSKYIGENHKLALLLDYDGTLAPIATHPDLATLPLETKNVLQRLSNLPDVYIAIISGRNVNNVKSMVGINGITYAGNHGLEILHPDGSKFVHPMPAVFESKVASLMQALQDQLCKDGAWVENKGALLTFHYRETPMERRPSMIEHAKKLIEDAGFKACSAHCAIEAKPPVEWNKGRASIYILRTAFGLDWSERIRIIYAGDDATDEDAMKALKGMAATFRVASSHIIRTSAERRLPSTDSVLTMLKWVERHLSRRKPRNNNDVSSKFRRGHSGITMEMSFTQPSA

SEQ ID NO: 145479 - DNA, 1590 bp, Magnaporthe grisea 70-15
  CDS (1)..(1590)
atgggcagcgttgaagacgagacggcccttccttcgggcggccgacttttgctcatctcaaatcgcctgcccatcaccatcaagcgctcagatgatggccaatacagcttctccatgtcctctggtggtctggtcaccggcctgagtggtctcgccaaaaccacgagctttcaatggtacggatggccgggtctcgaagtcccagacgccgaggccggccctgtcgtgcagaggctgaagaatgaatacggcgcccacccggtgtttgtggacgacgagctcgccgacaggcactacaacgggtttgccaactcgatcctctggccacttttccactaccaccctggagagatcacttttgacgaatcggcgtggtctgcctataaggaggttaacaggctgttcgcccagacagtcgtcaaggatgtgcaggatggcgacatgatttgggtccacgactaccacctgatgctgcttcctgagatgctgcgcgaggagataggggactcgaagaagaacgtcaaaattggattcttcctccacacgcccttcccctcatccgagatatacagaatcctgccagttcgccaggccctgctccagggtgtgctgcactgcgacttgcttgggttccacacatatgattacgcacggcatttcctgagctcatgctcacgtatcttgtctgcgccaacaacccccaacggcgtccaattcgccggtcggtttgtcacagtcggcgccttccccatcggaattgacccggagaagtttgtcgagggtctccaaaaacccaaagtccagcagcgaattgcggctctcactcgcaagttcgagggcgtgaagctcatcgtaggtgtcgacaggcttgactacatcaagggcgtgccgcagaagctgcacgcgctcgaggtcttcctgacggagcacccagagtggatcggcaagatcgtgctcgtgcaggtagcggtgccttcgcgacaggacgtcgaggagtaccagaacctgcgcgccgtggtcaacgagctggttgggcgtatcaacggcaaattcggcaccatcgagttcatgcccatccacttccttcaccagtcggtcagcttcgacgagctcgccgccctgtatgccgtttcggacgtgtgcctggtcagcagcacgcgcgacggcatgaacctcgtcagctacgagtacattgccacccagcgcgaccgccatggtgtcatgatcctgtccgagttcaccggcgctgcgcagtcgctgtctggctcgcttatcgtcaacccctggaacacggaagagctggccaacgccatccacgacgccgtcaccatgggccccgagcagcgcgaggccaacttcaagaagcttgagaggtacgtcttcaagtacaccagcgcatggtggggctccagcttcgtcgccgagctcaataggcttgcagccgggattgaaggtgcggatgcggaaggctcaaagaccaagatcgccatcaggggcgttggcgatgccgttgccgacggcgccggcaaggttgcagacgccgtctcgtcagtcttgccgggtggcgacaacaagacggagggaaactga

SEQ ID NO: 145480 - protein, 529 aa, Magnaporthe grisea 70-15
MGSVEDETALPSGGRLLLISNRLPITIKRSDDGQYSFSMSSGGLVTGLSGLAKTTSFQWYGWPGLEVPDAEAGPVVQRLKNEYGAHPVFVDDELADRHYNGFANSILWPLFHYHPGEITFDESAWSAYKEVNRLFAQTVVKDVQDGDMIWVHDYHLMLLPEMLREEIGDSKKNVKIGFFLHTPFPSSEIYRILPVRQALLQGVLHCDLLGFHTYDYARHFLSSCSRILSAPTTPNGVQFAGRFVTVGAFPIGIDPEKFVEGLQKPKVQQRIAALTRKFEGVKLIVGVDRLDYIKGVPQKLHALEVFLTEHPEWIGKIVLVQVAVPSRQDVEEYQNLRAVVNELVGRINGKFGTIEFMPIHFLHQSVSFDELAALYAVSDVCLVSSTRDGMNLVSYEYIATQRDRHGVMILSEFTGAAQSLSGSLIVNPWNTEELANAIHDAVTMGPEQREANFKKLERYVFKYTSAWWGSSFVAELNRLAAGIEGADAEGSKTKIAIRGVGDAVADGAGKVADAVSSVLPGGDNKTEGN

SEQ ID NO: 145481 - DNA, 1812 bp, Gibberella zeae PH-1
  CDS (1)..(1812)
atgctcgttattgagagatcggatcagatcaggtggatgtcaatttctaggcaagagcacaagctgacaaggtacgtgaatgttgcatcttctttgctaagcgtcatcgttctgctactcaacaacccaaagctccttgcgctaagtctaaccccactgtctactggggatctacgcctctcggctttgcgccagctgccagtcagaatgcctgagaccgttggagagaacggcaacgccgctccaggccgcctgctactgctttccaaccgtttgcccatcaccattaagcgatccgaagatggaagctattcattctccatgtcttctggtggtctggttactggactgagcggcctcagcaaaaccaccagctttcagtggtatggctggcctggtctcgaggtccctgacaacgaagtcgagggcatgaagcaacgactaaaagaagaatacggcgcacacccagttttcatcgacgatgagcttgcagacagacattacaatggtttttcaaactcgatcctctggcctctattccactaccaccctggtgagatcacattcgacgaatctgcctgggctgcataccaggaggtcaaccgcctcttcgccaagactgttatcaaagatgttcaggacggtgaccttatttgggtccacgactaccatctgatgctgcttcctcagatgcttcgtgaggaaattggcgaatcaaagaagaatgtcaagattggtttcttccttcacacaccattccctagcagtgagatctaccgaattctgcctgtacgagaggcactcctgactggcctcctcgactgcgatcttatcggcttccacacatacgactacgcccgccacttccttagcagttgctctcgtatcctcgagtgccccacgacacccaatggcgttgactggaatggccgttttgtaactgttggcgccttccctattggaatcgaccccgacaacttcgtcgaaggtttgaagaagcccaaggtgcaggagcgaatcgctgccctcagccgcaaattcgagggcgtcaagcttgttgttggtgtcgatcgattggattatatcaaaggtgtccctcagaaactacatgctcttgaggtgttcctcaccgaacatccggaatggattggcaagattgtcttggttcaggtcgccgtaccttcgcgacaagacgtcgaggagtatcagaatcttcgtgctgttgtcaatgaactggttggccgcatcaacggaaagttcggcaccattgagtttatgcctatccacttccttcaccagtctgtcaattttgatgagctcaccgcactttacgccgtttccgacgtctgccttgtttcatccacccgcgatggcatgaacttggtctcttacgagtatatcgcaacacaacaaaagaaccatggtgttatgattctcagtgaattcacaggcgctgctcagtctctcaatggcagtttgattgtcaacccttggaacacagaggagcttgcgaacgccttgcacgatgccgttacaatgagccccgaacagcgtgaggctaactacaagaaactcgagcgctatgtcttcaagtatacaagtgcttggtggggcgctagcttcgtcgccgagatgacccgccttagtgctgagggttctcaacccaagactcttcgcaatgtctcgggtgcagtgattgggttggagcagaaggcacagcaaatcgttactggactcgagaagaaggcggatgaactgttgtcgggtaacgagaagaacgaaaccgagacgagcgaagagccttctcaataa

SEQ ID NO: 145482 - protein, 603 aa, Gibberella zeae PH-1
MLVIERSDQIRWMSISRQEHKLTRYVNVASSLLSVIVLLLNNPKLLALSLTPLSTGDLRLSALRQLPVRMPETVGENGNAAPGRLLLLSNRLPITIKRSEDGSYSFSMSSGGLVTGLSGLSKTTSFQWYGWPGLEVPDNEVEGMKQRLKEEYGAHPVFIDDELADRHYNGFSNSILWPLFHYHPGEITFDESAWAAYQEVNRLFAKTVIKDVQDGDLIWVHDYHLMLLPQMLREEIGESKKNVKIGFFLHTPFPSSEIYRILPVREALLTGLLDCDLIGFHTYDYARHFLSSCSRILECPTTPNGVDWNGRFVTVGAFPIGIDPDNFVEGLKKPKVQERIAALSRKFEGVKLVVGVDRLDYIKGVPQKLHALEVFLTEHPEWIGKIVLVQVAVPSRQDVEEYQNLRAVVNELVGRINGKFGTIEFMPIHFLHQSVNFDELTALYAVSDVCLVSSTRDGMNLVSYEYIATQQKNHGVMILSEFTGAAQSLNGSLIVNPWNTEELANALHDAVTMSPEQREANYKKLERYVFKYTSAWWGASFVAEMTRLSAEGSQPKTLRNVSGAVIGLEQKAQQIVTGLEKKADELLSGNEKNETETSEEPSQ

SEQ ID NO: 145483 - DNA, 1476 bp, Candida glabrata CBS 138
  CDS (1)..(1476)
atgacacagattgataagaaagaagtatcaggaaacattattgttgtttccaacagattgccagtgaccatctcgaaggatgacactgggaagtaccagtacaagatgtcctctggagggctggttactgctttacaaggtctgaagaagaccgctacgttcaagtggtatgggtggcccggtctagagatccctgacgatgagaaagagcaagtcaagcaggacttgctcgagcaattcaacgctgtgcctgtgtttttgagcgacgaggtcgctgacttgcactacaacgggttcagtaactctatcctgtggcctctgttccactaccacccgggtgagatcaatttcgatgagaacgcctggctggcttacaacgaggccaacagggccttcgccgaggtcatcttcgagaccatgcaggacgacgacttgatatgggtccacgactaccacttgatgctgctgccccagatgctgcaggaggagatcaccaagcgtaagctgaggaacgtcaagctgggctggttcctgcacacgccgttcccttcctccgagatctacagaatcctgcctgtcagacaggagatcctgagaggtgtgctgagctgcgacctcctcggcttccacacttacgactacgcgcgccacttcctgtcctccgtccagagagtcctgaacgtcaacactctgcccaacggtgtcgagtaccaaggcaggttcgtcaacgtcggtgccttccctatcggtatcgacgtctccaccttccaggacggcctcttgaaacaacaggtcaaggacagaataagccagttgaaggagacgttcaagggacagaaaatcatcatcggtgtcgacagactggactacatcaagggtgtcccacagaaactgcacgccatggaggtcttcctaagcgaacacccagagtggagaggcaaagtcgtcctggtgcaggtagctgtcccaagcagaggcgacgtcgaggagtaccagtacttgagatcagtcgtcaacgagctggtcggaagaatcaacggccaattcggtaccgcagagttcgtcccaatccacttcatgcacaagagtgttcctttcgaagaattgatctccctgtacgcagtcagcgacgtctgtttggtctcttccacaagagacggtatgaacttggtctcttacgaatacattgcctgccaagaagaaacaaagggctccctgatcctgagtgaattcgctggtgcagcccaatccttgaacggtgccatcatcgtcaacccatggaacatcgacgaaatgtccgacgccatcaacgaagccttaaccttgccagaagtcaagagagaagtcaactgggaaaaattgtttaagtacatctcaaagtacacttccgccttctggggtgagaactttgtccacgaactgtacaacacttcttcaagcagcggtagcataaaatcctccgaggaaaagcactga

SEQ ID NO: 145484 - protein, 491 aa, Candida glabrata CBS 138
MTQIDKKEVSGNIIVVSNRLPVTISKDDTGKYQYKMSSGGLVTALQGLKKTATFKWYGWPGLEIPDDEKEQVKQDLLEQFNAVPVFLSDEVADLHYNGFSNSILWPLFHYHPGEINFDENAWLAYNEANRAFAEVIFETMQDDDLIWVHDYHLMLLPQMLQEEITKRKLRNVKLGWFLHTPFPSSEIYRILPVRQEILRGVLSCDLLGFHTYDYARHFLSSVQRVLNVNTLPNGVEYQGRFVNVGAFPIGIDVSTFQDGLLKQQVKDRISQLKETFKGQKIIIGVDRLDYIKGVPQKLHAMEVFLSEHPEWRGKVVLVQVAVPSRGDVEEYQYLRSVVNELVGRINGQFGTAEFVPIHFMHKSVPFEELISLYAVSDVCLVSSTRDGMNLVSYEYIACQEETKGSLILSEFAGAAQSLNGAIIVNPWNIDEMSDAINEALTLPEVKREVNWEKLFKYISKYTSAFWGENFVHELYNTSSSSGSIKSSEEKH

SEQ ID NO: 145485 - DNA, 2445 bp, Tribolium castaneum
  CDS (1)..(2445)
atgaccgtagatgtcgtcgcctcctccgggagcatgatcgtggtgtcgaaccgactacccttcgttttgcaaaaagatgccaacggtaaactcgtacgcaaagccagcgccggtggtctagtgacagccgttgctccggtcgtcatcaacggtaatggcttatgggtgggttggcccggaattcatctagcggaccctaacgaacccatcccggagtcggacccggacgatatcacgcctacggcggggctccggtccgagaaagtcgttgccgttcaaatcgacccagctgtcttcgattcgtactacaacggctgctgtaacgccactttttggcccttgttccactcaatgcccgacagggccacctttaaaagggagcactggcaatgctacaccaccgctaacaaagaattcgccgattgtaccatgaaggcgttgaagtctctcccgaaaaagaccgggaacgacgttcccttgatctggatacatgactaccacctaatgctagcggccaattgggtgagacaaggggccgaggaagaagggattaattgcaaactgggattcttcctgcatatcccgttcccgccgtgggatatcttccggttgttcccgtggtcggacgaaatcctccaagggatgctggcgtgtgacatggtcgggtttcacatcactgattactgtttgaatttcgtcgattgttgccagcggaatttgggatgtcgtgtcgaccgtaaaaatctcttggtggaacatggtggtagatcggtgcgagttcgcccgttaccaatcggaattcccttcgaacgattcgtcgaacttgccgagaaagcaccaagagtcttgtcaacaaaccaaagaattgttttaggagtcgatagactcgactacacgaaaggactggttcatagactgttggctttcgagaagttgctcgaaaaccacccccaacacaaggaaaaagtctcacttttacaaatctccgttccgtcgcgcaccgacgttaaggaataccaagacttgaaggaagaaatggaccaattggtcggccgaatcaatggtaaatttaccacacccaactggtcgccgattcgctacatttacgggtgtgtgagtcaggacgaactggcggcgttttaccgggacgcagccgtggggttagtcaccccgttgcgcgacggaatgaatttagtagccaaagaattcgtagcatgccaaattaacacccccccaggtgtcctcatagtgtctccgttcgccggagcgggcgaaacgatgcacgaagcgctcatttgcaacccttacgagatcaacgacgcttctgaggtcatccatcgcgcgctgacgatgcccgaagacgagagaatcctccggatgaattacctgcggagacgggagaaactcaacgatgttaactactggaccaagtcgtttttgtccgccatgggctctctaatcacgcaggaggatcacgacgatatcggaaccacgtcaatgcctgcggtcacgctcgacgatttcgacgaatatctggctaagtatatcgggaacacgcacaagctggctttgttgttggactatgacgggactctggccccgatcgccccgcacccagaccttgccatcatccctcccgaaaccaagaacgtcctccagagactgtcgaatatttccgacgtgtatatcgctatcatttccggaagagacgtgaataatgtgaagcaaatggtgggcattgatggtataacatacgctggcaatcacggtttggagattttacaccccgataatacgaaatttgtgcatcctatgccgacggagttccgagataaggtgggcgagttgttgcggcagttgcaggagagggtgtgtcgggatggcgcttgggtggagaacaaaggggcgcttttgactttccatttccgcgagacgccgtcacatattcggccacagttggccgaagaagccaagcgtttgatcgaagaagccgggtttaaggccgggaaggcgcattgtgctatcgaagccaaaccgccggttcagtggaataaaggaagagcgtctatttatattctgaggactgcattcggggtagattggagcgaaaggatcaggattatatatgcaggggatgatacgacggacgaggatgccatgcaggctttgaaaggtatggcggccacatttagagtaacgtcatcgtcgattgtgaaaacttcggccgagcgccgtttgccgtcgacagattcggtcttgacgatgctgaagtgggtggagcggcatttaagtcgcaggaagcccagcatcgatcctagtaattaccggaggaattcgttagcaaaacagggagccgttcaaatggaaatgtcttatacgaatacgcaacaaaggaacggaaattcgggaagaatctccaccacagactcgacagcttcgcactaa

SEQ ID NO: 145486 - protein, 814 aa, Tribolium castaneum
MTVDVVASSGSMIVVSNRLPFVLQKDANGKLVRKASAGGLVTAVAPVVINGNGLWVGWPGIHLADPNEPIPESDPDDITPTAGLRSEKVVAVQIDPAVFDSYYNGCCNATFWPLFHSMPDRATFKREHWQCYTTANKEFADCTMKALKSLPKKTGNDVPLIWIHDYHLMLAANWVRQGAEEEGINCKLGFFLHIPFPPWDIFRLFPWSDEILQGMLACDMVGFHITDYCLNFVDCCQRNLGCRVDRKNLLVEHGGRSVRVRPLPIGIPFERFVELAEKAPRVLSTNQRIVLGVDRLDYTKGLVHRLLAFEKLLENHPQHKEKVSLLQISVPSRTDVKEYQDLKEEMDQLVGRINGKFTTPNWSPIRYIYGCVSQDELAAFYRDAAVGLVTPLRDGMNLVAKEFVACQINTPPGVLIVSPFAGAGETMHEALICNPYEINDASEVIHRALTMPEDERILRMNYLRRREKLNDVNYWTKSFLSAMGSLITQEDHDDIGTTSMPAVTLDDFDEYLAKYIGNTHKLALLLDYDGTLAPIAPHPDLAIIPPETKNVLQRLSNISDVYIAIISGRDVNNVKQMVGIDGITYAGNHGLEILHPDNTKFVHPMPTEFRDKVGELLRQLQERVCRDGAWVENKGALLTFHFRETPSHIRPQLAEEAKRLIEEAGFKAGKAHCAIEAKPPVQWNKGRASIYILRTAFGVDWSERIRIIYAGDDTTDEDAMQALKGMAATFRVTSSSIVKTSAERRLPSTDSVLTMLKWVERHLSRRKPSIDPSNYRRNSLAKQGAVQMEMSYTNTQQRNGNSGRISTTDSTASH

SEQ ID NO: 145487 - DNA, 2412 bp, Tribolium castaneum
  CDS (1)..(2412)
atgatcgtggtgtcgaaccgactacccttcgttttgcaaaaagatgccaacggtaaactcgtacgcaaagccagcgccggtggtctagtgacagccgttgctccggtcgtcatcaacggtaatggcttatgggtgggttggcccggaattcatctagcggaccctaacgaacccatcccggagtcggacccggacgatatcacgcctacggcggggctccggtccgagaaagtcgttgccgttcaaatcgacccagctgtcttcgattcgtactacaacggctgctgtaacgccactttttggcccttgttccactcaatgcccgacagggccacctttaaaagggagcactggcaatgctacaccaccgctaacaaagaattcgccgattgtaccatgaaggcgttgaagtctctcccgaaaaagaccgggaacgacgttcccttgatctggatacatgactaccacctaatgctagcggccaattgggtgagacaaggggccgaggaagaagggattaattgcaaactgggattcttcctgcatatcccgttcccgccgtgggatatcttccggttgttcccgtggtcggacgaaatcctccaagggatgctggcgtgtgacatggtcgggtttcacatcactgattactgtttgaatttcgtcgattgttgccagcggaatttgggatgtcgtgtcgaccgtaaaaatctcttggtggaacatggtggtagatcggtgcgagttcgcccgttaccaatcggaattcccttcgaacgattcgtcgaacttgccgagaaagcaccaagagtcttgtcaacaaaccaaagaattgttttaggagtcgatagactcgactacacgaaaggactggttcatagactgttggctttcgagaagttgctcgaaaaccacccccaacacaaggaaaaagtctcacttttacaaatctccgttccgtcgcgcaccgacgttaaggaataccaagacttgaaggaagaaatggaccaattggtcggccgaatcaatggtaaatttaccacacccaactggtcgccgattcgctacatttacgggtgtgtgagtcaggacgaactggcggcgttttaccgggacgcagccgtggggttagtcaccccgttgcgcgacggaatgaatttagtagccaaagaattcgtagcatgccaaattaacacccccccaggtgtcctcatagtgtctccgttcgccggagcgggcgaaacgatgcacgaagcgctcatttgcaacccttacgagatcaacgacgcttctgaggtcatccatcgcgcgctgacgatgcccgaagacgagagaatcctccggatgaattacctgcggagacgggagaaactcaacgatgttaactactggaccaagtcgtttttgtccgccatgggctctctaatcacgcaggaggatcacgacgatatcggaaccacgtcaatgcctgcggtcacgctcgacgatttcgacgaatatctggctaagtatatcgggaacacgcacaagctggctttgttgttggactatgacgggactctggccccgatcgccccgcacccagaccttgccatcatccctcccgaaaccaagaacgtcctccagagactgtcgaatatttccgacgtgtatatcgctatcatttccggaagagacgtgaataatgtgaagcaaatggtgggcattgatggtataacatacgctggcaatcacggtttggagattttacaccccgataatacgaaatttgtgcatcctatgccgacggagttccgagataaggtgggcgagttgttgcggcagttgcaggagagggtgtgtcgggatggcgcttgggtggagaacaaaggggcgcttttgactttccatttccgcgagacgccgtcacatattcggccacagttggccgaagaagccaagcgtttgatcgaagaagccgggtttaaggccgggaaggcgcattgtgctatcgaagccaaaccgccggttcagtggaataaaggaagagcgtctatttatattctgaggactgcattcggggtagattggagcgaaaggatcaggattatatatgcaggggatgatacgacggacgaggatgccatgcaggctttgaaaggtatggcggccacatttagagtaacgtcatcgtcgattgtgaaaacttcggccgagcgccgtttgccgtcgacagattcggtcttgacgatgctgaagtgggtggagcggcatttaagtcgcaggaagcccagcatcgatcctagtaattaccggaggaattcgttagcaaaacagggagccgttcaaatggaaatgtcttatacgaatacgcaacaaaggaacggaaattcgggaagaatctccaccacagactcgacagcttcgcactaa

SEQ ID NO: 145488 - protein, 803 aa, Tribolium castaneum
MIVVSNRLPFVLQKDANGKLVRKASAGGLVTAVAPVVINGNGLWVGWPGIHLADPNEPIPESDPDDITPTAGLRSEKVVAVQIDPAVFDSYYNGCCNATFWPLFHSMPDRATFKREHWQCYTTANKEFADCTMKALKSLPKKTGNDVPLIWIHDYHLMLAANWVRQGAEEEGINCKLGFFLHIPFPPWDIFRLFPWSDEILQGMLACDMVGFHITDYCLNFVDCCQRNLGCRVDRKNLLVEHGGRSVRVRPLPIGIPFERFVELAEKAPRVLSTNQRIVLGVDRLDYTKGLVHRLLAFEKLLENHPQHKEKVSLLQISVPSRTDVKEYQDLKEEMDQLVGRINGKFTTPNWSPIRYIYGCVSQDELAAFYRDAAVGLVTPLRDGMNLVAKEFVACQINTPPGVLIVSPFAGAGETMHEALICNPYEINDASEVIHRALTMPEDERILRMNYLRRREKLNDVNYWTKSFLSAMGSLITQEDHDDIGTTSMPAVTLDDFDEYLAKYIGNTHKLALLLDYDGTLAPIAPHPDLAIIPPETKNVLQRLSNISDVYIAIISGRDVNNVKQMVGIDGITYAGNHGLEILHPDNTKFVHPMPTEFRDKVGELLRQLQERVCRDGAWVENKGALLTFHFRETPSHIRPQLAEEAKRLIEEAGFKAGKAHCAIEAKPPVQWNKGRASIYILRTAFGVDWSERIRIIYAGDDTTDEDAMQALKGMAATFRVTSSSIVKTSAERRLPSTDSVLTMLKWVERHLSRRKPSIDPSNYRRNSLAKQGAVQMEMSYTNTQQRNGNSGRISTTDSTASH

SEQ ID NO: 145489 - DNA, 1452 bp, Mycobacterium sp. JLS
  CDS (1)..(1452): transl_table=11
gtggctccggagggcgaccaacgcgttggctccggagattccgacttcgtcgtggtggccaaccggctgccgatcgacatggaacgactgcccgacggcagcacgtccatcaaacggagtcccggcggtctggtcaccgcgctcgaaccgctgctgcgcaaacgccgcggcgcgtggatcgggtgggccggcatcccggacagccccgaggaccccatcgaagaggacggtctacagctctacccggtcgccctgtcggccgatgacgtcgccgactactacgagggtttctccaacgccaccctctggccgctctaccacgacctgatcgtcaaaccgatctaccaccgcaagtggtgggaccgctacgtcgaggtcaaccggcggttcgccgaggcgaccgcccgcgccgccgcacagggggccaccgtctgggtccaggactaccaactgcagttggtgccgaagatgctgcggatgttgcggcccgacctgacgatcggtttcttcctgcacatcccgttcccgccggtcgagctgttcatgcagatgccgtggcgcaccgagatcatcgagggtctgctcggcgcggacctcgtcggtttccacctgcccggcggtgcgcagaacttcctgtacctgtcccgcaggctgaccggcgccaacacctcgcgcgccagcgtgggtgtgcggtcgcgcttcggcgaggtgcaggtcgggttccgcacggtgaaggtcggtgcgttcccgatctcgatcgactcggccgaactcgacagcaaggcgcgtaaccgcagcgtgcgccagcgcgcccgcgagatccgcaacgaactgggcaacccgcgcaagatcctgctcggcgtggaccgcctcgactacaccaagggcatcaacgtgcgcctcgaggcgttctccgaactgctcgaggacggccgcgtcgacaggaacgacaccgtgctcatccagttggcgacacccagccgggaacgcgtcgagagctacatcgccatgcgtgaggacatcgagcgccaggtcggccacatcaacggtgagttcggcgacgtcggccacccgatcgtgcactatctgcaccggccggtcccccgcgacgagctgatcgcgttcttcgtcgccgccgacgtcatgctcgtcaccccgctgcgcgacgggatgaacctggtcgccaaggagtacgtggcgtgccgcagcgacctcggcggcgcgttggtgctcagcgaattcaccggcgccgcggccgaactccgtcaggcctacctggccaacccgcaccacctcgaaggtgtcaaggatgccatcgaggcggcgctgaatcaggacccggaagagggccgccgtcggatgcgggcgctgcgcaggcaggtcctcgcccatgacgtcgaccggtgggccagggcgttcctcgacgcgctcgccgatactaaatcggcgtga

SEQ ID NO: 145490 - protein, 483 aa, Mycobacterium sp. JLS
MAPEGDQRVGSGDSDFVVVANRLPIDMERLPDGSTSIKRSPGGLVTALEPLLRKRRGAWIGWAGIPDSPEDPIEEDGLQLYPVALSADDVADYYEGFSNATLWPLYHDLIVKPIYHRKWWDRYVEVNRRFAEATARAAAQGATVWVQDYQLQLVPKMLRMLRPDLTIGFFLHIPFPPVELFMQMPWRTEIIEGLLGADLVGFHLPGGAQNFLYLSRRLTGANTSRASVGVRSRFGEVQVGFRTVKVGAFPISIDSAELDSKARNRSVRQRAREIRNELGNPRKILLGVDRLDYTKGINVRLEAFSELLEDGRVDRNDTVLIQLATPSRERVESYIAMREDIERQVGHINGEFGDVGHPIVHYLHRPVPRDELIAFFVAADVMLVTPLRDGMNLVAKEYVACRSDLGGALVLSEFTGAAAELRQAYLANPHHLEGVKDAIEAALNQDPEEGRRRMRALRRQVLAHDVDRWARAFLDALADTKSA

SEQ ID NO: 145491 - DNA, 1407 bp, Burkholderia vietnamiensis G4
  CDS (1)..(1407): transl_table=11
gtgagccgactcgtcgtcgtatccaatcgcattgcagatccccgtaaagccgccgccggcggccttgccgtagccgtgaaagacagcctgcaggaatcgggcggcgtctggttcggctggagcggcaggctgcgcagcgagggcgagcgacccgcgcagggcgacgacgtgcagatccagaacgtcggcgggatccagctcgcgacgatcgatctcgatccgcaggattacgacgcgtactatctcggctactcgaacaacgtgctatggccggtgttccactaccggctcgatctcgcgcagttcgaccgccgcttcgccgacggctaccgacgcgtgaaccagctgttcgcgcgcaagctcagcacgctgctgcggccggacgacaccatctgggttcacgactatcaactgattccgctcgccgccgaactgcgcgcgatgggctgcacgaatccgatcggcttcttcctgcatattccgatgccgccgccgccgatcatggccgcgattccggagcacgaatggctgatgcgcgcgctgtttgcgtacgacctcatcggctttcagaccgaatccgatctgctgcacttcgagcactacgtcgaggccgaggccggcgccgcgcgtctgcccgacggtcgcctgcgtgcgttcggccgcacgctgtcggccggcgcgtttccgatcggcatcaacgtcgacgaattcgcggcgctggcggagaatcgcgacggcatcgacatgttcgagcggatgcgcgatgaatattcgcgccgtcaattgctcgtcggcgtcgatcgtctcgattacacgaagggcctgccgcaacgcgtgcatgcgttccgtcagttgctcgaacagtatccggagaatcgcgaccgcgcgacgctgatccagatcgccgcgccgagccgcgaggatctcggcgcctacgacgacctgcggcgcgagatggacagtctgtgcggtgcgatcaacggcgactacggcgagctcgagtggatgccaatgcgctacattcatcggaccgttgcgcgcaagcgcttgcccggcctctatcgcgcaagccgtgtcgcgctcgttacgccgctgcgagacgggatgaacctggtcgcgaaggagtttcttgccgcgcaggacgaggctgatcccggcgtgctcgtgctgtcgcgcttcgccggcgcagccgagcaactgaagcccgcgctgctcgtcaatccgtacgacacgcagggcaccgcgcaggcgattcaacgcgcactcacgatgccgctcgacgagcgccgccagcgccacaacgcgctgatggcgatcgtgcgcaagaccgacgtccactggtggcgcacgcgctttctcgatgcgctgaccgaagcggccgaagttgcggcggcggctgcgtcctga

SEQ ID NO: 145492 - protein, 468 aa, Burkholderia vietnamiensis G4
MSRLVVVSNRIADPRKAAAGGLAVAVKDSLQESGGVWFGWSGRLRSEGERPAQGDDVQIQNVGGIQLATIDLDPQDYDAYYLGYSNNVLWPVFHYRLDLAQFDRRFADGYRRVNQLFARKLSTLLRPDDTIWVHDYQLIPLAAELRAMGCTNPIGFFLHIPMPPPPIMAAIPEHEWLMRALFAYDLIGFQTESDLLHFEHYVEAEAGAARLPDGRLRAFGRTLSAGAFPIGINVDEFAALAENRDGIDMFERMRDEYSRRQLLVGVDRLDYTKGLPQRVHAFRQLLEQYPENRDRATLIQIAAPSREDLGAYDDLRREMDSLCGAINGDYGELEWMPMRYIHRTVARKRLPGLYRASRVALVTPLRDGMNLVAKEFLAAQDEADPGVLVLSRFAGAAEQLKPALLVNPYDTQGTAQAIQRALTMPLDERRQRHNALMAIVRKTDVHWWRTRFLDALTEAAEVAAAAAS

SEQ ID NO: 145493 - DNA, 1377 bp, Burkholderia vietnamiensis G4
  CDS (1)..(1377): transl_table=11
atgagccgactgatcatcgtttcaaaccgcgtcgcaccgatttcggaaggcgagccggcggcgggcggtctcgcgatcggcgtgtacgacgcgctgaaggagacgggcggtatgtggttcggctggagcggcgaagtggtcgcgtccggcgcgccgcagatccgcatcgaggagcgcggccccgtgacgttcgcgaccgtcgggctgtcgcgccgcgattacgaccagtactaccgcggcttctcgaacgcgacgctgtggccggcgttccactaccgcgcggacctgatccagtacgaccgtcacgagttcgaaggctacggccgcgtgaacgtgtggctcgcgcagcagctcgtgccgctgctgcaggacgacgacgtgatctgggtccacgactatcacctgatcccgttcgcgcgcgcgctgcgcgcgtcgggcgtgaagaaccggatcggcttcttcctgcacatcccgtttcccgccgcgcaggtgctcgtgaacgtgccgccgcatcgcgagctggtcgagtcgctgtgcgcgttcgatctgctcggcttccagaccgagcccgacctgcgcgcgttctgcgattacgtcgagttcgaagccggcggcgaagtgacgcgcgacggccgcacggtacgcgtgagcgcgttcggcagcacgctgcgcgcggcggcttatccgatcggcgtgtatccggacgagatcgcgtcgctcgcgcaggcgggcgagcacggcaaggccgcgcgcatggccacgtcgctgcgcgggcgccagctgatcatgagcgtcgaccggctcgattattcgaagggcctcgtcgagcggttccgcgcgttcgagaagctgctggagcaccaggcgtcgatccgcaatcgcgtgtcgttcctgcagatcgcgccgtcgacgcgcgccgacctgcgcgcgtatcaggacatccggctgcagctcgaagcggaatcggggcgcatcaacggacgctacgcggagctcgactgggcgccgattctgtacattcatcgccagtacgaccggcaggtgctggccgcgctgtatcgcctcgcgcgcgtgggcttcgtgacgccgctgcgcgacgggatgaacctcgtcgcgaaggaatacgtgtccgcgcagaatccggacgatccgggcgtgctggtgctgtcgcgtttcgcaggcgcggcgcgcgagctgaccggcgcgctgatcgtcaatccgatcgacatcgacggcatggccgatgcgttgtcacaggcgctgacgatgccgctcgccgagcggcgcgcgcgttatgcggacatgatcgcgcagctgcgcgagaacaacgtgtcggtgtggcgcgacaacttcctgcgcgatttgcagcgcgcgtag

SEQ ID NO: 145494 - protein, 458 aa, Burkholderia vietnamiensis G4
MSRLIIVSNRVAPISEGEPAAGGLAIGVYDALKETGGMWFGWSGEVVASGAPQIRIEERGPVTFATVGLSRRDYDQYYRGFSNATLWPAFHYRADLIQYDRHEFEGYGRVNVWLAQQLVPLLQDDDVIWVHDYHLIPFARALRASGVKNRIGFFLHIPFPAAQVLVNVPPHRELVESLCAFDLLGFQTEPDLRAFCDYVEFEAGGEVTRDGRTVRVSAFGSTLRAAAYPIGVYPDEIASLAQAGEHGKAARMATSLRGRQLIMSVDRLDYSKGLVERFRAFEKLLEHQASIRNRVSFLQIAPSTRADLRAYQDIRLQLEAESGRINGRYAELDWAPILYIHRQYDRQVLAALYRLARVGFVTPLRDGMNLVAKEYVSAQNPDDPGVLVLSRFAGAARELTGALIVNPIDIDGMADALSQALTMPLAERRARYADMIAQLRENNVSVWRDNFLRDLQRA

SEQ ID NO: 145495 - DNA, 1422 bp, Burkholderia vietnamiensis G4
  CDS (1)..(1422): transl_table=11
atgagcagattgatcgtggtatcgaaccgtgtcgccgccggcgaggacacgcgcccgagcgccggcggcctggcggtcggcgtgatggacgcgctgaagcaaaccggcggcgtgtggttcggctggaacggcgagatcgtcgggacgcccgacgccgcgcccgcggtgcggcgcgacggcaacgtcacgtatgcgacgctcggcctcacccggcgcgactacgatcagtactatcgcggcttctcgaacgcgacgctgtggccggtattccactaccgaagcgatctcgcgcgcttcgaccggcaggagtacgcgggctatctgcgcgtgaacgcgatgctcgcccggcagctcgccgcgctgttgcggcccgacgatctgatctgggtgcacgactatcatctgctgccgttcgcgcattgcctgcgcgagctcggcgtgaagaacccgatcggcttcttcctgcacatcccgtttccgtcgcccgacatgctgcgcgtcgtgccgccgcacgacgagctggtgaagttcatgtgcgcgtacgacatcgcggggttccagaccgacgccgacaagcgcgcgttcagcgactacatcgagcggcgcgggatcggcacggcgagcgacgacgggatgctgcatgcgcacggccgggtcgtgaaggtcgcggcctatccgatcggcgtgtatccggacgcgattgccgaggcggccgtccagtacggcgggcgcaagccggtgaagatgctgcgcgacgcgctcggcggccgcaagctcgtgatgagcgtcgaccgtctcgactattcgaaggggctggtcgaacgtttccagtcgttcgagcgtatgctcgccggcgcgccggactggcaagggcgtgtgtcgttcgtgcagatcgcgccgccgacgcgctcggacgtgcagacctaccagcgcattcgcgagacgctcgaacgcgaggccggccgcatcaacggccgcttcgcgcaactcgactggacgccgatccagtatctgaaccgcaagtacgaacgcaatctgctgatggcgttcttccggatgtcgcaggtcggctacgtgacgccgctgcgcgacgggatgaatctggtcgcgaaggaatacgtcgcatcgcaggacccggccgatcccggcgtactcgtgctgtcggaattcgccggcgcggccgccgagctgggcggcgcgctgctcgtcaatccgtacgaccacgcgcagatggccgatgcgctcgcgcgcgcgctggcgatgccgctcgccgagcggcaggcgcgccatgaggagaacctcgcccagctgcgcaacaacgacctgtcggtgtggcgcgacacgttcgtcgccgatctgcgcagcgtcgccgccgccgcctcggtcacccagcgcgcgggccggcggaccgcgcatgtttga

SEQ ID NO: 145496 - protein, 473 aa, Burkholderia vietnamiensis G4
MSRLIVVSNRVAAGEDTRPSAGGLAVGVMDALKQTGGVWFGWNGEIVGTPDAAPAVRRDGNVTYATLGLTRRDYDQYYRGFSNATLWPVFHYRSDLARFDRQEYAGYLRVNAMLARQLAALLRPDDLIWVHDYHLLPFAHCLRELGVKNPIGFFLHIPFPSPDMLRVVPPHDELVKFMCAYDIAGFQTDADKRAFSDYIERRGIGTASDDGMLHAHGRVVKVAAYPIGVYPDAIAEAAVQYGGRKPVKMLRDALGGRKLVMSVDRLDYSKGLVERFQSFERMLAGAPDWQGRVSFVQIAPPTRSDVQTYQRIRETLEREAGRINGRFAQLDWTPIQYLNRKYERNLLMAFFRMSQVGYVTPLRDGMNLVAKEYVASQDPADPGVLVLSEFAGAAAELGGALLVNPYDHAQMADALARALAMPLAERQARHEENLAQLRNNDLSVWRDTFVADLRSVAAAASVTQRAGRRTAHV

SEQ ID NO: 145497 - DNA, 1491 bp, Synechococcus sp. WH 7803
  CDS (1)..(1491): transl_table=11
atgctgataaatgaaggcaaaagtgactttatcattctctatcatcgaactccatttgatgagtcaaccgacgaactcggaaatcgaatttggagagaccaaaaaagccccaatggcatcataccaaccctaagaaacttatttcgcagtagagagaatggcacatggattgcatggcgtcgagttgatgatgtaaaaaacgaacgcgacgaaaggattgtaatgaacaatcccgcaactttttcgttgaggaggatcccgcttgagcaagaacaaatttcaagtttttaccacgtaacatcaaaagaatcattttggccaattcttcatacatttccaacatattttgatgtaaacaatgcaaattggcaaatatttgaagaggttaatcaacgatttgctaatgctgcctgcgctgaagcagcagaaggtgccacagtttggattcacgactacaacttatggctcgtttcaggttttatccgtgagaaacgtcctgatttaaaaatagcattttttcatcacacgccatttccaggcaatgacgtctttgccatactgccgtggagaaaacaaatcatcgagagtttattagcttgcgatgtggttggattccacataccgcgctacacagaaaattttgcccgtgctgcaagctgtctgcttggcgttgaaaaagggccgaaagagagtgttgcaacgaaattcctaaaatttggttctgctttaactgaaccaactgaaacaccatggcttaaatacaagaatcgtaaagttaaactcgtctcttcacctgtcggtacctcaccagacgtgattcagaccctcgccgtacgcaacgatgttgctgagttaagcaagaaaattgatgaagacacaaaaaaggggcgaaagctcattctctcagcaagccgcgtcgactacacaaaggggaatgaagaacttctactcgcattcgagcgattactggagaggcggccggatctgcatggaaaggtagttttgatgttggcttgcgttgcagctgcttcagggatgaaaatctatgaagaaactcaacgactgattgaagaaacggcagggcgtatcaatggacggttcagtttgattgattgggtgccaattcgcttttcaaccaaccgtatcccctatgaggaaatgattgcgtggttttcaaagtcggatatttgctggattacacccttaagggatggtctcaatctcgtggccaaggaatatgtggctgcacgtaaaggcagagacggggttcttgttttgtcagaatttacaggggcttcagttgtgcttgatggagctcttttaacaaatccatactcacataaacaaatggatgatgcaattgaaactgcattggctttaccgcaagaagaacaagtctccagaatgaaaaaaatggttgatgcggttgacgagtttacggttacagactgggctaatgaacaaatgcagtcactagaaaccgtggattga

SEQ ID NO: 145498 - protein, 496 aa, Synechococcus sp. WH 7803
MLINEGKSDFIILYHRTPFDESTDELGNRIWRDQKSPNGIIPTLRNLFRSRENGTWIAWRRVDDVKNERDERIVMNNPATFSLRRIPLEQEQISSFYHVTSKESFWPILHTFPTYFDVNNANWQIFEEVNQRFANAACAEAAEGATVWIHDYNLWLVSGFIREKRPDLKIAFFHHTPFPGNDVFAILPWRKQIIESLLACDVVGFHIPRYTENFARAASCLLGVEKGPKESVATKFLKFGSALTEPTETPWLKYKNRKVKLVSSPVGTSPDVIQTLAVRNDVAELSKKIDEDTKKGRKLILSASRVDYTKGNEELLLAFERLLERRPDLHGKVVLMLACVAAASGMKIYEETQRLIEETAGRINGRFSLIDWVPIRFSTNRIPYEEMIAWFSKSDICWITPLRDGLNLVAKEYVAARKGRDGVLVLSEFTGASVVLDGALLTNPYSHKQMDDAIETALALPQEEQVSRMKKMVDAVDEFTVTDWANEQMQSLETVD

SEQ ID NO: 145499 - DNA, 1302 bp, Picrophilus torridus DSM 9790
  CDS (1)..(1302): transl_table=11
atgaaatacctggtagtgaccagccgtgggccattttcacacgaaaaaaagggtaaaaatgaaacgatagaaaataacgttggcggtgttgccacggcattgaaaatgctgttatcaaaaaacggtggcacatgggtatgctggggcagtggttcactggacattaactataaaagtgaaaacttttcaaattacgtaataaaaagaataatattaaattcaaccgagaaaaagaagttttatgatgaatactcaaacggcacgctatggcctgtgtttcattatttcagggacagaacaacattttacaaagatgcttttagatactaccttgaggttaacaggaaatttgccagggaggttattgaaaacattgatgatgatactgttatatggatacacgattaccagctggcaatgctccccgggattctaagggaaagcaatgtaaagaacaaaatcatattcacatggcacataccatgggtaagcccggaattcttttcaataataccggaatccagagaaataataaaaagcatatcaagcagcaattacattacatttcacatagataattaccgcgagaattttataaattcacagagattccttctcggttcatcgacaccttcaagggtctattcaatacctcttggcattgatacaaagtttttctcgcctaaaaatgcaaaaaagattaacaatataaaggcaaagatcatattctcaatagacaggcttgattacacaaagggtttaacgcttagggttcttgccattgaggatcttttgacagagcatcctgaattattaaaaaagtttgtttatataatgaatgtaaccccaagcaggacaacagtaagcgaatacataaacatgaaaaaggagcttgaaatgtcagttggccgggttaatggccgctttggtacaatagactggagaccaataatatacatgtacagaaagataagggataaaacactattatcatattacaaatccgcggacgttgcattaataacgccgcttatagacggtctaaatcttgtaagtaaggagttcgttgccacaacggaaaatggtgttttaataatatcaagatttgcgggcgcatcaaaggaactttcaagcgcaataactgtgaacccttataatataaaggaaactgcaaatgcaataataaaggcacttagcatggatgttaacgagagaaacaatatgatatcaaaacttaaaaacactgttgttaagagggatataaaatggtggtacaggcgtataacagcacttccgaggtaa

SEQ ID NO: 145500 - protein, 433 aa, Picrophilus torridus DSM 9790
MKYLVVTSRGPFSHEKKGKNETIENNVGGVATALKMLLSKNGGTWVCWGSGSLDINYKSENFSNYVIKRIILNSTEKKKFYDEYSNGTLWPVFHYFRDRTTFYKDAFRYYLEVNRKFAREVIENIDDDTVIWIHDYQLAMLPGILRESNVKNKIIFTWHIPWVSPEFFSIIPESREIIKSISSSNYITFHIDNYRENFINSQRFLLGSSTPSRVYSIPLGIDTKFFSPKNAKKINNIKAKIIFSIDRLDYTKGLTLRVLAIEDLLTEHPELLKKFVYIMNVTPSRTTVSEYINMKKELEMSVGRVNGRFGTIDWRPIIYMYRKIRDKTLLSYYKSADVALITPLIDGLNLVSKEFVATTENGVLIISRFAGASKELSSAITVNPYNIKETANAIIKALSMDVNERNNMISKLKNTVVKRDIKWWYRRITALPR

SEQ ID NO: 145501 - DNA, 1437 bp, Acinetobacter sp. ADP1
  CDS (1)..(1437): transl_table=11
atgtctagacttattattttatccaatcgtgtgagtttacctcagactgaatgtgtagcaggtggattagctgttgccatgcaagatgcgttaagtcagcttggtggtgtttgggttggttggaatggcaaaaaaattgaacaaccatttgaacagcattttgatattttatacaaatccaaaattacttatatgacctgtgcactgacacagcaacagtatcaggattattactgtggtttttcaaataatacattatggccagcaatgcatgaccgtgaagacctgatcgagtataaccctaaagaattcaaaacttatcaagatgtgaaccgtttatttgccaccaaaattgcagaatttgcccaaccagatgatctaatctgggtacaggattatcattttctaagtgttgctcgccattgtcgtgagctgggaatgcaaaataaaatcggattctttcttcatattccttttgcctcactggaaatatggagaaagattccttgtgcagagcagcttatggatgatctatgtcattataatttaataggtttgcaaactgctcaagatcaggaaaactgtatttcagtatgtagtgtacttttaaaagctcagaaaattcaaaacaatatgatttcattgaatcaaagagtgacgcaaattcaagactatccaattggtgttgatgttaaaggtattcaaaaaacactctcaaatttatctgatcaagatcaatatttgacaaacccctctgctatcaaaacaattattggggtcgatcgaatcgattattcaaaaggtttattcgaaagatttaatgcctttgccgagtttttagatcgcaacacagcgtttcatcaaaaagttcaacatgtgcaaatagcttcaccttgccgtctggaagttgctacatataagcgactatttgaacggtttaagttgaaagtagaattaatcaatagtgaattttcccaagataactggcttccaattgtttgtcattatgattcaaaaccacatcacgaacttatgcaattttatcgtaatgcggatatctgctgggttacttcacttaaagatggtatgaatttagttgctaaagaatatattgctgcacaaaatcctgataaccctggcgtactcatcttatctgaatttgcaggggcggcagaacaaatgcaagatgctctaatcgttaatcccaagaaccgtgatgcaatgattaaagccttgaagcttgcgttaaatatgtctttggaggagcgtcaatatcgttatcataaacttataaaacaacttatagaatatgatattaatcagtggcgagatgattttctgaaagacttgaattcctcacaatacattcaaaacttcgactataatcatcgtttatcaactgtattgttttatccaaattattcttccagaatctaa

SEQ ID NO: 145502 - protein, 478 aa, Acinetobacter sp. ADP1
MSRLIILSNRVSLPQTECVAGGLAVAMQDALSQLGGVWVGWNGKKIEQPFEQHFDILYKSKITYMTCALTQQQYQDYYCGFSNNTLWPAMHDREDLIEYNPKEFKTYQDVNRLFATKIAEFAQPDDLIWVQDYHFLSVARHCRELGMQNKIGFFLHIPFASLEIWRKIPCAEQLMDDLCHYNLIGLQTAQDQENCISVCSVLLKAQKIQNNMISLNQRVTQIQDYPIGVDVKGIQKTLSNLSDQDQYLTNPSAIKTIIGVDRIDYSKGLFERFNAFAEFLDRNTAFHQKVQHVQIASPCRLEVATYKRLFERFKLKVELINSEFSQDNWLPIVCHYDSKPHHELMQFYRNADICWVTSLKDGMNLVAKEYIAAQNPDNPGVLILSEFAGAAEQMQDALIVNPKNRDAMIKALKLALNMSLEERQYRYHKLIKQLIEYDINQWRDDFLKDLNSSQYIQNFDYNHRLSTVLFYPNYSSRI

SEQ ID NO: 145503 - DNA, 1404 bp, Propionibacterium acnes KPA171202
  CDS (1)..(1404): transl_table=11
atgtcggagaccgtccaggacaaggtcgacttccttgtcattgcaaaccgcttacccgtagaccgcaaggtcgacgacgacggcagcgttagttggaagtcctcccccggcggcctcgtcaccgctttggagcctgtcatgcaacgcaagggcggcgcatggatcggatggcatggcgcgcctgacgtagtcgtcaaacccttccaccatgacggttatgacatccacccggtgccactgagcgcccaggaggtcgaggagtactacgaggggttctctaacgcgaccctgtggccgctgtaccacgactgcattgtcgagccagtcttccaccgtgagtggtgggacgcattccagaaggtcaacaagaggtttgccgagcaagctgctgaacaggccgcagagggcgccaccgtgtgggtgcaggattaccagctcaacctcgtaccgaagtacctgcgtgagatgcgaccagatctgcgcattggattcttccttcacattccgttcccgccgattgagctttacagccgtctgccgtggcgcgaagagctcgtcgagggcttgctgggagctgacctcatcgggttccagactcccggagctgctgccaatttccagcgcttggcaaggcaccgcccgggggtcactgccgctcgtggtcgcgctcataccccggatggccgcaccgtcgtcatccgtgacttcccgatctcgattgactcacgtggtttccatgaactggccacctcagagaaagtcaaggctgaggctgccaagcttcgcgaggacctaggtcacccaggaacgatcatcttcggcgtcgaccgtctcgactacaccaagggtcttcgccaacgtatccgtgccgtcggagagctgttcaaagagggcaagctcgatccccacgaggtcgtcttcctacagctagccaccccgtcgcgggaacgcgtcgaggaatacaagatcctgcgcgacgacatcaacctgctcgtcggccagatcaattcgaaggtcgggtcgatcgccaaccgcgcgctggtctaccgcaatgagtcagttccgcgtgaagtgctagcagcgatgtaccagatggctgatcttatgctcgtcaccccggtacgtgacggcatgaacctggtcgccaaagagtacattgcctgccgctcgaacgacgactccgcgctggtactttccgagttcgctggtgcggcccgtgagctcaagcaggcctacatggtgaacccgtatgacattgacggtatgaaggccaccatcatgaaagcgcttacggactcccccaagatcaaggcccgcaagatgcgttccatgcgtcgtcaagtcttcgacaagacgatcgatgtctgggcagacaacttcctcaccgagctagaaggccagtga

SEQ ID NO: 145504 - protein, 467 aa, Propionibacterium acnes KPA171202
MSETVQDKVDFLVIANRLPVDRKVDDDGSVSWKSSPGGLVTALEPVMQRKGGAWIGWHGAPDVVVKPFHHDGYDIHPVPLSAQEVEEYYEGFSNATLWPLYHDCIVEPVFHREWWDAFQKVNKRFAEQAAEQAAEGATVWVQDYQLNLVPKYLREMRPDLRIGFFLHIPFPPIELYSRLPWREELVEGLLGADLIGFQTPGAAANFQRLARHRPGVTAARGRAHTPDGRTVVIRDFPISIDSRGFHELATSEKVKAEAAKLREDLGHPGTIIFGVDRLDYTKGLRQRIRAVGELFKEGKLDPHEVVFLQLATPSRERVEEYKILRDDINLLVGQINSKVGSIANRALVYRNESVPREVLAAMYQMADLMLVTPVRDGMNLVAKEYIACRSNDDSALVLSEFAGAARELKQAYMVNPYDIDGMKATIMKALTDSPKIKARKMRSMRRQVFDKTIDVWADNFLTELEGQ

SEQ ID NO: 145505 - DNA, 1479 bp, Leifsonia xyli subsp. xyli str. CTCB07
  CDS (1)..(1479): transl_table=11
gtgatcgtctcgaaccggttgcccgtcgaccgtgtggtggacgaaacaggcgaatcgagctggcgcccgtcgcccggcggcctggtcgccgccctgaagccggtcatgagggcggaggacggcgtctggatcggctgggccggtgtcgccggagaggaggtcgagccgttcgaggtggacggcatcgccatcctgccggtgccgctgagcgaacaggacctgcaagagtattacgaaggcttctccaacgacacgctctggccgctctaccacgatgtgatcgcaccgccgagctaccaccgcgaatggtgggagacgtacgtcgcggtcaaccgccggttcgcggccgccgccgccgcggtcgcagcgaaaggcgcggtcgtgtgggtacacgactaccagcttcagctcgtccccgagatgctgcgggagtcgcgtccggaccttgtcatcggattcttcaaccacatcccgttcccgccctatggcatctactcgcagctgccctggcgtcgtcagatcatcgacgggctgctgggtgcggatgtcgtcggcttccagcgcgtcgccgacgccagcaacttctcgcgtgccgtccgccggctgaagggctacgagacgcgcgggccgatcatcgatgtgccgatcgagagcgacgaccccgaggccggatcgcaccgtcacgtcacggccaaccgccacggcgggctcgtccggacggtcctcgcgcgcgcattcccgatctcgatcgacgtcgagcagtaccaggaactcgcccgccgcccggagatccgggccagggccgctgcgatccgcgaggagctcggcaaccccgagacgatcatgctgggtgtcgaccgcctcgactacacgaaggggatcggccaccgcctcaaggcgttcggcgagttgcttcgcgacggtcggctcgatgtcgagaaagcgaccctcgtgcaggtcgcgagtcccagccgcgaacgggtcgagacctaccgccagctccgtgacgagatcgagctgacggtcggccggatcaacggcgattactccaccctcggtcacaccgccgtcgcctatctccatcacggctatccgcgtgaggagatggtcgcgctctacctcgcggccgatgtcatgctcgtcacggcgctgcgcgatggaatgaacctggtcgccaaggaatacgtcgccacccgtgtggacgaggacggcgtgctcattctcagcgagttcgccggcgcgtccgatgagctgcgccaggcgctcctcatcaacccgcacgacatcgaggggctcaaggacgccatcgcgcaggccgtcgagatgccgcgtcgcgaccgcacccgccggatgcgcgccctccgcaagaaggtgctcaccaacgatgtcgcgcgctggtccgcgtccttcctcgacgcgctgatccgccgtgcgcatggcgaccacccgctgcagaattcgccggtcaaccggcgctga

SEQ ID NO: 145506 - protein, 492 aa, Leifsonia xyli subsp. xyli str. CTCB07
MIVSNRLPVDRVVDETGESSWRPSPGGLVAALKPVMRAEDGVWIGWAGVAGEEVEPFEVDGIAILPVPLSEQDLQEYYEGFSNDTLWPLYHDVIAPPSYHREWWETYVAVNRRFAAAAAAVAAKGAVVWVHDYQLQLVPEMLRESRPDLVIGFFNHIPFPPYGIYSQLPWRRQIIDGLLGADVVGFQRVADASNFSRAVRRLKGYETRGPIIDVPIESDDPEAGSHRHVTANRHGGLVRTVLARAFPISIDVEQYQELARRPEIRARAAAIREELGNPETIMLGVDRLDYTKGIGHRLKAFGELLRDGRLDVEKATLVQVASPSRERVETYRQLRDEIELTVGRINGDYSTLGHTAVAYLHHGYPREEMVALYLAADVMLVTALRDGMNLVAKEYVATRVDEDGVLILSEFAGASDELRQALLINPHDIEGLKDAIAQAVEMPRRDRTRRMRALRKKVLTNDVARWSASFLDALIRRAHGDHPLQNSPVNRR

SEQ ID NO: 145507 - DNA, 1377 bp, Burkholderia mallei ATCC 23344
  CDS (1)..(1377): transl_table=11
atgagccgtctcatcatcgtctcgaatcgggttgcgccgatctccgaaggagaacccgcggccggcggcctcgcgatcggcgtctacgacgcgctgaaggaaacgggcggcatgtggttcggctggagcggcgaggtgatcgcgtcgggcgggccgcagatccgcatcgaggagcacggccccgtcacgttcgcgacgatcgggctgtcgcgccgcgactacgatcagtactaccgaggcttttcgaacgcgacgctctggcccgcgttccactatcgcgcggacctgatccagttcgaccgccacgagttcgaaggctattcgcgcgtgaacgtgtggctcgcgcagcagctcgtgccgctgctgcgcgatgacgacgtgatctgggtgcacgactatcatctgattccgttcgcgcgggcgctgcgcacggcgggcgtgaagaaccgcatcggttttttcctgcatattccgtttccggcggcgcaggtgctcgtcaacgtgccgccgcatcgcgaactggtcgaggcgctgtgctcgttcgatctgctcggctttcagaccgacaccgatctgcgcgcgttcttcgagtacgtcgaatacgaggcgggcggcacggtcgatcgcgccgcgcatccggcgcgcgtcgacgcgttcggccgcacgctgcgcgcggccgcgtatccgatcggcgtgtatccggacgagatcgccgcgctcgcgaaggcgggcgagaacggccgcgcggtgaagtcgctcgcggcctcgctgcgcgggcggcagctcgtgatgagcgtcgaccggctcgattactcgaaggggctcgtcgagcgctttcgcgcattcgagaagctgctcgagcacgagacgtcgtttcgcaatcgcgtgtcgttcctgcagatcgcgccgtccacgcgcgccgatctgcgcgcgtaccaggacatccgccggcagctcgagggcgaatcggggcgcatcaacggccgtttcgcggagctcgactgggcgccgatcctctatatccatcggcagtacgaacggccggtgctcgccgcgctataccggctcgcgcgcgtcgggtacgtgacgccgctgcgcgacgggatgaatctcgtcgcgaaggagtacgtgtccgcgcaggatccggacgatccgggcgtgctcgtgctgtcgcgcttcgcgggcgccgcgtgcgaactcaccggcgcgttgatcgtcaatccgatcgacatcggcgggatggccgacgcgctgtcgcgcgcgctgtcgatgccgctcgccgagcggcgcgcgcgccacgccgacatgctcgcgcggttgcgcgagaacaacgtgtcggtgtggcgcgaccacttcctgcgcgatctcgggcggtag

SEQ ID NO: 145508 - protein, 458 aa, Burkholderia mallei ATCC 23344
MSRLIIVSNRVAPISEGEPAAGGLAIGVYDALKETGGMWFGWSGEVIASGGPQIRIEEHGPVTFATIGLSRRDYDQYYRGFSNATLWPAFHYRADLIQFDRHEFEGYSRVNVWLAQQLVPLLRDDDVIWVHDYHLIPFARALRTAGVKNRIGFFLHIPFPAAQVLVNVPPHRELVEALCSFDLLGFQTDTDLRAFFEYVEYEAGGTVDRAAHPARVDAFGRTLRAAAYPIGVYPDEIAALAKAGENGRAVKSLAASLRGRQLVMSVDRLDYSKGLVERFRAFEKLLEHETSFRNRVSFLQIAPSTRADLRAYQDIRRQLEGESGRINGRFAELDWAPILYIHRQYERPVLAALYRLARVGYVTPLRDGMNLVAKEYVSAQDPDDPGVLVLSRFAGAACELTGALIVNPIDIGGMADALSRALSMPLAERRARHADMLARLRENNVSVWRDHFLRDLGR

SEQ ID NO: 145509 - DNA, 1410 bp, Burkholderia pseudomallei K96243
  CDS (1)..(1410): transl_table=11
atgagccgtctcatcatcgtctcgaatcgggtcgcgccgatctccgaaggagaacccgcggccggcggcctcgcgatcggcgtctacgacgcgctgaaggaaacgggcggcatgtggttcggctggagcggcgaggtgatcgcgtcgggcgtgccgcagatccgcatcgaggagcacggccccgtcacgttcgcgacgatcgggctgtcgcgccgcgactacgaccagtactaccgaggcttttcgaacgcgacgctctggcccgcgttccactatcgcgcggacctgatccagttcgaccgccacgagttcgaaggctattcgcgcgtgaacgtgtggctcgcgcagcagctcgtgccgctgctgcgcgatgacgacgtgatctgggtgcacgactatcatctgattccgttcgcgcgggcgctgcgcacggcgggcgtgaagaaccgcatcggttttttcctgcatattccgtttccggcggcgcaggtgctcgtcaacgtgccgccgcatcgcgagctggtcgaggcgctgtgctcgttcgatctgctcggctttcagaccgacaccgatttgcgcgcgttcttcgagtacgtcgaatacgaggcgggcggcacggtcgatcgcgccgcgcatccggcgcgcgtcgacgcgttcggccgcacgctgcgcgcggccgcgtatccgatcggcgtgtatccggacgagatcgccgcgctcgcgaaggcgggcgagaacggccgcgcggtgaagtcgctcgcggcctcgctgcgcgggcggcagctcgtgatgagcgtcgaccggctcgattactcgaaggggctcgtcgagcgctttcgcgcattcgagaagctgctcgagcacgagacgtcgtttcgcaatcgcgtgtcgttcctgcagatcgcgccgtccacgcgcgccgatctgcgcgcgtaccaggacatccgccggcagctcgaaggcgaatcggggcgcatcaacggccgtttcgcggagctcgactgggcgccgatcctctatatccatcggcagtacgaacggccggtgctcgccgcgctataccggctcgcgcgcgtcgggtacgtgacgccgctgcgcgacgggatgaatctcgtcgcgaaggagtacgtgtccgcgcaggatccggacgatccgggcgtgctcgtgctgtcgcgcttcgcgggcgccgcgtgcgaactcaccggcgcgttgatcgtcaatccgatcgacatcggcgggatggccgacgcgctgtcgcgcgcgctgtcgatgccgctcgccgagcggcgcgcgcgccacgccgacatgctcgcgcggttgcgcgagaacaacgtgtcggtgtggcgcgaccacttcctgcgcgatctcgggcggcagcgcgcggcgtcgggggccggccggggtcgttag

SEQ ID NO: 145510 - protein, 469 aa, Burkholderia pseudomallei K96243
MSRLIIVSNRVAPISEGEPAAGGLAIGVYDALKETGGMWFGWSGEVIASGVPQIRIEEHGPVTFATIGLSRRDYDQYYRGFSNATLWPAFHYRADLIQFDRHEFEGYSRVNVWLAQQLVPLLRDDDVIWVHDYHLIPFARALRTAGVKNRIGFFLHIPFPAAQVLVNVPPHRELVEALCSFDLLGFQTDTDLRAFFEYVEYEAGGTVDRAAHPARVDAFGRTLRAAAYPIGVYPDEIAALAKAGENGRAVKSLAASLRGRQLVMSVDRLDYSKGLVERFRAFEKLLEHETSFRNRVSFLQIAPSTRADLRAYQDIRRQLEGESGRINGRFAELDWAPILYIHRQYERPVLAALYRLARVGYVTPLRDGMNLVAKEYVSAQDPDDPGVLVLSRFAGAACELTGALIVNPIDIGGMADALSRALSMPLAERRARHADMLARLRENNVSVWRDHFLRDLGRQRAASGAGRGR

SEQ ID NO: 145511 - DNA, 2262 bp, Azoarcus sp. EbN1
  CDS (1)..(2262): transl_table=11
atgcttattgcgaccgatctcgacggaacatttctcgccggccaccccgaagcgcgtttgcgcctgtatcagctgatcaatgcacaccctgaaatcaagctggtcttcgtcaccgggcgcggactcgaggtcgtgttgccactgctctccgacccgtcgatcccgacgcccgactacatcgtttgcgacgtcggcgcgacggtcgtcgatggccgtacgctgcaaccggtgcaaccgctgcaagccggcatcgacgcgctgtggcctggcgagcgtgtcgtcgccgcggcgatggcatcgttcgtcggcatcgagcgccaggaagtgccgcagcagcgccgctgctcgtatttctgcgcgcccggcaccgtcggcagcgaccttcgcgggatcgccgccgagctcggctgcgacatgctgtattcggccgaacgctatctggacatcctgccgcgcggcgtcaacaaaggcagcacgctcgatgcactggtgcggctgctcgagatcgaccgcgacgcggtgctggtcgccggcgacacgctcaatgatctgtcgatgtacgagcgggggttcgtcggcgtctgcgtcggcgagtcggaagcggcactgctcgacgcgacccgcgagcgcgctcatgtgttgcacgcgcgccatccgggctgcggaggcatcctcgaggcgatcgcccacttcggtttcctcgggccggcaggcgtcgaggcggagttgcgcgagaccgacaccccggggcgctccgaactcgtcatggtctatcaccggctgccgtacgaggaggtattcgaaaacgggcgcatcacccgcgcagccccgagctcgccgaacggcatcattccgacgttgctgagctacttcagcgacgggcgccccggcgcatggatcgcatggtcgatgcatgacccgaaaaaagcgatcccgttcgaagtccatacgaccgtcgaccgcgagcgctacccgcacctggtcgctgcgcgcgtaccgctgacgaaggacgacatcgacatcttctacaagcgcttttcgaaagaagcgttctggccgacgctgcacacgttctgggagcgcgcgcaatttcgcgaggatgactggcacgtttacctgaaggtcaaccggctctttgccgagcgcgccgcagccgaagcggccgaaggcgcggtcgtctggctgcacgactacaacttgtggatggtgccggcggtgctgcgcgagttgcgtccggacgtcaagatcgcgttcttccaccacacctatttcccgtcggcggacgtgttcaacgtgctgccgtggcgccgcgagatcattggcagcctactgcagtgtgactacatcggcttccatatcccgcgccaagccgagaatttcgtcgatgtcgcgcgcggcgtcgcaccgctgaccgtgctcgagcgccgcaactgcgcgccgcgctacctcacttacggctgcgccgtcggcctcgatgaagtcacgaccgcgatcgaggtccacggccgccgcatcggcctcggcgcccacccggtcggcctcgacgtcgagcgcgtgcgcaagatcctcgaccagccttcgacgcgcaagcgcatggccgaattgcgcgcggatctcgtcgacacgcgcgtgatcctgtcggtcgagcgcctcgactatacgaaaggcacgctcgagaagctgctcgcattcgagcgtctgctcgacgcgcatcccgagctgcagggcaaagtgtcgctgatggcggtgtgcgtgccggcagcgaaggaaatgacgatctacgacgcgttgcagacgcagatcgagcaggcggtcggccgcatcaacgggcgcttctcccgcgttagctggacgccggtgcagttcttcttccgcgcgctgccattcgaggaagtcgtcgcgtggtatgcgatggccgacgtgatgtggatcacgccgctgcgcgacggcctgaacctcgtcgcgaaggagtacgtcgcgacgcagggcatgatcgaggggcggggcgtgctcgtgctgtcggagttcgccggcgcggcagccgaactgcacggcgcagtgctgaccaatccgcacgatctcgcggacctcgcggcgcgcctgtatcaggcgatcgcgatgaacgacgccgaggccgaagcacgcctgcgcgagctgttcgccatcgtcgaacacaacgacatccaccgctggggacggaatttcctcgaagccgttaccacgccggtcggcgaagactcgctcgccggcacgggctgctga

SEQ ID NO: 145512 - protein, 753 aa, Azoarcus sp. EbN1
MLIATDLDGTFLAGHPEARLRLYQLINAHPEIKLVFVTGRGLEVVLPLLSDPSIPTPDYIVCDVGATVVDGRTLQPVQPLQAGIDALWPGERVVAAAMASFVGIERQEVPQQRRCSYFCAPGTVGSDLRGIAAELGCDMLYSAERYLDILPRGVNKGSTLDALVRLLEIDRDAVLVAGDTLNDLSMYERGFVGVCVGESEAALLDATRERAHVLHARHPGCGGILEAIAHFGFLGPAGVEAELRETDTPGRSELVMVYHRLPYEEVFENGRITRAAPSSPNGIIPTLLSYFSDGRPGAWIAWSMHDPKKAIPFEVHTTVDRERYPHLVAARVPLTKDDIDIFYKRFSKEAFWPTLHTFWERAQFREDDWHVYLKVNRLFAERAAAEAAEGAVVWLHDYNLWMVPAVLRELRPDVKIAFFHHTYFPSADVFNVLPWRREIIGSLLQCDYIGFHIPRQAENFVDVARGVAPLTVLERRNCAPRYLTYGCAVGLDEVTTAIEVHGRRIGLGAHPVGLDVERVRKILDQPSTRKRMAELRADLVDTRVILSVERLDYTKGTLEKLLAFERLLDAHPELQGKVSLMAVCVPAAKEMTIYDALQTQIEQAVGRINGRFSRVSWTPVQFFFRALPFEEVVAWYAMADVMWITPLRDGLNLVAKEYVATQGMIEGRGVLVLSEFAGAAAELHGAVLTNPHDLADLAARLYQAIAMNDAEAEARLRELFAIVEHNDIHRWGRNFLEAVTTPVGEDSLAGTGC

SEQ ID NO: 145513 - DNA, 1440 bp, Thermobifida fusca YX
  CDS (1)..(1440): transl_table=11
gtggacaaggcacagatcctcgtcgcttccaacaggggacccgtgtccttctcaatcggggacgacggcgccgtgaaatcccggcgcggcggtggcggcctggtttccggactgagttcggtagccaccgagatcgaaaccctgtgggtgtgcgccgcgttgtccgacgctgaccgcaaagccgccgcagcagcccccgaagggcggctggacaaggccggatacgacgtgggcggggcgagtgtacgcatgctcaacattcccgccgacgtcttcaacaatgcctacaactctgtggcgaactccacactgtggtttgttcaccacatgctctacgacacccccaacaagccgtcgttcggctcccgtttccgcgccgagtgggaggactaccgggcctacaactctgctttcgcggaagcactgctgaccggcgcggacgagggggcgaaggtcgccgtccaggactaccacctggcgctggtaccgaaaatgctccgggtacgccgccccgacctgcgcatcgcccacttctcccacaccccttgggctccccccgagtacttccggatgcttcccgcggacatcggccgggaactcctcgaaggcatgctcggcgccgaccacttgggcttcctcagcgtgcgctgggccgacgcgttcctgcggtgctgcgaagtgttcctgcgcgccccggtgaactggggcacccgcacggtcgagcatggcggccgggtcatccgtgtcggagtccacggcctgggcgcagacgcccaagggctgcgggagcgggccgccgccgaagatgtggcgcgctggcgggaacggctgcgggaacgggtcggcgaccgcaagctgatcgtgcgagtggaccgcaccgaactgtccaagaacatcgtgcgcggcctggaagccttcggtgaactgctgcggaagcgccccgaatggcggaaccgggtcacccacttggcgttcgcataccccagccgcagcggtgtcgcggagtaccgcgcctacaccgagtcggtgcgggccacggccgaagcgatcaacgccgagttcggcaccgacgactggacccccgtggtgctggaggtcaacgacgactacccccgctccctcgcctcctaccagatcgctgacgtgctgctggtcaacccgatccgcgacgggatgaacctggtcgcaaaggaagggccggtgctgtcgctcaacggcgtagcgctcgtgctgtccactgaggcgggcgctgccgacgacctgggcgccgacgcgatcctcgtcaacccctacgacgtgtcggagaccgccgaggcgctgcaccgggcgctgaccatggacgaagaggagcgacggcagcgcacggaacgtctggcggaggccgctgccgccctgcccccgcagcggtggttcaccgaccagctgcgggctttggactga

SEQ ID NO: 145514 - protein, 479 aa, Thermobifida fusca YX
MDKAQILVASNRGPVSFSIGDDGAVKSRRGGGGLVSGLSSVATEIETLWVCAALSDADRKAAAAAPEGRLDKAGYDVGGASVRMLNIPADVFNNAYNSVANSTLWFVHHMLYDTPNKPSFGSRFRAEWEDYRAYNSAFAEALLTGADEGAKVAVQDYHLALVPKMLRVRRPDLRIAHFSHTPWAPPEYFRMLPADIGRELLEGMLGADHLGFLSVRWADAFLRCCEVFLRAPVNWGTRTVEHGGRVIRVGVHGLGADAQGLRERAAAEDVARWRERLRERVGDRKLIVRVDRTELSKNIVRGLEAFGELLRKRPEWRNRVTHLAFAYPSRSGVAEYRAYTESVRATAEAINAEFGTDDWTPVVLEVNDDYPRSLASYQIADVLLVNPIRDGMNLVAKEGPVLSLNGVALVLSTEAGAADDLGADAILVNPYDVSETAEALHRALTMDEEERRQRTERLAEAAAALPPQRWFTDQLRALD

SEQ ID NO: 145515 - DNA, 1392 bp, Ralstonia eutropha JMP134
  CDS (1)..(1392): transl_table=11
atgccaagactagtagcggtatccaaccgggttgccgatccgcgcaacgttgccgcgggcggcctcgccgtggccttgtccgaagcgctgcgccagactggcgggatgtggtttggctggagcggcaaggcgctggaaacgaaccatggcggcacgcctggcgaaggggagctgcacttgcagcaagcgggcaatgtcacgctggccactgtggacatgtgccgcgaagaccatgacgcctactacctcggctacagcaacggtgtcctgtggcccgcattccactaccggctggatctggcggacttcgactcgaactatctcaacggctaccgtcgcgtgaaccagctgttcgcgcgcaagctggcgccgctgctcaagcccgatgacatcatctggatccacgactaccacctgatccctctagcggcggaattgcgcgccatcggctgcggacagcgcatcggcttcttcctgcatatcccgctgccgccaccgctgatcctggccgccatcccgcagcatgactggctcatgcgcgcgctgttcgcgtacgacctcatcggcttccagagccacaccgacctggagcatttctcgcgctacgtgcagaacgaagcgttcgccgagccaatgggcgaacaccgctatcgcgcgttccatcgcaccgtacgtgccgaggcgttcccgatcggcatcgatgtggaggagtttcgggaactcggtcggggcgctgaagcacaggagaccttcgagatgatgcgcgcgcagtacgcgagccgcaggctgctgctcggcatcgaccgactcgattactccaagggcctgccgcagcggctcaaggccttctaccggctgctggccgagtatccggagaaccgcatgagcgcgacgctggtgcagatcgcggcgccgtcgcgcgaatcggtagatgcctatgccgacctgcgcagcgagatggaacggctgagtggtgccatcaacggtgaattcggcgagctggactggatgccggtgcgctatatccatcgcaccacggcacgcaagaggctgccgggcttgtgccgtgcgagccgcgtagcgctcgtgacaccgctgcgcgatggcatgaatctcgtggcgaaggaattcatcgctgcgcaggatcgtgaagaccctggcgtgctcgtgctgtcgcgctttgcgggcgcggccgagcagctcaaggaagcgctgctggtgaacccctacgacacgcacgccaccgcgcaggcgatccagcaggcattgcacatgccgctggccgagcggcaggcgcggcatgagaagctgctggagcgcattcgtacgcaggacgtgcactggtggagccaggagtttctgcgcgcgctgacggaaacggacggcggctga

SEQ ID NO: 145516 - protein, 463 aa, Ralstonia eutropha JMP134
MPRLVAVSNRVADPRNVAAGGLAVALSEALRQTGGMWFGWSGKALETNHGGTPGEGELHLQQAGNVTLATVDMCREDHDAYYLGYSNGVLWPAFHYRLDLADFDSNYLNGYRRVNQLFARKLAPLLKPDDIIWIHDYHLIPLAAELRAIGCGQRIGFFLHIPLPPPLILAAIPQHDWLMRALFAYDLIGFQSHTDLEHFSRYVQNEAFAEPMGEHRYRAFHRTVRAEAFPIGIDVEEFRELGRGAEAQETFEMMRAQYASRRLLLGIDRLDYSKGLPQRLKAFYRLLAEYPENRMSATLVQIAAPSRESVDAYADLRSEMERLSGAINGEFGELDWMPVRYIHRTTARKRLPGLCRASRVALVTPLRDGMNLVAKEFIAAQDREDPGVLVLSRFAGAAEQLKEALLVNPYDTHATAQAIQQALHMPLAERQARHEKLLERIRTQDVHWWSQEFLRALTETDGG

SEQ ID NO: 145517 - DNA, 1557 bp, Thiobacillus denitrificans ATCC 25259
  CDS (1)..(1557): transl_table=11
atggctgcatccctggtcatcgtctatcacaggcaaccctatgaggaacacgtcgaaggcggcaagacggttttccgggagaacgccagtccgaacggcatcgtcccggcgctgaaaggcttcatcgggcagaccgagcgcgcgagctggatcgcgtggaagaaatcgccggccggcaagcccgtacgcttcgagcgccgaatcaccgtcgaggacagctacggcagctatgaggtggtgaggctgccgctcagcgccgagcagatcagccagttctaccacgtcacgtcgaaagaggcgctctggcccatcctcaacagttttccctcgctgtattcgaccgaaaactgcgactgggccgcgttccgcgaggtcaaccgcctgttcgccgaggcagcctgcgaggaggcggcgcccggcgcggtggtctgggtgcacgattacaacctgtggctggtgccgaaattcgtgcgggcgctgcgtccggatgtgcgcatcgcgtttttccatcacacgccgtttccggcggccgacgtcttcaacatcctgccctggcgcgacgagatcgtcgacagcctgctcgactgcgatctcgtcgggttccacgttccgcgctacgcgcgcaatttcgtctcggtggtgcagtcgctgcgcccggtcgacgcgctcgtcgaacgcgacgtcccgcccgacctgcgagcgacgggcaccgcgctttccgaaccggtgacaccggtggtgctacacagcggcaagcgccgcgtccagatcgacgcgttcccgatcggcacccacgcctcgctgatccgcgaaacggtgcagcagcccgagcggctcgcgcaggtcgcgcagatccggcacgacatcccgcaggagaagatcatcgtttcgatcgggcgcgtcgattacgccaagggcacgcgcgaaatgctgctcgcctacgaacgcctgctgcagcggcgccccgagctgcatgggcgaatcaagctgctcgtgacggcggtcgcggcagccgacggcatgcgcgtctacaagcgcgcccagcagtcgatcgagcagctcgcaggccgcatcaacgggcgcatcggcacgctggcctggcagccgatcctgctctcgacgacgcccatgccgttcgccgagacgctgtgctactaccgtgcggccgacatctgctggatcacgccgctgcgcgacggcctgaacctcgtcgccaaggaattcatcgccgcccacgtcaacgagagcggcgttctcgtgctctcggaattcgccggggccgcggtcgagttgcaggacgcggtcctcgtcaatccctacagcctcgtgcagatggacgccgcaatcgaccgcgcgctcgacatgcccgccgccgagcagcgcgcgcggatgcagcgcatggatgccttgatggatcgctacgacatcggtcactggacgcgccacgtgctcgaactgttcgcgcagttgccggcccgcgcgcaggccgacgcggatccggccccgcagcgtgcgcgccgtgccgggcgtgcgccggcggccgtgcccgtgcactag

SEQ ID NO: 145518 - protein, 518 aa, Thiobacillus denitrificans ATCC 25259
MAASLVIVYHRQPYEEHVEGGKTVFRENASPNGIVPALKGFIGQTERASWIAWKKSPAGKPVRFERRITVEDSYGSYEVVRLPLSAEQISQFYHVTSKEALWPILNSFPSLYSTENCDWAAFREVNRLFAEAACEEAAPGAVVWVHDYNLWLVPKFVRALRPDVRIAFFHHTPFPAADVFNILPWRDEIVDSLLDCDLVGFHVPRYARNFVSVVQSLRPVDALVERDVPPDLRATGTALSEPVTPVVLHSGKRRVQIDAFPIGTHASLIRETVQQPERLAQVAQIRHDIPQEKIIVSIGRVDYAKGTREMLLAYERLLQRRPELHGRIKLLVTAVAAADGMRVYKRAQQSIEQLAGRINGRIGTLAWQPILLSTTPMPFAETLCYYRAADICWITPLRDGLNLVAKEFIAAHVNESGVLVLSEFAGAAVELQDAVLVNPYSLVQMDAAIDRALDMPAAEQRARMQRMDALMDRYDIGHWTRHVLELFAQLPARAQADADPAPQRARRAGRAPAAVPVH

SEQ ID NO: 145519 - DNA, 1413 bp, Rhodobacter sphaeroides 2.4.1
  CDS (1)..(1413): transl_table=11
atgagtcgtctcgtcgtcgtctcgaaccgcgtgccgctgccggacgagaacggcaacccgccgcccggcgggctggccgtcgccgtccatgccgcgctgcgcaagaacggcgggatctggatgggctggtcgggccgctcgaccggcgaggaggagccgcagggcctgaccacgctggagcaggacaagatcagctatgtgctgaccgacctttcgcaggcggacctcgacgaatattacaacggcttcgccaaccgggtgctctggccgatcttccactgccgtctcgatctggccgaatatgcgcggcaggagatggcgggctatttccgcgtcaatcgcctgttcgccgaccgtctggtgccgatgctcgagcccgacgacgtgatctgggtgcatgattaccacctgatcccgctggcgcaggagctgcgcaagcgcggcgtgcgcaaccggatcggcttcttcctccacattccatggcccccggccgacatcctgaccgctctgccggtctacgagatcatcatgcggggccttgcggcctacgacctcgtggggttccagaccgactacgatctcgacaatttcgtgggttgtctgcgccgcgagggctggggcgactggtcgacgccgggctggctccgcgccttcgacaaggaggtggcggccgcggccttccccatcggcatcgagaccggggatttcgcgcggctcgcggccaagacggacgggctcgatctggtcaccgacatgcagcagagcctgcatggcagttcgctcatcatcggggttgaccggctcgactattccaagggcatcgccgcgcggatcgacgcgttcgagcggtatctgatgcgcaatcccgatcaggcgggcaaggtcacgctgctgcaggtggcgccccactcgcgctcggacgtgcccgagtatctcgagatgcaggggcaggtggagtcgcattgcggccgggtgaacggcgcgcacggcaccatcgagtgggtgcccatccgctatgtgaaccagtcgctcacccggcctgtgctggcgggcctctaccggctggcgaaagtggggctcgtcacgccgctccgcgacgggatgaacctggtggccaaggaatatgtggcctcgcaggatccggccgatccgggcgtcctcatcctctcgcgcttcgcgggcgccgcgcgcgaactggacggggccatcttcatcaacccctacgacaccgagcagacggcgggggccatcggccgtgcgctctcgatgccgctcgacgagcggatcgcgcgctggcggcgcatgatggatcatctcgagtcccacgatgtgctctggtggtgccgcacgttcctcgccgccctgaacgaggcgcccgaggacaacggtgccctcacccgagagagcgattga

SEQ ID NO: 145520 - protein, 470 aa, Rhodobacter sphaeroides 2.4.1
MSRLVVVSNRVPLPDENGNPPPGGLAVAVHAALRKNGGIWMGWSGRSTGEEEPQGLTTLEQDKISYVLTDLSQADLDEYYNGFANRVLWPIFHCRLDLAEYARQEMAGYFRVNRLFADRLVPMLEPDDVIWVHDYHLIPLAQELRKRGVRNRIGFFLHIPWPPADILTALPVYEIIMRGLAAYDLVGFQTDYDLDNFVGCLRREGWGDWSTPGWLRAFDKEVAAAAFPIGIETGDFARLAAKTDGLDLVTDMQQSLHGSSLIIGVDRLDYSKGIAARIDAFERYLMRNPDQAGKVTLLQVAPHSRSDVPEYLEMQGQVESHCGRVNGAHGTIEWVPIRYVNQSLTRPVLAGLYRLAKVGLVTPLRDGMNLVAKEYVASQDPADPGVLILSRFAGAARELDGAIFINPYDTEQTAGAIGRALSMPLDERIARWRRMMDHLESHDVLWWCRTFLAALNEAPEDNGALTRESD

SEQ ID NO: 145521 - DNA, 1434 bp, Carboxydothermus hydrogenoformans Z-2901
  CDS (1)..(1434): transl_table=11
atgagaggtaatcttttggtggtatctaaccggggaccctttaccattgaagaaaataacggtagtttaaaataccgtccggcggtaagtggacttgtatcggcggtccttcccgccgtaaaaaaaatcggaggaacctggttagcctgggcagggagaattgcggagaagcctgcggaagttcaggcggtaattaaagacgagtttcaatttgtggaaatcctcctatccagggaagaagtagaggggtattatgaaggttatgccaacggagtgctctggccgctctgccacctgatgccggaaaaagttaggatgtacgaagaaaattaccgaatttaccgggaagttaaccagaaatttgcccaaaaggctgctaccttattaagaaccgggacgcttttatggattcatgactaccacttagctttaatgccccactttattcgccaaaaaaatccctggcagcgaattgcctttttctggcatataccctttccgccggtagaactgtttaccattcagccctgggcggaagaaattttacgcggccttttaggtgcggatatcattggttttcatattgatgactaccgggaaaactttttacgggcggtggagcgggtattaaagcttccggtaaattacgagtggggtaccgtttattataatggacgagaagtcctggtcaaggcggtgccgattggtattgaaactaaaaacttccaaaaggaagtgcctgaaattactgaaattgagcaagaaatcgcaggattgaaaatctttctgggagtcgaaagattggattataccaaaggtttaaaagaaaaaatccaggggtttgcccgttttttggagaaaaatcccgagtatcggggtaaagttaagcttttacaggtggcggtaccgacccgggaaaatattgaccaataccaaacttatgcccgggaggttttggccgaagccgctaaggtaaatgaacgttttggcgataaccactggcagcccataaagattttaaagcgaaattatagccaggaagaacttatctatttataccgcattgccgatgcgcttgttattacttccctggaagatgggcttaacttggtggctaaagaatatattgcttccagaaaagagccgggagtgcttattttaagtaaacggacgggagttgcccggcaacttaatgctgctcttttggtcaatccctactcgccggaagaaattgctctaaaaatgaaagaagccatagaaatgccggataccctcaagaaaaagagtttttctttattaaaggaacaggttatcttaaaaaacaatgaatggtggctggaaaatttcctgggaaaagaactacggttgatggatacaggttttggcaaatactaccgcaaacggggtgaaaagaaagttggagctattgactaa

SEQ ID NO: 145522 - protein, 477 aa, Carboxydothermus hydrogenoformans Z-2901
MRGNLLVVSNRGPFTIEENNGSLKYRPAVSGLVSAVLPAVKKIGGTWLAWAGRIAEKPAEVQAVIKDEFQFVEILLSREEVEGYYEGYANGVLWPLCHLMPEKVRMYEENYRIYREVNQKFAQKAATLLRTGTLLWIHDYHLALMPHFIRQKNPWQRIAFFWHIPFPPVELFTIQPWAEEILRGLLGADIIGFHIDDYRENFLRAVERVLKLPVNYEWGTVYYNGREVLVKAVPIGIETKNFQKEVPEITEIEQEIAGLKIFLGVERLDYTKGLKEKIQGFARFLEKNPEYRGKVKLLQVAVPTRENIDQYQTYAREVLAEAAKVNERFGDNHWQPIKILKRNYSQEELIYLYRIADALVITSLEDGLNLVAKEYIASRKEPGVLILSKRTGVARQLNAALLVNPYSPEEIALKMKEAIEMPDTLKKKSFSLLKEQVILKNNEWWLENFLGKELRLMDTGFGKYYRKRGEKKVGAID

SEQ ID NO: 145523 - DNA, 1380 bp, Burkholderia sp. 383
  CDS (1)..(1380): transl_table=11
atgagtcgcctcatcattgtttcaaaccgcgttgcgccgatttcggaaggcgaaccggcggcgggtggtctcgcgatcggcgtctacgatgcgctgaaggagacgggcggcatgtggttcggctggagcggcgaggtcgtcgcgtccggcgcaccgcaaattcgcgtcgaggagcacgggccggtcacgttcgcgaccatcggcctgtcgcggcgcgactacgaccagtattaccgcggcttctcgaacgcgacgctgtggcccgcgtttcattaccgcaccgacctgatccagtacgaccgtcacgagttcgaaggctacagccgcgtgaacgtgtggcttgcccagcagctcgtgccgctgctgcaggacgacgacgtgatctgggtgcacgactatcacctgatcccgttcgcgcgcgcactgcgcgcggccggcgtgaagaaccgcatcggcttcttcctgcatatcccgtttccggctgcacaggtgctcgtcaacgtgccgccgcatcgcgatctcgtcgagtcactgtgcgcgttcgacctgatcggtttccagaccgaacccgacctgcgcgcgttctgcgactacgtcgaatccgaagcggacggcgtgatcgagcgcgacggccacctggcgacggtgcgcgcattcggccggacgctgcgcgcggccgcctatccgatcggcgtgcatccggacgagatcgcgtcgctcgcgcaggccggcgagcacggcaaggcggtgcgcacgctcgcgatctcgctgcgcggccgcaagctgatcatgagcgtcgaccggctcgattattcgaaggggctcgtcgagcgcttccgtgcgttcgagaagctgctcgagcacgagccgtcgcatcgcaatcgcgtgtcgttcctgcagatcgcgccgtcgacccgcgcggagctgcgcgcgtaccaggacatccggctacagctcgaaggggagtcggggcgcatcaacggacgcttcgccgagctcgactgggcgccgatcctctatatccatcgtcagtacgaccgccagctgctcgctgcgctgtaccggctcgcgcgggtcggctacgtgacgccgctgcgcgacgggatgaatctcgtcgcgaaggaatacgtgtccgcgcagaatccggaggatccgggcgtgctcgtactgtcgcgcttcgcgggcgccgcacgcgagttgacgggggcgctgatcgtcaatccgatcgatatcgacggaatggccgacgcgttgtcgcaggcgctgacgatgccgctcgccgagcggcgcgcgcgttatacggacatgattgcgcagcttcgcgagaacaacgtgtcggtgtggcgcgacaacttcctgcgcgatcttcagcacgcgtaa

SEQ ID NO: 145524 - protein, 459 aa, Burkholderia sp. 383
MSRLIIVSNRVAPISEGEPAAGGLAIGVYDALKETGGMWFGWSGEVVASGAPQIRVEEHGPVTFATIGLSRRDYDQYYRGFSNATLWPAFHYRTDLIQYDRHEFEGYSRVNVWLAQQLVPLLQDDDVIWVHDYHLIPFARALRAAGVKNRIGFFLHIPFPAAQVLVNVPPHRDLVESLCAFDLIGFQTEPDLRAFCDYVESEADGVIERDGHLATVRAFGRTLRAAAYPIGVHPDEIASLAQAGEHGKAVRTLAISLRGRKLIMSVDRLDYSKGLVERFRAFEKLLEHEPSHRNRVSFLQIAPSTRAELRAYQDIRLQLEGESGRINGRFAELDWAPILYIHRQYDRQLLAALYRLARVGYVTPLRDGMNLVAKEYVSAQNPEDPGVLVLSRFAGAARELTGALIVNPIDIDGMADALSQALTMPLAERRARYTDMIAQLRENNVSVWRDNFLRDLQHA

SEQ ID NO: 145525 - DNA, 1422 bp, Burkholderia sp. 383
  CDS (1)..(1422): transl_table=11
atgagcagattgatcgtggtatcgaaccgtgtcgccgccggcgaggacacgcgcccgagcgcgggtggcctggcggtcggcgtgatggacgcgctgaaggaaacgggcggcgtctggttcggctggaacggcgagatcgtcgacgcacccgataccgaacccgcgatccagcaggacggcaacgtcacctatgcgacggtcgggctgaaccggcgcgactacgatcagtactaccgcggcttctcgaacgcgacgctgtggccggtgttccattaccgcggcgatctcgcgcgcttcgaccgtcaggagtacgcgggctatctgcgcgtgaacgcgatgctcgccaagcagcttgccgccctgctgcgccccgacgacctgatctgggtacacgactatcacctgttgccgttcgcgcattacctgcgcgagctcggcgtgaagaacccgatcggcttcttcctgcacattccgtttccgtcgcccgacatgctgcgtctcgtgccgccgcacgaggaactcgtgaagttcatgtgcgcgtacgacgtcgcgggcttccagaccgagaccgacaagcaggcgttcaccgactacatcgaacggcgcgggatcggtgcggcgagcgacgacggaatgctgcacgcgcatggccgcgtcgtgaaggtcgccgcctatccgatcggtgtgcatcccgacgcgatcgcgcaggcggccgtccagtacagcgcgcgcaagccggtgaagatgctgcgcgaggcgctcgacggccgcaagctggtgatgagcgtcgaccgcctcgactactcgaaggggctcgtcgagcgcttccagtcgttcgagcggatgctcgcgaacgcgccgggctggcaggggcgcgtgtcgctcctgcagatcgcgccgccgacgcgttccgacgtgaagacctatcaggacattcgcgaaacgctcgaaggcgaggccggccgcatcaacggccgcttctcgcagctggactggaccccgatccagtacctgaaccgcaagtacgagcgcaacctgctgatggcgttcttccggatgtcgcaggtcggctacgtgacgccgctgcgcgacgggatgaatctcgtcgcgaaggagtacgtcgcgtcgcaggatccggccgatccgggcgtgctcgtgctgtcggagttcgcgggtgcggcagccgagctgaccggcgcgctcctcgtcaatccgtatgacctgtcgcagatggccgaggcgctcgagcgcgcgctgtcgatgccgctcgcggagcggcaggcgcgccacgaggaaaacctcgcgcggttgcgtgtgaacgacctgtcggtctggcgcgatacgttcgtcgccgacttgcgcagtgtcgcggctgccgcgtcggtcacgcggcgcgcgggccggcgggtcgcgcatgcgtga

SEQ ID NO: 145526 - protein, 473 aa, Burkholderia sp. 383
MSRLIVVSNRVAAGEDTRPSAGGLAVGVMDALKETGGVWFGWNGEIVDAPDTEPAIQQDGNVTYATVGLNRRDYDQYYRGFSNATLWPVFHYRGDLARFDRQEYAGYLRVNAMLAKQLAALLRPDDLIWVHDYHLLPFAHYLRELGVKNPIGFFLHIPFPSPDMLRLVPPHEELVKFMCAYDVAGFQTETDKQAFTDYIERRGIGAASDDGMLHAHGRVVKVAAYPIGVHPDAIAQAAVQYSARKPVKMLREALDGRKLVMSVDRLDYSKGLVERFQSFERMLANAPGWQGRVSLLQIAPPTRSDVKTYQDIRETLEGEAGRINGRFSQLDWTPIQYLNRKYERNLLMAFFRMSQVGYVTPLRDGMNLVAKEYVASQDPADPGVLVLSEFAGAAAELTGALLVNPYDLSQMAEALERALSMPLAERQARHEENLARLRVNDLSVWRDTFVADLRSVAAAASVTRRAGRRVAHA

SEQ ID NO: 145527 - DNA, 1407 bp, Burkholderia sp. 383
  CDS (1)..(1407): transl_table=11
gtgagccgactcgtcgtcgtatccaatcgcattgcagatcctcgtaaagccgcggccggcgggctcgccgtcgccgtgaaagacagcctgcaggaatccggcggtgtctggttcggctggagcgggaggctgcgcggcggcgacgatcaacctacgcatggcgacgaggtgcagatccagaacgtcggcggcatccagctcgcgacgatcgatctcgacccgcaggattacgacgcgtactacctcggttattcgaacaacgtgctgtggccggtgtttcactaccggctcgatctcgcgcagttcgaccgccgcttcgccgacggctaccggcgcgtcaaccagctgttcgcgcgcaagctgcgcacgctgctgcggcccgacgacaccatctgggtccacgactaccagctgattccgctcgccgccgagttgcgcgcgatgggctgcacgaatccgatcggcttcttcctgcacatcccgatgccgccgccgccgatcatggccgcgatcccggaacacgaatggctgatgcgttcgctgttcgcctacgatctcgtcggcttccagaccgagtcggatctgctccacttcgagcattacgtcgaagcggaagccggcgctgcacggctacccgacggccgcctgcgcgcgttcggccgcacgctgtcggccggcgcattcccgatcggcatcaacgtcgacgagttcgaatcgctcgcgcgcgatcgcgacggcatcgacatgttcgagcggatgcgcgacgagtattcgcgccgccagctgctggtcggcgtcgaccggctcgactacacgaagggattgccgcagcgcgtgcatgcgttccgccagttgctcgagcagtatccggagaatcgcaaccgcgcgacgctgatccagatcgccgcgccgagccgcgaggatctcggcgcgtacgacgacctgcggcgcgagatggacagcctgtgcggcgcgatcaacggcgactacggtgagctcgagtggatgccgatgcgctacattcaccgcaccgtcgcgcgcaagcgcttgccgggcctttatcgtgcgagccgcgtcgcgctcgtcacgccgctgcgcgacgggatgaacctcgtcgcgaaggaattcctcgccgcgcaggacgccgccgatccgggcgtgctcgtgctgtcgcgtttcgccggcgcggccgaacagttgaagtcggcgctgctcgtcaatccgtacgacacgcaaggcaccgcacaggcgattcagcgcgcgctcgcgatgccgctcgaagaacgccgccagcgtcacgcggcgttgatggcgatcgtgcgcaagaccgacgtgcactggtggcgtacgcgctttctcgacgcgctcgccgaagccgccgaagtcgcggccgcgaccgaatcctga

SEQ ID NO: 145528 - protein, 468 aa, Burkholderia sp. 383
MSRLVVVSNRIADPRKAAAGGLAVAVKDSLQESGGVWFGWSGRLRGGDDQPTHGDEVQIQNVGGIQLATIDLDPQDYDAYYLGYSNNVLWPVFHYRLDLAQFDRRFADGYRRVNQLFARKLRTLLRPDDTIWVHDYQLIPLAAELRAMGCTNPIGFFLHIPMPPPPIMAAIPEHEWLMRSLFAYDLVGFQTESDLLHFEHYVEAEAGAARLPDGRLRAFGRTLSAGAFPIGINVDEFESLARDRDGIDMFERMRDEYSRRQLLVGVDRLDYTKGLPQRVHAFRQLLEQYPENRNRATLIQIAAPSREDLGAYDDLRREMDSLCGAINGDYGELEWMPMRYIHRTVARKRLPGLYRASRVALVTPLRDGMNLVAKEFLAAQDAADPGVLVLSRFAGAAEQLKSALLVNPYDTQGTAQAIQRALAMPLEERRQRHAALMAIVRKTDVHWWRTRFLDALAEAAEVAAATES

SEQ ID NO: 145529 - DNA, 1455 bp, Desulfovibrio desulfuricans G20
  CDS (1)..(1455): transl_table=11
atgacgccagcaaagggcctgatcgtcgtatccaaccggcttcccgtcgtgttgtccagaaatgaagacgggtggggaataacgaccggtgccggagggctggtttctgccatggctccggtactgagagaccggggaggcacctgggtgggatggaccggcgccagcggtgaacatgaggccgaatcacttctgggcgagttttcccgtgaggccggctattccctcaagccggtcaggctggagaaagaagatgtggccgatttttactatggctttgccaacgaggttatctggccgctgtttcatgatttccagtcgctgtgcaatttttttccgaaatactggaaatcgtacctgcgggtgaacgagttgtatgcccgtgctgtcatggattccggcgatccggaagcgtacgtctgggtgcatgactatcacctgatgcatgtgggcgaaatgctcaagtccatgggcagcaggcgcagggcaggtttttttctgcacattccttttcccccgatggataattatctgaagctgccgtggcggcgcagactgctgtccgcgttgctggagtatgatcttgtggggtttcagacctatcgtgaccgcagaaatttcatgcagtcggtacaggtgctgcttcctcatgtgaaaccgcaggggagggggcctgtaatcgaactgctgctggacgggcgcaaggtaaggctgggggcttttcccatcagcatcgattaccggtcttttgtccgtacggcacgttctcctgcggtgtccggcagggtgaacgagctgaaaagcgccatggacgggcgcaggatgcttctggccgtggaccggcttgattattctaaaggcataacattccggctggaggcctttcgggaagcgctggaaaaataccccggactgcggggcaatgtcaccctgatgcagataatggttcccagccggcaggaggtgcccagatacaacgccctgaagcaggaaattgaaaggctggtcggggaaatcaacgggctgttcagcagaccgggctggaatcctgtgcagtaccagtacagaagccttggcagggaagagcttgtggcgtattacagggccgcttcgatggccatagtcacccctctgcgtgacggcatgaatctggtggccaaagaatactgcgcctgcaatgtgaaccggcggggcgtgctgttgctcagcgaatttgccggtgccgcagcgcagctgcagaacggagccgtgctggtgaacccttttgacagggaaggcatggcgcagagcatcaaagaggctctggatatgcctgccgaggaagcacgccgcaggatggacagaatgcgggacgtgattcgaaaaaatgatattttccgctgggtggatatgtttctgctggctgcgttttcgcgccatcttgatgactttccgccgacctatgcccgtaaataa

SEQ ID NO: 145530 - protein, 484 aa, Desulfovibrio desulfuricans G20
MTPAKGLIVVSNRLPVVLSRNEDGWGITTGAGGLVSAMAPVLRDRGGTWVGWTGASGEHEAESLLGEFSREAGYSLKPVRLEKEDVADFYYGFANEVIWPLFHDFQSLCNFFPKYWKSYLRVNELYARAVMDSGDPEAYVWVHDYHLMHVGEMLKSMGSRRRAGFFLHIPFPPMDNYLKLPWRRRLLSALLEYDLVGFQTYRDRRNFMQSVQVLLPHVKPQGRGPVIELLLDGRKVRLGAFPISIDYRSFVRTARSPAVSGRVNELKSAMDGRRMLLAVDRLDYSKGITFRLEAFREALEKYPGLRGNVTLMQIMVPSRQEVPRYNALKQEIERLVGEINGLFSRPGWNPVQYQYRSLGREELVAYYRAASMAIVTPLRDGMNLVAKEYCACNVNRRGVLLLSEFAGAAAQLQNGAVLVNPFDREGMAQSIKEALDMPAEEARRRMDRMRDVIRKNDIFRWVDMFLLAAFSRHLDDFPPTYARK

SEQ ID NO: 145531 - DNA, 1383 bp, Rhodospirillum rubrum ATCC 11170
  CDS (1)..(1383): transl_table=11
gtggctcgtcttatcgttgtctccaaccgcgtggcgcttcccgaggatcaagccggccgcgcggggggattggccgtggctttgcgcgaagcgctggtctcgtttggcgggatctggtttggctggagcggcaaggtcgccgcccagacatcggaccggccgcgcttcatcgaggaaggcccggtcacctatgcggtgctcgatcttggccgcaaggatcacgcccagtattacaacggtttcgccaatcgcaccctgtggccgctttttcattatcgcatggggttggccgaattcacccgccaggactacgaaggctatatgcgggtcaatacggttttcgccgagcagcttcaaccgctgctgaccgatgatgatctgatctgggtccatgattatcacctgatcccgctggggggagaactgcgccgcctgggggcgcgccagcgcatgggcatcttcctgcacacgccctttccggcgatggaggtattgctggccctgacccaccatcgccgactggtcggttcgctgtgcgcctatgatgtcgtcggcttccagaccgaaaacgaccggcgctcgttcttcgattacgtcctgcatgaagccggcggctggattggcgagaacggccatgtcaccgtctgggggcgctcgctggtcgcccgggtttatcccatcggcatcgagaaaggcgccttcgccgaggccgcccagcgcgcccagcgcacggtcgcctatcgccggctgcgcgccagcctgaacggccgcaagctgatgatcggggtcgagcgcctggattattccaagggcctgcccgaacgcttcgaggctttttcgcgcctgctcgaaaagcatcccgagcatcgcgccaaggtcagtttcatgcaggtcgcgccaatttcccgctccgaggttcccgaataccggcgcctgcgcgaggaactcgaaagcctgtcgggccagatcaatggccagttcggcgattacgattgggtgccaatccgctacctcacccgcaacttcgccagatcggtcctggccggtttctaccgacaaggggccgtcggcgttgtcacgccaatgcgcgatggtatgaatcttgtggcaaaagaatacgttgccagccagaatccccaggaccccggggtgctggttctttcgcgcttcgccggggcggcccgcgaactgacaacggcgcttcaggtcaaccccttcgaccgcgaggatatggccgatgccatggacagggccttgggcatggctttggacgagcgcaaggagcgttgggttgaaatgatgcgtatggtcgatgaaaactcgctggaagcttggcgcgagaagtatctggccgatctgaacgcggcgccgttcaatggctga

SEQ ID NO: 145532 - protein, 460 aa, Rhodospirillum rubrum ATCC 11170
MARLIVVSNRVALPEDQAGRAGGLAVALREALVSFGGIWFGWSGKVAAQTSDRPRFIEEGPVTYAVLDLGRKDHAQYYNGFANRTLWPLFHYRMGLAEFTRQDYEGYMRVNTVFAEQLQPLLTDDDLIWVHDYHLIPLGGELRRLGARQRMGIFLHTPFPAMEVLLALTHHRRLVGSLCAYDVVGFQTENDRRSFFDYVLHEAGGWIGENGHVTVWGRSLVARVYPIGIEKGAFAEAAQRAQRTVAYRRLRASLNGRKLMIGVERLDYSKGLPERFEAFSRLLEKHPEHRAKVSFMQVAPISRSEVPEYRRLREELESLSGQINGQFGDYDWVPIRYLTRNFARSVLAGFYRQGAVGVVTPMRDGMNLVAKEYVASQNPQDPGVLVLSRFAGAARELTTALQVNPFDREDMADAMDRALGMALDERKERWVEMMRMVDENSLEAWREKYLADLNAAPFNG

SEQ ID NO: 145533 - DNA, 1458 bp, Moorella thermoacetica ATCC 39073
  CDS (1)..(1458): transl_table=11
atgtcccaaaagcagcctgctaaaattgtcatggtttccaaccgaggttcatataatttgcaggcaacccgggacggtatccaggttgtaccggccatcagcggactggtttcggccgtggaacccttcttaagggaaaaaggtggcgtctgggttgcctggggtggccgggaggcgccccaggagaacagtcccggtttacgtttaccggtacccgagggtaatccggcctatacttttcgtgaagttccccttaccgccgatgaaatcaacctctattaccatggctttaccaatagcgccttgtggcccctatgccattactttttagaaaaatgtcgttatgaagtccgggaatggtcggcgtatgtcgatgttaatgccaaatttgccgcagccaccctggaagaagccggggaaagggatacagtctgggtaaatgattatcacctggccctggtaccggcccacctccgccaccgcaggccccaattaaaacaattcttcttctggcatatacctttcccccaccatgacctgctggcgaccctaccctgggcaacccatatcctgcgcggtctgctaggaaccgatgtcctgggttttcaccttcaagcctacgttgacaattttttgcaggccgtggcgcacatgctgggagccagggtcgattttgaagccggtattgtcttctgggagcagcggcgcattcatgttggtgcctggcctatgggcatagattatcaagccttccagcgccaggctgccagtccagccaccatggccagggctcaaaaactgcgggaacaaattggtgtcgagcgcctggcgttaagcgtggagcgcctcgattataccaagggcatcctggaaaggctcctggcgtgggaacgtctgctggaagaagcccccgaatggcgcggccgggccgccctgatccaggtcgccgttcccagccggacagctgtaccggcctatcgtcagttaaaggagcaggtggaagccactgtaggccgcatcaacggccgttttagtgacggcaactaccaaccggtatactatttctggcgcggcctcccccggcgggagctggtagcctattacctggcagccgatgtgatgctggtcacacccttaagagacggcttgaacctggtggccaaggaatatgtagcttcgcggcgtgatcagaccggcgtcctggtcttgagccgtttcgccggtgccgcccaggaattgaagggtgccgtcctggtgaacccctatgacatcgacgggatggccatgatctttaatacggccctggggatgggccgggcagagcaaagcaaaaggttgcaactgttacaggaaagggtacggcgccatgatgtccactggtggatgaattgttttcatcaggccatggccgtcagggaaggagaaaccggtgatgtctccggatcagctggcagctag

SEQ ID NO: 145534 - protein, 485 aa, Moorella thermoacetica ATCC 39073
MSQKQPAKIVMVSNRGSYNLQATRDGIQVVPAISGLVSAVEPFLREKGGVWVAWGGREAPQENSPGLRLPVPEGNPAYTFREVPLTADEINLYYHGFTNSALWPLCHYFLEKCRYEVREWSAYVDVNAKFAAATLEEAGERDTVWVNDYHLALVPAHLRHRRPQLKQFFFWHIPFPHHDLLATLPWATHILRGLLGTDVLGFHLQAYVDNFLQAVAHMLGARVDFEAGIVFWEQRRIHVGAWPMGIDYQAFQRQAASPATMARAQKLREQIGVERLALSVERLDYTKGILERLLAWERLLEEAPEWRGRAALIQVAVPSRTAVPAYRQLKEQVEATVGRINGRFSDGNYQPVYYFWRGLPRRELVAYYLAADVMLVTPLRDGLNLVAKEYVASRRDQTGVLVLSRFAGAAQELKGAVLVNPYDIDGMAMIFNTALGMGRAEQSKRLQLLQERVRRHDVHWWMNCFHQAMAVREGETGDVSGSAGS

SEQ ID NO: 145535 - DNA, 1419 bp, Burkholderia thailandensis E264
  CDS (1)..(1419): transl_table=11
atgagcagattgatcgtggtatcgaatcgcgtggcggccggccaggatgcgcgcccgacggcgggcgggctggcggtcggcgtgctcgacgcgctgaaggagacgggcggcgtctggttcggctggaacggcgagatcgccggcgcgcccgaggagcccgcgatcgagcgggacggcaacgtgacttacgcgaccgtcggcctgacccgccgcgactacgaccagtactatcgcggcttctcgaacgccacgctctggcccgtgttccactatcgcggggatctcgcgcgcttcgaccgtcaggaatatgcgggctatctgcgcgtgaactgcgcgctcgcgaagcagttgcgcgcgctcgtgcagcccgacgacatcatctgggtgcacgactatcacctgctgccgttcgcgcactgcctgcgcgagctcggcgtgaagaatccgatcggcttcttcctgcacattcctttcccgtcgcccgaggtcctgcggaccgtaccgccgcacgaagagctgatgaagttcatgtgcgcgtacgacgtcgtcggcttgcagacggagggcgacaagcaggcgttcgtcgattacatcgagcgccgcgggctcggcacgtcgagcgaggacgggattctgcatgcgcacggccgcgtcgtgaaggtcgccgcgtatccgatcggcatctatccggacgcgatcggcaaggcggccgtcgaatacggctcgcgcaaggcggtgaaggcgctgcgcgacacgatgcgcgagcgtaagctcgtgatcagcgtcgaccgactcgactattcgaagggcctcgtcgagcgctttcaggcgttcgagcggatgctcgcgaacgcgcccggctggcagggccgcgtgtcgctcgtgcagatcgcgccgccgacccgctccgacgtgcagacctatcagcggatccgccagacgctcgagggcgaggcggggcgcatcaacggccgcttcgcgcaactcgactggacgccgatccagtacctgaaccgcaagtacgagcgcaatctgctgatggcgctgttcaggctgtcgcaggttggctatgtgacgccgctgcgcgacgggatgaacctcgtcgcgaaggagtacgtcgcgtcgcaggatccgaacgatccgggcgtgctcgtgctgtccgagttcgcgggcgccgcggccgaactgccgggcgcgctgctcgtgaatccgttcgatctgtcgcagatggccgaatcgctcgagcgcgcgcttgcgatgccgctcgaggagcggcaggcgcgtcacgcggagaacatcgcgcggctacgcaagaacgatctgtcggtgtggcgcgattcgttcctcgcggatctgcgcagtgtcgcgacggccgcgtccgtcacgcagcgcgcgggcaggcgtgtcgcgaatgcttga

SEQ ID NO: 145536 - protein, 472 aa, Burkholderia thailandensis E264
MSRLIVVSNRVAAGQDARPTAGGLAVGVLDALKETGGVWFGWNGEIAGAPEEPAIERDGNVTYATVGLTRRDYDQYYRGFSNATLWPVFHYRGDLARFDRQEYAGYLRVNCALAKQLRALVQPDDIIWVHDYHLLPFAHCLRELGVKNPIGFFLHIPFPSPEVLRTVPPHEELMKFMCAYDVVGLQTEGDKQAFVDYIERRGLGTSSEDGILHAHGRVVKVAAYPIGIYPDAIGKAAVEYGSRKAVKALRDTMRERKLVISVDRLDYSKGLVERFQAFERMLANAPGWQGRVSLVQIAPPTRSDVQTYQRIRQTLEGEAGRINGRFAQLDWTPIQYLNRKYERNLLMALFRLSQVGYVTPLRDGMNLVAKEYVASQDPNDPGVLVLSEFAGAAAELPGALLVNPFDLSQMAESLERALAMPLEERQARHAENIARLRKNDLSVWRDSFLADLRSVATAASVTQRAGRRVANA

SEQ ID NO: 145537 - DNA, 1377 bp, Burkholderia thailandensis E264
  CDS (1)..(1377): transl_table=11
atgagccgtctcatcatcgtctcgaatcgggtcgcgccgatttcggaaggggagcccgccgcgggcggtctcgcgatcggtgtctacgacgcgctgaaggaaacgggcggcacgtggttcggctggagcggcgaggttgtcgcgtcgggcgcgccgcagattcgcgtcgaggagcacggccccgtcacgttcgcgacgatcgggctgtcgcgccgcgattacgatcagtactaccgaggcttctcgaacgcgacgctgtggccggcgttccattaccgcgcggacctgattcagttcgatcgccacgagttcgagggctattcgcgcgtgaacgtgtggctcgcgcggcagctcgtgccgctgttgcgcgacgacgacgtgatctgggtgcacgactatcacctgattccgttcgcgcaggcgctgcgcgcggccggcgtgaagaaccggatcggcttcttcctgcacattccgtttccggccgcgcaggtgctcgtcaacgtgccgccgcatcgggagcttgtcgaggcgctgtgctcgttcgatctgctcggcttccagaccgacaccgatctgcgcgcgttcttcgaatacgtcgaatgcgaggcgggcggcgcggtcgaccgcgccgcgcacccggcgcgcgtcgaggcgttcgggcgcacgctgcgcgcggccgcgtatccgatcggcgtctatccggacgagatcgccgcgctcgcgaaggcgggcgagaacggccgcgcggtgaaggcgctcgcggcgtcgctgcgcgggcggcagctcgtgatgagcgtcgaccggctcgattactcgaaggggctcgtcgagcgctttcgcgcgttcgagaagctgctcgagcacgagacgtcgtttcgcaatcacgtgtcgttcctgcagatcgcgccgtcgacgcgcgccgacctgcgcgcgtaccaggacatccgccgtcagctcgaaggcgagtcggggcgcatcaatgggcgcttcgcggagctcgactgggcgccgatcctctacatccatcggcagtacgagcggccggtgctggccgcgctgtaccggctcgcgcgtgtcggctacgtgacgccgctgcgcgacgggatgaatctcgtcgcgaaggagtatgtgtccgcgcaggacccggacgatcccggcgtgctggtgctgtcgcgcttcgcgggcgcggcgtgcgagcttacgggcgcgctgatcgtcaatccgatcgacatcgccgggatggccgacgcgttgtcgcgcgcgctgtcgatgccgctcgccgagcggcgcgcgcgtcacgccgacatgctcgcgcggctgcgcgagaacaacgtgtcggtgtggcgcgacaacttcttgcgggatctcgggcgatag

SEQ ID NO: 145538 - protein, 458 aa, Burkholderia thailandensis E264
MSRLIIVSNRVAPISEGEPAAGGLAIGVYDALKETGGTWFGWSGEVVASGAPQIRVEEHGPVTFATIGLSRRDYDQYYRGFSNATLWPAFHYRADLIQFDRHEFEGYSRVNVWLARQLVPLLRDDDVIWVHDYHLIPFAQALRAAGVKNRIGFFLHIPFPAAQVLVNVPPHRELVEALCSFDLLGFQTDTDLRAFFEYVECEAGGAVDRAAHPARVEAFGRTLRAAAYPIGVYPDEIAALAKAGENGRAVKALAASLRGRQLVMSVDRLDYSKGLVERFRAFEKLLEHETSFRNHVSFLQIAPSTRADLRAYQDIRRQLEGESGRINGRFAELDWAPILYIHRQYERPVLAALYRLARVGYVTPLRDGMNLVAKEYVSAQDPDDPGVLVLSRFAGAACELTGALIVNPIDIAGMADALSRALSMPLAERRARHADMLARLRENNVSVWRDNFLRDLGR

SEQ ID NO: 145539 - DNA, 2247 bp, Syntrophus aciditrophicus SB; identical to SEQ ID NO: 79102
  CDS (1)..(2247): transl_table=11

SEQ ID NO: 145540 - protein, 748 aa, Syntrophus aciditrophicus SB; identical to SEQ ID NO: 79103

SEQ ID NO: 145541 - DNA, 1554 bp, Syntrophus aciditrophicus SB
  CDS (1)..(1554): transl_table=11
atgggccgctctcgccccggagggattatccggaggagtgacatggaaacgcgaaggttagccgtgatatcgaaccgtctccccatcgttctgaaaaaagcgaaacggggaaaatgggagattgaaccgggatcgggggggctggtgacggccttggggcctgtcctcaaaaatcgtgacgggatatggatcggctgggtcggcacaaatgccgaggaaaccccggcaggccctctccttgcggatctgctttcacgggggacccgggagacgggttactccctgaagccggtgaatctgtcgcgagacgaagtgaaaaagtactatcacggcttttccaacgaggtcctctggcctctgttccacgacctcttttcgcggtgtcggttcgatcccgcttactggacgtgctatgaacaggtaaatcggaaattcgcgcaggccgtcgttcagaacacggaagagagcgattacgtgtgggttcaggactaccagctcatcctggtcggcagggagcttaaacgcctggggattaaacgccggacaggtttttttctccacattccttttccccccctcgatattttccttaagcttccctggcggttcgaaatcctggaggcgcttctggcatatgatctgattggttttcagaccgtcagagatctgcggaatttcatcgggtgcgtgcgtgccctcttccgttacaaggtcatgaaatcaagatatatgagcagaattcttctgccggacagggaaactctcgtgggagcatttcccatcagcatcgatttcaacgagttcgaagagcttgccagaaccgatgaagtggctgaagcggcatggatcctccattccaaccttcccaacagacaactgatcctgggtgtggaccgccttgattataccaagggcattcccgagcgcctgctggcattcggacatgccctggcctgctatccggacatgcgcaaaaaggtcactttgatccaggtcgtggttcccagtcgggtgggcgtggaagaatatggaaatctcaaacaggagatcgagcgcatcgtgggagagatcaacgggaaattcaccgagatcggctggatgccgatccattatgtatatcgatcattgccacgccaggaacttctcgcttattacaaaacctgcgagattgcactggttaccccgttgaaagacgggatgaacctcatcgccaaggaatactgcgcgagcaatatcgaggaaaaaggcgtccttattctgagtgaatttgccggcgccgcttcccagctctaccacgatgcgctcctggtcaatccctatgacaggcggcaagtggcggatacgatccataccgccttcgttatggaatatgaagaacgccagattcggatgcgaaggctcagacgatccatcaggaagcacgatattatcaagtgggtcaattctttcctgcaggcaggcatcgctcagaacctgaaggattttccacaggctgagttctttgtcccctcgccgaacggggattcggaaaagatgaacaacagacctgcctga

SEQ ID NO: 145542 - protein, 517 aa, Syntrophus aciditrophicus SB
MGRSRPGGIIRRSDMETRRLAVISNRLPIVLKKAKRGKWEIEPGSGGLVTALGPVLKNRDGIWIGWVGTNAEETPAGPLLADLLSRGTRETGYSLKPVNLSRDEVKKYYHGFSNEVLWPLFHDLFSRCRFDPAYWTCYEQVNRKFAQAVVQNTEESDYVWVQDYQLILVGRELKRLGIKRRTGFFLHIPFPPLDIFLKLPWRFEILEALLAYDLIGFQTVRDLRNFIGCVRALFRYKVMKSRYMSRILLPDRETLVGAFPISIDFNEFEELARTDEVAEAAWILHSNLPNRQLILGVDRLDYTKGIPERLLAFGHALACYPDMRKKVTLIQVVVPSRVGVEEYGNLKQEIERIVGEINGKFTEIGWMPIHYVYRSLPRQELLAYYKTCEIALVTPLKDGMNLIAKEYCASNIEEKGVLILSEFAGAASQLYHDALLVNPYDRRQVADTIHTAFVMEYEERQIRMRRLRRSIRKHDIIKWVNSFLQAGIAQNLKDFPQAEFFVPSPNGDSEKMNNRPA

SEQ ID NO: 145543 - DNA, 1533 bp, Frankia sp. CcI3
  CDS (1)..(1533): transl_table=11
gtgtcggacttcaacccgctcgacctgtcgctcgacctgccgctcgtgctgctgtccaatcgcggtccggtcaggttcgaccgggacgccaccggtcgtaccgtcaccaggggggcgggcggcctcgtctcggccctgtccggactcgccgagcatctcgacgacgcggtgtgggtgtgcggcgcagccagcgaggaggacgtcgccgtcgccggggagagcgccgggagctccatcctcgtccagacctatccctcgccccggctcgtggagggcgacccggacggccccgccatccgggtccggctcgtcgttaccgatccgaccgcctacgccgacttctacagcgtgtggtccaacccggtcctgtggttcatccagcacggcctctacggccgatcgctgtcaccggtgttcacccgggccgagcacgacgccttcgagaacggctacgcggcggtcaaccgggcctacgccgacgcggtggttgacgaggtgcgcgcgcggggtggcaaggcgctcgtcctgctgcaggactaccacttctacctcgtggctgactgggtgcgggagcagtgcccggatgcggtgctcacgcatttcatccacattccctggccggggccggacgagtggcgcatcctgcccgccgacatccgggagcgactactgcgcgggctgctcggtagtgatgtggtcggtttccatacccggcgctacgcccgcaacttcgtcctgtgcgcccaggagctgctcggcctgccgatcgacctggagcagctgacggtgacggtggcggaccgggtggtccgcgcccggtaccacccgatctcggtcgacccggcggcgctggacgctacgcaggcctccgaggaggtggcggcgcatgtggcgatgctgcgctacatcttcctcgacgatgaccgtcagctcatcctgcgggtggaccgcaccgaccccagcaagaacgtcgtgcgtggctttctggccttcggcaccctactcgatcagcatccggagctggtgggcaaggtcagcttcctggcgctgctgcagcccagccgcaccgacgtgccggagtacgccgactacatcgccctgatcggcgcggtcgtcgcggagatcaacgcccggcataccaaggaggggcgccagccgatcgacctgcggatggtcgaggacttcccgctcgccgtggcggcctactccatctgtgacgttctgatcgtcaacgcgatcgccgacgggatgaacctggtcgcgaaggaggtcgcggtcgtcaaccggcgtggcggcgtgctggcgctgtcggagatggccggggcgcacgaggagctgggcgagttcgccgttaccctgcaccccttcgacgtgcagcagatggccgacgccctgtacaccgcgctgacgatgccgatggaggagcgccatcgtcggctcgccgcggcagccagacaggtccgcacccacgacgtgcggcgctggctcgacgaccagttggtggacttgcggcgggtcgccggattcgggtga

SEQ ID NO: 145544 - protein, 510 aa, Frankia sp. CcI3
MSDFNPLDLSLDLPLVLLSNRGPVRFDRDATGRTVTRGAGGLVSALSGLAEHLDDAVWVCGAASEEDVAVAGESAGSSILVQTYPSPRLVEGDPDGPAIRVRLVVTDPTAYADFYSVWSNPVLWFIQHGLYGRSLSPVFTRAEHDAFENGYAAVNRAYADAVVDEVRARGGKALVLLQDYHFYLVADWVREQCPDAVLTHFIHIPWPGPDEWRILPADIRERLLRGLLGSDVVGFHTRRYARNFVLCAQELLGLPIDLEQLTVTVADRVVRARYHPISVDPAALDATQASEEVAAHVAMLRYIFLDDDRQLILRVDRTDPSKNVVRGFLAFGTLLDQHPELVGKVSFLALLQPSRTDVPEYADYIALIGAVVAEINARHTKEGRQPIDLRMVEDFPLAVAAYSICDVLIVNAIADGMNLVAKEVAVVNRRGGVLALSEMAGAHEELGEFAVTLHPFDVQQMADALYTALTMPMEERHRRLAAAARQVRTHDVRRWLDDQLVDLRRVAGFG

SEQ ID NO: 145545 - DNA, 1395 bp, Novosphingobium aromaticivorans DSM 12444
  CDS (1)..(1395): transl_table=11
atgagcaggctgatagtcatttcgaaccgcgtcagcgccggtgggggcgcgcaaggcggacttgccgtcgcgctttcggcggccttgcgcgaacatggagggatctggttcggctggtccggcaacgagaccagcgagtttaccggccacatcaacatggaacgcgtcgatggcgtgaccacggccacggtggatctggaagagcaggacatcgaggaatactacgatggctacgccaaccgtacactctggccgctgttccactaccggatcgacctggccgaatacgaacgcagcttcgccgatggctacaagcgcgccaacgaacgctttgccgaaacggcactgccgctgatcgagccggacgatctggtctgggtccaggattaccatatgtttccgctgggcaaggaactgcgcgcgcgcggggtcgaaaaccggatcggcttcttcctgcacattccctggccgccccgccgcctgctggcgaccttgcccgaggcacgcgcgctgaccgaaagtcttctcgcctatgacctgatcggcttccacaccgaggaatggctgcaatccttttgcgattacgtgtcgcacgaactgggcggtacgatcggcgacgatggctggctgtccgtgggcgagcgccgtgtgcgtctgatcgcttgcccggtcggcatcgatgcaaaggaatttgccgcccttgccgcaagcgaaaaggccaaggaaacctacgaacgtgtccgtgtgagtgccgttgggcgcacgatgatcgtcggggttgatcggctggactattccaagggcctggaagagcgcttcctcggctacgagcggttccttgtcgagcacccggaggagcgcaaggaagttaccctcttgcagatcgccccgccctcgcgcggcacggtcgacagctaccagcgcatccgcagcacgctcgaaggtttggccggacgcataaacggggcccatgcaggtcttgattgggttccgatccgatacgtgaaccaaggctacacgcgcgacatgcttgccggggtctatcgcgccagcaaggtggggcttgtcacccccttgcgcgatggcatgaaccttgtcgccaaggagtatgtcgccgcgcaggatcccggtgatcccggcgtgctgatcctgtcacgctttgccggtgcggcagagcagatgcccgaagcgctgctggtcaatccgcacagcgctgaagagatatccgacgctttgagccgcgccatcacgatgccgggtgaagaacggatccgacgttggcgaacgctcatgaatggcgtggaacagcacgacgtgacgtggtggtcgaagcattttaccgacgcgcttaaggactgccatgaacacgcttgcggctcggtacacagaaactga

SEQ ID NO: 145546 - protein, 464 aa, Novosphingobium aromaticivorans DSM 12444
MSRLIVISNRVSAGGGAQGGLAVALSAALREHGGIWFGWSGNETSEFTGHINMERVDGVTTATVDLEEQDIEEYYDGYANRTLWPLFHYRIDLAEYERSFADGYKRANERFAETALPLIEPDDLVWVQDYHMFPLGKELRARGVENRIGFFLHIPWPPRRLLATLPEARALTESLLAYDLIGFHTEEWLQSFCDYVSHELGGTIGDDGWLSVGERRVRLIACPVGIDAKEFAALAASEKAKETYERVRVSAVGRTMIVGVDRLDYSKGLEERFLGYERFLVEHPEERKEVTLLQIAPPSRGTVDSYQRIRSTLEGLAGRINGAHAGLDWVPIRYVNQGYTRDMLAGVYRASKVGLVTPLRDGMNLVAKEYVAAQDPGDPGVLILSRFAGAAEQMPEALLVNPHSAEEISDALSRAITMPGEERIRRWRTLMNGVEQHDVTWWSKHFTDALKDCHEHACGSVHRN

SEQ ID NO: 145547 - DNA, 1383 bp, Burkholderia xenovorans LB400
  CDS (1)..(1383): transl_table=11
atgagtcgcctggttgtggtctcaaatcgtacggtcgacccacgtaaaactgctgccggcggcctcgctgtcgctgtgcgggaaagtcttcagcgcaccggtggcctttggttcggctggagcgggaaaatctacgacgagtcggatgagatgacaagccggcgtggcgttcacgtgcaaacactcggcaatgtcacactcgccacagtcgatctgagccagcaggatcatgacaactactatctcggctatgcgaacggagtgctgtggccggtctttcactatcggctggatctcgcggacttcgacacgcgcttcgctgccggttaccggcgcgtgaaccagctgtttgccgagaaactccttccactgctcagacccgatgacatcatctgggtgcacgactatcacctgattccgcttgcagcggaattacgcgcaataggctgtggtaaccgtatcgggttctttctgcatattccaatgccgccgccgatgatcatggcagccattccggaacacgaatggttgatgcgttcgttgttcgcctatgatctcgtgggcttccaggggcagatcgacgtcgagcactttacgcattacgccgaatccgaagcgaacgccagacaggtcggcccgcaacaactccgtgcattcaatcgcacattgagactgggtgcgtatcccatcggaatcgatgtggaggagttcgtcagtctcgccaatggcaaggaagcgcgcgagatgttcacgcggatgcgtgacgagtattcgcgtcgacgcctgctgctaggcgtcgaccggctcgattactccaaaggcttgcctcagcgcattcacgcgtttcgagaactgcttgcacactatccagagaatcgcgatagcgcgaccttgatccagattgcgtcgcctagccgcgaaagcgtggctgcctatgacgatcttcgtcgtcagatggacagcctgtgcggcgcgatcaacggcgactacggtgaactggactggatgccggttcgctacattcaccggcacgtggcacgcaagcgcctgcctggtctttatcgcgcgagcaaggtcgcgctggtcactccgctgcgcgacgggatgaatctcgtcgccaaggaatttatcgccgcacaggatccgtctgatcccggcatgttggtactgtcccgtttcgccggcgccgcggagcaactcaaggaagcgttgctggtcaatccctacgacacgcaaggcaccgcgcatgccatccaaagggcgctgaccatgccgctcgatgaacgtcgcaatcgtcatgctgcactgatgaaaaggattcgcgagcatgacgtccactggtggtcttccagtttcctggacacactccaggatattccttga

SEQ ID NO: 145548 - protein, 460 aa, Burkholderia xenovorans LB400
MSRLVVVSNRTVDPRKTAAGGLAVAVRESLQRTGGLWFGWSGKIYDESDEMTSRRGVHVQTLGNVTLATVDLSQQDHDNYYLGYANGVLWPVFHYRLDLADFDTRFAAGYRRVNQLFAEKLLPLLRPDDIIWVHDYHLIPLAAELRAIGCGNRIGFFLHIPMPPPMIMAAIPEHEWLMRSLFAYDLVGFQGQIDVEHFTHYAESEANARQVGPQQLRAFNRTLRLGAYPIGIDVEEFVSLANGKEAREMFTRMRDEYSRRRLLLGVDRLDYSKGLPQRIHAFRELLAHYPENRDSATLIQIASPSRESVAAYDDLRRQMDSLCGAINGDYGELDWMPVRYIHRHVARKRLPGLYRASKVALVTPLRDGMNLVAKEFIAAQDPSDPGMLVLSRFAGAAEQLKEALLVNPYDTQGTAHAIQRALTMPLDERRNRHAALMKRIREHDVHWWSSSFLDTLQDIP

SEQ ID NO: 145549 - DNA, 1428 bp, Burkholderia xenovorans LB400
  CDS (1)..(1428): transl_table=11
atgagcagactgatcgtggtatcgaatcgtgtcgcgccgactcaggaaggccgtcccgcagcgggcggactggcgatcggcgtgctggacgcgctgaaggaaaccggcggagtctggttcggctggagcggcgagacggtgagcgagccgagcgctccggtgatcgagaaacagggcaacgtgacgtacgcgacggtgggtctcaccaagcgcgattacgaccagtactaccgcggtttttccaacgcgacgctgtggccgacgttccattaccgcaacgacctctcgcgctacgaccgtcaggaatacgcgggctatcagcgcgtgaacgcgacgctcgccaagcagctcaaggagctgctgaaacccgacgacatcatctgggttcacgactatcacctgctgccgttcgcgcgctgcctgcgcgagctgggcgtgaagaatcccatcggcttcttcctgcatattccgtttccggtgccggaggtgctgcgcaccattccgccgcacgaagaactggtcaaggccatgtgcagctacgacgtgatcggcttccagaccgatgcggatcgccagtcgttcgtcgacttcatcgagcgtggccagcacggcacatcgagcgaggacggcatggtgcacgcgtacaaccgcttcctgaaagtgggcgcgtatccgatcggaatctatccggacgcgattgccaaggccgccgagcagttcaccgaccgcaagccggtgcgcagcctgcgcgacggtatgcgcgggcgcaagctgatcatgagcgtggatcgtctcgactattcgaaggggctggtggagcgctttcaggcgttcgagcgactgttgctgaacgcacccggttggcacggacgcgtatcgctggtgcagatcgcgccgccgacgcgtgcggacgtgcagacatatcagcggattcggcagacgctggagggcgaagcgggccgcatcaacggccggttcgcgcagctcgactggacgccgatccagtacctgaaccgcaaatacgagcgcaatctgctgatggcgctattccgtcaatcgcaggtcggttatgtgacgccgctgcgcgacggtatgaatctggtcgcgaaggagtatgtcgcctcgcaggatccggccgatccgggcgtgctggtgctgtcgcaattcgccggcgccgccgagcagttgccgggcgcgctggtcgtcaatccgtttgatctgtcgcagatggccgaagcgcttgaacgcgctctgtccatgccgctcgccgagcgtcaggcgcggcatgccgacatgatggcgccgatgcgagagaacaatctgtcggtgtggcgcgatacgttccttgccgatctgcgcaatgtcgccacggcctcttcggtgacggccaaagcggtaaagctcgctgacgtgaccgcatcgtcgtag

SEQ ID NO: 145550 - protein, 475 aa, Burkholderia xenovorans LB400
MSRLIVVSNRVAPTQEGRPAAGGLAIGVLDALKETGGVWFGWSGETVSEPSAPVIEKQGNVTYATVGLTKRDYDQYYRGFSNATLWPTFHYRNDLSRYDRQEYAGYQRVNATLAKQLKELLKPDDIIWVHDYHLLPFARCLRELGVKNPIGFFLHIPFPVPEVLRTIPPHEELVKAMCSYDVIGFQTDADRQSFVDFIERGQHGTSSEDGMVHAYNRFLKVGAYPIGIYPDAIAKAAEQFTDRKPVRSLRDGMRGRKLIMSVDRLDYSKGLVERFQAFERLLLNAPGWHGRVSLVQIAPPTRADVQTYQRIRQTLEGEAGRINGRFAQLDWTPIQYLNRKYERNLLMALFRQSQVGYVTPLRDGMNLVAKEYVASQDPADPGVLVLSQFAGAAEQLPGALVVNPFDLSQMAEALERALSMPLAERQARHADMMAPMRENNLSVWRDTFLADLRNVATASSVTAKAVKLADVTASS

SEQ ID NO: 145551 - DNA, 1413 bp, Burkholderia xenovorans LB400
  CDS (1)..(1413): transl_table=11
atggggcgattgatcgtcgtgtcgaatcgcgtcgcaacgccgacggaaaccaagggatcggccggcggcctcgcggtcggcgtattcggcgcgctgaaggatgccggaggcgtgtggttcggctggagcggcgacgtggtcagcgagaccgtcgcgaacgccggtccgacgctggagcaggacggcgcggtgaccttcgcgaccgtagggctcacgcgcaaggattacgaccagtactatcgcggcttttcgaacgcgacattgtggccggtgttccactaccgcaacgacctcgcgcgctacgagcgcgaggaatacacgggctaccggcgcgtcaacgcgtggctcgcgcacaagctgatcaagctgctcgaacccgacgacgtgatctggattcacgactaccacctgatcccgttcgccgaggcgctgcgcaacgagggtgtcacgaaccgcatcggcttcttcctgcacattccgtttcccgcgccgcagatcctgctcaacattccgccgcacgaggaactggtgaagtcgctgtcgtgctacgacctgctgggcttccagaccgccaccgacgaactcgcgttcaaggattacgtcacgcgccacgcgcgcggcacggtgagtgcggacggtctcgtcgaagcgttcggccgcaagctgcgcaccggcgtctaccggatcggcgtgttccccgacgaaatcgccgagcaggcgaagcgctacgaaagccgtcagcacgtgctcgacctgaagcagagcctggaagggcgcaagctgatcatgagcgtcgaccggctggactattcgaagggactggtcgagcggttccgggccttcgagcatctgctggagcgctcgccggaatggcgcggcaacgtcacgctggtgcagatcgcgccgcccacccgttcggacgtcgccacctatcagaagattcgccaggatctggagtacgaagcggggcgcatcaatggccgctactcgggtctcgactacacgccgatccgctatctgaatcagcagtacgaccgctggaagctgatgtcgctgtttcgcgaatcgcagatcggtttcgtcacgccgctgcacgacggtatgaatctggtcgcgaaggaatacgtcgccgcgcagaatcccgacgatcccggcgtgctggtgctgtcgattttcgcgggtgcggcggcggagctgagcggcgcgctgctcgtcaatccacatgatgcgatcggcatgtgcgaagccttgcagcgcgcgttgcagatgccgctcgacgcacgtcagcggcgccatgaaatcaacatggccgcgctgcgcaagaacgatctcggcgtgtggcgcgacacgttcctgcacgatctgcgcagcgtgccggtgcagcagccaggcaagggtggcgggcataactga

SEQ ID NO: 145552 - protein, 470 aa, Burkholderia xenovorans LB400
MGRLIVVSNRVATPTETKGSAGGLAVGVFGALKDAGGVWFGWSGDVVSETVANAGPTLEQDGAVTFATVGLTRKDYDQYYRGFSNATLWPVFHYRNDLARYEREEYTGYRRVNAWLAHKLIKLLEPDDVIWIHDYHLIPFAEALRNEGVTNRIGFFLHIPFPAPQILLNIPPHEELVKSLSCYDLLGFQTATDELAFKDYVTRHARGTVSADGLVEAFGRKLRTGVYRIGVFPDEIAEQAKRYESRQHVLDLKQSLEGRKLIMSVDRLDYSKGLVERFRAFEHLLERSPEWRGNVTLVQIAPPTRSDVATYQKIRQDLEYEAGRINGRYSGLDYTPIRYLNQQYDRWKLMSLFRESQIGFVTPLHDGMNLVAKEYVAAQNPDDPGVLVLSIFAGAAAELSGALLVNPHDAIGMCEALQRALQMPLDARQRRHEINMAALRKNDLGVWRDTFLHDLRSVPVQQPGKGGGHN

SEQ ID NO: 145553 - DNA, 1461 bp, Burkholderia xenovorans LB400
  CDS (1)..(1461): transl_table=11
atgggccgactgatcatcgtatcgaaccgggttgcgccgatctcggagggcggcccggcggcgggtggtctggcggtcggcgtgtacgacgcactgaaggaaaccggcggcatgtggttcggctggagcggcgacgtgctcagttcgggccagccgcagatcaaggtcgaagagcgcggcccggtgaccttcgcgacgatcgcgctgatgcgccgcgattacgatcagtactaccgtggcttctcgaacgcgacgctgtggcccgcgttccactatcgcgccgacctgctgcaatacgaccggcacgacttcgagggctactggcgcgtcaatgcctggctcgcgcaacaactcgtgccgctgttgcgcgaagacgatgtgatctgggttcacgactatcacctgattccatttgcgcaggcgctgcgtgcggcgggcgtgaagaatcgcatcggcttttttctgcacattccgtttccggcttcccaggtgctgctggcagtgccgccgcatcgcgaacttgtcgaagcgctgtgttcgttcgatctgctcggcttccagactgcgccggatttgcgcgcgttctgcgactacatcgtcaatgaggcgaacggcaccgccgacccatcggcaagcggtccgctgacgatccacgcgttcggccgcacgctgcgggcggcagcttatccgatcggcgtctatccggacgagatcgccgaactcgcgaaagcgggcgagcgcggcaaaccggtgcgcacgatgaaggcgacgctgcactcgcgcaagctgatcatgagcgtggaccggctcgattactcgaaggggctggtcgagcgttttcgcgccttcgagcgtctgctcgaacactcgaccgcgcaacgcaacaaggtgtcgttcctgcagatcgcgccgccgacgcgcgccgacatgcacgcataccaggacatccgcttgcagctcgaaggggagtcggggcgcatcaacgggcgcttcgccgaactggactggacgccgattctctacatccacaagcaatacgagcgctcggtgctggccgcgctgttccgcaccgcgcatgtcggctatgtcacgccgttgcgtgacggcatgaacctcgtcgccaaggagtacgtatcggcgcaggatccggagaatcccggcgtgctcgtgctgtcacgctttgccggcgccgcgcaggaactggacggcgcgctgatcgtcaatccggtcgacatcgacggcatggccgaggcgctcgcacgggcgctcgacatgccgctcgcggagcgtcaggcgcgtcatcgcgacatgatggtgcagttgcgcgagaacaatgtgtcggtgtggcgcgataacttcatgcgcgatctgcagggcgtcgctggtgcaaagggcacccggaatgggaaggcgcgcgcagtggcggggaaaaaggcggcgcgcgaaacgcaggccgggtag

SEQ ID NO: 145554 - protein, 486 aa, Burkholderia xenovorans LB400
MGRLIIVSNRVAPISEGGPAAGGLAVGVYDALKETGGMWFGWSGDVLSSGQPQIKVEERGPVTFATIALMRRDYDQYYRGFSNATLWPAFHYRADLLQYDRHDFEGYWRVNAWLAQQLVPLLREDDVIWVHDYHLIPFAQALRAAGVKNRIGFFLHIPFPASQVLLAVPPHRELVEALCSFDLLGFQTAPDLRAFCDYIVNEANGTADPSASGPLTIHAFGRTLRAAAYPIGVYPDEIAELAKAGERGKPVRTMKATLHSRKLIMSVDRLDYSKGLVERFRAFERLLEHSTAQRNKVSFLQIAPPTRADMHAYQDIRLQLEGESGRINGRFAELDWTPILYIHKQYERSVLAALFRTAHVGYVTPLRDGMNLVAKEYVSAQDPENPGVLVLSRFAGAAQELDGALIVNPVDIDGMAEALARALDMPLAERQARHRDMMVQLRENNVSVWRDNFMRDLQGVAGAKGTRNGKARAVAGKKAARETQAG

SEQ ID NO: 145555 - DNA, 1395 bp, Ralstonia metallidurans CH34
  CDS (1)..(1395): transl_table=11
atgggaagactagtagccgtatcgaaccgggttgccgacccgcggaatcatgcggcgggcggacttgccgtcgcgctgtccgacacgttgaacaagaccggtggattgtggttcggctggagcggcaaggtagtggacgccagccgcggcggcacgcccggagagggcgagctgcaccagatccaggccggcaatgtcacgctggccacggtggatctgagccgggaggacttcgagtcctactacctgggctacagcaatggcgtgctgtggccggtattccactatcgggtggacctggccgacttcgattccggcggcaacctgaatgcctaccgccgcgtgaaccagcttttcgcgcgcaagctggcgccgctgctcaagcccgacgatgtgatctggatccacgactatcacctgattccgctggctgcggaattgcgggcgatcggttgcggccagcgcattggcttcttcctgcatatcccgctgccgccacggctgatcctggctaccattccgcagcacgagtggctgatgcgcgcgctgtttgcctatgacctgctcggcttccagagccacgacgatgtcgagcacttctcccgctatgtgcagggcgaggccggcgccgaaccgatgggcgaataccgcttccgtgcattccatcgcaccgtgcgtgcgcaggcgtttccgatcggtatcgatgtcgacgagttcatcgaactgggccgcgccgacgaagcgcgcgagacctacgagatgatgcgcggccagtacgcgcgacgcaggctgctgcttggcatcgaccgcctcgattactcgaagggcctgccccagcggctcaaggctttccagacgctgctggccgagtaccccgagaaccgttcaagcgccacgctgatccagatcgccgcgccgtcacgggaatcggtcgacgcctatgcggacctgcggcgcgacatggaaggcatcaccggcgcgatcaacggcgagtatggcgagctggactggatgccggtgcgctacatccaccgctccaccgcgcgtcgccgcctgccgggcctgtgccgtgcgtgcaacgtggcgctggtgacgccattgcgcgacggcatgaacctcgtcgccaaggaatacatcgcggcccaggacccggaggatcccggggtgctggtgctgtcccgcttcgcgggcgcggcggaacagctcaaggaagcgctgctggtcaatccatacgacacgcgtgccaccgcgcaggcgatccagcaggcactgcatatgtcgctgtcagagcgccaggcgcgtcaccagaagctgctggagcggattcgccagcaggatgtgcactggtggagcggggaatatctgcgggcgctaatggagacggaaggggggtga

SEQ ID NO: 145556 - protein, 464 aa, Ralstonia metallidurans CH34
MGRLVAVSNRVADPRNHAAGGLAVALSDTLNKTGGLWFGWSGKVVDASRGGTPGEGELHQIQAGNVTLATVDLSREDFESYYLGYSNGVLWPVFHYRVDLADFDSGGNLNAYRRVNQLFARKLAPLLKPDDVIWIHDYHLIPLAAELRAIGCGQRIGFFLHIPLPPRLILATIPQHEWLMRALFAYDLLGFQSHDDVEHFSRYVQGEAGAEPMGEYRFRAFHRTVRAQAFPIGIDVDEFIELGRADEARETYEMMRGQYARRRLLLGIDRLDYSKGLPQRLKAFQTLLAEYPENRSSATLIQIAAPSRESVDAYADLRRDMEGITGAINGEYGELDWMPVRYIHRSTARRRLPGLCRACNVALVTPLRDGMNLVAKEYIAAQDPEDPGVLVLSRFAGAAEQLKEALLVNPYDTRATAQAIQQALHMSLSERQARHQKLLERIRQQDVHWWSGEYLRALMETEGG

SEQ ID NO: 145557 - DNA, 1455 bp, Rubrobacter xylanophilus DSM 9941
  CDS (1)..(1455): transl_table=11
gtggcgcacagcggcggagtggtgatcgtttccaaccgggccccggtgaccttctcccgctccgggagcggggagagaacccactcgcggggggccggggggctggtcaccgccctgaacgccgtctcgcgccgcgccgagggggcggtctggatcgcctccgccgcctccgatgaggacgtgcgggtggcccgcgagtcggaggggccctgcgaggtcgatgacctccggctcgtcctcgtggagcacgacgcgggggcctacgacctgatgtacaaccgcctcgccaaccccctgctgtggttcgtccagcacggcctgtacgacctgccgtacgccccggagctcggcgaggagacgctgcgggcctgggaggaggggtacctgcccgtaaaccgcagcttcgcccgggccgccgcggaggcaatctccggggcggaggagccggtggtgctgctgcacgactaccacctctacatggtccccgagctgctgcgcgaggaggttggggaggggcccctgatctccttcttcgtccacatcccctggcccgagcccgacctctggcgggtcctgccctcctacatccgggagggggcgctgcgcagcctgctgcgctcggatatcgtggccttccacacccgccgctacgcccgcaacttcatggccgcggcctccgagatcctcggcgccgaggcggaccccgcgcggggaaccctccgccgcggcgggcgcgaggtgtgggtgcgctcctaccccatctccatagacccggccgagttcgaggaggtcgcggagagcccggaggtccgcagggaggaggagtacgtgcgcaacctgcccggcgcgctcctcgtccgggtggaccggaccgacctctccaagaacatcgtgcgcggtttcagggcctacggcaggatgctcgagctgcaccccgagatgcgcgggcgggtgaccttcttcgcccagctccagccctcccgcggggacatccccgagtacgccgcctacgcggaggcgatccgcaggagcgccgaggaggtcaacgaggcccacggcaccccctcctggcggccggtagagctctccatgcaggacaacttcccccgctccgtcgcggcctacaagaactacgacgccctcctggttaacgccgtgcgcgacgggatgaacctggtcgccaaggaggccgcggtcgtaaaccggcgggacggggccctcatcctctccgagaacgccggggcgcacgaggagctcggcgagcacgccctgacggtcaaccccttcgacctcgacgaccaggccgcggcgatccaccgggcgctcacgatgccccccgaagagcgcgcccggcgggcgcgggccctgcgcgagacggtcctctccaacaccatcgaggactgggccgccgcgcagatgcgcgacatagccgcccgccgcgcggcctcctcctag

SEQ ID NO: 145558 - protein, 484 aa, Rubrobacter xylanophilus DSM 9941
MAHSGGVVIVSNRAPVTFSRSGSGERTHSRGAGGLVTALNAVSRRAEGAVWIASAASDEDVRVARESEGPCEVDDLRLVLVEHDAGAYDLMYNRLANPLLWFVQHGLYDLPYAPELGEETLRAWEEGYLPVNRSFARAAAEAISGAEEPVVLLHDYHLYMVPELLREEVGEGPLISFFVHIPWPEPDLWRVLPSYIREGALRSLLRSDIVAFHTRRYARNFMAAASEILGAEADPARGTLRRGGREVWVRSYPISIDPAEFEEVAESPEVRREEEYVRNLPGALLVRVDRTDLSKNIVRGFRAYGRMLELHPEMRGRVTFFAQLQPSRGDIPEYAAYAEAIRRSAEEVNEAHGTPSWRPVELSMQDNFPRSVAAYKNYDALLVNAVRDGMNLVAKEAAVVNRRDGALILSENAGAHEELGEHALTVNPFDLDDQAAAIHRALTMPPEERARRARALRETVLSNTIEDWAAAQMRDIAARRAASS

SEQ ID NO: 145559 - DNA, 1392 bp, Mesorhizobium sp. BNC1
  CDS (1)..(1392): transl_table=11
gtgaaaaggcttgtcgtcgtctcgaaccgcgtagcggacctgacaaggacgtcccaggccggcgggcttgcggtcggccttgcggattcgctgcgtcagcgcggcggcgtatggatgggctgggacgggcagacgctgaaatacgaggaggagccggagccgcgcatccgcaagattggcgaggtgacccaggcgaccattccgctcaccgagcaggactatgcggaatactatctgggctttgccaacagcgttctatggccgctctttcactacaggctcgatctggtggagtacaaaacggccttcctggaaggctatcggcgcgtgaatgcgaaattcgcaaatgcgctggtgtcgattctccgtgacgacgatctaatctggatccatgattaccatcttattccgctcgcggcggagttgcgcgagcgcggctgcaagcagcgtatcggttttttcctgcacatccccttcccgcccccggaaattctcgccgctgttccccgccaccgttggctggtggagtgcctgctgaagcatgatgtgatcggttttcagacgcatacggatctcaacaaccttctgcgctatgtcgaggatcatctgggttgtgaaattctggccgacgggcgcatcaggacgcgcgagcgcgaggtgatcgccggtttctatcccatcggcatcgatgtggatgcctttgtgggcatggccgagaagccgaatgacgaggtgcaaatcgaaaccaaacggcgcgagatccttggacgaaggcagattatcggcgtcgacaggctggactacacgaaaggcttgccggatcgattgcgcgcctttgcccgccttctggagctctatccggagatgaggaaatcagtcgcgctgatgcaaatcgccacgcccacacgcgaagaggtcgaggcctatgtggatatccgcaaggaattggaggctctgtccggcgccatcaacggccgcttcgccgattttaactggacgcctgtgcgttacatccacggcaccgtgccgcgtgacgcgctggcagctctctaccgggcgagccaggtgggctttgtcacgccgcttcgtgacgggatgaacctcgtcgccaaggaatatgtcgccgcgcaatccatggatgatccgggcgtgctcgttctatcaaagtttgcaggggcagcggaggatctgcacgaggcgctgatcgtcaacccgtatgacgtggacgacatggctcgcaatctttgccgcgcgctcacaatgccgctggatgaacgtcaggagcgccagagggctcttatggagcgcatacgaaagcacgattccgcccactggctgaactccttcatggatgcgctcgaaaagggcgagacaaaagaggacgaggagtaa

SEQ ID NO: 145560 - protein, 463 aa, Mesorhizobium sp. BNC1
MKRLVVVSNRVADLTRTSQAGGLAVGLADSLRQRGGVWMGWDGQTLKYEEEPEPRIRKIGEVTQATIPLTEQDYAEYYLGFANSVLWPLFHYRLDLVEYKTAFLEGYRRVNAKFANALVSILRDDDLIWIHDYHLIPLAAELRERGCKQRIGFFLHIPFPPPEILAAVPRHRWLVECLLKHDVIGFQTHTDLNNLLRYVEDHLGCEILADGRIRTREREVIAGFYPIGIDVDAFVGMAEKPNDEVQIETKRREILGRRQIIGVDRLDYTKGLPDRLRAFARLLELYPEMRKSVALMQIATPTREEVEAYVDIRKELEALSGAINGRFADFNWTPVRYIHGTVPRDALAALYRASQVGFVTPLRDGMNLVAKEYVAAQSMDDPGVLVLSKFAGAAEDLHEALIVNPYDVDDMARNLCRALTMPLDERQERQRALMERIRKHDSAHWLNSFMDALEKGETKEDEE

SEQ ID NO: 145561 - DNA, 2202 bp, Cytophaga hutchinsonii ATCC 33406
  CDS (1)..(2202): transl_table=11
atgaatgacgaaaaaagattaattattgtagcatatagaataccttttaaagttacgtttaaagaaagcggagagcgcgtattacaacaaaattcaggagggcttgtttccgctatcctatcattggcagaaaaaggagatgtgtttggtaaaaatcaaaaaattcattggtttggttattccacaccagatattttacaggagggagaaacgcaggttgaaaatgaaaattttattgtacatcctgtcttaattgaagatgcactaaatgatgcgtattacgaaggattttgtaacagtacgatttggcccatttcgcattattatccctatctcaccagctttaatgaagaggattatgaagcgtatgtaaaagcaaataaaatatttgcagatcagattaatgcctttatccgtccgggagatatggtctggatacaggattatcagctgatgttattgcctggcatgctccgttcagaaaatccggatgcttctatcggttatttccatcacatcccttttgcaacgtttgaaatttttcgtttgcttccgaaacaatggcaaacagaattgttaaaaggtatgatcggcgcagatctggttggttttcataccaatgattacagccagtattttttgagaagtgtgcagcgtgtattaggctatgatactactgcccgcgacataagtattccaaacaggatcgtgcgggtagacacatttcccatcagcattgattataataaatttcaggaattgtataatgatccgggcgtaattgaaaaaaggaaagagtttttaaaagacctcagtgcagagaaaaatattttttccgttgaccggctagattattcaaaaggattgatccatcggttaaatgggtttgaatattttctggatcagtatccgcaatggcatacacgtgttgtacttacaatgattgtagttccttcgcgtgaaacaatcctgaagtatgctgagatgaaacacgaactggaagaagcggtaggccgcattaacggtaagtacggtaccttaggctggcgtccggttatatatctgtaccgttcgttaagctttgaagaattaggcgcgttatatacactggccgatgtggcactcatcacgcccatccgtgacgggatgaatttagttgcaaaagaatttgttgctacgcgtaccgataaaaaaggcgtattgattttaagtgaaatggcaggtgcgtcgctggaattgaatggtgcaatactgatcaacccaacagacaagaggacactggccgcagccattattcaggcattaaccatggacgagcaggagcagacacaacgtatgcagatgatgcaggaccggatccgtgtgtatgatatatttaaatggacagaagactacatggatcaattagatattataaaattgaaacaaatggaattcgaagagaaaattataaaccaggatgtgttaaaaagtttcaaacagatttttgatgaatcaagccggcgcttgtttttattggattatgacggaaccttatctcccattgttcctgacccctccagttctaagccaagtgtaggtattgttgatgtattaaaaaaactcagcagtgattttaatgtaaatgttgctatcataagcggaagagataaagagtttttgaattatatctttgatccaaatacaattctgtctgcagagcatggcgcgttcttacgtattccgggtcaggattgggagctgcaatatgattacaatgatcagtggaagcgttctgtattgccggtgtttcagaagtataccgatcgttgcgccggatcttttattgaaaataaatcaacatcacttgcctggcattacagaaatacagaaaaagaatatgctcatatccgttccagagaatttattgaagaactggaaaacaaagttgggataaaatcaaatctcgccattattgatggtgataaagtaattgaaatgaaaccttctgatgtagataaggggattgctgcgcggaaaatatgtgatctgtatcagccggattttattttatctattggagatgaccggactgatgaagacatgtttaaagcgcttccggataatgcgcttacaattaaagttggcgttaaaaatagttctgccaagtttacaattaaaacgcaggaagaagtaatgaccattctgaatacgtttttataa

SEQ ID NO: 145562 - protein, 733 aa, Cytophaga hutchinsonii ATCC 33406
MNDEKRLIIVAYRIPFKVTFKESGERVLQQNSGGLVSAILSLAEKGDVFGKNQKIHWFGYSTPDILQEGETQVENENFIVHPVLIEDALNDAYYEGFCNSTIWPISHYYPYLTSFNEEDYEAYVKANKIFADQINAFIRPGDMVWIQDYQLMLLPGMLRSENPDASIGYFHHIPFATFEIFRLLPKQWQTELLKGMIGADLVGFHTNDYSQYFLRSVQRVLGYDTTARDISIPNRIVRVDTFPISIDYNKFQELYNDPGVIEKRKEFLKDLSAEKNIFSVDRLDYSKGLIHRLNGFEYFLDQYPQWHTRVVLTMIVVPSRETILKYAEMKHELEEAVGRINGKYGTLGWRPVIYLYRSLSFEELGALYTLADVALITPIRDGMNLVAKEFVATRTDKKGVLILSEMAGASLELNGAILINPTDKRTLAAAIIQALTMDEQEQTQRMQMMQDRIRVYDIFKWTEDYMDQLDIIKLKQMEFEEKIINQDVLKSFKQIFDESSRRLFLLDYDGTLSPIVPDPSSSKPSVGIVDVLKKLSSDFNVNVAIISGRDKEFLNYIFDPNTILSAEHGAFLRIPGQDWELQYDYNDQWKRSVLPVFQKYTDRCAGSFIENKSTSLAWHYRNTEKEYAHIRSREFIEELENKVGIKSNLAIIDGDKVIEMKPSDVDKGIAARKICDLYQPDFILSIGDDRTDEDMFKALPDNALTIKVGVKNSSAKFTIKTQEEVMTILNTFL

SEQ ID NO: 145563 - DNA, 1425 bp, Rhodococcus sp. RHA1
  CDS (1)..(1425): transl_table=11
gtgaaggattccgttccgcacggcacgtccgacttcgtggtggtcgccaaccggctgcccgttgacatggaaacactcgacgacgggacgacacgctggaagcggagccccggaggcctcgtcacagcactggagccgatccttcacgaccgggaacgcggttcctgggtgggctggcccggtgtgcccgacacgaaggtcgaaccgatcgtctccggcggggtcgacctgtacccggtggagctgagctcggacgaggtcaagctgtattacgaaggattctcgaacgcgacgctgtggccgctgtaccacgacgtgctggtggcaccggtcttcgaccgggactggtggcactcgtacctggacgtgaaccgccacttcgccgaggagaccgcgcgcaccgcggccgagggcgcaaccgtgtgggtgcaggactaccagttgcagttggtgccccgtctgctgcgggagatgcgccccgacctgaccatcgggttcttcctccacatcccgttcccgcccgtcgaactgttcatgcagttgccgtggcgcaaggagatcgtggaggggctgctcggcgccgacctcatcggcttccacctgcccggcggcgccaacaatttcctgttcctggcgcgccggctgctgggactcgacaccaccaccgcaggtgtcggcgtgcgcagcgcactcggcaaggtgacactcgacggccgggtcgtgcaggtcggcgcgttccccatttccgtcgactcgcggcaactggtcgaacaggcaaccgatcccgccatcgtcgaacgggccgccgagatccgccgcgaactcggaaacccccgcaagattctcctcggagtcgaccggctcgactacacgaagggcatcgacctgcggctctcggcgctcggcgaactgctcgacgagggccgcctcgatccgtccgacaccgcgatggtgcaactcgccacccccagccgtgaacgcgtcgagcactacatgaagatgcgcagttccatcgaggagcaggtcagccacatcaacggtgaccacggtcagatcggccggccattcgtgcactacctctatcagccggtcgatcgcagcgaactgatcgcgctgttcctggccgccgacgtcatgctggtcacccccatgcgggacgggatgaacctcgtcgccaaggagtacgtggcctgtcgcgcggacctgggcggggcgctggtgctcagcgagttcgccggtgccgccgccgaactccggggcgcctacctggtgaacccgcacgacctcgacggagtgaagaacacgatcatggccgcgctggacccggaacgggagcagggacggcgccgcatgtcacgactgcaccgtcaggtgctcgaccacgacgtgcaccggtgggcgcagtcgttcctcggcgcgttgtag

SEQ ID NO: 145564 - protein, 474 aa, Rhodococcus sp. RHA1
MKDSVPHGTSDFVVVANRLPVDMETLDDGTTRWKRSPGGLVTALEPILHDRERGSWVGWPGVPDTKVEPIVSGGVDLYPVELSSDEVKLYYEGFSNATLWPLYHDVLVAPVFDRDWWHSYLDVNRHFAEETARTAAEGATVWVQDYQLQLVPRLLREMRPDLTIGFFLHIPFPPVELFMQLPWRKEIVEGLLGADLIGFHLPGGANNFLFLARRLLGLDTTTAGVGVRSALGKVTLDGRVVQVGAFPISVDSRQLVEQATDPAIVERAAEIRRELGNPRKILLGVDRLDYTKGIDLRLSALGELLDEGRLDPSDTAMVQLATPSRERVEHYMKMRSSIEEQVSHINGDHGQIGRPFVHYLYQPVDRSELIALFLAADVMLVTPMRDGMNLVAKEYVACRADLGGALVLSEFAGAAAELRGAYLVNPHDLDGVKNTIMAALDPEREQGRRRMSRLHRQVLDHDVHRWAQSFLGAL

SEQ ID NO: 145565 - DNA, 1548 bp, Rhodococcus sp. RHA1
  CDS (1)..(1548): transl_table=11
gtggctgccagttcggaatcgtcagcatcgtcatcacgctcgacttctgatcctgtgtccgggcaagccgacttcgtcgtcgtagcgaaccgactccccgtcgacctcgaacgccttccggacggcaccacgcgctggaagcgcagccccggtggcctcgtcaccgcgctcgagccgatcctgcgccgcaacaagggtgcatgggtcggctgggcgggggtcgcggacgccgaactcgaccccgtcgtcgaggacgatctcgagctctacccggttccgctcagcgccgcggagatcgccgactactacgagggcttctccaacgccaccctctggccgctctaccacgacgtcatcgtcaagcccgaatacaaccgcgactggtggaacgcctacgtcgaggtcaaccggcgcttcgcggaggccacgtcgaaggcggccgcgcatggggccacggtgtggatccaggattatcagctgcagctcgttccgaagatgctgcgcatgctccgccccgacctcacgatcgggttcttcctgcacattccgttcccgccggtggaactgttcatgcagatgccgtggcgcaccgagatcatcgagggcctgctcggcgccgacctgatcgggttccacctcccgggcggtgcccagaacttcctctacctggcccgcaaactcgccggtcagcagacgtcccgcggcaacgtgggtgtccgctccaagctgggcgtcgtgcaggtggggttccgcacggtgcgcgtcggcgcgtttccgatctccatcgattcggggcagctggacgaacagtcccgatccaagtcgatccgggaccgcgccaagaagatccgcaacgaactgggcaatcccaagcacatcatgctcggcgtcgaccgcctcgattacacgaagggcatcgacgtccgcctcgccgcgctgcacgagttgctcgacgagcagcgcatcgatcccgccgacacggtgatggtgcagctggccacgccgagccgcgagcgggtcgacagctacgtgcagatgcgcgacgacatcgaacgcaaggtgtcgcggatcaacggcgagtacagcgaggtcggcaggccggtggtgcactacctgcaccggccgatcccccgcgaggagctgatcgcgttcttcgtcgccgccgacgtgatgctggtgactccgctgcgcgacggcatgaacctcgtcgccaaggagtacgtggcgtgccgcagtgacctcggcggcgcactgctgctcagcgagttcacgggcgcggccgccgaactgcgtcaggcgttcctgtgcaatccgcacgatctcgacagcgtcaaggacgcgatggagcaggcactgggccagccgaaggaggacggccgacgccacatgcgggccctgcgcaggcaggtcctcgcacacgacgtcgaccggtgggccaggtccttcctcgacgccctcgctcacggcggcgccgccggccccgcgctgatcgcgcccgccgaggcttccgaggccgactacaacgaggacgcgaccggggagaactga

SEQ ID NO: 145566 - protein, 515 aa, Rhodococcus sp. RHA1
MAASSESSASSSRSTSDPVSGQADFVVVANRLPVDLERLPDGTTRWKRSPGGLVTALEPILRRNKGAWVGWAGVADAELDPVVEDDLELYPVPLSAAEIADYYEGFSNATLWPLYHDVIVKPEYNRDWWNAYVEVNRRFAEATSKAAAHGATVWIQDYQLQLVPKMLRMLRPDLTIGFFLHIPFPPVELFMQMPWRTEIIEGLLGADLIGFHLPGGAQNFLYLARKLAGQQTSRGNVGVRSKLGVVQVGFRTVRVGAFPISIDSGQLDEQSRSKSIRDRAKKIRNELGNPKHIMLGVDRLDYTKGIDVRLAALHELLDEQRIDPADTVMVQLATPSRERVDSYVQMRDDIERKVSRINGEYSEVGRPVVHYLHRPIPREELIAFFVAADVMLVTPLRDGMNLVAKEYVACRSDLGGALLLSEFTGAAAELRQAFLCNPHDLDSVKDAMEQALGQPKEDGRRHMRALRRQVLAHDVDRWARSFLDALAHGGAAGPALIAPAEASEADYNEDATGEN

SEQ ID NO: 145567 - DNA, 1485 bp, Synechococcus sp. CC9311
  CDS (1)..(1485): transl_table=11
atggcggtcacaaagggacaaagtcctttcattcttctgtaccatcgcacgccatttgatgaagggagagatgaaaagggcaacaggatttggtgcgatcagaaaagtccaaatggaattatcccgaccttaagaaatttatttcgaacccgggaaaacggtacttggatagcctggaggaaagttgacaaagtagaagatgcgaatgatgagaacattccaatgtctaatccgaaaccctttaccctatgcagaatcccactagaagaagatcaaatctctagcttttatcatgtaacttccaaggaatcattctggccaatcttacatactttccctacacattttaatgtaaacaacgcagattggagtatttttgaagaagttaattataggtttgccaaagctgcatgtcatcaggcagctgaatcagctaccgtttgggtacatgattataacttgtggcttgttcctggttatatcagggaattaaggcctgacctaaagattgcttttttccatcacacaccatttccaggaaatgatgtttttgctattttgccatggcgtgaacagattctcgaaagcctattatgttgcgatgttgttggattccatattccgcgttataccgaaaactttgctcgtgcagccaactgtctattaggtgctaaaaagggatcaaagcaacctgttaactctcgctttgtttctactggatcggcattaactgaaccatcggagaccccctgtttacattacaagggacgtaaaattcagctgttatcgtctccggtgggaacatcaccagatgtgatccaagaacttgcagcacgggctgatgttcaagagttagcagataaaattgatgatgatactaagaaaggtagaaagctaattctttctgcgagtcgtgttgactacacgaagggtaatgaagaacttttacttgcatttgaacgtctactggaacgtcgacccgattggcatggaaaagtggtgctcatgcttgcttgtgttgcagctgcaagcggcatgaaaatctacgaagacacgcaacgaaccatcgaagagaccgctgggcgtatcaatggccgatttagcttgattgattgggttcctatccgtttttctacacgacgcattccttacgaagaaatggttgcatggttcacacgctcagatatctgttggattacaccacttcgagatggattaaatttggttgctaaagaatatgcagctgcacgtaaggatcgaggcggggctttagtgctttctgagtttacgggtgcctcagttgtgcttgatggagcaattttgaccaatccgtattctcatcgtcagatggatgaagcaattgaacgagcactagaaatgcctaaagatgaacaaattaaacgtatgagccgcatgagcagtgctgtagagagttttacagtgagtgattgggttcgtgaacagatggatgcattagaggcttga

SEQ ID NO: 145568 - protein, 494 aa, Synechococcus sp. CC9311
MAVTKGQSPFILLYHRTPFDEGRDEKGNRIWCDQKSPNGIIPTLRNLFRTRENGTWIAWRKVDKVEDANDENIPMSNPKPFTLCRIPLEEDQISSFYHVTSKESFWPILHTFPTHFNVNNADWSIFEEVNYRFAKAACHQAAESATVWVHDYNLWLVPGYIRELRPDLKIAFFHHTPFPGNDVFAILPWREQILESLLCCDVVGFHIPRYTENFARAANCLLGAKKGSKQPVNSRFVSTGSALTEPSETPCLHYKGRKIQLLSSPVGTSPDVIQELAARADVQELADKIDDDTKKGRKLILSASRVDYTKGNEELLLAFERLLERRPDWHGKVVLMLACVAAASGMKIYEDTQRTIEETAGRINGRFSLIDWVPIRFSTRRIPYEEMVAWFTRSDICWITPLRDGLNLVAKEYAAARKDRGGALVLSEFTGASVVLDGAILTNPYSHRQMDEAIERALEMPKDEQIKRMSRMSSAVESFTVSDWVREQMDALEA

SEQ ID NO: 145569 - DNA, 1389 bp, Alkalilimnicola ehrlichei MLHE-1
  CDS (1)..(1389): transl_table=11
atgtcgttgatcaccatatcgaaccgggttgccctgcccagccagctccagggggcccaaggcggactggcggtgggtctgcgcagtgcactggaggatggcggtgggctctggttcggttgggacggtcgccacgaaccccggttacccgatccccgcccactggcggtgcagaacgccaacggcgtgcgctacgccaccctgcgcctgactcgtgccgagtacgagcggttctatctcggcttctccaaccaggtgctctggcccctgttccattaccgcttgccctatgtccactgccaacgggcggatcgggaagggtactgggccgtcaaccgcctgttcgcggatcggctgcccgatctaccggacgccgagtcgcccatctggatccacgattaccacttcattcccctgggccagatgttgcgggagcgggggatcactaaccccctgggctttttcctccacacccccttcccggcttgggatgtctaccgcgcattgccggatcaccaggccctgctggaagccctctgcgcccatgacctggtgggcttccaaaccgacctggatcgtgacaacttcctggactgtctgcgccacaccgacgccatcgaggtgatcgacacggcccgggcgcgctaccgcggccgggtggtccacatcggcgtcttcccgatcggtatcgacgtggactctgtggccgcccacgcccggcacggcttctactcgcagcagggacgccggttgcaggccagccttggggacagacgcctgatcatcggtgttgaccgcctggattacagcaaggggctggatatccgcttcgaagcctatcggcgtatgctggagcgccgccgggagcaccgggcgcgggtcgtttacctgcagattgcgccgatatcgcggggtgaggtgccggagtacgacgagattcgccgcgaactggagtaccaggcgggtcacctcaactgccagttcgccgagtacgactgggccccgctgcggtacctgaaccgcggcttccaccgggcgaacgtgctcgggtttctgtcccgggcccatgtcgggctggtcacccctatgcgcgacggtatgaacctcgtggccaaggagttcgtggccgcccaggatccggacgacccgggtgtgttggtcctctcgcatttggccggggcggcgcgcgagctggacgcggcggttctggtcaacccctacgatcccgatgaggtggcggagcggcttcaccaggcgctgaccatgccgttagcggagcggcgtgagcgttggacccgcatgatccggtgcctgcgcgagcaggacattacctgttggcgtgacgactacctgcaggccctgcagacggcggccggtgcgtccgggtga

SEQ ID NO: 145570 - protein, 462 aa, Alkalilimnicola ehrlichei MLHE-1
MSLITISNRVALPSQLQGAQGGLAVGLRSALEDGGGLWFGWDGRHEPRLPDPRPLAVQNANGVRYATLRLTRAEYERFYLGFSNQVLWPLFHYRLPYVHCQRADREGYWAVNRLFADRLPDLPDAESPIWIHDYHFIPLGQMLRERGITNPLGFFLHTPFPAWDVYRALPDHQALLEALCAHDLVGFQTDLDRDNFLDCLRHTDAIEVIDTARARYRGRVVHIGVFPIGIDVDSVAAHARHGFYSQQGRRLQASLGDRRLIIGVDRLDYSKGLDIRFEAYRRMLERRREHRARVVYLQIAPISRGEVPEYDEIRRELEYQAGHLNCQFAEYDWAPLRYLNRGFHRANVLGFLSRAHVGLVTPMRDGMNLVAKEFVAAQDPDDPGVLVLSHLAGAARELDAAVLVNPYDPDEVAERLHQALTMPLAERRERWTRMIRCLREQDITCWRDDYLQALQTAAGASG

SEQ ID NO: 145571 - DNA, 1368 bp, Hyphomonas neptunium ATCC 15444
  CDS (1)..(1368): transl_table=11
ttgggacgcctggtagcaatatccaacagaacggccgccgatgccggcgcgcaggcgggcgggcttgctgtggccgtatgggacgccctcaaagcgacaggcggattatgggcaggctggtccggcgatattgtcagcgactccccaggcagcaaacaatttgaatcagaagacggcgtttctttccttctgaccgacatgacagaagacgagcatgacggcttttacctgcgctattccaacagcacgctttggccaatatttcactatcgggtagatctggcgacgttcgatcgcggtgcctttgaccattatctcgcggtaaacgagcgattggcaaacctcacaattgagcatctgcgcgaacatgacatggtttgggtgcatgactaccatttcctcccgatggccgatgcgttgcgccgggccggatggaaggggcgcaccggatttttcctgcacataccgtttcccacaccagacatgttccgcgctcttccagagcatagctggctggcacgcgcgctttgccagtttgatctgatcggcttccagtccgaatccgaccgcacgaatttcgaacgttatctggtcgacagcctggatgcagatgcttctgaagcgccgatttatactgtcgcaggccggagagtgcgtgtgggtgtctatcccattggaattgatgctgccgcttttgaagaagccgctcgaagccctgcggccggggacgcggctgcccgcatcggacgtttcctgggaaatcgcgatctcatcatcggtgtggaccggatggattattccaaagggctgcctcaacgatttgaggccgttggcgcattttttgacaaccatccggagctgcatggcaaggtgtcggtaacgcagattgcgaccccctcacgaaccaaagtggaagagtatcgccagctgcgctatgaactcgatcagctcgtgggacgtatcaatggagattatggcgatctcgactggataccattgcgctatctggcgcgaagctattccagagatgaattggccggcctcttccgcatcgcacgcgtagggttggttacgccgcttcgggacgggatgaacctcgtggcaaaggaatacgtgatggcgcaggacccggaagatcccggcgttcttatactttcagaattcgctggggccgcggaacaacttcacgaagcgctgatcgtaaatccccatgaccgctcgacattggcggagaccatccggatcgcgctgactatgcctcttgaggaacgaaaacggcgatgggaggccctccgcgatgttgtaaggcggacagatattgcgtggtggcgggacctgttcctgaacgaccttcgcgccaaaatctga

SEQ ID NO: 145572 - protein, 455 aa, Hyphomonas neptunium ATCC 15444
MGRLVAISNRTAADAGAQAGGLAVAVWDALKATGGLWAGWSGDIVSDSPGSKQFESEDGVSFLLTDMTEDEHDGFYLRYSNSTLWPIFHYRVDLATFDRGAFDHYLAVNERLANLTIEHLREHDMVWVHDYHFLPMADALRRAGWKGRTGFFLHIPFPTPDMFRALPEHSWLARALCQFDLIGFQSESDRTNFERYLVDSLDADASEAPIYTVAGRRVRVGVYPIGIDAAAFEEAARSPAAGDAAARIGRFLGNRDLIIGVDRMDYSKGLPQRFEAVGAFFDNHPELHGKVSVTQIATPSRTKVEEYRQLRYELDQLVGRINGDYGDLDWIPLRYLARSYSRDELAGLFRIARVGLVTPLRDGMNLVAKEYVMAQDPEDPGVLILSEFAGAAEQLHEALIVNPHDRSTLAETIRIALTMPLEERKRRWEALRDVVRRTDIAWWRDLFLNDLRAKI

SEQ ID NO: 145573 - DNA, 1407 bp, Rhizobium leguminosarum bv. viciae 3841
  CDS (1)..(1407): transl_table=11
atgagccgtcttgtcgtcgtttccaatcgtgttcccatgccggccaaggatgggagcgccgctgccggcggcctggccgtcgcgctgcaggcagccctgcaggagcgtggcggcatttggatgggatggtcgggagaatcgagcggggacagggaacctggcccgctgtcgcagctgcagaagggcaacatcacctatgcgctgaccgatctcaccgataccgacgtcgaggagtattatcgcggcttcgcaaaccgcgttctgtggcccatctgccattatcgactggacctcgccgaatatggccggaaggaaatggccggctatttccgcgtcaaccgcttcttcgcacataggttggcgccgatgatcgagccggacgacatcatctgggttcatgattaccacctcattccgctggcggccgaactccgccaaatggggctgaaaaaccggatcggcttcttcctgcacattccctggccgccggccgacattctcgtcacgatgcccgtccatgaggaaatcatgcgcgggctctcgcattacgatctcgtcggcttccagaccgactacgacctccagaactttgccgggtatctcagaagggaaggaattggcgacgacctcggaaatggattgttcgattcccatgggcggatattcaaggccggcgcctatccgatcgggatcgaaactgcgggcttcgccgaattcgccgagagagccgcaaacaatatcatggtacagaagacccggcgcagcgttgaaggccgggacatgatcatcggggtcgaccgcctcgattattcgaagggcatcattcagcggctggaagcgttcgaaaccttcctcaccagcaatcctgcctaccagaacaaggtcacctatctgcaggtcacgccaaaatcgcgatcggaagttcccgaatacgagcatatgcagaagatggttgccgaacaggccggccgcgtgaacggcgccatcggaacggtcgactgggtgccgatccgctatgtcaaccgatcgatcagccgcaacgtgctcgcaggcatctaccggctggcgacgatcgggctggtcacgccgttgcgcgacggcatgaacctcgtcgccaaggaatatgtcgccgcccaggacccggatcggccgggcgtattggtgttatcgcgcttcgccggcgcggctcgagagttgaagggcgcactgctggtcaatccttacgatgtcgaaggcactgccaatgccatcgccaagggcctttccatgtcgctggaggagcgccgcgaccgctggagcatgatgatggagcatctgctttctcacgacgtctcactttggtgcgagaacttcttgggggatctggtgcttgctcccgagcttcgcccggagcatgatcccggatag

SEQ ID NO: 145574 - protein, 468 aa, Rhizobium leguminosarum bv. viciae 3841
MSRLVVVSNRVPMPAKDGSAAAGGLAVALQAALQERGGIWMGWSGESSGDREPGPLSQLQKGNITYALTDLTDTDVEEYYRGFANRVLWPICHYRLDLAEYGRKEMAGYFRVNRFFAHRLAPMIEPDDIIWVHDYHLIPLAAELRQMGLKNRIGFFLHIPWPPADILVTMPVHEEIMRGLSHYDLVGFQTDYDLQNFAGYLRREGIGDDLGNGLFDSHGRIFKAGAYPIGIETAGFAEFAERAANNIMVQKTRRSVEGRDMIIGVDRLDYSKGIIQRLEAFETFLTSNPAYQNKVTYLQVTPKSRSEVPEYEHMQKMVAEQAGRVNGAIGTVDWVPIRYVNRSISRNVLAGIYRLATIGLVTPLRDGMNLVAKEYVAAQDPDRPGVLVLSRFAGAARELKGALLVNPYDVEGTANAIAKGLSMSLEERRDRWSMMMEHLLSHDVSLWCENFLGDLVLAPELRPEHDPG

SEQ ID NO: 145575 - DNA, 2250 bp, Solibacter usitatus Ellin6076
  CDS (1)..(2250): transl_table=11
atgcgacggatggttccattcactttggcccttttagcgggtcttgccttactggcatgggccgcttccggggtcgtgcagactaccgctcgtcggtggtttgagcgcgacatcggcgcgcgtgcgaaccttgtcctggtcagctccgaaaagtcgctcgcaaataactggaacggcgagcccggcgaacttcaaaaacagcttgccgcactcactcgcgacgagcgcgtgatgggcgcggcggcctgcgatcccgatctcaagacgcgcgccgccaccgtcggatttcccgaggatttcggctgctgggccgtcggtacccgggtccgttcgatcgattccaacggcgtcgcccacttccggccctggagcaccgtgtccgacctgcccaccggccgtgtgcacgtgagcgtaatgccgctggccaatccggcgggtcaggaactcggcttcgcgatcctcctccacgacctcagcttcatcgatcgccgcgaggcgcaggcgcgtacgtttctcttcgccacctttgggattcttgccttcatcgcgcttttgctccccgtgtgggtcgccagactcgcgcgctacgattggagccgcgagttgagcagcctgctccgcggcggcggcaagcagcagcagagccgcgagttccaaccgatcctcagcgatgttcgcgagttggtgagccgcatggcatacgatcgcgacgacgctcccggccagtggaatgccgagcggctgaagcacagcctgaatagcaatctgcacggcgagagggtcgtcattctctccaaccgcgagccctatattcacgaattcaccccccatggaggtatcgaggtgcagcatcccgccagcggcctggtcaccgcgctcgaaccggtcatgcgcgcgtgctccggagtctgggtcgcgcacggcagcggcagcgccgatcgcgaaaccgtggatcgtaaggatcacgtgcgcgtccctcccggtgaagagtcgtatcacattcgccgcgtctggctcaccgaggaagagcagcagggctactactacggcttctccaacgaaggcctctggcctctctgccacgtcgcctatgcacgccccatcttccgcgccgaggactggcgccagtaccgcgccgtcaaccagaagttcgccgacgccgtcttgagcgaagtcgattcgagcgatcccattattctcgtgcaggattaccacttcgcactcgtgccggccatgatccgcaagcgcctgcccgccgccaccgtcatcatgttctggcacatcccctggcccaacgcggaaaatgtcggcatctgtccctggcgcaatcaattgctcgaaggcctcctgggcagcagcatccttggcttccacacccagctgcattgcaataacttcctggattcggtggatcgttacctggaaacacgcatcgaccgcgagaacaatgccgtagtgatgcaggggcatcgcacccttatacggccctatccgatttcgctcgaatggcccgtccactgggcagttgaggcgcccagccccgaggattgccgcgctcaggtctggcgtgacctcggcttgaaacgcgacgcgctcctcggagtcggtatcgatcgcctcgattacaccaaaggcattgaggagcgcctgctcgccgtggagcaactcctggagcgctacccggaataccgtggccgcttcagcttcgcccagctcgccgctcccagccgcaccaaaatcgagcgctaccgccaactcagcgaggacgtggagcgcctggccgagcgcatcaatcagcgcttcggaaaaccagattaccgccccgtgattctgctccgctcccaccacgagccgcccgaggtctttcgctacttccgcgcctccgatctctgctacgtgagttccctgcacgacggcatgaacctcgtggccaaggaatatgtcgccgcacgcaccgacctgaaaggcgtgctggtgctcagcgaattcaccggcgcggcgcgagaattgagcgaagcccttatcgtcaacccctacgacctggaggccagcagcgatgcgctcgccgccgcgctcgccatgccgctcgaagagcagcgcgaccgcatggcatcgatgcgctcgcttctcgtacagttcaacgtgtatcgctgggcgggaaggatgctggtggacgcggcgcgcctgcgcaaccaggagcgagtcgccggacgtctggcggagcgaaccggcgtcggttcatcggcctga

SEQ ID NO: 145576 - protein, 749 aa, Solibacter usitatus Ellin6076
MRRMVPFTLALLAGLALLAWAASGVVQTTARRWFERDIGARANLVLVSSEKSLANNWNGEPGELQKQLAALTRDERVMGAAACDPDLKTRAATVGFPEDFGCWAVGTRVRSIDSNGVAHFRPWSTVSDLPTGRVHVSVMPLANPAGQELGFAILLHDLSFIDRREAQARTFLFATFGILAFIALLLPVWVARLARYDWSRELSSLLRGGGKQQQSREFQPILSDVRELVSRMAYDRDDAPGQWNAERLKHSLNSNLHGERVVILSNREPYIHEFTPHGGIEVQHPASGLVTALEPVMRACSGVWVAHGSGSADRETVDRKDHVRVPPGEESYHIRRVWLTEEEQQGYYYGFSNEGLWPLCHVAYARPIFRAEDWRQYRAVNQKFADAVLSEVDSSDPIILVQDYHFALVPAMIRKRLPAATVIMFWHIPWPNAENVGICPWRNQLLEGLLGSSILGFHTQLHCNNFLDSVDRYLETRIDRENNAVVMQGHRTLIRPYPISLEWPVHWAVEAPSPEDCRAQVWRDLGLKRDALLGVGIDRLDYTKGIEERLLAVEQLLERYPEYRGRFSFAQLAAPSRTKIERYRQLSEDVERLAERINQRFGKPDYRPVILLRSHHEPPEVFRYFRASDLCYVSSLHDGMNLVAKEYVAARTDLKGVLVLSEFTGAARELSEALIVNPYDLEASSDALAAALAMPLEEQRDRMASMRSLLVQFNVYRWAGRMLVDAARLRNQERVAGRLAERTGVGSSA

SEQ ID NO: 145577 - DNA, 1479 bp, Mycobacterium avium 104
  CDS (1)..(1479): transl_table=11
atggctcccgggggagggcgaggctcgaagacggccagctacggcaattccgacttcgtcgtggtcgccaaccggctgccggtggatcaggagcgacttcccgacggcagcacggcctggaagcgcagccccggcggcttggtcaccgccctcgaaccgctgctgcgccgccagcgcggggcatgggtgggctggcccgggatcgtcgacgaggacgtcgaccacgaggacgacccgatcgtccaggacgacctggagcttcggccggtcaagctgagcgccgacgacgtcgccgaatactacgagggcttctccaacgccacgctgtggccgctgtatcacgacgtcatcgtcaaaccgatctaccaccgcgaatggtgggaccgctacgtcgccgtgaaccgccgcttcgccgaggccacctcgcgcgccgccgcgcgcggcgcgaccgtgtgggtgcaggactaccagctgcagctggtgccggcgatgctgcgcgaactgcggcccgacctgaccatcggcttcttcctgcacatcccgttcccgccggtggagctgttcatgcagctgccgtggcggaccgagatcgtcaagggcctgctcggcgccgatttggtcgggttccatctgaccggcggcgcccagaatttcctgttcctgtcccggcggttgatcggcgccaacacctcccgcggcgcggtgggggtgcggtcacgctacggcgaggtggagctggagtcccgcgtggtccgggtgggcgccttccccatctccatcgactccacggcgctcgaccagacggcccggcaccgcgatatccggcgccgcgcccgcgagatccgggccgagctgggcaacccgcgcaaggtgctgctcggcgtcgaccggctggactacaccaagggcatcgacgttcggctgaaagccttttcggagctgctggccgagggccgcgccaagcgcgacgacaccgtgctggtgcagctggccaccccgagccgggagcgggtggacagttatcagcagctgcgcaacgacatcgaacgccaggtcggccacatcaacggcgaatacggcgaggtcgggcatccggtggtgcactacctgcaccggccggtcccccgcaacgaactcatcgcgttcttcgtggcggccgacgtcatgctggtcacgccgctgcgcgacgggatgaacctggtcgccaaggagtacgtggcctgtcgcagcgacctcggcggggcgctggtgctgtccgaattcaccggcgccgcagccgaactccggcaggcgtatctggtcaacccgcacgacctggagggcgtcaaggacaccgtcgaggccgcgctcaaccaatccgtcgaggagggccggcgccggatgcggtcgttgcgccggcaggtgctcgcgcacgacgtcgaccgctgggcgcgttcgttcctcgacgcgctcgccgagtcggggccgcgtgacggctga

SEQ ID NO: 145578 - protein, 492 aa, Mycobacterium avium 104
MAPGGGRGSKTASYGNSDFVVVANRLPVDQERLPDGSTAWKRSPGGLVTALEPLLRRQRGAWVGWPGIVDEDVDHEDDPIVQDDLELRPVKLSADDVAEYYEGFSNATLWPLYHDVIVKPIYHREWWDRYVAVNRRFAEATSRAAARGATVWVQDYQLQLVPAMLRELRPDLTIGFFLHIPFPPVELFMQLPWRTEIVKGLLGADLVGFHLTGGAQNFLFLSRRLIGANTSRGAVGVRSRYGEVELESRVVRVGAFPISIDSTALDQTARHRDIRRRAREIRAELGNPRKVLLGVDRLDYTKGIDVRLKAFSELLAEGRAKRDDTVLVQLATPSRERVDSYQQLRNDIERQVGHINGEYGEVGHPVVHYLHRPVPRNELIAFFVAADVMLVTPLRDGMNLVAKEYVACRSDLGGALVLSEFTGAAAELRQAYLVNPHDLEGVKDTVEAALNQSVEEGRRRMRSLRRQVLAHDVDRWARSFLDALAESGPRDG

SEQ ID NO: 145579 - DNA, 1512 bp, Mycobacterium smegmatis str. MC2 155
  CDS (1)..(1512): transl_table=11
atgtctccggagagtggccacgaaaccatctccgggacctccgacttcgtggtggtcgccaaccggctaccggtcgatctggagcgactgcccgacggcaccacgcgatggaagcggagccccggtggcctggtgaccgcactggagccgctgctgcgcaagcggcgcggctcctggatcggctgggccggcgtcgccgacagtgacgaggaaccgatcgtccaggacggtctgcagctgcaccccgtgcggttgtcggccgacgatgtcgcgaagtactacgaaggtttctccaacgccaccctgtggccgctctaccacgacctgatcgtcaaacccgagtaccaccgcgagtggtgggaccggtacgtcgaggtcaaccgccgattcgccgaggcgacggcacgcgcggcagccgagggtgccacggtctggatccaggactaccagctgcagctggtgcccaagatgctgcgcatgctgcgccccgatgtgaccatcggcttcttcctgcacatccccttcccgccggtcgagctgttcatgcagatgccgtggcgcaccgagatcgtggaaggcctgctcggcgccgacctggtcgggttccacctgcccggcggcgcacagaacttcctggtgctctcgcgccggctggtcggcgccaacacgtcgcgcgccagcatcggcgtgcggtcgcgcttcggtgaggtgcaggtcggcttccgcaccgtcaaggtcggcgccttccccatatcgatcgactcggccgaactcgacggcaaggcacgcaaccgcgccatccggcagcgggcccgccagatccgcgccgagctgggcaacccccgcaagatcatgctgggcgtcgaccgcctcgactacaccaagggcatcgacgtgcggctgcgggcactgtccgaactgctcgaagagaagcgcatcaagcgtgacgacaccgtgctggtgcagctcgcgacgcccagccgggaacgcgtcgagagctacatcgcgatgcgtgaggacatcgaacgccaggtcggccacatcaacggcgagtacggcgaggtcggccacccgatcgtgcactacctgcaccggccgatcccccgcgacgagctcatcgcgttcttcgtcgcggccgacgtcatgctcgtgacgccgttgcgcgacggcatgaacctggtggccaaggagtacgtggcgtgccgcagcgatctcggcggtgcgctggtgctcagcgaattcaccggcgcggcagccgaactgcgccaggcctacctggtcaacccgcacgacctcgagggtgtcaaggacaagatcgaggccgcggtcaaccagaacccagaagagggcaagcgccgtatgcgtgcgctgcgccgccaggtgctcgcgcacgacgtcgaccggtgggcacgctcattcctcgacgcgctggccgccaccggcgagacgggcgactccggcgtgacgggcgagtccactcctgcgcccgagtccgactccgggagcttctag

SEQ ID NO: 145580 - protein, 503 aa, Mycobacterium smegmatis str. MC2 155
MSPESGHETISGTSDFVVVANRLPVDLERLPDGTTRWKRSPGGLVTALEPLLRKRRGSWIGWAGVADSDEEPIVQDGLQLHPVRLSADDVAKYYEGFSNATLWPLYHDLIVKPEYHREWWDRYVEVNRRFAEATARAAAEGATVWIQDYQLQLVPKMLRMLRPDVTIGFFLHIPFPPVELFMQMPWRTEIVEGLLGADLVGFHLPGGAQNFLVLSRRLVGANTSRASIGVRSRFGEVQVGFRTVKVGAFPISIDSAELDGKARNRAIRQRARQIRAELGNPRKIMLGVDRLDYTKGIDVRLRALSELLEEKRIKRDDTVLVQLATPSRERVESYIAMREDIERQVGHINGEYGEVGHPIVHYLHRPIPRDELIAFFVAADVMLVTPLRDGMNLVAKEYVACRSDLGGALVLSEFTGAAAELRQAYLVNPHDLEGVKDKIEAAVNQNPEEGKRRMRALRRQVLAHDVDRWARSFLDALAATGETGDSGVTGESTPAPESDSGSF

SEQ ID NO: 145581 - DNA, 1449 bp, Nocardioides sp. JS614
  CDS (1)..(1449): transl_table=11
gtgaagaacgtggcttcctctggctcggctgacctggtcatcgtcgcgaaccgactccccgtcgaccgggtgccgctcggagacgggacggccgagtggcggcgctcacccggcggcctggtcaccgcgatcgagccggtcatgcgcgccaacgacggcagctggatcggctggccgggcggcaccgagagcgacctggagcccttcgaggacgagggcctcgacctggtcccgatcacgttgacccagcaggaggtcgaggagttctacgagggcttcgcgaacggcaccctgtggccgctctaccacgacgtcgccgcgaagccggagttccaccgcgagtggtgggacgcctatgtggtggtgaaccggcggttcgccgagcaggccgctgcagctgcctccgagggtgcgaccgtgtgggtgcacgactaccagctgcagctggtgccacagatgctgcgcgagctgcgcccggacctgcggatcgggttctacctgcacatcccgttcccgcccaccgagctgttccagcagctgccctggcgacgccagctgctcgagggcctgctgggcgccgacctggtcggcttccagctccccggcgccgcgcagaacttcgtgcgactggtccgccagcgggtcgggcacaagacgcaccgcgacctcgtctacctgcccgacggccgcaccgtgcgggccgcagcgttcccgatctccatcgacgcgaagggcttcgaggacctggctcgctccgaggaggtcgagaagcgcgccgccgagatccgcgacgccctgggcaacccgagccggatcttcctcggcgtcgaccgactcgactacaccaagggcatctacgcccggctccgcgcctacagcgagctgctggcgcagggcgacctcgacgtcgaggacgcggtgttcgtgcaggtggcgacgccctcgcgcgagcaggtcgagcagtaccgcatcctccgcgacgacatcgaccgcctcgtggggcggatcaacggcgacctcgggcggatcggccggccggcgatcagctacatgcacgcgtcgtacccccgcgaggagatggcggcgctctaccgcgccgccgacatcatggtggtgacgccgtaccgcgacggcatgaacctggtcgccaaggagtacgtcgcctgccgcttcgacaacgacggcgcactggtgctctcggagttcgcgggcgcggccgacgagctgcggcaggcctggctggtcaacccctacgacatcaacgggatgaagtccgcactgctggaggcctaccgcgccgacgagaaggagcggacccggcggatgaaggcgatgcgcaagaccgtcagccagaacgacgtcgccgcctgggccgacagcttcctcgccgagctcaccgccgtgcggccctcgcacggcaagaccgtgcggcccgcccggcggtcctga

SEQ ID NO: 145582 - protein, 482 aa, Nocardioides sp. JS614
MKNVASSGSADLVIVANRLPVDRVPLGDGTAEWRRSPGGLVTAIEPVMRANDGSWIGWPGGTESDLEPFEDEGLDLVPITLTQQEVEEFYEGFANGTLWPLYHDVAAKPEFHREWWDAYVVVNRRFAEQAAAAASEGATVWVHDYQLQLVPQMLRELRPDLRIGFYLHIPFPPTELFQQLPWRRQLLEGLLGADLVGFQLPGAAQNFVRLVRQRVGHKTHRDLVYLPDGRTVRAAAFPISIDAKGFEDLARSEEVEKRAAEIRDALGNPSRIFLGVDRLDYTKGIYARLRAYSELLAQGDLDVEDAVFVQVATPSREQVEQYRILRDDIDRLVGRINGDLGRIGRPAISYMHASYPREEMAALYRAADIMVVTPYRDGMNLVAKEYVACRFDNDGALVLSEFAGAADELRQAWLVNPYDINGMKSALLEAYRADEKERTRRMKAMRKTVSQNDVAAWADSFLAELTAVRPSHGKTVRPARRS

SEQ ID NO: 145583 - DNA, 1470 bp, Mycobacterium sp. KMS
  CDS (1)..(1470): transl_table=11
gtggcttcggagggcgacccaggcgtcggctccggagactccgacttcgtcgtggtggccaaccggctgccgatcgacatggaacggctgcccgacggcagcacgtccttcaagcggagtcccggcggtctggtcaccgcgctcgaaccgctgctgcgcaaacgccacggcgcgtggatcggctgggccggcatcccggacagcgcggaggacccgatcgaggacgacggtctgcagctctaccccgtctcgctgtcggccgacgacgtcgccgactactacgagggcttctccaatgcaaccctgtggccgctctaccacgatctgatcgtcaaaccgatctaccaccgcaagtggtgggaccgctatgtcgaggtcaaccgccgcttcgccgaggcgaccgcccgcgccgcggccgagggcgccacggtgtgggtgcaggactaccagctgcagttggtgccgaagatgctgcggatgttgcggcccgacctgacgatcggcttcttcctgcacattccgttcccgccggtcgagctgttcatgcagatgccgtggcgcacggagatcatcgagggcctgctcggcgccgacctggtcggcttccacctgcccggcggggcgcagaacttcctctacctggcccgtcgcctgaccggcgccaacacctcccgcgccaccgtgggtgtgcggtcgcgcttcggcgaggtgcaggtcgggttccggacggtcaaggtcggcgcgttccccatctcgatcgactccgacgaactcgacggcaaggcccgcaaccgcgccgtccgccagcgcgcccgcgagatccgcaacgaactggggaatccgcgcaagatcctgctcggggtggaccgcctcgactacaccaagggcatcaacgtgcgcctcgaggcgctctcggaactgctcgaggacggccgtgtcgacagtcacgacaccgtgttcgtgcagttggctacccccagccgggaacgcgtccagagctacatcgagatgcgtgaggacatcgaacgccaggtcggccacatcaacggcgagttcggcgacgtcggccacccgatcgtgcactacctgcaccggccgattccccgcgacgagttgatcgcgttcttcgtggccgccgacgtcatgttggtcacccccctgcgcgacgggatgaacctggtcgccaaggagtacgtggcctgccgcagcgatctggggggcgcactggtgctcagcgaattcaccggtgccgcagccgaactccgtcaggcgtacttggcgaacccgcaccacctcgaaggcgtcaaggatgccatcgaggcggcgctgaaccaggaccccgaagagggccgccgacggatgcgcgcgctgcgcaggcaggtcctcgcccacgacgtcgaccggtgggccagggcgttcctcgacgcgctcgccgacacccgcgcaggcgccaaaccggtccgagactag

SEQ ID NO: 145584 - protein, 489 aa, Mycobacterium sp. KMS
MASEGDPGVGSGDSDFVVVANRLPIDMERLPDGSTSFKRSPGGLVTALEPLLRKRHGAWIGWAGIPDSAEDPIEDDGLQLYPVSLSADDVADYYEGFSNATLWPLYHDLIVKPIYHRKWWDRYVEVNRRFAEATARAAAEGATVWVQDYQLQLVPKMLRMLRPDLTIGFFLHIPFPPVELFMQMPWRTEIIEGLLGADLVGFHLPGGAQNFLYLARRLTGANTSRATVGVRSRFGEVQVGFRTVKVGAFPISIDSDELDGKARNRAVRQRAREIRNELGNPRKILLGVDRLDYTKGINVRLEALSELLEDGRVDSHDTVFVQLATPSRERVQSYIEMREDIERQVGHINGEFGDVGHPIVHYLHRPIPRDELIAFFVAADVMLVTPLRDGMNLVAKEYVACRSDLGGALVLSEFTGAAAELRQAYLANPHHLEGVKDAIEAALNQDPEEGRRRMRALRRQVLAHDVDRWARAFLDALADTRAGAKPVRD

SEQ ID NO: 145585 - DNA, 1419 bp, Acidovorax sp. JS42
  CDS (1)..(1419): transl_table=11
atgagccgactcgtcgtcatctccaaccgcctggccgacccgcgcaagagcgctgccggtggcctggccgtggccctgggcgacgcgctggcacgcacgggcggcctgtggttcggctggagcggcaccgtcaccgcggacggcacgcccggcgaaggtgcgctgcaaacacaccaggccggcaacgtgaccctggccaccgtggacctgtgccaggcggaccacgcggcctactaccagggctacgccaacagcgtgctgtggccggtgctgcactaccggctggacctggccgacttcagcgccaattacagcgagggctaccgccgcgtgaaccagatgttcgcgcgcaagctgctgccgctgctgcgcgaggacgacgtgatctgggtgcacgactaccacctgatcccgctggcggcggagctgcgcgcgctgggttgccgccagcgcatcggatttttcctgcatgtgcccgttcccccgccgctcatcctcgcagcgctgccgcaacacgagtggttgatgcgttcgttctttgcctacgacctggtgggcctgcaaagcgaggccgacgtcgtccacttcacacgctacatggtcaacgaagcccatgcgcaagagctggacgggcagcgcctgcgcgccttcaacgccaccgtgcgcgtggcggccttccccatcggcatcgatgtgcaggagttccagcgcctgggccgcgcaccagacgccgtgcatacctgcgaagccctgcgcgcggagtattcacgccgccagctgctgctgggcattgaccggctggactactccaagggcatcccgcaccgcgtgcgcgccttccgccagctgctggaacgctaccccgagaacgaacacagcgccacactggtgatgatcgcctcgccctcgcgcgacgacgtgcacgcctatgccgacctgcgccaggagctggagggcctgtgcggcgccatcaacggcgactatggcgatctggactggatgccgctgcgctacatccaccgcaccgtcgcccgcaagcgcgtgcccggcctgtgccgcgcggcacgcgtggggctggtcacgccgctgcgcgacggcatgaacctggtggccaaggaatacgtggtggcgcaagagcccgaggacccgggcgtgctggtgctgtcgcgctttgccggcgcggccgagcaactcaaggaggccttgctggtcaacccctacgacacccagggcatggccgacgcgatccagaccgcgctgcgcatgccgctgtccgagcgccagtggcgccatgagcggctcatggaacgcatccagcgccaggacgtgcactggtggcgcaacagcttcctgcaggcgctgcgcgacgaggctgcgccgccggtcaccgcgccggcaggggccgtggcagccacttga

SEQ ID NO: 145586 - protein, 472 aa, Acidovorax sp. JS42
MSRLVVISNRLADPRKSAAGGLAVALGDALARTGGLWFGWSGTVTADGTPGEGALQTHQAGNVTLATVDLCQADHAAYYQGYANSVLWPVLHYRLDLADFSANYSEGYRRVNQMFARKLLPLLREDDVIWVHDYHLIPLAAELRALGCRQRIGFFLHVPVPPPLILAALPQHEWLMRSFFAYDLVGLQSEADVVHFTRYMVNEAHAQELDGQRLRAFNATVRVAAFPIGIDVQEFQRLGRAPDAVHTCEALRAEYSRRQLLLGIDRLDYSKGIPHRVRAFRQLLERYPENEHSATLVMIASPSRDDVHAYADLRQELEGLCGAINGDYGDLDWMPLRYIHRTVARKRVPGLCRAARVGLVTPLRDGMNLVAKEYVVAQEPEDPGVLVLSRFAGAAEQLKEALLVNPYDTQGMADAIQTALRMPLSERQWRHERLMERIQRQDVHWWRNSFLQALRDEAAPPVTAPAGAVAAT

SEQ ID NO: 145587 - DNA, 2181 bp, Crocosphaera watsonii WH 8501
  CDS (1)..(2181): transl_table=11
atgtcaaaaactatcattgtttccaatagacttccggtaaagatcgaaagaaaccaagccggagaatttgagtataaaaccagtgagggaggtctagctacagggcttgggtcggtttataaagaaggtgataatatatgggttgggtggccaggattagctgtcaacaaaactgaagacaaagaggaaatatgctctagattgaaagagtcaaatatgagtcctgtattcctcactaaaaatgaaatagaagaatactatgaaggctttagtaatgagaccctatggccaaacttccattattttaatcagtatgctgtatacagcgacgtattttggaatacctacaaaaaagtaaacaagaagtttgccaagaaacttgaggagataatcgaagacggggataagatttggattcatgactatcagttgttagttcttccggcaatgatcagagaaactcatcctaacagtagcattggattttttctccatatcccatttccttcctacgaatcatttagattattaccgtggagaacggatctcttgacaggtatgctgggagcagattttattggcttccacacctacgattatgtgcgtcactttctctcttctgtcaatagattggttggcataacggataatgatggtcacatgaatgtggggaataggttggctatggcagatgcaattcctatgggtattgattacaatcgatacgcacaggccgcagctgatcccgaaacactagcaagcgaggtaaagtatcgaatttctctgggtgatgtgaagttaatattatccatcgatagattggattattccaagggtataccccaaagattgcgagcttttgaacagtttatcgaagaaaatgaagaatttagggaagaggtttctttacttatactggtagttccatctcgagatcaggtgccgatgtatgccaatctcaagaaggaaatagaattgctagttggcagcatcaacggcaagtttggaactatcaactggaggccgatccattacttctacagaagctatcctttacatagcctaagtgccttttaccgaatgtcccacgtagcattggttactcctctaagggatgggatgaatctagtttgtaaagagtttgttgctagtaagttggacaaaaaaggtgtattaatattgagtgaaacggctggttctgccaaagagttgtcagacgcaattttaatcaatcccaatgatactaatcaaatggtcgaagccatgaaagaggctctgaagatgccagaggaggagcaaattgcacgaatggagaccatgcagaagtcattgaaaagatatgatatcaacgcttgggtaaaactcttcatgaagggattagaacaggtcaaagaggagcaagaaaatcttcggacaaaacccatttcttcagtggtcaaaaataaacttttgcaagaataccgtagctcaaaaaaacggatcattttccttgattatgacggcactttggtgggtttctatgctaatcctaatgactccgtaccagacgcagaattagaggagttgatgacgaagttaacggcagataccaacaatcaagtagttgtcatcagtggtagaggccgtgatttcttggagaaatggctctcaaaattcaatgttgatttcatcgccgagcatggggtttggcacaaagaaaatggaaaggagtgggagtgttttgtggaactagatacttcctggcaagaagaatttgatcgagtgctagagatgtatgtagatcgtacccctggctcttttatagagcgtaaggatttttccatggtatggcattacaggaaagtggagccaggtttgggtgaactaagatccagagaattggccaatcttttaaaatatttatccgccgacaaagatttacaagtccaagaaggtgatatggtcatcgaaattaaaaacgccagggtgaacaagggggttgctgccgcttcctggttgaagaaaaacgattacgatttctcttttgcctgtggtgatgactggaccgatgaggatacctttaaagccatgccagaggacgcatttaccgttaaagtcgggtcttcttcgtcggctgcaaaatatcgggttgagaactttaaggatatccgtaaactgttattgagcctagctaatcagtag

SEQ ID NO: 145588 - protein, 726 aa, Crocosphaera watsonii WH 8501
MSKTIIVSNRLPVKIERNQAGEFEYKTSEGGLATGLGSVYKEGDNIWVGWPGLAVNKTEDKEEICSRLKESNMSPVFLTKNEIEEYYEGFSNETLWPNFHYFNQYAVYSDVFWNTYKKVNKKFAKKLEEIIEDGDKIWIHDYQLLVLPAMIRETHPNSSIGFFLHIPFPSYESFRLLPWRTDLLTGMLGADFIGFHTYDYVRHFLSSVNRLVGITDNDGHMNVGNRLAMADAIPMGIDYNRYAQAAADPETLASEVKYRISLGDVKLILSIDRLDYSKGIPQRLRAFEQFIEENEEFREEVSLLILVVPSRDQVPMYANLKKEIELLVGSINGKFGTINWRPIHYFYRSYPLHSLSAFYRMSHVALVTPLRDGMNLVCKEFVASKLDKKGVLILSETAGSAKELSDAILINPNDTNQMVEAMKEALKMPEEEQIARMETMQKSLKRYDINAWVKLFMKGLEQVKEEQENLRTKPISSVVKNKLLQEYRSSKKRIIFLDYDGTLVGFYANPNDSVPDAELEELMTKLTADTNNQVVVISGRGRDFLEKWLSKFNVDFIAEHGVWHKENGKEWECFVELDTSWQEEFDRVLEMYVDRTPGSFIERKDFSMVWHYRKVEPGLGELRSRELANLLKYLSADKDLQVQEGDMVIEIKNARVNKGVAAASWLKKNDYDFSFACGDDWTDEDTFKAMPEDAFTVKVGSSSSAAKYRVENFKDIRKLLLSLANQ

SEQ ID NO: 145589 - DNA, 1380 bp, Erythrobacter sp. NAP1
  CDS (1)..(1380): transl_table=11
gtggtgatttccaatcgcgtcgccgttccaaaggcgcgcggggtggcgggtgctcagggagggctcgcaggcgcgcttaacgcagcgctcaaggaccggggcggggtatggttcgggtggtccgggcaggagagcgaagaccgcaccggcaacatggacctgcaacgcaatgacggtgtgacgacggcaacaatcgacctctcaacccgcgacgtgggtgagtactacaacggttatgccaattcgacgctgtggccactgtttcattaccgcattgatcttgcccggttcgagaaccgcaccggcgagggctatgaaagggtcaacgaccgttttgccgagagcgcgctcccgctgatcgaagaagacgacctcgtctgggtgcacgattatcacctgatcccgcttggcgaacggcttcgttcgcgcgggatcaaaaaccgcatcggtttcttcctgcacacgccgtggccgccgacgcggctgctgacctcgttgccgtttcatgagcggctggtgcgcacgatgctttcctacgatctgatcggctttcagacgaaggagtggctctcaagcttcgtccactattgcgagaccgagctaggcgcgaaggtcgatcacgataccgggcgcatcacgcatgaaggccggacgaccaccgcgcgcgcttatcccatcgggatcgattggaaacactttcaggcgcagggcgacacaggcgaagcgcgcaatgctagccagcgcctcctcgcatcgacccggcacaggaccgcgatgattggggtcgaccggctcgactattccaagggactgcctgaacggatcgacggcatcgggcgcttcttcgacgagcatcctgagcgaacacgcgacctggttttcatccagatcgctccgccgagccgcgaagacgtggaaagctaccagcagatccgcgggttgcttgagcagaagaccggacagatcaacggcgcgcgcagcgaggttgatatcgttccgatccgctatgtgaaccgaggctacactcacgcccagctattcgggtttttccgcgcagccaagatcgggctcgtcacccctctgcgtgacgggatgaacctggtcgccaaggaatatgttgccgctcaagacccggaagatccgggcgtactggtcctctcggaattcgcgggcgcagcgcatcagctaggatgcgatggcaagggcgccgtgctggtcaatccccacagccccgacgcgctggcgggcgcgatccgcaaggcgctcgacatgccgcttgaagagcgcaagtcgcgctacgaggcgatgattgcgacggtgcgcgacgatgatgttcgcgactggacccagaatttctgcactgatctcgcggctgactga

SEQ ID NO: 145590 - protein, 459 aa, Erythrobacter sp. NAP1
MVISNRVAVPKARGVAGAQGGLAGALNAALKDRGGVWFGWSGQESEDRTGNMDLQRNDGVTTATIDLSTRDVGEYYNGYANSTLWPLFHYRIDLARFENRTGEGYERVNDRFAESALPLIEEDDLVWVHDYHLIPLGERLRSRGIKNRIGFFLHTPWPPTRLLTSLPFHERLVRTMLSYDLIGFQTKEWLSSFVHYCETELGAKVDHDTGRITHEGRTTTARAYPIGIDWKHFQAQGDTGEARNASQRLLASTRHRTAMIGVDRLDYSKGLPERIDGIGRFFDEHPERTRDLVFIQIAPPSREDVESYQQIRGLLEQKTGQINGARSEVDIVPIRYVNRGYTHAQLFGFFRAAKIGLVTPLRDGMNLVAKEYVAAQDPEDPGVLVLSEFAGAAHQLGCDGKGAVLVNPHSPDALAGAIRKALDMPLEERKSRYEAMIATVRDDDVRDWTQNFCTDLAAD

SEQ ID NO: 145591 - DNA, 1500 bp, Synechococcus sp. RS9917
  CDS (1)..(1500): transl_table=11
atgttgaaagaagaaggcaaaagctcattcattcttctctaccaccgcaccccttttgacgagggaaaggatgagcagggtaagcgaatctggatcgatcagaaaagccccaacggcatcattccaaccctgcggaacctgtttcgcagccgcctcgatggcacctggatcgcctggcgtcaggttgaatcgaccgaaggggtcgaagacgagcgcatagccatgaaggcgccggcagaattcacattgcgacgcattccgctcgagcaggagcagatctcaagtttttatcacgtcacatcgaaggaatcgttctggccgattcttcacacttttcccacctatttcgacgtcaacaacacggactggaccatctttcaggacgtcaatcgacgttttgcccaagccgcctgccatgaggctggtcacggggccaccgtgtgggtgcacgactacaacctctggctagcccccggctacatccgagagcaacgccctgatctgaaaatcgcctttttccatcacacccccttccccgggaatgatgtgttcgcgattctgccctggcgggagcagatcctggaaagtctgctcagttgcgatctcgttggttttcatatcccgcgttacaccgaaaacttcgcccgagccgccaattgcctgctgggcgcccgcaagggaccgaagcagccggtcaacgcccgcttcctctccaccggctccgccctcacggaaccgtcggaaaccccctggctcgactacaaaggccggcggattcagctgctctcgtcgccggtgggcacctcaccggatgtgattcaggccctggtgaatcgcgacgacattcaggactatgccgcccgcatcgaagatgacacccgcaagggtcgtcagctgatcctctcggccagccgggtggattacaccaagggcaacgaggagttgttgctggccttcgagcgcctgctggaacgtcgcccggaattgcacggccaggtggtgctcatgcttgcctgtgtgtcggctgccagtgggatgaagatctacgacgacacgcagcgttccatcgaagaaatggccgggcggatcaatgggcgcttcagcctcatggactgggtgccgatccgcttctcgacccgccggattccctacgaagaaatggtggcctggttcagcaaagccgatgtttgctggatcacccccctgcgggatggtctcaacctggtggccaaggaatacgccgctgcccgccgcgatcacggcggcgttctggtgctctccgaattcaccggtgcctcggtggtgctggatggtgccgtgctcaccaatccctattcccatcgccggatggatgaggccatcgatcaggccctggcgatgcctcccgaggaacagcaacagcgcatgcgcaagatgtcggccgccgtggaggcgttcaccgtcagtgactgggctgaagagcagatgggagccctgcgcgaggagtccgccgcggcatga

SEQ ID NO: 145592 - protein, 499 aa, Synechococcus sp. RS9917
MLKEEGKSSFILLYHRTPFDEGKDEQGKRIWIDQKSPNGIIPTLRNLFRSRLDGTWIAWRQVESTEGVEDERIAMKAPAEFTLRRIPLEQEQISSFYHVTSKESFWPILHTFPTYFDVNNTDWTIFQDVNRRFAQAACHEAGHGATVWVHDYNLWLAPGYIREQRPDLKIAFFHHTPFPGNDVFAILPWREQILESLLSCDLVGFHIPRYTENFARAANCLLGARKGPKQPVNARFLSTGSALTEPSETPWLDYKGRRIQLLSSPVGTSPDVIQALVNRDDIQDYAARIEDDTRKGRQLILSASRVDYTKGNEELLLAFERLLERRPELHGQVVLMLACVSAASGMKIYDDTQRSIEEMAGRINGRFSLMDWVPIRFSTRRIPYEEMVAWFSKADVCWITPLRDGLNLVAKEYAAARRDHGGVLVLSEFTGASVVLDGAVLTNPYSHRRMDEAIDQALAMPPEEQQQRMRKMSAAVEAFTVSDWAEEQMGALREESAAA

SEQ ID NO: 145593 - DNA, 1479 bp, Synechococcus sp. WH 5701
  CDS (1)..(1479): transl_table=11
atgaagcgcggaagcagcaatttcgtccttgtttaccacaggtctccctacgaagaaaccttcgacagcgaaggcaatcgccagtgggtcgaccagaaaagccccaacggtgtcatcccaactcttcggaatctgtttctggaggagcgatcaggaacttggatctcctggcgccaggatgccaattgttccgccaatgccgatgaacggctgaatctcacatcaccaagtccattcaccctcagaaggcttcccttaaccccggagcagatctccagtttttatcacgtcacctccaaagagtcgttctggccaatcctgcacaacttcccagggttattcagcgtcgataattccgactgggccacctttgaagaggtcaaccgctcctttgcgcgtgccgcctgtgaggaagcagcccctggtgccaccatctggattcacgattacaacctctggctcaccccggcaatgatccgcgagcagcgccaggatgttcgcatcgccttcttccaccacaccccgtttccctccagcgacgtcttcagcatccttccctggcgcgatgagatcctcgacagcctgctcagctgcgacctcgtcggctttcacattccctcctacgccaacaacttcgcccgctgcgccatcaacctgcgcggggctgaaggggccgatcccgttcccgtggccaagaaattccgccgctatggcagtgccctctcggaacccacggtggtgccctggatcgatcacaactgccgccgggttcacatccaggcctctcctgtgggcacctcccctgagctcatccgcgacctggtggtcacaccagcggtgaaggccatggccaacacgatcgccgagcagcacgagggccggaaactgattctctccgcctccagggtcgactacaccaaagggaacgaggaaatgctgctggcctatgagcgcctgctggagcagcagccgcgctggcatggcggagtcgagctgttcctgggttgtgtggcggcggccagtggcatgcgcatctacgaagacatccagcgttcggtggaggagattgtgggccgtatcaacggccgcttcgggcgcatcgactggactcctgttcggctctccacccaccgcacgtcctacgaggagctgatgggctggttcagccaggccgacgtctgctggatcaccccgttgcgggacggcctcaacctggtggccaaggaatacgtggcggcccgccagggactggggggcgtgctggtgctctcggaattcaccggcgcttcggtggagctggaggatgcggtgctcaccaatccctactcccatcgcagcatggaccgggccatcagcgacgccctcgacatgccccaggaggagcaggtgcagcggatggcctcgatgacccaggccgtggatgaattcacggttcagcactgggccgagcagcaattgggcacgctcaggtccctctag

SEQ ID NO: 145594 - protein, 492 aa, Synechococcus sp. WH 5701
MKRGSSNFVLVYHRSPYEETFDSEGNRQWVDQKSPNGVIPTLRNLFLEERSGTWISWRQDANCSANADERLNLTSPSPFTLRRLPLTPEQISSFYHVTSKESFWPILHNFPGLFSVDNSDWATFEEVNRSFARAACEEAAPGATIWIHDYNLWLTPAMIREQRQDVRIAFFHHTPFPSSDVFSILPWRDEILDSLLSCDLVGFHIPSYANNFARCAINLRGAEGADPVPVAKKFRRYGSALSEPTVVPWIDHNCRRVHIQASPVGTSPELIRDLVVTPAVKAMANTIAEQHEGRKLILSASRVDYTKGNEEMLLAYERLLEQQPRWHGGVELFLGCVAAASGMRIYEDIQRSVEEIVGRINGRFGRIDWTPVRLSTHRTSYEELMGWFSQADVCWITPLRDGLNLVAKEYVAARQGLGGVLVLSEFTGASVELEDAVLTNPYSHRSMDRAISDALDMPQEEQVQRMASMTQAVDEFTVQHWAEQQLGTLRSL

SEQ ID NO: 145595 - DNA, 2274 bp, Marinobacter sp. ELB17
  CDS (1)..(2274): transl_table=11
atgctactcgccaccgaccttgacggtacttttctcgcgggtgatccggaaaatcgcctcaagctttatcgactcatcgttgctcaccccgagatcgatttagtgtttgttaccggtcgagggctggaagccgtactacccctgctgtccgatccgacgattccgcagcccgactatattatctgcgatgtcggctgtaccgtggttcatggcgcctcgcaacaagccatccagcccctgcagggcgaaatcgacgaactctggccaggtgagcaagttgtggagagcgccctgtcctcatttgaaggcttgcagcgtcaggaagtccctcaggagcgccgcgtctcttacttctgtgacaacgacctggtcagcgaagacatgctggcacgcgtcagcgcattatcctgtgatgtacttttttccgcgggcaagtatctggacatacttccgcggggcgtcaacaagggacgcaccctgtcccgtctggttgaacacctgggggtagacccagaatcggtcttggttgccggtgacaccctgaatgacctgtcgatgtatcaacacgaattcaagggtgtctgtgtcggtgagtccgaggccggactgctggcagcaaccgagcaccaggcgcgagtacttcatgctggagcgtcgggctgtggtggcattctggaggcattcgaacattttggttatctgggccatctgggtattgaagccgaaattccggattacatgaacaggggcaaatccgacctggtgattgtctaccatcgcctgccctatgaagaagtggttgagaatggggagttgattcgacgtcggcccaaatcgcccaatggcatcatccccacactgctaagcttcttctccgatggcaaagcgggttcgtgggtcgcctggtcagttgacgatcccgatctcggccccttccagacccacaccgaagtggataccagccgctacgaaaaattggtcgcggcacgagtagcactgagcgaagaagacgttgagatcttttacaaacgattctcgaaagaagccttctggccgaccctgcacaccttttgggagcgggccacgttccgcgatgaccactggcaggtgtacctcaaggtcaacaggttgtttgcagagcgcgccgccgaggaagcggcggaaaacgccgtggtctggattcacgattacaatctgtggatggtacctgcctatttacgcgagatgcggccagacctcactatcgcctttttccatcacacctacttcccgtcagccgacgtattcaacgtgctgccctggcgccgcgaaatcatcggcagcctgttgcagtgtgaccacattggttttcatattccccggcaggccgagaactttgtggatgtggctagaggcgtcacaccgcttgaggtcacccataaaatgggctgtgcaccgcgctttctgacctatggctgcgcggtgggtctagatgaaatgagcaccgaaatcacagtgaatgaccgcaagatcgggctgggtgcacacccggtcgggcttgacctgaatcgcgttcgtaccgccctgtctgaccagagtgtcatcgcgcaaatggaaacactgcgtgaagagttcaaggatgttcggctgattttgtcggtggagcgtctcgacttcaccaaaggcattattgaaaagctacaggcttatgagcgcattctgaacgagcatcctgaactgaaaaccaaagtcacccttatgctgatctgcgtgccggcggcggccggaatgactatttacgaggaattgctgtcgcagatcgaacaaacggtggggcgcattaacgggcagtttgcacaggtcgggtggaccccggtgcagttcttcttccgcgccctgccctttgaagagctggtggcctattacaccatagccgatgtgatgtggattacgccgctgcgggatggcctgaacctggtcgcaaaagaatacatcgcaacccagggcttaacccaaggcagtggcgtactggtgctgtctgaatttgccggcgctgcggcagaactgcgcggcgccattctggcgaatccgcaccacccgcaggacctggccgatacctgctactacgcgttggcaatcagccgaagcgaagcccggaatcgactgagcgaagccttcgaagtggtttgccgttatgacatcgagtattgggggcgggagtttatcaatgaggttgaacgccgacgcgcaacaaaattaaacaagattttggccataggtcatcgcgcggcctga

SEQ ID NO: 145596 - protein, 757 aa, Marinobacter sp. ELB17
MLLATDLDGTFLAGDPENRLKLYRLIVAHPEIDLVFVTGRGLEAVLPLLSDPTIPQPDYIICDVGCTVVHGASQQAIQPLQGEIDELWPGEQVVESALSSFEGLQRQEVPQERRVSYFCDNDLVSEDMLARVSALSCDVLFSAGKYLDILPRGVNKGRTLSRLVEHLGVDPESVLVAGDTLNDLSMYQHEFKGVCVGESEAGLLAATEHQARVLHAGASGCGGILEAFEHFGYLGHLGIEAEIPDYMNRGKSDLVIVYHRLPYEEVVENGELIRRRPKSPNGIIPTLLSFFSDGKAGSWVAWSVDDPDLGPFQTHTEVDTSRYEKLVAARVALSEEDVEIFYKRFSKEAFWPTLHTFWERATFRDDHWQVYLKVNRLFAERAAEEAAENAVVWIHDYNLWMVPAYLREMRPDLTIAFFHHTYFPSADVFNVLPWRREIIGSLLQCDHIGFHIPRQAENFVDVARGVTPLEVTHKMGCAPRFLTYGCAVGLDEMSTEITVNDRKIGLGAHPVGLDLNRVRTALSDQSVIAQMETLREEFKDVRLILSVERLDFTKGIIEKLQAYERILNEHPELKTKVTLMLICVPAAAGMTIYEELLSQIEQTVGRINGQFAQVGWTPVQFFFRALPFEELVAYYTIADVMWITPLRDGLNLVAKEYIATQGLTQGSGVLVLSEFAGAAAELRGAILANPHHPQDLADTCYYALAISRSEARNRLSEAFEVVCRYDIEYWGREFINEVERRRATKLNKILAIGHRAA

SEQ ID NO: 145597 - DNA, 1488 bp, Saccharomyces cerevisiae
  CDS (1)..(1488)
atgactacggataacgctaaggcgcaactgacctcgtcttcagggggtaacattattgtggtgtccaacaggcttcccgtgacaatcactaaaaacagcagtacgggacagtacgagtacgcaatgtcgtccggagggctggtcacggcgttggaagggttgaagaagacgtacactttcaagtggttcggatggcctgggctagagattcctgacgatgagaaggatcaggtgaggaaggacttgctggaaaagtttaatgccgtacccatcttcctgagcgatgaaatcgcagacttacactacaacgggttcagtaattctattctatggccgttattccattaccatcctggtgagatcaatttcgacgagaatgcgtggttggcatacaacgaggcaaaccagacgttcaccaacgagattgctaagactatgaaccataacgatttaatctgggtgcatgattaccatttgatgttggttccggaaatgttgagagtcaagattcacgagaagcaactgcaaaacgttaaggtcgggtggttcctgcacacaccattcccttcgagtgaaatttacagaattttacctgtcagacaagagattttgaaaggtgttttgagttgtgatttagtcgggttccacacatacgattatgcaagacatttcttgtcttccgtgcaaagggtgcttaacgtgaatacattgcctaatggggtggaataccagggcagattcgttaacgtaggggccttccctatcggtatcgacgtggacaagttcaccgatgggttgaaaaaggaatccgtacaaaagagaatccagcaattgaaggaaactttcaagggctgcaagatcatagttggtgtcgacaggctggattacatcaaaggtgtgcctcagaagttgcacgccatggaagtgtttctgaacgagcatccagaatggaggggcaaggttgttctggtacaggttgcagtgccaagtcgtggagatgtggaagagtaccaatatttaagatctgtggtcaatgagttggtcggtagaatcaacggtcagttcgatactgtggaattcgtccccatccatttcatgcacaagtctataccatttgaagagctgatttcgttatatgctgtgagcgatgtctgcttggtctcgtccactcgtgatggtatgaacttggtttcctacgaatatattgcttgccaagaagaaaagaaaggttccttaatcctgagtgagttcacaggtgccgcacaatccctgaatggtgctattattgtaaatccttggaacaccgatgatctttctgatgccatcaacgaggccttgactttgcccgatgtaaagaaagaagttaactgggaaaaactttacaaatacatctctaaatacacttctgccttctggggtgaaaatttcgtccatgaattatacagtacatcatcaagctcaacaagctcctctgccaccaaaaactga

SEQ ID NO: 145598 - protein, 495 aa, Saccharomyces cerevisiae
MTTDNAKAQLTSSSGGNIIVVSNRLPVTITKNSSTGQYEYAMSSGGLVTALEGLKKTYTFKWFGWPGLEIPDDEKDQVRKDLLEKFNAVPIFLSDEIADLHYNGFSNSILWPLFHYHPGEINFDENAWLAYNEANQTFTNEIAKTMNHNDLIWVHDYHLMLVPEMLRVKIHEKQLQNVKVGWFLHTPFPSSEIYRILPVRQEILKGVLSCDLVGFHTYDYARHFLSSVQRVLNVNTLPNGVEYQGRFVNVGAFPIGIDVDKFTDGLKKESVQKRIQQLKETFKGCKIIVGVDRLDYIKGVPQKLHAMEVFLNEHPEWRGKVVLVQVAVPSRGDVEEYQYLRSVVNELVGRINGQFDTVEFVPIHFMHKSIPFEELISLYAVSDVCLVSSTRDGMNLVSYEYIACQEEKKGSLILSEFTGAAQSLNGAIIVNPWNTDDLSDAINEALTLPDVKKEVNWEKLYKYISKYTSAFWGENFVHELYSTSSSSTSSSATKN

SEQ ID NO: 145599 - DNA, 1482 bp, Propionibacterium freudenreichii subsp
  CDS (1)..(1482): transl_table=11
gtgagtgaggatcaactatccatccccagtgcgcccgccaacgatggacgtaccgaagatcccgtaccgcgcgatgcccctgccgccggcacatcacagtttgtcgtggtggccaacaggcttccggtggatcgcgtacagaatgacgacgactcctcgggctgggccctgtctcccggcggcctggtgacggccctcatccccgtgatgaaggaccatggtggcacctgggtcggctgggtcggctcggccgacgaacatatccagcccttcaccttcgacggctatggcatcatgcccgtggacctgtcggcccaggaattcaatgagtactacgagggcatgtcgaatgccaccttctggccgctctaccacgactgcgtcgagcaccctgaataccaccgtgaatggtgggacagctatatggaggtgaaccaacggttcgccaccgctgcggcggaggtcgccgcacccggcgccactgtgtgggtccaggactaccaattgcagaatgtgcctgcgctcctgcgccaaatgcgccccgacctgaagatcgggttcttcctgcacattccctttccgccctcggagctgttcatgcaactgccatggcgctaccaggtgatcagtggactgctcggctccgaccagatcggtttccaggaccccggttcggcccgcaatttcgcgcacctggtccgtcgcctggccggcatgcgcacccagggcgaccgcatcttctcccccgacggccgagtgatcctggcgcgtgcctatcccatctccattgacgcgcaggggatcctcgacctgtcgcgcacgccacaggcgagggccgaggccgagcagctccgcgaggacctgggcaatcccgacaagatcttcctgggcgtcgaccggctcgactacaccaagggcctgcgtcatcgcgtgcgggccttcggcgagttgttcacctccgggcaactcgacccgatgcgcaatgtctacctgcagatcgccaccccgacccgtgagggcgtggcgcgctaccaggtgttgcgcagcatcatcgatgagatggtcggacgcatcaactcgtccgtcgggcgcatcgggcgctcccccatcgagtaccgccacgccagctaccccaagatggccctggccgcgatgtaccgggccgccgatgtgatggtggtgaccccgctgcgcgatggcatgaacctggtggcgaaggaatacgtggcctcccacgattcggacgccggtgccctggtactcagcgaattcgccggcgcctcactggagctgaaacaggcctacatggtcaatccctacgacctcaacggcatgaagaaccagctgttgcgcgccgcgggcgacacccatgcgaaccatgtgcgccgcatgcggtccatgcgcaagcaggtcttccgccatgacatcgacgcgtgggccaacagcttcctgaccgatctgggcacggaacggtccgtgtga

SEQ ID NO: 145600 - protein, 493 aa, Propionibacterium freudenreichii subsp
MSEDQLSIPSAPANDGRTEDPVPRDAPAAGTSQFVVVANRLPVDRVQNDDDSSGWALSPGGLVTALIPVMKDHGGTWVGWVGSADEHIQPFTFDGYGIMPVDLSAQEFNEYYEGMSNATFWPLYHDCVEHPEYHREWWDSYMEVNQRFATAAAEVAAPGATVWVQDYQLQNVPALLRQMRPDLKIGFFLHIPFPPSELFMQLPWRYQVISGLLGSDQIGFQDPGSARNFAHLVRRLAGMRTQGDRIFSPDGRVILARAYPISIDAQGILDLSRTPQARAEAEQLREDLGNPDKIFLGVDRLDYTKGLRHRVRAFGELFTSGQLDPMRNVYLQIATPTREGVARYQVLRSIIDEMVGRINSSVGRIGRSPIEYRHASYPKMALAAMYRAADVMVVTPLRDGMNLVAKEYVASHDSDAGALVLSEFAGASLELKQAYMVNPYDLNGMKNQLLRAAGDTHANHVRRMRSMRKQVFRHDIDAWANSFLTDLGTERSV

SEQ ID NO: 145601 - DNA, 2481 bp, Spodoptera exigua
  CDS (1)..(2481)
atgagtggaacggacagcagtgccagtcgatccgcgtgcaacagcaagggcagcatgatcgttgtgtcgaaccgattgccttttattttgaagagaaatgaaaaaaccggcgaactcgagaggaaagccagcgccggtggtttggtcacagctgtggcccccgtagtaatcaggggtagtggcatctgggtaggatggccaggaatacacctggacgaccccaatgagaagattccagagtccaaccccaatgacaagacccccaccgctggtttgctgtctgagaagattgtaccaatccacgccgaaccaaaacttttcgacagttactacaatggctgctgcaacggtaccttctggcctttgttccactccatgcctgacagagctactttcattgccgaccactggaaggcatacatcaagtgcaatgaggagttcgctgagaagacagtccacgctctccatttgctcaaacagcagaaggggaagaatggcaactcaccgccaatcgtatgggtccatgattatcatctcatgttagctgctaactggataagacagcgagctgaagaagatgaaatcaagtgcaagttagcattcttcttgcacattccgttcccaccatgggacatattcagactgttcccatggtcagatgaagtacttcagggcattctgggttgtgatatggtgggtttccatataacagattactgcctgaacttcattgattgctgccaaagaaacttaggttgtcgtgtggacaggaagaatctcctggttgagttgggaggccgcaccatttgtgtgcgacctctgccaattggagtacccttcgacagattcgtacagttggcacagaacgcgaaaccagtgctctctaccaaccaacaagttatattaggagtcgatagactggattataccaaaggattagtacatagactgaaagccttcgagaggctgctggagaagtatccagaacacatcgagaaagtagtactgcttcaaatctcagtgccgtccagaacggacgtcaaggagtaccaagacttgaaagaagggatggatcaattagttggaagaattaacggcagatttactactcccaactggtcacctattaggtacatttatggatgcgtcggacaggatgaactagcagcattctaccgtgacgctgcagccgccttggtaacacctctgcgagacggtatgaacctcgtggcgaaggagttcgtcgcttgccagatcaacaagccaccaggagtgctgatagtgtcgcccttcgctggtgctggagagatgatgcacgaggctctcatctgcaacccatatgagctggatgacgctgctgaagtcattcacagggctctgataatgcctgaggatgagcgcacagtccgtatgaaccatctgaggaggcgagagcagctcaatgatgtcgacagctggatgaaagcgttcctcaaagctatggactcgttggaagaggaagctgatgacatcggagctacatccatgcagcccgttactattgacgacttcgatgaatatctgtcaaaatacatcggctacacgcaaaagctggcacttttactggactacgatggtactctagcacccatagcgcctcaccccgacctggcgacactgccgctggagaccaaacatacgttgcagagactctccaatatgtccgatgtttacatcgcgattatctccggcagaaacgtcgataacgttaagaatatggtgggcatcgaaggcatcacttatgctggtaaccacggtctggagatcctgcaccctgatggcagtaagttcgtgcaccccatgcccatggaactgcaagatgcagttgttaaactgctcaaggctctgcaagaacaggtttgcaaagatggcgcttgggtagaaaacaagggtgccctgcttactttccactaccgtgagacacctgtggcgaaacgtgctgcgctggcagaacaagcgaggaagctcatcacagaggctggttttacaccagcacccgcgcattgcgccttagaagctcgcccaccagtagaatgggacaaaggtcgtgcatcaatttacatcttgaggacggcctttggtctggactggagtgaaaggattaggattatctatgccggtgacgacgtcaccgatgaagacgccatgttggctctgaaaggtatggcagctactttccgtatcgcgtcgtctaacatcacgaagacatcagcagagaggcgattgtcgtcaacggactcagtgctcgccatgttgaagtgggtggaacgacacttttcccgccgcaagccgcgcgccaactcgttgacgtacaaaaacgcgcgaaaagcccgcgacaccatacagatgcacatgtcgtaccagatgcccgccaaaacgtcaccacgacacacgccgcccctcacgccagacaaaacctccagcggttcagagtccagttaa

SEQ ID NO: 145602 - protein, 826 aa, Spodoptera exigua
MSGTDSSASRSACNSKGSMIVVSNRLPFILKRNEKTGELERKASAGGLVTAVAPVVIRGSGIWVGWPGIHLDDPNEKIPESNPNDKTPTAGLLSEKIVPIHAEPKLFDSYYNGCCNGTFWPLFHSMPDRATFIADHWKAYIKCNEEFAEKTVHALHLLKQQKGKNGNSPPIVWVHDYHLMLAANWIRQRAEEDEIKCKLAFFLHIPFPPWDIFRLFPWSDEVLQGILGCDMVGFHITDYCLNFIDCCQRNLGCRVDRKNLLVELGGRTICVRPLPIGVPFDRFVQLAQNAKPVLSTNQQVILGVDRLDYTKGLVHRLKAFERLLEKYPEHIEKVVLLQISVPSRTDVKEYQDLKEGMDQLVGRINGRFTTPNWSPIRYIYGCVGQDELAAFYRDAAAALVTPLRDGMNLVAKEFVACQINKPPGVLIVSPFAGAGEMMHEALICNPYELDDAAEVIHRALIMPEDERTVRMNHLRRREQLNDVDSWMKAFLKAMDSLEEEADDIGATSMQPVTIDDFDEYLSKYIGYTQKLALLLDYDGTLAPIAPHPDLATLPLETKHTLQRLSNMSDVYIAIISGRNVDNVKNMVGIEGITYAGNHGLEILHPDGSKFVHPMPMELQDAVVKLLKALQEQVCKDGAWVENKGALLTFHYRETPVAKRAALAEQARKLITEAGFTPAPAHCALEARPPVEWDKGRASIYILRTAFGLDWSERIRIIYAGDDVTDEDAMLALKGMAATFRIASSNITKTSAERRLSSTDSVLAMLKWVERHFSRRKPRANSLTYKNARKARDTIQMHMSYQMPAKTSPRHTPPLTPDKTSSGSESS

SEQ ID NO: 145603 - DNA, 1416 bp, Rhizobium leguminosarum bv
  CDS (1)..(1416): transl_table=11
atgagccgtcttgtcgtcgtttcaaatcgtgttcccatgccggccaaagatgggagcgccgctgccggcggcctggccgtcgcgctgcaggcagccctgcaggagcggggcggcatctggatgggatggtcgggagaatcgagcggggacagggaacctggccctctgtcgcaactgcagaagggcaacatcacctatgcgctgaccgatctcaccgacaccgacgtcgaggagtattatcgcggcttcgcaaaccgcgttctctggcccatctgccattatcgactggacctcgccgaatatggccggaaggaaatggccggctatttccgcgtcaaccgcttcttcgctcacaggttggcgccgatgatcgagccggacgacatcatctgggttcatgattaccacctcattccgctggcggccgaactgcgccaaatggggctgaaaaaccggatcggcttcttcctgcacattccctggccgccggccgacattctcgtcacgatgcccgtccatgaagaaatcatgcgcgggctctcgcattacgatctcgtcggcttccagaccgactacgacctccagaactttgccgggtatctcagaagggagggaattggcgacgacctcggaaatggattgttcgattcccatggacggatattcaaggccggcgcctatccgatcgggatcgaaaccgcaggtttcgccgagttcgccgagagagccgcaaaccatatcatggtacagaagacccggcgcagcgttgaaggccgggacatgatcatcggggtcgaccgcctcgattattcgaagggcatcattcagagactggaagcgttcgaaaccttcctcaccagcaatcctgcctaccagaacaaggtcacctatcttcaggtcacgccaaaatcgcgatcggaagttcccgaatacgagcatatgcagaagatggtcgccgaacaggccggccgcgtcaacggcgccatcggaacggtcgactgggtgccgatccgctatgtcaaccgatcgatcagtcgcaacgtgctcgccggcctctaccggctggcgacgatcgggctggtcacgccgttgcgcgacggcatgaacctcgtcgccaaggaatatgttgccgcccaggatcccgatcggccgggcgtattggtgctatcgcgtttcgccggcgcggctcgagagttgaagggcgcactgctggtcaatccttacgatgtcgaaggcactgccaatgccatcgccaagggccttgccatgtcgctggaggagcgccgcaaccgctggagtatgatgatggagcatctgctaacccatgacgtctcactttggtgcgaaaacttcttgggagacttggtacttgctcccgagcctcgactggagcgtgactcccggacaggctcctga

SEQ ID NO: 145604 - protein, 471 aa, Rhizobium leguminosarum bv
MSRLVVVSNRVPMPAKDGSAAAGGLAVALQAALQERGGIWMGWSGESSGDREPGPLSQLQKGNITYALTDLTDTDVEEYYRGFANRVLWPICHYRLDLAEYGRKEMAGYFRVNRFFAHRLAPMIEPDDIIWVHDYHLIPLAAELRQMGLKNRIGFFLHIPWPPADILVTMPVHEEIMRGLSHYDLVGFQTDYDLQNFAGYLRREGIGDDLGNGLFDSHGRIFKAGAYPIGIETAGFAEFAERAANHIMVQKTRRSVEGRDMIIGVDRLDYSKGIIQRLEAFETFLTSNPAYQNKVTYLQVTPKSRSEVPEYEHMQKMVAEQAGRVNGAIGTVDWVPIRYVNRSISRNVLAGLYRLATIGLVTPLRDGMNLVAKEYVAAQDPDRPGVLVLSRFAGAARELKGALLVNPYDVEGTANAIAKGLAMSLEERRNRWSMMMEHLLTHDVSLWCENFLGDLVLAPEPRLERDSRTGS

SEQ ID NO: 145605 - DNA, 1443 bp, Rhodococcus opacus
  CDS (1)..(1443): transl_table=11
gtgaaagacactgctccgtacggcacgtccgacttcgtggtggtcgccaaccgactgcccgtggacatggagacactcgacgacgggacgacacgctggaagcggagcccgggaggcctcgtcacagccctggaaccgatccttcacgaccgggaacgcggttcctgggtgggctggcccggtgtgcccgacacgaaggtcgaaccgatcgtctccggcgggatcgacctgtacccggtggagctgagctcgaccgaggtctcgctgtactacgaaggattctcgaacgcgacgctgtggccgctgtaccacgacgtgctggtggcgccggtcttcgaccgggactggtggcactcgtacctggacgtgaatcgccacttcgccgaggagaccgcgcgcaccgccgccgagggcgcaaccgtgtgggtgcaggactaccagctgcagctggtgccccgtctgctgcgggagatgcgccccgacctgaccatcgggttcttcctccacatccccttcccgcccgtcgaactgttcatgcagttgccgtggcgcaaggagatcgtcgaggggctgctcggcgccgatctcatcggcttccacctgcccggcggcgccaacaatttcctgttcctggcgcgcaggctgctgggactcgacaccaccaccgcaggcgtcggcgtgcgcagcgcactcggccgggtgacactcgacgaccgggtcgtgcaggtcggagcgttccccatatccgtcgactcgcggcaactggtcgaacaggccaccgatcccgccatcgtcgaacgggccgccgagatccgccgcgagctcggaacccccgcgaagatcctcctcggagtcgaccgactcgactacacgaagggcatcgacctgcggctctcggcgctcggtgaactgctcgacgagggccggctcgatccgtccgacaccgtgatggtgcagctcgccaccccgagccgtgaacgcgtcgagcactacatgaagatgcgcagttccatcgaggagcaggtcagccacatcaacggtgatcacggtcagatcggccggccggtcgtgcactacctctatcagccggtcgatcgcagcgagctgatcgcgctgttcctggccgccgacgtcatgctggtcaccccgatgcgtgacgggatgaacctcgtcgcgaaggagtacgtcgcctgtcgagcggatctgggtggggcgctggtgctcagcgagttcgccggtgccgccgccgaactccggggcgcctacctggtgaacccgcacgacctcgacggagtgaagaacacgatcatggccgccctcgacccggagcgggagcagggacggcgccgcatgtcgcggctgcaccgccaggtgctcgaccacgacgtgcaccgctgggcgcagtcgttcctcggcgcgctgtctccggtcgccggcgactga

SEQ ID NO: 145606 - protein, 480 aa, Rhodococcus opacus
MKDTAPYGTSDFVVVANRLPVDMETLDDGTTRWKRSPGGLVTALEPILHDRERGSWVGWPGVPDTKVEPIVSGGIDLYPVELSSTEVSLYYEGFSNATLWPLYHDVLVAPVFDRDWWHSYLDVNRHFAEETARTAAEGATVWVQDYQLQLVPRLLREMRPDLTIGFFLHIPFPPVELFMQLPWRKEIVEGLLGADLIGFHLPGGANNFLFLARRLLGLDTTTAGVGVRSALGRVTLDDRVVQVGAFPISVDSRQLVEQATDPAIVERAAEIRRELGTPAKILLGVDRLDYTKGIDLRLSALGELLDEGRLDPSDTVMVQLATPSRERVEHYMKMRSSIEEQVSHINGDHGQIGRPVVHYLYQPVDRSELIALFLAADVMLVTPMRDGMNLVAKEYVACRADLGGALVLSEFAGAAAELRGAYLVNPHDLDGVKNTIMAALDPEREQGRRRMSRLHRQVLDHDVHRWAQSFLGALSPVAGD

SEQ ID NO: 145607 - DNA, 1488 bp, Rhodococcus opacus
  CDS (1)..(1488): transl_table=11
  misc_feature (142)..(142): s is g or c
gtggctgccagttcggaatcgtcagcatcgtcatcacgctcgacttctgatcctgtgtccgggcaagccgacttcgtcgtcgtcgcgaaccgactccccgtcgacctcgaacgccttccggacggcaccacacgctggaagsgcagccccggtggcctcgtcaccgcgctcgagccgatcctgcgccgcaacaagggcgcatgggtcggctgggcgggggtcgcggacgccgagctcgatcccgtcgtcgaggatgacctcgagctctaccccgttccgctgagcgccgcggagatcgccgactactacgagggcttctccaacgccaccctctggccgctctaccacgacgtcatcgtcaagcccgagtacaaccgcgactggtggaacgcgtacgtcgaggtcaaccggcgcttcgcggaggccacgtcgaaggcggccgcacacggcgccacggtgtggatccaggactatcagctgcagctcgttccgaagatgctgcgcatgctccgccccgaccttacgatcgggttcttcctgcacattccgttcccgccggtggaactgttcatgcagatgccgtggcgcaccgagatcatcgagggtctgctcggcgccgacctgatcgggttccacctcccgggcggtgcccagaacttcctgtacctggcccgcaaactcgccggtcagcagacgtcccgcggcaacgtgggcgtccgctccaagttgggcgtcgtgcaggtgggattccgcacggtgcgcgtcggcgcgtttccgatctccatcgattcgggccagctggacgagcagtcccgatccaagtcgatccgggaccgcgccaagaagatccgcaaggaactgggcaatcccaagcacatcatgctcggcgtcgaccgcctcgattacacgaagggtatcgacgtccgcctcgccgcgctgcacgaactgctcgacgagcagcgcatcgatcccgccgacacggtgatggtgcagctggccacgccgagccgcgagcgggtcgacagctacgtgcagatgcgcgacgacatcgaacgcaaggtgtcgcggatcaacggcgagtacagcgaggtcggccggccggtggtgcactacctgcaccggccgatcccccgcgaggagctgatcgccttcttcgtcgccgccgacgtgatgctggtgactccgctgcgtgacggcatgaacctcgtcgccaaggagtacgtggcgtgccgcagtgatctcggcggtgcgctgctgctcagcgagttcaccggcgcggccgccgaactgcgtcaggcgttcctgtgcaatccgcacgacctcgacagcgtcaaggacgcgatgaagcaggccctgaaccagccgcagaaggacggccgacgccacatgcgggccctgcgcaggcaggtcctcgcacacgacgtcgaccggtgggccaggtccttcctcgacgccctcgctcacggggcgccgccggcccggcactga

SEQ ID NO: 145608 - protein, 495 aa, Rhodococcus opacus
  misc_feature (48)..(48): The Xaa at location 48 stands for Arg, or Gly.
MAASSESSASSSRSTSDPVSGQADFVVVANRLPVDLERLPDGTTRWKXSPGGLVTALEPILRRNKGAWVGWAGVADAELDPVVEDDLELYPVPLSAAEIADYYEGFSNATLWPLYHDVIVKPEYNRDWWNAYVEVNRRFAEATSKAAAHGATVWIQDYQLQLVPKMLRMLRPDLTIGFFLHIPFPPVELFMQMPWRTEIIEGLLGADLIGFHLPGGAQNFLYLARKLAGQQTSRGNVGVRSKLGVVQVGFRTVRVGAFPISIDSGQLDEQSRSKSIRDRAKKIRKELGNPKHIMLGVDRLDYTKGIDVRLAALHELLDEQRIDPADTVMVQLATPSRERVDSYVQMRDDIERKVSRINGEYSEVGRPVVHYLHRPIPREELIAFFVAADVMLVTPLRDGMNLVAKEYVACRSDLGGALLLSEFTGAAAELRQAFLCNPHDLDSVKDAMKQALNQPQKDGRRHMRALRRQVLAHDVDRWARSFLDALAHGAPPARH

SEQ ID NO: 145609 - DNA, 2598 bp, Arabidopsis thaliana
  CDS (1)..(2598)
atgatttctgactacttgagacattgtatctacttcacttgctgtagagatatggtatcaagatcttattcaaacctcttggatcttgcttctggtaacttccattcgttttctcgagaaaagaagaggtttccaagagtagcaactgtcactggtgtcttatctgagctagatgatgataacaacagcaacagtgtctgctctgatgctccttcttccgtcacacaagatcgaatcatcatcgttggaaaccagcttcctattaaatcacatcggaactctgctggtaaattgagttttagttgggacaatgactcgcttctcttgcagcttaaagatggtatgcgtgaagatatggaagttgtctacattggttgccttaaggaacagattgatacagttgagcaagatgatgtttctcaaaggttgcttgagaatttcaaatgtgttcctgcttatatcccacctgagctattcactaagtactatcatggattctgtaagcaacatctatggcctttgtttcactacatgcttcccttaactcctgatcttggtggtagatttgatcgttctttatggcaagcttatctttcggttaacaagatctttgctgataaagtgatggaagtgattagtcctgatgatgattttgtttgggttcatgactatcacttaatggttttgcctacatttctaaggaagaggtttaatagagtaaagcttggttttttccttcatagcccgttcccttcctctgagatttaccgtactcttccagtgagaaatgagctcttacgtgcactcctcaacgctgatttgattggctttcatacctttgactatgcaagacacttcctttcttgttgtagcaggatgcttggtttatcctatcagtccaaacgtggaaccatagggcttgagtattatggtcgaacgcttcagtcaattttaaacctcccagagactcagaccaaagttgctgagctaagagatcagttcttggatcagaaagttcttctcggtgttgatgacatggacatcttcaaaggaatcagcctcaaactcttggcaatggaacaacttctcacacagcatcccgagaagagaggtcgagttgtacttgtccagattgcaaaccctgcaagaggtcgtgggaaagacgttcaggaggttcagtctgaaactgaagccacggttaaaaggatcaatgaaatgtttggaaggccgggctaccaacccgtggttctgattgatacaccgcttcaattctttgagaggattgcttactatgtcattgcagagtgttgtcttgttacagcggtaagagatggtatgaatcttataccttatgagtacattatctgcaggcaaggtaatccgaaactcaacgagactataggccttgacccttctgctgcaaagaagagtatgcttgttgtctctgagtttattggttgttctccttctttaagcggcgccattagagtaaatccgtggaacattgatgctgtgactgaagcaatggactatgcattgatagtttcagaagcagagaagcaaatgcgtcacgagaagcatcacaaatatgttagcacacatgatgttgcttattgggcgcgtagctttatacaagatcttgaaagggcttgcggggatcatgtgaggaagaggtgttgggggattggattcgggttaggctttagagttgtggcgcttgatccgagttttaaaaagctttcgattgagcacattgtctcagcttataagagaaccaagaaccgagccattttgttggattatgatggcacaatggtgcagccaggttccattaggacaacaccaacccgcgaaacaatcgaaatcttgaacaacctgtctagtgatcccaagaatatcgtgtacctcgtcagtgggaaagacagaaggacactaactgaatggttttcttcatgtgacgatctcggtttgggtgcagagcacgggtattttataaggccaaatgatggaacagactgggaaacgtcgagtttggtatcaggttttgagtggaaacaaatagcagagccagtgatgagactttacactgagactacagatggatcaacaatagagactaaagagactgctctcgtttggaattaccaattcgcagatcctgattttggatcttgtcaagccaaagagcttatggaacacctcgaaagcgtgcttaccaatgatccagtctctgtcaagactggacaacaactcgttgaagttaaaccacagggtgtgaacaaaggtcttgtggcagagaggcttctaacaacgatgcaagaaaaagggaaacttttggatttcattctctgcgtcggtgatgatcggtctgatgaggatatgtttgaggtgataatgagtgctaaagatggtccagctttgtctcctgtggctgagatattcgcttgcaccgttggacaaaagccaagcaaagcaaaatactatttagacgatactgcggagataatcagaatgctggacggtctagccgctaccaacacaactatctctgatcaaactgattcaaccgccactgttccaactaaagatctgttttaa

SEQ ID NO: 145610 - protein, 865 aa, Arabidopsis thaliana
MISDYLRHCIYFTCCRDMVSRSYSNLLDLASGNFHSFSREKKRFPRVATVTGVLSELDDDNNSNSVCSDAPSSVTQDRIIIVGNQLPIKSHRNSAGKLSFSWDNDSLLLQLKDGMREDMEVVYIGCLKEQIDTVEQDDVSQRLLENFKCVPAYIPPELFTKYYHGFCKQHLWPLFHYMLPLTPDLGGRFDRSLWQAYLSVNKIFADKVMEVISPDDDFVWVHDYHLMVLPTFLRKRFNRVKLGFFLHSPFPSSEIYRTLPVRNELLRALLNADLIGFHTFDYARHFLSCCSRMLGLSYQSKRGTIGLEYYGRTLQSILNLPETQTKVAELRDQFLDQKVLLGVDDMDIFKGISLKLLAMEQLLTQHPEKRGRVVLVQIANPARGRGKDVQEVQSETEATVKRINEMFGRPGYQPVVLIDTPLQFFERIAYYVIAECCLVTAVRDGMNLIPYEYIICRQGNPKLNETIGLDPSAAKKSMLVVSEFIGCSPSLSGAIRVNPWNIDAVTEAMDYALIVSEAEKQMRHEKHHKYVSTHDVAYWARSFIQDLERACGDHVRKRCWGIGFGLGFRVVALDPSFKKLSIEHIVSAYKRTKNRAILLDYDGTMVQPGSIRTTPTRETIEILNNLSSDPKNIVYLVSGKDRRTLTEWFSSCDDLGLGAEHGYFIRPNDGTDWETSSLVSGFEWKQIAEPVMRLYTETTDGSTIETKETALVWNYQFADPDFGSCQAKELMEHLESVLTNDPVSVKTGQQLVEVKPQGVNKGLVAERLLTTMQEKGKLLDFILCVGDDRSDEDMFEVIMSAKDGPALSPVAEIFACTVGQKPSKAKYYLDDTAEIIRMLDGLAATNTTISDQTDSTATVPTKDLF

SEQ ID NO: 145611 - DNA, 2829 bp, Arabidopsis thaliana
  CDS (1)..(2829)
atgcctggaaataagtacaactgcagttcttctcatatcccactctctcgaacagaacgcctcttgagagatagagagcttagagagaagaggaagagcaaccgagctcgtaatcctaatgacgttgctggcagttccgagaactctgagaatgacttgcgtttagaaggtgacagttcaaggcagtatgttgaacagtacttggaaggggctgctgctgcaatggcgcacgatgatgcgtgtgagaggcaagaagttaggccttataataggcaacgactacttgtagtggctaacaggctcccagtttctcccgtgagaagaggtgaagattcatggtctcttgagatcagtgctggtggtctagtcagtgctctcttaggtgtaaaggaatttgaggccagatggataggatgggctggagttaatgtgcctgatgaggttggacagaaggcacttagcaaagctttggctgagaagaggtgtattcccgtgttccttgatgaagagattgttcatcagtactataatggttactgcaacaatattctgtggcctctgtttcactaccttggacttccgcaagaagatcggcttgccacaaccagaagctttcagtcccaatttgctgcatacaagaaggcaaaccaaatgttcgctgatgttgtaaatgagcactatgaagagggagatgtcgtctggtgccatgactatcatcttatgttccttcctaaatgccttaaggagtacaacagtaagatgaaagttggatggtttctccatacaccattcccttcgtctgagatacacaggacacttccatcacgatcagagctccttcggtcagttcttgctgctgatttagttggcttccatacatatgactatgcaaggcactttgtgagtgcgtgcactcgtattcttggacttgaaggaacacctgagggagttgaggatcaaggcaggctcactcgtgtagctgcttttccaattggcatagattctgatcggtttatacgagcacttgaggtccccgaagtcaaacaacacatgaaggaattgaaagaaagatttactgacagaaaggtgatgttaggtgttgatcgtcttgacatgatcaaagggattccacaaaagattctggcattcgaaaaatttctcgaggaaaatgcaaactggcgtgataaagtggtcttattgaaaattgcggtgccaacaagacctgacgttcctgagtatcaaacactcacaagccaagttcatgaaattgttggccgcattattggtcgtctcgggacactgactgcagttccaatacatcatctggatcggtctctggactttcatgctttatgtgcactttatgccgtcacagatgttgcgcttgtaacatctttgagagatgggatgaatcttgtcagttatgagtttgttgcttgccaagaggccaaaaagggcgtcctcattctcagtgaatttgcaggtgctgcacagtctctgggtgctggagctattcttgtgaatccttggaacatcacagaagttgctgcctccattggacaagccctaaacatgacagctgaagaaagagagaaaagacatcgccataattttcatcatgtcaaaactcacactgctcaagaatgggctgaaacttttgtcagtgaactaaatgacactgtaattgaggcgcaactacgaattagtaaagtcccaccagagcttccacagcatgatgcaattcaacggtattcaaagtccaacaacaggcttctaatcctgggtttcaatgcaacattgactgaaccagtggataatcaagggagaagaggtgatcaaataaaggagatggatcttaatctacaccctgagcttaaagggcccttaaaggcattatgcagtgatccaagtacaaccatagttgttctgagcggaagcagcagaagtgttttggacaaaaactttggagagtatgacatgtggctggcagcagaaaatgggatgttcctaaggcttacgaatggagagtggatgactacaatgccagaacacttgaacatggaatgggttgatagcgtaaagcatgttttcaagtacttcactgagagaactcccaggtcacactttgaaactcgcgatacttcgcttatttggaactacaaatatgcagatatcgaattcgggagacttcaagcaagagatttgttacaacacttatggacaggtccaatctctaatgcatcagttgatgttgtccaaggaagccgctctgtggaagtccgtgcagttggtgtcacaaagggagctgcaattgatcgtattctaggagagatagtgcatagcaagtcgatgactacaccaatcgattacgtcttgtgcattggtcatttcttggggaaggacgaagatgtttacactttcttcgaaccagaacttccatccgacatgccagccattgcacgatccagaccatcatctgacagtggagccaagtcatcatcaggagaccgaagaccaccttcaaagtcgacacataacaacaacaaaagtggatcaaaatcctcatcatcctctaactctaacaacaacaacaagtcctcacagagatctcttcagtcagagagaaaaagtggatccaaccatagcttaggaaactcaagacgtccttcaccagagaagatctcatggaatgtgcttgacctcaaaggagagaactacttctcttgcgctgtgggtcgtactcgcaccaatgctagatatctccttggctcacctgacgacgtcgtttgcttccttgagaagctcgctgacaccacttcctcaccttaa

SEQ ID NO: 145612 - protein, 942 aa, Arabidopsis thaliana
MPGNKYNCSSSHIPLSRTERLLRDRELREKRKSNRARNPNDVAGSSENSENDLRLEGDSSRQYVEQYLEGAAAAMAHDDACERQEVRPYNRQRLLVVANRLPVSPVRRGEDSWSLEISAGGLVSALLGVKEFEARWIGWAGVNVPDEVGQKALSKALAEKRCIPVFLDEEIVHQYYNGYCNNILWPLFHYLGLPQEDRLATTRSFQSQFAAYKKANQMFADVVNEHYEEGDVVWCHDYHLMFLPKCLKEYNSKMKVGWFLHTPFPSSEIHRTLPSRSELLRSVLAADLVGFHTYDYARHFVSACTRILGLEGTPEGVEDQGRLTRVAAFPIGIDSDRFIRALEVPEVKQHMKELKERFTDRKVMLGVDRLDMIKGIPQKILAFEKFLEENANWRDKVVLLKIAVPTRPDVPEYQTLTSQVHEIVGRIIGRLGTLTAVPIHHLDRSLDFHALCALYAVTDVALVTSLRDGMNLVSYEFVACQEAKKGVLILSEFAGAAQSLGAGAILVNPWNITEVAASIGQALNMTAEEREKRHRHNFHHVKTHTAQEWAETFVSELNDTVIEAQLRISKVPPELPQHDAIQRYSKSNNRLLILGFNATLTEPVDNQGRRGDQIKEMDLNLHPELKGPLKALCSDPSTTIVVLSGSSRSVLDKNFGEYDMWLAAENGMFLRLTNGEWMTTMPEHLNMEWVDSVKHVFKYFTERTPRSHFETRDTSLIWNYKYADIEFGRLQARDLLQHLWTGPISNASVDVVQGSRSVEVRAVGVTKGAAIDRILGEIVHSKSMTTPIDYVLCIGHFLGKDEDVYTFFEPELPSDMPAIARSRPSSDSGAKSSSGDRRPPSKSTHNNNKSGSKSSSSSNSNNNNKSSQRSLQSERKSGSNHSLGNSRRPSPEKISWNVLDLKGENYFSCAVGRTRTNARYLLGSPDDVVCFLEKLADTTSSP

SEQ ID NO: 145613 - DNA, 1572 bp, Botrytis cinerea
  CDS (1)..(1572)
atgccttctgtagctggcgaggagcccaaggcttctagcagattgcttctagtatcgaacagattacccatcacgattaaacgaactgaggatggccaatatgatttcactggttcctcgggcggattggtaacgggcttgagtggattggcaaagacgactacatttcagtggtatggatggccaggtttggaagtgccagatgctgaagcaaaacctttggtcaagagattgaaggatgaacatggtgcccatccagttttcgtcgatgatgaattggccgataagcattacaacggattctctaattctatcctttggcctctattccattaccacccaggagagattacattcgacgagtcacaatggatggcatacaaggaggtcaacagattgttcgcaaaaacgattgcgaaggatgtacaagatggtgatttaatttgggtccacgattaccatctcatgcttcttccagagatgttgcgcgatgaaatcggcacgagcaagaagaatgtcaagattggattcttccttcatacacctttcccttccagtgagatctacagaatcttaccggttagagaatctttgttgttgagtgtccttcattgcgacttgatcggtttccacacatatgattatgctagacatttccttagcagttgctctagaattttggaaacacaaacaacacctaatggtgtcgaattccgtggtaaatatgtcacagtagctgctttccccatcggtatcgaccccgaaaagttcatcgaaaccctcaaaaagccaaaagtcgaagagcgcattgctcaattagagcgcaaattcgaaggtgttaaactcattgttggagttgacagattagattatatcaaaggtgtccctcaaaaattacacgcccttgaagtcttcctcacagaacatcccgagtggattggcaaggtagtccttgtccaagtcgctgttccttctcgtcaagatgtcgaagaatatcaaaatcttcgcgctgtcgtcaacgaacttgtcggtcgcattaacggtcgctttggtactgttgaattcatgcccattcatttcctccaccaatctgtcaatttcgatgaactcaccgctctctacgccgtttcagacgcctgtctcgtatccagtactcgtgatggcatgaatctcgtctcttatgaatacatcgccacacaacgtaagcgtcacggtgtaatgatcctctctgagttcacaggcgcggctcaatccctcaatggtgctctcattgttaacccatggaatacggaagaacttgcagatgctatccatgatgccgtcacaatgtctccagaacaaagagaaatcaatttcaagaaattggagaaatatgtattcaaatataccagttcatggtggggagaaagtttcgtaagcgagttgcagaggattagtgaacacgcggcgaaaaaatcaaacagtaagggaacggtagacaagatgccagacttagtagagggggttcaacaattcaatcttggagaacaaagagaggaggggagattggaaccgggtgaattcgatgattag

SEQ ID NO: 145614 - protein, 523 aa, Botrytis cinerea
MPSVAGEEPKASSRLLLVSNRLPITIKRTEDGQYDFTGSSGGLVTGLSGLAKTTTFQWYGWPGLEVPDAEAKPLVKRLKDEHGAHPVFVDDELADKHYNGFSNSILWPLFHYHPGEITFDESQWMAYKEVNRLFAKTIAKDVQDGDLIWVHDYHLMLLPEMLRDEIGTSKKNVKIGFFLHTPFPSSEIYRILPVRESLLLSVLHCDLIGFHTYDYARHFLSSCSRILETQTTPNGVEFRGKYVTVAAFPIGIDPEKFIETLKKPKVEERIAQLERKFEGVKLIVGVDRLDYIKGVPQKLHALEVFLTEHPEWIGKVVLVQVAVPSRQDVEEYQNLRAVVNELVGRINGRFGTVEFMPIHFLHQSVNFDELTALYAVSDACLVSSTRDGMNLVSYEYIATQRKRHGVMILSEFTGAAQSLNGALIVNPWNTEELADAIHDAVTMSPEQREINFKKLEKYVFKYTSSWWGESFVSELQRISEHAAKKSNSKGTVDKMPDLVEGVQQFNLGEQREEGRLEPGEFDD

SEQ ID NO: 145615 - DNA, 2574 bp, Brassica oleracea
  CDS (1)..(2574)
atggtatcaagatcctattccaacctcttggatctcgcttcaggcaacttccactccttctcccgggaaaagaagaggttcccaagagtagcaaccgtcacaggcgtcttatccgagctagacgacgacgccaacagcaacagcgtctgctccgacgctccatcctccatcgcgcaagaccgaatcatcatcgttggaaaccagctccccatcaaatcccatcgcaacccatccggtaaactcaccttcacctgggacaacgactccctcctcttgcagctcaaagacggcatgcgcgaagacatggaagtcgtctacatcggctgcctcaaagaccaagtagacccatccgagcaagacgacgtctcccaaagactcctcgagaatttcaaatgcgtccctgcttacatcccgcctgagatattcaccaagtactaccacggcttctgcaagcagcatctatggcccttgtttcactacatgcttcctctaaaccctgatctcggaggcaggttcgaccgctccttatggcaagcgtacctctccgttaacaagatcttcgctgacaaagtcatggaagtgattaaccctgacgatgacttcgtttgggttcatgactaccacttgatggttctgcctactttcttgcggaagaggtttaacagagtgaagctagggttcttcctccacagccccttcccttcttcagagatttaccgaactctccctgtcagaaacgagctcttacgcgccctactcaacgctgatctgattggctttcacacctttgactacgcgaggcacttcctctcttgctgcagcaggatgctaggcttgtcctaccagtccaaaagaggaaccatagggcttgagtactacggcagaacggtcagcatcaagatcctccccgtcgggatccacaccagccagcttcagtcgattctaaacctccccgagactcagaccaaagtcgctgaccttagagaccagttctcggaccagaaggtcctcctcggcgtcgacgacatggacatcttcaaaggaatcagcctcaagctcctggctatggagcagcttctccagcagcatccggagaagcgaggacgagttgtactcgtccagatcgccaaccccgcgagaggccgcgggaaagacgtccaggaggttcggtccgaaaccctagccaccgttaaacggatcaacgacacgttcggaaggccagggtaccagcctgtgtttctcatcgatgaaccgcttcagttctacgagaggatcgcttactacgtgatcgcagagtgttgtcttgtcaccgcagtgagagacggtatgaatcttatcccttatgagtatatcatctgcagacaagctaaccccaagctcaacgagacgttaggactcgacccttgcgctgcgaagaagagcatgcttgtagtctccgagttcatcggttgctctccttctctaagcggcgccattagagtgaacccgtggaacatcgacgcggtcaccgaggctatggactacgcgttgacagtttcggaagcggagaagcaaatgcgtcacgagaagcatcacaagtacgtgagcacccatgatgttgcctactggtcgcgcagctttatacaggatctcgagagggcgtgcgcggagcacgtgaggaagaggtgctgggggatagggttcgggttagggtttagggttgtggcgcttgatccgagttttaagaagctttctattgagcacattgtctcggcttataagaggaccaagaagagagctattcttgtggattacgatggcacgatggtgcagcctgggtccattaggacgacgcctagcatccaaacgatcgagaccttgaacaagctgtcgagtgaccccaagaatatcgtttatctcatcagcgggaaagatcgaaagacgctaaccgaatggttttcctcttgtggtgatcttggtttggccgcagagcatggatactttataaggccaaatgatggaacagagtgggaaacatcgagtttagtgtcggcttttgagtggaaacaaatagcagagccagtgatgagactctacactgagacgacagatggatcaacaatagagactaaagagactgctctcgtttggaactacgagtttgctgatcctgacttcggatcttgtcaagctaaagagcttatggaacacttagaaagcgtgctcacgaatgatccagtctctgtcaaaaccggacaacaactcgttgaagttaaaccacagggtgtgaacaaaggtcttgtggcagagaggcttctaacgacgatgcaggaacaagggaagctgttggatttcattctatgcgtgggagatgatcggtctgatgaggatatgtttgaggtgataatgggtgctaaagatggtcctgctttatctccagtggctgagatcttcgcttgcaccgttggtcaaaagccaagcaaagctaagtactacttagacgacactgcagagatcatcagaatgcttgaaggtctagccacctctgatcaaacctcttcaaccgtggatgttccaacaaaagatatcttctaa

SEQ ID NO: 145616 - protein, 857 aa, Brassica oleracea
MVSRSYSNLLDLASGNFHSFSREKKRFPRVATVTGVLSELDDDANSNSVCSDAPSSIAQDRIIIVGNQLPIKSHRNPSGKLTFTWDNDSLLLQLKDGMREDMEVVYIGCLKDQVDPSEQDDVSQRLLENFKCVPAYIPPEIFTKYYHGFCKQHLWPLFHYMLPLNPDLGGRFDRSLWQAYLSVNKIFADKVMEVINPDDDFVWVHDYHLMVLPTFLRKRFNRVKLGFFLHSPFPSSEIYRTLPVRNELLRALLNADLIGFHTFDYARHFLSCCSRMLGLSYQSKRGTIGLEYYGRTVSIKILPVGIHTSQLQSILNLPETQTKVADLRDQFSDQKVLLGVDDMDIFKGISLKLLAMEQLLQQHPEKRGRVVLVQIANPARGRGKDVQEVRSETLATVKRINDTFGRPGYQPVFLIDEPLQFYERIAYYVIAECCLVTAVRDGMNLIPYEYIICRQANPKLNETLGLDPCAAKKSMLVVSEFIGCSPSLSGAIRVNPWNIDAVTEAMDYALTVSEAEKQMRHEKHHKYVSTHDVAYWSRSFIQDLERACAEHVRKRCWGIGFGLGFRVVALDPSFKKLSIEHIVSAYKRTKKRAILVDYDGTMVQPGSIRTTPSIQTIETLNKLSSDPKNIVYLISGKDRKTLTEWFSSCGDLGLAAEHGYFIRPNDGTEWETSSLVSAFEWKQIAEPVMRLYTETTDGSTIETKETALVWNYEFADPDFGSCQAKELMEHLESVLTNDPVSVKTGQQLVEVKPQGVNKGLVAERLLTTMQEQGKLLDFILCVGDDRSDEDMFEVIMGAKDGPALSPVAEIFACTVGQKPSKAKYYLDDTAEIIRMLEGLATSDQTSSTVDVPTKDIF

SEQ ID NO: 145617 - DNA, 1422 bp, Aspergillus oryzae
  CDS (1)..(1422)
atggtgacggagaataagaagaagcgcggcttgattatcgtctcaaaccgtcttccactatctgtcaaggaagaaaatggtacatacaagtccagcttatccagcggtggacttgtaacagccctgtcgggtctgacaaagtcaacgaacttccgctggttcggctggcctggcaaggctatcgaggacccagaggagcagaaaaaggtctcagacgctctagcagagaatagcgcggtgggaatcttcctgagcgagcagttggcgcaagaccattacaacaaattctcgaactccgtcctttggcccattctccattaccagtctggagttgccttcaatgaagatgcatgggaagcgtatcagcgtgtgaacgagatcttcgccgatacggtcgccaaagaagcggctaatggggatcttatctgggttcatgattaccatctattgctcctgccttctctcttgcgtgagcgactgaagaagcaagggaagaattgcccgattggatttactttgcacaccccatttcctgcggaggacttttggagggcgattcctgtgcagaaggatttacttaaggggttgcttgcttgcgatgtgattgggttccacacggatgagtatcggcggaactttactgagagctgtgaacgtagtttgggcgccaatgctgagaaagaaggccagcttgaatacgaaggacacacagcctgtgttggtacgtttgtggtcgggatcgacccgcagaaattcaacgactctatgcaagatccggacgttcagaaacgtatcaaagagttagaaaggcgttatgagggcaaaactgtcattatcggtgtggatcggttggattatactaagggtctagtccagaagctcgaggggtgggatcatttccttaagacctatcccgaattggagggcaaggtcaccctgattcaagtggctatacccagtcgtgaggatgtgaaagagtatcaggagcttgaggaggaaatttctacacttgtcggcaagatcaatggagagcatgctacacccgatggaacaccactcatttacatgcaccggtctgtctctttcactgaactaacggccttgtactgcatttccgatatctgcctcctcacctcccgaagagacggcatgaacctcgtggcgtctgaatacgtggcttgtcaggagaataagcatggagtccttgtgctctccgaacttgcaggggctgcctctttcatgtctggtggcagcgtaaccttccacccatctagtgtacaggaactgtcagatgcagtccaccaagcaatcagtatggacgacaaggagaggaaggaacgatatgagaatctacgagaatttatcaccacccacacaaggcaagttccggatctcattctttttatacttatactaagctaa

SEQ ID NO: 145618 - protein, 473 aa, Aspergillus oryzae
MVTENKKKRGLIIVSNRLPLSVKEENGTYKSSLSSGGLVTALSGLTKSTNFRWFGWPGKAIEDPEEQKKVSDALAENSAVGIFLSEQLAQDHYNKFSNSVLWPILHYQSGVAFNEDAWEAYQRVNEIFADTVAKEAANGDLIWVHDYHLLLLPSLLRERLKKQGKNCPIGFTLHTPFPAEDFWRAIPVQKDLLKGLLACDVIGFHTDEYRRNFTESCERSLGANAEKEGQLEYEGHTACVGTFVVGIDPQKFNDSMQDPDVQKRIKELERRYEGKTVIIGVDRLDYTKGLVQKLEGWDHFLKTYPELEGKVTLIQVAIPSREDVKEYQELEEEISTLVGKINGEHATPDGTPLIYMHRSVSFTELTALYCISDICLLTSRRDGMNLVASEYVACQENKHGVLVLSELAGAASFMSGGSVTFHPSSVQELSDAVHQAISMDDKERKERYENLREFITTHTRQVPDLILFILILS

SEQ ID NO: 145619 - DNA, 1530 bp, Aspergillus oryzae
  CDS (1)..(1530)
atgccttccctcgaagacagttctaagaatgactccagactgctgctcatttcaaatcggttaccgattacgataaaacgctccgaagacgggaagtatgacttttccatgtcatctggcggcttggttagcggtctgagtggtctatcgaaatccactacgtttcaatggtatggctggcctggcctagaggtccccgaagaagagataccggtggtgaagcaacggttgaaggatgaatacaatgcggttcccgtatttatcgatgatgagctcgcggaccggcattacaatggattctccaattcgattctgtggccccttttccattatcatcctggtgaaatcacgttcgatgaatctgcttgggacgcttacaaggatgcgaatcgattatttgcgcgggccgttgcgaaagaagtccaggatggcgatctaatttgggtgcatgactaccatttgatgcttctccctgagatgcttcgagaagaaatcggagatcagaagcagaatgttaaaattgggttcttcctccacacccccttccctagcagtgaaatttacaggattcttccggtccgaaacgagctgttgcttggggtcctccattgcgacctcataggcttccacacctacgactatacaagacatttcctgagcgcttgctcgcgcttattgggattggcgacgactcccaacggtattgagtttcagggcaaaatcattgcctgcggagctttcccgatcggcattgacccggagaaattccaggagggtcttaagaaagaaaaggtccagaagcggattgcacagcttgaacagaagttccaaggagtgaagcttatggtgggtgttgaccgccttgactatataaagggcgttccgcaaaagctgcatgcgctggaagtgttccttagcgatcatcctgaatgggttggtaaagttgtcctggtccaagttgctgtccccagtagacaggatgtcgaggagtatcagaatttgagggctgttgtgaacgagctggtcggccgcatcaacgggaaatttggtactgtggaattcatgccaatccacttcctgcacaagtcggtcaattttgatgaactgattgccctgtatgccgtgtcggatgcgtgcattgtttcgtcaactcgagatggcatgaatctggtcgcgtacgaatatattgcagctcaacaaaagcggcacggtgttttggttctctcagagtttgccggtgcagcccagagtctcaatggcagtattatcattaacccttggaacaccgaagaactcgctggtgcctaccaggaggctgtcaccatgagcgacgagcaaagggctctgaatttctctaagttggacaaatatgtcaataaatatacgagtgccttctggggccagtcattcgtaacggaattgacgaggatatctagccaatctgcggagaaattccagtctaagagggcttccctgaccggcacgtaccacgaacaagtgaacggtgtagaatccgagggatcggcttga

SEQ ID NO: 145620 - protein, 509 aa, Aspergillus oryzae
MPSLEDSSKNDSRLLLISNRLPITIKRSEDGKYDFSMSSGGLVSGLSGLSKSTTFQWYGWPGLEVPEEEIPVVKQRLKDEYNAVPVFIDDELADRHYNGFSNSILWPLFHYHPGEITFDESAWDAYKDANRLFARAVAKEVQDGDLIWVHDYHLMLLPEMLREEIGDQKQNVKIGFFLHTPFPSSEIYRILPVRNELLLGVLHCDLIGFHTYDYTRHFLSACSRLLGLATTPNGIEFQGKIIACGAFPIGIDPEKFQEGLKKEKVQKRIAQLEQKFQGVKLMVGVDRLDYIKGVPQKLHALEVFLSDHPEWVGKVVLVQVAVPSRQDVEEYQNLRAVVNELVGRINGKFGTVEFMPIHFLHKSVNFDELIALYAVSDACIVSSTRDGMNLVAYEYIAAQQKRHGVLVLSEFAGAAQSLNGSIIINPWNTEELAGAYQEAVTMSDEQRALNFSKLDKYVNKYTSAFWGQSFVTELTRISSQSAEKFQSKRASLTGTYHEQVNGVESEGSA

SEQ ID NO: 145621 - DNA, 1440 bp, Aspergillus oryzae
  CDS (1)..(1440)
atggctcccaccgactcatcgctgggcgactctcgcttgctgatcgtttccaatcgccttcccatcaccattagacgatctgggaatggcaagtatgaattttcaatgtcttccggtggattagtgaccggattgagcggtctgtccaagacaacaaccttccaatggtacggttggccaggtttggaagtgccggaggatgaagtcccttctgtgaaacagagactcaaagacgaattcggcgcaactccggtgttcatggatgacaaactagcggatcgtcactacaatggcttctccaactcgatcctttggcctctattgcactatcatcctggtgagattgtgtttgatgagggtgcctgggatgcctaccgtgaggcaaatcttctattcgccaagaccatcgctaaggaagcccaagagggtgacttggtctgggtgcacgattatcatctcatgcttcttccggaattgctccaggagcaacttaatctcctgggaaagaagaatattcggattggatttttcctccacacaccattccccagcagtgaaatctacagaatcctgcccgttagagccgaacttctgcgaggtttgctgcattgccacctaatcggcttccatacctatgactatgcacgtcacttcttaagcagctgtgctcacatacttggattggtgacaacccctagcagcgtgaaatacgaaggcaggtctatcaatgttggggcattccccattggaatcgaccccgacaagttcactgaaggcttgaagagcccgaaggtgcaaaaccgcatcacgagcctggagaataaattccagggaacaaagttgatggtcagcgttgaccgcctggattatatcaagggtatccctcagaagttacacgccctggaagtctttctccaaaaccacccagaatgggttggtaaggtcgtcctggttcaggtggctgtcccaagtcgtcaggatgtcgaagaataccagaatttaagagcggtagtaaatgagctagtgggccgaatcaacggcaaattcggaacggtggactacatgcccatccacttcatgcacaagtcggtgagcttcgacgaacttattgctctatatgcggcatcagatgcctgcattgtttcttcgactcgcgacggaatgaatctggtatccttcgagtacatcgcaactcaacagaaacgcaaaggcgttctgatcttgtctgaattcgccggtgctgctcagagtctcaatggaagcattgttgtcaatccatggaacactgaggagctagcagaggcgtatcatgaggcggtttcaattagtgaagaacagcgcgccgttcaatttgcaaagctctacaagtatatctcgaaatacacaagtgctttctggggtcagtcgtttgtggccgagatgtctcaatgctcatcttga

SEQ ID NO: 145622 - protein, 479 aa, Aspergillus oryzae
MAPTDSSLGDSRLLIVSNRLPITIRRSGNGKYEFSMSSGGLVTGLSGLSKTTTFQWYGWPGLEVPEDEVPSVKQRLKDEFGATPVFMDDKLADRHYNGFSNSILWPLLHYHPGEIVFDEGAWDAYREANLLFAKTIAKEAQEGDLVWVHDYHLMLLPELLQEQLNLLGKKNIRIGFFLHTPFPSSEIYRILPVRAELLRGLLHCHLIGFHTYDYARHFLSSCAHILGLVTTPSSVKYEGRSINVGAFPIGIDPDKFTEGLKSPKVQNRITSLENKFQGTKLMVSVDRLDYIKGIPQKLHALEVFLQNHPEWVGKVVLVQVAVPSRQDVEEYQNLRAVVNELVGRINGKFGTVDYMPIHFMHKSVSFDELIALYAASDACIVSSTRDGMNLVSFEYIATQQKRKGVLILSEFAGAAQSLNGSIVVNPWNTEELAEAYHEAVSISEEQRAVQFAKLYKYISKYTSAFWGQSFVAEMSQCSS

SEQ ID NO: 145623 - DNA, 1611 bp, Helicoverpa armigera
  CDS (1)..(1611)
atgagtggaacggacagcagtgccagtcgatccgcgtgcaacagcaagggaagcatgatcgttgtgtcgaacaggttgcccttcatcctcaagagaaatgacaagactggcggtctggagaggaaagccagtgctggtgggttggtgacagcagtagctccagtggtgatccgtggaggcggcatctgggtgggatggccaggcatacatctggatgaccccaatgaaaagatcccggagtcagaccccaacgacaagacccctactgccggcttgctatcagagaagatagtccccgtgcacgctgagcccaaactcttcgacagctactacaatggctgctgcaacggtactttctggcccctcttccactccatgcctgaccgagccaccttcatcgctgaccactggagggcatacatcaagtgcaacgaggagttcgctgagaagacagtgtatgctctgcatctgctcaaacaacagaaggggaagaatgggacctctccaccgatcgtgtgggtccatgattaccatcttatgttagctgctaactggattagacagcgagttgaggaagatgacataaaatgcaagcttgcgttctttctgcacattcctttccccccgtgggacatattcaggctgttcccatggtctgatgaagtattgcagggcattcttggttgtgacatggtcggattccacataactgactactgcctgaacttcattgattgttgccaaagaaacttaggttgtcgtgtggacagaaagaatctgctagttgaattgggaggtcgcaccatctgtgtccgaccgttacctatcggagtacccttcgacagatttgtccagttggctcaaaacgcaaagacagtgctctctacaagccaacaaattatattaggagttgatagactggattataccaaaggattagtacatagactgaaagctttcgagagattactggaaaagtatcccgagcacatcaagaaagtaatgctgcttcagatctcggtgccgtcaagaacggacgtcaaggaataccaggacttaaaggaagagatggatcagctggttggaagaataaacggaagatttactactccaaactggtcacctattaggtacatttacggatgcgtcggccaggatgaactagctgccttctaccgcgatgctgcagtagccctggttacacctctgcgagatggcatgaacctcgtcgctaaggagttcgtagcctgtcagattaacaagcctccaggagtgctgatcgtgtcacccttcgccggtgctggagaaatgatgcacgaagctctcatctgtaatccgtatgaattggacgatgctgctgaagtcattcacagggcgctgataatgccggaagatgagcgcacagtccgtatgaaccacttgagaagacgtgagcagctcaatgatgttgatagctggatgaaggcgttcttgaaagccatggactctttggaagaggaggctgatgatattggtgccacgtccatgcagcctgtcaccattgatgacttcgatgaatatctttctaagtacattggctacacacaaaagctggcattactacttgactaa

SEQ ID NO: 145624 - protein, 536 aa, Helicoverpa armigera
MSGTDSSASRSACNSKGSMIVVSNRLPFILKRNDKTGGLERKASAGGLVTAVAPVVIRGGGIWVGWPGIHLDDPNEKIPESDPNDKTPTAGLLSEKIVPVHAEPKLFDSYYNGCCNGTFWPLFHSMPDRATFIADHWRAYIKCNEEFAEKTVYALHLLKQQKGKNGTSPPIVWVHDYHLMLAANWIRQRVEEDDIKCKLAFFLHIPFPPWDIFRLFPWSDEVLQGILGCDMVGFHITDYCLNFIDCCQRNLGCRVDRKNLLVELGGRTICVRPLPIGVPFDRFVQLAQNAKTVLSTSQQIILGVDRLDYTKGLVHRLKAFERLLEKYPEHIKKVMLLQISVPSRTDVKEYQDLKEEMDQLVGRINGRFTTPNWSPIRYIYGCVGQDELAAFYRDAAVALVTPLRDGMNLVAKEFVACQINKPPGVLIVSPFAGAGEMMHEALICNPYELDDAAEVIHRALIMPEDERTVRMNHLRRREQLNDVDSWMKAFLKAMDSLEEEADDIGATSMQPVTIDDFDEYLSKYIGYTQKLALLLD

SEQ ID NO: 145625 - DNA, 1554 bp, Metarhizium anisopliae var
  CDS (1)..(1554)
atgactgcagacaccagtgtcgcagatggccttgcgccagaagtccacggccgactcctcctcctctcgaaccgtctccccatcaccatcaagagctccgatgacggcagttacacattctccatgtcctctggcggcctggtcacgggccttagcggcctcagcaagaccactagcttccagtggtacggatggccaggtctcgaggtgcctgacaatgaagtcgccgacatgaagcggcgcctgaaggacgaatacggcgcgcacccggttttcatcgatgacgagctcgctgatagacattacaacggattttcagactccatcctttggcccctcttccactaccaccccggcgaaatcacctttgatgaatccgcatgggcagcctaccaagaagtaaaccatctcttcgcccagaccgtcatcaaggacgttcaagatggcgacctcatctgggtgcacgattatcccctaatgctcctgccgcagatgctgcgggaagaaatcgccaagaccaacaagaaggtcaagattggcttcttcctgcacacgccgtttcctagcagcgaagtctaccgcatcttgcccgttcgcgaacctctgctccgcggcctgctggactgcgacctgatcgggttccacacgtacgactatgcgcgtcatttcctgagcagctgctcccgcatcttgggcgcgcataccacgcccaatggcgttgactggaacggacgcttcgtcaccattggtgcgttccccataggcatcgacccggacaaatttgtcgaagggcttaagaagccgtctgtgcaggaacgcatcgcgactctgaatcgcaaattcgaaggcgtaaagttgattgtcggcgtcgacagactagattgcatcaagggagtgccgcagaagttgcacgccttggaagtattccttaccgaacaccctgaatggatcggcaagattgttctcgtccaggtcgccgtgccctcgcgccaagacgtggaagagtatcaaaatctccgcgccgtggtcaacgagctcgtcggccgcatcaacggcaaattcggcaccattgaattcatgcccatccatttcctccaccagtccgcctcctttgacgaactaaccgccctctacgctgtatcggatgtatgcctcgtctcctcgactcgcgatggcatgaacctcgtctcatacgaatacattgccacgcagcaagagcgccacggcgtcatgattctctccgagttcaccggcgccgcacagtctctcaacgggagtctcgtcgtcaatccatggaacacggaggaactggccaatgccatccatgacgccgtcaccatgagccctgggcagcgggcggcgaattataagaaactagagcgctatgtcttcaagtacaccagcgcatggtggggaaccagctttgtgtctgaaatgactcgccttgattcgaacaacgcccagcccaagacgttgcggaacgtgtctggcgctgttgttgggccgggccaggatgaagatgaggctacttctcctatgcagaataacccatga

SEQ ID NO: 145626 - protein, 517 aa, Metarhizium anisopliae var
MTADTSVADGLAPEVHGRLLLLSNRLPITIKSSDDGSYTFSMSSGGLVTGLSGLSKTTSFQWYGWPGLEVPDNEVADMKRRLKDEYGAHPVFIDDELADRHYNGFSDSILWPLFHYHPGEITFDESAWAAYQEVNHLFAQTVIKDVQDGDLIWVHDYPLMLLPQMLREEIAKTNKKVKIGFFLHTPFPSSEVYRILPVREPLLRGLLDCDLIGFHTYDYARHFLSSCSRILGAHTTPNGVDWNGRFVTIGAFPIGIDPDKFVEGLKKPSVQERIATLNRKFEGVKLIVGVDRLDCIKGVPQKLHALEVFLTEHPEWIGKIVLVQVAVPSRQDVEEYQNLRAVVNELVGRINGKFGTIEFMPIHFLHQSASFDELTALYAVSDVCLVSSTRDGMNLVSYEYIATQQERHGVMILSEFTGAAQSLNGSLVVNPWNTEELANAIHDAVTMSPGQRAANYKKLERYVFKYTSAWWGTSFVSEMTRLDSNNAQPKTLRNVSGAVVGPGQDEDEATSPMQNNP

SEQ ID NO: 145627 - DNA, 2298 bp, Stenotrophomonas rhizophila
  CDS (1)..(2298): transl_table=11
ttgactgtatcgacaccctctctctccactccgacccgtacaccgccggccacgccggccccgcagctgattctggccaccgacctggatggcactttccttgccggcgatgccgccgcgcgccaccggttgtaccggctggttgaccaacaccccggcatcgccctgatcttcatcaccggccgcggcctggaagcggtgatgccgctgctctccgacccggcgatcccgcgcccggactacgtggtctgcgatgtcggcgcgaccgtggtggatggccacacgctgcagcccctgcagccgctgcagtcgatgatcgatgcgcactggcccggcgaacacgtggtggccgcggcgatgcgcccgttcaccgcgctgcagcgccaggacgtgccgcaggaacgacgctgctcgtatttctgcgatccccagacgctggcgccgctgcgcgcgcagatccaggccgccgcccaggcgctgggctgcgacgtgctgtattcggctgaccgctacctggacatcctgccgccggacaccgacaagggccgcaccctggccgcgcttgcgcgcctgctggacctgccgcgcgagcgcatcctggtggctggcgacaccctcaatgacctgtcgatgtacaccgccggcttccgcggcgtgtgcgtgggcgattccgagccggcgctgaccgaggcgaccgccacgctggccaccaccttccacgcgcaggcgccggggtgtggcggcatcctggaggcgatcgagcacttcgcgctgctcgccgacgatgaccgctacctgtacccgcccaagcaggcccgcgccgccggcgctgacctggtgatggtctaccaccgcctgcccttcgacgaagtgatggagaacggcgtgctggtgcagcgcccgccgcgctcgcccaacggcatcattccctcgctgctgagcttcttcgaaggcggccagaaaggctcctgggtggcatggggcatcgacgatcccaaacgcggcccgttccagacccacctggcggtggacgccgagcgctaccccaccctcaccgccgcgcgggtgccgttgagccggcaggaagtggacatcttctacaagcgcttctccaaggaagcgtactggccgatgctgcatgtgttctgggaacgcgcgaggttccgcgaggacgactggcaggtgttcctgaaggtcaaccgcaagttcgccgaggccactgccgccgaagccgcgcacggggccacggtgtggatccacgactacaacctgtggatggtgccggccacgctgcgcgaactgcgcccggacctgaaaatcgccttcttccaccacacctacttcccgtcggcggatgtgttcaacgtggtgccgtggcgccgcgagatcatcggcagcctgctgtcgtgcgactacatcggcttccatattccgcgccaggtggagaacttcgtggacgtggtacgcggcgccgtgccggccgagcgcctggcatgggaaagctgcgccccgcgcttcctcacctatggctgcgcggtggggctggacaccatgaccacgcgcctgcgcgtgggcgaccgtgaaatcgcgctgggcgcgcacccggtgggcaccgacctgcgccgcatccataacgtgctggcgcgcagcgatgtgcgcaatgacatcttcaagctgcgccgcgagatcggggcacgcaagctggtgctgtcggtggagcggctggactacaccaagggcacgctggccaagctggaggccttcgaacgcctgctggaacagcatcccgaacgccagggcaaggtgaccttgttgatggtgtgcgtgccggccgcacgcgaaatgaccgtgtaccgcacgctgcagaaccagatcgaacaggcggtgggacgcatcaacggccgcttctcacgactggactggacgccggtgcggttcttcgcacaggccctgccgtttgaggaggtggtggcgcactacgcagcggcgcaggtgatgtggatcacgccgttgcgcgatggcatgaatctggtggccaaggagttcgtggccacccacggcatcgaaggcagcagcggcgtactggtgctcagcgagttcgccggtgcggcagcggagttgaagggcgcggtgctgaccaacccgcacgatccggccgacctgaccgccggcctgctgcaggcgttgtcgatgcccgaggaagaagccaccgggcgcatgcggcagctgttcggcagcgtggagtattacgacgtggatcgttgggggcgcgagttcctggaggcggtgcgcggttga

SEQ ID NO: 145628 - protein, 765 aa, Stenotrophomonas rhizophila
MTVSTPSLSTPTRTPPATPAPQLILATDLDGTFLAGDAAARHRLYRLVDQHPGIALIFITGRGLEAVMPLLSDPAIPRPDYVVCDVGATVVDGHTLQPLQPLQSMIDAHWPGEHVVAAAMRPFTALQRQDVPQERRCSYFCDPQTLAPLRAQIQAAAQALGCDVLYSADRYLDILPPDTDKGRTLAALARLLDLPRERILVAGDTLNDLSMYTAGFRGVCVGDSEPALTEATATLATTFHAQAPGCGGILEAIEHFALLADDDRYLYPPKQARAAGADLVMVYHRLPFDEVMENGVLVQRPPRSPNGIIPSLLSFFEGGQKGSWVAWGIDDPKRGPFQTHLAVDAERYPTLTAARVPLSRQEVDIFYKRFSKEAYWPMLHVFWERARFREDDWQVFLKVNRKFAEATAAEAAHGATVWIHDYNLWMVPATLRELRPDLKIAFFHHTYFPSADVFNVVPWRREIIGSLLSCDYIGFHIPRQVENFVDVVRGAVPAERLAWESCAPRFLTYGCAVGLDTMTTRLRVGDREIALGAHPVGTDLRRIHNVLARSDVRNDIFKLRREIGARKLVLSVERLDYTKGTLAKLEAFERLLEQHPERQGKVTLLMVCVPAAREMTVYRTLQNQIEQAVGRINGRFSRLDWTPVRFFAQALPFEEVVAHYAAAQVMWITPLRDGMNLVAKEFVATHGIEGSSGVLVLSEFAGAAAELKGAVLTNPHDPADLTAGLLQALSMPEEEATGRMRQLFGSVEYYDVDRWGREFLEAVRG

SEQ ID NO: 145629 - DNA, 2184 bp, uncultured archaeon GZfos37D1
  CDS (1)..(2184): transl_table=11
atgagaaggttgttgattatttcaaacagattacctgtcagtgttgaaagaaggaagaacgagtttcgtttcagttcaagcgtgggcgggcttgctactggcttaaatgcattacatcaaagatatgaaagcgtctgggttggctggcccgggattgcaataaatagagaagaaaccgattatgtcgaatcaaaattgtctgaatttaattgctaccctgttttcctctctcaaggagaagtggagaagtattattacggatttagcaacaaaactctatggccgctatttcattacttcccccagtatgccaaatatgagcactctgagtggtcgacttacgagcacgtgaacaggaaattttgtgagcgcgtagccgaaattgcaaagcctgaagacgttatttggattcatgactaccatttgatgcttctgcccgggcttataagggagcgttttcccgatgcaacaataggcttcttcttgcatatcccctttccatctgccgacttatttcgcttgataccgtggagaaggagaattttagaaggggtcttaggtgctgacctcataggtttccacacctacgactatgcgcacaatttccttagctccgtgctacgtctgcttggttatgaacatgaattggggaagttcgcgattggagataggatagtgcaagtggacgtgcatcccatggggattgaagtccagaaatttgtgagagcaacaagcagaaggggaataaaaagggaagtagcacggctacgcagccggttcaagaactgcaaaataatattctcgatggatcggctggactacacgaaaggaatcccggaaaggctttatgcatttgagcattttctcgaaactcacccggaatggcatgaaaaggtcgttttcattttaaaaatcgctccctctcgcactaaagtggggcagtatcgtgtgttgaagcaggaaatagatgagctcgtaggaaggataaacggaaaatatggaacgcctgaatgggtcccaatatcttacttctaccgctctttgccattccaaaccatcgttgctttttatctcgcggcagatgttgcactcctgacctcgatgcgagatggtatgaaccttatagcaaaggagtttgttgcaagcagggtggatggaaaaggcgttttaatattgagtgagatggcgggagctgcaagagagttaggagaagcgctcgtggtgaatccaaacaacaaagaggaagtggcggaggcactgaatgaagctttgagaatgccggaagaggagcaaaaatcgaggaatgaggagatgcagaaacgtttaagacattatgatgtgtttcattgggggtcaggattcataaggcgtgttcttgagacgaaaaggttacaagaggaactaaatatgaaaaaattgagtgaaaaaataagggaggagctaaaaaacgcttataaagctgcggataaatgtttgctgctcttagattacgatggaaccctggttccatttgctgataagccggagcgcgcaaaacccgataaagagcttttagacatatttagagcactatctaagtcgcctgaaaacaccgttgtgataataagtggtcgtgacaaggaaaccctggagcgctggtttggagacactggggtatgcctggtggcggagcatggagtgcggctcaaagaggaggaaggagagtggaaagagatagaacttctcaaagaagactggaaggaaaagataatccatatacttgacctttttgtggatagggctccgggttcttttatagaagagaagagcttttctctggtttggcattacaggaaagtagacccagagctgggagaattaagggctaaagagcttacggatcagttaatagaccttacagcgtgtacagagcttcaagtgatgaaaggaaacaaggtagtggaagtgaaggatgggcggctgaataaagggatagctgcttctcattggctaacgaagggttttgggttcatattagcggtgggagacgaccttacagatgaagatatgttcaaagtccttcctgagggtgcgtattctgtaaagatcggttttacaccatcgaaagcacgattttatctggggtcaccaaaggaagtgagggctttactcgatgaaatggaactggttgaagtttataaataa

SEQ ID NO: 145630 - protein, 727 aa, uncultured archaeon GZfos37D1
MRRLLIISNRLPVSVERRKNEFRFSSSVGGLATGLNALHQRYESVWVGWPGIAINREETDYVESKLSEFNCYPVFLSQGEVEKYYYGFSNKTLWPLFHYFPQYAKYEHSEWSTYEHVNRKFCERVAEIAKPEDVIWIHDYHLMLLPGLIRERFPDATIGFFLHIPFPSADLFRLIPWRRRILEGVLGADLIGFHTYDYAHNFLSSVLRLLGYEHELGKFAIGDRIVQVDVHPMGIEVQKFVRATSRRGIKREVARLRSRFKNCKIIFSMDRLDYTKGIPERLYAFEHFLETHPEWHEKVVFILKIAPSRTKVGQYRVLKQEIDELVGRINGKYGTPEWVPISYFYRSLPFQTIVAFYLAADVALLTSMRDGMNLIAKEFVASRVDGKGVLILSEMAGAARELGEALVVNPNNKEEVAEALNEALRMPEEEQKSRNEEMQKRLRHYDVFHWGSGFIRRVLETKRLQEELNMKKLSEKIREELKNAYKAADKCLLLLDYDGTLVPFADKPERAKPDKELLDIFRALSKSPENTVVIISGRDKETLERWFGDTGVCLVAEHGVRLKEEEGEWKEIELLKEDWKEKIIHILDLFVDRAPGSFIEEKSFSLVWHYRKVDPELGELRAKELTDQLIDLTACTELQVMKGNKVVEVKDGRLNKGIAASHWLTKGFGFILAVGDDLTDEDMFKVLPEGAYSVKIGFTPSKARFYLGSPKEVRALLDEMELVEVYK

SEQ ID NO: 145631 - DNA, 2184 bp, uncultured archaeon GZfos34H9
  CDS (1)..(2184): transl_table=11
atgagaaggttgttgattatttcaaacagattacctgtcagtgttgaaagaaggaagaacgagtttcgtttcagttcaagcgtgggagggcttgctactggcttaaacgcattacatcaaaaatacaaaagcgtctgggttggctggcccgggattgcaataaatagagaagaaaccgattatgtcgaatcaaaattgtcagaatttaattgctaccccgttttcctctctcaaggagaagtggagaagtattattacggatttagcaacaaaaccctatggccgctatttcattacttcccccagtatgccaaatatgagcactctgagtggtcggcttacgagcacgtgaacaggaaattttgtgagcgcgtagccgaaattgcaaagcctgaagacattatttggattcatgactaccatttgatgcttctgcccgggcttataagggagcgttttcccgatgcaacaataggcttcttcttgcatatcccctttccatctgccgacttatttcgcttgataccgtggagaaggagaattttagaaggggtcttaggtgctgacctcataggtttccacatctacgactacgcgcacaatttcctttgcagtgtgctccgcctgctcggttatgaacatgaatttgggaagttcgcgattggagataggatagtgcaagtggacgtgcatccaatggggattgaagtccagaaatttgtgagagcaacaagcggcaggggaataaaaagggaagtagcacggctacgcagccggttcaagaactgcaaaataatattctcgatggataggctggactacacgaaaggaatcccggaaaggctttatgcttttgagcattttctcgaaactcacccggaatggcatgaaaaggtcgttttcattttaaaaatcgctccctctcgcactaaagtggggcaatatcgtgtgttgaagcaggaaatagatgagctcgtaggaaggataaacggaaaatatggaacgcctgaatgggtaccaatatcttacttctaccgctctttgccattccaaaccatcattgctttttatctcgcagcagatgttgcactcctgacctcgatgcgagatggtatgaaccttatagcaaaggagtttgttgcaagcagggtggatggaaaaggagttttgatactgagtgagatggcgggagctgcaagagagttaggagaagcgctcgtggtaaactcgaacaacaaagaggaagtggcagaggcgctgaatgaagctttgagaatgccggatgaggagcaaaaatcgaggaatgaggagatgcagaaacgtttgagtcattatgatgtgtttcattgggggtcaggattcataaggagtgttcttgagacgaaaaggttacaagaggaactaaatatgaagaaattgagtgaaaaaataagggaggagctaaaaaactcttataaagctgctgataaacgtttgctgctcttagattacgatggaaccctggttccatttgctgataagccggagcgcgcaaaaccagatagagagcttttggacttatttagagcactatctgagccgcctgaaaacaccgtcgtgataataagtggtcgtgacaaggaaaccctggagcgctggtttggagacacaggggtatgcctggtggcggagcacggagtgtggctcagagaggaggaaggagagtggaaagagatagaacttctcaaagaagactggaaggaaaagataatccctatacttgacctttttgtggatagagctccgggttcttttatagaagagaagagattttctctggtttggcattacaggaaagtagacccagagctgggagaattaagggctaaagagcttacggatcagttaatagaccttacagcgtgcacagagcttcaagtgatgaaaggaaacaaggtagtggaagtgaaggatgggagggtgaataaagggatagctgcttctcattggctaacaaaaggttttgggttcatattagcggtgggagacgaccttacagatgaagatatgttcaaagtccttcctgaggatgcgtattctgtaaagataggttttacaccatcggaagcacgattttatctggggtcaccaaaggaagtgagggctttactcgatgaaatggaaatggttgaagtttataaataa

SEQ ID NO: 145632 - protein, 727 aa, uncultured archaeon GZfos34H9
MRRLLIISNRLPVSVERRKNEFRFSSSVGGLATGLNALHQKYKSVWVGWPGIAINREETDYVESKLSEFNCYPVFLSQGEVEKYYYGFSNKTLWPLFHYFPQYAKYEHSEWSAYEHVNRKFCERVAEIAKPEDIIWIHDYHLMLLPGLIRERFPDATIGFFLHIPFPSADLFRLIPWRRRILEGVLGADLIGFHIYDYAHNFLCSVLRLLGYEHEFGKFAIGDRIVQVDVHPMGIEVQKFVRATSGRGIKREVARLRSRFKNCKIIFSMDRLDYTKGIPERLYAFEHFLETHPEWHEKVVFILKIAPSRTKVGQYRVLKQEIDELVGRINGKYGTPEWVPISYFYRSLPFQTIIAFYLAADVALLTSMRDGMNLIAKEFVASRVDGKGVLILSEMAGAARELGEALVVNSNNKEEVAEALNEALRMPDEEQKSRNEEMQKRLSHYDVFHWGSGFIRSVLETKRLQEELNMKKLSEKIREELKNSYKAADKRLLLLDYDGTLVPFADKPERAKPDRELLDLFRALSEPPENTVVIISGRDKETLERWFGDTGVCLVAEHGVWLREEEGEWKEIELLKEDWKEKIIPILDLFVDRAPGSFIEEKRFSLVWHYRKVDPELGELRAKELTDQLIDLTACTELQVMKGNKVVEVKDGRVNKGIAASHWLTKGFGFILAVGDDLTDEDMFKVLPEDAYSVKIGFTPSEARFYLGSPKEVRALLDEMEMVEVYK

SEQ ID NO: 145633 - DNA, 2184 bp, uncultured archaeon GZfos34A6
  CDS (1)..(2184): transl_table=11
atgagaaggttgttgattatttcaaacagattacctgtcagtgttgaaagaaggaagaacgagtttcgtttcagttcaagcgtgggcgggcttgctactggcttaaatgcattacatcaaagatatgaaagcgtctgggttggctggcccggaattgcaataaatagagaagaaaccgattatgtcgaatcaaaattgtctgaatttaattgctaccctgtttttctctctcaaggagaagtggagaagtattattacggatttagcaacaaaaccctatggccgctatttcattacttcccacagtatgccaaatatgagcactcggaatggtcggcttacgagcacgtgaacaggaaattttgtgagcgcgtagccgaaattgcaaagcctgaagacgttatttggattcatgactaccatttgatgcttctgcccgggcttataagggagcgttttcccgatgcaacaataggcttcttcttgcatatcccctttccatctgccgacttatttcgcttgataccctggaggaggagaattttagaaggggtcttaggtgctgacctcataggtttccacacctacgactacgcgcacaatttcctttgcagtgtgctccgcctgctcggttatgaacatgaattggggaagttcgcgattggagataggatagtgcaagtggacgtgcatccaatggggattgaagtccagaaatttgtgagtgcaacaagcggaaggggaataaaaagggaagtagcacggctacgcagccggttcaagaactgcaaaataatattctcgatggatcggctggactacacgaaaggaatcccggaaaggctttttgcatttgagctttttctcgaaactcacccggaatggcatgaaaaggtcgttttcattttaaaaatcgctccctctcgcactaaaggggggcagtatcgtgtgttgaagcaggaaatagatgagctcgtaggaaggataaacggaaaatatggaacgcctgaatgggccccaatatcttacttctaccgctctttgccattccaaaccatcgttgctttttatctcgcggcagatgttgcactcctgacctcgatgcgagatggtatgaaccttatagcaaaggagtttgttgcaagcagggtggatggaaaaggcgttttaatactgagtgagatggcgggagccgcaagagagttaggagaagcgctcgtggtgaatccaaacaacaaagaggaagtggtggaggcgctgaatgaagctttgagaatgccggaagaggagcaaaaatcgaggaatgaggagatgcagaaacgtttatgtcattatgatgtgtttcattgggggtcaggattcataaggagtgttcttgagacgaaaaggttacaagaggaactaaatatgaagaaattgagtgaaaaaataagggaggagctaaaaaacgcttataaagctgcggataaatgtttgctgctcttagattacgatggaaccctggttccatttgctgataagccggagcgcgcaaaacccgataaagagcttttgtacctatttagagcactatctgagccgcctgaaaacaccgttgtgataataagtggtcgtgataaggaaaccctggagcgctggtttggcggcactgaggtatgtctggtggcggagcacggagtgtggctcagagaggaggaaggagagtgggaggcgatagaacttcttaaagaagactggaaggaaaagataatccctatacttgacctttttgtggatagggctccgggttcttttatagaagagaagagcttttctctggtttggcattacaggaaagtagacccagagctgggagaattaagggctaaagagcttacggatcagttaatagaccttgcagcgtgtacagagcttcaagtgatgaaaggaaacaaggtagtggaagtgaaggatgggagggtgaataaagggatagctgcttctcattggctaacgaagggttttgggttcatattagcggtgggagacgaccttacagatgaagatatgttcaaagtcctccctggggatgcgtattctgtaaagataggttttacaccatcgaaagcacgattttatctggggtcaccaaaggaagtgagggctttactcgatgaaatggaaatggttgaagtttataaataa

SEQ ID NO: 145634 - protein, 727 aa, uncultured archaeon GZfos34A6
MRRLLIISNRLPVSVERRKNEFRFSSSVGGLATGLNALHQRYESVWVGWPGIAINREETDYVESKLSEFNCYPVFLSQGEVEKYYYGFSNKTLWPLFHYFPQYAKYEHSEWSAYEHVNRKFCERVAEIAKPEDVIWIHDYHLMLLPGLIRERFPDATIGFFLHIPFPSADLFRLIPWRRRILEGVLGADLIGFHTYDYAHNFLCSVLRLLGYEHELGKFAIGDRIVQVDVHPMGIEVQKFVSATSGRGIKREVARLRSRFKNCKIIFSMDRLDYTKGIPERLFAFELFLETHPEWHEKVVFILKIAPSRTKGGQYRVLKQEIDELVGRINGKYGTPEWAPISYFYRSLPFQTIVAFYLAADVALLTSMRDGMNLIAKEFVASRVDGKGVLILSEMAGAARELGEALVVNPNNKEEVVEALNEALRMPEEEQKSRNEEMQKRLCHYDVFHWGSGFIRSVLETKRLQEELNMKKLSEKIREELKNAYKAADKCLLLLDYDGTLVPFADKPERAKPDKELLYLFRALSEPPENTVVIISGRDKETLERWFGGTEVCLVAEHGVWLREEEGEWEAIELLKEDWKEKIIPILDLFVDRAPGSFIEEKSFSLVWHYRKVDPELGELRAKELTDQLIDLAACTELQVMKGNKVVEVKDGRVNKGIAASHWLTKGFGFILAVGDDLTDEDMFKVLPGDAYSVKIGFTPSKARFYLGSPKEVRALLDEMEMVEVYK

SEQ ID NO: 145635 - DNA, 2184 bp, uncultured archaeon GZfos33E1
  CDS (1)..(2184): transl_table=11
atgagaaggttgttgattatttcaaacagattacctgtcagtgttgaaagaaggaagaacgagtttcgtttcagttcaagcgtgggcgggcttgctactggcttaaatgcattacatcaaagatatgaaagcgtctgggttggctggcccgggattgcaataaatagagaggaaaacgattatgtcgaatcaaaactgtctgaatttaattgctaccccgttttcctctctcaaggagaagtggagaagtattattacggatttagcaacaaaaccctatggccgctattccattacttcccccagtatgccaaatatgagtacgctgagtggtcggcttacgagcacgtgaacaggaaattttgtgagcgcgtagccgaaattgcaaagcctgaagacgttatttggattcatgattaccatttgatgctcctgcccgggcttataagggggcgttttcccgatgcaacaataggcttcttcttgcatatcccctttccatctgccgacttatttcgcttgataccctggagaaggagaattttagaaggggtcttaggtgctgacttcataggtttccacacctacgactatgcgcacaatttccttagtagtgtgctctgcctgctcggttatgaacatgaattggggaagttcgcgattggagataggatagtgcaagtggacgtgcatccaatggggattgaagtccagaaatttgtgagtgcaacaagcggaaggggaataaaaagggaagtagcacggctacgcagccggttcaagaactgcaaaataatattctcgatggatcggctggactacacgaaaggaatcccggaaaggctttatgcatttgagcattttctcgaaactcacccggaatggcatgaaaaggtcgttttcattttaaaaatcgctccctctcgcactaaagtggggcagtatcgtgtgttgaagcaggaaatagatgagctcgtaggacggataaacggaaaatatggaacgcctgaatgggtcccaatatcttacttctaccgctctttgccattccaaaccatcgttgctttttatctcgcggcagatgttgcactcctgacctcgatgcgagatggtatgaaccttatagcaaaggagtttgttgcaagcagggtggatggaaaaggagttttaatactgagtgagatggcgggagctgcaagagagttaggagaagcgctcgtggtaaatccaaacaacaaagaggaagtggcagaggcgctgaatgaagctttgagaatgccggaagaggagcaaaaatcgaggaatgaggagatgcagaaacgtttgagtcattatgatgtgtttcattgggggtcaggattcataaggagtgttcttgagacgaaaaggttacaagaggaactaaatatgaagaaattgaacgaaaaaataagggaggagctaaaaaactcttataaagctgctgataaacgtttgctgctcttagattacgatggaaccctggttccatttgctgataagccggagcgcgcaaaacccgataaagagcttttgtacatatttagagcactatctgagccgcctgaaaacaccgttgtgataataagtggtcgtgacaaggaaaccctggagcgctggtttggagacactggggtatgcctggtggcggagcacggagtgcggctcagagaggaggaaggagagtgggaagagatagaacttcttaaagaagactggaaggaaaagataatctctatacttgacctttttgtggatagggctccgggttcttttatagaagagaagagcttttctctggtttggcattacaggaatgtagacccagagctgggagaattaagggctaaagagcttacggatcagttaataggccttacagcgtgtacagagcttcaagtgatgaaaggaaacaaggtagtggaagtgaaggatgggagggtgaataaagggatagctgcttctcattggctaacgaagggttttgggttcatattagcggtgggagacgaccttacagatgaagatatgttcaaagtcctccctgagggtgcgtattctgtaaagataggttttacaccatcgaaagcacgattttatctggggtcaccaaaggaagtgagggctttactcgatgaaatggaaatggttgaagtttataaataa

SEQ ID NO: 145636 - protein, 727 aa, uncultured archaeon GZfos33E1
MRRLLIISNRLPVSVERRKNEFRFSSSVGGLATGLNALHQRYESVWVGWPGIAINREENDYVESKLSEFNCYPVFLSQGEVEKYYYGFSNKTLWPLFHYFPQYAKYEYAEWSAYEHVNRKFCERVAEIAKPEDVIWIHDYHLMLLPGLIRGRFPDATIGFFLHIPFPSADLFRLIPWRRRILEGVLGADFIGFHTYDYAHNFLSSVLCLLGYEHELGKFAIGDRIVQVDVHPMGIEVQKFVSATSGRGIKREVARLRSRFKNCKIIFSMDRLDYTKGIPERLYAFEHFLETHPEWHEKVVFILKIAPSRTKVGQYRVLKQEIDELVGRINGKYGTPEWVPISYFYRSLPFQTIVAFYLAADVALLTSMRDGMNLIAKEFVASRVDGKGVLILSEMAGAARELGEALVVNPNNKEEVAEALNEALRMPEEEQKSRNEEMQKRLSHYDVFHWGSGFIRSVLETKRLQEELNMKKLNEKIREELKNSYKAADKRLLLLDYDGTLVPFADKPERAKPDKELLYIFRALSEPPENTVVIISGRDKETLERWFGDTGVCLVAEHGVRLREEEGEWEEIELLKEDWKEKIISILDLFVDRAPGSFIEEKSFSLVWHYRNVDPELGELRAKELTDQLIGLTACTELQVMKGNKVVEVKDGRVNKGIAASHWLTKGFGFILAVGDDLTDEDMFKVLPEGAYSVKIGFTPSKARFYLGSPKEVRALLDEMEMVEVYK

SEQ ID NO: 145637 - DNA, 2184 bp, uncultured archaeon GZfos12E2
  CDS (1)..(2184): transl_table=11
atgagaaggttgttgattatttcaaacagattacctgtcagtgttgaaagaaggaagaacgagcttcgtttcagttcaagcgtgggcgggcttgctactggcttaaatgcattacatcaaagatatgaaagcgtctgggttggctggcctgggattgcaataaatagagaagaaaccgattatgtcgaatcaaaattgtcagaatttaattgctaccccgttttcctctctcaaggagaagtggagaagtattattacggatttagcaacaaaaccctatggccgctatttcattacttcccccagtatgccaaatatgagcactctgagtggtcggcttacgagcacgtgaacaggaaattttgtgagcgcgtagccgaaattgcaaagcctgaagacattatttggattcatgactaccatttgatgcttctgcccgggcttataagggagcgttttcccgatgcaacaataggcttcttcttgcatatcccctttccatctgccgacttatttcgcttgataccgtggagaaggagaattttagaaggggtcttaggtgctgacctcataggtttccacacctacgactacgcgcacaatttcctttgcagtgtgctccgcctgctcggttatgaacatgaatttgggaagctcgcgattggagataggatagtgcaagtggacgtgcatccaatgggggttgaagtccagaaatttgtgagagcaacaagcggaaggggaataaaaagggaagtagcacggctacgcagccggttcaagaactgcaaaataatattctcgatggatcggctggactacacgaaaggaatcccggaaaggctttatgcatttgagcattttctcgaaactcacccggaatggcatgaaaaggtcgttttcattttaaaaatcgctccctctcgcactaaagtggggcagtatcgtgtgttgaagcaggaaatagatgagctcgtaggaaggataaacggaaaatatggaacgcctgaatgggtcccaatatcttacttctaccgctctttgccattccaaaccatcgttgctttttatctcgcggcagatgttgcactcctgacctcgatgcgagatggtatgaaccttatagcaaaggagtttgttgcaagcagggtggatggaaaaggagttttaatactgagtgagatggcgggagctgcaagagagttaggagaagcgctcgtggtgaatccaaacaacaaagaggaagtggcagaggcgctgaatgaagctttgagaatgccggaagaggagcaaaaatcgaggaatgaggagatgcagaaacgtttaagtcattatgatgtgtttcattgggggtcaggattcataaggagtgttcttgagacgaaaaggttacaagaggaactaaatatgaagaaattgagtgaaaaaataagggaggagctaaaaaacgcttataaagctgcggataaatgtttgctgctcttagattacgatggaaccctggttccatttgctgataagccggagcgcgcaaaacccgataaagagcttttgtacctgtttagagcactatctgagccgcctgaaaacaccgttgtgataataagtggtcgtgacaaggaaaccttggagcgctggtttggagacactggggtatgcctggtggcggagcatggagtgcggctcaaagaggaggaaggagagtggaaagagatagaacttctcaaagaagactggaaggaaaagataatccctatacttgacctttttgtggatagggctccgggttcttttatagaagagaagagcttttctctggtttggcattacaggaaagtagacccagagctgggagaattaagggctaaagagcttacggatcagttaatagaccttacggcgtgcacagagcttcaagtgatgaaaggaaacaaggtagtggaagtgaaggatgggagggtgaataaagggatagctgcttctcattggctaacgaagggttttgggttcatattagcggtgggagacgaccttacagatgaagatatgttcaaagtccttcctgagggtgcgtattctgtaaagataggttttacaccatcgaaagcacgattttatctggggtcaccaaaggaagtgagggctttactcgatgaaatggaactggttgaagtttataaataa

SEQ ID NO: 145638 - protein, 727 aa, uncultured archaeon GZfos12E2
MRRLLIISNRLPVSVERRKNELRFSSSVGGLATGLNALHQRYESVWVGWPGIAINREETDYVESKLSEFNCYPVFLSQGEVEKYYYGFSNKTLWPLFHYFPQYAKYEHSEWSAYEHVNRKFCERVAEIAKPEDIIWIHDYHLMLLPGLIRERFPDATIGFFLHIPFPSADLFRLIPWRRRILEGVLGADLIGFHTYDYAHNFLCSVLRLLGYEHEFGKLAIGDRIVQVDVHPMGVEVQKFVRATSGRGIKREVARLRSRFKNCKIIFSMDRLDYTKGIPERLYAFEHFLETHPEWHEKVVFILKIAPSRTKVGQYRVLKQEIDELVGRINGKYGTPEWVPISYFYRSLPFQTIVAFYLAADVALLTSMRDGMNLIAKEFVASRVDGKGVLILSEMAGAARELGEALVVNPNNKEEVAEALNEALRMPEEEQKSRNEEMQKRLSHYDVFHWGSGFIRSVLETKRLQEELNMKKLSEKIREELKNAYKAADKCLLLLDYDGTLVPFADKPERAKPDKELLYLFRALSEPPENTVVIISGRDKETLERWFGDTGVCLVAEHGVRLKEEEGEWKEIELLKEDWKEKIIPILDLFVDRAPGSFIEEKSFSLVWHYRKVDPELGELRAKELTDQLIDLTACTELQVMKGNKVVEVKDGRVNKGIAASHWLTKGFGFILAVGDDLTDEDMFKVLPEGAYSVKIGFTPSKARFYLGSPKEVRALLDEMELVEVYK

SEQ ID NO: 145639 - DNA, 1413 bp, Rhodobacter sphaeroides f
  CDS (1)..(1413): transl_table=11
atgagccgtctcgtcgtcgtctcgaaccgcgtgcccctgccggacgagaacggcaacccgccgcccggcgggctggccgtcgccgtccatgtcgcgctgcgcaagaacggcgggatctggatgggctggtcgggccgctccaccggcgaggaagagccgcagggcctgaccacgctggagcaggacaagatcagctatgtgctgaccgacctctcgcaggcggacctcgacgaatattacaacggtttcgccaaccgggtcctctggccgatcttccactgccgcctcgatctggccgaatatgcccggcaggagatggcgggctatttccgcgtcaatcgcctgttcgccgaccgtctggtgccgatgctcgagcccgacgacgtgatctgggtgcatgattaccacctgatcccgctggcgcaggagcttcgcaagcgcggggtgcgcaaccggatcggcttcttcctccacattccgtggcccccggccgacatcgtgaccgcgctgccggtctacgagatcatcatgcggggccttgcggcctacgatctcgtggggttccagaccgactacgacctcgacaatttcgtgggctgcctgcgccgcgagggctggggcgactggtcgaccccgggctggctccgcgccttcgacaaggaggtggcggccgcggcctttcccatcggcatcgagaccggggatttcgcgcggctcgcggccaagacggacgggctcgatctggtcaccgacatgcagcagagcctccatggcagtgctctcatcatcggggtggaccggctcgactattccaagggcatcgccgcgcggatcgacgcgttcgagcggtatctgatgcgcaaccccgaccaggcgggcaaggtcacgctgctgcaggtggcgccccattcgcgctcggacgtgcccgaatatctcgagatgcaggggcaggtggagtcgcattgcggccgggtgaacggcgcgcacggcaccatcgagtgggtgcccatccgctatgtgaaccagtcgctcacccggcctgtgctggcgggcctctaccggctggcgaaagtggggctcgtcacgccgctccgcgacgggatgaacctggtggccaaggaatatgtggcctcgcaggatccggccgatccgggcgtcctcatcctctcgcgcttcgcgggcgccgcgcgcgaactggacggggccatcttcatcaacccctacgacaccgagcagacggcgggggccatcggccgtgcgctctcgatgccgctcgacgagcggatcgcgcgctggcggcgcatgatggatcatctcgagtcccacgatgtgctctggtggtgccgcacgttcctcgccgccctgaacgaggcgcccgaggacaacggtgccctcacccgagagagcgattga

SEQ ID NO: 145640 - protein, 470 aa, Rhodobacter sphaeroides f
MSRLVVVSNRVPLPDENGNPPPGGLAVAVHVALRKNGGIWMGWSGRSTGEEEPQGLTTLEQDKISYVLTDLSQADLDEYYNGFANRVLWPIFHCRLDLAEYARQEMAGYFRVNRLFADRLVPMLEPDDVIWVHDYHLIPLAQELRKRGVRNRIGFFLHIPWPPADIVTALPVYEIIMRGLAAYDLVGFQTDYDLDNFVGCLRREGWGDWSTPGWLRAFDKEVAAAAFPIGIETGDFARLAAKTDGLDLVTDMQQSLHGSALIIGVDRLDYSKGIAARIDAFERYLMRNPDQAGKVTLLQVAPHSRSDVPEYLEMQGQVESHCGRVNGAHGTIEWVPIRYVNQSLTRPVLAGLYRLAKVGLVTPLRDGMNLVAKEYVASQDPADPGVLILSRFAGAARELDGAIFINPYDTEQTAGAIGRALSMPLDERIARWRRMMDHLESHDVLWWCRTFLAALNEAPEDNGALTRESD

SEQ ID NO: 145641 - DNA, 2208 bp, Thermoproteus tenax
  CDS (1)..(2208): transl_table=11
gtgggaggacaagtgcgcctcatagtggtctccaacagattgcccgtcactatatcgccgagcggcgagataagggagtccgtgggcggccttgcgactgctatgaagtccttcctcggcgccgtgaacgggggcagagagctgggcctcgaggaggtcgtctgggtcggctggtcaggcgtgccctcggagagggagtccaacgatctgagggagcgcctcagagggatgggcctagagcctgtccccctctcgtctgaggaggtcgaggggttctacgagggcttttccaattcgactctctggccgctcttccacggcttctcggagtatgcgacgtatgaggagaagcactggcgcgcctacagaggcgtcaacgagaagtacgccaaagcggtcgtagctctggcgcgccccggcgacctagtgtggatccacgactaccacctcatgttggcgccggcgatagtgagagaggcggcggaggtcggagtgggcttcttcctccacatccccttcccgccggccgagcttctacagctcctgccctccgagtggcggagggagatcttggagggcctcctggggtcggacctcgtcggcttccacacatacgaatactccgcgaatttctccaggagcgtcgtcagattcctgggatacaaagtggagatgggggccatcgcagtgggccacagaagggtgagagttggcgtcttccccataggcatagacttcgatagattctacaattcctcgcaggatccctctgtagtcgaggagatggcgaagctcagagagatgttggggcgcgcgaaggttgtgttctctatagacagacttgactacactaagggcgtcctaaggagggtggccgcgtgggagaggttcttgagggagcaccccgagtggcgcggcagagccgtgttcgtgttggtggtcgtgccctcgaggacgggcgtgcccatgtacgaggaaatgaagaggcagatagacagagaggtcggcagaataaatggggagctgggggagctcaactgggtccctatagtgtacttgtaccgcttcatcccatcgcccaccctcatggcgctgtacaatatagccgacgttgctctgataactccgctgcgcgacggaatgaacttggtggcgaaggagttcgtggcctccaagagggactgccgcggagtgcttatactcagcgaactggccggcgcctccaaggagctggccgaggcgttggtgataaacccaaacgacgtggggggcactgcggaggcgatagcggaggcgctctccatgtcggaggacgagcagtgtaggaggatcagggctatgcaggagaggctgaggatgagggacgtggtcagatggggcaccgacttcatctactccctaatctcggcgaagtcggcccgagaggaggtggagaaggccctcagatatatggaggagctctcggtggacaaactcaagtctgacttcgccaaggccaagaggaggctcttgctcttggactacgacggcacgttggtcccccactatccctacccgcacatggcggttccagacggcgatctgttggagctgttgagccgccttgcggcgctccccgagacggcggtctacgtagtgagcgggaggggcagagactttctggacggctggctcggcagactgccggtcggccttgtggcggagcacggcttcttcctgaaacaccccggaggagaatggaaatcgttggggaaagtcgatccctcatggaggcagtacgccaagggcataatggaggacttcgcctctaatgtccccggaagcttcgtggaggtgaaagaggccgggatagcttggcactaccgcaacgccgatgagacaatcgccgagaaggcagtggtggagttgatcgatgcgttgtccaacgcgctggcgggctcgggcctctcgatattgaggggcaagaaggtggtggaggtgcgcccggctggatacaccaaggggacggcggccaagatgttgcttgacgagctctcgcccgactttgtgttcgtcgcaggcgacgacgagacggacgagggcatgttcgaggtcgcgccccagagcgcctacactgtgaaagtggggcctggcccaactctggccaagttcagagtcggggactacagagggctgaggtctctattggagcagttgcgccccccttag

SEQ ID NO: 145642 - protein, 735 aa, Thermoproteus tenax
MGGQVRLIVVSNRLPVTISPSGEIRESVGGLATAMKSFLGAVNGGRELGLEEVVWVGWSGVPSERESNDLRERLRGMGLEPVPLSSEEVEGFYEGFSNSTLWPLFHGFSEYATYEEKHWRAYRGVNEKYAKAVVALARPGDLVWIHDYHLMLAPAIVREAAEVGVGFFLHIPFPPAELLQLLPSEWRREILEGLLGSDLVGFHTYEYSANFSRSVVRFLGYKVEMGAIAVGHRRVRVGVFPIGIDFDRFYNSSQDPSVVEEMAKLREMLGRAKVVFSIDRLDYTKGVLRRVAAWERFLREHPEWRGRAVFVLVVVPSRTGVPMYEEMKRQIDREVGRINGELGELNWVPIVYLYRFIPSPTLMALYNIADVALITPLRDGMNLVAKEFVASKRDCRGVLILSELAGASKELAEALVINPNDVGGTAEAIAEALSMSEDEQCRRIRAMQERLRMRDVVRWGTDFIYSLISAKSAREEVEKALRYMEELSVDKLKSDFAKAKRRLLLLDYDGTLVPHYPYPHMAVPDGDLLELLSRLAALPETAVYVVSGRGRDFLDGWLGRLPVGLVAEHGFFLKHPGGEWKSLGKVDPSWRQYAKGIMEDFASNVPGSFVEVKEAGIAWHYRNADETIAEKAVVELIDALSNALAGSGLSILRGKKVVEVRPAGYTKGTAAKMLLDELSPDFVFVAGDDETDEGMFEVAPQSAYTVKVGPGPTLAKFRVGDYRGLRSLLEQLRPP

SEQ ID NO: 145643 - DNA, 1350 bp, Thermus thermophilus
  CDS (1)..(1350): transl_table=11
atggggctcatcatcgtggccaaccgggcgcccttccgcctgacccccgaggggctcgtccccgcggtgggcggactcgccaccgcgcttctcccggtcctggagaggcgccatggcgtctgggtggcggccggggagtggcgggagaagggccaagccgccaccccccgggaaagccaggtccgcctggaacaggtcttcctaccggagaaggagtggcagggctactacggggggttctccaaccgggtcctctggcccctctgccactacttcttggagcgggtggagctcaggcgggacttctaccaggactaccagcgggccaaccgccgcttcgccgagcgggtggcccaggtcttccgcgagggggacacggtcttcgtccaggactaccacctcctcctccttccccgcctcctccgggagaggatcccggcgaaaatcgggttctttttccacatcccctggccctccagcggggtcttccgcatcctgccctggggcagggccttggtggagggcgttctgggggccgacctcatcggcttccacaccccggagtacgtggagaacttcctgaggaccgccgcctactacggctaccaggtggaggaaaaccgggtgcgggtgggggaaaggtgggtgcgggtggaggcccaccccttggggatagacacggggcgcttcggggagctcgcccaggacccccacatcggcctccacgcccgggccctcaagcggctcgcaggggcggagcggctcatcctcggggtggaccggctggactacaccaagggaattttggaaaggctcctcgcctacgaacgcctcctccagtcctacccccagtggcggggccgggtggccttcttccagatcgccaccccaagccgcaccagcgtccacgcctaccgggagctcaagcggcgggtggacgaggtggtggggcggatcatggggagcttcctcagggaggactgggtgcccctccgctacttctaccagacctacacccaagaggagctcgccgccttttaccgggcggcggacgtggccctcatcacccccttgagggacgggatgaacctggtggccatggagtacgcctacaccacggaggacggggtcctggtcctctccaacctggcgggggcggcggagtacctgaaggaggcccttctggtcaacccctacgacctggacgggatggcccaggccctggaccgggccctgcgcatgcccggaggggaacgccgggaaaggctttccgccttgaaggcccgcattgaggccttggacgtgcagggctgggcggagcgcttcctcgcctccttggaggagggatga

SEQ ID NO: 145644 - protein, 449 aa, Thermus thermophilus
MGLIIVANRAPFRLTPEGLVPAVGGLATALLPVLERRHGVWVAAGEWREKGQAATPRESQVRLEQVFLPEKEWQGYYGGFSNRVLWPLCHYFLERVELRRDFYQDYQRANRRFAERVAQVFREGDTVFVQDYHLLLLPRLLRERIPAKIGFFFHIPWPSSGVFRILPWGRALVEGVLGADLIGFHTPEYVENFLRTAAYYGYQVEENRVRVGERWVRVEAHPLGIDTGRFGELAQDPHIGLHARALKRLAGAERLILGVDRLDYTKGILERLLAYERLLQSYPQWRGRVAFFQIATPSRTSVHAYRELKRRVDEVVGRIMGSFLREDWVPLRYFYQTYTQEELAAFYRAADVALITPLRDGMNLVAMEYAYTTEDGVLVLSNLAGAAEYLKEALLVNPYDLDGMAQALDRALRMPGGERRERLSALKARIEALDVQGWAERFLASLEEG

SEQ ID NO: 145645 - DNA, 1344 bp, Thermoplasma volcanium
  CDS (1)..(1344): transl_table=11
ttgatgaggtacgtaatagcctccagtaggtgtcccttttcgcatgatgttgtaatgggtagagaacttgtcaaagagaatgttggcggcgtagctaccgcccttaaaagggcaatatctaaacatggtgggacgtggatatgctggggagacggaaaggcagataaccgatacgttaacgaggatgttgggacttataaaataaaaaggataatactgaccccacaagagaagagaggatattatgacatgtattcaaacagaactctgtggccgctcttccattattttagggagagagtacagtatacagataatggatacgagacatacagaaaggtaaatgaaaaatttgcagaggagatacttaataatacgtcacaggaagatatagtttgggtacacgattatcagctttctctcgtacctggaatactacggcaaaaaggccttaaaaacaggatcattttcacttggcacatcccgtgggtatctagagagatgtttgaaactcttactgaaagcgatgaaataaaggaaagcgttggttcagcggattttataacatttcacactgacctatacagaaagaactttgaaagcctctttgaaaatagaaaacatggtaagtctatagctgtgcctcttggtatagactaccgatacttcgaaaaggctaagtcaagtcaaattaaaagttacgctcttaaagacaaaataatgctattctctattgatagattagattacaccaaagggcttacaaatagagttctctctatagagagacttattcgaaatcatcctgaaacatcagggaaatttgtttacgtcatgatagttacaccaagcagaacttctgtatcggattacgtatcaatgaagagagaacttgaaatgaatataggtagagttaatggagaatttggaaccatttcctggatgccaatactatatatgtacagaaaaatttcagatcattcgctagtctcatactataagtccgccgatatcgctcttattaccccgcttatagatggcttaaacttggtcagcaaggaatttattgcatctactgagaaaggcatacttgtattatctaaattcgcaggagcttcaaattgcctcagaggtgcgcttatagttaacccaaatagcccggatgaggttgctgatgctatatacaaggcgatgaacatggaaagaaaggaagctgatgagaggcttttaaaaatgaaggccattgtcaaggcaagagacacggattggtggataaaaagaatatataggttagccatcgctaaagaacatgatagacgggttactaataacagaattgaataa

SEQ ID NO: 145646 - protein, 447 aa, Thermoplasma volcanium
MMRYVIASSRCPFSHDVVMGRELVKENVGGVATALKRAISKHGGTWICWGDGKADNRYVNEDVGTYKIKRIILTPQEKRGYYDMYSNRTLWPLFHYFRERVQYTDNGYETYRKVNEKFAEEILNNTSQEDIVWVHDYQLSLVPGILRQKGLKNRIIFTWHIPWVSREMFETLTESDEIKESVGSADFITFHTDLYRKNFESLFENRKHGKSIAVPLGIDYRYFEKAKSSQIKSYALKDKIMLFSIDRLDYTKGLTNRVLSIERLIRNHPETSGKFVYVMIVTPSRTSVSDYVSMKRELEMNIGRVNGEFGTISWMPILYMYRKISDHSLVSYYKSADIALITPLIDGLNLVSKEFIASTEKGILVLSKFAGASNCLRGALIVNPNSPDEVADAIYKAMNMERKEADERLLKMKAIVKARDTDWWIKRIYRLAIAKEHDRRVTNNRIE

SEQ ID NO: 145647 - DNA, 2268 bp, Pseudomonas anguilliseptica
  CDS (1)..(2268): transl_table=11
atgttacttgccaccgatctcgatggaacctttctcggcggcgatcccaaggatcgcttaagcctttaccaaaccatcgccgcccacccggaaatccgcctggcctacgtcaccggccgcagcctggaatcggtgctgccactgctggcagacccgaccctgccacaaccggatttcattatctccgacgtcggcgccagcctggtacatggcgacagcctgcagccgattcagccgctgcaaagcgcggtggacgccctctggcccggcgacagccaggttgccagtgccatcgagcgctttgccctggagcgccaggacgtgccgcaggtgcgccgctgctcctacttctgcaaccctgaacaggcggccaacccggaactgctgacaattgctgaaagcttgggctgcgacctgctctactcggccgaacgctacctggatttcctgcccaagggcgtcaacaagggcagcagcctgcaggcgctgatcgactggttggaactggacaacgaccaggtgctgaccgctggcgacacgctcaacgacctttccatgctgagcggccagttcaagggtgtctgcgtcggcgcatccgagccgggcctgctgcaagccacccggcagtattcgctggtgttccacgccgagcgcgccggttgcggcggtatacttgaagcctttgtgcactttggctttctcggcaaacaaggcatcgctgctgaaggcaaacaagttgccgaacccggcaaagccgatctgatgatggtctaccaccgtctgccttacgaagaattccgcggtgccgatggtaagttgcaacgccgccgcccgacttcccccaacggcattattccgaccctgctgagcttctttggcgatggtcgcgccggctcctgggtagcctgggctgagcatgacgaaaacagcggcgaaaccttcgacagccacaccaccgtggatgccgagcgttacccaaagctgaccgccgcgcgggtggcgctgagcaaggaagaggtcgacattttctacaagcgcttctcaaaggaagccttctggccgaccctgcacaccttctgggagcgggggcagttccgtgaggacgactggcaggtgttcctcaaggtcaaccgcgcttttgccgagcgcaccgccctggaagcagccgaaggcgccaccgtctggctgcacgattacaacctgtggatggtgcccggctacctgcgcgagctgcgcccggacctgcgcatcgccttcttccaccacacctacttcccatcggcggatgtgtttaacgtactgccttggcgccggcagatcatcggcagcctgctgcagtgcgactacatcggctttcatatcccgcgccaggtggaaaacttcgtcgatgccgcgcgcggcgtgatgccgctgcaaaccgtcagccggcagaactgcgcgccacgctttattacctatggctgcgccgtgggcctggagcgcatgaccaccgccgtggacactggtaaccgcgtggtcaaacttggcgcccacccggtgggcctggatatcgagcgggtacgcagcgccctggccgcaccgaagatcagggaaatgatggaacgtctgcgcagcgaacttgccggggtcaaactgattctctcggtagaacgcctcgactacaccaaaggcattctggaaaagctcaacgcttatgagcgcctgttggaagaaaaccccgagctgctcggcaaggtcaccctggtaaccgtgtgcgtgccggcggccaaggaaatgaccatttatgacgagctgcaagggcagatcgagcaggccgtgggccgcatcaacggccgcttcgcccgcatcggctggacaccactgcagttcttcttccgcagcctgccgttcgaggaagtcagcgcctggtacgccatggccgacgtgatgtggattaccccactgcgcgacggcctcaacctggtggccaaggaatttgtcgccgctcaaggcctgctggatggccgtggcgtgctggtactttcggagtttgccggcgctgccgccgagctcaaaggcgcgctactgaccaacccgcatgacccggtggatatgacgcaaacctgttatgtggcgctgaacatgcctaaggccgaggcccaggcacgcctgcgtgagctgttcgatatcgtcaactacaacgatatccgccgctggggtgatgaattcctcgccgccgtcagcgacccgcaggagcaactggaccgtgccctcgggctggtcggctag

SEQ ID NO: 145648 - protein, 755 aa, Pseudomonas anguilliseptica
MLLATDLDGTFLGGDPKDRLSLYQTIAAHPEIRLAYVTGRSLESVLPLLADPTLPQPDFIISDVGASLVHGDSLQPIQPLQSAVDALWPGDSQVASAIERFALERQDVPQVRRCSYFCNPEQAANPELLTIAESLGCDLLYSAERYLDFLPKGVNKGSSLQALIDWLELDNDQVLTAGDTLNDLSMLSGQFKGVCVGASEPGLLQATRQYSLVFHAERAGCGGILEAFVHFGFLGKQGIAAEGKQVAEPGKADLMMVYHRLPYEEFRGADGKLQRRRPTSPNGIIPTLLSFFGDGRAGSWVAWAEHDENSGETFDSHTTVDAERYPKLTAARVALSKEEVDIFYKRFSKEAFWPTLHTFWERGQFREDDWQVFLKVNRAFAERTALEAAEGATVWLHDYNLWMVPGYLRELRPDLRIAFFHHTYFPSADVFNVLPWRRQIIGSLLQCDYIGFHIPRQVENFVDAARGVMPLQTVSRQNCAPRFITYGCAVGLERMTTAVDTGNRVVKLGAHPVGLDIERVRSALAAPKIREMMERLRSELAGVKLILSVERLDYTKGILEKLNAYERLLEENPELLGKVTLVTVCVPAAKEMTIYDELQGQIEQAVGRINGRFARIGWTPLQFFFRSLPFEEVSAWYAMADVMWITPLRDGLNLVAKEFVAAQGLLDGRGVLVLSEFAGAAAELKGALLTNPHDPVDMTQTCYVALNMPKAEAQARLRELFDIVNYNDIRRWGDEFLAAVSDPQEQLDRALGLVG

SEQ ID NO: 145649 - DNA, 1503 bp, Synechococcus sp
  CDS (1)..(1503): transl_table=11
atgaaatcttctctcgtcattctctaccatagggaaccctatgatgaggtgcgcgaaaacggtaaaaccttctaccgtgacaaaacaagccctaacgggatcatgccgacccttaaaagcttctttgccaacgctgaacaaagcacctgggtcgcttggaaacaaatctctggcaaacaacaagaaaatttccaagccaagatggcatttcccggtcaggaaaactccgtggttcaccgcatccccttgtccgccgaccaggtcaaaaacttctatcacatcacctcaaaagaagccttctggccgattctgcactccttcccctggcagtttacctatgactcctcagactgggaaaattttaagcaaatcaacgaaatgtttgccgaggctgcctgcgaagatgccgacgatgacgccctcttttgggtccatgactataatctctggctgaccccctactttatccgccagaagaaacccaacgctaaaattgcctttttccaccacacgccatttccgagtgttgatatttttaacattctgccgtggcgtgaagcgatcgtagacagtctcctctgctgtgacctgtgtggcttccatttgccccgctacgtgcaaaactttgtcgccgtcgcccggagtttgcgcaaggtcgaaattacccgccaagtgcccgtcgatgagcacgcctttactgccgtaggcaccgccctcgcagaacccgaaattaccacccagttgaaatataaagatcacctggtgaatttggatgctttccccgtgggcacaaaccccacccagatccgtgcccaggtagagaaagccagtacccaggagcgaatccgcaaaatccgggaagaactaggcagcaacaagctgattttgtccgctggacgggtggactacgtgaagggcaccaaggaaatgttggtctgctatgaacgcctactagaacggcgaccggagttgcaaaccaaagtgaatctggtggttgccgcggccaaggctgcctctgggatgcgagtttataaaaatgcccaaagtgaaattgagcgactcgtaggtcggatcaatggtcgctttgccaatttgaactggaccccgattttgctctttaccagtgccctctcctacgaggaacttctcggtttctttggggccgcagatattgcctggattacgccgctgcgggatggcttgaatctagtcgccaaagagtatgtggtcgcccatggttgcgatgatggggtcttgatcctgtcagaattcgccgggtcagcggtggaactgcccgatgcgatcctcaccaatccttacgcggcgaagcggatggatgaatccattgatcaagccctggccatgcccgtcgaggaacaacaacggcgtatgaagagtatgtaccaggcgatccaacgctatgacgtgcagcagtgggccaatcatatgttccgggaagccaaggcaacggcagtcctgggtaaggagccgacccccgtctag

SEQ ID NO: 145650 - protein, 500 aa, Synechococcus sp
MKSSLVILYHREPYDEVRENGKTFYRDKTSPNGIMPTLKSFFANAEQSTWVAWKQISGKQQENFQAKMAFPGQENSVVHRIPLSADQVKNFYHITSKEAFWPILHSFPWQFTYDSSDWENFKQINEMFAEAACEDADDDALFWVHDYNLWLTPYFIRQKKPNAKIAFFHHTPFPSVDIFNILPWREAIVDSLLCCDLCGFHLPRYVQNFVAVARSLRKVEITRQVPVDEHAFTAVGTALAEPEITTQLKYKDHLVNLDAFPVGTNPTQIRAQVEKASTQERIRKIREELGSNKLILSAGRVDYVKGTKEMLVCYERLLERRPELQTKVNLVVAAAKAASGMRVYKNAQSEIERLVGRINGRFANLNWTPILLFTSALSYEELLGFFGAADIAWITPLRDGLNLVAKEYVVAHGCDDGVLILSEFAGSAVELPDAILTNPYAAKRMDESIDQALAMPVEEQQRRMKSMYQAIQRYDVQQWANHMFREAKATAVLGKEPTPV

SEQ ID NO: 145651 - DNA, 1425 bp, Escherichia coli O157
  CDS (1)..(1425): transl_table=11
atgagtcgtttagtcgtagtatctaaccggattgcaccaccagatgagcacgccgccagtgccggtggccttgccgttggcatactgggggcactgaaagccgcaggcggactgtggtttggctggagtggtgaaacagggaatgaggatcagccgctaaaaaaggtgaaaaagggtaacattacgtgggcctcttttaacctcagcgaacaggaccttgacgaatactacaaccaattctccaatgccgttctctggcctgcttttcattatcgcctcgatctggtgcaatttcagcgtcctgcctgggacggctatctacgcgtaaatgcgttgctggcagataaattactgccgctgttgcaagacgatgacattatctggatccacgattatcacctgttgccatttgcgcatgaattacgcaaacggggagtgaataatcgcattggtttctttctgcatattcctttcccgacaccggaaatcttcaacgcgctgccgacatatgacaccttgcttgaacagctttgtgattatgatttgctgggtttccagacagaaaacgatcgtctggcgttcctggattgcctttctaacctgacccgcgtcacgacacgtagcgcaaaaagccatacagcctggggcaaagcgtttcgaacagaagtttacccgattggcattgagccaaaagaaatagccaaacaggctgccgggccactgccgccaaaactggcgcaacttaaagcggaactgaaaaacgtacaaaatatcttttctgtcgaacggctggattattccaaaggtttgccagagcgttttctcgcctatgaagcgttgctggaaaaatatccgcagcatcatggtaaaattcgttatacccagattgcaccaacgtcgcgtggtgatgtgcaagcctatcaggatattcgtcatcagctcgaaaatgaagccggacgaattaatggtaaatacgggcaattaggctggacgccgctttattatttgaatcagcattttgaccgtaaattactgatgaaaatattccgctactctgacgtgggcttagtgacgccactgcgtgacgggatgaacctggtagcaaaagagtatgttgccgctcaggacccagccaacccgggcgttcttgttctttcgcaatttgcgggagcggcaaacgagttaacgtcggcgttaattgttaatccctacgatcgtgacgaagttgcagttgcgctggatcgtgcattgactatgtcgctggcggaacgtatttcccgtcatgcagaaatgctggacgttatcgtgaaaaacgatattaaccactggcaggagtgcttcattagcgacctaaagcagatagttccgcgaagcgcggaaagccagcagcgcgataaagttgctacctttcctaagcttgtgtag

SEQ ID NO: 145652 - protein, 474 aa, Escherichia coli O157
MSRLVVVSNRIAPPDEHAASAGGLAVGILGALKAAGGLWFGWSGETGNEDQPLKKVKKGNITWASFNLSEQDLDEYYNQFSNAVLWPAFHYRLDLVQFQRPAWDGYLRVNALLADKLLPLLQDDDIIWIHDYHLLPFAHELRKRGVNNRIGFFLHIPFPTPEIFNALPTYDTLLEQLCDYDLLGFQTENDRLAFLDCLSNLTRVTTRSAKSHTAWGKAFRTEVYPIGIEPKEIAKQAAGPLPPKLAQLKAELKNVQNIFSVERLDYSKGLPERFLAYEALLEKYPQHHGKIRYTQIAPTSRGDVQAYQDIRHQLENEAGRINGKYGQLGWTPLYYLNQHFDRKLLMKIFRYSDVGLVTPLRDGMNLVAKEYVAAQDPANPGVLVLSQFAGAANELTSALIVNPYDRDEVAVALDRALTMSLAERISRHAEMLDVIVKNDINHWQECFISDLKQIVPRSAESQQRDKVATFPKLV

SEQ ID NO: 145653 - DNA, 1437 bp, Candida albicans
  CDS (1)..(1437): transl_table=12
atggttcaaggaaaagtcttggtggtttcaaatagaatacctgttacaatcaaaagattggataatggttcatacgattattccatgtcctccggtggactcgttacagcattacaaggtttgaaaaaaacaactgagtttcaatggtatggatggcctggattggaaattccagaagatgagcaaactaaagtaaatgacgaattgaaatccaaattcaattgtacagccatatttttaagtgatacgattgctgatttacattataatgggttttcaaatagtattttatggccacttttccattatcatcctggggaaatgaactttgatgaaaatgcatgggcagcatatattgaagccaataagaaatttgcattggaaatagtcaaacaagtcaatgatgatgatatgatttgggttcatgattatcatttaatgcttttgccagaaatgttaagacaagaaattggtaacaagaagaaaaacattaaaattggattcttcttgcacacaccattcccatcatcagaaatttatcgtattttgccagttcgtaaagaaattcttgaaggtgtgttgagttgtgatttaattggattccatacctatgattacgcccgtcatttcatcagttcggtttcaagaatcgtgccaaacgtcagtactttacctaatggtataaagtaccagggacgttcgatcagcatcggggctttccccattgggattgatgttgataactttattgacggtttgaaaaaagatagtgttgtggaacgtattaaacaattgaaatctaaattcaaagacgttaaggttattgttggtgttgatagattagactatatcaaaggtgttccgcaaaaattacatgcatttgaagtctttttgaatgaaaatcccgaatggattggcaaagtagttttggtccaagttgctgttccatccagaggtgatgttgaagaatatcaaagtttaagaagtacagtgagtgaattggttggaaggatcaatggtgaatttggtactgttgaatttgtccctatacattacttgcacaaatccatcccctttgatgaattgatcagtttatacaatatcagtgatgtttgtttggttagttctactcgagatggtatgaatttggttagttacgagtatattgcttgtcaacaagatcgcaagggtgtcttgatcttatctgaatttgctggtgcagcacaatcacttaatggtgccttgattgttaacccatggaacactgaagatttaagtgaagcaatcaaagaaagtttaacattaccagaagaaaagagggaatttaatttcaagaaattgttcacctacatttcgaaatacacttcaggattttggggtgaaagttttgttaaagaattgtacaaatgtaacccacaaaagagtttgagggactag

SEQ ID NO: 145654 - protein, 478 aa, Candida albicans
MVQGKVLVVSNRIPVTIKRLDNGSYDYSMSSGGLVTALQGLKKTTEFQWYGWPGLEIPEDEQTKVNDELKSKFNCTAIFLSDTIADLHYNGFSNSILWPLFHYHPGEMNFDENAWAAYIEANKKFALEIVKQVNDDDMIWVHDYHLMLLPEMLRQEIGNKKKNIKIGFFLHTPFPSSEIYRILPVRKEILEGVLSCDLIGFHTYDYARHFISSVSRIVPNVSTLPNGIKYQGRSISIGAFPIGIDVDNFIDGLKKDSVVERIKQLKSKFKDVKVIVGVDRLDYIKGVPQKLHAFEVFLNENPEWIGKVVLVQVAVPSRGDVEEYQSLRSTVSELVGRINGEFGTVEFVPIHYLHKSIPFDELISLYNISDVCLVSSTRDGMNLVSYEYIACQQDRKGVLILSEFAGAAQSLNGALIVNPWNTEDLSEAIKESLTLPEEKREFNFKKLFTYISKYTSGFWGESFVKELYKCNPQKSLRD

SEQ ID NO: 145655 - DNA, 1515 bp, Emericella nidulans
  CDS (1)..(1515)
atgcccggcgttgagaaatcctcacaaaacgaatcgagacttcttctcgtttcaaatcggttacccatcaccataaagcgatcagaagatggcaaatatgatttttccatgtcatcaggtggcctcgttagtggtttgagtggcttatcgaaaaccacaaccttccagtggtacggctggcccggtctggaggttccggaagaggagatcccgactctgaagaaccggttaaaggaagaatataacgctattccggtctttatcgatgatgagcttgcagacagacactacaatgggttttctaactccatcctttggccacttttccattaccaccccggcgaaatcacattcgacgagtctgcttgggaagcttataaagaggcaaatcgtctatttgcacaggctgttgcgagccaagttcaggatggcgacttaatttgggtgcatgactaccatttgatgctcctacctgaaatgctccgagaagaaattggaaacaccaagaaaaacatcaagattggtttcttcctccacactccattccccagcagtgaaatttaccgaattctgccggtacgaaacgagctattgcttggacttctccactgtgacctcatcggtttccacacttatgactacacgagacatttcctcagtgcttgctcgcggttgctgggactgccaaccactcctaatgggatagaattccagggaaagataatcgcttgcggcgctttccctattggcattgatccggagaaattcaaggaaggcttgaagaaagaaaaagtccaaaagcgtattgcaactttggagcagaaattccagggcgtgaagcttatggtaggcgttgaccggctggattatatcaagggcgttcctcaaaagctccatgcccttgaagtattcctgagtgaccatcctgaatgggtgggcaaggtggttcttgtccaggtcgccgttcccagtcgtcaagatgtagaagaataccagaatttgagggctgttgtgaacgaattggtgggcaggataaacgggaaatttggaactgtcgaatttatgccgatccattttctccacaaatcggtgaatttcgatgaactcattgctctctacgccgtgtccgatgcatgcgtcgtttcttccacccgagatggaatgaacctcgtttcgtacgagtacatcgctacccaggagaagcgccacgggtcgttagtcctgtctgaatttgctggtgccgcccagagtctcaacggaagcataatcgttaacccttggaatactgaggagcttgcagcggcttaccatgaagccgtgacgatgagtgatgaacagcgagcgcttaacttctcgaaactggataaatatgtcaacaagtacacaagtgccttttggggtcaatcctttgttaccgaattgacaagaatttcggagcaagccgcagggaaacttcccaccaaagagactcctgtgaacggagagacgtcaaagctagagacttcgtcacagtag

SEQ ID NO: 145656 - protein, 504 aa, Emericella nidulans
MPGVEKSSQNESRLLLVSNRLPITIKRSEDGKYDFSMSSGGLVSGLSGLSKTTTFQWYGWPGLEVPEEEIPTLKNRLKEEYNAIPVFIDDELADRHYNGFSNSILWPLFHYHPGEITFDESAWEAYKEANRLFAQAVASQVQDGDLIWVHDYHLMLLPEMLREEIGNTKKNIKIGFFLHTPFPSSEIYRILPVRNELLLGLLHCDLIGFHTYDYTRHFLSACSRLLGLPTTPNGIEFQGKIIACGAFPIGIDPEKFKEGLKKEKVQKRIATLEQKFQGVKLMVGVDRLDYIKGVPQKLHALEVFLSDHPEWVGKVVLVQVAVPSRQDVEEYQNLRAVVNELVGRINGKFGTVEFMPIHFLHKSVNFDELIALYAVSDACVVSSTRDGMNLVSYEYIATQEKRHGSLVLSEFAGAAQSLNGSIIVNPWNTEELAAAYHEAVTMSDEQRALNFSKLDKYVNKYTSAFWGQSFVTELTRISEQAAGKLPTKETPVNGETSKLETSSQ

SEQ ID NO: 145657 - DNA, 1467 bp, Kluyveromyces lactis
  CDS (1)..(1467)
atggttaatcaagacattagtaagctatccttgaacgaatgtcctggtagtgtaattgtcatttccaatagactgcccgtaactatcaaaaaggatgaaaagaccggtgaatacgaatattctatgtcttccggtgggttagtcactgcattacagggtttgaagaaatctactacgttccaatggtatggttggcctggtttagaagttcctgatgaggataaggctaaggtgaaaagagagttgttggaaaaattcaatgcgattcctattttcttgagtgacgaagttgctgatcttcattacaacggattttccaactctattctatggccattgttccattaccatcctggtgagatcactttcgatgacactgcatggttggcgtacaacgaggcaaatatggcttttgccgatgaaattgagggaaatatcaacgataacgatgtggtgtgggttcatgattaccatttgatgttgttaccggagatgattcgtcaaagagttattgccaagaagttgaaaaacatcaagattggttggttcttacatacgccgttcccatcttctgagatttacagaattttgcctgtgagacaagagatcttgaagggtgttttgagttgtgatttgatcggattccatacttacgattatgctagacatttcttaagtgccgtgcaaaggattttaaacgtgaatacgttacccaatggtgtcgagtttgacggacgtttcgtcaacgttggtgctttccctattggtatcgatgtggaaacgttcacagaaggtttgaagcaagatgctgtaatcaagagaatcaaagagttgaaagaatcctttaaaggttgcaagataataattggggtcgatcgtcttgattacatcaaaggtgttcctcagaagttacacgccttggaagtgttcctcggtgcgcatcctgaatggattggtaaggtggtgctagtacaagtcgctgtaccaagtcgtggggatgttgaagagtatcaatacttgagatcggtggttaatgaactagttggtagaatcaatggtcaatttggtacagcggaattcgtacctatccatttcatgcacaggtctattcctttccaagaattgatctccctttatgccgttagtgacgtttgcttggtctcttccactcgtgatggtatgaatttggtctcctacgaatacatttcctgccaggaagagaaaaagggaacattaattctttcagagtttactggggctgctcaatctttgaacggtgcgttgatcgtgaatccatggaacacagatgatttagcagaatcaattaacgaagccttgacggtacctgaagagaaaagagctgctaattgggaaaaattgtacaaatatatctcgaaatatacaagtgctttctggggtgaaaacttcgtccatgaattgtacagattaggatcgtcaaacaactga

SEQ ID NO: 145658 - protein, 488 aa, Kluyveromyces lactis
MVNQDISKLSLNECPGSVIVISNRLPVTIKKDEKTGEYEYSMSSGGLVTALQGLKKSTTFQWYGWPGLEVPDEDKAKVKRELLEKFNAIPIFLSDEVADLHYNGFSNSILWPLFHYHPGEITFDDTAWLAYNEANMAFADEIEGNINDNDVVWVHDYHLMLLPEMIRQRVIAKKLKNIKIGWFLHTPFPSSEIYRILPVRQEILKGVLSCDLIGFHTYDYARHFLSAVQRILNVNTLPNGVEFDGRFVNVGAFPIGIDVETFTEGLKQDAVIKRIKELKESFKGCKIIIGVDRLDYIKGVPQKLHALEVFLGAHPEWIGKVVLVQVAVPSRGDVEEYQYLRSVVNELVGRINGQFGTAEFVPIHFMHRSIPFQELISLYAVSDVCLVSSTRDGMNLVSYEYISCQEEKKGTLILSEFTGAAQSLNGALIVNPWNTDDLAESINEALTVPEEKRAANWEKLYKYISKYTSAFWGENFVHELYRLGSSNN

SEQ ID NO: 145659 - DNA, 1903 bp, Pichia angusta
  CDS (1)..(1428)
atggtcaaaggtaatgttatagtggtttcaaatagaatcccagtcactattaagaagactgaagatgatgaaaatggaaaatcaagatacgactatacaatgtcatcaggcggattagtgacggcattacaagggctcaaaaatccatttcgatggtttggatggcctgggatgtctgttgatagcgaacagggacgacaaactgtcgagcgggatttgaaggaaaagttcaattgttatccgatatggttaagtgacgaaattgcagacttacattataacggctttagcaattctatactttggccattgttccactatcacccaggggagatgaattttgatgaaattgcttgggccgcttatttggaagcaaataaactgttttgccaaacgatcttaaaggagataaaagacggggacgttatctgggtacatgattatcatctcatgttgttgccttcactgctaagagaccaacttaatagtaaggggctaccgaatgtcaaaattggctttttccttcatactccttttccttcaagcgaaatatacaggatacttcctgtaaggaaagaaattctcgaaggagtgcttagttgtgatttgataggtttccacacctatgattatgtccgtcactttcttagttcggttgaaagaatattgaaattgcgaacgagcccacaaggtgttgtctataatgatagacaggtgactgtaagtgcttatccgattggcattgacgttgacaaattcttgaatggtcttaagactgatgaggtcaaaagcaggataaaacagctggaaaccagatttggtaaagattgtaaacttattattggggtggacaggctggattacatcaaaggtgtacctcaaaaactccacgcgtttgaaattttcttggagagacaccctgagtggattggaaaagttgttttgatacaggtggctgtcccctcacgaggggacgttgaagaatatcaatctttgagggcagctgtaaatgagctagtgggaagaatcaatggtagatttggtaccgtcgaatttgttcctatccatttccttcataaaagcgtgaacttccaagagctgatatctgtctacgctgctagtgatgtttgtgtagtgtcatcgacacgggacggaatgaatttggtcagttatgaatacattgcttgtcaacaagatcgaaagggatctctagtactaagtgaatttgcgggagctgctcagtcattaaatggcgctctcgtagtgaatccatggaatacagaagaactcagtgaagctatttacgaaggcttgatcatgagtgaagagaaaaggaggggcaattttcagaagatgttcaagtacattgagaaatatactgcaagttattggggagagaactttgtgaaagaattgacgagagtgtgattactgtggtttgcaggttaatttgaaatgttcacttgtacttgaagaattttatattatatacatgttatacatcaataggataaaaattaagtagacaaagttatcattttgttgggctgtaaaaattgaacgataacaatatatttgacaaaattaatttgatctaattgagctggagggcgtaatatatttggtttcctgaatcatcttgtagatcacaatatggggcagcttctttcgcagccgatcacagagaaacacatcacacttgtccaacatgatcacatatcgcattcaatcggggaaatgcaaggatacaggttgaccatggaagacgcgttctgtgatttgaacgaaagaatattcgtgacggaagagggacttgacatcagaaaacaagacgagaatacagagggtgatctggagtctcttcaaattaacatttatggtgtctttgacggacatggcggtt

SEQ ID NO: 145660 - protein, 475 aa, Pichia angusta
MVKGNVIVVSNRIPVTIKKTEDDENGKSRYDYTMSSGGLVTALQGLKNPFRWFGWPGMSVDSEQGRQTVERDLKEKFNCYPIWLSDEIADLHYNGFSNSILWPLFHYHPGEMNFDEIAWAAYLEANKLFCQTILKEIKDGDVIWVHDYHLMLLPSLLRDQLNSKGLPNVKIGFFLHTPFPSSEIYRILPVRKEILEGVLSCDLIGFHTYDYVRHFLSSVERILKLRTSPQGVVYNDRQVTVSAYPIGIDVDKFLNGLKTDEVKSRIKQLETRFGKDCKLIIGVDRLDYIKGVPQKLHAFEIFLERHPEWIGKVVLIQVAVPSRGDVEEYQSLRAAVNELVGRINGRFGTVEFVPIHFLHKSVNFQELISVYAASDVCVVSSTRDGMNLVSYEYIACQQDRKGSLVLSEFAGAAQSLNGALVVNPWNTEELSEAIYEGLIMSEEKRRGNFQKMFKYIEKYTASYWGENFVKELTRV

SEQ ID NO: 145661 - DNA, 1542 bp, Schizosaccharomyces pombe
  CDS (1)..(1542)
atgtcggatgctcatgataccataaaatcactcacgggtgatgcttctaactctcggcgtttgatcgtcgtctccaatcgtttaccaattacaattaagcgaaaggataatggcacatatgactttagtatgtcttcgggtggtctggtcagtgctttgagcggtctcaagaagctcatgacctttcaatggttgggctggtgcggtcaagagattcctgaggatgaaaaacccatgattatccagcgtttgcaagatgagtgtagcgctattcccgtctttttggatgatgagactgccgaccgccattacaacggatttagtaacagcattctttggcccttgttccactaccatcctggtgaaattaattttgacgaggaaaattgggaggcctatcgtgcggctaactacgcttttgccgaggccattgtcaaaaatctgcaggatggtgatttaatttgggtgcaggattatcatttgatggttcttcctcaaatgttgcgtgaattaatcggtgataagtttaaggatatcaaaattggcttcttcttgcacactcctttcccaagtagcgaaatctatcgtgttttacccgttagaaacgaaatccttgaaggtgtactcaactgtgatctcgttggcttccatacctacgactatgcccgtcactttttgtctgcatgctctcgtatccttaatcttagcacactacctaacggtgtggaatacaatggtcaaatggtcagcgtcggcaccttccccatcggtattgatcccgaaaagttctctgatgctctgaagtctgacgtggtaaaggatcgcattgcaagcatcgaacgtagactacaaggcgttaaggtgattgtgggtgtcgatcgtttggactacattaagggtgttccccaaaaattccatgcctttgaagtgttcttagaacaataccctgaatgggttggaaaggtcgtgttggttcaagttgccgttccttctcgtcaagatgtcgaagagtatcagaatcttagagccgttgtcaatgagcttgttggccgtattaacggtcgttttggtactgttgaatatacacctattcatttcttacataaaagtgttcgctttgaagagctggttgctctgtataacgtttcagacgtttgtttaattacctcaactcgtgatggtatgaatcttgtttcatacgagtacatttgcactcaacaagagagacatggtgccctaattcttagtgaatttgccggtgctgcccagtcactcaatggtagtattgtaattaatccatggaacacggaggaattagcaaactccattcatgatgccctcactatgccggagaaacaacgtgaggctaatgagaataaattattccgatatgttaataagtataccagtcaattctggggtcaaagctttgtcggtgagttgcaacgcattcaacactacagccaccctcaccccagaagaacgaatccgattttacgaaccaagtctgctcaagtgctgtcgatgaattctagctcgtaa

SEQ ID NO: 145662 - protein, 513 aa, Schizosaccharomyces pombe
MSDAHDTIKSLTGDASNSRRLIVVSNRLPITIKRKDNGTYDFSMSSGGLVSALSGLKKLMTFQWLGWCGQEIPEDEKPMIIQRLQDECSAIPVFLDDETADRHYNGFSNSILWPLFHYHPGEINFDEENWEAYRAANYAFAEAIVKNLQDGDLIWVQDYHLMVLPQMLRELIGDKFKDIKIGFFLHTPFPSSEIYRVLPVRNEILEGVLNCDLVGFHTYDYARHFLSACSRILNLSTLPNGVEYNGQMVSVGTFPIGIDPEKFSDALKSDVVKDRIASIERRLQGVKVIVGVDRLDYIKGVPQKFHAFEVFLEQYPEWVGKVVLVQVAVPSRQDVEEYQNLRAVVNELVGRINGRFGTVEYTPIHFLHKSVRFEELVALYNVSDVCLITSTRDGMNLVSYEYICTQQERHGALILSEFAGAAQSLNGSIVINPWNTEELANSIHDALTMPEKQREANENKLFRYVNKYTSQFWGQSFVGELQRIQHYSHPHPRRTNPILRTKSAQVLSMNSSS

SEQ ID NO: 145663 - DNA, 1410 bp, Yarrowia lipolytica
  CDS (1)..(1410)
atgcccaacgtgctggtcatatcgaaccgtctgccggtgaccatttcccgcgaggaagatggcacctacaagtatacaatgagctcagggggcctggtaacagcgctgtcgggcctcaagcagtcgacgaccttccaatggtttgggtggcccggattagagatccccgaaaaagacaagccgcgactcatcaatgaccttgagaccatgttctcgtgcgtgcccgtgttcatggacgacgatctcgccgacctccattacaatggcttctccaactccattctgtggcccttgttccactaccatcccggagaaatgaatttcgaccaggtggcgtgggaagcttacacacaggccaaccggctatttgccaaaaaggtggcatcaatcgtcaaacccggcgacattgtgtgggtccacgactaccacctcatgttgctacccgagatgctgcgtgaagagtgcgagaacaacagcgctctcgacggcctgaagattggattcttcctgcacacgccattcccatcttcggaaatctacagaattttgcctgtccgaaaggaggtgctgacaggtgtgctgtcgtgcaacctcattggcttccacacctacgactacgctcgccactttctgtcgtccgtctctcgaatcctggatctagaaaccatgcccaacggaacgtattacaaggggcgtcatgtcgtggtaggtgcgtttcctatcggtattgatgtcaacaagtttctcgaaggatgcaaacgaccagctgttcaggaacgaatcgcacagctccaggataagtttaagggcatcaaggtggttgtgggtgtcgacagattggattacatcaagggtgtgccccagaaacttcacgcctttgaggtcttcctgtcagaacaccccgaatggatcggcaaggtcgtgctggtgcaggtcgcagtgccttcccgaggactagtggaagagtatcagaacctgagagcagtggtgaatgagctggtcggacgtatcaacggtatgtttggtactgtcgagtttacgcccatccatttcatgcaccgatcggtggacttcaacgagctgattgctctctactcgatatcagatgtgtgtttcgtgtcgtctacgcgagacggaatgaacctagtgtcgtatgagtatgttgcttgtcaaactgagaagcacggatcgctgatcttgtctgaattcacaggtgcagctcagagtctcaacggagccctgattgtcaacccatggaacaccgaagacatggccgaggctctgtacgactctctgactttttcgcccgagaagaaggctgagaaccaccgcaagctgttcaagtacgttagtaagtacacctctcagcattggggcgaggcctttgtctccgagttgaagcggtgttga

SEQ ID NO: 145664 - protein, 469 aa, Yarrowia lipolytica
MPNVLVISNRLPVTISREEDGTYKYTMSSGGLVTALSGLKQSTTFQWFGWPGLEIPEKDKPRLINDLETMFSCVPVFMDDDLADLHYNGFSNSILWPLFHYHPGEMNFDQVAWEAYTQANRLFAKKVASIVKPGDIVWVHDYHLMLLPEMLREECENNSALDGLKIGFFLHTPFPSSEIYRILPVRKEVLTGVLSCNLIGFHTYDYARHFLSSVSRILDLETMPNGTYYKGRHVVVGAFPIGIDVNKFLEGCKRPAVQERIAQLQDKFKGIKVVVGVDRLDYIKGVPQKLHAFEVFLSEHPEWIGKVVLVQVAVPSRGLVEEYQNLRAVVNELVGRINGMFGTVEFTPIHFMHRSVDFNELIALYSISDVCFVSSTRDGMNLVSYEYVACQTEKHGSLILSEFTGAAQSLNGALIVNPWNTEDMAEALYDSLTFSPEKKAENHRKLFKYVSKYTSQHWGEAFVSELKRC

SEQ ID NO: 145665 - DNA, 1488 bp, Saccharomyces cerevisiae
  CDS (1)..(1488)
atgactacggataacgctaaggcgcaactgacctcgtcttcagggggtaacattattgtggtgtccaacaggcttcccgtgacaatcactaaaaacagcagtacgggacagtacgagtacgcaatgtcgtccggagggctggtcacggcgttggaagggttgaagaagacgtacactttcaagtggttcggatggcctgggctagagattcctgacgatgagaaggatcaggtgaggaaggacttgctggaaaagtttaatgccgtacccatcttcctgagcgatgaaatcgcagacttacactacaacgggttcagtaattctattctatggccgttattccattaccatcctggtgagatcaatttcgacgagaatgcgtggttggcatacaacgaggcaaaccagacgttcaccaacgagattgctaagactatgaaccataacgatttaatctgggtgcatgattaccatttgatgttggttccggaaatgttgagagtcaagattcacgagaagcaactgcaaaacgttaaggtcgggtggttcctgcacacaccattcccttcgagtgaaatttacagaatcttacctgtcagacaagagattttgaagggtgttttgagttgtgatttagtcgggttccacacatacgattatgcaagacatttcttgtcttccgtgcaaagagtgcttaacgtgaacacattgcctaatggggtggaataccagggcagattcgttaacgtaggggccttccctatcggtatcgacgtggacaagttcaccgatgggttgaaaaaggaatccgtacaaaagagaatccaacaattgaaggaaactttcaagggctgcaagatcatagttggtgtcgacaggctggattacatcaaaggtgtgcctcagaagttgcacgccatggaagtgtttctgaacgagcatccagaatggaggggcaaggttgttctggtacaggttgcagtgccaagtcgtggagatgtggaagagtaccaatatttaagatctgtggtcaatgagttggtcggtagaatcaacggtcagttcggtactgtggaattcgtccccatccatttcatgcacaagtctataccatttgaagagctgatttcgttatatgctgtgagcgatgtttgtttggtctcgtccacccgtgatggtatgaacttggtttcctacgaatatattgcttgccaagaagaaaagaaaggttccttaatcctgagtgagttcacaggtgccgcacaatccttgaatggtgctattattgtaaatccttggaacaccgatgatctttctgatgccatcaacgaggccttgactttgcccgatgtaaagaaagaagttaactgggaaaaactttacaaatacatctctaaatacacttctgccttctggggtgaaaatttcgtccatgaattatacagtacatcatcaagctcaacaagctcctctgccaccaaaaactga

SEQ ID NO: 145666 - protein, 495 aa, Saccharomyces cerevisiae
MTTDNAKAQLTSSSGGNIIVVSNRLPVTITKNSSTGQYEYAMSSGGLVTALEGLKKTYTFKWFGWPGLEIPDDEKDQVRKDLLEKFNAVPIFLSDEIADLHYNGFSNSILWPLFHYHPGEINFDENAWLAYNEANQTFTNEIAKTMNHNDLIWVHDYHLMLVPEMLRVKIHEKQLQNVKVGWFLHTPFPSSEIYRILPVRQEILKGVLSCDLVGFHTYDYARHFLSSVQRVLNVNTLPNGVEYQGRFVNVGAFPIGIDVDKFTDGLKKESVQKRIQQLKETFKGCKIIVGVDRLDYIKGVPQKLHAMEVFLNEHPEWRGKVVLVQVAVPSRGDVEEYQYLRSVVNELVGRINGQFGTVEFVPIHFMHKSIPFEELISLYAVSDVCLVSSTRDGMNLVSYEYIACQEEKKGSLILSEFTGAAQSLNGAIIVNPWNTDDLSDAINEALTLPDVKKEVNWEKLYKYISKYTSAFWGENFVHELYSTSSSSTSSSATKN

SEQ ID NO: 145667 - DNA, 1458 bp, Zygosaccharomyces rouxii
  CDS (1)..(1458)
atgactgtatccaaaaaagatagtggtaaaacttccccgggcaatatcgttgttgtttccaacagattgcccgtaacgatcagtaaaaatgctatgggtaagtatgaatacaaattttccagtggtggtcttgttactgcattacaagggttgaaaaagacttctactttccagtggtatggttggccaagtcttgaaattcctgatgacgaaaaacctgttgtcaagaaagacttacttgaaaaattcaatgcaatcccaattttcttatcagatgaaattgcagatttgcactataatggatttagtaactcgattttatggccacttttccactaccatccgggtgagattaatttcgatgaaaatgcgtggttagcctacaacgaagcaaatgctacatttgcaagtgaaatctgtggtaatctacaagataatgatctggtttgggtccatgattatcatttgatgcttttgcctgagatgctaagtgctcacattcaaaggaaaggtttgaaaaacattaaattgggatggtttttgcatacacctttcccctcaagtgaaatttacagaattctgcctgtgagacaagagattttaaacggtgtgttgagttgtgatttaattggattccacacttacgattacgcaagacatttcttatcatcgattcaaagatgtttaaacgttaacactttgcctaatggggtggagtaccaggggaggttcgtcaacgtgggggctttccccattggtattgacgtggatacttttaaggaaggtttacaaaaggagaatgtcaaacagaggattaggactttacaagagagattcaaaggttgtaaaattatggttggtgtcgatagattggattatatcaagggggttcctcaaaaattacatgcaatggaggttttccttaacgaacatcccgaatggatcggtaaggttgttctagtgcaattggcaatccccagtagaggtgatgtggaagaatatcaatatttacgttcggtggttaacgaattagtgggacgtattaatggtcagtttggtacaattgagtttgtcccaattcattttatgcacaaatcgattcctttcgaagaattgatttcgttatatgcggtcagtgatgcttgtatcgtctcatcaactcgtgatggtatgaacttagtctcctacgagtacatcgcttgtcggaagaaaggctccctcatattgagtgaatttacgggtgctgcgcagtcattaaacggtgctctcatagtgaacccctggaacacagatgaactttcagattcgattaatgaggctctaacgctccctgatgaaaagaaggactcaaactgggaaaaactctacaagtacatctccaaatacacttctgcctactggggggaaaatttcgttcacgaattaaacgctaccggtaccatcaagacaggtcaatag

SEQ ID NO: 145668 - protein, 485 aa, Zygosaccharomyces rouxii
MTVSKKDSGKTSPGNIVVVSNRLPVTISKNAMGKYEYKFSSGGLVTALQGLKKTSTFQWYGWPSLEIPDDEKPVVKKDLLEKFNAIPIFLSDEIADLHYNGFSNSILWPLFHYHPGEINFDENAWLAYNEANATFASEICGNLQDNDLVWVHDYHLMLLPEMLSAHIQRKGLKNIKLGWFLHTPFPSSEIYRILPVRQEILNGVLSCDLIGFHTYDYARHFLSSIQRCLNVNTLPNGVEYQGRFVNVGAFPIGIDVDTFKEGLQKENVKQRIRTLQERFKGCKIMVGVDRLDYIKGVPQKLHAMEVFLNEHPEWIGKVVLVQLAIPSRGDVEEYQYLRSVVNELVGRINGQFGTIEFVPIHFMHKSIPFEELISLYAVSDACIVSSTRDGMNLVSYEYIACRKKGSLILSEFTGAAQSLNGALIVNPWNTDELSDSINEALTLPDEKKDSNWEKLYKYISKYTSAYWGENFVHELNATGTIKTGQ

SEQ ID NO: 145669 - DNA, 1554 bp, Aspergillus niger
  CDS (1)..(1554)
atgccttccctcgaaaaccccacctttcagaatgaggctcgcttgctcctcgtctccaatcggcttccaatcacgatcaagcgatcggatgacggtcgctatgacttctccatgtcctccggtggcctggtcagtggactaagtggcctgtccaaatccacaaccttccaatggtacggctggcccggtttggaggtcccggaggaggagattcccgtggtgaaggaacgcttgaagcaggagtataacgccgtgccagtgttcattgatgacgagctggcagaccgtcactacaatggcttttctaactccattctctggcccctcttccattaccatcccggtgagattacctttgacgagtccgcctgggaagcatacaaggaggccaaccgtcttttcgccaaagcggttgcgaaggaagttcaagatggcgacttgatctgggtgcatgattatcacttgatgcttctccctgagatgctgcgtgaggagatcggcgatagcaaggagaatgtcaagatcggcttcttcctccatacgcccttccctagcagcgagatctacagaattctcccagtccggaacgagttgttgctcggtgtcttgcattgcgacttgattgggttccatacctacgactatactaggcactttttgagtgcttgctcgcgactcttgggcttaacaactacgcctaatgggatcgaatttcagggcaagatcattgcctgcggtgccttccctatcggtatcgacccggagaagtttgaagaggggttgaagaaggagaaagtccagaaacgcattgcgatgctggaacaaaaattccagggcgtgaaactcatggtgggtgtggaccgcctggattacatcaaaggtgtcccccagaagttacatgcccttgaggtgttccttagcgatcatccggagtgggttggcaaggttgtcctggttcaggttgctgttcctagtcgacaagatgtggaggaataccagaacttgagggctgttgtgaatgagctggtgggccggattaacggcaaatttggcacggttgaattcatgcctatccatttcctgcacaagtcggtcaactttgacgagctaattgccctgtacgcggtttctgacgcctgcattgtttcgtcaacccgcgacgggatgaacctcgtcgcctatgagtacatcgccactcagaaaaagcgtcatggtgtcttggtgctttccgagttcgcgggtgctgctcagagccttaacggcagtatcatcataaacccctggaacaccgaagagctggcgggtgcttatcaggaagcggtaaccatgagcgacgagcagagagccctcaacttctccaagctcgacaaatatgtcaataaatatacaagtgcattctggggccagtccttcgtgacagaattgactcgcatatcggagcattcggcggagaagttccatgctaagaaggcttctttcagcgacaacaactccgagaacggggaaccttccaacggtgtagagactccggcccaggagcaggtggcacagtga

SEQ ID NO: 145670 - protein, 517 aa, Aspergillus niger
MPSLENPTFQNEARLLLVSNRLPITIKRSDDGRYDFSMSSGGLVSGLSGLSKSTTFQWYGWPGLEVPEEEIPVVKERLKQEYNAVPVFIDDELADRHYNGFSNSILWPLFHYHPGEITFDESAWEAYKEANRLFAKAVAKEVQDGDLIWVHDYHLMLLPEMLREEIGDSKENVKIGFFLHTPFPSSEIYRILPVRNELLLGVLHCDLIGFHTYDYTRHFLSACSRLLGLTTTPNGIEFQGKIIACGAFPIGIDPEKFEEGLKKEKVQKRIAMLEQKFQGVKLMVGVDRLDYIKGVPQKLHALEVFLSDHPEWVGKVVLVQVAVPSRQDVEEYQNLRAVVNELVGRINGKFGTVEFMPIHFLHKSVNFDELIALYAVSDACIVSSTRDGMNLVAYEYIATQKKRHGVLVLSEFAGAAQSLNGSIIINPWNTEELAGAYQEAVTMSDEQRALNFSKLDKYVNKYTSAFWGQSFVTELTRISEHSAEKFHAKKASFSDNNSENGEPSNGVETPAQEQVAQ

SEQ ID NO: 145671 - DNA, 1443 bp, Aspergillus niger
  CDS (1)..(1443)
atggctgccaacggctcttcttcggaaggcgatcaccgcctgttgatcgtttccaatcgtctgcccatcaccattcgtcgctccgggggtgggaaatatgagttttccatgtcctctggtggcctggtgactggtttgagcggactatcaaagaccacaaccttccagtggtatggctggccaggactggaagtgcccgaggatgagatcgactccgtgaaacagcgtttgcaggaagagttcaacgccaccccggtgttcatggacgacaaactggcagatcgccactacaatggcttctcaaactcaatcttgtggcctcttctgcattatcatcccggtgaaattgtttttgacgaagctgcctgggatgcgtatcgtgaggcgaaccgtctgttcgcaaagactatcgcccatgaggcccgggaaggagaccttgtctgggtccacgactatcacctcatgcttcttccggaagttctccgcgaagaactcgcagccttgggcaagaacaatatccgcattggatttttcttgcatactccattcccgagcagtgagatctatagaatccttcctgtgcggagtcagttgctgcgcggcgtgttgcagtgtgacttgatcggattccatacctatgactatgcgcgtcacttcctgagctgttgctctcatatccttggattggtcacaaccccaagcagtgtcaaattcaaagacaggtctgtcgccgtgggagctttccccatcggcattgatcccgacaagttcaccgagggcctaaagagccccaaggtgcagaaccgcatcgcaagtctcgagaacaagttccaaggaaccaagttgatggtcagcgttgatcgcctggactacatcaagggtattccccagaagctgcatgccttggaggtcttcctctcccagcatcctgaatgggtgggcaaagtcgtgctggtacaggtagctgtcccgagtcgtcaggatgttgaagagtatcaaaacctgagggccgtggtgaacgagctggtgggcagaatcaacggaaagttcggaacggtcgactacatgcccatccacttcatgcacaaatcggtgagctttgatgagctcatcgcgctgtatgccgcctccgacgcgtgtgtcgtgtcgtcgactcgcgacgggatgaacctagtgtcgttcgaatacgttgcaacacagcagaaacgcaagggggtgctaattctgtcggagtttgctggagccgcgcaaagccttaacggcagcattgtagtcaacccgtggaacacggaagaacttgccagcgcataccacgaggccgtgtcgatgagtgacgatctgcgggcccaaaaattcgaaaagctctacaaatacatctccaagtacaccagtgctttctggggcaagtcatttgttgccgaactatccaagtgttcaacctga

SEQ ID NO: 145672 - protein, 480 aa, Aspergillus niger
MAANGSSSEGDHRLLIVSNRLPITIRRSGGGKYEFSMSSGGLVTGLSGLSKTTTFQWYGWPGLEVPEDEIDSVKQRLQEEFNATPVFMDDKLADRHYNGFSNSILWPLLHYHPGEIVFDEAAWDAYREANRLFAKTIAHEAREGDLVWVHDYHLMLLPEVLREELAALGKNNIRIGFFLHTPFPSSEIYRILPVRSQLLRGVLQCDLIGFHTYDYARHFLSCCSHILGLVTTPSSVKFKDRSVAVGAFPIGIDPDKFTEGLKSPKVQNRIASLENKFQGTKLMVSVDRLDYIKGIPQKLHALEVFLSQHPEWVGKVVLVQVAVPSRQDVEEYQNLRAVVNELVGRINGKFGTVDYMPIHFMHKSVSFDELIALYAASDACVVSSTRDGMNLVSFEYVATQQKRKGVLILSEFAGAAQSLNGSIVVNPWNTEELASAYHEAVSMSDDLRAQKFEKLYKYISKYTSAFWGKSFVAELSKCST

SEQ ID NO: 145673 - DNA, 2580 bp, Oryza sativa
  CDS (1)..(2580)
atgccgacccccgcgccgtcggcatcgtcctcctcctcctcctgcggcggcggtggcggtggcgccggggccgcgtcgtcctactcctcctccccggacgaccgcatgctccgcggggagtgcggccgccgccaccccttcgcgtcgtcggcggcggtgggggccggttccccggacgccatggacacggactccgcggagccttcctccgcggcgacctccgtcgcggacttcggggcccggtcgccgttctcgccgggggccgcctcgcccgccaacatggacgacgcgggcggcgcgtcggcggcggggcacgcggcgcggccgccgctcgccgggccgcgcagcgggttccgccgcctcggcctccgcgggatgaagcagcgcctcctcgtcgtcgccaaccgcctccccgtctccgccaatcgccgcggcgaggaccagtggtccctggagatcagcgccggcggcctcgtcagcgccctcctcggcgtcaaggacgtggacgcgaagtggatcggatgggcgggcgtcaacgtccccgacgaggtcggccagcgagctctcacccgagcgctcgccgagaagagatgtataccagtgttcctggatgaggaaatcgtgcaccaatactacaacggatactgcaacaacatactctggcctctgtttcactacctgggattgccacaggaggacaggttggcgacgacgaggaatttcgagtcacagttcaacgcgtacaagcgagcaaaccagatgttcgctgatgttgtgtaccagcactacaaggaaggggatgtgatctggtgccatgattaccacctcatgttcctgcccaagtgcctcaaggatcatgacatcaacatgaaggtcgggtggttcctgcacacgccattcccttcttcggagatttaccggacgctgccctcccggtcggagctgcttcgctccgtgctctgtgctgatttagtcggatttcatacatatgattatgcaagacattttgtgagcgcatgtacaagaatacttggactggagggcactcctgagggtgtggaagaccaaggaaggctaaccagagttgctgcgtttcctattgggatagactctgaacgtttcaagcgagcattggagcttccagcagtaaaaagacacatcactgaattaacacaacgttttgatggtcgaaaggtaatgcttggtgttgaccgacttgacatgatcaaaggaattccgcaaaagattttggcctttgaaaagtttctcgaagaaaaccatgaatggaatgataaagtggttctacttcaaattgctgtgccgacaagaactgatgtccctgagtatcaaaagcttacaagtcaggtgcatgaaattgttgggcgcataaatggccgatttggaacactgactgctgttcctattcatcatctggaccgatctcttgatttccatgccttgtgtgccctttatgcagtcactgatgtggcccttgtaacatcgctgagagatggaatgaatcttgtaagctatgaatatgttgcatgccaaggatcaaaaaaaggagttttgatattgagtgagtttgctggggcagcacagtctcttggagccggtgctattttagtaaacccctggaatattactgaagtcgcagactcaatcaagcatgctttgacaatgtcatctgatgagagagaaaagcgacataggcataactatgctcatgtgacaactcacactgcacaagattgggccgaaacttttgtatgtgagttaaatgagacagttgctgaagctcagctgagaacaagacaagttccacctgatctccctagtcaagcagcaattcaacaatatctgcattccaaaaatcggttgctcatattggggttcaattcaacattgactgagccagttgaatcctctgggagaaggggtggtgaccaaatcaaggaaatggagctcaagttgcatcctgagttgaagggccctttgagagccctctgtgaggatgagcatactacagttattgttcttagtggaagtgacaggagcgtccttgatgaaaatttcggagaattcaatatgtggttagcagcagagcatggcatgtttttacgtccaactaatggagagtggatgacaacaatgcctgagcatctgaacatggattgggtagacagtgtaaagaatgtttttgaatactttacagaaagaaccccaaggtctcattttgaacaccgtgagacatcatttgtatggaattacaagtatgctgatgttgagtttggacggctccaagcaagagatatgctgcagcacttgtggacaggtccaatctcaaatgcagcagtcgatgttgttcaaggaagccgatcagttgaagttcggtctgtcggagttacaaagggtgctgcaattgatcgtattctaggagagatagttcatagcaaaagcatgattactccaattgattatgttctatgcattgggcacttcctaggaaaggtaattatgcaattaatttatatgtgcatatccgtttctttcagtgcaaggtgctttttttgtctttga

SEQ ID NO: 145674 - protein, 859 aa, Oryza sativa
MPTPAPSASSSSSSCGGGGGGAGAASSYSSSPDDRMLRGECGRRHPFASSAAVGAGSPDAMDTDSAEPSSAATSVADFGARSPFSPGAASPANMDDAGGASAAGHAARPPLAGPRSGFRRLGLRGMKQRLLVVANRLPVSANRRGEDQWSLEISAGGLVSALLGVKDVDAKWIGWAGVNVPDEVGQRALTRALAEKRCIPVFLDEEIVHQYYNGYCNNILWPLFHYLGLPQEDRLATTRNFESQFNAYKRANQMFADVVYQHYKEGDVIWCHDYHLMFLPKCLKDHDINMKVGWFLHTPFPSSEIYRTLPSRSELLRSVLCADLVGFHTYDYARHFVSACTRILGLEGTPEGVEDQGRLTRVAAFPIGIDSERFKRALELPAVKRHITELTQRFDGRKVMLGVDRLDMIKGIPQKILAFEKFLEENHEWNDKVVLLQIAVPTRTDVPEYQKLTSQVHEIVGRINGRFGTLTAVPIHHLDRSLDFHALCALYAVTDVALVTSLRDGMNLVSYEYVACQGSKKGVLILSEFAGAAQSLGAGAILVNPWNITEVADSIKHALTMSSDEREKRHRHNYAHVTTHTAQDWAETFVCELNETVAEAQLRTRQVPPDLPSQAAIQQYLHSKNRLLILGFNSTLTEPVESSGRRGGDQIKEMELKLHPELKGPLRALCEDEHTTVIVLSGSDRSVLDENFGEFNMWLAAEHGMFLRPTNGEWMTTMPEHLNMDWVDSVKNVFEYFTERTPRSHFEHRETSFVWNYKYADVEFGRLQARDMLQHLWTGPISNAAVDVVQGSRSVEVRSVGVTKGAAIDRILGEIVHSKSMITPIDYVLCIGHFLGKVIMQLIYMCISVSFSARCFFCL

SEQ ID NO: 145675 - DNA, 2562 bp, Glycine max
  CDS (1)..(2562)
atggtttcaaggtcatattctaacttgttagatcttacttcttgtggctccccgactttcagtcgtgagaagaaaaggctccctcgagtggcaactgttgctggagtactgtctgaattagatgatgaaaccagcaacagtgtttgctctgatactccatcctcagtctctcaagagaggatgatcattgttggtaaccagcttccattaaaggcacacagaaaagacaacggtacttgggagttcacatgggatgaggactcacttcttttacagctgaaagatggtcttggggatgatgtggaaactatctatattggttgtcttaaagaagagattgagccaagtgagcaagatgatgttgctctgtacttgcttgacactttcaaatgtgtgccaacgttcctccctcctgagctttttagtaaattctatcatggattctgcaaacaacatctatggcctttgtttcactacatgcttcccctgtcacctgatcttggcggtcgattcgataggtccctttggcaagcttacctttctgtgaacaagatatttgcggataaagtgatggaagtcatcagccctgatgatgactttgtgtgggttcatgactaccatctgatggaacttcctacatttttgagaaagagatttaacagggtgaggctaggattcttcctccatagtccatttccttcgtctgagatataccgaacccttcctgttagggatgaacttcttagagctcttctgaattctgaccttattgggtttcatacttttgattatgccaggcatttcctctcctgttgcagcagaatgcttgggatttcttaccaatccaagcgtggctacattggccttgagtactatggaagaacagtaagcattaagattcttcctgttggtattcatataggtcagctccaatctgtcatgagtcatcccgagacagaaagcaaggttgcagagttaaaaaaacagttcagagatcaaactgtgctgctcggggtggatgacatggatatcttcaaaggaatcagcttaaaacttttggccatggaacaattgcttttacaacatcctgataagaggggcagagttgttctggtccaaattgctaaccctgcaagaggccgtggaaaggatgtgcaggaggtacaaagtgaaacttatgccacgatgaagaggataaataatgcatttggaaggcctggatacacacctgtagtcttgattgatacaccacttcagagttatgagcgaattgcttattatgtgattgcagaatgttgccttgttacagcagtgagagatgggatgaaccttataccctatgaatatatcatttgtagacaaggaaatgagaagatagatgagattttagggacagacctgcttactcaaaagaagagtatgctggtggtgtctgagtttattggctgctccccttcgttaagtggggcaattcgagtgaatccatggaacattgattctgtcgctgaagctatggattctgcgttgatggtcccagaggctgaaaagcagatgcggcatgagaagcattataggtatgttagtacacatgatgttgcgtattgggcacgtagcttcttgcaggatctggaaagggcatgtagagatcatctgaggaggagatgctggggaattggttttggtttaggcttccgagtgattgctttggatccaaactttagaaagctatctgtggaacatattgtttcagcttataagaggaccaagcaccgagcaattcttttggattatgatggcactatggtgcagcctgggtcgatgagtttaacacctaatgctgaagccgttagcatcttgaacatcttgtgcagggacaccaagaatcatgttttcattgtaagtggaagggagagaaagactcttactgaatggttttcttcttgtgaaaggatgggaatcgctgcagagcatggttattttgtgaggacaaatcaaaatgcagaatgggaaacttgtgttccagtacccgattttgagtggaaacagattgctgagccggttatgcagttatatatggaaacaactgatggttctaacatagatgccaaagaaagtgctctagtttggaattacgagtatgcagaccgggactttggttcatgccaagctaaagagctttttgatcatctggaaagtgttcttgccaatgagcctgtttctgttaaaagtagtccaaacattgttgaagtaaaacctcagggtgtgagtaagggaatcgtagcagaacgtcttctcttaacaatgcaacaaaagggagtgattccagattttgttctatgcattggagatgacagatcagacgaggacatgtttggggtaatcatgaatgcaaaggcaaccctatctccagttgctgaagtgtttccatgcactgttggccagaaacctagcaaggcaaagtattatttggaagacacaagtgagattttgagaatgttgcaaggccttgccaatgcttctgagcactctactagaacttctttgcaaccagcttctcattaa

SEQ ID NO: 145676 - protein, 853 aa, Glycine max
MVSRSYSNLLDLTSCGSPTFSREKKRLPRVATVAGVLSELDDETSNSVCSDTPSSVSQERMIIVGNQLPLKAHRKDNGTWEFTWDEDSLLLQLKDGLGDDVETIYIGCLKEEIEPSEQDDVALYLLDTFKCVPTFLPPELFSKFYHGFCKQHLWPLFHYMLPLSPDLGGRFDRSLWQAYLSVNKIFADKVMEVISPDDDFVWVHDYHLMELPTFLRKRFNRVRLGFFLHSPFPSSEIYRTLPVRDELLRALLNSDLIGFHTFDYARHFLSCCSRMLGISYQSKRGYIGLEYYGRTVSIKILPVGIHIGQLQSVMSHPETESKVAELKKQFRDQTVLLGVDDMDIFKGISLKLLAMEQLLLQHPDKRGRVVLVQIANPARGRGKDVQEVQSETYATMKRINNAFGRPGYTPVVLIDTPLQSYERIAYYVIAECCLVTAVRDGMNLIPYEYIICRQGNEKIDEILGTDLLTQKKSMLVVSEFIGCSPSLSGAIRVNPWNIDSVAEAMDSALMVPEAEKQMRHEKHYRYVSTHDVAYWARSFLQDLERACRDHLRRRCWGIGFGLGFRVIALDPNFRKLSVEHIVSAYKRTKHRAILLDYDGTMVQPGSMSLTPNAEAVSILNILCRDTKNHVFIVSGRERKTLTEWFSSCERMGIAAEHGYFVRTNQNAEWETCVPVPDFEWKQIAEPVMQLYMETTDGSNIDAKESALVWNYEYADRDFGSCQAKELFDHLESVLANEPVSVKSSPNIVEVKPQGVSKGIVAERLLLTMQQKGVIPDFVLCIGDDRSDEDMFGVIMNAKATLSPVAEVFPCTVGQKPSKAKYYLEDTSEILRMLQGLANASEHSTRTSLQPASH

SEQ ID NO: 145677 - DNA, 2598 bp, Zea mays
  CDS (1)..(2598)
atggtttcaaaatcatactcaaatctgctagacctgacctctggagatggatttgactttcgacaaccttttaagtctcttcctcgtgtcgtaacttctcctggtattatatctgacactgattgggatacaataagtgatggtgattcagttggttcagcatcttctactgagaggaaaataatcgttgccaacttccttccgttgaattgtacaagagatgaaactggggtgctttccttctcattggatcatgatgcgcttctcatgcaacttaaagatagtttttcaaatgagactgatgttgtgtatgtgggcagtttgaaggttcaggtagatcctggtgagcaggaccaagttgcacagaagcttcttagagaatatcgatgcatacctacttttctcccatctgacctacagcagcagttctatcatggcttctgtaaacaacaattatggccactttttcattatatgcttccaatttgccttgacaagggtgagctatttgatcgcagcctgtttcaagcctatgtccgagccagcaaactttttgcagataaagttatggaagcaatcaatgcagatgatgattacgtttgggttcatgattatcatctcatgctgctccctacattcttgaggaagaggttacaccgaataaagattggtttcttccttcacagcccttttccctcttcagaaatctacaggactctgcctgtaagggatgaaatcctgaagtcactgcttaatgctgatctgattggtttccaaacatttgactatgcccgccacttcctatcttgctgtagcagattgctaggcctgcattatgagtcaaaacgtggttacattggaatagagtattttggccgaacagtgagtttgaagatcctttctgtgggtgtccatgttggtcggcttgaatctgtcttaaagttgcctgctacagttagtaaggttgaagaaattgaacaaaggtataagggcaagatactcatgttaggtgtagatgacatggacatcttcaaagggataagtctgaaattgcttgcactggagcttcttctggacagaaacccaaagcttagagagaaggttgtccttgtacaaatcatcaatcccgcaagaagcacggggaaggacgtgcaggaagctattacagaagctgtctctgtggctgaaaggattaatacaaattatggttcttcaagttacaagcctgttgtcctaattgatcaccacataccattttatgaaaagattgcattctatgctgcgtctgattgctgtattgtaaatgctgtgagggatggcatgaacttagtaccatatgagtatactgtttgccgacagggaaatgaggagattgataaactcagaggtcttggcaaagacacccatcacacaagcacacttattgtttcggagtttgtgggttgctccccatctcttagtggtgctttcagggtaaatccttggagtgtcgatgatgtggcggatgccttgtgccgtgcaactgatttgactgaatccgagaaacggctgcggcatgaaaagcattatcgctatgtcagtactcatgatgttgcttactgggcacgcagctttgctcaagatctggaaagagcatgcagagatcattacagccgaaggtgttgggcgattggatttggcctgaatttcagagttattgctctttctcctggcttcagaaagctttcttcggagcactttgtttcttcttataacagggcttctagaagagcaatatttctcgactacgacggcacacttgtgccccagtcgtcaatcaacaaagctccaagtgaagaagtcatctccgttcttaacaccttgtgtaatgatccaaagaacgttgtgtttatcgtaagtggacgaggacgtgattccctcgatgagtggttttctccatgcgagaagctccgtctagccgcagaacatggctattttatcaggtggagcaaggaagctgcatgggagtcgagctattcaagtccgcggcaagaatggaagcacattgccgaacctgtcatgcaggtatacacagagacaacagatggatcttcaatcgagtcaaaggaaagcgccctagtatggcactatttggacgcggaccatgatttcggttccttccaagcaaaggagctacaaggtcatcttgagagggtgctatcgaatgagcctgttgttgtgaagtgtggccattatattgtagaggtgaaaccacagggagttagcaaggggcttgctgtcaacaagctgattcacacactggtcaagaacgggaaggcaccggatttcctgatgtgcgtcggcaacgacagatctgatgaggacatgtttgaaagcatcaacggtatgacctccaacgctgtcttatcacccacaatgccggagctgtttgcctgttcagtcggtcagaagcccagcaaagcaaaatattatgtggacgacaccagcgaagtaatcagattgctcaagaatgtaacccgcatcccctcgcagcggcaggatgtcagtgccagccatgggcgtgtgaccttcagaggcgtgctcgattacgtggactag

SEQ ID NO: 145678 - protein, 865 aa, Zea mays
MVSKSYSNLLDLTSGDGFDFRQPFKSLPRVVTSPGIISDTDWDTISDGDSVGSASSTERKIIVANFLPLNCTRDETGVLSFSLDHDALLMQLKDSFSNETDVVYVGSLKVQVDPGEQDQVAQKLLREYRCIPTFLPSDLQQQFYHGFCKQQLWPLFHYMLPICLDKGELFDRSLFQAYVRASKLFADKVMEAINADDDYVWVHDYHLMLLPTFLRKRLHRIKIGFFLHSPFPSSEIYRTLPVRDEILKSLLNADLIGFQTFDYARHFLSCCSRLLGLHYESKRGYIGIEYFGRTVSLKILSVGVHVGRLESVLKLPATVSKVEEIEQRYKGKILMLGVDDMDIFKGISLKLLALELLLDRNPKLREKVVLVQIINPARSTGKDVQEAITEAVSVAERINTNYGSSSYKPVVLIDHHIPFYEKIAFYAASDCCIVNAVRDGMNLVPYEYTVCRQGNEEIDKLRGLGKDTHHTSTLIVSEFVGCSPSLSGAFRVNPWSVDDVADALCRATDLTESEKRLRHEKHYRYVSTHDVAYWARSFAQDLERACRDHYSRRCWAIGFGLNFRVIALSPGFRKLSSEHFVSSYNRASRRAIFLDYDGTLVPQSSINKAPSEEVISVLNTLCNDPKNVVFIVSGRGRDSLDEWFSPCEKLRLAAEHGYFIRWSKEAAWESSYSSPRQEWKHIAEPVMQVYTETTDGSSIESKESALVWHYLDADHDFGSFQAKELQGHLERVLSNEPVVVKCGHYIVEVKPQGVSKGLAVNKLIHTLVKNGKAPDFLMCVGNDRSDEDMFESINGMTSNAVLSPTMPELFACSVGQKPSKAKYYVDDTSEVIRLLKNVTRIPSQRQDVSASHGRVTFRGVLDYVD

SEQ ID NO: 145679 - DNA, 2598 bp, Zea mays
  CDS (1)..(2598)
atggtttcaaaatcatactcaaatctgctagacctgacctctggagatggatttgactttcgacaaccttttaagtctcttcctcgtgtcgtaacttctcctggtattatatctgacactgattgggatacaataagtgatggtgattcagttggttcagcatcttctactgagaggaaaataatcgttgccaacttccttccgttgaattgtacaagagatgaaactggggtgctttccttctcattggatcatgatgcgcttctcatgcaacttaaagatagtttttcaaatgagactgatgttgtgtatgtgggcagtttgaaggttcaggtagatcctggtgagcaggaccaagttgcacagaagcttcttagagaatatcgatgcatacctacttttctcccatctgacctacagcagcagttctatcatggcttctgtaaacaacaattatggccactttttcattatatgcttccaatttgccttgacaagggtgagctatttgatcgcagcctgtttcaagcttatgtccgagccaacaaactttttgcagataaagttatggaagcaatcaatgcagatgatgacttcgtttgggttcatgattatcatctcatgttgctccctacattcttgaggaagaggttacaccgaataaagattggtttcttccttcacagtccttttccctcctcagaaatctataggactctgcctgtaagggatgaaatcctgaagtcactgcttaatgctgatctcattggtttccaaacatttgactatgcccgccacttcctatcttgctgtagcagattgctaggcctgcattatgagtcaaaacgtggttacattggaatagagtattttggccgaacagtgagcctgaagatcctttccgtgggtgtccatattggtcggcttgaatctgtcttaaaattgcctgctacagttagtaaggttcaagaaattgaacaaaggtataagggcaagatactgatgttaggtgtagatgacatggacatcttcaaagggataagtctgaaatttcttggactggagcttcttctggacagaaacccaaagcttagagagaaggttgtccttgtacaaatcatcaatccagcaagaagcacagggaaggacgtgcaagaagctattacagaagctgtctctgtggctgaaaggattaatacaaattatggttcttcaagttacaagcctgttgtcctaattgatcaccacataccattttatgaaaagattgcattctatgctgcgtctgattgctgtattgtaaatgctgtgagggatggcatgaacttagtaccatatgagtatactgtttgccgacagggaaatgaggagattgataaactcagaggtcttggcaaagacacccatcacacaagcacacttattgtttcggagtttgtgggttgctccccatctcttagtggtgctttcagggtaaatccttggagtgtcgatgatgtggcggatgccttgtgccgtgcaactgatttgactgaatccgagaaacggctgcggcatgaaaagcattatcgctatgtcagtactcatgatgttgcttactgggcacgcagctttgctcaagatctggaaagagcatgcaaagatcattatagcagaaggtgttgggcgattggattcggtctgaattttagagttattgctctttctcctggcttcagaaagctgtcgtcagagcactttgtttcttcttataacaaggcttctagaagagcaatatttcttgattacgatggcacacttgtgccccagtcatcaatcaacaaagctccaagtgaagaagtcatttccgttcttaacaccttatgtaatgatccaaagaacattgtgtttatagtaagtggacgaggacgtgattcccttgatgagtggttttctccgtgtgagaagcttggtctagcggcagaacatggctattttatcagatggagcaaggaagccgcatgggagtcaagctattcaaggccgcagcaagaatggaagcacattgccgaacctgtgatgcaggtatacacagagacaacagatggatcttcaatcgagtcaaaggaaagcgccctagtatggcactatttggacgcggaccatgatttcggttccttccaagcaaaggagctacaaggtcatcttgagagggtgctatcgaatgagcctgttgttgtgaagtgtggtcattatattgtagaggtgaaaccacagggagttagcaaggggcttgctgtcaacaagctgattcacacactggtcaagaacgggaaggcaccggatttcctgatgtgcgtcggcaacgacagatctgatgaggacatgtttgaaagcatcaacggtatgacctccaacgctgtcttatcacccacaatgccggagctgtttgcctgttcagtcggtcagaagcccagcaaagcaaaatattatgtggacgacaccagcgaagtaatcagattgctcaagaatgtaacccgcatcccctcgcagcggcaggatgtcagtgccagccatgggcgtgtgaccttcagaggcgtgctcgattacgtggactag

SEQ ID NO: 145680 - protein, 865 aa, Zea mays
MVSKSYSNLLDLTSGDGFDFRQPFKSLPRVVTSPGIISDTDWDTISDGDSVGSASSTERKIIVANFLPLNCTRDETGVLSFSLDHDALLMQLKDSFSNETDVVYVGSLKVQVDPGEQDQVAQKLLREYRCIPTFLPSDLQQQFYHGFCKQQLWPLFHYMLPICLDKGELFDRSLFQAYVRANKLFADKVMEAINADDDFVWVHDYHLMLLPTFLRKRLHRIKIGFFLHSPFPSSEIYRTLPVRDEILKSLLNADLIGFQTFDYARHFLSCCSRLLGLHYESKRGYIGIEYFGRTVSLKILSVGVHIGRLESVLKLPATVSKVQEIEQRYKGKILMLGVDDMDIFKGISLKFLGLELLLDRNPKLREKVVLVQIINPARSTGKDVQEAITEAVSVAERINTNYGSSSYKPVVLIDHHIPFYEKIAFYAASDCCIVNAVRDGMNLVPYEYTVCRQGNEEIDKLRGLGKDTHHTSTLIVSEFVGCSPSLSGAFRVNPWSVDDVADALCRATDLTESEKRLRHEKHYRYVSTHDVAYWARSFAQDLERACKDHYSRRCWAIGFGLNFRVIALSPGFRKLSSEHFVSSYNKASRRAIFLDYDGTLVPQSSINKAPSEEVISVLNTLCNDPKNIVFIVSGRGRDSLDEWFSPCEKLGLAAEHGYFIRWSKEAAWESSYSRPQQEWKHIAEPVMQVYTETTDGSSIESKESALVWHYLDADHDFGSFQAKELQGHLERVLSNEPVVVKCGHYIVEVKPQGVSKGLAVNKLIHTLVKNGKAPDFLMCVGNDRSDEDMFESINGMTSNAVLSPTMPELFACSVGQKPSKAKYYVDDTSEVIRLLKNVTRIPSQRQDVSASHGRVTFRGVLDYVD

SEQ ID NO: 145681 - DNA, 2742 bp, Zea mays
  CDS (1)..(2742)
atgatgtcgcggtcgtacaccaacctgctcgacctcgcggagggcaacttcgcggcgctgggcccggccgccggcgccggcggcagcgggcggcagaggcatgggtcgttcgggctgcggcggatgtcgcgggtgatgacggtgccggggacgctgacggagctcgacggcgaggacgagtcggagccggccgcgaccagcagcgtcgcctccgacgtgccctcgtccgtggcggcggaccgcctcatagtggtctcgaatcagttgcccatcgtcgcgcgccgcaggcccgacggccgagggtggtccttctcgtgggacgatgactcgctcctgctccagctccgcgacggcattcccgacgagatggaggtgctcttcgtcggatcactccgcgccgacgtccccgcagccgagcaggacgcggtatcgcaggcgctgctcgaccgattccgctgcgcgccggtgttcctccctgaccacctcaacgaccggttctaccacggcttctgcaagcgccagctctggcctctgttccactacatgctccccttctcatcgcccgcttccgcgtctgccgccgctacctcttcctccgtcgccacttcgtcacccggcaacggttgcttcgaccgcagcgcttgggaggcatacgtgctcgccaacaagttcttctttgagaaggtcgtcgaggtaatcaacccggaggatgactacgtctgggttcacgactaccatctcatggcgctgcctaccttcctccgccgctgcttcaaccgcctccgcatcggattcttcctccacagccccttcccctcgtccaagatctaccgcaccctccctgttcgggaggagatactcaaggcgctgctcaactgtgacctaattggcttccacacttttgattacgccaggcacttcctctcgtgctgcagtaggatgctgggaattgaataccagtcaaagcgtgggtacattgaattggattactttggccgcactgtcgggatcaaaatcatgccagtgggagttcatatgggtcaattggagttgggtctgcgcttgcctgatagggaatggaggctttctgagcttcaacgccagtttcaggggaaaactgtcttgcttggtgtggatgatatggatatctttaaggggatcaatttgaagcttctcgcctttgagaacatgttgaggacacatcccaagtggcaggggagagcagtgttagtgcagattgctaacccagcccgtggaaggggtaaagatctggaagccatccaggctgagattgaggagagctgccagcggatcaatggagactttggccagtcagggtatagccctgttgttttcatcgatcgtgatgtgtcaagtgttgagaagattgcctattatacgatagcggaatgtgtggtggtgactgctgtgagggatgggatgaacttgacaccgtatgaatacgttgtctgtaggcagggtgcaccaggatctcagtcggtagcagaggtgagtgggccaaagaagagcatgctggttgtgtcagagtttattggctgctcaccgtcactgagcggtgctattagggttaacccatggaatatagaggcaaccgcggaggcgatgaatgaggccatttcaatgccagaacaggaaaaacagttgaggcatgagaaacattaccgttatgtcaggagccatgacgtcgcttattggtcaaagagcttcatcatagacttggaaagggtttgtaaggatcacttcaagaggacttgttggggcatagggttgggttttggtttcagggtggtggccttggaccctcatttcacaaagcttaacatggattcaatcattaatgcttatgagctttcagagagcagggctatattgctcgattatgatggaactctggttccccaaacttccctcaacaaggaacctagtccacaggttttgagcatcatcaataccctttgctcagatagtagaaacatcgtttttcttgtcagtggtcgagacaaagataccttgggaaagtggttctcctcatgtccaagattggggattgcagctgaacatggttacttcttgaggtggtctagagaagaagagtggcaaacatgcactcaggcattggacttcggatggatgcaaatggcgaagccagtgatgaatttatatacagaagcaactgatggatcctacattgaggccaaggaaagtgccttggtgtggcaccatcaggatgctgacctaggctttggatcctcacaggcaaaggagatgcttgatcacctggaaagtgtactagcaaatgaaccagtctctgtcaagagtggccagttcattgttgaagtcaaaccacagggaataagcaaaggaatagttgctgagaggatacttgcatcagtgaaggagagaggaaagcaggctgatttcttattgtgcatcggcgatgataggtctgatgaggacatgtttgaaaatattgctgatatcactgggaggaatttggttgctccaagaacagcactgtttgcgtgcactgtgggacaaaaaccaagcaaagccaaattctatctggatgatacattcgaagtggtcactatgctgagcgcactggcagatgccacaggtcctgagactgattcggctgatgaatctgtcgcatatatctcatcacttgatattggtgacgaacaatcagaatccagtgataaaccagttgaagggtcttag

SEQ ID NO: 145682 - protein, 913 aa, Zea mays
MMSRSYTNLLDLAEGNFAALGPAAGAGGSGRQRHGSFGLRRMSRVMTVPGTLTELDGEDESEPAATSSVASDVPSSVAADRLIVVSNQLPIVARRRPDGRGWSFSWDDDSLLLQLRDGIPDEMEVLFVGSLRADVPAAEQDAVSQALLDRFRCAPVFLPDHLNDRFYHGFCKRQLWPLFHYMLPFSSPASASAAATSSSVATSSPGNGCFDRSAWEAYVLANKFFFEKVVEVINPEDDYVWVHDYHLMALPTFLRRCFNRLRIGFFLHSPFPSSKIYRTLPVREEILKALLNCDLIGFHTFDYARHFLSCCSRMLGIEYQSKRGYIELDYFGRTVGIKIMPVGVHMGQLELGLRLPDREWRLSELQRQFQGKTVLLGVDDMDIFKGINLKLLAFENMLRTHPKWQGRAVLVQIANPARGRGKDLEAIQAEIEESCQRINGDFGQSGYSPVVFIDRDVSSVEKIAYYTIAECVVVTAVRDGMNLTPYEYVVCRQGAPGSQSVAEVSGPKKSMLVVSEFIGCSPSLSGAIRVNPWNIEATAEAMNEAISMPEQEKQLRHEKHYRYVRSHDVAYWSKSFIIDLERVCKDHFKRTCWGIGLGFGFRVVALDPHFTKLNMDSIINAYELSESRAILLDYDGTLVPQTSLNKEPSPQVLSIINTLCSDSRNIVFLVSGRDKDTLGKWFSSCPRLGIAAEHGYFLRWSREEEWQTCTQALDFGWMQMAKPVMNLYTEATDGSYIEAKESALVWHHQDADLGFGSSQAKEMLDHLESVLANEPVSVKSGQFIVEVKPQGISKGIVAERILASVKERGKQADFLLCIGDDRSDEDMFENIADITGRNLVAPRTALFACTVGQKPSKAKFYLDDTFEVVTMLSALADATGPETDSADESVAYISSLDIGDEQSESSDKPVEGS

SEQ ID NO: 145683 - DNA, 2595 bp, Zea mays
  CDS (1)..(2595)
atggttctgaagtcgcacacaaatctgctagatatgtgttgtgaagatgtgtttgacttccaacaacctttaagatctcctcgtcatgtggtgaactctcctggcatcatatctgaccctgattgggaaagtagtaatgatggcaactcagttggttctatgcctttttgttttaagagaaagattattgttgcaaatttccttcctgtgatctgtgcaaaaaatgaagctaccggagaatggtcctttgccatggatgataatcaactgcttgttcaactcaaagatggttttccaattggtaatgaagttatttatgtgggtagtttgaatgttcaagttgatcctattgagcaagatcgagtttctcagaagctcttcaaggaacacagatgcgtacctacctttctcccagctgaactccagcatcaattctatcacatattctgcaaacagcacttatggccacttttccattatatgcttcctgtttgtcatgacaaagatgagctctttgaccgttccctttttcaagcctacgtgcgggccaacaaaatttttgctgacaaaattgtggaggcagtcaattcggatgatgattgtgtgtgggttcatgattatcacctcatgcttatcccaacccttttaagaaagaaactgcaccggatcaaagttggtttcttcctccacagcccatttccctcgtctgagatctataggacactgccagtgcgggatgaaattctaaaatcacttcttaatgctgacctcattggctttcaaacttttgactatgcccgccacttcctttcatgttgcagcaggcttttaggccttaattatgagtccaaacgtggccacataggtatagagtacttcggccgaacagtgagcctcaagattcttgctgcaggtgtacatgttggccggcttgaggctacattgaggttgcctgctacaattaaaaaggttcaagaaattgagagtagatatagtggcaagttggtaatattaggtgtagatgacatggacatctttaaaggtatcagtctaaaactgcttggcttggagcttcttctggaaagaacacctaagcttcgaggcaaggttgtccttgtacagattgttaatcctgcaagaagcatcggaaaagacattgaggaagcgaaatatgaagctgaatctgtagctcaaaggataaatgataaatatggttctgctaattacaagcctgttgtcctcattgactactcaatacctttctatgaaaagatcgcattttatgctgcatctgactgctgtattgtaaatgctgtgagggatggcatgaatttgataccgtatgagtacaccgtatgcaggcagggaaatgaggagcttgataagctcagaggtcttaataagagctcatctcacacaagcacacttattgtgtctgaatttgtgggttgctctccatcacttagtggagcattcagggtaaatccttggagtatggaagatgtggctgatgcattatacagtgtaacagacctgacacgatatgagaagaatctgcgccatgaaaagcactatcgctatgtcaggtctcatgatgttgcttactgggcacgcagctttgaccaggatctggataaagcatgcatagagcaatacagccaaagatgttggacaactgggtttggtttaaattttagagttattgccctttcacctgggtttagaagactgtctctagaacacctagcctcgtcttataagaaggctaacaggaggatgatattcctggactacgatgggacccttgtgccgcagacatcacacgacaaatctccaagcgctgaacttatctctacccttaacagcttgtgcagtgatatgaagaacacagtatttatagtcagcggacgaggaagagattccctaagcgagtggtttgcttcatgcgagaacctcggtatcgctgccgaacatggttactttatcagatggaacaaagcagctgaatgggagacaagcttctcaggtatttattctgaatggaagctcatcgcggaccctatcatgcatgtatacatggaaacaactgatgggtccttcatagagccaaaagagagcgctttggtatggcactatcagaacacggatcatgactttggctcgtgccaggcaaaggagctagtgagccatcttgagcgagtcctatcgaacgaacctgttgtcgtgaggcgtggccatcagatcgtagaagttaaacctcagggagttagcaaggggatttccgtggacaagatcatccggaccttggtcagcaaaggggaagtaccagaccttttgatgtgcatcggaaacgatcggtcggacgaggacatgttcgagagcatcaacagagccacctccctttccgagcttcctgccgctccagaagtattcgcctgttccgttggccccaaggccagcaaggcaaactactacgtcgatggctgcgacgaagtaatcagactgctgaagggtgtcacagccgtttcgctccaaaaggatactgccggccatagccatgcggcattcgaggatacgcttgaggttgtcagctga

SEQ ID NO: 145684 - protein, 864 aa, Zea mays
MVLKSHTNLLDMCCEDVFDFQQPLRSPRHVVNSPGIISDPDWESSNDGNSVGSMPFCFKRKIIVANFLPVICAKNEATGEWSFAMDDNQLLVQLKDGFPIGNEVIYVGSLNVQVDPIEQDRVSQKLFKEHRCVPTFLPAELQHQFYHIFCKQHLWPLFHYMLPVCHDKDELFDRSLFQAYVRANKIFADKIVEAVNSDDDCVWVHDYHLMLIPTLLRKKLHRIKVGFFLHSPFPSSEIYRTLPVRDEILKSLLNADLIGFQTFDYARHFLSCCSRLLGLNYESKRGHIGIEYFGRTVSLKILAAGVHVGRLEATLRLPATIKKVQEIESRYSGKLVILGVDDMDIFKGISLKLLGLELLLERTPKLRGKVVLVQIVNPARSIGKDIEEAKYEAESVAQRINDKYGSANYKPVVLIDYSIPFYEKIAFYAASDCCIVNAVRDGMNLIPYEYTVCRQGNEELDKLRGLNKSSSHTSTLIVSEFVGCSPSLSGAFRVNPWSMEDVADALYSVTDLTRYEKNLRHEKHYRYVRSHDVAYWARSFDQDLDKACIEQYSQRCWTTGFGLNFRVIALSPGFRRLSLEHLASSYKKANRRMIFLDYDGTLVPQTSHDKSPSAELISTLNSLCSDMKNTVFIVSGRGRDSLSEWFASCENLGIAAEHGYFIRWNKAAEWETSFSGIYSEWKLIADPIMHVYMETTDGSFIEPKESALVWHYQNTDHDFGSCQAKELVSHLERVLSNEPVVVRRGHQIVEVKPQGVSKGISVDKIIRTLVSKGEVPDLLMCIGNDRSDEDMFESINRATSLSELPAAPEVFACSVGPKASKANYYVDGCDEVIRLLKGVTAVSLQKDTAGHSHAAFEDTLEVVS

SEQ ID NO: 145685 - DNA, 25 bp, Artificial sequence
  primer
atgagtcgtttagtcgtagtatcta

SEQ ID NO: 145686 - DNA, 24 bp, Artificial sequence
  primer
ttacgcaagctttggaaaggtagc

SEQ ID NO: 145687 - protein, 563 aa, Artificial sequence
  consensus sequence
  Variant (3)..(10): Xaa in position 3 to 10 is any amino acid
  Variant (11)..(26): Xaa in position 11 to 26 is any or no amino acid
  Variant (30)..(33): Xaa in position 30 to 33 is any amino acid
  Variant (34)..(52): Xaa in position 34 to 52 is any or no amino acid
  Variant (54)..(54): Xaa in position 54 is any amino acid
  Variant (57)..(83): Xaa in position 57 to 83 is any amino acid
  Variant (84)..(109): Xaa in position 84 to 109 is any or no amino acid
  Variant (111)..(111): Xaa in position 111 is any amino acid
  Variant (113)..(114): Xaa in position 113 to 114 is any amino acid
  Variant (116)..(117): Xaa in position 116 to 117 is any amino acid
  Variant (121)..(122): Xaa in position 121 to 122 is any amino acid
  Variant (124)..(137): Xaa in position 124 to 137 is any amino acid
  Variant (138)..(160): Xaa in position 138 to 160 is any or no amino acid
  Variant (162)..(164): Xaa in position 162 to 164 is any amino acid
  Variant (166)..(167): Xaa in position 166 to 167 is any amino acid
  Variant (170)..(182): Xaa in position 170 to 182 is any amino acid
  Variant (183)..(193): Xaa in position 183 to 193 is any or no amino acid
  Variant (195)..(196): Xaa in position 195 to 196 is any amino acid
  Variant (199)..(199): Xaa in position 199 is any amino acid
  Variant (201)..(207): Xaa in position 201 to 207 is any amino acid
  Variant (209)..(216): Xaa in position 209 to 216 is any amino acid
  Variant (217)..(223): Xaa in position 217 to 223 is any or no amino acid
  Variant (226)..(226): Xaa in position 226 is any amino acid
  Variant (228)..(228): Xaa in position 228 is any amino acid
  Variant (230)..(230): Xaa in position 230 is any amino acid
  Variant (232)..(239): Xaa in position 232 to 239 is any amino acid
  Variant (241)..(252): Xaa in position 241 to 252 is any amino acid
  Variant (253)..(254): Xaa in position 253 to 254 is any or no amino acid
  Variant (256)..(257): Xaa in position 256 to 257 is any amino acid
  Variant (260)..(267): Xaa in position 260 to 267 is any amino acid
  Variant (269)..(283): Xaa in position 269 to 283 is any amino acid
  Variant (284)..(319): Xaa in position 284 to 319 is any or no amino acid
  Variant (321)..(340): Xaa in position 321 to 340 is any amino acid
  Variant (341)..(359): Xaa in position 341 to 359 is any or no amino acid
  Variant (366)..(366): Xaa in position 366 is any amino acid
  Variant (369)..(374): Xaa in position 369 to 374 is any amino acid
  Variant (376)..(379): Xaa in position 376 to 379 is any amino acid
  Variant (381)..(397): Xaa in position 381 to 397 is any amino acid
  Variant (399)..(399): Xaa in position 399 is any amino acid
  Variant (401)..(404): Xaa in position 401 to 404 is any amino acid
  Variant (405)..(405): Xaa in position 405 is any or no amino acid
  Variant (407)..(419): Xaa in position 407 to 419 is any amino acid
  Variant (423)..(430): Xaa in position 423 to 430 is any amino acid
  Variant (432)..(458): Xaa in position 432 to 458 is any amino acid
  Variant (459)..(459): Xaa in position 459 is any or no amino acid
  Variant (467)..(468): Xaa in position 467 to 468 is any amino acid
  Variant (470)..(470): Xaa in position 470 is any amino acid
  Variant (471)..(471): Xaa in position 471 is any or no amino acid
  Variant (473)..(476): Xaa in position 473 to 476 is any amino acid
  Variant (477)..(493): Xaa in position 477 to 493 is any or no amino acid
  Variant (495)..(495): Xaa in position 495 is any amino acid
  Variant (497)..(497): Xaa in position 497 is any amino acid
  Variant (500)..(502): Xaa in position 500 to 502 is any amino acid
  Variant (505)..(507): Xaa in position 505 to 507 is any amino acid
  Variant (509)..(510): Xaa in position 509 to 510 is any amino acid
  Variant (511)..(514): Xaa in position 511 to 514 is any or no amino acid
  Variant (516)..(518): Xaa in position 516 to 518 is any amino acid
  Variant (521)..(532): Xaa in position 521 to 532 is any amino acid
  Variant (534)..(543): Xaa in position 534 to 543 is any amino acid
  Variant (544)..(546): Xaa in position 544 to 546 is any or no amino acid
  Variant (548)..(562): Xaa in position 548 to 562 is any amino acid
NRXXXXXXXXXXXXXXXXXXXXXXXXGGLXXXXXXXXXXXXXXXXXXXXXXXWXGWXXXXXXXXXXXXXXXXXXXXXXXXXXXXXXXXXXXXXXXXXXXXXXXXXXXXXYXGXXNXXLWPXXHXXXXXXXXXXXXXXXXXXXXXXXXXXXXXXXXXXXXXYXXXNXXFAXXXXXXXXXXXXXXXXXXXXXXXXWXXDYXLXXXXXXXRXXXXXXXXXXXXXXXFFXHXPXPXXXXXXXXPXXXXXXXXXXXXXXDXXGFXXXXXXXXFXXXXXXXXXXXXXXXXXXXXXXXXXXXXXXXXXXXXXXXXXXXXXXXXXXXPXXXXXXXXXXXXXXXXXXXXXXXXXXXXXXXXXXXXXXXVDRLDYXKGXXXXXXAXXXXLXXXXXXXXXXXXXXXXXPXRXXXXXYXXXXXXXXXXXXXINGXXXXXXXXPXXXXXXXXXXXXXXXXXXXXXXXXXXXXRDGMNLVXXEXXAXXXXXXXXXXXXXXXXXXXXXGXLXLSXXXGAXXXLXXXXXXAXXXNPXXXXXXXXXXXXAXXXXXXXXXXXXXRXXXXXXXXXXXXXXXW

SEQ ID NO: 145688 - protein, 23 aa, Artificial sequence
  protein pattern
  Variant (2)..(2): Xaa in position 2 is any amino acid
  Variant (3)..(10): Xaa in position 3 to 10 is any or no amino acid
  Variant (13)..(13): Xaa in position 13 is Leu or Met
  Variant (17)..(17): Xaa in position 17 is Ala or Ser
  Variant (18)..(18): Xaa in position 18 is any amino acid
  Variant (20)..(20): Xaa in position 20 is Phe or Tyr
  Variant (21)..(21): Xaa in position 21 is Ala, Ile or Val
  Variant (22)..(22): Xaa in position 22 is any amino acid
  Variant (23)..(23): Xaa in position 23 is Ala, Cys, Asn, Ser, Thr or Val
TXXXXXXXXXDGXNLVXXEXXXX

SEQ ID NO: 145689 - protein, 19 aa, Artificial sequence
  protein pattern
  Variant (4)..(5): Xaa in position 4 to 5 is any amino acid
  Variant (8)..(10): Xaa in position 8 to 10 is any amino acid
  Variant (11)..(11): Xaa in position 11 is Lys or Arg
  Variant (12)..(13): Xaa in position 12 to 13 is any amino acid
  Variant (14)..(14): Xaa in position 14 is Ala, Gly or Ser
  Variant (15)..(18): Xaa in position 15 to 18 is any amino acid
  Variant (19)..(19): Xaa in position 19 is Phe, Ile or Leu
RLDXXKGXXXXXXXXXXXX

SEQ ID NO: 145690 - protein, 14 aa, Artificial sequence
  protein pattern
  Variant (2)..(3): Xaa in position 2 to 3 is any amino acid
  Variant (4)..(4): Xaa in position 4 is Phe or Tyr
  Variant (5)..(5): Xaa in position 5 is Ala, Cys or Ser
  Variant (6)..(8): Xaa in position 6 to 8 is any amino acid
  Variant (12)..(13): Xaa in position 12 to 13 is any amino acid
YXXXXXXXLWPXXH

SEQ ID NO: 145691 - protein, 15 aa, Artificial sequence
  protein pattern
  Variant (2)..(2): Xaa in position 2 is any amino acid
  Variant (3)..(3): Xaa in position 3 is Leu or Met
  Variant (4)..(4): Xaa in position 4 is Ile, Leu or Val
  Variant (7)..(8): Xaa in position 7 to 8 is any amino acid
  Variant (9)..(9): Xaa in position 9 is Ala or Thr
  Variant (12)..(14): Xaa in position 12 to 14 is any amino acid
  Variant (15)..(15): Xaa in position 15 is Leu or Met
GXXXLSXXXGAXXXX

SEQ ID NO: 145692 - DNA, 1218 bp, Escherichia coli
  CDS (1)..(1218): transl_table=11
atgtcccccattgaaaaatccagcaaattagagaatgtctgttatgacatccgtggtccggtgctgaaagaagcaaaacgcctggaagaagaaggtaacaaggtactgaaactgaacatcggcaacccagccccgttcggttttgacgcgccagatgaaatcctcgttgacgtgatacgcaacctgcctaccgctcaagggtattgcgattccaaaggtctttactccgcgcgtaaagccatcatgcagcactaccaggctcgtggcatgcgtgatgttaccgtggaagatatttacatcggcaatggtgtatcggagcttatcgttcaggcaatgcaggcattgctgaacagcggggacgaaatgttggttcctgcaccagattacccactctggaccgcggcggtttcgctttccagcggtaaagcggtgcattatctttgcgatgaatcctctgactggttcccggacctcgatgatattcgcgctaaaattacgcctcgtacgcgtgggatcgttattatcaacccaaataacccaaccggcgcggtatattccaaagagcttttaatggagattgtggagattgcacgtcagcataatctcattatcttcgccgatgaaatttatgacaaaattctctacgacgacgctgagcatcactcaattgcgccgctggcacctgacctgctgaccattacctttaacggactgtcgaaaacgtaccgcgttgcaggcttccgtcaggggtggatggtgttgaacgggccgaaaaaacacgccaaaggctacatcgaaggtctggaaatgctggcttcaatgcgcctgtgtgctaacgttcctgcgcaacacgccattcagaccgcgctaggtggttatcagagcatcagtgaatttattacccctggcggtcgtctttatgagcagcgtaaccgcgcgtgggaactgatcaacgatattccgggcgtttcctgcgtgaaacctcgtggtgcgctgtatatgttcccgaaaatcgacgccaaacgctttaacattcacgacgatcagaaaatggtgttggatttcctgttgcaggaaaaagttctgttggtgcaagggacggcattcaactggccgtggccggatcacttccgcattgtcacgctaccgcgtgtcgatgatatcgagctgtctttgagcaagttcgcgcgtttcctttctggttatcatcagctgtaa

SEQ ID NO: 145693 - protein, 405 aa, Escherichia coli
MSPIEKSSKLENVCYDIRGPVLKEAKRLEEEGNKVLKLNIGNPAPFGFDAPDEILVDVIRNLPTAQGYCDSKGLYSARKAIMQHYQARGMRDVTVEDIYIGNGVSELIVQAMQALLNSGDEMLVPAPDYPLWTAAVSLSSGKAVHYLCDESSDWFPDLDDIRAKITPRTRGIVIINPNNPTGAVYSKELLMEIVEIARQHNLIIFADEIYDKILYDDAEHHSIAPLAPDLLTITFNGLSKTYRVAGFRQGWMVLNGPKKHAKGYIEGLEMLASMRLCANVPAQHAIQTALGGYQSISEFITPGGRLYEQRNRAWELINDIPGVSCVKPRGALYMFPKIDAKRFNIHDDQKMVLDFLLQEKVLLVQGTAFNWPWPDHFRIVTLPRVDDIELSLSKFARFLSGYHQL

SEQ ID NO: 145694 - DNA, 2103 bp, Glycine max
  CDS (454)..(1899)
cacatacacacactcttcaatcaaattgaagcagaaagccaaaggccagagagagccctgttatctacggagagacccttacactccaaagcttggccacaattgaaggacgagcattatccctttggattaataaagccatctcaaatctcaattccaataatccgttagcacttttttcagtggctctggtgctgccattgcgttccaccaaccgccactgccacacatacacttcactacagacaaataaatttcacactcttttgtctgacacgtataacattctgaactaaaactacttggtttttcccacaccgaatactcttcttcaatcaagcgaaggtggtctcacttgactcgattgcaagtgatccacgacacactgttcgcttcacaaaagcttcgaatccaattcctcagtaacatctgcaagaagtcttctccttcaccatgccaccaaagcctttagactatgggtcaataaatgaaaacgtgaagaagagtcaatatgctgtcagaggtgaattataccttcgagcttctgagcttcagaaagagggcaaaaagattatatttactaatgttggcaacccacatgcattgggacagaaaccactgagcttccctcgtcaggttgttgctttgtgccaagctccattcctacttgatgatcctaatgttggactgctattccctgctgatgcaattgcaagagctaaacactatctttcattgacctcgggcggtttaggcgcttatagtgactcccgcggccttccaggagtgaggaaggaagtggctgagttcatactcaggcgtgatggttatccaactgatccagaactcatatatctcactgatggtgccagcaagggggtgatgcagatattaaatactatcatcagaggtcaagacgatgggattttggttccagtcccacaatacccactctactcagcaacaattgctctgcttggtggtacccttgttccatactaccttgaagagacagcaaattggggtcttgatgttaatgaacttcgtcaatcagttgagcaggctcgctttaaaggaataactgttaaagcaatggtgatcataaatcctggaaaccctactggtcaatgccttagtgaagctaatctaagagaggttttgcaattctgttatcaagaaaatttagccttgcttggagatgaggtttaccagacaaatatatatcaggatgaacgacccttcattagttctagaaaggttttgatggacttggggccacctataagcaaggaagtccagcttatttcttttcactccgtgtcaaaaggttattatggtgaatgtggacagcgaggtggatattttgaaatgaccaacattcctccagagacagttgatgagatctacaaggttgcatcaatatcacttagtccaaatgttccagcacaaatatttatgggagttatgctccatccacctcaacctggagatatttcttatgacaaatttgttagggagagcaccggaatacttgaatcactgagaagaagagcaaggctaatgactgatggattcaacagttgcagaaatgtggtttgtaattttactgaaggtgccatgtattcattccctcaaatacgtttgccgccaagagctttagaggctgctaaacaggctgcaaaggttccagatgttttctactgcctcaaacttttggaagccactggcatatccactgttcctggttcaggatttggacagagagaaggggtcttccatttgaggactactattttaccagacgaggaagacatgcccgctattatggatagtttcaaaaagttcaatgatgaattcatggagcaatacgaagacaatagaggttattcaaggttgtaagaaaattatcgtaaaagatgcattatactcttgtgcttttgtaagaaaaacataacctccctttctactatttgtccttggagataattcttaaaccttacactttcttctatatcatctctgaacttacaatatttcggctgcatatttaatctctcttgaacctttattatcttgtggcatagcaatcaaacaatcgtcttg

SEQ ID NO: 145695 - protein, 481 aa, Glycine max
MPPKPLDYGSINENVKKSQYAVRGELYLRASELQKEGKKIIFTNVGNPHALGQKPLSFPRQVVALCQAPFLLDDPNVGLLFPADAIARAKHYLSLTSGGLGAYSDSRGLPGVRKEVAEFILRRDGYPTDPELIYLTDGASKGVMQILNTIIRGQDDGILVPVPQYPLYSATIALLGGTLVPYYLEETANWGLDVNELRQSVEQARFKGITVKAMVIINPGNPTGQCLSEANLREVLQFCYQENLALLGDEVYQTNIYQDERPFISSRKVLMDLGPPISKEVQLISFHSVSKGYYGECGQRGGYFEMTNIPPETVDEIYKVASISLSPNVPAQIFMGVMLHPPQPGDISYDKFVRESTGILESLRRRARLMTDGFNSCRNVVCNFTEGAMYSFPQIRLPPRALEAAKQAAKVPDVFYCLKLLEATGISTVPGSGFGQREGVFHLRTTILPDEEDMPAIMDSFKKFNDEFMEQYEDNRGYSRL

SEQ ID NO: 145696 - DNA, 1998 bp, Sorghum bicolor
  CDS (274)..(1728)
gcacgaggccttcctctcgctgtccggccggcgtcgggcgtgcgccgctcgcttgaccgcggccgtcgtccccgcccctccctccccctgccccccgctttccggcgcccgcctgccggccgccccttgtttaacgccaaaccatctggcctttgcagccccgattcgccacgaaaccggccgcagtgtgagagagggacgccgcccgttgtccccggcgtatacgcaatccttccgtcgctgcgaagctgatccctcgtgttcgccttcgccatggcccctgcctccagcgtcgccgtggagaacctcaacccaaaggtcttaaaatgtgagtatgcagtccgtggggagattgtcatccatgctcagcgcttgcagcaacaactacaaacgcaaccagggtctcttcctttcgatcagatcctcttctgcaacattgggaatcctcaatctcttggtcagcaacctgtgacattcttcagggaggttcttgctctttgtgatcatccatgcctcttggaaaaagaggaaaccaaatcattgttcagtgctgatgctatttctcgagcaaagcagattcttgcaactattcctggaagggcaaccggtgcatatagtcacagccagggtatcaaaggactgcgtgatgcaattgctgctggtatcacctcacgtgatggattccctgcaaatgcagatgacattttcattacagatggagcaagtcctggggtccacatgatgatgcaattactgattaggaatgagaaggatggcattctgtgcccaattcctcagtaccccttgtactcggcctccatagctcttcatggtggagctcttgtcccctattaccttgatgaaaaaactgggtggggtttggagatctctgatcttaagaagcaactcgaagatgctcggtcaaaaggcattgatgttagggccttggtggttatcaatccaggaaatccgactgggcaggttcttgctgaagacaaccaatatgacatagtgaaattctgcaaaaatgagggccttgttcttctagctgacgaggtatatcaagagaacatctatgttgacaacaagaaatttaactctttcaagaagattgcaagatccatgggatacggcgaggatgatctccctctagtatcatttcagtctgtttccaaaggatactatggagagtgtggtaaaagaggaggttacatggagatcactggcttcagtgctccggtaagagagcagatctacaaggtagcttcagtgaacctgtgctccaatatcactggtcaaatccttgcaagcctcgtcatgaatccaccaaaggttggggacgaatcatatgcttcctacaaggcagagaaagatgcaatccttcagtctttagctcgtcgtgcaaaggcattggaggatgcattcaacaagcttgagggaatttcatgtaacaaggctgaaggagcaatgtaccttttccctcagattcatctgccacagaaggcaattgaggctgctaaagctgctgagaaagcacctgatgcgttctatgctctccgtctccttgaatcaactggaattgttgtggtccctggatctggatttggtcaagttcctggaacatggcacatcagatgcactatcctgccgcaagaagacaaaatccccgcggtgatcacccgcttcaaggctttccatgaggcgttcatggctgagtaccgcgactaaactgttacagtgtgaattaagatggagattcagtagaagagtccatcttttttcctccctttgttccccctttgtacttcttgtactgtgttttaatatattttccagtaggggctaaaaacccctccggttgtttcctaaaaaaaagtagaagagttcaatgacagagcaaaaaggggccagtgttagaaatcttatttcctccactggagcaacaattgtctgtcttcaatcaaaaacaaaaatttcgaactggcctaggcacttctc

SEQ ID NO: 145697 - protein, 484 aa, Sorghum bicolor
MAPASSVAVENLNPKVLKCEYAVRGEIVIHAQRLQQQLQTQPGSLPFDQILFCNIGNPQSLGQQPVTFFREVLALCDHPCLLEKEETKSLFSADAISRAKQILATIPGRATGAYSHSQGIKGLRDAIAAGITSRDGFPANADDIFITDGASPGVHMMMQLLIRNEKDGILCPIPQYPLYSASIALHGGALVPYYLDEKTGWGLEISDLKKQLEDARSKGIDVRALVVINPGNPTGQVLAEDNQYDIVKFCKNEGLVLLADEVYQENIYVDNKKFNSFKKIARSMGYGEDDLPLVSFQSVSKGYYGECGKRGGYMEITGFSAPVREQIYKVASVNLCSNITGQILASLVMNPPKVGDESYASYKAEKDAILQSLARRAKALEDAFNKLEGISCNKAEGAMYLFPQIHLPQKAIEAAKAAEKAPDAFYALRLLESTGIVVVPGSGFGQVPGTWHIRCTILPQEDKIPAVITRFKAFHEAFMAEYRD

SEQ ID NO: 145698 - DNA, 1726 bp, Zea mays
  CDS (115)..(1551)
acctcccttcccccactctcttctctccccgcggcccgtgactcatccacccacagtccactcgccactccccccggaacggcggcggcggcgacggcggaggagtaacgcaagatggcgaggaaacctctcgactacgaggagctgaacgagaacgtcaagagggtgcagtacgcggtgcgcggggagctgtacctccgcgcctccgagctgcagaaggagggcaagaagatcatcttcaccaacgtcggcaacccgcacgccctcggccagaaaccgctcaccttcccgcgccaggtggtggcgctgtgccaggctccgttcctcctcgacgatccccacgtcggcctcatgttcccggcggacgccatcgctagggccaagcactatctcgccatggcgcccggcggtctaggtgcgtacagtgactcccgcggcatcccgggaatcaggaaggaagttgccgacttcatccacaagcgtgatggatatcccagtgatccggaactcatctacctcacagacggtgccagcaaaggtgtgatgcagatcctgaacaccatcattagaaacgagatggatgggatcttggtccctgttcctcagtacccactttattccgccaccatttccctctatggtggttctctggtcccgtactacttggaagaagaggctaactggagcctcgactttgtgaatatccggcaaacagtggcggaggcacggtccaagggaatctctgttcgagcgatggtgatgataaatccaggaaatcccactggccaatgccttagtgaagcgaatataaaggaacttctgcaattttgctaccatgaaaacttagttctgctagcagatgaagtgtatcaacagaacatttatcaagatgaacggccatttataagcgcaagaaaggttatgttcgacatgggtccaccaataagcagtgagcttcaggttgtttctttccacactgtgtcgaaagggtactggggagagtgcggacaacgtggtggatacttcgaaatgacaaatcttcctcccaagacagtagatgagatctacaaggttgcatcgatagcactgagtccaaacgttcctgggcaaatttttatgggagtaatggttaaccctcctaaacctggagatatctcgtacctgaagttcgctgctgaaagcaagtccatccatgaatctttgaggaggagagcacgcatgatgacagatggtttcaacagttgccgaaacgtcgtgtgcaatttcactgaaggagctatgtactctttcccccaaatacgtctgccaccgagagctattgaggcggcaagaagagccggcaaatcagcggacgtcttctactgcctcaagctcctggaggcgacaggaatctccactgttccgggctctggttttgggcaaaaggaaggggtgttccaccttcggaccactatccttccagcggaggaagacttccctgccatcatgtcgagcttcaagaagttcaacgactcgttcatggagcagtacgagggctactccaggctgtgagcaggaagagaaacaagagtttacagatctgaagaagagattattgattggaagcttattagttattgtaactcccttgaaaagcaggttgtgcggggattattgtttattgaataaaaagtccgccatttgattctactgccataccagtatatataattgtgaattggcttgt

SEQ ID NO: 145699 - protein, 478 aa, Zea mays
MARKPLDYEELNENVKRVQYAVRGELYLRASELQKEGKKIIFTNVGNPHALGQKPLTFPRQVVALCQAPFLLDDPHVGLMFPADAIARAKHYLAMAPGGLGAYSDSRGIPGIRKEVADFIHKRDGYPSDPELIYLTDGASKGVMQILNTIIRNEMDGILVPVPQYPLYSATISLYGGSLVPYYLEEEANWSLDFVNIRQTVAEARSKGISVRAMVMINPGNPTGQCLSEANIKELLQFCYHENLVLLADEVYQQNIYQDERPFISARKVMFDMGPPISSELQVVSFHTVSKGYWGECGQRGGYFEMTNLPPKTVDEIYKVASIALSPNVPGQIFMGVMVNPPKPGDISYLKFAAESKSIHESLRRRARMMTDGFNSCRNVVCNFTEGAMYSFPQIRLPPRAIEAARRAGKSADVFYCLKLLEATGISTVPGSGFGQKEGVFHLRTTILPAEEDFPAIMSSFKKFNDSFMEQYEGYSRL

SEQ ID NO: 145700 - DNA, 1746 bp, Zea mays
  CDS (1)..(1479)
atggtgaggaccatgtccacgacggccgcgggcacgcccccagtgtcggtcgccaccatcaaccccaaggtcttgaagtgtgaatatgcagttcgaggagagattgttacacatgctcagaacttacaacaagaattgcagaaaaatccagaatcacttcctttcgacgagatactctactgtaatattggaaatccccaatcacttgggcaacaaccagttacctatttcagagaagttctctctctatgtgatcatccagctctcctggacaaaagtgaaactcatgctttgtacagttcagatgctatagagagagcatggcaaattctagagaagataccaggtagagcgacaggagcatatagccatagtcagggtataaaaggtttacgtgatgaaattgctgctggaattgctgcccgtgatgggtttcatgcaagcggagataacatctttctaacagatggagcaagcccagcagtgcacatgatgatgcagttgttaataagttctgagagcgatggcattctctgccctattccacagtacccactgtactctgcatcgattgctcttcacggtggttcccttgttccttatttccttaatgaagagacagggtggggactcgatgttgatgagctgaagaaacaactggaggaggctcgatctaagggcatcactgtcagggcgcttgtggtcataaatccaggaaatccaacaggacaggttcttgttgaggaaaaccaaaagaaaattgtcgaattctgcaagaatgaaggacttgttcttctcgcagatgaggtttaccaggaaaatatatatgttgaagataagccattccactcattcaaaaaaattgcacggtcactgggatacactgatgatgatcttcctttggtatcattccagtcagtttctaaaggctactacggagaatgtggaaaacgaggcggttatatggagataactggattcagtcctgatgtacgggaacaaatttacaaggtggcatcagtaaacctgtgctccaatgtttcggggcaaattcttgctagccttgtaatgaacccaccaaaggctggggatgaatcctttgaatccttcatgtcagagagggatggtatcctttcatcgttggctcggcgtgcaaaggctttggaagaagcattcaacagtttagaaggaattacatgcaacaaagccgaaggtgcaatgtatctgttcccacgccttcatttaccccagaaggcaattggagctgcccaagcagtcggcactgcgccagatgcatactacgcaaaacgcctactggaagccactggaatcgtcgtcgtccccggttctgggtttggacaggtccctggaacgtggcacttcaggtgcacgatactgccgcaggaggacaagatacctgcgatagtatccaggctcaaggagttccacgagaagttcatggatgaattccgtgattgagctgagtatccatcgccctggcgtgatttttatctgttcaaaataataatgctgccaattggttgcccccgctccctcgtcgtcccatggatgctacagccaaacaccatcccaaattgtgttacaggcagatccctatcgaaaaacctacagaatctcgggcactgcaatgccatggttctgtttgccttgtgagaagtgtatcaggctaggctctgagccctgatgtgtacaaacatacccgaactttgaggccaagttgagttg

SEQ ID NO: 145701 - protein, 492 aa, Zea mays
MVRTMSTTAAGTPPVSVATINPKVLKCEYAVRGEIVTHAQNLQQELQKNPESLPFDEILYCNIGNPQSLGQQPVTYFREVLSLCDHPALLDKSETHALYSSDAIERAWQILEKIPGRATGAYSHSQGIKGLRDEIAAGIAARDGFHASGDNIFLTDGASPAVHMMMQLLISSESDGILCPIPQYPLYSASIALHGGSLVPYFLNEETGWGLDVDELKKQLEEARSKGITVRALVVINPGNPTGQVLVEENQKKIVEFCKNEGLVLLADEVYQENIYVEDKPFHSFKKIARSLGYTDDDLPLVSFQSVSKGYYGECGKRGGYMEITGFSPDVREQIYKVASVNLCSNVSGQILASLVMNPPKAGDESFESFMSERDGILSSLARRAKALEEAFNSLEGITCNKAEGAMYLFPRLHLPQKAIGAAQAVGTAPDAYYAKRLLEATGIVVVPGSGFGQVPGTWHFRCTILPQEDKIPAIVSRLKEFHEKFMDEFRD

SEQ ID NO: 145702 - DNA, 1443 bp, Oryza sativa (japonica cultivar-group)
  CDS (1)..(1443)
atgttcggcggcggcggcggcggcgggaggaagccgctggactacgaggagctgaacgagaacgtgaagaaggtgcagtacgcggtgcggggggagctgtacctgcgcgcctccgagctccagaaggagggcaagaagatcatcttcaccaacgtcggcaacccacacgcgctcggccagaagccgctcaccttcccccgccaggttgtggcgctgtgccaggcccccttcctgctcgatgatcccaacgtcggccttatcttccccgccgacgccatcgcgcgggccaagcactacctcgccatggcacccggtggactagcttacagtgattcccgaggtatccctggtattaggaaggaagtcgccgagttcatcgagaggcgtgatggttatccagatccagaacttatttacctcacagatggtgccagcaaaggtgtgatgcaaatgctgaataccattatcagaaatgagagagatgggattctggttcctgttccacaatacccgctttattctgctgccatttccctctttggtggttctctcgtgccatactacttagaagaagaggctaactggggacttgacttcgtcaatctccgacagactgtggcgtcagcgcggtcaaagggaatcactgttcgagcaatggtgattatcaacccaggaaaccctactggccaatgccttagtgaaggaaacataaaggaacttctcaaattctgcttccatgagaacttagttctgcttgcagatgaagtctatcaacagaacatttatcaagatgagcgcccatttataagtgctagaaaggttctgtttgacatgggtcctcctatgagcagggaagttcagctggtttctttccatactgtgtcaaaaggatattggggggagtgtggacaacgtggagggtattttgaaatgacaaatcttcctcccaagacagtagacgagatctacaaggttgcatcaatcgcactcagtccaaatgttcctgggcagatctttatgggtttaatggttaaccctcctaagcctggagatatctcttatctgaagttttctgctgaaaagtctatcctcgagtctttgaggaggagagcacgcctgatgacagatggtttcaatagttgccgaaatgttgtctgcaatttcacagaagctatgtactctttcccccaaatacgcttaccaccaaaagctatagatgcagccaaaagggctggcaaagcggccgatgttttctactgcctcaagcttcttgaagcaactggaatatccactgttccagggtcaggtttcggacaaaaagaagtgttccacctgaggacgaccatcctgccagctgaggaggacatgcctgccatcatgaccagcttcaagaagttcaacgacactttcatggatcagtacgatggctactccaggatgtga

SEQ ID NO: 145703 - protein, 480 aa, Oryza sativa (japonica cultivar-group)
MFGGGGGGGRKPLDYEELNENVKKVQYAVRGELYLRASELQKEGKKIIFTNVGNPHALGQKPLTFPRQVVALCQAPFLLDDPNVGLIFPADAIARAKHYLAMAPGGLAYSDSRGIPGIRKEVAEFIERRDGYPDPELIYLTDGASKGVMQMLNTIIRNERDGILVPVPQYPLYSAAISLFGGSLVPYYLEEEANWGLDFVNLRQTVASARSKGITVRAMVIINPGNPTGQCLSEGNIKELLKFCFHENLVLLADEVYQQNIYQDERPFISARKVLFDMGPPMSREVQLVSFHTVSKGYWGECGQRGGYFEMTNLPPKTVDEIYKVASIALSPNVPGQIFMGLMVNPPKPGDISYLKFSAEKSILESLRRRARLMTDGFNSCRNVVCNFTEAMYSFPQIRLPPKAIDAAKRAGKAADVFYCLKLLEATGISTVPGSGFGQKEVFHLRTTILPAEEDMPAIMTSFKKFNDTFMDQYDGYSRM

SEQ ID NO: 145704 - DNA, 1227 bp, Methylophilus methylotrophus
  CDS (1)..(1227): transl_table=11
atgcagccagtcaataaatccagcaaactcagtaatgtctgttacgacatccgcggccctgtcctacaacgtgcgcgccagatggaagaggatgggcaacgcattatcaagttgaatatcggcaaccccatgccgttcggttttaatgcccccgaagaaattgtccaggacgtgatccataatatggaccaggcctcgggttataccgattccaaaggattgttcgcggcgcgcaaagcgattatgcattacacccagcaaaaaaacattgccggggtgaccatagacgacatcattatcggtaatggtgtgtctgaactcattgtgatggccatgcagggcttgctcaataatggtgaccagattctggtgcccatgccggattatccgttgtggaccgctgcagtgaacctggcaggtggtacggcgcgtcattacgtctgtgacgagcagtccggctggctgccagacctcaaggatattgagaacaagatcacggccaataccaaaggtatcgtgattatcaatcctaacaatccgaccggtgccttgtatcccaaagaaacgctggaaggcattatcgagattgcgcgtcatcatagcctggtgatttttgccgacgagatttacgacaaggtgttgtatgacggtaacacgcatacgtccatcgcgtcgctggctgacgatgtgctgtttgtgacctttaacggcttgtccaaaaattaccgcgcctgtggctaccgctcaggctggatgattatctccggcgataaaaaggatgccaaggattatatcgaaggcctcaatatgctggcctccatgcgtttgtgtgccaatgtgcccgggcaactggcgattcagacagcactaggcggttaccagagtattaatgacctggtcgcgcccagtggccgcttgtgcaagcagcgtgacctggcttacgacatgctcacttccatgccgggcgtgacttgtgtcaagccagctgcagccatgtatctgtttccaaagttggatccagcgatgtatccgatcgaagatgatcagcagtttatcctcgacttattgctggaagaaaaagtactgctggttcaaggcacgggctttaactggaaagcgcctgatcatttcagggtagtgttcctgcctaatgtggatgacctgaccgaggcgatgacacgcataggccgctacctggatagctatcgtaagaagcatgcaaaataa

SEQ ID NO: 145705 - protein, 408 aa, Methylophilus methylotrophus
MQPVNKSSKLSNVCYDIRGPVLQRARQMEEDGQRIIKLNIGNPMPFGFNAPEEIVQDVIHNMDQASGYTDSKGLFAARKAIMHYTQQKNIAGVTIDDIIIGNGVSELIVMAMQGLLNNGDQILVPMPDYPLWTAAVNLAGGTARHYVCDEQSGWLPDLKDIENKITANTKGIVIINPNNPTGALYPKETLEGIIEIARHHSLVIFADEIYDKVLYDGNTHTSIASLADDVLFVTFNGLSKNYRACGYRSGWMIISGDKKDAKDYIEGLNMLASMRLCANVPGQLAIQTALGGYQSINDLVAPSGRLCKQRDLAYDMLTSMPGVTCVKPAAAMYLFPKLDPAMYPIEDDQQFILDLLLEEKVLLVQGTGFNWKAPDHFRVVFLPNVDDLTEAMTRIGRYLDSYRKKHAK

SEQ ID NO: 145706 - DNA, 1182 bp, Mesorhizobium loti MAFF303099
  CDS (1)..(1182): transl_table=11
atgcctagaccatcgtctcgcatttccggcatcgtgccttcgggcaaggatggctgggaggttcacttcgctgcctggacgcgcaaggaagccggtgaggacatcatcatgctgtcggtcggcgatcacgacttcgacacgccctcgcaaacgatcgaggcctgcgtgaccgcggttcgcggcagcaaccaccactacaccccgctgcccggcctgccgcgcctgcgccaggcaatggcggccgcctccagcgcctgcaccggcatcgagacgacgcctgatcaagtgatcgccacgccgggcggccaggccgccctctatgcggccgtgcaggccgttctcgaccagggcgaccatgccatcgtggtggcaccctattatgccacctaccccaacacgttcagcgccgccggagccagtttcaccgtcgtcgagacgccggccgaagacgggtttcagcctcgcgccgacatgatccgcgcggcactcaggcccaacacccgcgccatcctgatcaacacgccgaacaatccgacgggtgcggtctattcgcgcgagcggctggaacagctggcgcaaatctgccgcgagcatgacctctggctgctgtctgacgaggtctactggacgctgggtggcggcgagcatgtctcgccacgctcgctgcccggcatggcagagcgcacgctggtcatcaattccatgtccaagagccacggcatgaccggctggcgcatgggctggctgaccggtccgcaggacatgatcacgctgctcatcaacctcaatctggtgacgacctacggcttgccggccttcatctcgattgcctgcgccgaggcgctcgagaaccgttacggcgtcaaggagatcgccgagcgctatgcggcgcgccggaccgtcctgctggatgccgtgcgcggcatgaacaatgtcagcgtgcgcggttccgaaggcggcatgtatgtcatgctcgacatatccgatgtcgagccggacgacgagaaattcgcctgggcccttctcgaccaggagaaggtcggcgtgatgcccggctccagcttcggcgaagcggccgccggccacatccgcatcagcctctgccagccggagcccgtactgcaggaggccgccgctcggctgcgccgttttgcttccacctatcgccgcgaggccgcatga

SEQ ID NO: 145707 - protein, 393 aa, Mesorhizobium loti MAFF303099
MPRPSSRISGIVPSGKDGWEVHFAAWTRKEAGEDIIMLSVGDHDFDTPSQTIEACVTAVRGSNHHYTPLPGLPRLRQAMAAASSACTGIETTPDQVIATPGGQAALYAAVQAVLDQGDHAIVVAPYYATYPNTFSAAGASFTVVETPAEDGFQPRADMIRAALRPNTRAILINTPNNPTGAVYSRERLEQLAQICREHDLWLLSDEVYWTLGGGEHVSPRSLPGMAERTLVINSMSKSHGMTGWRMGWLTGPQDMITLLINLNLVTTYGLPAFISIACAEALENRYGVKEIAERYAARRTVLLDAVRGMNNVSVRGSEGGMYVMLDISDVEPDDEKFAWALLDQEKVGVMPGSSFGEAAAGHIRISLCQPEPVLQEAAARLRRFASTYRREAA

SEQ ID NO: 145708 - DNA, 1197 bp, Pyrococcus abyssi GE5
  CDS (1)..(1197): transl_table=11
atggttagagcctcaaaaagggctctttctatagagtatgcaattagagatgtcgttctaccagctagagagctcgaaaagaagggtataaaggtcataaggctaaacattggcgatccagttaagtttgacttccagccaccggagcatatgaaggaagcatactgcaaggccattaaggaaggtcacaactactatggagatagtgagggtttaatggaactaagggaggcgatagttgagagggaaaagaagaagaatggtgtaaacattacgccagatgacgttagggttacggctgcagttacagaggcccttcagatgatatttggagcattactagacccaggagatgaaatattaattccaggaccaagttacccaccgtacaccggcctagtcaagttctatggtggagtaccagtagaatacagaacgatcgaggaggaaggctggcaacctgatatagatgaccttaggaagaagataaccgagagaaccaaggcgatagcggtaataaatccgaataatccgaccggagcattgtacgacaagaagactctggaggagataatcaacattgcaggtgagcatgacattccagttctaagcgacgagatctatgacttaatgacctatgaagggaagcacatttcaccagcatcactaaccaaggacgtcccggtaatagtgatgaacggcctatcgaaggtttactttgccaccggctggagattaggatacatgtactttgtagaccctgagggtaagctaagcgaagttagggaagccattgacaagcttgcaaggataagactgtgtccaaacactccagcccaatttgccgcaatagcaggactgaggggcccaatggattaccttgaagagtatatgaagaagcttaaggagaggagggactacatatacaagagattgaacgaaattcctgggataagcacgactaaaccacagggagccttctacatattccccaggattgaggaaggcccatggaaggatgacaaagagttcgtccttgacgtactccacaacgcccacgtcctctttgtacacggctcgggattcggagaatacggaagaggacacttcagggcagtattcctaccaccagtagaggttcttgaggaggcgatgaacaggtttgagaagttcatgagagagaagttaagctcttga

SEQ ID NO: 145709 - protein, 398 aa, Pyrococcus abyssi GE5
MVRASKRALSIEYAIRDVVLPARELEKKGIKVIRLNIGDPVKFDFQPPEHMKEAYCKAIKEGHNYYGDSEGLMELREAIVEREKKKNGVNITPDDVRVTAAVTEALQMIFGALLDPGDEILIPGPSYPPYTGLVKFYGGVPVEYRTIEEEGWQPDIDDLRKKITERTKAIAVINPNNPTGALYDKKTLEEIINIAGEHDIPVLSDEIYDLMTYEGKHISPASLTKDVPVIVMNGLSKVYFATGWRLGYMYFVDPEGKLSEVREAIDKLARIRLCPNTPAQFAAIAGLRGPMDYLEEYMKKLKERRDYIYKRLNEIPGISTTKPQGAFYIFPRIEEGPWKDDKEFVLDVLHNAHVLFVHGSGFGEYGRGHFRAVFLPPVEVLEEAMNRFEKFMREKLSS

SEQ ID NO: 145710 - DNA, 1206 bp, Pyrococcus horikoshii OT3
  CDS (1)..(1206): transl_table=11
atgaccctaatgataagggcttctaaaagagctctttctatagaatacgcaattagggatgttgtactacccgctagagagctcgaaaaaaagggcataaaagtgatcagactaaacattggcgaccccgttaaattcgacttccagccaccagagcacatgaaagaggcatactgtagggcaattcaggaaggtcataactattatggagacagcgagggattaattgagcttagagaagcaatagtgaaaagggaaaaggagaagaatggggttgatataactcccgatgacgttagagttacggccgctgtaacagaggcactacaattgatattcggggcccttctggatccaggagatgagattctaatcccaggaccgagctatcctccatatacgggcttagtgaaattttatggcggaaagccagtagagtatagaacaattgaggaggaaggatggcaaccagatatagacgacctaaggaaaaagataagtgaaagaacgaaagcgatagccgttataaatcctaacaatccaacgggggccctatacgataagaaaactatagaagagattataaacgttgcaggagaacacgatttagtagttttaagcgacgaaatctacgatttgatgacttatgaaggaaaacacatttctcctggctccttgaccaaggatgttccagttatagtcatgaatggattatcaaaggtatactttgccacgggatggaggcttgggtatatgtactttgttgatcccgaagggaaattaagcgaagtcagggaagcaattgataaactagcaaggataagaatatgtcctaacacaccaggacaatttgcagcgatagcgggattaacaggctccatggactatcttaaagagtatatgaaaaaactaaaggagagaagagacttcatatataagagactcaatgaaattccaggaataagcacaacaaaaccccagggggcattctatatctttccaagaattgaagaaggcccatggaagagtgataaggaatttgtgctcgacgttctacataacgcccatgtcctattcgttcatggctcaggattcggcgaatatgggaagggacacttcagaattgtattcttacctccgattgaaatcctcgaagaagctatggacaggtttgagaaattcatgagggaaaggctttcttcatga

SEQ ID NO: 145711 - protein, 401 aa, Pyrococcus horikoshii OT3
MTLMIRASKRALSIEYAIRDVVLPARELEKKGIKVIRLNIGDPVKFDFQPPEHMKEAYCRAIQEGHNYYGDSEGLIELREAIVKREKEKNGVDITPDDVRVTAAVTEALQLIFGALLDPGDEILIPGPSYPPYTGLVKFYGGKPVEYRTIEEEGWQPDIDDLRKKISERTKAIAVINPNNPTGALYDKKTIEEIINVAGEHDLVVLSDEIYDLMTYEGKHISPGSLTKDVPVIVMNGLSKVYFATGWRLGYMYFVDPEGKLSEVREAIDKLARIRICPNTPGQFAAIAGLTGSMDYLKEYMKKLKERRDFIYKRLNEIPGISTTKPQGAFYIFPRIEEGPWKSDKEFVLDVLHNAHVLFVHGSGFGEYGKGHFRIVFLPPIEILEEAMDRFEKFMRERLSS

SEQ ID NO: 145712 - DNA, 1218 bp, Aeropyrum pernix K1
  CDS (1)..(1218): transl_table=11
ttgccccagaaggatcctaccctggacatccaggagagggttgttgagatagagggtgagactgctttcgcatacctcgcagtggccaggaagctgatccaggagggtaggcgcgtaataagctttgggataggccagcccgacttcccgacgccccatcacattagagaggctgcgaagaaggctttagacgaggggttcacaggctataccgagacggccgggataccggagctgagggaggctatcgcatggtacctcaactccaggtacggggccgacgtgtctccggaggaggttatagccacgacgggggctaagactgcaatattcctgggtatggccctctacctgaggccgggagacgaggtcataataccggaccccagctactacgcctacgcacaggtggctaaactcttcggcgccaggcccgtttacgttccaatgaagtttgagccgggtctagggttcaggttcgatatcgaggggatagaaagggctgtgagcgagaagacgaggatgatagttgtcaacaacccccacaaccccacggggagtgttttcccgccggaccaggtggaggcgatacacgatatagcgaggaggaggggcctaataatactggccgacgagatatacgacaacttcctctacacggagaagcccttcaagagcaccctctccctcccagactggagggagaacctcgtttacgtcaacggtttcagcaagacattcagcatgacgggctggaggctcggctatgttgtgctcaggagggaggtaatcccgaaggccctagacctcgcagtcacaatatacagctgcccccccagcatagctcagaaggctggcgtcgccgcgctcagaggcgactggggtcctgtgagagagatggtagaagagttcaggagcagagcgaggatactttacgacatactatcccaggccgagggtatagagccctacctcccggagggcgccttctacatgttcccccgtgtggccggcctcctgaggaagacggggctcagcgtggagcagctcgcggagaagctgctatacagctacggcgtcctggtcctgcccggcaccagcttccctgagagtgttggcagggagcatgttaggctgagcttcgccacggccaccagcgacgtgaaggagggggcggagataatagtcagggcgtctagggagctgtccagcggctag

SEQ ID NO: 145713 - protein, 405 aa, Aeropyrum pernix K1
MPQKDPTLDIQERVVEIEGETAFAYLAVARKLIQEGRRVISFGIGQPDFPTPHHIREAAKKALDEGFTGYTETAGIPELREAIAWYLNSRYGADVSPEEVIATTGAKTAIFLGMALYLRPGDEVIIPDPSYYAYAQVAKLFGARPVYVPMKFEPGLGFRFDIEGIERAVSEKTRMIVVNNPHNPTGSVFPPDQVEAIHDIARRRGLIILADEIYDNFLYTEKPFKSTLSLPDWRENLVYVNGFSKTFSMTGWRLGYVVLRREVIPKALDLAVTIYSCPPSIAQKAGVAALRGDWGPVREMVEEFRSRARILYDILSQAEGIEPYLPEGAFYMFPRVAGLLRKTGLSVEQLAEKLLYSYGVLVLPGTSFPESVGREHVRLSFATATSDVKEGAEIIVRASRELSSG

SEQ ID NO: 145714 - DNA, 1173 bp, Helicobacter pylori J99
  CDS (1)..(1173): transl_table=11
atgccctattcttctaaagtccaatccctttcagaatccgcaacgatcgctatcagcacactcgctaaagaattgaaatcgcaaggaaaagatattttaagtttttcagcgggcgagcctgattttgacaccccgcaagcgatcaaagatgcggctataaaagccctaaatgacggctttacaaaatacactccagtagctggaatccctgaattattaaaagcgatcgcttttaaattgaaaaaagaaaacaacctggattatgaaccgagtgaaattctggtgagcaatggcgctaagcaaagcttgttcaatgcgattcaagccttgataggggagggcgatgaggtggttatccctgtgcctttttgggtaacttaccctgagcttgtgaaatacagcggaggagtgagccaattcattcaaaccgatgaaaaaagccattttaaaatcacccccaagcagcttaaagacgccttaagccccaaaacaaaaatgctcattctcaccaccccatcaaaccctaccggcatgctttatagtaaggcggaattagaggctttgggcgaagttttgaaagacaccaaagtttgggtgcttagcgatgaaatttatgaaaagcttgtctataaaggggagtttgtttcttgcgcggcggtgagtgaagagatgaaaaaacgcaccattaccattaatggcttgagcaagtcagtggcgatgacaggctggcgtatgggctatgcggcgagcaaggataaaaaattagtcaaattgatgagtaatttgcaaagccaatgcacttccaatatcaattctatcacgcaaatggcttctattgtggcgcttgaagggttggtggataaggaaattgaaacgatgcgtcaggcttttgaaaagcgctgtcatttagcccacgcaaaaatcaatgcgattgaagggctgaacgctttaaaacctgatggggcgttttatctgtttattaatattggcagtctttgtgggggggattcgatgcgattttgccatgagctattagaaaaagaaggcgtggcgttagtgcctggaaaggcttttggattggaaggctatgttcgtttgtcttttgcatgctcagaagaacagattgaaaaggggattgaacgcatcgctcgctttgtcaaatcaaaaggataa

SEQ ID NO: 145715 - protein, 390 aa, Helicobacter pylori J99
MPYSSKVQSLSESATIAISTLAKELKSQGKDILSFSAGEPDFDTPQAIKDAAIKALNDGFTKYTPVAGIPELLKAIAFKLKKENNLDYEPSEILVSNGAKQSLFNAIQALIGEGDEVVIPVPFWVTYPELVKYSGGVSQFIQTDEKSHFKITPKQLKDALSPKTKMLILTTPSNPTGMLYSKAELEALGEVLKDTKVWVLSDEIYEKLVYKGEFVSCAAVSEEMKKRTITINGLSKSVAMTGWRMGYAASKDKKLVKLMSNLQSQCTSNINSITQMASIVALEGLVDKEIETMRQAFEKRCHLAHAKINAIEGLNALKPDGAFYLFINIGSLCGGDSMRFCHELLEKEGVALVPGKAFGLEGYVRLSFACSEEQIEKGIERIARFVKSKG

SEQ ID NO: 145716 - DNA, 1188 bp, Bacillus halodurans C-125
  CDS (1)..(1188): transl_table=11
atggagttagctaagcgagtttctaccttgacaccgtcatcaacattggcgattacagcaaaggcaaaagagttaaaggagcaagggcacgatgtgatcggattaggagcaggggagccggattttaatactcctcaatacattattgatgctgcggtacgatccatggaagaagggcatacgaaatacaccccatctggaggcttaccaaagttaaaggaagctattattgaaaagtttaagcaagatcaagggcttacatatacagcgaaggaaattttcgtcggtacaggggcgaagcacgttctctatacactgttccaagcgttgttaaatgaaggtgatgaagtgattatcccatctccttactgggtgagctatccagagcaagtgaagcttgctggaggggaacctgtgttcgtggaagggaaagaatcgaacgactttaagttaacaccagctcagcttgagcctgttcttacagaccgaacgaaggcgattattattaattcaccgagtaatccaacaggctctttatatacgcaagaggagttagcagcgttaggggaagtgtgccttaagcataatgtccttatcatctcagatgaaatttatgaaaagcttgtatatgatggagcaaaacatacatcggttgcggaaatttccccacaattaaaggaaaacacagtcgtaattaacggtgtttccaaatctcactcgatgacaggctggcggatcgggtacgcggcaggaccggaggcgctcattcaagcgatgaccaatctcgcgagccacagtacatccaatccaacgaccagcgctcaatatggtgcgattgccgcttacactgaggatgatggatctgtcgagaagatgcgagtggcgttcgaggagcgacttcacacgatttacgataagcttgtggcgattcctggtgtatcgtgcgtaaaacctaagggagcattttatttattcccgaatgtagaggaagctgcagcattaacaggtcacgaaacggttgacgactttgtgaaagtcttgttagaggaagaaaaagtcgccctcgtacctggctcagggttcggtgcacctgacaatgttcgtttatcctatgcaacgtcactggagctattagaagcagcgatcgaccgaattttccgcttcgtcgaagcgaaacgcagcaaataa

SEQ ID NO: 145717 - protein, 395 aa, Bacillus halodurans C-125
MELAKRVSTLTPSSTLAITAKAKELKEQGHDVIGLGAGEPDFNTPQYIIDAAVRSMEEGHTKYTPSGGLPKLKEAIIEKFKQDQGLTYTAKEIFVGTGAKHVLYTLFQALLNEGDEVIIPSPYWVSYPEQVKLAGGEPVFVEGKESNDFKLTPAQLEPVLTDRTKAIIINSPSNPTGSLYTQEELAALGEVCLKHNVLIISDEIYEKLVYDGAKHTSVAEISPQLKENTVVINGVSKSHSMTGWRIGYAAGPEALIQAMTNLASHSTSNPTTSAQYGAIAAYTEDDGSVEKMRVAFEERLHTIYDKLVAIPGVSCVKPKGAFYLFPNVEEAAALTGHETVDDFVKVLLEEEKVALVPGSGFGAPDNVRLSYATSLELLEAAIDRIFRFVEAKRSK

SEQ ID NO: 145718 - DNA, 1215 bp, Pasteurella multocida subsp. multocida str. Pm70
  CDS (1)..(1215): transl_table=11
atggcgcattttcctaaatcagataaattagaacacgtttgttacgatattcgcggacctgttcataaagaagcacttcgtttagaagaagaaggacataaaattctcaagcttaatattggtaatcccgccccttttggttttgaagcaccagatgaaatcttagttgatgtcattcgcaacttacccaccgcacaaggctattgtgactcgaaaggcttgtattctgcacgtaaagctattgtgcaatattaccaatcaaaaggcattcacggggcgacggtgaatgatgtgtacattggtaatggggtgtctgaattaatcaccatgtcattacaagcgttgctcaatgacggcgatgaagtgctgattccgatgccagactatccgctttggactgccgcggcgactttagccggtggtaaaccagtgcactatttatgtgatgaagaagcgaattggtttcctgatgtgaatgatatcaaaagcaaaatcacaaagcgtactaaagcgattgtggtaattaatcccaataacccaacgggtgcggtatacagtcaagatttgctgttagagatcattgaagtggcgcgccaacataaattgattatttttgccgacgagatctacgataaaattttatatgatgatgcagtgcaccaccatattgccgctctcgcaccagatattttaaccgtcacttttaatgggttgtcgaaagcctaccgtgtcgcgggtttccgccaaggttggatgatcttaaacggaccgaaaaaagccgctgcgggttatattgaagggctcgatatgttggcgtctatgcgactttgcgccaatgtaccaatgcaacatgcgattcaaactgcgctaggtggctatcaaagtattaatgaatttatccttcccggtgggcgtttgcttgagcagcgcaataaagcctatgagttaattaatcaaatccctggggtaagttgcatcaaaccgcaaggtgcgatgtatatgttcccgaaaatcgacatcaaaaaatttaatatctatgatgatgaaaagatggtgtttgatttgttggcacaagaaaaagtgttattagtacatggacgtggtttcaactggcattcccctgatcatttccggattgtcactttacctcatgttcatcaaattgaagaggcgctcacgaaacttgctcgtttcttagcccactatcatcaataa

SEQ ID NO: 145719 - protein, 404 aa, Pasteurella multocida subsp. multocida str. Pm70
MAHFPKSDKLEHVCYDIRGPVHKEALRLEEEGHKILKLNIGNPAPFGFEAPDEILVDVIRNLPTAQGYCDSKGLYSARKAIVQYYQSKGIHGATVNDVYIGNGVSELITMSLQALLNDGDEVLIPMPDYPLWTAAATLAGGKPVHYLCDEEANWFPDVNDIKSKITKRTKAIVVINPNNPTGAVYSQDLLLEIIEVARQHKLIIFADEIYDKILYDDAVHHHIAALAPDILTVTFNGLSKAYRVAGFRQGWMILNGPKKAAAGYIEGLDMLASMRLCANVPMQHAIQTALGGYQSINEFILPGGRLLEQRNKAYELINQIPGVSCIKPQGAMYMFPKIDIKKFNIYDDEKMVFDLLAQEKVLLVHGRGFNWHSPDHFRIVTLPHVHQIEEALTKLARFLAHYHQ

SEQ ID NO: 145720 - DNA, 1215 bp, Lactococcus lactis subsp. lactis Il1403
  CDS (1)..(1215): transl_table=11
atgagaaaatttgaaaaatcgcataaacttgataatgtcagctatgatattcgtggtccagtattggatgaagcacaaagaatgcgagccaatggtgaaaaaattcttcgattgaatacaggaaatccagctgaatttggctttcttgctcctgatgaagtcattagtgacttgattcaacatgctgtggatagcgaaggatattcagattctaaagggattttctcggctcgtaaagcgattatgcaatactgtcagctcaagggttttcctaatcttgatatcaatgatattttcacaggtaatggggtttctgaattgattgttatggccatgcagggacttttggacacaggggatgaggttttgattcctatgcctgattatccactttggacggcttctgtcagcttagctggaggaacagctgttcattacctctgtgatgaacaggctggttggttccctgacattgatgatattcgctcaaaaatcacaagtaatacaaaagccattgttttgattaatcctaataatccaacgggtgcgctgtattctaaagatttattgcttgaaattgttcaagtggctagagaaaataatttaattattttctctgacgaaatttatgaccgattggttatggatggagcagttcatgttccgattgctagcttggcaccagatctttttgtggtcacaatgaatggcctctcaaaatcacaccgcattgcgggattccgtgtggggtggatggttttgtcaggtgaaaaatcacatgtcaagggttatattgaaggtttgaatatgctggcttcaatgcgactttgttccaatgttttagctcaatcagtcgtacaaacttcacttggtggcactcaatcggttgataaattgctgttgccgggtggacgagtttatgaacaaagagaattcatttataaagccatcaatgatattccaggattatctgcggtcaaacctcaagcagctttctatattttccctaaaattgacagagaaatgtataaaattgataatgatgaacaatttgtcttggactttttgaagcaggaaaaaatcctgcttgttcatggtcgaggatttaattggaaagagccagaccatttccgaattgtttatctgcctcgtgtggacgaattagcggaaatacaagaaaaaatggaacgtttcctttggcaatatcgtaaataa

SEQ ID NO: 145721 - protein, 404 aa, Lactococcus lactis subsp. lactis Il1403
MRKFEKSHKLDNVSYDIRGPVLDEAQRMRANGEKILRLNTGNPAEFGFLAPDEVISDLIQHAVDSEGYSDSKGIFSARKAIMQYCQLKGFPNLDINDIFTGNGVSELIVMAMQGLLDTGDEVLIPMPDYPLWTASVSLAGGTAVHYLCDEQAGWFPDIDDIRSKITSNTKAIVLINPNNPTGALYSKDLLLEIVQVARENNLIIFSDEIYDRLVMDGAVHVPIASLAPDLFVVTMNGLSKSHRIAGFRVGWMVLSGEKSHVKGYIEGLNMLASMRLCSNVLAQSVVQTSLGGTQSVDKLLLPGGRVYEQREFIYKAINDIPGLSAVKPQAAFYIFPKIDREMYKIDNDEQFVLDFLKQEKILLVHGRGFNWKEPDHFRIVYLPRVDELAEIQEKMERFLWQYRK

SEQ ID NO: 145722 - DNA, 1215 bp, Streptococcus pyogenes M1 GAS
  CDS (1)..(1215): transl_table=11
atgaaaattattgaaaaatcatcaaaattagaacatgttgcctatgatattcgagggcctgttttggatgaagctaatcgcatgattgcgagtggtgaaaaaattctgcgtttaaatactggcaatcctgctgcttttggttttgaagcaccagatgaagtgattcgtgatttaattgtcaacgcgaggctaagtgagggctattctgacagtaaagggattttttcagcgcgtaaggctatcatgcagtattgtcaactcaagggcttcccagatgttgacattgaagatatttatttgggaaatggcgtgtcagagttgatatccatatcccttcaagctttgctagataatggcgatgaagttttagtaccaatgccggattatcctttatggacggcttgtgtgagtcttggtggaggaaaagcggtccattatctttgtgatgaagaagctggttggtatcctgatattgctgatatcaaatcaaaaatcacgagtcgcaccaaagctattgtggtcatcaatcctaataacccaacaggagccctttatcctaaggagattttagaagacatcgttgctttggcaagagaacaccagctgattatttttgccgatgaaatctatgatcgtttggtgatggatggtaaagagcatattgctattgcaagtttggcacctgatgttttttgtgtatctatgaatggtctttccaaatctcatcgtattgctggttttcgtgttggatggatggtcttatcaggtcctaaagaccatgttaaaggttacattgaagggttaaacatgcttgccaatatgcggttatgctccaatgttttagcccaacaagttgttcaaacttccttaggaggtcatcaatcagttgatgcactgttactgccaggagggcgtatttttgagcaacgtaattttatttatgaagctattaatgctatccctggcttatcggcagttaaacctgaagcaggtctttatttatttccgaaaattgatcgtcagatgtatcgtattgatgatgatgaagaatttgtcttacagttattaaagcaagaaaaagtgatgttggtacatggacgtggttttaactggaaagatccagatcacttccgtattgtttacctaccaagtgtagaagaattagaagatgtccaagaaaagattacacgtgtcttataccagtatagacgttaa

SEQ ID NO: 145723 - protein, 404 aa, Streptococcus pyogenes M1 GAS
MKIIEKSSKLEHVAYDIRGPVLDEANRMIASGEKILRLNTGNPAAFGFEAPDEVIRDLIVNARLSEGYSDSKGIFSARKAIMQYCQLKGFPDVDIEDIYLGNGVSELISISLQALLDNGDEVLVPMPDYPLWTACVSLGGGKAVHYLCDEEAGWYPDIADIKSKITSRTKAIVVINPNNPTGALYPKEILEDIVALAREHQLIIFADEIYDRLVMDGKEHIAIASLAPDVFCVSMNGLSKSHRIAGFRVGWMVLSGPKDHVKGYIEGLNMLANMRLCSNVLAQQVVQTSLGGHQSVDALLLPGGRIFEQRNFIYEAINAIPGLSAVKPEAGLYLFPKIDRQMYRIDDDEEFVLQLLKQEKVMLVHGRGFNWKDPDHFRIVYLPSVEELEDVQEKITRVLYQYRR

SEQ ID NO: 145724 - DNA, 1215 bp, Neisseria meningitidis MC58
  CDS (1)..(1215): transl_table=11
atggataaatttcccaagtctgcaaagctcgatcacgtctgttacgacatacgcgggccggttcacaaaaaagcccttcagttggaagaggagggcaataaaatccttaaactcaatatcggcaaccctgcgccgttcggctttgaagcccctgatgaaatcttggtcgatgtcatccgcaacctgccgacttcgcaaggctattgcgattctaaagggctgtattccgcccgcaaagccattgttcactactatcagaccaaaggtttgcgcgatattacggttgatgatgtctatatcggcaacggcgtgtccgagctgattacgatgtctatgcaggcattgctcaacgacggcgacgaaatcctgattcccgcgcccgactatcccttgtggacggcggcggcaacgcttgcgggcggtacggtacgccattatctgtgcgacgaagaaaacggctggttccccaaccttgccgatatggaagccaaaatcacgcccaaaaccaaagccatcgtcgtcatcaatcccaataatccgacaggcgcggtgtacagcagggaaatcctgttggaaatcgccgaactggcgcgcaagcacggtttgattattttcgccgacgagatttacgacaaaatcctttatgacggcgcggttcaccaccacatcgccgcgcttgcccccgaccttttgacggtaacgttcaacggtttgtccaaagcctaccgtgtagccggattccgccaaggctggatggtgctcaacgggccgaaacatcatgcaaaaggttacatcgagggtttggatatgctctcgtctatgcgcctgtgtgccaatacgccgatgcagcacgcgattcagacggcattgggcggctatcagagcatcaacgaattcattttgcccggcggacggcttttggaacagcgcaacagggcgtgggaactggtcaaccagattcccggcgtatcctgcgtcaaaccgatgggcgcgatgtatatgttcccaaaaatcgataccgaaatgtaccgtatccgcgatgacatgaaattcgtttacgatttgctggtgcgcgaaaaagtcttgctggtgcagggaacggggtttaattggatcaagcccgaccatttccgcattgttacgctgccttacgtccatcagattgaagaggcgatgggcaggctggcaagattcctgcaaacctaccgccaataa

SEQ ID NO: 145725 - protein, 404 aa, Neisseria meningitidis MC58
MDKFPKSAKLDHVCYDIRGPVHKKALQLEEEGNKILKLNIGNPAPFGFEAPDEILVDVIRNLPTSQGYCDSKGLYSARKAIVHYYQTKGLRDITVDDVYIGNGVSELITMSMQALLNDGDEILIPAPDYPLWTAAATLAGGTVRHYLCDEENGWFPNLADMEAKITPKTKAIVVINPNNPTGAVYSREILLEIAELARKHGLIIFADEIYDKILYDGAVHHHIAALAPDLLTVTFNGLSKAYRVAGFRQGWMVLNGPKHHAKGYIEGLDMLSSMRLCANTPMQHAIQTALGGYQSINEFILPGGRLLEQRNRAWELVNQIPGVSCVKPMGAMYMFPKIDTEMYRIRDDMKFVYDLLVREKVLLVQGTGFNWIKPDHFRIVTLPYVHQIEEAMGRLARFLQTYRQ

SEQ ID NO: 145726 - DNA, 1125 bp, Methanothermobacter thermautotrophicus str. Delta H
  CDS (1)..(1125): transl_table=11
atgatcatgaggaaatttgcctcccgtgtaaaggatatacagctttctgagataaggaaaatatttgaggttgcagatgaggatacaataaaccttggcataggtgaaccagatttcagtgtccctgatcatgtcagggaggctgttaaggatgctgttgacgagggcctgacccattacacctccaacatggggatggaggagctgagggaagccatagcagataaacttaaaagcgaaaacagggttcatgctgaaccagaatcaataatagtgactgtgggtgccagtgaggccatattcatgtgcacccaggccctccttgacattggtgaccatgccctcatacctgaccctggttttctatcctatgatgcctgtgtccggctttccggggcagtgagcatacccgtgcccctcagtatggatgaagggttctcgatgagccctgaaagggttgaatcactcatcacccaggatacccgggtcataataatgaattccccatcgaacccaaccgggagcgtcatgggaaaggatgatgtgaaggggattgctgagatcgccgaggacaatgacctgataataatatcggatgagatctatgagaagataatctatgatggaaaacactacagtccggcgcagtttacagataacgccctcatagtcaatgggttttcaaagacctatgcaatgactggtctcaggatcggttacgttgccggctgtgaggatataattgaggagctcctgaaggtccaccagtacaacaccgcctgtgccccttcaatatcccagtacgcagcccttgcagccatcagggggcctcagaactgtgttaaggatatggtggatgagtttagaagaaggagggaccttatgttccgttccctcactgatatgggccttgaatgtgtcctgcccggcggggcgttctacatgttcccgtatgctggggactcagaagaattcacaaagctttcacttgaagctggagttgcagttgtcccgggatccgcctttgggaatgaagggaaaggttacatcaggatgtcctatgcaacatcctatgagcttatcgaggaggctatggaacgacttaaaactgtctgtggtgtttaa

SEQ ID NO: 145727 - protein, 374 aa, Methanothermobacter thermautotrophicus str. Delta H
MIMRKFASRVKDIQLSEIRKIFEVADEDTINLGIGEPDFSVPDHVREAVKDAVDEGLTHYTSNMGMEELREAIADKLKSENRVHAEPESIIVTVGASEAIFMCTQALLDIGDHALIPDPGFLSYDACVRLSGAVSIPVPLSMDEGFSMSPERVESLITQDTRVIIMNSPSNPTGSVMGKDDVKGIAEIAEDNDLIIISDEIYEKIIYDGKHYSPAQFTDNALIVNGFSKTYAMTGLRIGYVAGCEDIIEELLKVHQYNTACAPSISQYAALAAIRGPQNCVKDMVDEFRRRRDLMFRSLTDMGLECVLPGGAFYMFPYAGDSEEFTKLSLEAGVAVVPGSAFGNEGKGYIRMSYATSYELIEEAMERLKTVCGV

SEQ ID NO: 145728 - DNA, 1143 bp, Halobacterium sp. NRC-1
  CDS (1)..(1143): transl_table=11
atgaacttcagcaccagagtcacgagcgttgaaccgagcgcaaccctcgcggtgagcactctcgcgagcgaactggaagccgacggcgtcgacgtggtcgatctgtccgtgggcgaacccgacttcgacacgccggagagcatcgtggacgccgggaaggcggcgatggacgccggccacaccggctacgcgccgtccaacggcgtgcccgaactccgggacgcgatcgcggagaagctgcagggcgacggcctcgactacgaggcgggcaacgtcatcgtgaccccgggcgcgaagcaggcgctctacgagacgtttcaggcggtcgtcgacgagggcgacgaggtcgcgttgctggacccggcgtgggtgtcctacgaggcgatggcgaagctcgcgggcggcgagctgaaccgcgtcgacctcgcgccccacgacttccagttggagccggcactcgacgacctcgcggacgcggtctccgacgacaccgagttgctggtggtgaactccccgagcaacccgacgggtgcggtgtactcgcgggcggccatggagggcgttcgcgatctcgccgtcgaccacgacatcacggtgatctccgacgagatctaccagcgcgtcaactacggcccggcgcacgtgagcctcgcgggcctcgatggaatgttcgagcgcacggtcaccatcaacgggttctcgaaggcgtactcgatgaccgggtggcgactcggctacctcgccggccccgaggcgctcgtcgatcaggccgggaaggtgcagtcacactccgtctcgtcggccgcgaacttcatccagcgcgccggcgtcgaagccatccggcacaccgacgacgccatcgacgagatggtcgccgccttcgaatcgcggcgggacctgctcgtggacctgttcgccgagcacggcaccgacgtctcgacgcccgacggcgcgttctacctgatgctgccggtcgccgacgacgaccaggcgtggtgccaggacgcgctcaaagacgcccacgtcgcaaccgtgcccggatcggcgttcggcgcgcccggctacgcgcgactctcctacgcggcgagcaccgaccgcctcgaagcggcagtcgatcggctcgcggccgaaggctacctgtag

SEQ ID NO: 145729 - protein, 380 aa, Halobacterium sp. NRC-1
MNFSTRVTSVEPSATLAVSTLASELEADGVDVVDLSVGEPDFDTPESIVDAGKAAMDAGHTGYAPSNGVPELRDAIAEKLQGDGLDYEAGNVIVTPGAKQALYETFQAVVDEGDEVALLDPAWVSYEAMAKLAGGELNRVDLAPHDFQLEPALDDLADAVSDDTELLVVNSPSNPTGAVYSRAAMEGVRDLAVDHDITVISDEIYQRVNYGPAHVSLAGLDGMFERTVTINGFSKAYSMTGWRLGYLAGPEALVDQAGKVQSHSVSSAANFIQRAGVEAIRHTDDAIDEMVAAFESRRDLLVDLFAEHGTDVSTPDGAFYLMLPVADDDQAWCQDALKDAHVATVPGSAFGAPGYARLSYAASTDRLEAAVDRLAAEGYL

SEQ ID NO: 145730 - DNA, 1215 bp, Neisseria meningitidis Z2491
  CDS (1)..(1215): transl_table=11
atggataaatttcccaagtctgcaaagctcgatcacgtctgttacgacatacgcgggccggttcacaaaaaagcccttcagttggaagaggagggcaataaaatccttaaactcaatatcggcaaccctgcgccgttcggctttgaagcccctgatgaaatcttggtcgatgtcatccgcaacctgccgacttcgcaaggctattgcgattctaaagggctgtattccgcccgcaaagccattgttcactactatcagaccaaaggtttgcgcgatattacggttgatgatgtctatatcggcaacggcgtgtccgagctgattacgatgtctatgcaggcattgctcgacgacggcgacgaaatcctgattcccgcgcccgactaccctttgtggacggcggcggcaacgcttgcgggcggtacggtacgccattatctgtgcgacgaagaaaacggctggttccccaaccttgccgatatggaagccaaaatcacgcccaaaaccaaagccatcgtcgtcatcaatcccaataatccgacaggcgcggtgtacagcagggaaatcctgttggaaatcgccgaactggcgcgcaagcacggtttgattattttcgccgacgagatttacgataaaatcctttatgacggagcggttcaccaccacatcgccgcgcttgcccccgaccttttgacggtaacgttcaacggtttgtccaaatcctaccgcgtcgccggcttccgccaaggctggatggtgctcaacgggccgaaacatcacgcaaaaggttacatcgagggtttggatatgctctcgtccatgcgcttgtgtgccaatacgccgatgcagcacgcgattcagacggcattgggcggctatcagagcattaacgaatttatcctgccgggcgggcggcttttggaacagcgcaacagggcgtgggaactggtcagccaaatccccggcgtgtcctgcgtcaaaccgatgggcgcgatgtatatgttcccgaaaatcgataccgaaatgtaccgcatccgcgatgacatgaaattcgtttacgatttgctggtgcgcgaaaaagtcttgctggtacagggaacggggtttaattggatcaagcccgaccatttccgcattgttacgctgccttacgtccatcagattgaagaggcgatgggcaggctggcaagattcctgcaaacctaccgccaataa

SEQ ID NO: 145731 - protein, 404 aa, Neisseria meningitidis Z2491
MDKFPKSAKLDHVCYDIRGPVHKKALQLEEEGNKILKLNIGNPAPFGFEAPDEILVDVIRNLPTSQGYCDSKGLYSARKAIVHYYQTKGLRDITVDDVYIGNGVSELITMSMQALLDDGDEILIPAPDYPLWTAAATLAGGTVRHYLCDEENGWFPNLADMEAKITPKTKAIVVINPNNPTGAVYSREILLEIAELARKHGLIIFADEIYDKILYDGAVHHHIAALAPDLLTVTFNGLSKSYRVAGFRQGWMVLNGPKHHAKGYIEGLDMLSSMRLCANTPMQHAIQTALGGYQSINEFILPGGRLLEQRNRAWELVSQIPGVSCVKPMGAMYMFPKIDTEMYRIRDDMKFVYDLLVREKVLLVQGTGFNWIKPDHFRIVTLPYVHQIEEAMGRLARFLQTYRQ

SEQ ID NO: 145732 - DNA, 1218 bp, Escherichia coli O157:H7 EDL933
  CDS (1)..(1218): transl_table=11
atgtcccccattgaaaaatccagcaaattagagaatgtctgttatgacatccgtggtccggtgctgaaagaagcaaaacgcctggaagaagaaggtaacaaggtactgaaactgaacatcggcaacccagccccgttcggttttgacgcgccagatgaaatcctcgttgacgtgatacgcaacctgcctaccgctcaagggtattgcgattccaaaggtctttactccgcgcgtaaagccatcatgcagcactatcaggctcgtggcatgcgtgatgttaccgtggaagatatttacatcggcaatggtgtatcggagcttatcgttcaggcaatgcaggcattgctgaacagcggggacgaaatgttggttcctgcaccagattacccactatggaccgcggcggtttcgctttccagcggtaaagcggtgcattatctttgcgatgaatcctctgactggttcccggacctcgatgatattcgcgctaaaattacgcctcgtacgcgtgggatcgttattatcaacccaaataacccaaccggcgcggtatattccaaagagcttttaatggagattgtggagattgcacgtcagcataatctcattatcttcgccgatgaaatttatgacaaaattctctacgacgacgctgagcatcactcaattgcgccgctggcacctgacctgctgaccattacctttaatggactgtcgaaaacgtaccgcgttgcaggcttccgtcaggggtggatggtgttgaacgggccgaaaaaacacgccaaaggctacatcgaaggtctggaaatgctggcttcaatgcgcctgtgtgctaacgttcctgcgcaacacgccattcagaccgcgctgggtggttatcagagcatcagtgaatttattacccctggcggtcgtctttatgagcagcgtaaccgcgcgtgggaattgatcaacgatattccgggcgtttcctgcgtgaaaccttgtggtgcgctgtacatgttcccgaaaatcgacgccaaacgctttaacattcacgacgatcagaaaatggtgctggatttcctgttgcaggaaaaagttctgttggtgcaagggacggcattcaactggccgtggccggatcacttccgcattgtcacgctaccgcgtgtcgatgatatcgagctgtcgttgagcaagttcgcgcgtttcctttctggttatcatcagctgtaa

SEQ ID NO: 145733 - protein, 405 aa, Escherichia coli O157:H7 EDL933
MSPIEKSSKLENVCYDIRGPVLKEAKRLEEEGNKVLKLNIGNPAPFGFDAPDEILVDVIRNLPTAQGYCDSKGLYSARKAIMQHYQARGMRDVTVEDIYIGNGVSELIVQAMQALLNSGDEMLVPAPDYPLWTAAVSLSSGKAVHYLCDESSDWFPDLDDIRAKITPRTRGIVIINPNNPTGAVYSKELLMEIVEIARQHNLIIFADEIYDKILYDDAEHHSIAPLAPDLLTITFNGLSKTYRVAGFRQGWMVLNGPKKHAKGYIEGLEMLASMRLCANVPAQHAIQTALGGYQSISEFITPGGRLYEQRNRAWELINDIPGVSCVKPCGALYMFPKIDAKRFNIHDDQKMVLDFLLQEKVLLVQGTAFNWPWPDHFRIVTLPRVDDIELSLSKFARFLSGYHQL

SEQ ID NO: 145734 - DNA, 1167 bp, Deinococcus radiodurans R1
  CDS (1)..(1167): transl_table=11
atgacctctcctttccgcctctccgcccgcgcccagagcctcaagccgtctgcgacagtggcggtcacgtcccgcgccctggaactccagcgtcagggcctggacgtgatttccatgagcgtgggcgagccggatttcgacacgccgccacatgtcaaggccgccggcatcgccgccatcgaggaaggcaagaccaaatacaccccggtcagcggcattcccgaactgcgcgaggccatcagcgccaagtttcggcgcgaaaacggcctggactacgcgccgaacgccgtgacggtaacgagcggcggtaaacaggcgctgttcaacgcctttttcgcgttgctgaaccccggcgacgaggtgctgattcccgcgccccactgggtcagctaccccgaaatggtcgcgctgaccggcgcggtgccggtaaccgtacccactacgccgcagcagggctttcaactcgacccggacgccctcgccgccgccatcacgccgcgcacccgcatggtgattctcaacagccccggcaacccgacgggcgcggtgtttccgccggaaaccttgcgggcggtggccgacctcgccacgcagcacggcttgatgatcgtcaccgacgaaatctacgagcacctcgtctacgacgccgagcaggtcagcatcggcacctacgcgccggagcacaccctgaccatcaatggcgcgagcaaagcgtatgccatgaccggctggcgcatcggctacgcgggcgggccgcgcgaggtgattgccgccatgaacgcgctgcaatcgcaaagcaccagcaacgccagcagcgtcagccagtacgccgccctcgccgcgctggaacagcacgaggaaaccatgcgcttcatcgacagggcccgcaccgcctaccgcgaacggcgcgaccgcatcgtggcgggcctcaacgcgctggggttgcccacgcccacgccgcaaggggccttttacgtgatggccgacacccgcgccattcacaccgacgaactcgaagccgcccgcatcattctggatgaggcgcaggtcgccgtcgtgcccggcaccgatttcgccgcgccgggacaggtgcgcctgagctacgcgaccagcatggacaacatcgaggaagtgctgcggcggctggaaggggtcgtgcggcgctaa

SEQ ID NO: 145735 - protein, 388 aa, Deinococcus radiodurans R1
MTSPFRLSARAQSLKPSATVAVTSRALELQRQGLDVISMSVGEPDFDTPPHVKAAGIAAIEEGKTKYTPVSGIPELREAISAKFRRENGLDYAPNAVTVTSGGKQALFNAFFALLNPGDEVLIPAPHWVSYPEMVALTGAVPVTVPTTPQQGFQLDPDALAAAITPRTRMVILNSPGNPTGAVFPPETLRAVADLATQHGLMIVTDEIYEHLVYDAEQVSIGTYAPEHTLTINGASKAYAMTGWRIGYAGGPREVIAAMNALQSQSTSNASSVSQYAALAALEQHEETMRFIDRARTAYRERRDRIVAGLNALGLPTPTPQGAFYVMADTRAIHTDELEAARIILDEAQVAVVPGTDFAAPGQVRLSYATSMDNIEEVLRRLEGVVRR

SEQ ID NO: 145736 - DNA, 1278 bp, Xylella fastidiosa 9a5c
  CDS (4)..(1278): transl_table=11
gtgatgtctaatagcccgcaaacgccgcttgccacgcgccagcgattgtccgaagttcgctatgagatccgaggggagttggcgcgccgtgcgcgtgagcttgaggcggagggacgcaagcttatcaagctcaacatcggtaatccaggtgcgttcggtttccgggcgccagagcatctgcaacgtgccatcgccgatgatatgggacgtaccgatccttatacgcatcagcagggtttgccaatcgcacgtgaggcgattgctgctgcttatgtacgacgtcactatccagatgctgatgcagatcgggtctttgtggggaatggggtttctgagttaattgatttgtcgttgcgggcgttgcttaatccaggcgatgaggtgttggttccttcaccggattatccgctgtggtcggcggcgacgattctcaacgatggtcggcccgtgtattaccgttgtgcgccggagaacggtttccagcccgatgcagtcgagatcgaaacgctggtgtcttcacggacacgtgcgattgtgttgattaatccgaataatcccagtggtgccaattattcgcaggagttattggagcggattgtggcaatcgcagtgaaacatcatctgctgttgttggttgatgagatttacgatcagattttgtatgacggtgcggtgtttgttccagtggctcctttggcggggacgcatccatgtatcactttcagtgggctgagtaaggtgcatcgtgcgtgcggttggcgtgtgggttgggcgttgctgtccgggagtagcattcaaattgataatctgcgcaatgcgatggatttgctgggtgcgttgcgtttgtgtgcgaatgtcccagggcaatatgcgattgatgcggcggtcaatgggccagatacgatcactccgttatgttcgcctggtggtcctttgtacgagacgcgccgtgcggtgattgaggcctgcgtggtgagtgagcatttgtcgttggtggtgcctgctggggcgttatacgcgttcccatcggtcgtgggaccggcggcgcggcactttgatgattatgcttttgcgctggagttgatgaatgacgagggggtgctggtggtgcctggatcaagttttaatgtgccatatcgggatcacttccgcgtgacgttgcttcctgatgctgcgttgatacgtgaagtgttttctcgtattgaccgggccttgtcgcgccgtgctgaggtggctgagaaggtggtgccgctcaagtcgcgtagcgccgccgcttga

SEQ ID NO: 145737 - protein, 424 aa, Xylella fastidiosa 9a5c
MSNSPQTPLATRQRLSEVRYEIRGELARRARELEAEGRKLIKLNIGNPGAFGFRAPEHLQRAIADDMGRTDPYTHQQGLPIAREAIAAAYVRRHYPDADADRVFVGNGVSELIDLSLRALLNPGDEVLVPSPDYPLWSAATILNDGRPVYYRCAPENGFQPDAVEIETLVSSRTRAIVLINPNNPSGANYSQELLERIVAIAVKHHLLLLVDEIYDQILYDGAVFVPVAPLAGTHPCITFSGLSKVHRACGWRVGWALLSGSSIQIDNLRNAMDLLGALRLCANVPGQYAIDAAVNGPDTITPLCSPGGPLYETRRAVIEACVVSEHLSLVVPAGALYAFPSVVGPAARHFDDYAFALELMNDEGVLVVPGSSFNVPYRDHFRVTLLPDAALIREVFSRIDRALSRRAEVAEKVVPLKSRSAAA

SEQ ID NO: 145738 - DNA, 1314 bp, Mycobacterium leprae TN
  CDS (1)..(1314): transl_table=11
ttgacactatatcagcaaatttcagtggacggcagtggcaccatgagtgacgtgactactcaccagctgcccatgcacacccctggctatcaccggcaacgtgccttcgcgcagtcgtccaagcttcaggacgtcctctacgaaatccgtggcccggtgagccagcatgccacacgactagaaactgaaggacaccgcatcctcaaactgaatatcggtaacccagcgctgttcgggttcgacgcacctgacgtaattatgcgcgacatgatccaggcgctgccgtacgcgcaggggtactccgactcccagggcatcctgcctgcacgtcgcgcggtggttacccgctacgagctggtcgacgggttcccccgattcgacgtcgatgacgtctatctcggcaacggcgtctccgagctgatcacgatgacgctgcaggccctgttagacaacggcgatcaggtgctgatcccctcgccggactacccgctgtggacagcgtcgacctcgctggccggtggcacacccgtacattacctctgcgacgaaacccaaggctggcaaccagatatcgccgacgtggaatctaagatcaccgagcgcaccaaagcactggtcgtgatcaaccccaacaaccctaccggcgccgtctacagcaacgaaatccttaaccaaatagtcgacctagcacgtaagcatcagctgctgctgcttgccgacgagatctacgacaagattctctatgacgacaccaagcacatcagcgtggcctcaattgcgcctgatctactgtgcttgaccttcaacggtctttcgaaagcctaccgtgtcgccgggtaccggtccggctggctagcgatcaccgggcccaaggaccatgccagtagcttcattggggggatcaatctactggccaatatgcggttatgcccgaatgttcctgcgcagcatgcgatccaggtagccctcggtggccaccagagcatcgaagacttggtgctaccgggcggtcggctgctcgagcagcgtgacgtcgcctggaccaaactgaacgagatcccgggggtgtcatgcgtcaaacccaccggtgcactgtatgcctttccccggctagatccagaagtctatggcatcgtcgatgacgagcaactggtcctcgacctgctactacaagagaagatcctggtcacccagggcagcggattcaattggccggcaccggatcatctgcgcttggtgacgctgccgtggtctcgtgaccttgcggctgcgatcgaccggctcggtaacttcttggtcagttaccgtcaatag

SEQ ID NO: 145739 - protein, 437 aa, Mycobacterium leprae TN
MTLYQQISVDGSGTMSDVTTHQLPMHTPGYHRQRAFAQSSKLQDVLYEIRGPVSQHATRLETEGHRILKLNIGNPALFGFDAPDVIMRDMIQALPYAQGYSDSQGILPARRAVVTRYELVDGFPRFDVDDVYLGNGVSELITMTLQALLDNGDQVLIPSPDYPLWTASTSLAGGTPVHYLCDETQGWQPDIADVESKITERTKALVVINPNNPTGAVYSNEILNQIVDLARKHQLLLLADEIYDKILYDDTKHISVASIAPDLLCLTFNGLSKAYRVAGYRSGWLAITGPKDHASSFIGGINLLANMRLCPNVPAQHAIQVALGGHQSIEDLVLPGGRLLEQRDVAWTKLNEIPGVSCVKPTGALYAFPRLDPEVYGIVDDEQLVLDLLLQEKILVTQGSGFNWPAPDHLRLVTLPWSRDLAAAIDRLGNFLVSYRQ

SEQ ID NO: 145740 - DNA, 1197 bp, Clostridium acetobutylicum ATCC 824
  CDS (1)..(1197): transl_table=11
atgaatttttctaagaaagccggacaaatagcagcttccataacattagagataaccgcaaaggctgatgaaatgaaagcaaatggaataaatgtaataggatttggtgctggacagccagattttaataccccaaaaaatataagagatgcagctatatatgctatagaaaatgggtatactaaatatacacctgtttcaggaatcaaggaactaaaaatggctatatgcgataaatttaaaagagataataatttaaactattctttatctaatattatagtttcaactggagctaaacaatgcttatcagatacattttcagcattattaaatccaggtgacgaggttatattaagtgcaccatattgggtaacctatcctgaactaataaaattaaatgatggtatttctgtaattataaatactacagaagaaaatcactttaaactatcagttgatgacttagaaaatgcgtatacaagtaaaactaaagctatacttataaatagcccttcaaatccaacaggaacagtatatacagaaactgagcttaaagctatagctgagtttgcaaaagaaaaggatttattcattatctctgatgaaatatatgaaaaattaatctatgatggtgagagacatgtaagtatagctagtttaagccaggatgcttttaatagaacagttgttataaatggtatgtctaagtcctacgctatgacaggatggagattaggctatgctgcttcaggatcatctgaatttataaaactaatgtcccatatacaagctcatactacatcaaatgcaaattctataactcaatatgcaagcgtagaggcgttaaatggacgccaagaagaattacattcaatggtaactgaatttgaaaaaagaagaacttatatgtctaaaagagttaacaacataactggaatacactgcttgttgccaaagggcgctttttacgtgatgatgaatataagcaatctttttgggaaagaaataaatggagtaaaaataaataattctgtagatttttcaaaagaacttcttagcgaaaataaagttgctgtggttcctggtacaggttttgggaatgacaactatgtaagattatcctatgcaacatcaatggacaatatagttaaaggacttgatgaaatagagaacttcataggaaaattacgctaa

SEQ ID NO: 145741 - protein, 398 aa, Clostridium acetobutylicum ATCC 824
MNFSKKAGQIAASITLEITAKADEMKANGINVIGFGAGQPDFNTPKNIRDAAIYAIENGYTKYTPVSGIKELKMAICDKFKRDNNLNYSLSNIIVSTGAKQCLSDTFSALLNPGDEVILSAPYWVTYPELIKLNDGISVIINTTEENHFKLSVDDLENAYTSKTKAILINSPSNPTGTVYTETELKAIAEFAKEKDLFIISDEIYEKLIYDGERHVSIASLSQDAFNRTVVINGMSKSYAMTGWRLGYAASGSSEFIKLMSHIQAHTTSNANSITQYASVEALNGRQEELHSMVTEFEKRRTYMSKRVNNITGIHCLLPKGAFYVMMNISNLFGKEINGVKINNSVDFSKELLSENKVAVVPGTGFGNDNYVRLSYATSMDNIVKGLDEIENFIGKLR

SEQ ID NO: 145742 - DNA, 1215 bp, Streptococcus pneumoniae R6
  CDS (1)..(1215): transl_table=11
atgaaagaatataacaagtctagtaagttagagcatgttgcttatgatatccgtggtcctgtattggaagaagccatgcggatgcgagcgaatggagaaaagattttacgtctgaatacaggaaatccagcagaatttggctttacagcgccagacgaggtcattcatgacttgattatgaatgcgcgtgatagtgaaggctattctgactccaaaggaattttctcagcccgtaaggccatcatgcagtattgccagctgaagaaattcccaaacgtagatattgatgatatttaccttggaaatggtgtcagtgagttgattgtcatgtccatgcaggggcttttggacaatggggatgaggtcttagtgccaatgccagactatcctctatggacggcggctgtcagcctagctggaggaaatgccgttcactatatctgtgatgaagctgttgaatggtacccagatattgacgatatcaagtcaaaaatcacttccaataccaaggcaatcgtccttatcaatccaaataacccaactggagccctttatcctaaggaactcttgctggagattattgagattgcccgtcaaaatgatttgattatctttgcggatgaaatctatgaccgcatggtaatggacggacatgtgcatacgcctgtggcgagcttggcaccagatgtcttctgtgtcagcatgaatggtctgtcaaaatcccaccgcatagcaggtttccgtgtgggttggatggtcttgtctggccctaagactcatgttaagggctatatcgaagggctcaatatgctgtccaatatgcgcctttgctctaacgttttggcccaacaagtcgtacaaacttccttggggggtcaccaatcagtcgatgaattgcttcttcctggtggacgaatctacgagcaaagaaatttcatctataatgccattcaagatattccaggtttgtctgccgttaaacccaaggcggggctctatatcttcccaaaaatcgaccgcaatatgtaccgtatcgatgatgatgagcagtttgtccttgatttcttgaagcaggaaaaggttctcttggttcatggtcgaggctttaactggcaggaaccagaccacttccgtatcgtttaccttcctcgtgttgatgagttagcccaaatccaagaaaagatgactcgtttcttgaaacagtatcgtagatag

SEQ ID NO: 145743 - protein, 404 aa, Streptococcus pneumoniae R6
MKEYNKSSKLEHVAYDIRGPVLEEAMRMRANGEKILRLNTGNPAEFGFTAPDEVIHDLIMNARDSEGYSDSKGIFSARKAIMQYCQLKKFPNVDIDDIYLGNGVSELIVMSMQGLLDNGDEVLVPMPDYPLWTAAVSLAGGNAVHYICDEAVEWYPDIDDIKSKITSNTKAIVLINPNNPTGALYPKELLLEIIEIARQNDLIIFADEIYDRMVMDGHVHTPVASLAPDVFCVSMNGLSKSHRIAGFRVGWMVLSGPKTHVKGYIEGLNMLSNMRLCSNVLAQQVVQTSLGGHQSVDELLLPGGRIYEQRNFIYNAIQDIPGLSAVKPKAGLYIFPKIDRNMYRIDDDEQFVLDFLKQEKVLLVHGRGFNWQEPDHFRIVYLPRVDELAQIQEKMTRFLKQYRR

SEQ ID NO: 145744 - DNA, 1161 bp, Bacillus subtilis subsp. subtilis str. 168
  CDS (1)..(1161): transl_table=11
atgacttcgtatttatcagactatgtacaacaaataaaaccatccggcatccgcaaattctttgatttggcggcaacgatggaaggcgtcatttctttaggcgtcggcgagcctgattttgttaccgcatggaatgtccgcgaagcaagcattctctctcttgaacaaggatatacgtcatacacggccaatgcgggtttatactcattgcgggaggaaatcagccgttatttgagcaacaggtttgaccttagctactcgccagataatgagctgattgtgacagtgggggcaagtcaggctttggatattgcgatccgcgccattgtgaatccaggtgaggaagtcatcattcctgagccgtgttttgttgcgtacgatgcgcttgtttctttggcaggcggtatcccggttcacgttcatacaacggcagacaaaggatttaaagcaacggctgctgattttgaagcggcagtcactgaaaaaacaaaggccattctcatctgctcaccatcgaatccgacaggttcggtttattcgaaggaagagctgaatgagattgctgagtttgccaaaaaacatgatgtcatcgtcttagccgacgagatctacgcggagctgacatatgatgaggaatttacaagtatagcggcattaccgggaatgaaggaacggacggtagtcatctcaggcttttcaaaagcatttgcaatgacgggctggaggctcggttttgccgcggcaccatccttgcttcgggatgccatgcttaaaattcatcagtatgcgatgatgtgcgcgcccgcaatggcgcagtttgccgcccttgaaggcctgaagaacggcatggaagacgtagaaaaaatgaaaaaaagctatcgaagaagacggaatctgtttgtagaatcgctcaatgaaatcggtctcagctgtcatcatccgggcggcgctttctatgcttttccatctatcaaaagcatgggaatgagttcagaacagtttgccgaggagctactgacgcaggaaaaagtggcagttgttcctggaagtgtgtttggtccgagcggtgagggatatatccgttgttcatacgcaacctcgattgaacagcttcaagaagcgttagtcagaatgaaacgcttcctgcacaaaacaacataa

SEQ ID NO: 145745 - protein, 386 aa, Bacillus subtilis subsp. subtilis str. 168
MTSYLSDYVQQIKPSGIRKFFDLAATMEGVISLGVGEPDFVTAWNVREASILSLEQGYTSYTANAGLYSLREEISRYLSNRFDLSYSPDNELIVTVGASQALDIAIRAIVNPGEEVIIPEPCFVAYDALVSLAGGIPVHVHTTADKGFKATAADFEAAVTEKTKAILICSPSNPTGSVYSKEELNEIAEFAKKHDVIVLADEIYAELTYDEEFTSIAALPGMKERTVVISGFSKAFAMTGWRLGFAAAPSLLRDAMLKIHQYAMMCAPAMAQFAALEGLKNGMEDVEKMKKSYRRRRNLFVESLNEIGLSCHHPGGAFYAFPSIKSMGMSSEQFAEELLTQEKVAVVPGSVFGPSGEGYIRCSYATSIEQLQEALVRMKRFLHKTT

SEQ ID NO: 145746 - DNA, 1149 bp, Thermoplasma acidophilum DSM 1728
  CDS (1)..(1149): transl_table=11
atgctctccgaaaggatgcagtacataaacgagtcagctacggtatcggcatcaaacaacgttgaaaagctcagaaaacagggcctgaagatatataattttggcattggtgaacctgatttcacaacgccggaagggatcatagattacgcctttgagatggcgaaacagggaaagacccattatactccctctgctggaattatggaactccgcgagaaaattgcatctaagctgaagacaagaaatcgcatagatgcaaatgcggaaaacgtgctcgtcacgccgacgaagttcggcataaacctcgcaatgatggtcatactgaatcctggtgatgaggtcatcataccggatccatactacgtatcatatcccgatatagttaaacttgcaggaggtaagcctgtacctgtgcgaaccaccgacgattacgatattgatctggatgagatgagaaaattcgtgacaccaaggacaagggccataattctcaataatccaaataacccaaccggtaaggttctatcggagaaagagataagagacctcgtagatttcgcattggaaaatgatatttacatagtatcagatgaaatatatgaggatctaatatacgagggaagcctgtattcgccagcttctatgggaaaggaggcatttgaacacaccataacgctgaatggcttttcaaaaggatatgccatgaccggatggcgcatagggtatttcgtggctactgaggagatcgttgaagccgcaaacatcatacagcagcagacaataacatgtgcttcatctatatcgcagtatgcggctctcagagcgcttgatgacaatgaaagtccagctaggatgagatccgaattcaggaaacgcagagaccttgcatacggcatactttctgagagcacggatatgaaggtgcacaagccagaaggcgcattctacatgtttcctgggtacagcaaggatataccctccgaaaagatcgctgagatgctgctgaaccaggagcatgttgtcgttaccccaggaagcgcctttggcgatcgtggccgacaccatttcaggatatcatttgcgacctcggaagacattatcaaagagggacttgaaaggctggtcaaatttatgcacacattatga

SEQ ID NO: 145747 - protein, 382 aa, Thermoplasma acidophilum DSM 1728
MLSERMQYINESATVSASNNVEKLRKQGLKIYNFGIGEPDFTTPEGIIDYAFEMAKQGKTHYTPSAGIMELREKIASKLKTRNRIDANAENVLVTPTKFGINLAMMVILNPGDEVIIPDPYYVSYPDIVKLAGGKPVPVRTTDDYDIDLDEMRKFVTPRTRAIILNNPNNPTGKVLSEKEIRDLVDFALENDIYIVSDEIYEDLIYEGSLYSPASMGKEAFEHTITLNGFSKGYAMTGWRIGYFVATEEIVEAANIIQQQTITCASSISQYAALRALDDNESPARMRSEFRKRRDLAYGILSESTDMKVHKPEGAFYMFPGYSKDIPSEKIAEMLLNQEHVVVTPGSAFGDRGRHHFRISFATSEDIIKEGLERLVKFMHTL

SEQ ID NO: 145748 - DNA, 1203 bp, Caulobacter crescentus CB15
  CDS (1)..(1203): transl_table=11
atgtcgctcgagtccgccgccctgcggcgtatcgcaccgtcggccaccatcgccatcagcgccaaggcgcgcgcgctgaaagccgccggccgtgacgtgatcgccctgtctgcgggcgagccggacttcgacacgcccgacaatatcaagaacgccgccatcgaagcgatcaaggcgggcaagaccaagtacaccgacccggacggcatgcccgagctgaaggccgccatctgcgccaagttcaagcgcgagaacggcctggagtacaagcccagccagatccacgtcgccccgggcggcaagccggtgatctacaacgccctggtcgccaccctgaacccgggcgacgaggtgatcatccccgcgccgtactgggtgtcgtaccccgacatgaccctgctggccggcggcacgcccgtttcggtcgagaccaccgccgaaagcggcttcaagatcacgccggaagccctcgaggcggcgatcacgccgaagaccaagtggctgatcatcaacagcccctcgaacccgtcgggcggcgcctatagccgcgccgagctgcaggcgatcgccgatgtgctgctgcgccatccgcaggtctgggtgctgaccgacgacatgtacgagcacctggtgttcgacgacttcgagttcaccaccatcgcccaggtcgagcccaagctctatgaccgcaccctgacgatgaacggggtgtcgaagggctattcgatgaccggctggcgcatcggctatgctgcaggtcccgagccgctgatcaaggccatgggcaagatgatcagccagacgacctccaacccctgctcgatctcgcagtgggccgcgctggaggcgctgaacggcacgcaggacttcatcaagccgaacgccaagctgttccaggaacgccgcgacctcgttgtgtcgatgctgaaccaggccaccggcctgcactgcccgaccccggaaggcgccttctacgtctatccctcgtgcgccggcctgatcggcaagaccgccccctcgggcaaggtcatcgagagcgacgaggacttcgccaccgaactgctggagagcgaaggcgtggccgtcgtgcacggcgcggcctttggcctctcgccgttcttccgcatcagctacgccaccagcaacgaggtgctggaagacgcctgctcgcgcatccagcgcttctgcgccagcgtgaagtga

SEQ ID NO: 145749 - protein, 400 aa, Caulobacter crescentus CB15
MSLESAALRRIAPSATIAISAKARALKAAGRDVIALSAGEPDFDTPDNIKNAAIEAIKAGKTKYTDPDGMPELKAAICAKFKRENGLEYKPSQIHVAPGGKPVIYNALVATLNPGDEVIIPAPYWVSYPDMTLLAGGTPVSVETTAESGFKITPEALEAAITPKTKWLIINSPSNPSGGAYSRAELQAIADVLLRHPQVWVLTDDMYEHLVFDDFEFTTIAQVEPKLYDRTLTMNGVSKGYSMTGWRIGYAAGPEPLIKAMGKMISQTTSNPCSISQWAALEALNGTQDFIKPNAKLFQERRDLVVSMLNQATGLHCPTPEGAFYVYPSCAGLIGKTAPSGKVIESDEDFATELLESEGVAVVHGAAFGLSPFFRISYATSNEVLEDACSRIQRFCASVK

SEQ ID NO: 145750 - DNA, 1215 bp, Salmonella typhimurium LT2
  CDS (1)..(1215): transl_table=11
atgtcccccattgaaaaatccagcaaactcgaaaatgtctgttatgacattcgtggccccgttctgaaagaagcgaaacgccttgaggaagaaggtaataaagttcttaaactgaatatcggcaaccccgcccccttcggattcgaagcgccggacgaaattctggtcgatgtcattcgtaatttgccgacggcgcaaggatattgcgactcgaaagggctttattccgcccgtaaagcgattatgcagcattatcaggcccgtggaatgcgcgatgtaaccgtggaagatatctatatcggtaacggcgtttccgagctgatcgttcaggcgatgcaggcgttgcttaacagtggcgatgaaatgctggttcccgcgcccgattatccgttatggacagcggcggtatcgctctccagcggcaaggcggtacattatctttgcgatgaatcttccgactggttcccggaccttgacgatatccgcgccaaaatcaccccacgtacgcgtggtattgtcattattaatccaaacaaccctactggcgccgtctattctaaagaattgttgatggaaattgtcaacattgcgcgcgagcataatctcatcatcttcgccgatgaaatttatgacaagattctctatgacgatgccgagcatcactctatcgccgcactggcgcctgatctgctgaccatcacctttaatgggttgtctaaaacctatcgcgtcgccggcttccgccagggctggatggtgctgaacgggccgaaaaaacatgcgaaaggctatattgaagggctggagatgttagcctcaatgcgcctgtgcgccaacgtcccggcgcaacatgctattcagaccgcgctcggcggctatcaaagcattagtgaatttattctgccgggcggtcgactgtatgaacagcgtaaccgcgcctgggagttgattaacgatattcccggcgtttcctgcgtaaaaccgcgcggcgcgttgtacatgttccccaggatcgacgctaaacgttttaatattcacgacgaccagaagatggtgctggacttcctgctacaggaaaaggtgctgctggtgcaaggtaccgcctttaactggccgtggccagatcacttccgcattgtgacgctaccgcgtgaagatgacctggagatggccatcaaccgttttgggcgtttcctctcaggttaccatcaataa

SEQ ID NO: 145751 - protein, 404 aa, Salmonella typhimurium LT2
MSPIEKSSKLENVCYDIRGPVLKEAKRLEEEGNKVLKLNIGNPAPFGFEAPDEILVDVIRNLPTAQGYCDSKGLYSARKAIMQHYQARGMRDVTVEDIYIGNGVSELIVQAMQALLNSGDEMLVPAPDYPLWTAAVSLSSGKAVHYLCDESSDWFPDLDDIRAKITPRTRGIVIINPNNPTGAVYSKELLMEIVNIAREHNLIIFADEIYDKILYDDAEHHSIAALAPDLLTITFNGLSKTYRVAGFRQGWMVLNGPKKHAKGYIEGLEMLASMRLCANVPAQHAIQTALGGYQSISEFILPGGRLYEQRNRAWELINDIPGVSCVKPRGALYMFPRIDAKRFNIHDDQKMVLDFLLQEKVLLVQGTAFNWPWPDHFRIVTLPREDDLEMAINRFGRFLSGYHQ

SEQ ID NO: 145752 - DNA, 1182 bp, Listeria monocytogenes EGD-e
  CDS (1)..(1182): transl_table=11
atggacttaccgttatcaaaacgtgtcaaaggagtagccccgtcgcctacacttgcgattacggctaaagcaaaacaaatgaaacaagaaggaattgatgtcatcggtttaggtgctggggaaccagatttcaatacgccacagaatattatcgatgcagcaatagagtccatgaataaaggattcaccaaatatactccttctagtggaatcatcgagctcaaacaagcaattgtcgacaagctcaaaaaagatcagttcttaaactacgaaacaaaccaaattttcgtaggaacaggagctaaacatgttctctactctgcgtttcaaacgattttagatccaggcgatgaagtcattattccagtcccgtattgggtaacttatcccgaacaagtcaaattagcaggtggtattcctgtctttgtagaaactggttttgacgcagattttaaaatttcagcagcagattttgaaaaagctattacgaaaaaaacaaaagcaatcgttttaaattcaccaaataatccttctggtatgtgttatacaaaagaggagcttattgctattggcgaagttgctgaaaaacatcaaatttatattttatctgatgaaatatatgaaaaattatactatggaaataaagctgatttagtttctattgcgagtttaagtgaccgtttatatgacttaaccattgttataaacggtgtgtctaaagcatattcgatgacgggctggcgcattggttacgcagccgcaaataaagaaatcattgctggaatgagcaagctggcggaccatttaacaagtaatccgacagctaatgcccagtatgctgcacttgaagcgtatgtaggtagtcaagaagttccagaaaaaatgtaccaagcttttgaagaacgaatggaacgcttttatccagaattaaacagtattccaggatttaaaccgaaaaaaccagatggcgccttttatttctttattgaagtaaaagaagcggcacataaaaaaggttttcaggatgtagatgcttttgtagcagctcttttagaagaagcgaaagtcgcagttattccaggctcaggattcggaatgcccgattatatacgcctttcttatgcaacaaatccagacttattccaagaagctataaatcgaatcaaaagttttatgaaatag

SEQ ID NO: 145753 - protein, 393 aa, Listeria monocytogenes EGD-e
MDLPLSKRVKGVAPSPTLAITAKAKQMKQEGIDVIGLGAGEPDFNTPQNIIDAAIESMNKGFTKYTPSSGIIELKQAIVDKLKKDQFLNYETNQIFVGTGAKHVLYSAFQTILDPGDEVIIPVPYWVTYPEQVKLAGGIPVFVETGFDADFKISAADFEKAITKKTKAIVLNSPNNPSGMCYTKEELIAIGEVAEKHQIYILSDEIYEKLYYGNKADLVSIASLSDRLYDLTIVINGVSKAYSMTGWRIGYAAANKEIIAGMSKLADHLTSNPTANAQYAALEAYVGSQEVPEKMYQAFEERMERFYPELNSIPGFKPKKPDGAFYFFIEVKEAAHKKGFQDVDAFVAALLEEAKVAVIPGSGFGMPDYIRLSYATNPDLFQEAINRIKSFMK

SEQ ID NO: 145754 - DNA, 1167 bp, Nostoc sp. PCC 7120
  CDS (1)..(1167): transl_table=11
atgaaactggcagcaagagtaagtcaggtaacaccttcgataaccttagcgatcgcagcgaaagctaaggcgatgaaggcagagggtatagacgtttgtagttttagcgctggtgaacccgattttgataccccagcgcatatcaaagcagcagccgccaaggctttggatgaaggcaaaaccaagtatggtgcagcagctggagaaccaaagttaagggaagcgatcgcccgcaagttgcaaaaggataatcatctggattacaaaccagagaatgtcattgtcactaatggcggtaagcattcgctttacaacttgattgtggcgctgattgatccaggtgatgaggtgattatcccggctccctattggttgagttatcccgaaatggtgactctggtaggtgggaaatcggtaattgtccccacagatgcttccactggttataaaatcacccccgaacaactgcgaaaagctattacccccaaaaccaagctatttgtcctcaactccccatctaaccccacagggatggtgtacacaccagaggaaatcaaagctttggctcaggtagtagttgatgcagatatctatgttgtgtctgatgagatttacgaaaaaattctctacgatggcgcacagcatatcagcatcggttcgctagggaaggaaatttttaaccgcacgttgattagtaatggctttgcgaaagcttattctatgacggggtggcgtttgggctatctagccgggccagtggacattatcaaggctgctagttccattcaagggcatagtacatcaaatgtatgtacctttgctcaatatggagcgatcgctgctttggaagattcccaagattgtgtggaagaaatgcgccaagccttcgctaaacgtcgtcaggtaatgctagatcgactcaacgccatccccggcttgagtactgcaaaaccagacggtgcattttatctgtttccagatatcagcaaaactggcttgaaatccctcgaattttgtgatgctttaattgaagaacacaaggttgcagtaattccagggatagcttttggtgctgatgacaacatccgcctttcctacgctactgatttggcaacaattgagaaaggtttggatcggttagagaagtttgtccgttctcgcatttag

SEQ ID NO: 145755 - protein, 388 aa, Nostoc sp. PCC 7120
MKLAARVSQVTPSITLAIAAKAKAMKAEGIDVCSFSAGEPDFDTPAHIKAAAAKALDEGKTKYGAAAGEPKLREAIARKLQKDNHLDYKPENVIVTNGGKHSLYNLIVALIDPGDEVIIPAPYWLSYPEMVTLVGGKSVIVPTDASTGYKITPEQLRKAITPKTKLFVLNSPSNPTGMVYTPEEIKALAQVVVDADIYVVSDEIYEKILYDGAQHISIGSLGKEIFNRTLISNGFAKAYSMTGWRLGYLAGPVDIIKAASSIQGHSTSNVCTFAQYGAIAALEDSQDCVEEMRQAFAKRRQVMLDRLNAIPGLSTAKPDGAFYLFPDISKTGLKSLEFCDALIEEHKVAVIPGIAFGADDNIRLSYATDLATIEKGLDRLEKFVRSRI

SEQ ID NO: 145756 - DNA, 1623 bp, Arabidopsis thaliana
  CDS (1)..(1623)
atgcggagattcttgattaaccaagctaaaggtctcgtcgaccattctcgtcgtcaacatcaccacaaaagtccaagctttctctctcctcaacctcgtccccttgcttcttctcctcctgctctgtctcgtttcttctcttctacttcggagatgtctgcttctgattccacttcttctcttcccgttactcttgactccatcaatcccaaggttctgaaatgtgagtatgctgttcgaggagaaattgtcaacattgctcagaagttacaagaagacttgaagactaataaggatgcttatccctttgatgagataatctattgcaacattgggaatcctcaatctcttggtcagctgcctataaagttcttccgtgaggttctcgcattgtgtgaccacgcaagtcttttggatgagtctgaaacccatggtttgttcagtaccgattcaattgaccgagcatggaggattttggaccatattcccggaagagcaactggggcttacagtcatagccagggtatcaagggtttacgtgatgtaattgcagctggaatcgaagcacgtgatggtttccctgctgatccaaatgatattttcttgactgatggtgcaagtccagcggttcacatgatgatgcaacttctcttgagctcagagaaagatggtattctttccccgattcctcagtatccattgtactcggcttcaattgcccttcatggtggatctttggttccgtactatcttgatgaagcaacaggatggggactggaaatatctgaccttaagaagcaactagaggaagctaggtccaagggcatctctgtaagggccttggttgtcataaaccccggtaacccaactgggcaggttcttgcggaagaaaaccagcgtgacattgttaatttctgcaagcaagagggtttggttcttttagctgatgaagtctaccaagaaaatgtttacgtccctgacaaaaagttccattctttcaagaaagtggctcggtctttgggctatggagaaaaagatatctcgttagtctcgttccaatcagtctccaaaggatattatggagaatgtggaaaaagaggaggttacatggaggttactggattcacttctgatgtaagagaacagatatacaaaatggcttctgtgaatctttgttctaacatctctggtcaaattcttgctagccttgtcatgagcccacccaagcctggtgatgactcatatgactcatacatggcagaaagagatggaattctctcatccatggctaaacgtgcaaagactttggaagacgctctcaacagtttagaaggtgttacatgtaacagagccgaaggagcaatgtatctcttcccgcgaattaaccttcctcaaaaggctatcgaagctgctgaggctgaaaaaactgcaccagatgcgttctactgcaaacgccttctcaatgctactggtgtagttgtagtccctggttctggctttggacaggttcctggaacatggcactttagatgcacaatacttccacaagaagacaagattccagcgatagtgaatcgtctgacagagttccacaagagcttcatggacgagttccgcaactaa

SEQ ID NO: 145757 - protein, 540 aa, Arabidopsis thaliana
MRRFLINQAKGLVDHSRRQHHHKSPSFLSPQPRPLASSPPALSRFFSSTSEMSASDSTSSLPVTLDSINPKVLKCEYAVRGEIVNIAQKLQEDLKTNKDAYPFDEIIYCNIGNPQSLGQLPIKFFREVLALCDHASLLDESETHGLFSTDSIDRAWRILDHIPGRATGAYSHSQGIKGLRDVIAAGIEARDGFPADPNDIFLTDGASPAVHMMMQLLLSSEKDGILSPIPQYPLYSASIALHGGSLVPYYLDEATGWGLEISDLKKQLEEARSKGISVRALVVINPGNPTGQVLAEENQRDIVNFCKQEGLVLLADEVYQENVYVPDKKFHSFKKVARSLGYGEKDISLVSFQSVSKGYYGECGKRGGYMEVTGFTSDVREQIYKMASVNLCSNISGQILASLVMSPPKPGDDSYDSYMAERDGILSSMAKRAKTLEDALNSLEGVTCNRAEGAMYLFPRINLPQKAIEAAEAEKTAPDAFYCKRLLNATGVVVVPGSGFGQVPGTWHFRCTILPQEDKIPAIVNRLTEFHKSFMDEFRN

SEQ ID NO: 145758 - DNA, 1506 bp, Drosophila melanogaster
  CDS (1)..(1506)
atgcccagcagttttgccaacgagagtcagttccgataccagagcagccgcaatcgtgccagctgcacaagccggagtcccagcgagccggaatccccggcgccggtgacgcccaattgcgatgtagtcgatcaggcgctggccgagctgcagctccaatcgcaggacatacgcaagcaacaggacctggtggacaccacagccacgagcagcagcagccgaaagcgttccggatgggagataaagggctccaagctatcccttaacacgcacaatcgcattcggaacattgtcgagtcgctaaagatcaaaccgaatccggagaagcccatgataccgctgtccattggtgatcccacaacctttggcaatctaaaagccgccgatgagacaatgaaggcggtgctgcattccctggagagcggcaagtacaatgggtatgccagcacccagggtcacgagatagcccgcaaagcggtggccaaatacagtgcccaccagcgtcccgacggagagatcgatgccaacgaggtggtgctgtgcagcggctgctcctccgccttggagtactgcatcctggcgctggcggatcgtggtcagaatgttctggtgccgcgaccgggtttctgtttgtactatacgctggcccagggcttggatatcgaggtgcgctactacgatcttctgcccgatcagcagtggcgcgccgatctcgttcagctagagagcctgatcgatgagaacaccgccgcccttttgatcaacaatccgagcaatccctgtggcagcgtcttcgatgagaagcatctgcgcgagttgatagccatctgcgaacgccactatctgcccatcattgccgatgagatctatgagcactttgtgttccccggctccaagcacttggccgtgagcagcctgaccacggaggttccagttctctcctgtggcgggttgaccaaacgcttcctggttcccggttggcgaatgggttggatcatagtgcacgatcgcaagaatcgtttgcgcgatgccattgtcggtctaaagaacatgtgtggtcgcattctgggctccaataccatcattcagggtgccctgcccgatatcctgaccaagacaccgcagtcttattttgacggcgtgattgatgtgctccactcgaatgccatgctggcctacaagatgctgaaacaggtgcgtggcctcgatcccgtaatgcccaatggagccatgtacatgatgataggcgtgagcatcgaacgcttcccggaattcaaggacgacacccactttgtccaggagatggtgaatgagcagagtgtcttctgtctgccgggcagctgctttgagtacccgggatacgtgcggatcgtacttactgtgcccggggcaatgatcgaggaggcgtgctccaggattgccgagttctgcgatcgccactacaaaaaggagtcgcgcaatttcattgagcacggactgctcgactgcgatgatgtggccttttga

SEQ ID NO: 145759 - protein, 501 aa, Drosophila melanogaster
MPSSFANESQFRYQSSRNRASCTSRSPSEPESPAPVTPNCDVVDQALAELQLQSQDIRKQQDLVDTTATSSSSRKRSGWEIKGSKLSLNTHNRIRNIVESLKIKPNPEKPMIPLSIGDPTTFGNLKAADETMKAVLHSLESGKYNGYASTQGHEIARKAVAKYSAHQRPDGEIDANEVVLCSGCSSALEYCILALADRGQNVLVPRPGFCLYYTLAQGLDIEVRYYDLLPDQQWRADLVQLESLIDENTAALLINNPSNPCGSVFDEKHLRELIAICERHYLPIIADEIYEHFVFPGSKHLAVSSLTTEVPVLSCGGLTKRFLVPGWRMGWIIVHDRKNRLRDAIVGLKNMCGRILGSNTIIQGALPDILTKTPQSYFDGVIDVLHSNAMLAYKMLKQVRGLDPVMPNGAMYMMIGVSIERFPEFKDDTHFVQEMVNEQSVFCLPGSCFEYPGYVRIVLTVPGAMIEEACSRIAEFCDRHYKKESRNFIEHGLLDCDDVAF

SEQ ID NO: 145760 - DNA, 1197 bp, Pyrococcus furiosus DSM 3638
  CDS (1)..(1197): transl_table=11
atgataagggcctcaaagagagctctctctgtggagtatgctattagagatgtcgttctacctgcaagggaacttgaaaaaaagggaatcaaggtaattaggctaaacataggcgatcctgtaaagttcgactttcaaccacccgagcacatgaaggaagcatattgtaaagcaattaaagaggggcacaattactatggagatagtgagggattacccgagttaagaaaagctatagtagaaagggaaaagaggaagaatggagtggacataactcccgatgacgtgagggttacagctgcagtcactgaagctctccagctaatttttggagctctattagacccaggagatgaaattctagttcctgggcccagttatcctccctatacagggcttgtaaagttctacggtggaaagcctgtggaatatagaactattgaagaggaagactggcaacctgatattgacgacattaggaagaagataacagacagaacaaaagctatagcagttataaaccccaacaacccgactggagcgctctacgacaaaaagacacttgaggaaatcttgaacatcgcaggggaatatgaaattcctgttataagcgacgagatatacgatttgatgacatacgagggagaacacatttctcccggatcattaaccaaagatgttcctgtaatagttatgaacggattatccaaagtctactttgccacagggtggagacttggatacatgtactttgtcgatccagagaataaattgagtgaggtcagagaggcaatagatagattggcaaggattagactgtgtccaaatacccccgcacaattcgcagctatagcaggactaacgggcccaatggattatctcaaagaatacatgaaaaagctcaaggagagaagagattacatctacaagaggctaaatgagatcccaggaataagcacgacaaaaccacaaggagcattttacatattccccaagatagaggtgggaccgtggaagaatgataaagaattcgttcttgacgttctccacaatgctcacgttctatttgttcacggttcaggatttggagagtatggtgcaggccactttagagcagtgttcttgcctccaatagaaatcctggaagaggctatggatagattcgaaaagttcatgaaagaaagactgaaagaatga

SEQ ID NO: 145761 - protein, 398 aa, Pyrococcus furiosus DSM 3638
MIRASKRALSVEYAIRDVVLPARELEKKGIKVIRLNIGDPVKFDFQPPEHMKEAYCKAIKEGHNYYGDSEGLPELRKAIVEREKRKNGVDITPDDVRVTAAVTEALQLIFGALLDPGDEILVPGPSYPPYTGLVKFYGGKPVEYRTIEEEDWQPDIDDIRKKITDRTKAIAVINPNNPTGALYDKKTLEEILNIAGEYEIPVISDEIYDLMTYEGEHISPGSLTKDVPVIVMNGLSKVYFATGWRLGYMYFVDPENKLSEVREAIDRLARIRLCPNTPAQFAAIAGLTGPMDYLKEYMKKLKERRDYIYKRLNEIPGISTTKPQGAFYIFPKIEVGPWKNDKEFVLDVLHNAHVLFVHGSGFGEYGAGHFRAVFLPPIEILEEAMDRFEKFMKERLKE

SEQ ID NO: 145762 - DNA, 1314 bp, Corynebacterium glutamicum ATCC 13032
  CDS (1)..(1314): transl_table=11
atgactacagacaagcgcaaaacctctaagaccaccgacaccgccaacaaggctgtgggcgcggatcaggcagcgcgtcccactcggcgaacaactcgccgcatcttcgatcagtcggagaagatgaaggacgtgctgtacgagatccgtggcccggtggccgcggaggcggaacgcatggagcttgatgggcataacatcttaaagctcaacacgggaaatccagccgtgttcggattcgatgcccccgacgtgattatgcgtgacatgatcgccaaccttccaacttcccaagggtattccacctccaaaggcattattccggcccggcgagcagtggtcacccgctacgaagttgtgcccggattcccccacttcgatgttgatgatgtgttcttaggcaacggtgtctcagaactaatcaccatgaccacccaagcactcctcaacgacggcgatgaagttcttatccccgcaccggactacccactgtggactgccgcaacctccctggctggtggtaagcctgtgcactacctctgtgatgaggaagatgactggaacccatccatcgaagacatcaagtccaaaatctcagagaaaaccaaagctattgtggtgatcaaccccaacaaccccacgggagctgtctacccgcgccgggtgttggaacaaatcgtcgagattgcacgcgagcatgacctgctgattttggccgatgaaatctacgaccgcattctctacgatgatgccgagcacatcagcctggcaacccttgcaccagatctcctttgcatcacatacaacggtctatccaaggcataccgcgtcgcaggataccgagctggctggatggtattgactggaccaaagcaatacgcacgtggatttattgagggcctcgaactcctcgcaggcactcgactctgcccaaatgtcccagctcagcacgctattcaggtagctctcggtggacgccagtccatctacgacctcactggcgaacacggccgactcctggaacagcgcaacatggcatggacgaaactcaacgaaatcccaggtgtcagctgtgtgaaaccaatgggagctctatacgcgttccccaagctcgaccccaacgtgtacgaaatccacgacgacacccaactcatgctggatcttctccgtgccgagaaaatcctcatggttcagggcactggcttcaactggccacatcacgatcacttccgagtggtcaccctgccatgggcatcccagttggaaaacgcaattgagcgcctgggtaacttcctgtccacttacaagcagtag

SEQ ID NO: 145763 - protein, 437 aa, Corynebacterium glutamicum ATCC 13032
MTTDKRKTSKTTDTANKAVGADQAARPTRRTTRRIFDQSEKMKDVLYEIRGPVAAEAERMELDGHNILKLNTGNPAVFGFDAPDVIMRDMIANLPTSQGYSTSKGIIPARRAVVTRYEVVPGFPHFDVDDVFLGNGVSELITMTTQALLNDGDEVLIPAPDYPLWTAATSLAGGKPVHYLCDEEDDWNPSIEDIKSKISEKTKAIVVINPNNPTGAVYPRRVLEQIVEIAREHDLLILADEIYDRILYDDAEHISLATLAPDLLCITYNGLSKAYRVAGYRAGWMVLTGPKQYARGFIEGLELLAGTRLCPNVPAQHAIQVALGGRQSIYDLTGEHGRLLEQRNMAWTKLNEIPGVSCVKPMGALYAFPKLDPNVYEIHDDTQLMLDLLRAEKILMVQGTGFNWPHHDHFRVVTLPWASQLENAIERLGNFLSTYKQ

SEQ ID NO: 145764 - DNA, 1215 bp, Streptococcus pyogenes MGAS8232
  CDS (1)..(1215): transl_table=11
atgaaaattattgaaaaatcatcaaaattagaacatgttgcctatgatattcgagggcctgttttggatgaagctaatcgcatgattgcgagtggtgaaaaaattctgcgtttaaatactggcaatcctgctgcctttggttttgaagcaccagatgaagtgattcgtgatttaattgtcaacgcgaggctaagtgagggctattctgacagtaaagggattttttcagcgcgtaaggctatcatgcagtattgccaactcaagggcttcccagatgttgacattgaagatatttatttgggaaatggcgtgtcagagttgatatccatgtcccttcaagctttgctagataatggcgatgaagttttagtaccaatgccggattatcctttatggacggcttgtgtgagtcttggtggaggaaaagcagtccattatctttgtgatgaagaagctggttggtatcctgatattgctgatatcaaatcaaaaatcacgagtcgcaccaaagctattgtggtcatcaatcctaataacccaacaggagccctttatcttaaggagattttagaagacatcgttgctttggcaagagaacaccagctgattatttttgccgatgaaatctatgatcgtttggtgatggatggtaaagagcatattgctattgcaagtttggcacctgatgttttttgtgtatctatgaatggcctttccaaatctcatcgtattgctggttttcgtgttggatggatggtcttatcaggtcctaaagaccatgttaaaggttacattgaagggttgaacatgcttgccaatatgcggttatgctccaatgttttagctcaacaagttgttcaaacttccttaggaggccatcaatcagttgatgcactgttactgccaggagggcgtatttttgagcaacgtaattttatttatgaagctattaatgctatccctggcttatcggcagttaaacctgaagcaggtctttatttatttccgaaaattgatcgtcagatgtatcgtattgatgatgatgaagaatttgtcttacagttattaaagcaagaaaaagtgatgttggtacatggacgtggttttaactggaaagatccagatcacttccgtattgtttacctaccaagtgtagaagaattagaagatgttcaagaaaagattacacgtgtcttataccagtatagacgttaa

SEQ ID NO: 145765 - protein, 404 aa, Streptococcus pyogenes MGAS8232
MKIIEKSSKLEHVAYDIRGPVLDEANRMIASGEKILRLNTGNPAAFGFEAPDEVIRDLIVNARLSEGYSDSKGIFSARKAIMQYCQLKGFPDVDIEDIYLGNGVSELISMSLQALLDNGDEVLVPMPDYPLWTACVSLGGGKAVHYLCDEEAGWYPDIADIKSKITSRTKAIVVINPNNPTGALYLKEILEDIVALAREHQLIIFADEIYDRLVMDGKEHIAIASLAPDVFCVSMNGLSKSHRIAGFRVGWMVLSGPKDHVKGYIEGLNMLANMRLCSNVLAQQVVQTSLGGHQSVDALLLPGGRIFEQRNFIYEAINAIPGLSAVKPEAGLYLFPKIDRQMYRIDDDEEFVLQLLKQEKVMLVHGRGFNWKDPDHFRIVYLPSVEELEDVQEKITRVLYQYRR

SEQ ID NO: 145766 - DNA, 1167 bp, Thermoanaerobacter tengcongensis MB4
  CDS (1)..(1167): transl_table=11
atgaatcctaataaatacatatctgatgtagtaaagaaaataccaccttctgggattaggaaattttttgaccttgttaccaactcaaaggatataatatcactgggcgtaggggaaccggattttgtaactccatgggaaataagaaaagaggggattgaaacactgtgcaggggaaataccacatacacatcaaatttaggcttgcttgaactgaggatagccatctcctattttttaaagacacattatgacttaaactacgaccctgaaaaagaaattatggttactattggtgcaagtgaggctattgatttagcacttagagctcttttaaatgatggagatgaggttttaattccggaacccagttacgtttcctatgctccttgcgtaattctcacaagaggtgtcccagtgtttatacctacagacgaaaaaaacaattttatactcactcctgatgatttaagatccaaaataacttcaaagacaaaagcattaatcttactctatcctaacaatcctacaggtgcaatcatgaaaaaagaagacctggaagagattgtagatgtaataattgaaaaagaccttattgtaatttctgatgaaatatacagcgagctgacttatgaaggaaaacacgtaagcatagcctctcttccagggatgaaagaaaggacaatcctcataaacggtttttcaaaagcttttgccatgactggatggaggttagggtacattgcggcagagcatgaatttatagaagcgatgaacaaaatccaccaatatacaacaatatgtgctccgataactgcccagtacgcagccataaagggtatatacgaatgcgaagaagatataataaaaatgagggaaacctacgaccaaagaaggcggtttatcgtaaatggattccgcgaaataggtcttgactgttttgaacccaaaggagcgttttacatttttccttcaataaaaaagacaggcatgacttctgaagagttctgcgaaaaacttttaaaagaagaaaaagtagcagtagtacccggaaatgcctttggtccaagtggtgaaggttatgttagggtctcgtatgcgtattctatagataaaatagcaaaggcacttgaaaggataaaacgctttgctgaaaaaatattataa

SEQ ID NO: 145767 - protein, 388 aa, Thermoanaerobacter tengcongensis MB4
MNPNKYISDVVKKIPPSGIRKFFDLVTNSKDIISLGVGEPDFVTPWEIRKEGIETLCRGNTTYTSNLGLLELRIAISYFLKTHYDLNYDPEKEIMVTIGASEAIDLALRALLNDGDEVLIPEPSYVSYAPCVILTRGVPVFIPTDEKNNFILTPDDLRSKITSKTKALILLYPNNPTGAIMKKEDLEEIVDVIIEKDLIVISDEIYSELTYEGKHVSIASLPGMKERTILINGFSKAFAMTGWRLGYIAAEHEFIEAMNKIHQYTTICAPITAQYAAIKGIYECEEDIIKMRETYDQRRRFIVNGFREIGLDCFEPKGAFYIFPSIKKTGMTSEEFCEKLLKEEKVAVVPGNAFGPSGEGYVRVSYAYSIDKIAKALERIKRFAEKIL

SEQ ID NO: 145768 - DNA, 1212 bp, Streptomyces coelicolor A3(2)
  CDS (1)..(1212): transl_table=11
atgcaggtgatccagtcgaccaagctcgccaacgtctgttacgagatccggggcccggtgctcgaggaggcgatgcggctggaggcggccgggcaccgcatcctgaagctgaacaccggcaatccggcagccttcggcttcgagtgcccgccggagattttggaggacatcctccgcaacgtctccacggcgcacggctacggcgacgcgaagggcctgctggcggcgcgccgggcggtcgtcatgcacaaccagaccctcggcatcgagacggacgtcgagcacgtcttcatcggcaacggcgtctccgagctgatcgtgatggcgatgcagggcctgctcgacgacggcgacgaggtcctcgtcccggcccccgactacccgctgtggacggccgccgtctcactgtccggcggtacggcggtgcactaccgctgcgacgagcagtccgactggatgcccgacctcgcggacgtggagcggaagatcaccgaccgcaccaaggccctggtgatcatcaatccgaacaacccgacgggcgcggtctacgacgacgcgatgctgcgcggactgacggacatcgcccgccggcacaacctgctggtctgctcggacgagatctacgacaagatcctctacgacgacgccacccacaccccgaccgccgcgatcgcccccgacctgctcaccctcaccttcaacggcatgtcgaaggcgtaccgggtggccggttaccgggtcggctggatgtcgatctccgggccgcgcgcgcacgccgagtcctacatcgagggcctgacgatcctggcgaacatgcgcctgtgcgccaacatgccgggccagcacggcgtggtcgcggcgctcagcgggcggcagaccatcaacgagctggtgctgccgggcgggcggctgcgcgagcagcgcgacgccgcccacgaggcactgaccagcattcccggcgtgacctgcgtgaagccgaagggtgcgctgtacctcttcccgcggctcgaccccaaggtcttcaagatcaaggacgaccggcggatggtcctggacctgctgcgccaggagaagatcatggtcgtccagggcaccggcttcaactggcccgagcccgaccacttccgggtggtgaccctgccgacggccgcggacctgcgcgaggcggtggaccggatcgggaacttcctggacgggtacagccagccctga

SEQ ID NO: 145769 - protein, 403 aa, Streptomyces coelicolor A3(2)
MQVIQSTKLANVCYEIRGPVLEEAMRLEAAGHRILKLNTGNPAAFGFECPPEILEDILRNVSTAHGYGDAKGLLAARRAVVMHNQTLGIETDVEHVFIGNGVSELIVMAMQGLLDDGDEVLVPAPDYPLWTAAVSLSGGTAVHYRCDEQSDWMPDLADVERKITDRTKALVIINPNNPTGAVYDDAMLRGLTDIARRHNLLVCSDEIYDKILYDDATHTPTAAIAPDLLTLTFNGMSKAYRVAGYRVGWMSISGPRAHAESYIEGLTILANMRLCANMPGQHGVVAALSGRQTINELVLPGGRLREQRDAAHEALTSIPGVTCVKPKGALYLFPRLDPKVFKIKDDRRMVLDLLRQEKIMVVQGTGFNWPEPDHFRVVTLPTAADLREAVDRIGNFLDGYSQP

SEQ ID NO: 145770 - DNA, 1209 bp, Streptomyces coelicolor A3(2)
  CDS (1)..(1209): transl_table=11
atggagttccggcagtcgaacaagctcagcgaggtctgttacgagatccgcggcccggtcatcgagcacgccaacgcgctggaggaggcggggcacagcgtgctgcgcctgaacaccggcaaccccgccctcttcgggttcgaggcgcccgaggagatcgtccaggacatgatccgcatgctgccgagggcgcacggctacacggactcgcgcggcatcctctccgcccgccgggccgtcgcccagcgctaccaggcgctcggcctggaggtggacgtggacgacgtcttcctgggcaacggcgtctcggagctgatctccatggccgtgcaggccctccttgaggacggcgacgaggtgctgatccccgcccccgacttccccctctggacggcggtgaccaccctcgcgggcggcaaggcggtgcactacctctgcgacgagcaggccgagtggtaccccgacctggccgacatggaggcgaagatcaccgaccgcaccaaggcggtcgtcatcatcaaccccaacaaccccaccggcgccgtctaccccaaggagatcgtcgagggcatcctcgacctcgcccgccggcacggcctgatggtcctcgccgacgagatctacgaccagatcctgtacgacgacgccgtgcaccactcggccgcgtccctcgcccccgacctggtggtgctgaccttctgcggcctgtccaagacgtaccgggtggcgggtttccgctccggctggctggtggtgacggggccgaagcagcacgcgagggactacctggagggcctgaccatgctggcctccatgcgcctgtgcgccaacgcgcccgcccagtacgccatccaggccgcgctcggcggccgccagtccatccgcgagctgacggcccccggcggacggctgcacgagcagcgggacgtcgcctgggagaagctcaacgagatccccggcatctcctgcgtcaagcccaagggcgcgctgtacgccttcccgcgcatcgacccggccgtccacaagatccacgacgacgagcgcttcgtcctggacctgctgctgcgggagaagatccaggtggtgcaggggacgggcttcaactggccctcccccgaccacttccgcatcctgaccctgccgcacgcggaggacctggaggccgcgatcggacgcatcgggcgcttcctgagcgggtaccggcagtag

SEQ ID NO: 145771 - protein, 402 aa, Streptomyces coelicolor A3(2)
MEFRQSNKLSEVCYEIRGPVIEHANALEEAGHSVLRLNTGNPALFGFEAPEEIVQDMIRMLPRAHGYTDSRGILSARRAVAQRYQALGLEVDVDDVFLGNGVSELISMAVQALLEDGDEVLIPAPDFPLWTAVTTLAGGKAVHYLCDEQAEWYPDLADMEAKITDRTKAVVIINPNNPTGAVYPKEIVEGILDLARRHGLMVLADEIYDQILYDDAVHHSAASLAPDLVVLTFCGLSKTYRVAGFRSGWLVVTGPKQHARDYLEGLTMLASMRLCANAPAQYAIQAALGGRQSIRELTAPGGRLHEQRDVAWEKLNEIPGISCVKPKGALYAFPRIDPAVHKIHDDERFVLDLLLREKIQVVQGTGFNWPSPDHFRILTLPHAEDLEAAIGRIGRFLSGYRQ

SEQ ID NO: 145772 - DNA, 1272 bp, Xanthomonas axonopodis pv. citri str. 306
  CDS (1)..(1272): transl_table=11
atgtccactgccccgcaaaagccgctcgccatccgcgagcgtctgtccgaagtccgctacgaaatccggggcgagctggcgcgacgagcgcgggagctggaggcgcagggccgcaagctgatcaagctcaatatcggtaacccgggtgcgttcggcttccgtgcgccggagcatctgcagcgcgccatcgccgacgacatgggccgcaccgatccgtacacccatcagcaaggcctgccggaagcgcgcgaggcgatcgccaccgcatatgcgcggcgccagcatccggatgcgcatccggaccgcatcttcgttggcaacggcgtcagcgaactgatcgatctgtcgctgcgtgcgctgctcaatcccggcgacgaagtgctggtgccctcgcccgactatccgctgtggtcggccgcgaccatcctcaacgatggtcgtcccgtgtattaccgctgcgccccggaaaacggcttccagccggacccagtggagatcgagacgctggtgtcctcgcgcacccgcgccatcgtgctgatcaatccaaacaatcccagcggcgccagttattcgcgcgaactgctggagcgcatcgtggcgatcgccaccaagcacaatctgctcttgatggtcgatgagatctacgaccaggtgctgtacgacgacgcggccttcgtgccggtcgcgccgctggccggcgcgcacccgtgcatcactttcagcggcctgagcaaggtgcatcgcgcctgcggttggcgcgtgggctgggcactgctgtcgggcgaccaagcgcgcatcaacgacttgcgcaatgcgatggacctgctcggcgccttgcgcctgtgcgccaatgtaccaggccagtacgccatcgatgcggccgtgaacgggccggacaccatctcggcattgtgcgcacccggcggacggctgtacgaaacccgccgcgcggtgatcgaggcctgcgcggccagcgagcatctgtcgctggtggcaccggccggtgcgctgtatgcgttcccggcagtggtgggcgcggcggcgcgcaacttcgacgatcatgcgttcgccctcgatctgatgaacgaggaaggcgtgctggtggttcccggctccagcttcaacgtgccgtatcgccatcatttccgcgtgacattgatgccggaagccggtgtgatgcgcgatgtgttcgcgcgcatcgaccgtgcactggcacgccgcgccgaagcggtcaccaaggtggttccactcaagccacgcagcgtggcctga

SEQ ID NO: 145773 - protein, 423 aa, Xanthomonas axonopodis pv. citri str. 306
MSTAPQKPLAIRERLSEVRYEIRGELARRARELEAQGRKLIKLNIGNPGAFGFRAPEHLQRAIADDMGRTDPYTHQQGLPEAREAIATAYARRQHPDAHPDRIFVGNGVSELIDLSLRALLNPGDEVLVPSPDYPLWSAATILNDGRPVYYRCAPENGFQPDPVEIETLVSSRTRAIVLINPNNPSGASYSRELLERIVAIATKHNLLLMVDEIYDQVLYDDAAFVPVAPLAGAHPCITFSGLSKVHRACGWRVGWALLSGDQARINDLRNAMDLLGALRLCANVPGQYAIDAAVNGPDTISALCAPGGRLYETRRAVIEACAASEHLSLVAPAGALYAFPAVVGAAARNFDDHAFALDLMNEEGVLVVPGSSFNVPYRHHFRVTLMPEAGVMRDVFARIDRALARRAEAVTKVVPLKPRSVA

SEQ ID NO: 145774 - DNA, 1164 bp, Thermosynechococcus elongatus BP-1
  CDS (1)..(1164): transl_table=11
atggattgggcaacgcgggtgatgcgggtcacgccgtcggtaacgctggcgattgatgccaaagccaaggcaatgcgggcggctggagaagatgtctgtagcttcagtgcaggcgaacccgactttgacacccctgcccacattcgtgaagctgtgaaaacagctctcgatcaaggtaaaactcgctatggtccggcggcaggggaaccggctctgcggcaggcgatcgccaccaagctcaaccgcgacaaccacctgccctatcgtgcggaaaatatcctcgtcaccaatggcggcaagcaggccctctttaacctgatgctggccctgatcaaccccggcgatgaggtgattattcctgccccctactgggtgagttatccagaaatggtgcatctagccagtggcacgccagtgattgtggcaaccacgccggaaacgggctatcgaattacccctgcgcaactggaggatgcgattacaccgaagacacggctggttgtcctcaattcccccagtaaccccacgggcatggtctatacacctgaggaaattcgtgagctggcggcagtgattgtgcggcatcaactgtgggtcgtttctgatgaaatttacgaaaaaatactctacgacggtgccgaacacctgagcattggcgcagtcagtggggctgcctttgagcgcaccattgtttgcagtgggtttgccaaggcctatgccatgaccggctggcgagtgggctacctagcagggacaacggagattgttaaagtggcaaccaaaattcagagccacagcacctcaaatgtgtgtacatttgcccagtatggcgcccttgctgccttagaaggaagtcaagactgtgtggctgagatggtggcagcatttcgcgagcgccgtgcctatatgtatgccgggatttgtgagattccgcggctgcgctgtctcaaacccaagggggcattttatttgtttgtggatattggcgacacgggtatagggtccgtggaattttgcgatcgcctgctggaggaggaaaaagtggccgccgtccccggtaaagcctttggcatggatgatcacattcgcctctcctacgccacggatctagccacgattgaaaaaggcctgacgcgactagcgaaatttgtccagcggctctaa

SEQ ID NO: 145775 - protein, 387 aa, Thermosynechococcus elongatus BP-1
MDWATRVMRVTPSVTLAIDAKAKAMRAAGEDVCSFSAGEPDFDTPAHIREAVKTALDQGKTRYGPAAGEPALRQAIATKLNRDNHLPYRAENILVTNGGKQALFNLMLALINPGDEVIIPAPYWVSYPEMVHLASGTPVIVATTPETGYRITPAQLEDAITPKTRLVVLNSPSNPTGMVYTPEEIRELAAVIVRHQLWVVSDEIYEKILYDGAEHLSIGAVSGAAFERTIVCSGFAKAYAMTGWRVGYLAGTTEIVKVATKIQSHSTSNVCTFAQYGALAALEGSQDCVAEMVAAFRERRAYMYAGICEIPRLRCLKPKGAFYLFVDIGDTGIGSVEFCDRLLEEEKVAAVPGKAFGMDDHIRLSYATDLATIEKGLTRLAKFVQRL

SEQ ID NO: 145776 - DNA, 1185 bp, Oceanobacillus iheyensis HTE831
  CDS (1)..(1185): transl_table=11
atggaattagcacaaagagttcaaacattaacaccatcatctacattagcgataactgctaaggcaaaagatttaaaaaaacaagggtttgatgtcattggattaggagcaggtgagccagactttaatacaccagaatatattatggatggcgctaagcaagcaatgaacaacggcctaacaaagtatactcctgcaggtggaattgccgagttaaaactagcaattattgataaatttaaacaagacaacggtctttcctataatgaaaaacaaattattgtgacaaacggggcaaaacatgctttatatacacttttccaagtaatattaaataaggaagacgaagtaatcatcccatcaccatattgggttagttatcctgaacaagtaaaacttgctgaaggaaacccaataatattaccagctgccgagactaatgattttaaaataactccaacacaattagaagaggctattactccaaaaacaaaagcagtaattattaattcaccttctaatccaactggcttaatgtattcaaaagaagaattagcagcgctcggtgaagtatgccttaaacataatatcatcattgtttctgacgaaatttatgaaaaattaatctatacatcaaaagaacatgtatctatagcttccatatctgatgaattatataaccaaacaattataataaacggtgtctctaaatcacatgcaatgactggttggagaattggttatgctgcaggtaatgagacaattattaaagcgatgaccaatcttgcttctcattcaacttcaaaccctacatcaattgcacaatatggagcactagcagcttatacgaaagatcctggtgatatatcattagaatataagaaaatatttgctgaacgattagatgccttttataaattgatacaagatatcccaggaatggaatgcattaaaccagaaggcgcattttatctatttcctaatgcaaaaaaagcagctgaaatgaatggttttgcaacggttgatgaatgggtagctgcacttttagaagaagaaaaagttgcattagtaccagggtctggatttgggtcaccagataatgtacgtttatcctatgcactgtcaattgaggaactaacagaagcagctaatcgaattcatcgatttgttctaaatcataaataa

SEQ ID NO: 145777 - protein, 394 aa, Oceanobacillus iheyensis HTE831
MELAQRVQTLTPSSTLAITAKAKDLKKQGFDVIGLGAGEPDFNTPEYIMDGAKQAMNNGLTKYTPAGGIAELKLAIIDKFKQDNGLSYNEKQIIVTNGAKHALYTLFQVILNKEDEVIIPSPYWVSYPEQVKLAEGNPIILPAAETNDFKITPTQLEEAITPKTKAVIINSPSNPTGLMYSKEELAALGEVCLKHNIIIVSDEIYEKLIYTSKEHVSIASISDELYNQTIIINGVSKSHAMTGWRIGYAAGNETIIKAMTNLASHSTSNPTSIAQYGALAAYTKDPGDISLEYKKIFAERLDAFYKLIQDIPGMECIKPEGAFYLFPNAKKAAEMNGFATVDEWVAALLEEEKVALVPGSGFGSPDNVRLSYALSIEELTEAANRIHRFVLNHK

SEQ ID NO: 145778 - DNA, 1545 bp, Bifidobacterium longum NCC2705
  CDS (1)..(1545): transl_table=11
atgtttgcggaacgtctgcgcaatgcgatgaacagcaggggactgaagcaggtcgatttggtgcacgccgccgaacatcgtggtgtaaagatgggcaagagccacatcagccaatacgtggccggcaagaccatgccccgcgaggacgtgctcgaattcctggccagcgaactggacgtcgacatgaactggctgcgcggcgaggaatccaccacgcaattgaactcggacgcctccaacagcgtcacggacggcgaacacgccgccacaccgcttgccacgggtgcctccaagccccagacggacagcgagattcccgtgggccgccgccgcaccttcggcaaatcgcacaagctcgacaacgtgctctacgacgtgcgcggcccggtcgccgacgaggcgatgcgcatggaggccaacggcacccacatcctgaaattgaacatcggcaacccggcacccttcggcttccgcacgccggacgaagtcgtctacgacatggcccaccagctcaccgacaccgaaggctactcgccgtccaagggcctgttctccgcgcgcaaggccatcatgcagtacgcgcagctgaagaacatcccgaacgtcaccatcgacgacatctacaccggcaacggcgtcagcgagctcatcaacctgtccatgtccgcgctactcgacaccggcgacgaagtgctcgtgccatccccggactacccgctgtggaccgcctgcgtgaacctggccggcggcaccgccgtgcactacctgtgcgacgaacagtccgaatggtatccggacatcgacgacatccgctccaagatcaccagcaacaccaaggcgattgtcatcatcaacccgaacaaccccaccggcgcactttacccaaaggaagtgctccagcagatcgtcgacatcgcgcgcgaacaccagctcatcatcttctccgacgaaatctacgatcgcctcgtcatggacggcctgcagcacatctccatcgcctcgatggccccggacctgttctgcgtgaccttctccggcctgtcgaaatcgcacatgatcgccggctaccgcatcggctggatgatcctgtccggcaacaagcgcattgccaaggactacatcgagggcctcaacatgctcgccaacatgcgcatgtgttcgaacgtgcccgcccagtccgtggtgcagaccgcgcttggcggccaccagagcgtcaacgactacatcgtgccgggcggccgcgtgcacgaccagcgcgacctcgtctacgacatgctcaaccagattcccggcatcaccgccgtcaagccgaaggccgcgttctacatcttcccgaagatcgacgtcaaacgcttcaacatccactcggacgagcagttcgcgctcgacctgctgcatgacaagcacatcctcatcagccacggcggcgcgttcaactggcatcgccccgaccacttccgcgtggtgtacctgccgcgcatgggcatgctgcgcgaaaccatgggggagatctccgacttcttcagctactactggcagagctga

SEQ ID NO: 145779 - protein, 514 aa, Bifidobacterium longum NCC2705
MFAERLRNAMNSRGLKQVDLVHAAEHRGVKMGKSHISQYVAGKTMPREDVLEFLASELDVDMNWLRGEESTTQLNSDASNSVTDGEHAATPLATGASKPQTDSEIPVGRRRTFGKSHKLDNVLYDVRGPVADEAMRMEANGTHILKLNIGNPAPFGFRTPDEVVYDMAHQLTDTEGYSPSKGLFSARKAIMQYAQLKNIPNVTIDDIYTGNGVSELINLSMSALLDTGDEVLVPSPDYPLWTACVNLAGGTAVHYLCDEQSEWYPDIDDIRSKITSNTKAIVIINPNNPTGALYPKEVLQQIVDIAREHQLIIFSDEIYDRLVMDGLQHISIASMAPDLFCVTFSGLSKSHMIAGYRIGWMILSGNKRIAKDYIEGLNMLANMRMCSNVPAQSVVQTALGGHQSVNDYIVPGGRVHDQRDLVYDMLNQIPGITAVKPKAAFYIFPKIDVKRFNIHSDEQFALDLLHDKHILISHGGAFNWHRPDHFRVVYLPRMGMLRETMGEISDFFSYYWQS

SEQ ID NO: 145780 - DNA, 1203 bp, Brucella suis 1330
  CDS (1)..(1203): transl_table=11
atggcatttctcgccgacgccctttcccgtgtaaagccatctgcgaccatcgctgtcagccagaaagcacgtgaactgaaagcaaaaggcaaggacgtgatcgtcctgggcgcaggtgagccggatttcgacacgcctgaaaatatcaagcaggcggccattgccgcgatcaatcgcggtgaaacaaagtacacgcccgtatccggcatcccgcaactgcgccaggccatcgtctccaagttcaagcgtgaaaacggcctcgactacaagccggaacagaccatcgtcggcaccggcggcaagcagattttgttcaacgccttcatggccacgctgaaccccggcgacgaagtcatcattcccgccccctattgggtcagctacccggaaatggtggccatcaacggcggcaccccggttttcatcgacacgaagattgaagacaatttcaagctgaccgctgccgatctcgaaaaggcgatcacaccgaagaccaagtggctcatcttcaactcgccctccaacccgaccggcgcggcctatacgcaagccgaactgaagtcgctgaccgacgttctcgtgcgccatccgcatgtctggatcttgaccgacgacatgtatgagcatctggtctatggcgatttcgtcttcacgacgcctgctcaggtggaaccctcgctctatgaccgtacgctcaccatgaacggcgtttccaaggcctatgccatgaccggctggcgcatcggctatgccgccggtccaatcgagctcatcaaggccatggacatgattcaggggcagcagacctccggcgcctgctcgattgctcagtgggcagcggtcgaagcactgaacggcacgcaggatttcatccccgcgaacaagaaaatcttccaggcccgccgcgatctggtcgtttccatgctcaaccaggcaaccggcctccagtgcccgacgccggaaggcgcgttctatgtctatccgtcctgcgcagggctgatcggcaagaagaccgaagcgggcaaagtcatcgaaaccgacaaagatttcgtgacggaacttctggaaaccgaaggcgtggcggttgttcatggttcggcattcggcctcggcccgaacttccgcatttcctatgcaacctcggatgagctgctggaaaaagcctgcatacgcatccagcgtttctgcgccagcctgcgctga

SEQ ID NO: 145781 - protein, 400 aa, Brucella suis 1330
MAFLADALSRVKPSATIAVSQKARELKAKGKDVIVLGAGEPDFDTPENIKQAAIAAINRGETKYTPVSGIPQLRQAIVSKFKRENGLDYKPEQTIVGTGGKQILFNAFMATLNPGDEVIIPAPYWVSYPEMVAINGGTPVFIDTKIEDNFKLTAADLEKAITPKTKWLIFNSPSNPTGAAYTQAELKSLTDVLVRHPHVWILTDDMYEHLVYGDFVFTTPAQVEPSLYDRTLTMNGVSKAYAMTGWRIGYAAGPIELIKAMDMIQGQQTSGACSIAQWAAVEALNGTQDFIPANKKIFQARRDLVVSMLNQATGLQCPTPEGAFYVYPSCAGLIGKKTEAGKVIETDKDFVTELLETEGVAVVHGSAFGLGPNFRISYATSDELLEKACIRIQRFCASLR

SEQ ID NO: 145782 - DNA, 1215 bp, Shewanella oneidensis MR-1
  CDS (1)..(1215): transl_table=11
atgcgccctatcatcaagtccaacaagttggatactgtttgctacgacattcgcggcccagtgcacaaggaagccagacgtttagaggacgagggccataggatccttaaactcaatattggtaaccctgcacctttcggttttgaagcaccggaagaaattgtgcgcgatgtgatccttaatcttcccagcgcccaaggttactgtgagtcaaaaggattattctctgcccgcaaggcaattgtgcagcattatcaagcgcaagggatctatgacgttgatatcgaggatgtctatatcggtaacggcgtgtcagaactgattatgatggccatgcagggcttattaaacaccgcggacgaaatactgatcccatcccccgattacccactgtggacagcggcagccaacttggctggcggtaaagccgtacattatcgctgtgatgaagaagcagattggttccctgatcttgatgatattaagagcaaaatctcttcgcgtacccgtggcattgtgttgattaaccccaataacccaacgggtgccgtctacagtaaagaattattactacaagtcgttgagctatgccgtgagcacaacttgatcctgtttgccgatgaaatctacgataagattttatacgatgaagccaaacatattccggcagctagcttatccgatgatattttaacggtcacgtttaatggattatcaaaagcatatcgcgcggccggttttagaataggctggatgatgctctcgggtaatctcaaagccgcgaaaagttatattgaagggttagacatgctagcctctatgcgtctatgcgctaacgtgccaaatcaacatgccattcaaactgcactcggtggctatcaaagcattaatgaactgattttacctagtggccgtttgaccgtgcagcgagatacctgctatgagttgctcaaccaaatccccggcgtgagcgtgaaaaagcccaaaggcgcactttatgctttccccaaattggatatgaaaaagttcaatttaagggatgatgaacgcttggtactcgatttattaagggacaaaaaaatccttttagtgcatggtaccgcctttaattggccggagccggatcatctccgagtcgtgtttttaccctataaagaagatctaactaaagccttgactgagtttggcaacttccttgaaacctacaagcagtaa

SEQ ID NO: 145783 - protein, 404 aa, Shewanella oneidensis MR-1
MRPIIKSNKLDTVCYDIRGPVHKEARRLEDEGHRILKLNIGNPAPFGFEAPEEIVRDVILNLPSAQGYCESKGLFSARKAIVQHYQAQGIYDVDIEDVYIGNGVSELIMMAMQGLLNTADEILIPSPDYPLWTAAANLAGGKAVHYRCDEEADWFPDLDDIKSKISSRTRGIVLINPNNPTGAVYSKELLLQVVELCREHNLILFADEIYDKILYDEAKHIPAASLSDDILTVTFNGLSKAYRAAGFRIGWMMLSGNLKAAKSYIEGLDMLASMRLCANVPNQHAIQTALGGYQSINELILPSGRLTVQRDTCYELLNQIPGVSVKKPKGALYAFPKLDMKKFNLRDDERLVLDLLRDKKILLVHGTAFNWPEPDHLRVVFLPYKEDLTKALTEFGNFLETYKQ

SEQ ID NO: 145784 - DNA, 1218 bp, Streptococcus mutans UA159
  CDS (1)..(1218): transl_table=11
atgatgaaagaatttaataagtctgctaaacttgaacatgtggcctatgatattcgcggtccagtattagaagaagccgatcgtatgattgctaatggggagaaaatcttacgtcttaatacaggaaatcctgccgcttttggattaacagcacctgatgaggttattcgggatttaattatgaatgcgcgtgagagcgaaggttattcagattcgaagggaatcttttcagctcgtaaagctattatgcaatattgtcagcttaaaaatattcctgatgttgatgttgatgacatctatattggcaatggtgtatcggaaatgattactatgtctatgcaaggacttttagatgacggtgacgaagttttagtccccatgcctgattatccactgtggacggctgctgttagtctggcaggaggtcaggctgttcattatgtctgtgatgaaagttccaattggtatccagatattgataatattaagtctaaaatcacttcaaatacgaaagctcttgtggttatcaatcctaataaccctacaggggctctttatcccaaagatgtattagaagatatcgttgaagttgctcgtcagaatgatttaattatttttgctgatgagatttatgatcgtctggtcatggatggtggggaacatgtggctattgctagtcttgcaccggatcttttttgtgtttctatgaatggtttgtcaaaatcccatcgtattgcaggtttccgtgtaggttggatggttttatctgggcctaaaaaacatgtcaaagattatattgaaggccttaacatgctttcaaatatgcgcctttgttctaatgttctggctcaacaagttattcaaacatctttgggcggcgttcagtctattgatgaacttcttttgccgggtggccgtatttatgaacagcgtaattttatttataaagctatgaatgaaatccctggaatcacagcggtaaaacctcaggcgggactttatattttcccaaaaattgaccgtaatatgtatcggattgatgatgatgagcaatttgttctgaattttctcaaacaggaaaaaatccttcttgttcatggacgcggctttaactggatggaaccagatcatttccgtattgtttatttaccgcgcgttgaagagctctctaagattcaagaaaagatgacacgcttcctagggcaatatcgaaaataa

SEQ ID NO: 145785 - protein, 405 aa, Streptococcus mutans UA159
MMKEFNKSAKLEHVAYDIRGPVLEEADRMIANGEKILRLNTGNPAAFGLTAPDEVIRDLIMNARESEGYSDSKGIFSARKAIMQYCQLKNIPDVDVDDIYIGNGVSEMITMSMQGLLDDGDEVLVPMPDYPLWTAAVSLAGGQAVHYVCDESSNWYPDIDNIKSKITSNTKALVVINPNNPTGALYPKDVLEDIVEVARQNDLIIFADEIYDRLVMDGGEHVAIASLAPDLFCVSMNGLSKSHRIAGFRVGWMVLSGPKKHVKDYIEGLNMLSNMRLCSNVLAQQVIQTSLGGVQSIDELLLPGGRIYEQRNFIYKAMNEIPGITAVKPQAGLYIFPKIDRNMYRIDDDEQFVLNFLKQEKILLVHGRGFNWMEPDHFRIVYLPRVEELSKIQEKMTRFLGQYRK

SEQ ID NO: 145786 - DNA, 1728 bp, Drosophila melanogaster
  CDS (1)..(1728)
atgtttaaaaacagaaaaataatgagtcgaatgctaattaaacctgctgccgccacagtttcggccgcattgcagcagcaccagcgccagcagcaacagtacgttattcgccgctggaaatcgttcctgcacaacaacagcaacaatgccaatcgacgtgcggcgaaatcaacggcaacagcaacggtgacggcagcagcgacgtcgcagcgccatggaacaagcggcgatttcattcaaccgttagacgtccgccgttccttttcaaccagccacaaaatgccgtcgtcgtcgaaagcgctcacactggataacataaatcccaactttattgccatggaatatgccgttcgcggtcctctggtgattcgtgctggggaaatcgagaaggaactggaaaagggtgtcaagaagccattcgaccaggtgatccgtgccaacatcggtgattgccatgcgatgggccagcagcccttgaccttcctgcgacagctgttggcgctgaccttcgagacacgtctgctggattcacccgattatcccgaggacgtcaagaagcgcgcctgtgccattttgaacggctgccagggtcaatcggtgggctcgtacaccgactccgccggtctggaggtggtgcgtcgccaggttgctcagtacatcgagaaaagggatggcggcatcgcctccaattggcaggacatctatctaaccggcggtgcctctcccggcatcaagagcattctctccatgatcaacgccgaggtgggatgcaaggcgcctggtgtcatggtgcccattccgcagtacccactgtactcggccaccatctccgaatacggcatgaccaaggtggattactatctggaggaggagaccggttggagcctggacaggaaggagctgcaacggtcctacgatgaggcgaagaaggtctgcaatccgcgtgccctggtcgtgatcaatccgggcaatcccaccggacaggtactgacccgcgagaacatcgaggagatcattaagttcgcacacgataacaaggtgctggtgctggccgatgaggtgtaccaggacaatgtctacgacaagaactccaagttctggtcgttcaagaaggtggcctacgaaatgggcgacccctatcgtaatctggaaatggtcagtttcctgtccacctcgaagggctatctgggcgagtgcggcattcgcggcggttacatggaggttctcaatcttgatcccaaggtcaaggccatgctgaccaagtcgataacggcggcgctttgcagcaccaccgctggccaggtggccgtgagtgccctggtcaatccaccgcagcccggagagccatcatacgatctgtacaagaaggagcgcgatggcattctggccgctctaaaagaacgggccgagctcgtccacaaggcactgaacagcttcgaaggctacaaggttaaccccgtacagggcgccatgtacgtctttccacagatcgagatcccgcccaaggcgatcgaggcggccaaggccaagggcatggcccccgatgttttctacgcatttgagctgctcgagacgagcggcatttgcattgttcctggcagtggatttggtcagaagcccggcacgtggcatttccgaagcacgatcctcccgcaaacggacaagctgaagctgatgatggagaagttccgtgtgttccacgccgagttcatgaagaagtacaagtag

SEQ ID NO: 145787 - protein, 575 aa, Drosophila melanogaster
MFKNRKIMSRMLIKPAAATVSAALQQHQRQQQQYVIRRWKSFLHNNSNNANRRAAKSTATATVTAAATSQRHGTSGDFIQPLDVRRSFSTSHKMPSSSKALTLDNINPNFIAMEYAVRGPLVIRAGEIEKELEKGVKKPFDQVIRANIGDCHAMGQQPLTFLRQLLALTFETRLLDSPDYPEDVKKRACAILNGCQGQSVGSYTDSAGLEVVRRQVAQYIEKRDGGIASNWQDIYLTGGASPGIKSILSMINAEVGCKAPGVMVPIPQYPLYSATISEYGMTKVDYYLEEETGWSLDRKELQRSYDEAKKVCNPRALVVINPGNPTGQVLTRENIEEIIKFAHDNKVLVLADEVYQDNVYDKNSKFWSFKKVAYEMGDPYRNLEMVSFLSTSKGYLGECGIRGGYMEVLNLDPKVKAMLTKSITAALCSTTAGQVAVSALVNPPQPGEPSYDLYKKERDGILAALKERAELVHKALNSFEGYKVNPVQGAMYVFPQIEIPPKAIEAAKAKGMAPDVFYAFELLETSGICIVPGSGFGQKPGTWHFRSTILPQTDKLKLMMEKFRVFHAEFMKKYK

SEQ ID NO: 145788 - DNA, 1707 bp, Drosophila melanogaster
  CDS (1)..(1707)
atgagtcgaatgctaattaaacctgctgccgccacagtttcggccgcattgcagcagcaccagcgccagcagcaacagtacgttattcgccgctggaaatcgttcctgcacaacaacagcaacaatgccaatcgacgtgcggcgaaatcaacggcaacagcaacggtgacggcagcagcgacgtcgcagcgccatggaacaagcggcgatttcattcaaccgttagacgtccgccgttccttttcaaccagccacaaaatgccgtcgtcgtcgaaagcgctcacactggataacataaatcccaactttattgccatggaatatgccgttcgcggtcctctggtgattcgtgctggggaaatcgagaaggaactggaaaagggtgtcaagaagccattcgaccaggtgatccgtgccaacatcggtgattgccatgcgatgggccagcagcccttgaccttcctgcgacagctgttggcgctgaccttcgagacacgtctgctggattcacccgattatcccgaggacgtcaagaagcgcgcctgtgccattttgaacggctgccagggtcaatcggtgggctcgtacaccgactccgccggtctggaggtggtgcgtcgccaggttgctcagtacatcgagaaaagggatggcggcatcgcctccaattggcaggacatctatctaaccggcggtgcctctcccggcatcaagagcattctctccatgatcaacgccgaggtgggatgcaaggcgcctggtgtcatggtgcccattccgcagtacccactgtactcggccaccatctccgaatacggcatgaccaaggtggattactatctggaggaggagaccggttggagcctggacaggaaggagctgcaacggtcctacgatgaggcgaagaaggtctgcaatccgcgtgccctggtcgtgatcaatccgggcaatcccaccggacaggtactgacccgcgagaacatcgaggagatcattaagttcgcacacgataacaaggtgctggtgctggccgatgaggtgtaccaggacaatgtctacgacaagaactccaagttctggtcgttcaagaaggtggcctacgaaatgggcgacccctatcgtaatctggaaatggtcagtttcctgtccacctcgaagggctatctgggcgagtgcggcattcgcggcggttacatggaggttctcaatcttgatcccaaggtcaaggccatgctgaccaagtcgataacggcggcgctttgcagcaccaccgctggccaggtggccgtgagtgccctggtcaatccaccgcagcccggagagccatcatacgatctgtacaagaaggagcgcgatggcattctggccgctctaaaagaacgggccgagctcgtccacaaggcactgaacagcttcgaaggctacaaggttaaccccgtacagggcgccatgtacgtctttccacagatcgagatcccgcccaaggcgatcgaggcggccaaggccaagggcatggcccccgatgttttctacgcatttgagctgctcgagacgagcggcatttgcattgttcctggcagtggatttggtcagaagcccggcacgtggcatttccgaagcacgatcctcccgcaaacggacaagctgaagctgatgatggagaagttccgtgtgttccacgccgagttcatgaagaagtacaagtag

SEQ ID NO: 145789 - protein, 568 aa, Drosophila melanogaster
MSRMLIKPAAATVSAALQQHQRQQQQYVIRRWKSFLHNNSNNANRRAAKSTATATVTAAATSQRHGTSGDFIQPLDVRRSFSTSHKMPSSSKALTLDNINPNFIAMEYAVRGPLVIRAGEIEKELEKGVKKPFDQVIRANIGDCHAMGQQPLTFLRQLLALTFETRLLDSPDYPEDVKKRACAILNGCQGQSVGSYTDSAGLEVVRRQVAQYIEKRDGGIASNWQDIYLTGGASPGIKSILSMINAEVGCKAPGVMVPIPQYPLYSATISEYGMTKVDYYLEEETGWSLDRKELQRSYDEAKKVCNPRALVVINPGNPTGQVLTRENIEEIIKFAHDNKVLVLADEVYQDNVYDKNSKFWSFKKVAYEMGDPYRNLEMVSFLSTSKGYLGECGIRGGYMEVLNLDPKVKAMLTKSITAALCSTTAGQVAVSALVNPPQPGEPSYDLYKKERDGILAALKERAELVHKALNSFEGYKVNPVQGAMYVFPQIEIPPKAIEAAKAKGMAPDVFYAFELLETSGICIVPGSGFGQKPGTWHFRSTILPQTDKLKLMMEKFRVFHAEFMKKYK

SEQ ID NO: 145790 - DNA, 1314 bp, Corynebacterium efficiens YS-314
  CDS (1)..(1314): transl_table=11
atgactaccaaaaagcgcaacacctcagagaccaccgacaccgccccgaaggcagtgggcgcggatcaggcagcgcgtccggttcggcggaccacccgccgcatcttcgatcagtcggagaagatgaaggacgtgctgtacgagatccgtggcccggtggccgcggaggcggaacgcatggagcttgatgggcacaatatcctcaagctcaacaccggcaacccggccgtcttcgggttcgatgcccccgatgtgatcatgcgtgacatgatcgccgccctgcccacctcccaggggtattcgacctccaagggcatcatccccgcacgtcgtgccgtggtgacccgctatgaggtcatcccggacttccccaacttcgacgtcgatgatgtcttcctgggcaatggtgtctccgagttgatcaccatgaccatgcaggcactgctcaacgacggcgatgaggttctcatcccggcaccggactacccgctgtggaccgccgcgacctccctgtccggtggcaaaccggtgcactacctctgtgatgaggacaatgagtggaacccctccatcgaggacatccgctccaagatcaccgagaagaccaaggccatcgtggtgatcaaccccaacaacccgaccggggctgtctactcccgcaaggttctgcaggagatcgcggacatcgcccgcgaatacgatctgctggtgctcgccgatgagatctacgaccgcattctctacgacgatgcccagcacatcaacatggccaccctgtgcccggacctgatgtgcatcacctacaacggcctgtccaaggcctaccgtgtcgcaggctaccgcgccggctggatgatcatcactggccccaagcgttatgccaagggcttcatcgacggcctggagctgctcgccggcacccgcctgtgcccgaatgtcccggcgcagcacggcatccaggtggccctcggtggccggcagtccatctacgggctcaccggtgaaggcggacgcctgctcaaccagcgtaatgtcgcctggcagaaactcaacgagatccccggtgtcagctgctacaagccgatgggtgcgctctacgccttcccgcgcctggatccgaatgtctatgagatccacgacgacacccagctgatgctcgatatcctgcgttcagagaagatcctcctggtgcagggcaccggcttcaactggccccaccatgaccacttccgcgtggtcaccctgccgtgggcatcccagttggaaaacgccatcgagcgactgggcaacttcctggtcagctacaaacagtag

SEQ ID NO: 145791 - protein, 437 aa, Corynebacterium efficiens YS-314
MTTKKRNTSETTDTAPKAVGADQAARPVRRTTRRIFDQSEKMKDVLYEIRGPVAAEAERMELDGHNILKLNTGNPAVFGFDAPDVIMRDMIAALPTSQGYSTSKGIIPARRAVVTRYEVIPDFPNFDVDDVFLGNGVSELITMTMQALLNDGDEVLIPAPDYPLWTAATSLSGGKPVHYLCDEDNEWNPSIEDIRSKITEKTKAIVVINPNNPTGAVYSRKVLQEIADIAREYDLLVLADEIYDRILYDDAQHINMATLCPDLMCITYNGLSKAYRVAGYRAGWMIITGPKRYAKGFIDGLELLAGTRLCPNVPAQHGIQVALGGRQSIYGLTGEGGRLLNQRNVAWQKLNEIPGVSCYKPMGALYAFPRLDPNVYEIHDDTQLMLDILRSEKILLVQGTGFNWPHHDHFRVVTLPWASQLENAIERLGNFLVSYKQ

SEQ ID NO: 145792 - DNA, 1212 bp, Pseudomonas putida KT2440
  CDS (1)..(1212): transl_table=11
atgcagttcagcaaatcgaacaagctcgccaatgtctgctacgacattcgcggcccagtgctcaagcacgccaaacgcctggaggaggaaggccaccgcatcctcaagctgaacatcggcaacccggcgccgtttggcttcgaggcgcctgatgaaatccttcaggatgtgatccgcaacctgcccaccgcacagggctacagcgactccaaaggcctgttcagtgcccgcaaggcggtgatgcagtactgccagcagaaagatatcgaaggcgtcaccatcgaggacatctacctgggtaatggtgtgtccgagctgatcgtcatgtcgatgcaggcgctgctcaacaacggcgacgaagtgctgatcccggcccccgactacccgctgtggactgccgccgtgagcctggccggcggcaagccggtgcactacctgtgcgacgagcaggccgactggttccctgaccttgaggacatcaaggccaagatcaccccgaacaccaaggcgctggtgatcatcaacccgaacaacccgaccggcgccgtctactccaaagaactgctgctgggcatgctggagctggcccgccagcacaacctggtggtgttctccgacgagatctacgacaagatcctgtacgacgaagccgtgcacatcagcaccgcctcgctggctccggacctgctgtgcctgaccttcaacggcttgtccaagtcgtaccgggtggcgggcttccgctctggctggctgatcatttccgggcccaagcaccacgcacacagctacatcgaaggcatcgacatgctggccaacatgcgcctgtgcgccaacgtgccggcccagcatgccatccagaccgcgctgggcggctaccagagcatcaacgacctggtgctgccgccgggccgcctgctggagcagcgcaaccgcacctacgaactgctcaacgacatccctggcgtcagctgcgtgaaaccgatgggcgcgctgtatgcgttcccgcggatcgacccgaaggtttgcccgatcctcaacgacgagaagttcgcccttgacctgctgctgtcggagaagctgctgatcgtacaagggacggcgttcaactggccgtggccggaccacttccgcgtggtgaccttgccgcgggtggatgacctggaagcggcaattggccggatcggcaatttcctgaagggttattcgcagtag

SEQ ID NO: 145793 - protein, 403 aa, Pseudomonas putida KT2440
MQFSKSNKLANVCYDIRGPVLKHAKRLEEEGHRILKLNIGNPAPFGFEAPDEILQDVIRNLPTAQGYSDSKGLFSARKAVMQYCQQKDIEGVTIEDIYLGNGVSELIVMSMQALLNNGDEVLIPAPDYPLWTAAVSLAGGKPVHYLCDEQADWFPDLEDIKAKITPNTKALVIINPNNPTGAVYSKELLLGMLELARQHNLVVFSDEIYDKILYDEAVHISTASLAPDLLCLTFNGLSKSYRVAGFRSGWLIISGPKHHAHSYIEGIDMLANMRLCANVPAQHAIQTALGGYQSINDLVLPPGRLLEQRNRTYELLNDIPGVSCVKPMGALYAFPRIDPKVCPILNDEKFALDLLLSEKLLIVQGTAFNWPWPDHFRVVTLPRVDDLEAAIGRIGNFLKGYSQ

SEQ ID NO: 145794 - DNA, 1215 bp, Vibrio vulnificus CMCP6
  CDS (1)..(1215): transl_table=11
atgcaaaatatcgggatgtcgtcaaaactcgacaatgtctgctatgacatcaggggtcctgtactcaaacatgctaagcgcatggaagaagaagggcataaaatccttaagctaaatattggaaaccccgccccatttggctttgacgcccctgatgaaattctggtcgatgtgattcgtaacttgcctacgtcgcaaggttactgcgattcaaaaggcatctactcagcacgtaaagccgtggtacagcactaccaacgcaaaggcattcgttctctcgatgtggaagatgtctacgtgggcaatggcgtctctgagctgatcgtgatggccatgcaagcactgcttaacaacggtgacgaaatgctggttccagcaccagactacccattatggaccgctgccgtggcactttcgggtggtaaagcggtgcattacctctgtgatgagcaagcagactggtaccctgatctggatgatatgcgcaaaaaaatcacgcctaagactcgtggtattgtactcatcaacccaaataacccaacgggtgccgtctacagccgcgattttctactggaagtgatcgaaatcgcgcgtcaacacaagctgatgattttcgccgatgaaatctacgacaaggtgttgtacgacggagcggttcacacctcagtcgcgaccttaactgacgatgtgctggtgatgacgtttaacggcctatcaaaagcctatcgcgtatgtggtttccgtggtggttggatgtttatgaccggaccaaaacatttagcgcaaggctatgttaacggtttggacatgctggcttcgatgcgcctgtgcgccaacgtgccaatgcaacacgcgattcaaactgccttggggggctatcagagcatcaatgaattgatcttacctggcggtcgtttattggagcaacgtgatcgcgcatgggagttgatcaaccaaatccctggcgtttcatgtgtgaaaccaaaaggcgcaatgtatctgttccctaagattgatacgaaaaaatacagcatcaaagatgaccaaaagatggtttttgattttctcgttcaagaaaaagtgttgttagtgcagggttctggattcaactggccaaaaccagaccacttccgcattgtcactctaccgcatatcgaagatctcgaaaccgccattggccgctttgaacgtttcttacatggctatagccagtag

SEQ ID NO: 145795 - protein, 404 aa, Vibrio vulnificus CMCP6
MQNIGMSSKLDNVCYDIRGPVLKHAKRMEEEGHKILKLNIGNPAPFGFDAPDEILVDVIRNLPTSQGYCDSKGIYSARKAVVQHYQRKGIRSLDVEDVYVGNGVSELIVMAMQALLNNGDEMLVPAPDYPLWTAAVALSGGKAVHYLCDEQADWYPDLDDMRKKITPKTRGIVLINPNNPTGAVYSRDFLLEVIEIARQHKLMIFADEIYDKVLYDGAVHTSVATLTDDVLVMTFNGLSKAYRVCGFRGGWMFMTGPKHLAQGYVNGLDMLASMRLCANVPMQHAIQTALGGYQSINELILPGGRLLEQRDRAWELINQIPGVSCVKPKGAMYLFPKIDTKKYSIKDDQKMVFDFLVQEKVLLVQGSGFNWPKPDHFRIVTLPHIEDLETAIGRFERFLHGYSQ

SEQ ID NO: 145796 - DNA, 1203 bp, Bradyrhizobium japonicum USDA 110
  CDS (1)..(1203): transl_table=11
atgcccgaactcgcaaaccgcctcaagactgtgaaggtgtcggcctcggcggcgatgacggacaaggcgcgcgagctccgcgacgcgggtgtcaagatcgtcggcttgtcgtccggcgagcccgattttccgacgccgccgcatgcgatcgaggccgcacatcgggccgccctggccggcgataccaagtacccggcgcagccggggactgtcgcgttgcggaccgcggtccagcgcaagttcaagcgcgagaacaatctcgactacgccctcgacgagatcctgatcgccaacggcggcaagcagattatcttcaacgcgctgttcgccacctgtaatcccggcgacgaggtcgtcattcccgcgcccggctggatcacctatgcggacatcgttctccttgcagaggcgacgcccgtcgccgtgccgtgcccggagaacaaccagttcaagctccgcccgacggacctggatgcggcgatcacgccgcggacgaagtggctgatcctgaactttcccaacaatccgaccggcgcggcgtgcacgcgcgacgagatgtgcgcgatcgccgacgtcatgctgaagtatcccgacgtctggattctcaccgacgatatctacgagcacctcacttatgatggtttcgaattctgcaccatcgcggaggttgaaccgagactgaagaaccgtgtcgtgaccgtgaacggcgcgtcaaaggcctacgccatgactggctggcgggtcggctattgcggcggccccaaggacctgatcgctgcgatgaacaatgtccacggtcaggcgaccggtggaatctgcaccctgagccaggcggcggcggttgcggtcctggatgggccgcaggagttcctgaaggagcgtgcggacatctatcgcgaccggcgcgatctggtggtcaagctgctcaatcagatccccggcatcacctgccacaagccggaaggggcattctacgtgttcccgaatatcgccggttgcatcggcaagaccacaaagggcgggcgccggctggacaccgatgccgacttcatttcggctctgctggaagagcagcatgtcgcggccgtaccgggcggcgcctacggcatgagcccgtacttccggatctcctacgcgaccgataccgaatcgctcaaggaaggctgccggcgtatcgcgaacttctgcgaaagcctgcgctga

SEQ ID NO: 145797 - protein, 400 aa, Bradyrhizobium japonicum USDA 110
MPELANRLKTVKVSASAAMTDKARELRDAGVKIVGLSSGEPDFPTPPHAIEAAHRAALAGDTKYPAQPGTVALRTAVQRKFKRENNLDYALDEILIANGGKQIIFNALFATCNPGDEVVIPAPGWITYADIVLLAEATPVAVPCPENNQFKLRPTDLDAAITPRTKWLILNFPNNPTGAACTRDEMCAIADVMLKYPDVWILTDDIYEHLTYDGFEFCTIAEVEPRLKNRVVTVNGASKAYAMTGWRVGYCGGPKDLIAAMNNVHGQATGGICTLSQAAAVAVLDGPQEFLKERADIYRDRRDLVVKLLNQIPGITCHKPEGAFYVFPNIAGCIGKTTKGGRRLDTDADFISALLEEQHVAAVPGGAYGMSPYFRISYATDTESLKEGCRRIANFCESLR

SEQ ID NO: 145798 - DNA, 1194 bp, Clostridium tetani E88
  CDS (1)..(1194): transl_table=11
atgttatctaaaaaaggaaaggaaatatcaccttctgttacattagcaataactgcaaaagctaatgaaatgaagaaggatggaatagatgtagtaggttttggggcaggggaaccggattttaatacacctgaaaatatccaaaatgctgcaattaaagcaatgagagaaggatatacaaagtacacaccagtttctggcgtagttgaattaaaagatgctatagtaaataaattcaaaaaggaaaataatttaatatataaatcatcacagataatagtatccactggagcaaagcaatgtatagctaatttgtttatggctattttaaatccaggagatgaggttttaatatctgcaccatattgggttagttatccagaactcgttaaattagcagatggtgtgcctgtatttgtagattgtaaaaaagaaaatgattataaatactctatagatgaattagaaaagagggtttctagtaaaacaaaggctataattattagtagtccgaacaatccaacaggaagtatttattatgaagaagagcttagagatatagctgaattttgtaaaaaacataatttaataattttatccgatgaaatatatgaaaaacttatttatggacataataaacatataagtatagctagcctaaatgaagatacttataatagaactgttgtaataaatggagtatctaagacttatgctatgactggttggagaataggatatgcggcagggccaggaaatgtaattaaattaatgaataatatacagagtcatatgacttcaaatccaaattcaatcgctcaatatgctgccctagaagctttaacaggagagcaggagtctataaatagtatggtgagtgaatttgaaaagagaagaaattatatggtggaaagaataaattcaataaatggaatagagtgtatagagcctaaaggagccttttatatgtttgctgatataaataaagtaataggtaagaaaatcaatggagaagaaataaaaaactctgtggatttttgtgaaaaattattagaattatataaagtagctgttgttccaggagcggcttttggtttagaaaatcacataaggctttcctatgctatatctatggaaaatatagaaaaaggattggacagaatatcaaattgtgttagcgaattacaaagttaa

SEQ ID NO: 145799 - protein, 397 aa, Clostridium tetani E88
MLSKKGKEISPSVTLAITAKANEMKKDGIDVVGFGAGEPDFNTPENIQNAAIKAMREGYTKYTPVSGVVELKDAIVNKFKKENNLIYKSSQIIVSTGAKQCIANLFMAILNPGDEVLISAPYWVSYPELVKLADGVPVFVDCKKENDYKYSIDELEKRVSSKTKAIIISSPNNPTGSIYYEEELRDIAEFCKKHNLIILSDEIYEKLIYGHNKHISIASLNEDTYNRTVVINGVSKTYAMTGWRIGYAAGPGNVIKLMNNIQSHMTSNPNSIAQYAALEALTGEQESINSMVSEFEKRRNYMVERINSINGIECIEPKGAFYMFADINKVIGKKINGEEIKNSVDFCEKLLELYKVAVVPGAAFGLENHIRLSYAISMENIEKGLDRISNCVSELQS

SEQ ID NO: 145800 - DNA, 1206 bp, Lactobacillus plantarum WCFS1
  CDS (1)..(1206): transl_table=11
atgtacatggaattatcgcgtaaagtaatgcaggttcaaccgtcagcgacattgaagatcagtgcgactgccaagcaaatgatggcggacggcgttgacgttatcaatttaggaatcggtgaaccggattttcagaccccggataacattaagcaagcagccattgatagtattcaaaatggtcaagcgagtttctacacaccggcaactggattaccagctttaaaacaagccatcagtcagcgaattgaggctgaccatcactaccattttgatcctaatcagatcgtcgtaacggatggcgcaaaaatggcgttgtttacgttattccaagttattctgaatcccgacgatgaagtgttattaccagtcccatactgggtcagctattcggagcaagttaaattagctggtggtgtgccagtcgaagttagcaccgatgaacagttgcggtttaccactgctgatttggaagcgcagcggacgcctaagacgaaggccttagtcttgaattcgccacagaatccatccggtctggttttcagccgtgcagaattgacggcgatcgtgaattgggccgttgaacacgacgttttggtaattgcggatgaaatttatgaaaagttattatataacggtaatgaatttacatccgtgttagaattagatgatgctaatatggatcacgtggttttgatcaatggggtttcaaaagcctattccatgactggttggcgtatcggatatgctgccgggccacaaaccatcatggctaagatgggggtcgtgttaggtcacgctgctagcaacccagccgccgtatcacaatatgctgcgattgaagcttttagtggtgaccaatcatcggttgaaacgatgcgtcagggctttgaagcgcggttaaacgaactatacccactgatcgagcgtttacctgggtttaagatgcctgctggcaaaccagcgggagccttttacttgttcccagatattacggaagcattgcgtttaacaggctatgcagatgcaccggcctttgtgacggcagtgttattagaagcccatgtcggtttagtgcctggagaggcgtttggcatgcccggttgtttacggttaagctatgcaactgatatcgattccttgcgagaggcccatcgacggttacaaaaatttatgacagaaaaaattgctgaacaagcaaagtaa

SEQ ID NO: 145801 - protein, 401 aa, Lactobacillus plantarum WCFS1
MYMELSRKVMQVQPSATLKISATAKQMMADGVDVINLGIGEPDFQTPDNIKQAAIDSIQNGQASFYTPATGLPALKQAISQRIEADHHYHFDPNQIVVTDGAKMALFTLFQVILNPDDEVLLPVPYWVSYSEQVKLAGGVPVEVSTDEQLRFTTADLEAQRTPKTKALVLNSPQNPSGLVFSRAELTAIVNWAVEHDVLVIADEIYEKLLYNGNEFTSVLELDDANMDHVVLINGVSKAYSMTGWRIGYAAGPQTIMAKMGVVLGHAASNPAAVSQYAAIEAFSGDQSSVETMRQGFEARLNELYPLIERLPGFKMPAGKPAGAFYLFPDITEALRLTGYADAPAFVTAVLLEAHVGLVPGEAFGMPGCLRLSYATDIDSLREAHRRLQKFMTEKIAEQAK

SEQ ID NO: 145802 - DNA, 1212 bp, Pseudomonas syringae pv. tomato str. DC3000
  CDS (1)..(1212): transl_table=11
atgcagttcaacaaatcgaacaagctcgcaaacgtctgctacgacattcgcgggccagtgctcaagcacgccaaacgcctggaagaggaaggccatcgcatcctcaagctgaatatcggcaacccggcaccgtttggtttcgaggcgccggacgaaatcctgcaggacgtgatccgcaacctgccgaccgctcagggctacagcgactccaagggcctgttcagcgcccgcaaggcggtcatgcagtactaccagcagaagcaggtcgaaggtgtcggcatcgaagacatctacctgggcaacggcgtttccgagctgatcgtgatgtcgatgcaggcgctgctaaataacggcgacgaagtgctggttccggcacccgattacccattgtggaccgccgcagttgcgctgtccggtggcagcccggtgcattatctgtgcgacgagcaggccaactggtggcctgaccttgaagacatcaaggccaagatcacgccgaacaccaaggccatggtcatcatcaacccgaacaaccccaccggtgcggtgtattcccgcgaagtgctgctgggcatgctggagctggcccgtcagcacaacctggtggtgttctccgacgaaatatacgacaaaatcctgtatgacgacgccgtgcatatctgcaccgcctcgctggcgccggacctgctgtgcctgaccttcaacggcttgtcgaaatcgtaccgcgttgcgggcttccgctcgggctggatcgccatttccgggccgaaacacaacgcgcagagctacatcgaaggcatcgacattctggccaacatgcgcctgtgcgccaacgtgcctagccagcacgccatccagaccgcgctgggcggctaccagagcatcaatgacctgatcctgccaccaggtcgcctgctggagcagcgcaaccgcacctgggagttgctcaacgacattcccggcgtgagctgcgtcaagccgatgggcgcgctgtatgcgttcccgcgcatcgacccgaaggtctgcccgatcttcaacgacgagaagtttgtgctcgacctgctgctctcggaaaaactgctggtggttcagggcactgcgttcaactggccttatcctgaccacttccgcgtggtgaccctgcctcgggtcgacgagctggagcaggccattggccgcatcggcaacttcctcaagggttatcgtcagtaa

SEQ ID NO: 145803 - protein, 403 aa, Pseudomonas syringae pv. tomato str. DC3000
MQFNKSNKLANVCYDIRGPVLKHAKRLEEEGHRILKLNIGNPAPFGFEAPDEILQDVIRNLPTAQGYSDSKGLFSARKAVMQYYQQKQVEGVGIEDIYLGNGVSELIVMSMQALLNNGDEVLVPAPDYPLWTAAVALSGGSPVHYLCDEQANWWPDLEDIKAKITPNTKAMVIINPNNPTGAVYSREVLLGMLELARQHNLVVFSDEIYDKILYDDAVHICTASLAPDLLCLTFNGLSKSYRVAGFRSGWIAISGPKHNAQSYIEGIDILANMRLCANVPSQHAIQTALGGYQSINDLILPPGRLLEQRNRTWELLNDIPGVSCVKPMGALYAFPRIDPKVCPIFNDEKFVLDLLLSEKLLVVQGTAFNWPYPDHFRVVTLPRVDELEQAIGRIGNFLKGYRQ

SEQ ID NO: 145804 - DNA, 1215 bp, Vibrio parahaemolyticus RIMD 2210633
  CDS (1)..(1215): transl_table=11
atgcaaaatatcgggatgtcgtcaaaactcgacaatgtctgctacgacattagggggcctgtactcaaacatgctaagcgcatggaggaagaagggcataaaatcctaaagttgaacattggtaaccctgccccatttggttttgacgcccctgatgagattcttgtagatgtaattcgtaatctaccgacctctcaaggctactgtgattccaaaggcatttactctgcgcgtaaagcggtggttcaacattaccaacgcaaaggcattcgttctttagacgtagaagatgtgtacgtcggtaatggcgtgtcggagctgatcgtgatggcaatgcaagcgctgctaaacaacggcgatgaaatgctcatccctgcgcctgactacccattgtggacggcatcagtagcgttgtctggtggcaaccccgttcattatctgtgtgatgaacaatcggattggtatccagaccttgatgacatcaaaaagaaaatcacgccgaagacccgcggtattgttctgatcaacccgaacaatccaacaggtgctgtatatagtcgtgacttcttgcttgaagtgattgagattgctcgccaacacaagctgatcattttcgctgacgagatttacgacaaagtgctttacgatggcgcaacacacacttctgttgcgacgctaacggaagacgtacttgtgatgaccttcaatggtttgtcgaaagcttaccgggtatgtggtttccgcggtgggtggatgttcttaactggtccaaaacacttagcacaaggctacgttaacggtctagagttgctctcttctatgcgtctttgtgccaacgtgccgatgcaacatgcgattcaaaccgcgctaggtggctaccaaagtatcaatgagttgatcttacctggtggccgattgctagagcagcgtaatcgtgcgttcgagctgatcaaccagatcccaggggtatcttgtgtgaaacccaaaggtgccatgtacttattccctaaaatcgataccaagatgtacaacatcaagaatgaccaacagatggtgctcgatttcttgaaacaggaaaaagtactgctagtacaaggctcaggttttaactggccaaaaccagaccatttccgcattgtgactttgccacacgttgaagatctggaaaccgcaatcggacgcttcgagcgattcctatcaacctacagccagtaa

SEQ ID NO: 145805 - protein, 404 aa, Vibrio parahaemolyticus RIMD 2210633
MQNIGMSSKLDNVCYDIRGPVLKHAKRMEEEGHKILKLNIGNPAPFGFDAPDEILVDVIRNLPTSQGYCDSKGIYSARKAVVQHYQRKGIRSLDVEDVYVGNGVSELIVMAMQALLNNGDEMLIPAPDYPLWTASVALSGGNPVHYLCDEQSDWYPDLDDIKKKITPKTRGIVLINPNNPTGAVYSRDFLLEVIEIARQHKLIIFADEIYDKVLYDGATHTSVATLTEDVLVMTFNGLSKAYRVCGFRGGWMFLTGPKHLAQGYVNGLELLSSMRLCANVPMQHAIQTALGGYQSINELILPGGRLLEQRNRAFELINQIPGVSCVKPKGAMYLFPKIDTKMYNIKNDQQMVLDFLKQEKVLLVQGSGFNWPKPDHFRIVTLPHVEDLETAIGRFERFLSTYSQ

SEQ ID NO: 145806 - DNA, 1239 bp, Streptococcus pyogenes SSI-1
  CDS (1)..(1239): transl_table=11
atggaatacgaggtgtatgagactatgaaaattattgaaaaatcatcaaaattagaacatgttgcctatgatattcgagggcctgttttggatgaagctaatcgcatgattgcgagtggtgaaaaaattctgcgtttaaatactggcaatcctgctgcttttggttttgaagcaccagatgaagtgattcgtgatttaattgtcaacgcgaggctaagtgagggctattctgacagtaaagggattttttcagcgcgtaaggctatcatgcagtattgtcaactcaagggcttcccagatgttgacattgaagatatttatttgggaaatggcgtgtcagagttgatatccatatcccttcaagctttgctagataatggcgatgaagttttagtaccaatgccggattatcctttatggacggcttgtgtgagtcttggtggaggaaaagcggtccattatctttgtgatgaagaagctggttggtatcctgatattgctgatatcaaatcaaaaatcacgagtcgcaccaaagctattgtggtcatcaatcctaataacccaacaggagccctttatcctaaggagattttagaagacatcgttgctttggcaagagaacaccagctgattatttttgccgatgaaatctatgatcgtttggtgatggatggtaaagagcatattgctattgcaagtttggcacctgatgttttttgtgtatctatgaatggtctttccaaatctcatcgtattgctggttttcgtgttggatggatggtcttatcaggtcctaaagaccatgttaaaggttacattgaagggttaaacatgcttgccaatatgcggttatgctccaatgttttagcccaacaagttgttcaaacttccttaggaggtcatcaatcagttgatgcactgttactgccaggagggcgtatttttgagcaacgtaattttatttatgaagctattaatgctatccctggcttatcggcagttaaacctgaagcaggtctttatttatttccgaaaattgatcgtcagatgtatcgtattgatgatgatgaagaatttgtcttacagttattaaagcaagaaaaagtgatgttggtacatggacgtggttttaactggaaagatccagatcacttccgtattgtttacctaccaagtgtagaagaattagaagatgtccaagaaaagattacacgtgtcttataccagtatagacgttaa

SEQ ID NO: 145807 - protein, 412 aa, Streptococcus pyogenes SSI-1
MEYEVYETMKIIEKSSKLEHVAYDIRGPVLDEANRMIASGEKILRLNTGNPAAFGFEAPDEVIRDLIVNARLSEGYSDSKGIFSARKAIMQYCQLKGFPDVDIEDIYLGNGVSELISISLQALLDNGDEVLVPMPDYPLWTACVSLGGGKAVHYLCDEEAGWYPDIADIKSKITSRTKAIVVINPNNPTGALYPKEILEDIVALAREHQLIIFADEIYDRLVMDGKEHIAIASLAPDVFCVSMNGLSKSHRIAGFRVGWMVLSGPKDHVKGYIEGLNMLANMRLCSNVLAQQVVQTSLGGHQSVDALLLPGGRIFEQRNFIYEAINAIPGLSAVKPEAGLYLFPKIDRQMYRIDDDEEFVLQLLKQEKVMLVHGRGFNWKDPDHFRIVYLPSVEELEDVQEKITRVLYQYRR

SEQ ID NO: 145808 - DNA, 1218 bp, Enterococcus faecalis V583
  CDS (1)..(1218): transl_table=11
atgagaaattttaaaaaatccgataaattaaataacgtaagttacgatgtccgtggtcctgttttagaagaagcagaacgcatgcaagaagagggcatacgtattttgaaattaaatacagggaatccagcgccatttggttttgatgccccaaatgaaattgtgcgcgacatgattgtaaatgttcgcgattcagaaggttattccgattcaaaaggtattttttctgcaagaaaagcgattgaacaatattgccaattaaaaaaatttcctaatgtaacgattaatgatatttacactggtaatggcgtgagtgaactaattaccatgtgtatgcaaggcttgttaaataacggcgatgaagtacttgtgccaatgccagactatcctttatggactgcatctgtttctttggcgggcggtacacccgttcattatatttgtgatgagcaagcagaatggtatccagacattgatgatataaaatcaaaaataacttcgaatacaaaagcaatcgttattatcaatcccaataatccgactggtgctttatatccgaaagagttattactagaaattgtcgaagtggcacgtcaaaatgatttaattatttactccgatgaaatttatgatcgcttggtcatggacggtttggttcatgtaccgattgctacattagctcctgatttatttgtcgtaacattgaatggtttgtcaaaatcacatcgagtggcaggcttccgatgcggttggatggtgttaagtggagataaatcacgagtaaaagggtatatcgaagggctaaatatgcttgcttccatgcggttatgctcaaatgtgttgtcacaacaaatcattcaaactgcattaggtggctatcaaagtgtcgatggtttacttttgccaggtggcagaatttacgaacaacgagaatttatttacaatgcgataaatgatattcctggtttatcagccgtgaagcctaaagcagctttctatatttttccgaaaattgatacggccaaatttgacatttatgatgatgaaaaatttgttttagatttcttacacaaacatcatattttattagtccatggtggtgggttcaactggcaacaacccgatcacttccgtattgtttatttaccgaagatggaagacttaaaaactacagcagataaaatgcgtgaatttttaagtacctacaaacaaaaataa

SEQ ID NO: 145809 - protein, 405 aa, Enterococcus faecalis V583
MRNFKKSDKLNNVSYDVRGPVLEEAERMQEEGIRILKLNTGNPAPFGFDAPNEIVRDMIVNVRDSEGYSDSKGIFSARKAIEQYCQLKKFPNVTINDIYTGNGVSELITMCMQGLLNNGDEVLVPMPDYPLWTASVSLAGGTPVHYICDEQAEWYPDIDDIKSKITSNTKAIVIINPNNPTGALYPKELLLEIVEVARQNDLIIYSDEIYDRLVMDGLVHVPIATLAPDLFVVTLNGLSKSHRVAGFRCGWMVLSGDKSRVKGYIEGLNMLASMRLCSNVLSQQIIQTALGGYQSVDGLLLPGGRIYEQREFIYNAINDIPGLSAVKPKAAFYIFPKIDTAKFDIYDDEKFVLDFLHKHHILLVHGGGFNWQQPDHFRIVYLPKMEDLKTTADKMREFLSTYKQK

SEQ ID NO: 145810 - DNA, 1185 bp, Coxiella burnetii RSA 493
  CDS (1)..(1185): transl_table=11
atgaatgatgtcttatccgtccgagcgcaacaacttgaaccctcagtaacattggctgtctccgatctcgcacgcgagcttttaaacaagggccatgacgtgatcagtctcagcgcaggtgaaccggattttgacaccccggactttatcaaacagtccgccattaaagcaattcaagaaggctttaccaaatacaccaatgtagacggaactcctgccctaaaagcggcgattgtccataaattaaagcgcgataatcacttaaactacgagccttctgaaatactggtcagcggcggagccaaacaatcgatctataacgtcctgatgggaacgctaaatgcgggggacgaagccatcattcctgccccttattgggtgagctatccaccaatggtacaactggcggaagcaaaacccattattatctcagcgaccattgaccaaaattttaaactcactcccggtcagctctctcaagcgattactccccaatcgcgactgctgattttaaacagtcccaacaacccttccggagttgcttatactgaaagtgaattaaaagcgttggcagacgttttgatggagcatccccaaattttaattctttccgatgaaatttatgaatatattctgtggggacaaaaccgttttgtaaatatccttaacgtttgcccggaattgcgcgatcgcactatcattatcaacggcgcttccaaggcttatgccatgaccggatggcgaattggttatgcggctggtcctaaatcgattattcaagcaatgaaaaaaattcaatctcagagtacttcttctcccaattcgattgcccaagtcgctgccacgacagcactcggcgctcagcgcggtgattttgcttacatgtatgaggcttataaaacacgccacgatttggtgctgaaagcccttaatcaaatgaaaggtgttcactgcattcccgctgacggcgccttttacctcttccccgatgtttcggctgccatccaacagctcggattagaggatgacatcaaactcggaacgtacttattggataaaacgaaagttgccgtcgtccccggaagcgcctttggctcgcccggacacgttcgcctttcttgtgcaaccagcaccgaaaaattgcaagaagccctggagcggttagcgtcggtactggattattag

SEQ ID NO: 145811 - protein, 394 aa, Coxiella burnetii RSA 493
MNDVLSVRAQQLEPSVTLAVSDLARELLNKGHDVISLSAGEPDFDTPDFIKQSAIKAIQEGFTKYTNVDGTPALKAAIVHKLKRDNHLNYEPSEILVSGGAKQSIYNVLMGTLNAGDEAIIPAPYWVSYPPMVQLAEAKPIIISATIDQNFKLTPGQLSQAITPQSRLLILNSPNNPSGVAYTESELKALADVLMEHPQILILSDEIYEYILWGQNRFVNILNVCPELRDRTIIINGASKAYAMTGWRIGYAAGPKSIIQAMKKIQSQSTSSPNSIAQVAATTALGAQRGDFAYMYEAYKTRHDLVLKALNQMKGVHCIPADGAFYLFPDVSAAIQQLGLEDDIKLGTYLLDKTKVAVVPGSAFGSPGHVRLSCATSTEKLQEALERLASVLDY

SEQ ID NO: 145812 - DNA, 1209 bp, Streptomyces avermitilis MA-4680
  CDS (1)..(1209): transl_table=11
atggagttccggcagtcgagcaagctcagcgaggtctgttacgagatccgcggcccggtgatcgagcacgccaacgcgctggaggaggcgggccacagcgtgctgcgcctgaacaccggcaaccccgcgctcttcggcttcgaggcgcccgaggagatcctccaggacatgatccggatgctcccccgggcgcacggctacaccgactcgcgcggcgtcctctccgcccgccgcgccgtggcccagcgctaccaggaccgtggcctggaggtcgacgtcgacgacgtgttcctgggcaacggcgtctccgaactcgtctcgatggccgtacaggcgctgatcgaggacggcgacgaagtcctcatcccggccccggacttccccctctggacggccgtcaccacgctcgcgggcggcaaggcggtgcactacctctgcgacgagcaggccgactggtacccggacctggcggacatggccgcgaagatcaccgaccgcacgcgcgccgtggtcatcatcaaccccaacaaccccaccggcgcggtctatccgaaggagatcgtcgagggcatcctcgatctcgcccgtcggcacggcctgatggtgttcgcggacgagatctacgaccagatcctgtacgacgacgccgtgcaccactcggccgccgccctcgcgcccgacctggtggtcctcaccttctgcggcctgtcgaagacgtaccgcgtggccggcttccggtccggctggctggtcgtcacgggccccaagcagcacgcccgcagctatctggagggcctgacgatgctcgcctccatgcggctgtgcgcgaacgcccccgcccagtacgcgatccaggccgcgctcggcggccgccagtccatccaggagctgaccgcaccgggcggccggctgtacgagcagcgcgaccgcgcctggcagaagctcaacgagatcccgggcgtctcgtgcgtgaagccgaagggcgcgttgtacgcgttcccgcgcatcgaccccaccgtgcacaagatccacgacgacgagaagttcgtcctggacctgctgctgcgggagaagatccaggtggtccagggcaccggcttcaactggccccgccccgaccacttccgcatcctcacgctcccccacgcggacgacctggacgcggcgatcagccggatcgggcggttcctgagcgggtaccggcagtaa

SEQ ID NO: 145813 - protein, 402 aa, Streptomyces avermitilis MA-4680
MEFRQSSKLSEVCYEIRGPVIEHANALEEAGHSVLRLNTGNPALFGFEAPEEILQDMIRMLPRAHGYTDSRGVLSARRAVAQRYQDRGLEVDVDDVFLGNGVSELVSMAVQALIEDGDEVLIPAPDFPLWTAVTTLAGGKAVHYLCDEQADWYPDLADMAAKITDRTRAVVIINPNNPTGAVYPKEIVEGILDLARRHGLMVFADEIYDQILYDDAVHHSAAALAPDLVVLTFCGLSKTYRVAGFRSGWLVVTGPKQHARSYLEGLTMLASMRLCANAPAQYAIQAALGGRQSIQELTAPGGRLYEQRDRAWQKLNEIPGVSCVKPKGALYAFPRIDPTVHKIHDDEKFVLDLLLREKIQVVQGTGFNWPRPDHFRILTLPHADDLDAAISRIGRFLSGYRQ

SEQ ID NO: 145814 - DNA, 1212 bp, Streptomyces avermitilis MA-4680
  CDS (1)..(1212): transl_table=11
atgcaggtgatccagtccacgaagctcgccaacgtctgctacgagatccggggcccggtgctcgaggaggcgatgcggctggaagcggctggtcatcggatcctcaagctcaacacgggcaatccggcggcgttcggcttcgagtgcccgcccgagatcctcgaggacatcctccgcaacgtctcctccgcacacggctacggcgacgcgaagggcctgctggccgcccgccgcgccgtcgtcatgcacaaccagaccctcggcatcgagacggacgtcgagcacgtcttcgtgggcaacggcgtctccgagctgatcgtgatggccatgcagggcctgctggacgacggcgacgaggtgctcgtaccggcgcccgactacccgctgtggaccgcctccgtctccctgtccggcggcacggccgtgcactaccactgcgacgagcagtcggactggatgcccgacctcgccgacgtggagcgcaaggtcaccgaccgcaccaaggcgatcgtcatcatcaacccgaacaacccgacgggcgcggtgtacgacgaggcgatgctgcggggcctgacggacatcgcccgccgccacaacctgctcgtctgctcggacgagatctacgacaagatcctctacgacggcgccacgcacaccccgaccgccgcggtcgcccccgatctgctcacgctgacgttcaacggcatgtcgaaggcgtaccgcgtggccggctaccgggtcggctggatggcgatctccgggccgcgcgcgcacgccgactcgtacatcgagggcctgacgatcctggcgaacatgcggctgtgcgcgaacatgccgggtcagcacggggtggtcgccgcgctgagcggccgtcagacgatcaacgaactggtgctgccgggcggacggctcaaggaacagcgggacgtggcgcacgagctgctgacccagatccccggcgtgagctgtgtgaagccgaagggcgcgctctatctgttcccgcggctcgaccccaaggtcttcaagatcaaggacgaccggcagatggtgctcgacctgctgcgccgcgagaagatcatggtggtccagggcacgggcttcaactggccggaccccgaccacttccgggtggtgaccctgccgacggtgggcgatctgacctcggcgatcacccggatcgggaacttcctggacggttacagccagccgtga

SEQ ID NO: 145815 - protein, 403 aa, Streptomyces avermitilis MA-4680
MQVIQSTKLANVCYEIRGPVLEEAMRLEAAGHRILKLNTGNPAAFGFECPPEILEDILRNVSSAHGYGDAKGLLAARRAVVMHNQTLGIETDVEHVFVGNGVSELIVMAMQGLLDDGDEVLVPAPDYPLWTASVSLSGGTAVHYHCDEQSDWMPDLADVERKVTDRTKAIVIINPNNPTGAVYDEAMLRGLTDIARRHNLLVCSDEIYDKILYDGATHTPTAAVAPDLLTLTFNGMSKAYRVAGYRVGWMAISGPRAHADSYIEGLTILANMRLCANMPGQHGVVAALSGRQTINELVLPGGRLKEQRDVAHELLTQIPGVSCVKPKGALYLFPRLDPKVFKIKDDRQMVLDLLRREKIMVVQGTGFNWPDPDHFRVVTLPTVGDLTSAITRIGNFLDGYSQP

SEQ ID NO: 145816 - DNA, 1227 bp, Nitrosomonas europaea ATCC 19718
  CDS (1)..(1227): transl_table=11
atgcaacccatcaagaaatccagcaaactcgataatgtctgctacgacatacgcggcccggttctcgatcgcgccagacaaatggaggatgaaggccagcgtgttatcaagctcaacatcggcaatcctgcttccttcgggttcgaggcgccggacgagattctgcaggatgtcatccgcaatctttctgctgcatccggttattgcgattccaaagggttgtttgctgcccgcaaagccatcatgcactacacgcaggaaaaaaatatcgccaacgtgcagatggatgacatttatatcgggaatggcgtatcggaactgatcatgctggccacgcaggcgctgctggaaaatggtgatgaaatactggttccctcgccggattacccgctgtggacggcagccatctcgcttgccggcggggttgcacgtcattacacctgtgacgaacaatccagctggctgcccgatccggaaaacataaaagcccaggtcagcagcagaacccgggccatcgtaatcatcaaccccaacaacccgaccggtgcgctgtatccggatgatctgttgcgcgaaatcattgaaattgcccggcgtaacaatctgatcatttttgcggatgaaatctacgacaaaattctttacgactctgccagccacacttcggttgcctcgctggctgatgatgttttattcgttacattcaacggtttatccaaaaactaccgtgcagccggctttcgctccggctgggtcgtcgtttccggtaacaagactcatgcacgggattacattaccgggctcaacatgctggcatcgatgcgcctgtgcgccaatgttccggcacaattcggcatccagactgcattaggcggttatcagagcatacatgatctcaccatgcctaccggccggctgaaacggcagcgtgatctggcctggaaactgctgaccgacatcccgggcgtgacctgcttcaaaccgcagagtgcactgtacctgttcccacgactcgatcccgactactatccagttaaagatgatgaacagtttgcactggatctgctgctggaagagaaggtgctggtggtacagggaaccgggttcaactggtcgcaacccgatcatttccggatcgtgtttctacccaacagtgatgatttgacagaagcaatcggccggatcgcgaagtttctcgaccgttatcgcacccgccacggcagttga

SEQ ID NO: 145817 - protein, 408 aa, Nitrosomonas europaea ATCC 19718
MQPIKKSSKLDNVCYDIRGPVLDRARQMEDEGQRVIKLNIGNPASFGFEAPDEILQDVIRNLSAASGYCDSKGLFAARKAIMHYTQEKNIANVQMDDIYIGNGVSELIMLATQALLENGDEILVPSPDYPLWTAAISLAGGVARHYTCDEQSSWLPDPENIKAQVSSRTRAIVIINPNNPTGALYPDDLLREIIEIARRNNLIIFADEIYDKILYDSASHTSVASLADDVLFVTFNGLSKNYRAAGFRSGWVVVSGNKTHARDYITGLNMLASMRLCANVPAQFGIQTALGGYQSIHDLTMPTGRLKRQRDLAWKLLTDIPGVTCFKPQSALYLFPRLDPDYYPVKDDEQFALDLLLEEKVLVVQGTGFNWSQPDHFRIVFLPNSDDLTEAIGRIAKFLDRYRTRHGS

SEQ ID NO: 145818 - DNA, 1182 bp, Rhodopirellula baltica SH 1
  CDS (1)..(1182): transl_table=11
ttgcctgaggtttcttccgcaagcaaccatcgctttcaaccttcatccaacaggcaacgagtcaacatgcatccctggatcgcggatcgaacggcctcctttgatagcagcggaattcgaaaagtcttcgatctcgctgcgaaactgaaagacccgatcaacttgtccatcgggcaaccggactttgatgtccccgaggaaattcaggacgcgaccgtcgatgcaattcgatcgggcaaaaacgcatactcgccaacccagggtatcgcgccgctgcgtgagaaactgctggcggaaatcaacgccaagtatcccggccaaaatcgcgacgtgtttgtcagcagcggcacctcgggcggtttggtcctttcgctgctttcgatgatcaatccgggtgacgaggtcatcttcctggatccctatttcgtcatgtacccggctctcgtgagcttgtgcggtggtatccccgtgacggtcgattcgtacccggatttccggttggatccagccaagatcgaagccgcgatcacacccaaaaccaagatgatcctggtcaacagtcccgccaatccaaccggcgtgaccgcgtcggagcaagatcttcgagatgtcggcgatttggcggccaagcacaacatcgcgctgctttcggacgagatctacagccgattcttctacgacggcgacttcgcatctcccgcggccaccaatcccgacacaatcgtgatcgacggtttcagcaaatcgcacgcgatgaccggatggcgagtgggctacgtccacggaccgcccgagatcattgcgacgatgctcaagatccaacagtattcgttcgtctgctcgccccagcccgctcagtggggagctctccgtgcgatggaaatttcgctggacggccacattgacgactaccgtcgcaaacgcgacttcatggtggaacaactttcgccgcacttcgaactgaccagccccggcggtgcgttttatctgttcccgaaagcccccggcaccgaaggggggacggcgtttgtcgaaagagcgatcgcggacggcctgctgatcattcccggcaagattttcagcagccgcgattctcacttccgcgtcagcttcgccgccagcgatgacacgctgcgtcgcggtgccgaacgcctgatcaagctggctggcgacaatcgctga

SEQ ID NO: 145819 - protein, 393 aa, Rhodopirellula baltica SH 1
MPEVSSASNHRFQPSSNRQRVNMHPWIADRTASFDSSGIRKVFDLAAKLKDPINLSIGQPDFDVPEEIQDATVDAIRSGKNAYSPTQGIAPLREKLLAEINAKYPGQNRDVFVSSGTSGGLVLSLLSMINPGDEVIFLDPYFVMYPALVSLCGGIPVTVDSYPDFRLDPAKIEAAITPKTKMILVNSPANPTGVTASEQDLRDVGDLAAKHNIALLSDEIYSRFFYDGDFASPAATNPDTIVIDGFSKSHAMTGWRVGYVHGPPEIIATMLKIQQYSFVCSPQPAQWGALRAMEISLDGHIDDYRRKRDFMVEQLSPHFELTSPGGAFYLFPKAPGTEGGTAFVERAIADGLLIIPGKIFSSRDSHFRVSFAASDDTLRRGAERLIKLAGDNR

SEQ ID NO: 145820 - DNA, 1230 bp, Bordetella bronchiseptica RB50
  CDS (1)..(1230): transl_table=11
atgtcccgcgccgacctagatacccgtctttccgaccgcctcgccgcttcccgcccctccgccaccggagcggtcagcgaactggcccgccgcctggcggccgagggccgctccgtcatcagcctcagcgagggcgagctggacttcgacacgcccgcccacatccagcaagcggccatcgacgccatcaaaggggggcagacccgctacaccagcgtgggcggcacgccggccctgaaggcggccatcgcgcgcaagttcgcccgcgaccaccagctcgactacgcgccggccgaactcatcgccgccaccggcgccaagcagatcctcttcaacgccctgctggccaccatcgacccgggcgacgaggcgctggtggtggcgccgttctgggtgtcctatacggaaatggcgcgcatcgccggcggcacgccggtcgtgatcacccccgacgccgccaaccagttcaagctgacgcccgaactgctggccgcccacatcacgccgcgcacgcgctggctcatcctcaacgggccgtgcaatccatccggcgcgctgtacagccgcgaggagctggcagccctggccgaggtggtgcgccagcatccgcgcctgctggtcatgtcggacgacatctatgaacaactggtgtacgagggcaagttcacctccttcgtcgaagcggcgccggacatgcgcgagcgcacgctgaccatcaacggcgtatccaagacctacgccatgaccggctggcgcctgggctacgccggcgggccggcgtggctgatcaaggcgctggaactgctgcagtcgcaaagcaccagcaatcccagctcgatcagccaggcggccgccgccgccgcgctcgacggcccgcaggatttcctccaggactggcgcgccagcctgagcagccgccgcgacatggcgctgtcggtgctgcgcgacgccgcgccggcgatgacattcacccgcccgccggcggccttctatctgttcgccgattgcagccaagccatcggcatgcgcacgcccaagggcgagcgcatcggcgacgatgccgatttcgcgcgctacctgctcgaagaagcgggcgtggcggcggtgccgggcagcgccttcgggctggccccttatctgcgcctgacgttctgcgtggccgaggcgcgcctgcggcaggcctgcgagcgcatcgtcgcggcctgcgcccgactggcccgtccggcatga

SEQ ID NO: 145821 - protein, 409 aa, Bordetella bronchiseptica RB50
MSRADLDTRLSDRLAASRPSATGAVSELARRLAAEGRSVISLSEGELDFDTPAHIQQAAIDAIKGGQTRYTSVGGTPALKAAIARKFARDHQLDYAPAELIAATGAKQILFNALLATIDPGDEALVVAPFWVSYTEMARIAGGTPVVITPDAANQFKLTPELLAAHITPRTRWLILNGPCNPSGALYSREELAALAEVVRQHPRLLVMSDDIYEQLVYEGKFTSFVEAAPDMRERTLTINGVSKTYAMTGWRLGYAGGPAWLIKALELLQSQSTSNPSSISQAAAAAALDGPQDFLQDWRASLSSRRDMALSVLRDAAPAMTFTRPPAAFYLFADCSQAIGMRTPKGERIGDDADFARYLLEEAGVAAVPGSAFGLAPYLRLTFCVAEARLRQACERIVAACARLARPA

SEQ ID NO: 145822 - DNA, 1305 bp, Chromobacterium violaceum ATCC 12472
  CDS (1)..(1305): transl_table=11
atgaaacaaccacaccgccaacgcaagaccgttccgtccggcgggcggcctgaaacggaaaccgccgccgccatgcagccagtacacaagtctcagaaactcgccaacgtctgttacgacatccgcggaccggtgctcgaacacgcgaagaggatggaggacgaggggcaccgcatcatcaagctgaacatcggcaacccggcgccgttcggcttcttcgccccggacgagatcatcgaggacgtgatcgtcaacctgccggcggcgtccggttactccgactccaagggtctgttcgccgcgcgcaaggccatcatgcattacgcgcagcagaagcacctgcccaacgtggcgatggacgacatcatcgtcggcaacggcgtgtccgagctgatcgtgatggcgatgcaggcgctgctggacaacggcgacgaagtgctggtgccggcgccggattatccgctgtggaccgcggcggtgagcctggccggcggcaaggccgtgcactacttgtgcgacgaggagcagggctggttccccagcatcgacgacatccgcgccaagatcacgccgaccacccgcgccatcgtcatcatcaacccgaacaatccgaccggcgcggtgtatccgcccgcgctgctgcagcagatcgtcgacgtcgcgcgccagcaccagctgatcatctatgccgacgagatctacgacaaggtgctgtacgacgcggtccggcacacttccatcgcctccttggcgccggacctgttcgtggtgacgctgaacggcctgtccaagaactaccgcgcctgcggttaccgcgccggctggatgatcctgtcgggcgagaaaaagcacgccaaggactacatcgaaggcctgaacatgctggcttcgatgcggctgtgcgccaacgtgccgtcgcaatacgcgatccagaccgcgctgggcggctaccagagcatcgacgacctggtggcgccgggcggacgcctggcgcgccagcgcgacctcgcccacaagctgctgaccgagattccgggcgtgtcctgcgtcaagccgcagggcgcgctgtacctgttccccaggctggatcccaaggtctacccgatcgccgacgaccagcagttcatcctggaactgctgcagcaggagaaggtattgctggtgcagggcagcggtttcaactggattgcgcccgatcacttccgcgtggtattccttcccaactcggacgatctgatcgaggccatcggccgcatcgcgcgcttcctggaaagctaccgcaagcgtcacggcgctgccgagtaa

SEQ ID NO: 145823 - protein, 434 aa, Chromobacterium violaceum ATCC 12472
MKQPHRQRKTVPSGGRPETETAAAMQPVHKSQKLANVCYDIRGPVLEHAKRMEDEGHRIIKLNIGNPAPFGFFAPDEIIEDVIVNLPAASGYSDSKGLFAARKAIMHYAQQKHLPNVAMDDIIVGNGVSELIVMAMQALLDNGDEVLVPAPDYPLWTAAVSLAGGKAVHYLCDEEQGWFPSIDDIRAKITPTTRAIVIINPNNPTGAVYPPALLQQIVDVARQHQLIIYADEIYDKVLYDAVRHTSIASLAPDLFVVTLNGLSKNYRACGYRAGWMILSGEKKHAKDYIEGLNMLASMRLCANVPSQYAIQTALGGYQSIDDLVAPGGRLARQRDLAHKLLTEIPGVSCVKPQGALYLFPRLDPKVYPIADDQQFILELLQQEKVLLVQGSGFNWIAPDHFRVVFLPNSDDLIEAIGRIARFLESYRKRHGAAE

SEQ ID NO: 145824 - DNA, 1173 bp, Wolinella succinogenes DSM 1740
  CDS (1)..(1173): transl_table=11
atgtattcccaccgaatcgagtctttgtcagaatctatgactattgctatcagcacgctagccagagagcttcagagcaaagggaaggatgtaatctctctttctgcgggtgagcctgattttgagacacctcaagtgattaaagacgaggcaatcaaggcgattgaggatggcttcactaaatacacctcggtggcagggatacctgagcttttgaaggcgattcaagccaagctggccagagacaatcatctagaatatgaaactaaggagattttggtgagcaatggagccaagcactccctttttaacatctttcaggccattgtagaggagggagacgaggtgattatcccttcgccctattgggtcacctatcccgaagtggtcacctattgcggtggaaaaaatatctttattgagacttgtgatgcgtcaggctttaagatgagtgctgcccaactcaaagccgctctcactcccaagactaaggcgctggttttgaccacgccctctaaccctacaggttcagtctacagtcgccaagagctggaggcgattgctgaggtgctcaaaggaaccaacgtctgggtggtgagcgatgagatgtatgaaaagcttgtctatggggtggaattcacctcggtggcgagcatctctgaggatatgctaaagcgcaccatcacggtgaatggcctgagcaaatcggctgcgatgacaggctggcgcatgggctatcttgcaaccaaagacaaaaagctcatcaagttgatggataatctccagagccaatgcacctccaatatctgttctatcactcaaaaagcctcgattcctggcttggatggtcgcatagatccagaggtggaaaagatgcgacaagagtttgagaggcggcgcaatttcgccgtggatgcgctcaatgccatcaaagggctctcagtcattaagcctgaaggggcattttatctctttgtgaacaccaaggcgctagagcttgattcgatgcagttttgcaaagatcttcttgaagaggagggtgtggcagttgttccagggattggctttgggatggaggggtattttcgactctcctttgccactagcatggagaagatagaagagggaatcaagcgaatcgctcgattctgtgagaagcgagagagggcttag

SEQ ID NO: 145825 - protein, 390 aa, Wolinella succinogenes DSM 1740
MYSHRIESLSESMTIAISTLARELQSKGKDVISLSAGEPDFETPQVIKDEAIKAIEDGFTKYTSVAGIPELLKAIQAKLARDNHLEYETKEILVSNGAKHSLFNIFQAIVEEGDEVIIPSPYWVTYPEVVTYCGGKNIFIETCDASGFKMSAAQLKAALTPKTKALVLTTPSNPTGSVYSRQELEAIAEVLKGTNVWVVSDEMYEKLVYGVEFTSVASISEDMLKRTITVNGLSKSAAMTGWRMGYLATKDKKLIKLMDNLQSQCTSNICSITQKASIPGLDGRIDPEVEKMRQEFERRRNFAVDALNAIKGLSVIKPEGAFYLFVNTKALELDSMQFCKDLLEEEGVAVVPGIGFGMEGYFRLSFATSMEKIEEGIKRIARFCEKRERA

SEQ ID NO: 145826 - DNA, 1188 bp, Gloeobacter violaceus PCC 7421
  CDS (1)..(1188): transl_table=11
atgtcccgcctggccacccgcgtcgcttcgctgactccatcgctcacgcttgccattgccgccaaagccaaggcgctggcggcgggcggcgtcgatgtgtgcggcctgagcgccggggaacccgatttcgatactcctgctcccatcaaggcggcggccaaggcggccctcgaccgcggtgagaccaagtacggaccggtggccgggcagccgcgcctgcgcgaacggattgcccgaaagttggagcgcgaaaacggcctaccctacacccccgagcagattctggtcaccaacggcggcaagcagggcctttacaacgcgatcatggccctcatcgaacccggcgatgcggtgctcatcccgagcccctactggctgagctacccggagatggtttcgctcgcgggcggtacctcggtgctcttgcccaccaccgaggcgaccggcttcaagatcacgcctgagcaactggaggccgccatcaccccccgcacccggttgctcatcctcaattccccctccaacccgacgggcatggtctacagccgccccgaactggaggcgattaccgaggtggttctgcgccacgacctgatggttctctccgacgaaatctacgaaaaactcgtctacgacggcgcgcggcaccacagcatcggcggcctggggcgcgaaatgtttgcgcgcacgatcaccagcggcggcttcagcaaggcttttgcgatgaccggctggcggctcgggtacctggccggtcccacggacctgattggggccgccggcgccattcagagccacagcacctccaacgtcgccgcctactcccaagccggggcgttggcggccctcgaagatccgcaggtggcgctcgaagtggagcggatggtgcgcgtcttcgccgagcggcgcaccgccatgtacgatgcggtggcggcgatcccgggtctgcgctgtgcccgtgcccagggggctttctatctgctgccggatatttccgccacgggcctcaattccacggccttctgcgaacaactgctcgaccaattccacgtcgctgcggtgcccggcatcgccttcggctcggacagccacgtccgcctttcttacgccaccgacctcgacaccatctacaaaggcgttgaacgtctcggccagtttgtgcgccagtgcctggccgtgcgcgcctga

SEQ ID NO: 145827 - protein, 395 aa, Gloeobacter violaceus PCC 7421
MSRLATRVASLTPSLTLAIAAKAKALAAGGVDVCGLSAGEPDFDTPAPIKAAAKAALDRGETKYGPVAGQPRLRERIARKLERENGLPYTPEQILVTNGGKQGLYNAIMALIEPGDAVLIPSPYWLSYPEMVSLAGGTSVLLPTTEATGFKITPEQLEAAITPRTRLLILNSPSNPTGMVYSRPELEAITEVVLRHDLMVLSDEIYEKLVYDGARHHSIGGLGREMFARTITSGGFSKAFAMTGWRLGYLAGPTDLIGAAGAIQSHSTSNVAAYSQAGALAALEDPQVALEVERMVRVFAERRTAMYDAVAAIPGLRCARAQGAFYLLPDISATGLNSTAFCEQLLDQFHVAAVPGIAFGSDSHVRLSYATDLDTIYKGVERLGQFVRQCLAVRA

SEQ ID NO: 145828 - DNA, 1215 bp, Photorhabdus luminescens subsp. laumondii TTO1
  CDS (1)..(1215): transl_table=11
atgctagcagttaaaaaatccagcaaattggataatgtttgttatgatatccgcggccccgtactcaaggaagctaaacgccttgaagaagaaggcaataaagtcctcaaattaaatattggtaatccagccccctttggttttgaagcaccagatgaaatcttggtagatgttatccgtaacttaccaacagcacagggttattcagattcgaaaggtctgtattctgcacgcaaagctatcatgcaacattatcaagcccggaatatgatggacgtaaccgttgaagatatttatatcggcaatggtgtttctgaattaatcgttcaggcaatgcaagcattactgaatactggtgatgaaatgctggttcctgcacctgattatcctctctggactgcggcagtttcactttccagtggcaaagccgtgcattatatgtgtgatgaagggtcagattggtttcctgacttaaatgatatccgcaacaaaattacgccccgcacacgtgggattgtgattattaaccctaataatccaacgggtgctgtatatagtaaagagctgttattggaagttgttgaaatagcccggcaacacaatttgattatttttgctgatgagatttacgacaaaatcttatatgacgatgccgagcatcattcaattgccgccctcgcgcctgatctgttaacggtaacatttaatggattatctaaaacatatcgggttgcaggttttcgtcaaggctggatggtattaaacggcccgaagaaacacgctaagagctatattgaaggtttggagatgctggcatcaatgcgtttatgtgccaatgtgccaatgcaacacgctattcaaactgctttaggcggttaccaaagtatcagtgaattcattttacctggtggccgtttgtatgagcagcgtaaccgagcatgggaattaatcaatcaaatccccggcgtttcctgcgtgaaacctaaaggcgctttatatatgtttccaaaaattgatgcaaaacgttttaatgttcacgatgaccagaaaatggtgcttgaccttttattacaagagaaggtcttgttagtgcagggaaccgcatttaactggccggaacctgaccatctccgcattgtgaccctaccaaggcttgatgaactggagatggcaattcagaaattcgcccgatttattggtaaatatcatcagtaa

SEQ ID NO: 145829 - protein, 404 aa, Photorhabdus luminescens subsp. laumondii TTO1
MLAVKKSSKLDNVCYDIRGPVLKEAKRLEEEGNKVLKLNIGNPAPFGFEAPDEILVDVIRNLPTAQGYSDSKGLYSARKAIMQHYQARNMMDVTVEDIYIGNGVSELIVQAMQALLNTGDEMLVPAPDYPLWTAAVSLSSGKAVHYMCDEGSDWFPDLNDIRNKITPRTRGIVIINPNNPTGAVYSKELLLEVVEIARQHNLIIFADEIYDKILYDDAEHHSIAALAPDLLTVTFNGLSKTYRVAGFRQGWMVLNGPKKHAKSYIEGLEMLASMRLCANVPMQHAIQTALGGYQSISEFILPGGRLYEQRNRAWELINQIPGVSCVKPKGALYMFPKIDAKRFNVHDDQKMVLDLLLQEKVLLVQGTAFNWPEPDHLRIVTLPRLDELEMAIQKFARFIGKYHQ

SEQ ID NO: 145830 - DNA, 1272 bp, Corynebacterium diphtheriae NCTC 13129
  CDS (1)..(1272): transl_table=11
atgaataacaaaaaagagactccacaagcagcccctgcccaacgcaagcgcacacggcggatatttgatcagtcggacaagttgaaaaatgtgctgtatgaaatccgtgggccggtgacggctgaagcagaggccatggagctcgacgggcaccggattctcaagctcaacacgggcaaccctgcgatctttgggttcgaggcccctgatgtgatcatgcgtgacatgattgcgtccttgcctacgtcgcaaggctattccacgtcgaaaggcatcattccggcacgtcgtgcgatcgtaacacgctacgaggtcattccaggttttcctgcttttgacgtagatgatgtttacatcggcaatggtgtatccgagctgattaccatgaccacccaagcgttgctgaacaacggcgacgaagtgctcattccgatgccggattatccgctgtggactgcggcgacgtctcttgcgggcggcaaaccggtgcactatctgtgcgatgaggaagacgattggaacccgtcgatcgaagacatcaagtccaagatcaccgagcgcaccaaagccattgtggtgattaaccctaataaccccaccggtgcggtgtattccaaggaagtcttgcaaaagatcgttgatgttgcccgtgaacatgatctgctgattttggccgatgagatctacgatcgcattctttacgatggcgccgtgcacaccaacatcgcagctcttgcacctgatcttttgtgcatcactttcaatggtttgtctaaggcttatcgtgtggcgggttatcgtgccggctggatgatcgtcaccggcccgaagaataatgctcgcggttttatcgagggtctcgatttgctgtcgggcacccgtctttgcgctaatgtgccaggccagcacgcaatccaggtggcgttgggtggccgccagtcgatttacgatctcacaggtcaaggtggccgtttgctggagcagcgcaatgtgacgtgggagaagctcaacgctattcctggcgtgagctgcgtgaagccgatgggtgcgttgtatgccttcccgaagctcgacttggagtactacgacatcaaggatgatgcccagctgatgcttgatttgctgcgccaggaaaaaatcttgatggtacagggtacgggctttaactgggataagccggatcatttccgtgtggttacgttgccgtgggcttcacagttgtcggaggccatggaccggttgggtaacttcctagccagctataagcagtaa

SEQ ID NO: 145831 - protein, 423 aa, Corynebacterium diphtheriae NCTC 13129
MNNKKETPQAAPAQRKRTRRIFDQSDKLKNVLYEIRGPVTAEAEAMELDGHRILKLNTGNPAIFGFEAPDVIMRDMIASLPTSQGYSTSKGIIPARRAIVTRYEVIPGFPAFDVDDVYIGNGVSELITMTTQALLNNGDEVLIPMPDYPLWTAATSLAGGKPVHYLCDEEDDWNPSIEDIKSKITERTKAIVVINPNNPTGAVYSKEVLQKIVDVAREHDLLILADEIYDRILYDGAVHTNIAALAPDLLCITFNGLSKAYRVAGYRAGWMIVTGPKNNARGFIEGLDLLSGTRLCANVPGQHAIQVALGGRQSIYDLTGQGGRLLEQRNVTWEKLNAIPGVSCVKPMGALYAFPKLDLEYYDIKDDAQLMLDLLRQEKILMVQGTGFNWDKPDHFRVVTLPWASQLSEAMDRLGNFLASYKQ

SEQ ID NO: 145832 - DNA, 1236 bp, Rhodopseudomonas palustris CGA009
  CDS (1)..(1236): transl_table=11
atgccgactcatgacggctgcaaggagaagacgatgccgttcctcgccaccgcgctcgatcgtgtgaagccgtccgcgaccatcgcggtcacggacaaagcgcgtgagctgaaagcggccgggcgcaacgtcatcggcttgggttccggcgagccggacttcgatactcccgccaacatcaagctggcggcgatccatgcggtcgaggccggcaagaccaagtacaccgcggtcgacggcattccggagctgaagcaggccatcatcgacaagttcaagcgcgagaacggcctgacctacaagccgaaccagatcatcgtcggtaccggcggcaagcaggtgctgtacaacgccctgatggcgaccatcaatccgggcgacgaggtgatcatcccggcgccgtattgggtcagctatccggagatggtcgcgctcgccggcggcgaaagcgtgccggtggtgtgcaccgccgagttcggcttcaagctgcagccggcggcactggaagcggcgatcacgccgaagaccaagtggatcattctcaactcgccctcgaacccgaccggcgcggcctacagccgtgccgagctgaaggcgctcaccgacgtgctggtcaagcacccgcatgtctgggtgatgaccgacgacatgtacgagcacctcgtctatgacgacttcgagttcaccaccccggcgcagatcgagccgaagctgttcgatcgcaccctcacggtgaacggcgtgtcgaagtcgtattgcatgaccggctggcggatcggttatgccggcggcccggccgagctgatcaaggcgatgtcgacgatccagtcgcagtcgacctcgaacccgtgctcgatcgcccagtgggccgccgtcgaggcgctcaacggtccgcaggacttcatcgacgcgcacaacaaggtgttcaaggagcgccgcgacctcgtcgtgtcgatgctgaaccaggcgaccggcatcgactgcccgcggcccgagggtgcgttctacgtctatccgtcgtgcgccggcaccatcggcaagaccgcgccgtcaggcaaaaagatcgagaccgaccaggacttcgtcaccgagcttctggaagcggaaggcgtcgcggtggtgcagggctcggcgttcggcctcggcccggcattccgcatctcctacgccaccaagacctcggatctcgaggatgcctgcaagcgcattcagcggttctgcggaaatttgcggtaa

SEQ ID NO: 145833 - protein, 411 aa, Rhodopseudomonas palustris CGA009
MPTHDGCKEKTMPFLATALDRVKPSATIAVTDKARELKAAGRNVIGLGSGEPDFDTPANIKLAAIHAVEAGKTKYTAVDGIPELKQAIIDKFKRENGLTYKPNQIIVGTGGKQVLYNALMATINPGDEVIIPAPYWVSYPEMVALAGGESVPVVCTAEFGFKLQPAALEAAITPKTKWIILNSPSNPTGAAYSRAELKALTDVLVKHPHVWVMTDDMYEHLVYDDFEFTTPAQIEPKLFDRTLTVNGVSKSYCMTGWRIGYAGGPAELIKAMSTIQSQSTSNPCSIAQWAAVEALNGPQDFIDAHNKVFKERRDLVVSMLNQATGIDCPRPEGAFYVYPSCAGTIGKTAPSGKKIETDQDFVTELLEAEGVAVVQGSAFGLGPAFRISYATKTSDLEDACKRIQRFCGNLR

SEQ ID NO: 145834 - DNA, 1293 bp, Mycobacterium avium subsp. paratuberculosis K-10
  CDS (1)..(1293): transl_table=11
atggacagtgatggcaccattggtggtgtgacaacccaccagctgcctgtgcactcgtccgcgcaccatcgccagcagcgtactttcgcccagtcgtccaagctccaggacgtcctgtacgagatccgcggcccggtacatcagcacgcggcgcggctggaggccgagggacaccgcatcctcaagctcaacatcggcaacccggcgccgttcggcttcgaggcgcccgacgtcatcatgcgcgacatgatccaggccctgccgtacgcccagggctactccgactcgcagggcatcctgcccgcgcgccgggcggtggtcacccgctacgagttggtcgacgggttcccccgcttcgacgtcgacgatgtctacctgggcaacggcgtgtccgaactgatcacgatgacgctgcaggcgctgctcgacaacggcgacgaggtgctgatcccgtcgccggactacccgctgtggacggcgtcgacctcgctggccggcggcacccccgtgcactacctgtgcgacgagacgcagggctggcagcccgacatcgccgatctggaatccaagatcaccgagcgcaccaaggcgctggtggtgatcaacccgaacaacccgaccggcgcggtgtacagcggcgaaatcctgagccagatggtcgatctggcgcgcaagcacgagctgctgctgctggccgacgagatctacgacaagatcctctacgacgacgccaagcacatcaacgtggcgtcgctggcgccggacatgctgtgcctgaccttcaacggcctgtcgaaggcgtaccgggtggccggctaccgggccggctggctggcgatcaccggacccaaggaccacgccggcagcttcatcgagggcatcaacctgctggccaacatgcggctgtgcccgaacgtcccggcgcagcatgcgatccaggtggccctgggcggccaccagagcatcgaggacctggtgctgccgggcgggcggctgctcgagcagcgcgacgtggcgtggagcaagctcaacgagatccccggggtgtcctgcgtcaaacccgccggcgccttgtacgcgtttccccggctggaccccgaggtctacgacatcaccgacgacgagcagctggtgctcgacctgctgctgcaggagaagatcctggtcacccacggcaccggcttcaactggccggcgccggatcacctgcgcatcgtgacgctgccgtgggcgcgggacctggccgccgcgatcgagcggctgggcaacttcctggtcggctatcgacagtaa

SEQ ID NO: 145835 - protein, 430 aa, Mycobacterium avium subsp. paratuberculosis K-10
MDSDGTIGGVTTHQLPVHSSAHHRQQRTFAQSSKLQDVLYEIRGPVHQHAARLEAEGHRILKLNIGNPAPFGFEAPDVIMRDMIQALPYAQGYSDSQGILPARRAVVTRYELVDGFPRFDVDDVYLGNGVSELITMTLQALLDNGDEVLIPSPDYPLWTASTSLAGGTPVHYLCDETQGWQPDIADLESKITERTKALVVINPNNPTGAVYSGEILSQMVDLARKHELLLLADEIYDKILYDDAKHINVASLAPDMLCLTFNGLSKAYRVAGYRAGWLAITGPKDHAGSFIEGINLLANMRLCPNVPAQHAIQVALGGHQSIEDLVLPGGRLLEQRDVAWSKLNEIPGVSCVKPAGALYAFPRLDPEVYDITDDEQLVLDLLLQEKILVTHGTGFNWPAPDHLRIVTLPWARDLAAAIERLGNFLVGYRQ

SEQ ID NO: 145836 - DNA, 1293 bp, Yersinia pestis biovar Microtus str. 91001
  CDS (1)..(1293)
atggcgtcggagtacattgagcaccttgcagtgttccacgctgaggacacgcttttaccagcaaaaggctcattttttatgtcccccattgagaaatccagcaaactggacaacgtctgttatgacattcgtggaccggtgctaaaagaagctaagcgtcttgaagaggaaggtaacaaggttctgaaactgaacatcggcaaccctgccccgtttggtttcgatgcacccgacgagattctggtggatgtaatccgtaatttaccgaccgcacaaggctattgcgactccaaaggcttgttttcggcacgtaaagccattatgcaacactatcaagcccgcaatatccgtgatctgacggtcgaggatatctacattggaaacggtgtttccgagttgatcgttcaatccatgcaagcattactgaatttgggtgatgaaatgctagtacccgcaccggattacccgctgtggacagctgccgtgtcgctctcaagtggtaaagcgattcattatatgtgtgatgaagagtcaggctggttccctgatttggatgatattcgcagcaaaatcactccgcgtacccgtgggattgtgattatcaacccgaataacccaaccggtgcggtatacagcaaagagctgctgttagaaattgttgaaattgctcgccagaatgacctaattattttcgctgatgagatctacgataaaattttgtatgacgatgctcagcaccattcgatcgccgcattagcccctgatttgctgaccgttacgttcaatgggctgtctaaaacataccgtgttgcgggtttccgccagggctggatggtgttgaacgggccgaaaaagcacgctaaagggtatattgaaggcttggaaatgctggcatcgatgcgtttgtgcgccaacgtaccaatgcagcatgcgattcaaaccgccttgggcggctatcagagcattagtgagtttatccaacctggtggccgtttgtacgagcagcgtgatcgggcctgggagcttatcaaccaaatccccggtgtttcctgtgtgaaacctcagggcgcgttgtatatgttcccacgtattgatcagaaacgttttaacctgaaagacgaccagaagttggtattggatctgttgttgcaagagaaagtgctattggtgcaaggtagcgcctttaactggccgtacccggaccatgtgcggatcgtcacgctgccacgggtggatgagctagagatggcggtgaggaagctggggcggttcttagagacgtatcatcagtaa

SEQ ID NO: 145837 - protein, 430 aa, Yersinia pestis biovar Microtus str. 91001
MASEYIEHLAVFHAEDTLLPAKGSFFMSPIEKSSKLDNVCYDIRGPVLKEAKRLEEEGNKVLKLNIGNPAPFGFDAPDEILVDVIRNLPTAQGYCDSKGLFSARKAIMQHYQARNIRDLTVEDIYIGNGVSELIVQSMQALLNLGDEMLVPAPDYPLWTAAVSLSSGKAIHYMCDEESGWFPDLDDIRSKITPRTRGIVIINPNNPTGAVYSKELLLEIVEIARQNDLIIFADEIYDKILYDDAQHHSIAALAPDLLTVTFNGLSKTYRVAGFRQGWMVLNGPKKHAKGYIEGLEMLASMRLCANVPMQHAIQTALGGYQSISEFIQPGGRLYEQRDRAWELINQIPGVSCVKPQGALYMFPRIDQKRFNLKDDQKLVLDLLLQEKVLLVQGSAFNWPYPDHVRIVTLPRVDELEMAVRKLGRFLETYHQ

SEQ ID NO: 145838 - DNA, 1278 bp, Apis mellifera
  CDS (1)..(1278)
atgtcgacacaggtttttcgcgatcgatggaacgtggaagcgtcagacatcgcgaggagcacccacaaccccataagatccatcgtggagagcctcgtggtcgagcctaatcccgccaaatctttgatctcgttgtcgatcggcgatccaactacgtttggcaatctaaaaccgccgaaagaggtaatcgaagcagttcaacaaagcctcgtctctcagctgtacaatggatatgcaccaagtacaggttatcagattgcaaaggaagctgtagcagagtatagttccaacgaatttgtaaaggtcgatgccaaggatgtaatattatgcagcggatgttcctgcgccctcgacctgtgtataacagcgttggcaagaagggagcaaaatatcctgataccacgacccggtttctctatctatcgaacgcttgcggaaggtcttggtatcaacgtaaaatcttacgacttacgcccggaactcggttgggaaatcgatctggatgatttggaatcgcagatcgacgaatcgacggcagcgatcgttataaataatccttcgaatccgtgcggttccgtgttcagcaaggatcacgcacttgacattctcgatgtagctgcccgttactacgtaccgataatagccgatgagatttacgagcatatggtatttcccgggcaaacttttcactcgttggcatccttgtcgagagaagttccgattttgtcgtgcagcggtttgacgaaaagatttttagtgcccggttggcgtatgggctggataatcattcacgatcgtcaaaacgttctggagaaagaggtggcgcttcattgcttaagtcaaagaattatcggtagcaatacgcttgtccagggtgctctgcccgctattttgaagaacacgccacagcagttttacgatgacgttatgagaacgttatacaatcattcgaaattggcgtacgattacacgattaagattcctggactgaaaccaataatgcccaacggtgcaatgtacatgatggtttacatagatttaccttgttttccggaatttaattccgacctcgaattcgtgcagcgattgctaatggaggagtccgtgttttgtcttcctggccagtgcttcgattatccgtcctacatgaggctggtcatcacagttcccatggaaatgttggaggaagcttgccagagaattcaggaattttgcgagaggcatcactacaaaacagccaaagatacgcaaataaataatttaattgctacgtattga

SEQ ID NO: 145839 - protein, 425 aa, Apis mellifera
MSTQVFRDRWNVEASDIARSTHNPIRSIVESLVVEPNPAKSLISLSIGDPTTFGNLKPPKEVIEAVQQSLVSQLYNGYAPSTGYQIAKEAVAEYSSNEFVKVDAKDVILCSGCSCALDLCITALARREQNILIPRPGFSIYRTLAEGLGINVKSYDLRPELGWEIDLDDLESQIDESTAAIVINNPSNPCGSVFSKDHALDILDVAARYYVPIIADEIYEHMVFPGQTFHSLASLSREVPILSCSGLTKRFLVPGWRMGWIIIHDRQNVLEKEVALHCLSQRIIGSNTLVQGALPAILKNTPQQFYDDVMRTLYNHSKLAYDYTIKIPGLKPIMPNGAMYMMVYIDLPCFPEFNSDLEFVQRLLMEESVFCLPGQCFDYPSYMRLVITVPMEMLEEACQRIQEFCERHHYKTAKDTQINNLIATY

SEQ ID NO: 145840 - DNA, 2157 bp, Nasonia vitripennis
  CDS (242)..(1726)
ctaacctccaagctattatccaacatctcgcacatccgaagcgaggaggatctcagctatgtcgtcgtcgcgttcgcgtctccttctgcagcgccgtagcggcggtaatggcccgtcagctcgcaacttcagctgccttgtcggcggggagagtacggcaactactacaacaactcgccgcgccgccagcagtgcgtcatcggcagcagcgcgccgcggtgctaccagtctgctcagagcgatgacgggcagcacgaccggtgtccgggagcagtcctctggacagccccaacgtattctaaccgaggacaatgtgttcgagaacctcgtcaagatggagtacgcggtcaggggaccgctgctcattcgcgccctggagatagagaaggagttgcagaagggagccaagaagccgttcaaggaggtgatcaaggcgaacgtcggagatgctcacgctatgggacagaagcccatcactttcctcaggcaggtcctcgccatcgcgctttatccggagcttatgcaggatcctaggtaccccgacgatgctaaggaaagagcaaggacgatactcgagggctgcaagggcttcagcgtgggttcgtactcggagtcggctggtgtcgaggtgatcagaaaacacgcggccaagtacatcatggaccgcgacggtggcattcccagtgactacagaaacatcatcctgtcgaacggagcgtcggacagtattaaggcattcctgaagctgttcaacgagcatatcaacggcaagccgtcaggagttatggtcccgatcccgcagtacccattatactcggcgacaatagccgagtttgggctgcatcagataggctactacctcaacgaagacaataagtggtcgctggatatcagcgaactcgagcgatcctttggcgaggctcaacgtcacagcaacccacgagtcctcgttgtcataaaccctggtaacccaactgggcaggtgctctcgcgcgagaatatcgaggatgtcatcaggttcgcatacaagaaccgactgttcctcctggctgacgaggtttaccaggacaatatctatcacaaggactgctgcttccattcgtttaagaaagtcaccaacgagatgggcgaaccctacgcgagcatggaactcgcttccttcatgtcggtttcgaaaggttacatgggtgagtgcggtctgcgtggaggttacggtgagatcgtcaacatggacccgaaggtcatggccatcttgatgaagtccatctcggcgacgctgtgtccgaccgtcgtaggccaggctgcgatggatgtagtcgtcaaccctccgaggaatggagaaccttcctacaaacagttcatgaacgagaaacaaactacactggcatctctggctgagaggtcgcaactcgtagtcgacactctcaacgccattcccggtttccatgcaaatccagctatgggtgccatgtatgttttcccgagagtcgacttgccggagaaggctatcaaagcagcgaaagcggctggccaggtgcccgatgtcttctacgccttcaagttgctcgaatctaccggcatctgcgttattccgggctctggtttcggccagcgccccggcacatatcacttcagaacaacgatactgccgcagaaggaaaagatcaagactatgctcaacagcctcaaggaattccacctaaagttccttcaagagtacagttaggctggatgttaattaatttttttagtacgtaagtcggagccgatatgcgatgagaaatgtaaaaggtgatcaaatgataaagttttgcgctttaaaattcgataataatgataataataacgaataaaccaaactgtaacccaatgagtacactattgtgtttgtacactgtttgagaaatgtactactattactactatgtacgagtagcgtcatttcgcacagatgcagcgagcctgctcatcgttctttacctacatacgccttttttacacggttttttgcagatcgctagttttaattatttattattattgagcttagtggatttgtaaataatacaagagctgtctgtatcaaagttgttgacgttattcatgtatgtatactcttctgaactgtatgaattaaatttttcaacaaaactcaat

SEQ ID NO: 145841 - protein, 494 aa, Nasonia vitripennis
MTGSTTGVREQSSGQPQRILTEDNVFENLVKMEYAVRGPLLIRALEIEKELQKGAKKPFKEVIKANVGDAHAMGQKPITFLRQVLAIALYPELMQDPRYPDDAKERARTILEGCKGFSVGSYSESAGVEVIRKHAAKYIMDRDGGIPSDYRNIILSNGASDSIKAFLKLFNEHINGKPSGVMVPIPQYPLYSATIAEFGLHQIGYYLNEDNKWSLDISELERSFGEAQRHSNPRVLVVINPGNPTGQVLSRENIEDVIRFAYKNRLFLLADEVYQDNIYHKDCCFHSFKKVTNEMGEPYASMELASFMSVSKGYMGECGLRGGYGEIVNMDPKVMAILMKSISATLCPTVVGQAAMDVVVNPPRNGEPSYKQFMNEKQTTLASLAERSQLVVDTLNAIPGFHANPAMGAMYVFPRVDLPEKAIKAAKAAGQVPDVFYAFKLLESTGICVIPGSGFGQRPGTYHFRTTILPQKEKIKTMLNSLKEFHLKFLQEYS

SEQ ID NO: 145842 - DNA, 2986 bp, Aedes aegypti
  CDS (333)..(1967)
agtctcgactggctcgcgaatcgctctagttcggttaccaaggattgttttgtgtttttgctttaccctgtgctgtatctgtgaagtgtttgaaagttatctgcgtcatcgtttccagctgctccatccaacggaacttacgatctgatagtgtttgtcaacaacgcggccacaacaaaaaaccgccacgtgattctcctttgtgttgcgagcgagaaccccatcgcaaggagagagagtgcgagagcgcgcgcgatatcaaaacacgcacaccaacacataaccccacttttattctcccgccttcgactcgagtgcagaaaatcgcaaccatgtcgctcagtcaagttttgaacgtctgcccaaggagtgccatcgctggactgggaatagcagcagccagtagtggagcaacaacaacaggagcagcaagaagaagtgtaggccgcatatcaacattactgctctcatcgaccctcagcagccaggacaccaccagaagaaacatgtcgacgtcgccctgcgcctacaagcaatgtatcaccctggacaacatcaatccggccatcaagctgatggagtacgcagttcgtggcccactagtcatccgggccgctgccatcgagaaggaactggaacagggtgccaagaaaccgttcaaggaagtgatccgggccaacatcggtgactgccatgccatgggacaggaaccgattacgttcctccgccaggtgctcggtctggtgtcctacccgccactgtttgaggacaaatcgatcccggaggatgccaagaagcgcgcccgggatatcctgtccggttgcaagggccactccgtgggttcctacaccgattcgaacggtattgaaattatccggaagcacgtggcccaatacatccaggaccgcgacggtggagttccgtccgatccgaacaacatcatcctctcggccggagcatccggtggcatcaaagtgctcatgtccctcctgaggtgccccatcgatggcaagacccccggagtgatgattccgattccgcagtatcctctatactcggccacaatcgccgaatttgaaatggcacaggtcggctactacctggacgaagccaacaaatggggactagacattgccgagctagagcgatcgctgaacgaagccaagaagacttgtgccccgcggatactggtcgtcatcaacccgggcaacccgaccggccaggtgctgtctcgtgataacattgaaaacatcatcaaattcgcacacaaggaaaagctggtactgtttgccgatgaggtctatcaggacaatgtctacgaacagggatccaagttccactcgttcaagaaggtgatgatggagatgggagccccctacaaccagatggaactgtgcagcttcatgtcctgttcaaagggttacatgggtgaatgcggaattcgtggaggatacgccgaggttgtgaacatgtgcccagacgttaaagccatgctgctgaagtgtatctcggcgcaactctgcccgacgaccatcggacaggcttgtatggatgtggtggtgaacccaccgaaacccggagagccatcgtacgaacagttcatgaaggagaagaacgccgtgctggcttcgctgaaggtacgagctgaaatggtggccagcacgttcaactcgatcgaaggattctcctgcaatcctgtgcagggtgcgatgtactgtttcccacaaattcggctgccggagaaggctatcgaggcggcgaagaaggccggccaggcaccggacgttttctatgcattccagctgttagagcaaaccggtatttgcatcgtgcccggttctggattcggtcagcgccccggaacgtaccacttccgcaccaccatcctgccccagccggccaagctgaaggaaatgctcgacatgttccgggcgttccacgaaaagttcctgaagcagtacaagtaaatcctcggatcaatctctcggccatagcgacatcaagtaggttccacacgcctacaccgccatccactccaccatctcctataacaccccgaagatcctcgagatctgctgccagcctaggcgcttcaactggacgcaaattttactcttcaactcgagtcagacattgttgtttgtgaatcgcccggtttcgaaaaccaaacggattcaattgagatacatatactcttatacacgaaagccaagcatctatacacatataatatctagtagtgaaaaaagcgcgcattgcacgtaaagcatacataaaggtcgtattacaaagtcgatctaatcggcacaatcgaactcgagatctattatacatacattagattcaacgccagaacgacaccccgtgtgagtccgaattcggttttaggtggcgttaggtagctttcgcaattgaagctagaaaaaaaagtcaatccaccctaactctcgatggtgatcatttttttttaattacttagttgcttgcttagatgtttaaacggctaaggcactttgcgtttgttttcttgttctttttttaatttgtcggcttcgttcgccattttagcgtgtaaaattatacgaacaattacttaaaattggcaaccgaatatgatggataaaagacaataataatttttggaccaccctacactgagggtgggatccatacaaattggccaatcgaaaaactatagtgtgtcacgtatatgtattttaatgcgttattgaaacaaaagatatcagtaggacgataatctggcgggagaaaatgattagaattcgtacaacagcccaaatgtaccttactattaccagcgtttcttattttgtattagtcgctcatttattgatcctcccgttttgtgaagatgtaaaaatttctgccaacggcagaaagctataaattattgttcggaatgataatgaagaacaccgaaagcatgttattgtgaataaagtttaaaaacatataagtaaaattt

SEQ ID NO: 145843 - protein, 544 aa, Aedes aegypti
MSLSQVLNVCPRSAIAGLGIAAASSGATTTGAARRSVGRISTLLLSSTLSSQDTTRRNMSTSPCAYKQCITLDNINPAIKLMEYAVRGPLVIRAAAIEKELEQGAKKPFKEVIRANIGDCHAMGQEPITFLRQVLGLVSYPPLFEDKSIPEDAKKRARDILSGCKGHSVGSYTDSNGIEIIRKHVAQYIQDRDGGVPSDPNNIILSAGASGGIKVLMSLLRCPIDGKTPGVMIPIPQYPLYSATIAEFEMAQVGYYLDEANKWGLDIAELERSLNEAKKTCAPRILVVINPGNPTGQVLSRDNIENIIKFAHKEKLVLFADEVYQDNVYEQGSKFHSFKKVMMEMGAPYNQMELCSFMSCSKGYMGECGIRGGYAEVVNMCPDVKAMLLKCISAQLCPTTIGQACMDVVVNPPKPGEPSYEQFMKEKNAVLASLKVRAEMVASTFNSIEGFSCNPVQGAMYCFPQIRLPEKAIEAAKKAGQAPDVFYAFQLLEQTGICIVPGSGFGQRPGTYHFRTTILPQPAKLKEMLDMFRAFHEKFLKQYK

SEQ ID NO: 145844 - DNA, 1816 bp, Anopheles gambiae str. PEST
  CDS (1)..(1392)
atggagtacgcggtccgcggcccgctggtcatccgcgccggtgtcatcgagaaggagctcgaggagggtgcgaaaaaacccttcaaggaagtgatccgcgccaacattggcgattgccatgcgatgggccagccgccgattaccttcattcgacaggtactggggctcgtgtcgtacccgccgctgtttaacgacccgtcgatcccgacggacgcgaagcagcgcgcccgcgccatcctcgacggctgcaagggcggctcggtcggctcgtactcggactcggccggcatcgaggtgatccggcggcatgcggccgagtacattcagcggcgcgacggcggcatcccggccgactggcaaaacatcatcctgtccgccggcgcgtccggcggcatcaaggtgctgatggcgctgctgcgctgcccgatcgacggcaagaagccgggcgtgatgataccgatcccgcagtacccgctgtactccgcgacgatcgccgagttcgacatggagcagatcggctactacctggacgaggcgaacaagtggggcctggacattgccgagctggagcggtcgctgaaggaggcgcgcaagacgtcggcaccgcgcatcctcgtcgtgatcaacccgggcaacccgaccggccaggtgctgtcccggtcgaacatcgaggacatcatcaagtttgcgcagcgcgagcggttggtgctgttcgcggacgaggtgtaccaggacaacgtgtacgagagcggctcgcagttccactcgttcaagaaggtgatgatggagatgggcgaaccgtacagcaagatggagctgtgcagcttcatgtcctgctcgaaggggtacatgggcgagtgcggcatccggggcgggtacgccgagatcgtcaacctctgcccggacgtgcgcacgatgctgctgaagtgcatttccgcccagctctgcccgaccacggccggccaggccgtgctggactgtgtggtcaatccgccgcgcaagggcgaaccgtcctacgagcagttcgagaaggagaaggcgtccgtgctggagtcgctgcgcgagcgggccgagctggtcgcgcgcacgttcaactcgatcgagggcttctcgtgcaacccggtgcagggggcgatgtacgcattcccgcagatccggctgccggcgaaggcgctcgaggcggccaagaaagatggcaagccggcggacacattctacgcattccagctgctcgaggagacaggtatctgcatcgtgcccggttccggcttcgggcagcgccccggtacctaccatttccgcaccaccatcctgccccagccggaaaagctgaaggaaatgctcggcctgttcaagtccttccacgagaagttcctgcagaagtacaagtaagctgtatgagcgcgagcgccaagcgggttgtgagaaggcgggaaggaagcagatcacaatatttagtaggtaggagaaggagagcgagaagagcgatcgtgcaggaccggcacacatcacacacacacacacagccacatattggtcgctaagcagcatcgcggaagaattgggcaaacatatcgtgccggcagcgattgggcagagatcgatcgagcgagtaggcagtaaaatggagaccgcttatgtgtagacgaagcaatttaattgcaatttcttcaagaaaaataacggcactggtgtgcaatgcaaataaagggtaaacctttacagccgtagttgatagagcgaacagtggatgcaacaccagcacccaggcaaaacggatttcacgcagcgataaagaaatgatcttacacgaaac

SEQ ID NO: 145845 - protein, 463 aa, Anopheles gambiae str. PEST
MEYAVRGPLVIRAGVIEKELEEGAKKPFKEVIRANIGDCHAMGQPPITFIRQVLGLVSYPPLFNDPSIPTDAKQRARAILDGCKGGSVGSYSDSAGIEVIRRHAAEYIQRRDGGIPADWQNIILSAGASGGIKVLMALLRCPIDGKKPGVMIPIPQYPLYSATIAEFDMEQIGYYLDEANKWGLDIAELERSLKEARKTSAPRILVVINPGNPTGQVLSRSNIEDIIKFAQRERLVLFADEVYQDNVYESGSQFHSFKKVMMEMGEPYSKMELCSFMSCSKGYMGECGIRGGYAEIVNLCPDVRTMLLKCISAQLCPTTAGQAVLDCVVNPPRKGEPSYEQFEKEKASVLESLRERAELVARTFNSIEGFSCNPVQGAMYAFPQIRLPAKALEAAKKDGKPADTFYAFQLLEETGICIVPGSGFGQRPGTYHFRTTILPQPEKLKEMLGLFKSFHEKFLQKYK

SEQ ID NO: 145846 - DNA, 1461 bp, Magnaporthe grisea 70-15
  CDS (1)..(1461)
atgtcttcaacctcgaggcgcagattaaaccatgacaacatcaaccctcatgtcaaggctgccaaatatgcagtgaggggtgagctcgccgtcaagagcgaggagttccgtgcaaagctcacaaacggtgactccgacttgcctttcaaggaggtcatctcggccaatatcggaaacccccagcagctggaccagaagcccatcaccttcttccgccaggtcctcagcatcttggagaacccactcctccttgatcacgaggatgttctcctgaaccacctcggctacaagtccgacgttgttgcccgggcaaagtggcttctcagcaaggttgggtccgtcggcgcatatagcgccagcaacggtgctccggccatccgccagagcattgccgacttcctagagaggcgtgatggatttcccgccaaggaatccgatatttacctgtctgccggtgcatcatctggcgtcaacactcttcttcacgtcatttgctcagacaagaactctggcgtgcttgtccccatcccgcagtaccccttgtacacagcgtcgctgtccctgcttgacgcgcaatgcgtgccttactacttggacgagtccaagaactggggcaccagcatggagaccatcagggctgcccatgatgaggccaaggccaagggtaccgatgtgcgcgccatcgtcgtcatcaaccctggaaaccctaccggtgcctcgctgtccgaggaggacatccgtggcatcatcgagctcgcgcgtgctgagcgtctcgtcgtgatggcggacgaggtgtatcagaccaacgtgtttgttggcaagttccactcattcaagcgggtcctccgccagctgcagaaggagaaccctgacggcaagtatgatgaggttgagctcgcatcgctgcactctgtatccaagggcatggtaggcgagtgtggccaccgtggcggctactttgagctcgtcaactttgacgagaaggtgcaggctgagatttacaagtttgtctctatcatgctgtgcgcccccgtcatcggccagtgcctggtcgagctcatggtcaacccgcccaaggagggcgagcccagctacgagctgtacaaaaaggagtacgacggcatctttgagggcctcaaggcacgcgccaccgccttgcacaaggcctttgccgagatggagggcgtcgagtgcgacactccccaaggctcaatgtacctcttcccgaccatcaacgtccctcagaaggctgccgccgaggccgagaaggagggccgtacgcccgacgagttttactgcatgcgtctgctcgaggccacgggcgtctgtgtcgtgcctggcagcggattcgggcagaagcccggcaccctccacctacgcaccactttcctcgctcccggtacagagtgggtgggcagcattgtcaagtttcacaaggagttcatggacaagtacaggtag

SEQ ID NO: 145847 - protein, 486 aa, Magnaporthe grisea 70-15
MSSTSRRRLNHDNINPHVKAAKYAVRGELAVKSEEFRAKLTNGDSDLPFKEVISANIGNPQQLDQKPITFFRQVLSILENPLLLDHEDVLLNHLGYKSDVVARAKWLLSKVGSVGAYSASNGAPAIRQSIADFLERRDGFPAKESDIYLSAGASSGVNTLLHVICSDKNSGVLVPIPQYPLYTASLSLLDAQCVPYYLDESKNWGTSMETIRAAHDEAKAKGTDVRAIVVINPGNPTGASLSEEDIRGIIELARAERLVVMADEVYQTNVFVGKFHSFKRVLRQLQKENPDGKYDEVELASLHSVSKGMVGECGHRGGYFELVNFDEKVQAEIYKFVSIMLCAPVIGQCLVELMVNPPKEGEPSYELYKKEYDGIFEGLKARATALHKAFAEMEGVECDTPQGSMYLFPTINVPQKAAAEAEKEGRTPDEFYCMRLLEATGVCVVPGSGFGQKPGTLHLRTTFLAPGTEWVGSIVKFHKEFMDKYR

SEQ ID NO: 145848 - DNA, 3081 bp, Apis mellifera
  CDS (214)..(1845)
ggagaacattggcgagaattcgtggaagctaacggcggtcgtgtctgggccctccatgaagttgataaacgcattcattccggctgaccgaatgaggttttaagcacccagcgcatgtgcgaatatcccccaccatactgccgagtgaattaccggagccgtctgccatctgattgaactggaggtaaagagagagaaccaaccgataaaacgatgccgcaggcacgctggtggaacgctgttatcgcgagcagtcggcctaggacgtgggaacaactgactgcctcctcctccgcgggttcagggacatcgacaggaagaacatccatatgtccgacgactgaagttgtaatccaccggccggctaccgtcagaacattacaccgcggcatggcgagcagtcaatctggaaccaaaatcctcaccgaggataatgttttcacgaatcttcggaaaatggagtacgcagtgcgcggaccactccttttacgtgctctcgagatcgaaaaggagcttcagaagggagtcaagaaaccattcaaggaggtgataaaggcaaatgtgggagatgcacatgctatgggccaacagcctatcactttcttgaggcaagtactgaccctgacagtatcgccgaatcttctcaatgatcctaactatcctgaagacgtgaaggatcgagccaagactatcttataccattgtaaaggaggcagcattggttcgtattcggaatcagcaggaattgagatcatccggaaacatattgcccagtacattcaggatcgcgatggaattccatctgattatcataatatcatcctctcgaacggcgcttcggatggaattaaatcctttctgaagttgttcaatgagaaaatagacggtaaaccatccggtgtgatgattccaattccacagtatcctttatattctgccactctagctgaatttggtttggctcaaattggttattatttaaatgaagaaaataaatgggcgttagatatttctgaattggatagagcattaaatgaatcaagaagaatgtgtaatcctcgtgtactagtcgtaataaatcctggtaatccaaccggacaagttcttacacgtaccaatattgaagacattattcgatttgcgtataaaaatcatttgttcttgttggctgacgaggtttatcaagataatgtttatgataaagatagtgccttccattcatttaagaaagtaatgacagaaatgggagaaccttattgtaaaatggaactggcttcctttatgtctatttctaaaggttatatgggagaatgtggaatccgcggtggctatggagaaattattaatatggatcccaaagtaatggcaatattattaaagtcgatttcagcaatgttatgtccgactgttcttggtcaagtagtgatggacgttgtagtaaatccaccaaaatcaaatgaaccatcctatgaattatttcaaaaagaaaaagaacaaactttatattctttagcggagcgatcgaaattagtagtcgatacattaaataccattccaggttttaaggttaatccagctatgggtgcaatgtatgtatttccacgaattgatctaccaaaaaaagctatagaggtagcagaaagggaaggtcaacagcctgatgttttttatgctttcaaactattagaatctactggaatatgtgtaataccaggttctggttttggacaacaacctggaacctatcattttaggacgacaattttgccacaaaaagaaaaaataaaaacaatgcttgaatgtctgaaacaattccatcttaagttccttgaggagtacaaataataatatataaaaatttttatattattttaatctcgaaatcagggtcataatatgtgaatcagtattaaattttcatgaaattattttaaatttattcggaagattattttgcactttataatgaaaaaaatacaaaaaatttttgagattgttatagaatagatttattatgtacgtatgtatcacagtaattcattgataactaatagatatgtttttttataatactcattgatgttatcaggttattacagtagaattccgtttatgtgattgaaatttgtatttttattatctaaactttacttttattatatgaattatcattaagcattgttctatttatataaatgtatataaatattattatgtatttaaagataaatgtttaatagaattctcttatgtaaatgagctcttatgtgaacaattataaatgatgggaataagacttttattaatctgatgaaccgattaccctctagatagatttatataaacggatttctactgtacatagaaagtatattgtaatttacatttgagcagattaagtataattataaatttgcattatatgcaaataattttcattatatgcaattttcatggaggaataaattgttatcaatataaacaagatgtacaaatgaacttgaaatagattttaaagtttttatcatatgtatatagattatatacatttaatgaaattcatttactaaaaaaaacttatgtttatatttgtttatatatgttcaaaatccacaataaaaaaaaattacataaaaatgaaaaaatgtgcaatatatttattattatttttaaatgaaacttattaaaaatataaatatatatttgataatgtgcattcagtaatatatattaacaatatattaatatatatatcgataatataactaataatttagcatttcacataaatgttttgcaaatataatactatgagtaattaatttttaaataataagtaaaaatgtaatttataactttgaaaattataatttcttgaaattcttgaataagttaattaatatataaacagaatttaaatgagattaagtggatgttgaatcatgtataattctatatgaaagttaatatagtgtagttaattttagttttttttttaaaaagcatatctgttatttaagtaatccatattttaaaataaaagcttaatgtaatttaaaagaaataaacatgaaatttatc

SEQ ID NO: 145849 - protein, 543 aa, Apis mellifera
MPQARWWNAVIASSRPRTWEQLTASSSAGSGTSTGRTSICPTTEVVIHRPATVRTLHRGMASSQSGTKILTEDNVFTNLRKMEYAVRGPLLLRALEIEKELQKGVKKPFKEVIKANVGDAHAMGQQPITFLRQVLTLTVSPNLLNDPNYPEDVKDRAKTILYHCKGGSIGSYSESAGIEIIRKHIAQYIQDRDGIPSDYHNIILSNGASDGIKSFLKLFNEKIDGKPSGVMIPIPQYPLYSATLAEFGLAQIGYYLNEENKWALDISELDRALNESRRMCNPRVLVVINPGNPTGQVLTRTNIEDIIRFAYKNHLFLLADEVYQDNVYDKDSAFHSFKKVMTEMGEPYCKMELASFMSISKGYMGECGIRGGYGEIINMDPKVMAILLKSISAMLCPTVLGQVVMDVVVNPPKSNEPSYELFQKEKEQTLYSLAERSKLVVDTLNTIPGFKVNPAMGAMYVFPRIDLPKKAIEVAEREGQQPDVFYAFKLLESTGICVIPGSGFGQQPGTYHFRTTILPQKEKIKTMLECLKQFHLKFLEEYK

SEQ ID NO: 145850 - DNA, 1725 bp, Candida glabrata CBS 138
  CDS (1)..(1725)
atgttacgtagtactacatcgaaatcactatcgaaaatgccacatgctataccaccacaatgccgtcgttctcactcgagttcgatattccagactaagaagaggctcgcccacttggagtccgatagaccttacctgacccacctgcctcgctccatgaactcaagtcccaacttgagattccactcctctgcttcgtcttcctcgctgaggtcgtctttcctaaacacggaaatacaccaccatagccacaacaacctgcctttcttgcctgccgagcaagctactttgaaagacgtgaacgagtgcgtcctgaacgccaagtacgctgtgcgcggtgccatccctatgcgtgccgaggagctgaaaacacagctgatggaaaacccgcactctttgcccttcaacgacattattaacgccaacatcggtaacccacagcagctgaaacagaagccactgagcttctacagacaggtattgtccctgctgcagtaccctgagctgatccccacgctggagaacaatccccagaccatgatcaagcaagacgccatcgacagagccaagaggctcctggacgacattggcgggtccgtcggtgcttactcctcttcacagggtgtcctcggcatcaggaaaaccgtcgctgacttcatcacaaacagggacgacggtatcattgcttaccccgaagacatattcttgaccgcgggtgcttctagcgccgtagactacttgctgtccatcttctgcagaggcgaggagacaggtgtgctgatcccaatcccacagtatccactttacacagccactctggccctgcaaaactctcacgccctgccatactacctgaacgaagaaacaggctggtccaccgaccctgaggaactagagtccatcatcttagactccatcgagaacaacatcaaaccaagcgttcttgtagttatcaacccaggtaaccctacaggtgccgtgctatccgaagaggctatcgaacagatattcacattggccgccaagtacggtataatcgtcatcgcagatgaagtctaccaggaaaacgtcttcgaagacgtaaagttccattcaatgaagaaagtcttgagacaactgcaaatgaaacaaccaggcctctacgacaacgtccaattggcctccttacattccacctctaagggtgtctccggtgagtgtggccaaagaggtggttacatggaactagttggtttcactcacgatatcagacaagtagtcctaaaattggcttctatctccttgtgtccagtggtgacaggtcaagcccttgttgatttaatggtttgtcctcctcagaagggcgaagaatcttacgaacaggatcaagaagaacgtagaaacattcacaaggaattgcacaagagagctactctattgcacgacgcttttgtcaaattagatggtatctcttgtcaaaagccacaaggtgccatgtacttgttcccaaaacttgagctaccttacaaggctatccaagaggcccttcaccaggacatgagcccagatgaattttattgtaagtcattgttggagaagactggtatctgtaccgtgcctggttccggttttggccaggagccaggtacttaccatttgagaactactttcttggctccaggaaccaaatggatcgaagactgggttgatttccaccaagagttctacaacaagtttaagaactga

SEQ ID NO: 145851 - protein, 574 aa, Candida glabrata CBS 138
MLRSTTSKSLSKMPHAIPPQCRRSHSSSIFQTKKRLAHLESDRPYLTHLPRSMNSSPNLRFHSSASSSSLRSSFLNTEIHHHSHNNLPFLPAEQATLKDVNECVLNAKYAVRGAIPMRAEELKTQLMENPHSLPFNDIINANIGNPQQLKQKPLSFYRQVLSLLQYPELIPTLENNPQTMIKQDAIDRAKRLLDDIGGSVGAYSSSQGVLGIRKTVADFITNRDDGIIAYPEDIFLTAGASSAVDYLLSIFCRGEETGVLIPIPQYPLYTATLALQNSHALPYYLNEETGWSTDPEELESIILDSIENNIKPSVLVVINPGNPTGAVLSEEAIEQIFTLAAKYGIIVIADEVYQENVFEDVKFHSMKKVLRQLQMKQPGLYDNVQLASLHSTSKGVSGECGQRGGYMELVGFTHDIRQVVLKLASISLCPVVTGQALVDLMVCPPQKGEESYEQDQEERRNIHKELHKRATLLHDAFVKLDGISCQKPQGAMYLFPKLELPYKAIQEALHQDMSPDEFYCKSLLEKTGICTVPGSGFGQEPGTYHLRTTFLAPGTKWIEDWVDFHQEFYNKFKN

SEQ ID NO: 145852 - DNA, 1491 bp, Yarrowia lipolytica CLIB122
  CDS (1)..(1491)
atgctgagacagggtataaagcgtgcggtggtgcatgcccgagccgtacaggccgtgtgcaaacgaaccaacatgaccatcaccaaaaaagatctcaacccccaggtggtcaacgcccagtatgccgtgcgaggcaagttggcggtgcgggccgacgaaatcaaggagcagatgcgaaccaacccgtcgctgttcccctttgacaaggtcatcaacgccaacattggcaacccccagcagctcgaccagaagcccgtcactttctaccgccaggtcctggctatgctgcagtaccccgagttgatggatcgggccgccgacgtgggcatccccaacgacgcagtgcagcgtgctcgaaagctgctggacgacattggatcggtcggcgcctactcgtcgtcccagggcgtcaccaccgtgcgaaattcggtggctaacttcatccaaaagcgagacggctacgcagcctcggcctccgacatctacctcaccacaggagcctccaacgccgtcacttttctgctcacaactttggctcgaggcgacggatcggacggattcatgatccccattccccagtatcccctttacaccgccaccctgaccctgcagaactccaaccccgtcccctactacctggacgaagccaaggagtggggcaccaacatggctgctctcaacgacgccgtcgagtcctccaagcacaagctcaaggccgtcgtggtcatcaaccccggaaaccccaccggagcttgtctcggcgtcaaggaaatcaaggacattctgctgctggcacagaaggagggcattgccgtgatcgccgacgaggtctaccaggccaacatttttgcctctggccagttccactccttcaaaaaggtctggtccattctcaaggaggagaaccccgacttcaacgtgcccctggcatctctgcattccacctccaagggcaagatcggagagtgtggccagcgaggaggctacatggagctcgttggtttccatgaggacgtgattgagcagatctacaagctctgttccatctctctgtgtcccgttgtcaccggacaggctcttattgagtgtatggtcaacccccccgttgagggagacgaatcgtaccctctgttcaacaaggaaaccaaccacattatggatactctcacccagcgagccaaccggctgtacgaggccttcaaggagatgcccaaggtctcctgcgagcctccccagggcgccatgtacctgttcccctccatcgagctgcctgctggcgccattgccgaggccgagcgacacaacgagcagcccgacgagttttactgcatgaagctgctggagcagactggtatctgtgttattcctggctctggatttggccagaaggatggcacttaccatttccgaacaaccttcctcgcacctggtgatgactacggagagaagattgtcaacttccacaagaagtttttggctcagtacgagtaa

SEQ ID NO: 145853 - protein, 496 aa, Yarrowia lipolytica CLIB122
MLRQGIKRAVVHARAVQAVCKRTNMTITKKDLNPQVVNAQYAVRGKLAVRADEIKEQMRTNPSLFPFDKVINANIGNPQQLDQKPVTFYRQVLAMLQYPELMDRAADVGIPNDAVQRARKLLDDIGSVGAYSSSQGVTTVRNSVANFIQKRDGYAASASDIYLTTGASNAVTFLLTTLARGDGSDGFMIPIPQYPLYTATLTLQNSNPVPYYLDEAKEWGTNMAALNDAVESSKHKLKAVVVINPGNPTGACLGVKEIKDILLLAQKEGIAVIADEVYQANIFASGQFHSFKKVWSILKEENPDFNVPLASLHSTSKGKIGECGQRGGYMELVGFHEDVIEQIYKLCSISLCPVVTGQALIECMVNPPVEGDESYPLFNKETNHIMDTLTQRANRLYEAFKEMPKVSCEPPQGAMYLFPSIELPAGAIAEAERHNEQPDEFYCMKLLEQTGICVIPGSGFGQKDGTYHFRTTFLAPGDDYGEKIVNFHKKFLAQYE

SEQ ID NO: 145854 - DNA, 1182 bp, Prochlorococcus marinus str. MIT 9515
  CDS (1)..(1182): transl_table=11
atgagtgaagtaaatttatcaaaaagagctctctcacttgaaccttcacttactctccagataagtgctaaagctaaaaaactttcagaagaggggaaagatatctgtaatttaagtgctggagaaccagattttgatgctccaaaagaaatcttaaatgccacaagtcaggctatattcgatggacatacaaaatatggtcctgccgcaggggataaagaacttagaaaagctattgcaaaaaaattgcagattcaaaacaatttaaatgttgaatttgaaaatgtaatggtaacaaatggagcaaagcaggcaatttataatcttttccaggttttattgaatgatggtgacgaagtgataatacctgctccatattggctaagctatccacaaatggttagattggcgggtggaaaacctatcttcctaaattcagcccctgaagatggattcaaaattaatatacaagatttaagatctaaaatttcctcaaaaactaaatttattataattaattctcccaataacccaactggcagaataatggcaaaagaagagttattacaaattgcggaagtagtaagagagcataaaaatattaatgttctttcagatgagatttacgaattaattcttaaaaaagaatttcgtcatttaagtttagcttcattagctactgatttaaaagaaagaatttttattattaatggttttgcaaaagggtgggcgatgactggctggagagtaggttatttagtaggaaaaaaagaggttattaaagcttcatccgctttacaaagtcaaagcacaagtaatgtttgttctttcgttcaaagaggagctttagaagctttaaagataaatcaagaatttttcttaaaaatcaatagtcattatgatctcagaagagaaatactttatgaaggccttagaaatattgaaggtttagttgttcatcaacctaatggagctttttacgcatttcctagattacctaataaatctataagttctgttgatttttgcaaaaaaatcttaaatgattatggattagtaatagtacccgggaaaccatttggagataatcaaagctttagaatatcttgtgcaacatcaaaagaaaaaattattgacggattatcaaggttaaaaaaagcggttcataattattatttttag

SEQ ID NO: 145855 - protein, 393 aa, Prochlorococcus marinus str. MIT 9515
MSEVNLSKRALSLEPSLTLQISAKAKKLSEEGKDICNLSAGEPDFDAPKEILNATSQAIFDGHTKYGPAAGDKELRKAIAKKLQIQNNLNVEFENVMVTNGAKQAIYNLFQVLLNDGDEVIIPAPYWLSYPQMVRLAGGKPIFLNSAPEDGFKINIQDLRSKISSKTKFIIINSPNNPTGRIMAKEELLQIAEVVREHKNINVLSDEIYELILKKEFRHLSLASLATDLKERIFIINGFAKGWAMTGWRVGYLVGKKEVIKASSALQSQSTSNVCSFVQRGALEALKINQEFFLKINSHYDLRREILYEGLRNIEGLVVHQPNGAFYAFPRLPNKSISSVDFCKKILNDYGLVIVPGKPFGDNQSFRISCATSKEKIIDGLSRLKKAVHNYYF

SEQ ID NO: 145856 - DNA, 1287 bp, Mycobacterium sp. JLS
  CDS (1)..(1287): transl_table=11
atggacgacgtgaccatgcctcagacgccggccgagcggacctggcacgcccagggccaccagccgcggccccgtacgttcacgcagtcgtcgaagctgcaggacgtcctctacgagatccgcggcccggtacacgagcacgcgtcccggctggaggccgagggccaccgcatcctcaagctcaacatcggcaacccggcgccgttcggcttcgaggcacccgacgtgatcatgcgcgacatcatccaggcgctgccgtacgcgcagggctactcggactccaagggcatcatgcccgcgcgccgggcggtgttcacccgctacgaactcgtcgacgggttcccgcgcttcgacgtcgacgacgtgttcctcggcaacggggcctccgagctcattcagatggtgctgcaggcgctgctggacaacggcgatcaggtgctgatcccggcgccggactatccgctgtggacggcgtgcacctcgctggcgggcggcaccccggtgcactacctgtgtgacgagacgcagggctggaatcccgacgtcgccgacatcgagtcgaagatcaccgaccgcaccaaggcgatcgtcgtcatcaacccgaacaacccgaccggcgcggtgtacagccgcgagacgctggagcggatcgccgatctcgcgcggaaacaccagctgctgctgctggccgacgagatctacgacaagatcctctacgacgatgccaaacacatctcactggcctcggtcgcgccggacgtgttgaccctgacgttcaacgggctgtcgaaggcctaccgggtggcgggttaccgctcgggctggctggtgatcaccggacccaaggagcacgccagcagcttcatcgagggcatcagcctgctggccaacatgcggttgtgcccgaatgtgcctgcacagcatgcgattcaggtggcgctcggcggccatcagagcatcgacgatctggtgttgcccggcgggcggttgctcgagcagcgcgacgtggcctgggagaagctcaacgagattcccggcgtctcgtgcgtgaagccggccggcgcgctgtacgcgttccctcgacttgatcccgaggtctacgagatccacgacgacgagctgctggtgctcgacctgctgctgcaggaaaagatcctggttgtgcagggcaccgggttcaactggccgacaccggatcacctgcgcatcgtcacgctaccgtgggcccgtgacctggccaatgccatcgagcgtctcggcaacttcctggtcagctaccggcagtag

SEQ ID NO: 145857 - protein, 428 aa, Mycobacterium sp. JLS
MDDVTMPQTPAERTWHAQGHQPRPRTFTQSSKLQDVLYEIRGPVHEHASRLEAEGHRILKLNIGNPAPFGFEAPDVIMRDIIQALPYAQGYSDSKGIMPARRAVFTRYELVDGFPRFDVDDVFLGNGASELIQMVLQALLDNGDQVLIPAPDYPLWTACTSLAGGTPVHYLCDETQGWNPDVADIESKITDRTKAIVVINPNNPTGAVYSRETLERIADLARKHQLLLLADEIYDKILYDDAKHISLASVAPDVLTLTFNGLSKAYRVAGYRSGWLVITGPKEHASSFIEGISLLANMRLCPNVPAQHAIQVALGGHQSIDDLVLPGGRLLEQRDVAWEKLNEIPGVSCVKPAGALYAFPRLDPEVYEIHDDELLVLDLLLQEKILVVQGTGFNWPTPDHLRIVTLPWARDLANAIERLGNFLVSYRQ

SEQ ID NO: 145858 - DNA, 1143 bp, Herminiimonas arsenicoxydans
  CDS (1)..(1143)
atggaagaagacggtcacaagatcatcaagttgaatatcggtaatctggccactttcggtttcgatgcgccggacgagattgtgcaggacatgatccgcaacctgtcaaatgcgtctggttataccgattccaaaggcttgttcgcgccgcgcaaggcgatcatgcagtactcgcaggaaaagaaaattgccggcgtgacgatagacgacatctatctcggcaacggcgcttccgaattgatcgtcatgagcatgaatgccttgctcaataccggcgatgaagtactggtgccttcgcccgattacccgttgtggactgctgcggtcagcctgtcaggcggcacgccggtgcactatgtgtgcgatgagcaggccgactggttcccggatatcgacgatatcaggaagaaaatcaattcgaataccaaggccatcgtcgtcatcaatccaaacaatccgaccggcgccttgtacccggtggaattgctgcagcaaatcgtcgacctcgcacgcgaacaccagctgatcgtgtttgctgacgagatttacgacaaggttttatatgacggcgccaagcacgattcgatcgcttcgctggctgatgacgtgttgttcattaccttcaacggcctgtcgaaaaattaccgtgcctgcggctatcgcgccggctggatgatcgtttccggcgaaaagcgttatgccaaggattacatcgaaggcttgaacatgctggcctcgatgcgcctgtgcgccaatgcgcctggccagtacgcgattcaaaccgcactgggcggttaccaaagcatcaatgatctggtcggccccggtggacgcctgacgcggcagcgcgatctggcgcacaaattgctgaccgaaattccgggtgtgacttgcgttaaaccgaagtcggccctgtacatgttcccgcgccttgatccgaagatgtacccgatcaaggatgatcaggattttgcctatcaattgctggccgaggaaagcgtattgatcgtgcagggcacgggtttcaattgcccgacgcctgatcatttcagggtagtcttcctgccgaattccgacgatttgacgatagcgatcggacgtattgcgcatttcctcgaagggtatcgcaagcggctgggttga

SEQ ID NO: 145859 - protein, 380 aa, Herminiimonas arsenicoxydans
MEEDGHKIIKLNIGNLATFGFDAPDEIVQDMIRNLSNASGYTDSKGLFAPRKAIMQYSQEKKIAGVTIDDIYLGNGASELIVMSMNALLNTGDEVLVPSPDYPLWTAAVSLSGGTPVHYVCDEQADWFPDIDDIRKKINSNTKAIVVINPNNPTGALYPVELLQQIVDLAREHQLIVFADEIYDKVLYDGAKHDSIASLADDVLFITFNGLSKNYRACGYRAGWMIVSGEKRYAKDYIEGLNMLASMRLCANAPGQYAIQTALGGYQSINDLVGPGGRLTRQRDLAHKLLTEIPGVTCVKPKSALYMFPRLDPKMYPIKDDQDFAYQLLAEESVLIVQGTGFNCPTPDHFRVVFLPNSDDLTIAIGRIAHFLEGYRKRLG

SEQ ID NO: 145860 - DNA, 1239 bp, Burkholderia vietnamiensis G4
  CDS (1)..(1239): transl_table=11
atgaaaccgattcagaagtcgaacaagctgctcaacgtctgctacgacatccgtggcccggtgctcgagcacgcgaagcgcctcgaggaagaaggccaccgtatcatcaagctgaacatcggcaacctcgcgccgttcggtttcgacgcaccggacgagatcatccaggacatgatccgcaaccttcccgcgtcgtcgggctattcggattcgaagggcgtgttctcggcgcgcaaggccgtgatgcactacacgcagcaaaagggcgtggtcggcgtgggcctcgacgacatctacatcggcaacggcgcatccgagctgatcgtgatggcgacccaggcattgctgaacgacggcgacgaggtgctgctgccggcgcccgactacccgctgtggacggccgccgtgagcctgtcgggcggcacgcccgtgcactacgtgtgcgacgagcagaacgcgtggatgcccgaccccgacgacatccgtcgcaagatcacgccgaacaccaaggcgctcgtcgtgatcaacccgaacaacccgaccggcgcgctgtattccgacgaattgctgctcgagctgctcgagatcgcgcgtcagcacgggctgatcgtgttcgccgacgaggtctacgacaagatcgtctacgacggcctcgaacacacggcgctcggttcgctgtcggaggacgtgatcaccgtcacgttcaacagcctgtcgaaaagctatcgctcgtgcggctaccgcgcgggctggatgtccgtgtcgggcctcggcggcgacaaccgacggcgcgcgaacgactatctggaggggctcggcatcctgtcgtcgatgcggctgtgcgcgaacgtgccggggcagttcgcgatccagaccgcgctcggcggctaccagagcatcaacgagctgatcgtgccgagcgggcgcctgtacaagcagcgcgaactcgcgtacgacatgctcacgtcgattccgggcgtgacctgcgtgaagccgcaggccgcgctgtacatgttcccgcggctcgatccgaagctgtatccgatccagaacgatcagcagttcatcctcgacctgttgctcgaggagcgcgtgctgctcgtgcagggcacaggctttaactgggcgcagccggatcacttccgcgtggttttcctgccgaacctcgacgatctggccgattcgatcagccggatcgcgcgcttcctcgacggctaccgcaagcgccattcggtctga

SEQ ID NO: 145861 - protein, 412 aa, Burkholderia vietnamiensis G4
MKPIQKSNKLLNVCYDIRGPVLEHAKRLEEEGHRIIKLNIGNLAPFGFDAPDEIIQDMIRNLPASSGYSDSKGVFSARKAVMHYTQQKGVVGVGLDDIYIGNGASELIVMATQALLNDGDEVLLPAPDYPLWTAAVSLSGGTPVHYVCDEQNAWMPDPDDIRRKITPNTKALVVINPNNPTGALYSDELLLELLEIARQHGLIVFADEVYDKIVYDGLEHTALGSLSEDVITVTFNSLSKSYRSCGYRAGWMSVSGLGGDNRRRANDYLEGLGILSSMRLCANVPGQFAIQTALGGYQSINELIVPSGRLYKQRELAYDMLTSIPGVTCVKPQAALYMFPRLDPKLYPIQNDQQFILDLLLEERVLLVQGTGFNWAQPDHFRVVFLPNLDDLADSISRIARFLDGYRKRHSV

SEQ ID NO: 145862 - DNA, 1215 bp, Streptococcus pyogenes str. Manfredo
  CDS (1)..(1215)
atgaaaattattgaaaaatcatcaaaattagaacatgttgcctatgatattcgagggcctgttttggatgaagctaatcgcatgattgcgagtggtgaaaaaattctgcgtttaaatactggcaatcctgctgcctttggttttgaagcaccagatgaagtgattcgtgatttaattgtcaacgcgaggctaagtgagggctattctgacagtaaagggattttttcagcgcgtaaggctatcatgcaatattgccaactcaagggcttcccagatgttgacattgaagatatttatttgggaaatggcgtgtcagagttgatatccatgtcccttcaagctttgctagataatggcgatgaagttttagtaccaatgccggattatcctttatggacggcttgtgtgagtcttggtggaggaaaagcggtccattatctttgtgatgaagaagctggttggtatcctgatattgctgatatcaaatcaaaaatcacgagtcgtaccaaagctattgtggtcatcaatcctaataacccaacaggagctctttatcctaaggagattttagaagacattgttgctttggcaagagaacaccagctgattatttttgccgatgaaatctatgatcgtttggtgatggatggtaaagagcatattgctattgcaagcttggcacctgatgttttttgtgtatctatgaatggcctttccaaatctcatcgtattgctggttttcgtgttggatggatggtcttatcaggtcctaaagaccatgttaaaggttacattgaagggttgaacatgcttgccaatatgcggttatgctccaatgttttagcccaacaagttgttcaaacttccttaggaggccatcaatcagttgatgcactgttactgccaggagggcgtatttttgagcaacgtaattttatttatgaagctattaatgctatccctggcttatcggcagttaaacctgaagcaggtctttatttatttccgaaaattgatcgtcagatgtatcgtattgatgatgatgaagaatttgtcttacagttattaaagcaagaaaaagtgatgttggtacatggacgtggttttaactggaaagatccagatcacttccgtattgtttacctaccaagtgtagaagaattagaagatgttcaagaaaagattacacgtgtcttataccagtatagacgttaa

SEQ ID NO: 145863 - protein, 404 aa, Streptococcus pyogenes str. Manfredo
MKIIEKSSKLEHVAYDIRGPVLDEANRMIASGEKILRLNTGNPAAFGFEAPDEVIRDLIVNARLSEGYSDSKGIFSARKAIMQYCQLKGFPDVDIEDIYLGNGVSELISMSLQALLDNGDEVLVPMPDYPLWTACVSLGGGKAVHYLCDEEAGWYPDIADIKSKITSRTKAIVVINPNNPTGALYPKEILEDIVALAREHQLIIFADEIYDRLVMDGKEHIAIASLAPDVFCVSMNGLSKSHRIAGFRVGWMVLSGPKDHVKGYIEGLNMLANMRLCSNVLAQQVVQTSLGGHQSVDALLLPGGRIFEQRNFIYEAINAIPGLSAVKPEAGLYLFPKIDRQMYRIDDDEEFVLQLLKQEKVMLVHGRGFNWKDPDHFRIVYLPSVEELEDVQEKITRVLYQYRR

SEQ ID NO: 145864 - DNA, 1218 bp, Klebsiella pneumoniae subsp. pneumoniae MGH 78578
  CDS (1)..(1218): transl_table=11
atgtcccccatcgaaaaatccagcaagttagagaacgtctgttatgacatccgcggcccggttctgaaagaagccaaacgtcttgaagaagaaggcaataaggttctgaaactgaacatcggcaacccggcgccattcggcttcgaggcccctgacgagatcctcgtcgacgtcatccgcaatttgcctaccgcccagggttactgcgattcgaaaggattgtactcggcgcgtaaagctatcatgcagcattaccaggcccggggtatgcgcgatgtcacggtggaagacatctatatcggcaacggcgtgtccgagctgattgtgcaggcgatgcaggcgctgttaaacagcggcgatgagatgctggttcccgccccggactacccgctgtggacggcggcggtgtcgctttccagcggcaaagcggtgcactatctgtgtgacgaatcctctgactggttcccggatctggacgacatccgcgcaaaaatcacaccgcgcacccgcgggatcgtgatcattaaccctaacaaccccaccggcgcggtctattccaaagaattgctgcaggagatcgtggagatcgctcgtcagcataatctgatcattttcgccgatgaaatttacgacaagatcctctacgacgaagcccagcatcactctattgccgccctggcgccggacctgctgacggtgacctttaacggattgtcgaaaacctaccgcgttgccggcttccgtcagggctggatggtgttgaatggcccgaaaaaacacgcgaagggctatatcgaagggctggagatgctggcttcaatgcgtctgtgcgccaacgtgccggcccagcatgctatccagacggcgctgggcggctatcagagcatcagcgaattcatcatccccggcggacgcctgtatgaacaacgcaaccgcgcctgggagcttatcaacgatattccgggcgtctcctgcgtgaagccaaaaggcgcgctgtatatgttcccgaaaatcgacgccaaacgcttcaatattcatgacgaccagaaaatggtgctcgacttcctgctgcaggagaaagtcctgctggtgcagggcaccgcctttaactggccgtggccggatcacgtacgcatcgtgaccctgccgcgcgaagacgacctggagatggctatctcccgctttggccgcttcctctccggctaccatcagctttaa

SEQ ID NO: 145865 - protein, 405 aa, Klebsiella pneumoniae subsp. pneumoniae MGH 78578
MSPIEKSSKLENVCYDIRGPVLKEAKRLEEEGNKVLKLNIGNPAPFGFEAPDEILVDVIRNLPTAQGYCDSKGLYSARKAIMQHYQARGMRDVTVEDIYIGNGVSELIVQAMQALLNSGDEMLVPAPDYPLWTAAVSLSSGKAVHYLCDESSDWFPDLDDIRAKITPRTRGIVIINPNNPTGAVYSKELLQEIVEIARQHNLIIFADEIYDKILYDEAQHHSIAALAPDLLTVTFNGLSKTYRVAGFRQGWMVLNGPKKHAKGYIEGLEMLASMRLCANVPAQHAIQTALGGYQSISEFIIPGGRLYEQRNRAWELINDIPGVSCVKPKGALYMFPKIDAKRFNIHDDQKMVLDFLLQEKVLLVQGTAFNWPWPDHVRIVTLPREDDLEMAISRFGRFLSGYHQL

SEQ ID NO: 145866 - DNA, 1218 bp, Kineococcus radiotolerans SRS30216
  CDS (1)..(1218): transl_table=11
atgaagctcgagcagtccgacaagctggccgacgtcctctacgacgtgcgcggccccgccctgcgccgcgcccagcagctcgaggaggccggccaccggatcctcaagctgaacatcggcaacccggccccgttcggcttcgaggcccccgaggaactgctccaggacatggtcgccaacctgccggtggcgcagggctacagcgacagcaagggggttccctccgcccgccgcgcggtggtgcagtccagtcagctcaagggcgtccccggggtcgacgtcaacgacgtgtacatgggcaacggggtcagcgaactcatcgtcatgacgatgcaggcgctgctcaacgacggcgacgaggtcctcgtcccggccccggactacccgctgtggaccgccgcgacgagcctcgccggcgggcgcgccgtgcactacctctgcgacgagtccgccggctgggaacccgacctcgaccacctgcgggcgcaggtgaccccgcggaccaaggcgatggtcgtcatcaaccccaacaaccccaccggcgcggtgtacggcaaggccgtgctcgaggggatgctccaggtcgcgcgcgagcacggcctgctcgtcctgtccgacgagatctacgacaagatcctctacgacgacgccgtccacgtctccacggcctcgctggccccggacctgctgtgcatcacgttcaacgggctgtccaaggcgtaccgggtggcgggtttccggtccggctggatgtacctgtccggtcccaaggggcacgccgccgggttcgtcgagggcctcgacctgctggcgaacatgcgcctgtgcgccaacgtccccgcccagcacgtcgtgcaggcggcgctgtcggggcaccagtccatcaacgacctcgtcctgcccggcgggcggctggccgagcagtcgcaccggacgtgggagctgctgaaccagatccccggggtcagctgcgtgaaaccccgcggggccctgtactgcttcccccggctcgaccccgaggtgcaccgggtcgaggacgactaccagctcatcgtcgacctgctggagtcccagcacgtgctcgtcgtgcagggcaccgggttcaactggcccaagcccgaccacttccggatcgtgaccctcccccgcgtggaggacctggagagcgccgtggggcgcatcggcacgttcctcaccgggcggctcgccggccgctga

SEQ ID NO: 145867 - protein, 405 aa, Kineococcus radiotolerans SRS30216
MKLEQSDKLADVLYDVRGPALRRAQQLEEAGHRILKLNIGNPAPFGFEAPEELLQDMVANLPVAQGYSDSKGVPSARRAVVQSSQLKGVPGVDVNDVYMGNGVSELIVMTMQALLNDGDEVLVPAPDYPLWTAATSLAGGRAVHYLCDESAGWEPDLDHLRAQVTPRTKAMVVINPNNPTGAVYGKAVLEGMLQVAREHGLLVLSDEIYDKILYDDAVHVSTASLAPDLLCITFNGLSKAYRVAGFRSGWMYLSGPKGHAAGFVEGLDLLANMRLCANVPAQHVVQAALSGHQSINDLVLPGGRLAEQSHRTWELLNQIPGVSCVKPRGALYCFPRLDPEVHRVEDDYQLIVDLLESQHVLVVQGTGFNWPKPDHFRIVTLPRVEDLESAVGRIGTFLTGRLAGR

SEQ ID NO: 145868 - DNA, 1188 bp, Xanthobacter autotrophicus Py2
  CDS (1)..(1188): transl_table=11
atgctgatcaccaccgcccccttcgaccgcatcggcgaggagaacgccttcgccgtgctggcgcgcgccacggcactggccgggcaagggcggtccatcctcaacctgggcatcggccagccggatttccgcactccggaccatatcgtcgaggccgcggtgaaagcgctgcgcgacggccagcacggctacaccccctcggtgggcatcctgccgctgcgcgaggcggtggccgccgacctcaaccgccgctacggcgtggaggtggacccggacctggtgatgatcatgcccggcggcaaggtcaccatgtatgcggccatccgcctgttcggcgagccgggggcggagatcctctatccggaccccggcttccccatctaccgctccatgatcgagcacaccggcgccacccctgtcccggtgccgatccgcgaggagaacggcttcgccttctcggcggaggagacgctggcgctgatcacgccgaagacgcgcctgctcatcatcaactcgccggccaatcccaccggcggcgtcaccccagcggccgaaattgacaagctggtgaagggccttgccgcccacccccatgtggcgctgatgtcggatgagatctacgaccgcttcctgttcgacggcgaggaacaccgcaccctcctggcctatccgcagatccgtgaccggctgatcctgctcaacggctggtccaagacctatgccatgaccggctggcgtctcggctattccatctggccgaaggacctctacgacaaggtgcgcaagctggcggtgaattgctggagctgcgtgaacgctgccacccaatatgccggcatcgccgcccttgaaggcccgcaggatgcggtggacgcgatgaccgccgagttcgacgcccgccgccgcatcgtggtggacgggctgaacgccctgccgggggtgcgctgcgcgacgccgaagggcgccttctacgccttccccaacgtctccggcaccggctggagcgaggccaagaagctcgcctccgccctgctggaggaggcgggcgtcgcggtcatcggcgggccggatttcggcgtttatggcgaaggctatctccggctgtcctacgccacctcgcgggagaatatcgcggccgcgctagcgcgcatgggcgacttcctcgccgccaaccgcaaggtggcctga

SEQ ID NO: 145869 - protein, 395 aa, Xanthobacter autotrophicus Py2
MLITTAPFDRIGEENAFAVLARATALAGQGRSILNLGIGQPDFRTPDHIVEAAVKALRDGQHGYTPSVGILPLREAVAADLNRRYGVEVDPDLVMIMPGGKVTMYAAIRLFGEPGAEILYPDPGFPIYRSMIEHTGATPVPVPIREENGFAFSAEETLALITPKTRLLIINSPANPTGGVTPAAEIDKLVKGLAAHPHVALMSDEIYDRFLFDGEEHRTLLAYPQIRDRLILLNGWSKTYAMTGWRLGYSIWPKDLYDKVRKLAVNCWSCVNAATQYAGIAALEGPQDAVDAMTAEFDARRRIVVDGLNALPGVRCATPKGAFYAFPNVSGTGWSEAKKLASALLEEAGVAVIGGPDFGVYGEGYLRLSYATSRENIAAALARMGDFLAANRKVA

SEQ ID NO: 145870 - DNA, 1179 bp, Prochlorococcus marinus str. MIT 9215
  CDS (1)..(1179): transl_table=11
atgagccaaatcaatttatctgaacgggcactttcaattgagccttctcttacattgcagataagtgcgagagcaaatcaattgtcggcagaaggagtagatatctgcaatttaagtgcaggagaacctgactttaatgccccaaaagaagttatagaggctacaagtaaagctatatttgatggatttacaaagtacggtccagcagcgggcaatttagatctccgaaaagcaattgcaaataaacttcaaattcaaaacaatttaaattttaaatttgaaaatgtaatgatcacaaatggtgctaagcaagcaatatataatcttttccaagttttattaaatattggagacgaagttattattccttctccatactggttaagttatcctcagatggttagattggcaggtggaaagccaatttttacaaattcttctgcggaagatggatttaaaataaatataaaagatttgaagtctaaaatttcttcaaaaactaaatttataattataaattctcctaataaccctactggaagaattatgtcaaaggaagaattaatgcaaattgcggatttagccagagagcatccaaatatcaatattctttctgatgagatttatgaactaatcctaaaaaaagaatttaaacactacagtttatctacactagcaaatgatttaaaagataggatttttataataaatggttttgcgaaaggatgggctatgactggctggaggataggttacttagtaggtcctaaagatgtaatcaaagcatcctcagcattacaaagtcaaagtacaagtaatgtttgctcttttgttcaaaaaggtgctttagaggctttaaaagttaataatgagtttttctcaatgataaatagccattatgatcaaagaagaagtcttctctatgagggtcttaagaatataaatgggatttatattgaagaacctaatggagcattttatgcatttccaagattacctaactcctcaattacttctgttgatttctgcaataaagttcttcaagatttcggattagtagttgtacctgggaaagcttttggggctgatgaatgtataagaatatcttgcgcagcttcagaggctaaaataaaagatggactagataggtttgaaaaagcaatttctcaatactattga

SEQ ID NO: 145871 - protein, 392 aa, Prochlorococcus marinus str. MIT 9215
MSQINLSERALSIEPSLTLQISARANQLSAEGVDICNLSAGEPDFNAPKEVIEATSKAIFDGFTKYGPAAGNLDLRKAIANKLQIQNNLNFKFENVMITNGAKQAIYNLFQVLLNIGDEVIIPSPYWLSYPQMVRLAGGKPIFTNSSAEDGFKINIKDLKSKISSKTKFIIINSPNNPTGRIMSKEELMQIADLAREHPNINILSDEIYELILKKEFKHYSLSTLANDLKDRIFIINGFAKGWAMTGWRIGYLVGPKDVIKASSALQSQSTSNVCSFVQKGALEALKVNNEFFSMINSHYDQRRSLLYEGLKNINGIYIEEPNGAFYAFPRLPNSSITSVDFCNKVLQDFGLVVVPGKAFGADECIRISCAASEAKIKDGLDRFEKAISQYY

SEQ ID NO: 145872 - DNA, 1140 bp, Desulfococcus oleovorans Hxd3
  CDS (1)..(1140)
atgatatccaaacgcgcccggcagatcaccccgtttctggtgatggatgtcctggaaaaagccgacgagatggagcggcagggcatcgatgtggttcacctggaggtgggagagcctgatttcgacattccgttgtgcgtgaaaacagcggtggaaaaggcccttgccgacggccgcacctactacacccacagcctgggcgacattcggctgcggcaggcgatctgcgatcactacaaaaaccggtacggcgttaccgtgaccccttcccgggtgattgtcacctccggcacctcgccggccatgatgatggcgtttgccgccctgctggatcccggcgacgaggtgattatttctgacccccattatgcctgttatcccaactttatcacctttgccgggggccaacccgtaacggttcctgtttacgaggccgacgggttccagtactcgccggaagccattgcagcggccatgaccgaacgaaccaaggccattttcatcaactccccttcaaatcctaccggcacgctgctctccagggagcgaatggcggctatcgcccggtttgaaccctacattatttctgatgaggtctaccacggcctggtgtacgagggcagggaacactccattttggaatttaccgacaacgcctttgtacttaacggtttttccaagctctacgccatgaccggtcttcggctgggttacctgatcgtacccgagccctttgtgcgcacggtccagattcttcaccagaactttatgatatcggccaactcggtggtgcagttcgccggcatcgcggccctggagcaggctggcgacgacgtggcccgcatgaaggcgatttacaacgaaaggcgtctttacatgatccgccggctgcgggagcttgggtttaccattccggtagaacccaccggcgctttttacctgtttgtcaatgccgggcacctttcttccgactcttacagccttgcctttgacattctggaaaaggcccgtgtgggcgtggcgccgggtattgatttcgggaaaaacggtgaagggtttctgcggttttcctacgccaactctctggaaaacatcgccgaaggtctgaaccggctggagccgtatcttgaacggcgttga

SEQ ID NO: 145873 - protein, 379 aa, Desulfococcus oleovorans Hxd3
MISKRARQITPFLVMDVLEKADEMERQGIDVVHLEVGEPDFDIPLCVKTAVEKALADGRTYYTHSLGDIRLRQAICDHYKNRYGVTVTPSRVIVTSGTSPAMMMAFAALLDPGDEVIISDPHYACYPNFITFAGGQPVTVPVYEADGFQYSPEAIAAAMTERTKAIFINSPSNPTGTLLSRERMAAIARFEPYIISDEVYHGLVYEGREHSILEFTDNAFVLNGFSKLYAMTGLRLGYLIVPEPFVRTVQILHQNFMISANSVVQFAGIAALEQAGDDVARMKAIYNERRLYMIRRLRELGFTIPVEPTGAFYLFVNAGHLSSDSYSLAFDILEKARVGVAPGIDFGKNGEGFLRFSYANSLENIAEGLNRLEPYLERR

SEQ ID NO: 145874 - DNA, 1173 bp, Desulfovibrio vulgaris subsp. vulgaris str. Hildenborough
  CDS (1)..(1173): transl_table=11
atgaacatctcggatcgtcttacccgcatcaaaccttccgccacgctcgccgtcaacgccaaggcgctcgaactcaaggcccgtggggtgaaggtcgtcagcctcgccgtgggcgagcctgatttcggcacacccgcgcacatctgcgaggcggccaagagagccatcgacgagggtttcacccgctacacccccgtgcccggcatcatcgaactgcgagaggcggtggcgggctacttcggtcgatgctacggggtcgaagcccccgccgaggccaccatcgtgaccaacggcggcaagcaggcactgtacaacctctttcaggcactgctcaaccccggcgacgaggtgctcgtgcccgcgccctactgggtgagctatcctgcgctggtgcagcttgccgagggtgtgcccgtgttcgtgccctcgcccgccgagcgcggcttcaagataacccccgccgaactcgatgcgcaccgcacccccagaacacgggtgctgctgctcaattcgccctccaaccccacgggtgcgtgctacacccgcgaggagatggacgccctcatgcagtgggccgtcgaccatgacatcttcgtcatcgccgacgagatatacgaccgcctcgtctacggcgacatgcagcccgtgagcgtctccggctggtggcagcgcttccccgacagggtggcggtggtcaacggcctcgccaaaacctttgccatgaccgggtggcgcgtgggctatgtgcttgcccaccccgacctcgtgaaggccgtggccaagattcaggggcagtccacgtccaacatatgctccatcgcccagaaggccgccctcgccgccctgaccggtccctacgatgccgtggaggagatgcggtgcgccttcgtgcgccgtcgcgacctcgcctatgacatcatctccggctggaaggacgtggtgtgcccgcgccccgacggtgcgttctacctcttcgccgacatccaccggcactacaacgcctccatgcccgattcggccgccgtatgcacccgtcttctcgaagaggcgcaggtggcgctggtgcccggttccgccttcggcgacgacaagtgcatcaggttctcgtacgccgtggcggacgatgtgctcgaagatgcgctctcgcgcgtcgccaaggtactgttcggctag

SEQ ID NO: 145875 - protein, 390 aa, Desulfovibrio vulgaris subsp. vulgaris str. Hildenborough
MNISDRLTRIKPSATLAVNAKALELKARGVKVVSLAVGEPDFGTPAHICEAAKRAIDEGFTRYTPVPGIIELREAVAGYFGRCYGVEAPAEATIVTNGGKQALYNLFQALLNPGDEVLVPAPYWVSYPALVQLAEGVPVFVPSPAERGFKITPAELDAHRTPRTRVLLLNSPSNPTGACYTREEMDALMQWAVDHDIFVIADEIYDRLVYGDMQPVSVSGWWQRFPDRVAVVNGLAKTFAMTGWRVGYVLAHPDLVKAVAKIQGQSTSNICSIAQKAALAALTGPYDAVEEMRCAFVRRRDLAYDIISGWKDVVCPRPDGAFYLFADIHRHYNASMPDSAAVCTRLLEEAQVALVPGSAFGDDKCIRFSYAVADDVLEDALSRVAKVLFG

SEQ ID NO: 145876 - DNA, 1140 bp, Picrophilus torridus DSM 9790
  CDS (1)..(1140): transl_table=11
atggtttcatcacgtttaagccagattagcgagtcagcaacagtaagcatgagcaacagggcgagcgagcttagaaaagccggcaaaaaactttataattttggtatcggggagccggacatgacaacaccggataatataataaagatggcttttgacgatgcaatgtccggaaaaacccattacacaccatcggcaggcatacctgaactcagggaaaagatagcattgaagatgaaatcaaaaaacaatatagacgttgttgcaaagaacgttcttgttacgccaacaaagttttcaataaatcttgcactttacacaataatcgatccaggggacgaggttttaatcccatcgccatactatgtttcatatcctgacattgttaaaataaactctggaaaacctgtttttgcggactgcgatgatgaatacaatatagatattgataatcttagaagggcgataacgccaaaaacaagggcaatactaattaacaatccagtaaatcccaccgggaaggttctatcagagaaaaacataagggaaacagttgattttgcccttgaaaacaatctatatataatatcagatgaaatatatgaggatattatatacaggggaaagatgttctcacctgcatcaataccagaggcctttgataaaacagttacagtaagcggattctcaaagagctatgccatgacaggctggcgtgttggttacatggtcgcaccggaggagataataaaatccgcggacaagattcagcagcaaacattaacatgtgcaccatcaatatcacagtacgctgcactgcatgccctggacgatgatgatagtgtaaagcacataagggagacgtttgaaaaacgcagggatcttgttgtctcactattaaaggaaacaaacctgcacttttacgaacctgagggtgcattctatgtttttccgggatatgaaagcgatgttaaatcatacgatgctgcaatgaatcttttagaaaacaaaaatgtaatagtaactccaggggcgccatttggttctgaatatcatttcaggatatcctttgcaacgtccgaggatgatataaaaaatggaataccattaataggtgagtattttaaatcaatatcatag

SEQ ID NO: 145877 - protein, 379 aa, Picrophilus torridus DSM 9790
MVSSRLSQISESATVSMSNRASELRKAGKKLYNFGIGEPDMTTPDNIIKMAFDDAMSGKTHYTPSAGIPELREKIALKMKSKNNIDVVAKNVLVTPTKFSINLALYTIIDPGDEVLIPSPYYVSYPDIVKINSGKPVFADCDDEYNIDIDNLRRAITPKTRAILINNPVNPTGKVLSEKNIRETVDFALENNLYIISDEIYEDIIYRGKMFSPASIPEAFDKTVTVSGFSKSYAMTGWRVGYMVAPEEIIKSADKIQQQTLTCAPSISQYAALHALDDDDSVKHIRETFEKRRDLVVSLLKETNLHFYEPEGAFYVFPGYESDVKSYDAAMNLLENKNVIVTPGAPFGSEYHFRISFATSEDDIKNGIPLIGEYFKSIS

SEQ ID NO: 145878 - DNA, 1431 bp, Acinetobacter sp. ADP1
  CDS (1)..(1431): transl_table=11
atgtcgcagaaaaaaagcgttatttttaaaaacctactccctgtgattaaacaatatcaacaggctggattcacgcatgaaaaaattgttgctttactcaaagaccaacatgatcttgatcttgtaacaactgaaacatttaaaagctatttatatcgttatgcaaaagtgacccccactccatccgagagcctcaaaatgacgaacacaattcaaaccccacgagaaattaaaaaatcttctaagctcgagcatgtatgctacgacattcgtggacctgtgttacgagcggccaatgaaatggaagaacaaggtcataaaattattaaacttaatattggcaaccctgcgccatttggtttcgaagcacctcaagaaattattaatgatgtcgcattaaatctacctaacgcgattggttacactgactccaaaggtatcttccctgcacgtaaagccatttgccagtattatcagcaaaaaggtattcgcgatatgcacgtcaatgatgtgtatgttggaaacggggtatccgaactgattgtcatggccatgcaaggtttgctaaatgatggcgatgaaatgctggttccaatgccagattatccactctggacagcagcagtaaatttatctggtggtacagcaattcactataaatgtgatgaagaaaatagctggtatccagatattgtcgatatggaaagcaaaataacgcctaatactcgtggtattgtggtgattaatccaaataatccaacaggttcggtttatccaagacacgtgctccagcaaattgtagctttagctaaaaagcacgatctgattttatttgccgatgaaatctatgacaagattatttacgatggaattgaacacgtagcacttgcctctcttgcaggcgatcaactctgtatttcctttaatggtttatcaaaatcttatcgtgttgcaggttatcgttcaggctggatggcgattacaggtgataaatcacgtgctaaagattacatcgaaggtctggatatgctggcatccatgcgcctatgtgccaaccatcaagcacaatatgcgattcaaacggctttaggcggttatcagtcgattaatgacttgattcgtccaagcggacgtttatacgagcaacgcaatattgcatgggaaatgcttaatgaaatacacggcgtcagttgtgtaaaacctgagggtgccatgtattgctttccaaaactagatccgaatatttatcaggtcgaggatgatgaacagttgatgctggatttcttacgtgcagagaaagtgcttctggtacaaggaacaggatttaactggccaacgcatgatcacttccgcttggtcttcttaccagcagagaatgagcttcgagaagcaattacacgattatcacgctttctcgcaacgcgccgttaa

SEQ ID NO: 145879 - protein, 476 aa, Acinetobacter sp. ADP1
MSQKKSVIFKNLLPVIKQYQQAGFTHEKIVALLKDQHDLDLVTTETFKSYLYRYAKVTPTPSESLKMTNTIQTPREIKKSSKLEHVCYDIRGPVLRAANEMEEQGHKIIKLNIGNPAPFGFEAPQEIINDVALNLPNAIGYTDSKGIFPARKAICQYYQQKGIRDMHVNDVYVGNGVSELIVMAMQGLLNDGDEMLVPMPDYPLWTAAVNLSGGTAIHYKCDEENSWYPDIVDMESKITPNTRGIVVINPNNPTGSVYPRHVLQQIVALAKKHDLILFADEIYDKIIYDGIEHVALASLAGDQLCISFNGLSKSYRVAGYRSGWMAITGDKSRAKDYIEGLDMLASMRLCANHQAQYAIQTALGGYQSINDLIRPSGRLYEQRNIAWEMLNEIHGVSCVKPEGAMYCFPKLDPNIYQVEDDEQLMLDFLRAEKVLLVQGTGFNWPTHDHFRLVFLPAENELREAITRLSRFLATRR

SEQ ID NO: 145880 - DNA, 1215 bp, Erwinia carotovora subsp. atroseptica SCRI1043
  CDS (1)..(1215): transl_table=11
atgtctccgattgaaaaatccaaaaaactggagaacgtatgctatgacatccgtggcccagtcttaaaggaagccaagcggcttgaagaagaaggtaataaagtccttaaactgaatattggcaaccctgcccctttcggcttcgaggcaccggacgaaattctggtcgatgtcatccgtaacctgcctactgcacagggctactgtgattccaaggggctctattccgcccgtaaggctatcgttcagcactatcaggcgcgcgatatgcgcgatatgacggttgaagacgtctatattggtaacggtgtttctgaactcatcgtgcaatccatgcaggcgctactcaatccgggtgatgaaatgctggttcccgcaccggattatccactctggactgcggcggtttccctgtctaacggcaatgccgttcactatctctgcgatgagtcctccgattggttccccgatctggatgatatccgcaaaaaaatcacgtccaatactcgcggtattgtcatcatcaacccgaataatccgacgggagcggtctacagcaaagagttgctgctggatatcgtggctatcgcgcgtgaacacagcctgatcattttcgccgacgaaatttacgacaaaattctgtatgacgatgcgcagcaccactctattgctgcgttagcgccggatctgctgacagtcacgttcaacgggctgtccaaaacatatcgtgtggcggggttccgtcaaggctggatggtactgaacggcccgaaaaagcacgcaaaagggtacattgaagggctggaaatgctggcgtccatgcgtttgtgtgccaacgtgccaatgcagcatgcgattcagaccgccttgggtggctaccaaagcatcagcgaatttattcaacccggtggacgtctgtatgaacagcgcaatcgttcatgggaattgatcaatcagatccccggtgtatcgtgcgtaaaaccacgcggcgcgctctatatgttcccgcgtattgatgccaaacgctttaatatccacgacgaccaaaagctggtgctggatctcctgttacaggaaaaagtgttactggttcagggaaccgcatttaactggccttacccggatcatgtacgtatcgtcacgctgccgcgtattgatgaactggacatggcaatccacaaattagggcgcttcctaggacactatcaccaataa

SEQ ID NO: 145881 - protein, 404 aa, Erwinia carotovora subsp. atroseptica SCRI1043
MSPIEKSKKLENVCYDIRGPVLKEAKRLEEEGNKVLKLNIGNPAPFGFEAPDEILVDVIRNLPTAQGYCDSKGLYSARKAIVQHYQARDMRDMTVEDVYIGNGVSELIVQSMQALLNPGDEMLVPAPDYPLWTAAVSLSNGNAVHYLCDESSDWFPDLDDIRKKITSNTRGIVIINPNNPTGAVYSKELLLDIVAIAREHSLIIFADEIYDKILYDDAQHHSIAALAPDLLTVTFNGLSKTYRVAGFRQGWMVLNGPKKHAKGYIEGLEMLASMRLCANVPMQHAIQTALGGYQSISEFIQPGGRLYEQRNRSWELINQIPGVSCVKPRGALYMFPRIDAKRFNIHDDQKLVLDLLLQEKVLLVQGTAFNWPYPDHVRIVTLPRIDELDMAIHKLGRFLGHYHQ

SEQ ID NO: 145882 - DNA, 1203 bp, Erwinia carotovora subsp. atroseptica SCRI1043
  CDS (1)..(1203): transl_table=11
atgccagatattgccgatcgacttaataacattgctatttccgcgtccgtcgcgatgacgcaaaaagcacgtgaccttgccgctcagggtattgatgtggttgggctttcaaccggtgaaccggatttccctactccggtgcacgcgattgaagcggcttatgctgccgcactcgcgggtgatactcgttatccgccgaccgacggtacacccacgctacgggcggctattcagcgcaaattcaagcgcgataaccatctcaactacgacatcagccaaatcattacctctggcggtgcacggcagattattttcaatgccatgatggcaacgataaatccgggtgatgaagtggtcatccccacaccttcgtggataagctacgccgacatcgtgaaatttgctggcggtacgccagtgccagtcgcttgccgtgaagaacacggttttaaacccttgtcgcaagatattgctcatgcgatcacgccgaaaaccaaatggctattgctgaattatccgagcaaccctacggggtctgtggcaagccgcagtgagttgcaggctatcgccgatgtgatgttggataatccacacgtctgggtcatgaccgatgatatttacgagcacctgatttatgacgactgcgaatttttgactatggcgcaggtcgagccacgcctgtttgatcgcgtactcacggtaaacggtgtatcaaaagcatactcgatgacaggctggcgactgggcttttgtggcggccctgtcgcgttaatcaaagcaatgagtaatgtgaacacgcaaaatgcgggcggcatcgcgacattagcgcaggcagcagcaattgccgtattagatggcccacaggatctgcttaaagaacgcgccgcgatttatcgccagcgtcgggatttcgtactggaaaaactggcagccattgacggcctgcgctgccacaaaccgcagggcgctttttatctgtttgtgaatatcgcccattttattggcaagacgagtgctggcgggcggcgcattgaaagcgatgctgactttgtcatggcactgattgaagagcaacacgtcgtgacggtgcaaggtgccgcctatggcatgagcccgtatattcgtctttcttacgccacgagcatggaacgccttgagacgggatgcgcacgcttgggtgcattctgcaacggttgtcattaa

SEQ ID NO: 145883 - protein, 400 aa, Erwinia carotovora subsp. atroseptica SCRI1043
MPDIADRLNNIAISASVAMTQKARDLAAQGIDVVGLSTGEPDFPTPVHAIEAAYAAALAGDTRYPPTDGTPTLRAAIQRKFKRDNHLNYDISQIITSGGARQIIFNAMMATINPGDEVVIPTPSWISYADIVKFAGGTPVPVACREEHGFKPLSQDIAHAITPKTKWLLLNYPSNPTGSVASRSELQAIADVMLDNPHVWVMTDDIYEHLIYDDCEFLTMAQVEPRLFDRVLTVNGVSKAYSMTGWRLGFCGGPVALIKAMSNVNTQNAGGIATLAQAAAIAVLDGPQDLLKERAAIYRQRRDFVLEKLAAIDGLRCHKPQGAFYLFVNIAHFIGKTSAGGRRIESDADFVMALIEEQHVVTVQGAAYGMSPYIRLSYATSMERLETGCARLGAFCNGCH

SEQ ID NO: 145884 - DNA, 1194 bp, Symbiobacterium thermophilum IAM 14863
  CDS (1)..(1194): transl_table=11
atgcgtctgtccgcccgagcccgcgcactcacgccgtcaccgaccatggcgatcgacgccatgtcgaagcagatggtggcggagggcatagacgtcgtcaacttctcggtgggggaacccgacttcgacacaccggagtcgatcaaggccgcaggcatcgccgccatccaacagggagagaccaagtacacccctgccgcgggaaccctggaactgcgcaaggccatctgcgagaagctggagcgggacaacgggctgcagtaccgcccggaggagatcgtggtctccaacggcggcaagcagtcgttgtacaatgcgtaccaggtgctgctggatcccggcgaagaggtgatcatccaggcgccgtactgggtctcctacccggagatcgtgcggttggccgggggcgtccccgtggtggtggagaccgacgagtccaccggcttccgcctgacggccgacatgatccgggagaagctgaccaaccgcacccgggtcatcaacctgaacagcccgagcaatcccaccggcgccgtgctctcccgcagggagctggaggagatcgcggccctggcggtggagcacgacctgatgatcgtgaccgacgagatctacgagaagctgctctacgacggcgccgagcacgtgtccatcgcctcgctgggggaggaggtcaagcggcggaccatcaccgtcaacggcctctccaaggcgtacgccatgaccggctggcgtatgggatacaccgcctcggagcggatctacgccaaggcgatggcagacctgcagtcccagtccacctcgggaccgtcctcgatctcccaggcggctgcggtggccgcactgcggggcagccaggagtcggtggagcagatgcggcaggagttcgaccgccggcgccggcacatgctggagcggttgaaccggctgccgggcttctccgtgaaggtggcgccggcgggggcgttttacctgttccccaacgtgtcggctctcttcggggagaccatcgccgggcgcaagatcacctcgtccgatgacctggcggaggtcatcctggagcaggcccacgtggccgtcgtgcccgggaccggcttcggtgcgccccaccacatccgcttctcgtatgcgacctcgatggagcgcatcgacgaggggctggaccgcatcgcccggctgctcgccaggggctag

SEQ ID NO: 145885 - protein, 397 aa, Symbiobacterium thermophilum IAM 14863
MRLSARARALTPSPTMAIDAMSKQMVAEGIDVVNFSVGEPDFDTPESIKAAGIAAIQQGETKYTPAAGTLELRKAICEKLERDNGLQYRPEEIVVSNGGKQSLYNAYQVLLDPGEEVIIQAPYWVSYPEIVRLAGGVPVVVETDESTGFRLTADMIREKLTNRTRVINLNSPSNPTGAVLSRRELEEIAALAVEHDLMIVTDEIYEKLLYDGAEHVSIASLGEEVKRRTITVNGLSKAYAMTGWRMGYTASERIYAKAMADLQSQSTSGPSSISQAAAVAALRGSQESVEQMRQEFDRRRRHMLERLNRLPGFSVKVAPAGAFYLFPNVSALFGETIAGRKITSSDDLAEVILEQAHVAVVPGTGFGAPHHIRFSYATSMERIDEGLDRIARLLARG

SEQ ID NO: 145886 - DNA, 1215 bp, Mannheimia succiniciproducens MBEL55E
  CDS (1)..(1215): transl_table=11
atggaactctttcctaaatcgaataaattagaacatgtctgttatgatattcgcggccccgtgcataaagcggcgcttcgtttagaagaagaaggtcacaaaattttaaaactgaatatcggcaaccccgcgcctttcggttttgaagcgcccgatgaaattctgattgatgttatccgcaatttaccgaccgcacaaggctattgcgattccaaagggctatattccgcccgtaaagctattgtgcaatactaccaatcaaaaggtattcacggcgctacggtaaatgacgtgtatatcggtaacggcgcctcggaactaattacaatggcaatgcaggcgcttttaaacgacggcgacgaagtgctggtgccaatgcctgactacccgttatggactgcggcggtaactttggcaggcggtaaagcggtacattatctttgcgatgaagaacaggattggttcccggctatcgatgatattaaaagcaaaatcacctcccgtaccaaagccattgttattattaatccgaacaatccgaccggtgcggtttatagcaaagaacttttattggaaattgccgaaatcgcacggcaaaacggtttattaattttctccgatgaaatttatgacaaaattttatatgacggcgcggttcaccaccatattgcgggcttagcgcccgatttattaaccatcaccatgaacggtttgtccaaagcctatcgcatttgcggtttccgtcagggttggatgattttaaacgggcctaaagataaagcacgcggctatatcgaagggttagacatgatcgcctcaatgcggttatgtgcgaacgtgccgatgcaacatgccatccaaactgcgttaggcggttatcaaagtattaacgaattgattgtgcccggcggtcgtctatacgaacaacgcaaccgcgcctatgaattattaaatcaaattcccggcgtaagttgcgtaaaaccgatgggcgcactttatatgttccctaaaatcgacattaaaaaattcaatatttatgacgatgaaaaactcgtgctcgatttgctggcgcaggaaaaggtgttgttagttcacggtagaggctttaactggcatgcgcctgaccacttccgaatcgttactctgccttatgtgcatcaaattgaagaggccttgaacaaattcgcccgatttatggaaaactatcatcaataa

SEQ ID NO: 145887 - protein, 404 aa, Mannheimia succiniciproducens MBEL55E
MELFPKSNKLEHVCYDIRGPVHKAALRLEEEGHKILKLNIGNPAPFGFEAPDEILIDVIRNLPTAQGYCDSKGLYSARKAIVQYYQSKGIHGATVNDVYIGNGASELITMAMQALLNDGDEVLVPMPDYPLWTAAVTLAGGKAVHYLCDEEQDWFPAIDDIKSKITSRTKAIVIINPNNPTGAVYSKELLLEIAEIARQNGLLIFSDEIYDKILYDGAVHHHIAGLAPDLLTITMNGLSKAYRICGFRQGWMILNGPKDKARGYIEGLDMIASMRLCANVPMQHAIQTALGGYQSINELIVPGGRLYEQRNRAYELLNQIPGVSCVKPMGALYMFPKIDIKKFNIYDDEKLVLDLLAQEKVLLVHGRGFNWHAPDHFRIVTLPYVHQIEEALNKFARFMENYHQ

SEQ ID NO: 145888 - DNA, 1179 bp, Legionella pneumophila subsp. pneumophila str. Philadelphia 1
  CDS (1)..(1179): transl_table=11
atggatatcgcattggcaaagcgtgtacaaaaagtaaaaccttcacctacccttgccgtagctgcaaaagcagctcagatgaaagcccaggggcttgatatcattggccttggaactggtgaacctgattttgacacgccgcagcatataaagctagccgccatctctgctattgaagcaggtgataccaaatacaccgccgttgatgggatagtcgaactaaaggaagcggttaaaaacaaattcaaaagagacaatgaactggattatcaactcaatcagatattggtctccgtagggggtaaacaaagctgctataacctctgccaagcttaccttaatcctggcgatgaagtcatcattcccgctccttattgggtatcctatcctgacatggttttgctggctgatggcgttcctgtcatcattgaaactactcccgcgcagcgttataaaatcaatgcacaacaactggaacaagccatcactccaaaaacacgaatgattttcctgaacagcccttccaacccctctggaatagcctacacccagaacgagttaaaggaattaggcgacgttttgaaaaaacatccacagatactgattgccacggatgatatgtatgaacatattatctggagccaaccctttacgaacatcctcaatgcctgccctgaattatatgacagaacgatcgtattaaatggcgtgtccaaagcttatgccatgacaggctggcggataggctatgcggcaggccctgcaccattaatcaatgcgatgaaaaccattcaatcccaatccacatccaatccatgctccatagcccaaagagctgccgtagccgctttgaatggcagcaatgaaagcattgaagaaatggtgaacgccttccaccaaaggcacgactacgtggccgatagattgcaaagcatcgatggcatagaggtcatccccgccgacggaactttctacatttttcccagtgtgcaggcgattatcgaaaaacgaggttacgccaatgacatcgaattttccgaaaaattgctgaatgaagtaggtgtagcactggttccaggctccgccttcggcacagaaggctgcatcagaatatccttcgccaccggtattgacaccctgaaagatgccttgaaccgattacaacgtttctgcagttaa

SEQ ID NO: 145889 - protein, 392 aa, Legionella pneumophila subsp. pneumophila str. Philadelphia 1
MDIALAKRVQKVKPSPTLAVAAKAAQMKAQGLDIIGLGTGEPDFDTPQHIKLAAISAIEAGDTKYTAVDGIVELKEAVKNKFKRDNELDYQLNQILVSVGGKQSCYNLCQAYLNPGDEVIIPAPYWVSYPDMVLLADGVPVIIETTPAQRYKINAQQLEQAITPKTRMIFLNSPSNPSGIAYTQNELKELGDVLKKHPQILIATDDMYEHIIWSQPFTNILNACPELYDRTIVLNGVSKAYAMTGWRIGYAAGPAPLINAMKTIQSQSTSNPCSIAQRAAVAALNGSNESIEEMVNAFHQRHDYVADRLQSIDGIEVIPADGTFYIFPSVQAIIEKRGYANDIEFSEKLLNEVGVALVPGSAFGTEGCIRISFATGIDTLKDALNRLQRFCS

SEQ ID NO: 145890 - DNA, 1182 bp, Methylococcus capsulatus str. Bath
  CDS (1)..(1182): transl_table=11
atgagcatacgactttccgaccgcgtccagtccatcaagccgtccccgactctcgccgtcaccgcccgcgccgccgcgatgcgcgccgccggcaaggacatcgtgggactgggcgcgggcgaaccggacttcgacacgccggaccatatcaaacaggcggccatccaggccatcgaaaagggtttcaccaaatacacggcggtcgatggaacgcccgggctcaagcaggcgatccaggcgaaattcaaacgcgaaaacgggttggattacgcgctcgatcagatcctggtgtcctgcggcggcaagcagagtttctacaatctggcccaggccctgctcaaccccggcgacgaggtcgtcatcccggcgccttactgggtgtcctatccggacatggtgctgctggccggcgccgtcccggtgatcgtcgaggccgggcaacagcaggcgttcaagatcacgccggcacaactggaagccgcgctgacggccagaacccggctgttcgtgatcaacagtccatccaatcccaccggcatggcctacaccgcggaagagctggccggcctcggtgaggtgctgcggcggtttcccgaggtcgtcatcgccaccgacgacatgtacgagcacatcctctgggaaggtggattcagcaacgtcctgaacgtctgcccggacctgtacgagcggaccgtggtgctgaacggcgtgtccaaagcctactcgatgaccggctggcgcatcggctacgcagccgggcccgagcggctgatcgaggccatgaccaacatccagtcgcagagcacctccaatcccacttcgatctcgcaggtcgcggcagaggccgcgctcaatggcgagcagggcttcatcgccggcatggtggaggctttcaagcaaaggcacgacttcgtggtcggaagactgaacgccattcccggcgtcgactgcctgaaaacccacggcaccttctatgtcctgccgaatgtcgaagcggcgatggccaggctgcatctggcggacgacgtggcgctgtccgaatacctgatcgaacagggcggcgtggccgtggtgccgggctcggctttcggcgcaccgggccacgtccgtctctccatcgccaccagcatggccaatctggaaaaggccatggaacgcctggcgaccaccctgtccaaatga

SEQ ID NO: 145891 - protein, 393 aa, Methylococcus capsulatus str. Bath
MSIRLSDRVQSIKPSPTLAVTARAAAMRAAGKDIVGLGAGEPDFDTPDHIKQAAIQAIEKGFTKYTAVDGTPGLKQAIQAKFKRENGLDYALDQILVSCGGKQSFYNLAQALLNPGDEVVIPAPYWVSYPDMVLLAGAVPVIVEAGQQQAFKITPAQLEAALTARTRLFVINSPSNPTGMAYTAEELAGLGEVLRRFPEVVIATDDMYEHILWEGGFSNVLNVCPDLYERTVVLNGVSKAYSMTGWRIGYAAGPERLIEAMTNIQSQSTSNPTSISQVAAEAALNGEQGFIAGMVEAFKQRHDFVVGRLNAIPGVDCLKTHGTFYVLPNVEAAMARLHLADDVALSEYLIEQGGVAVVPGSAFGAPGHVRLSIATSMANLEKAMERLATTLSK

SEQ ID NO: 145892 - DNA, 1221 bp, Azoarcus sp. EbN1
  CDS (1)..(1221): transl_table=11
atggtgcgcaagtccgcgaaactcgccaatgtctgctacgacattcgcgggccggtgctgatcaaggccaagcagatggaggacgaggggcacaagatcatcaagctgaacatcggcaatctcgccgcgttcggcttcgacgcgccggaagagatccagctcgacatgatccgcaacctgccgaactcggccggctactcggaatcgaaaggcattttcgccgcgcgcaaggcggtgatgcattacacgcagcaaaagcacatcaagggcgtgacgctcgaggacatctacatcggcaacggggtgtcggagctgatcgtgatggcgatgaacgcgctgctgaacatcggcgacgaggtgctcgtgccggcgcccgattacccgttgtggaccgctgcggtgagcctgtcgggtggcacgccggtgcattacatctgcgacgaagccaacgaatggctgcccgacctcgacgacatgcgcgcgcgtatcaccccgaacacgcgcgcaatcgtcgtcatcaaccccaacaacccgaccggcgcgctgtatccggaccacatcctgcagggcatcgtcgacatcgcccgggagcacggcctgatcgtctacgcggacgaggtgtacgacaaggtgttgtacgacggtgcgacgcaccggtcgatgggctcgttctccgaggacgtgctgacgatcctcttcaacggcctgtcgaaaaactaccgctcgtgcggctaccgcgccggatggatggtcgtgtgcggcgacaagcgccacgcgcaggactacatcgaagggctcaacatgctcgcgtcgatgcggctgtgcgcgaacgtgccggggcagtacgcgatccagaccgcgctcggcggctaccagagcatcgacgatctggtcgcggaaggcgggcgcatgcgccgtcagcgcgacctcgcgcacgagctgatcagcgcgatcccgggcgtcagctgcgtcaagccgaaagcgacgctgtacatgtttccgaagctcgacccgaagctttacccgatcgaggacgaccaggcgttcatcgccgaactgctcgaagaagagcgcgtgctgctcgtgcagggcagcggcttcaactggccgcacccggatcatttccggctcgtgttcctgccgcacgaggacgacctgcgcgacgcgatcggacggatcgcgcgctttctcgagcagtatcgcaagcggcacgccgcctga

SEQ ID NO: 145893 - protein, 406 aa, Azoarcus sp. EbN1
MVRKSAKLANVCYDIRGPVLIKAKQMEDEGHKIIKLNIGNLAAFGFDAPEEIQLDMIRNLPNSAGYSESKGIFAARKAVMHYTQQKHIKGVTLEDIYIGNGVSELIVMAMNALLNIGDEVLVPAPDYPLWTAAVSLSGGTPVHYICDEANEWLPDLDDMRARITPNTRAIVVINPNNPTGALYPDHILQGIVDIAREHGLIVYADEVYDKVLYDGATHRSMGSFSEDVLTILFNGLSKNYRSCGYRAGWMVVCGDKRHAQDYIEGLNMLASMRLCANVPGQYAIQTALGGYQSIDDLVAEGGRMRRQRDLAHELISAIPGVSCVKPKATLYMFPKLDPKLYPIEDDQAFIAELLEEERVLLVQGSGFNWPHPDHFRLVFLPHEDDLRDAIGRIARFLEQYRKRHAA

SEQ ID NO: 145894 - DNA, 1170 bp, Campylobacter jejuni RM1221
  CDS (1)..(1170): transl_table=11
atgcttacaaaaagatctcaagttttagaagaatctatcactttagctatcactgcacttgccaatgaacttaaagccaaaggcgaggatatcattagtttttcagcgggtgaacctgattttgacacaccacaaaccatcaaaaatgccgctataagtgctattgaaaaaggatgtggaaaatacactgctgttgcaggaattcctgaagtattaaaagctattcaaaccaaatttaaaaaagataataatcttgattatgaaacaaatgaaatcatcaccaatgtaggtgcaaaacactctctttttgaatgtatagaatgcttagtagaaaaagatgatgaagtgattatccctagtccttactgggtaagctatcctgaaatggtaaaatttgcaggtggaaaacctgtatttatagaaggcttagaagaaaatggctttaaaattaccgctgaacaactaaaaaaagctatcacagctaaaaccaaggttttaatgttaaattctccttcaaatcctgtaggatcgatttattctaaagaagaattaactcaaattgctaaagttttagaaggaactcaaattaccgttttaagtgatgaaatgtatgaaaaacttcgctatgatggttttgattttgtagcttttgcaagtgtaagcgaagacgctttaaaacgtactgtgactattaacggacttagcaaatgtggagctatgccaggatggcgttttggctatatggcaagcaaaaataaagccctaatttcagccgttaaaagacttcaaggacaaagcacttcaaatatttgctccattactcaacatgcagccattcctgctttaaatgggaaatgtgataaagatatagaaaaaatgcgtcaagcctttgaaaaacgccgtaacttagctttagatatgcttaaacaaatcccaaatatcagtgtttataaaccagaaggtgctttttatctttttgtaaatatacaaaaaatagaaaaagattctatgaaattttgccaaaaattacttgaacaagaaaaagttgccgttgttccaggcataggttttggcacggatggatactttagactttcttatgccacaagcgatgaactcatcgaaaaaggtttagaaagaatagcaaatttcattaaaaactataaataa

SEQ ID NO: 145895 - protein, 389 aa, Campylobacter jejuni RM1221
MLTKRSQVLEESITLAITALANELKAKGEDIISFSAGEPDFDTPQTIKNAAISAIEKGCGKYTAVAGIPEVLKAIQTKFKKDNNLDYETNEIITNVGAKHSLFECIECLVEKDDEVIIPSPYWVSYPEMVKFAGGKPVFIEGLEENGFKITAEQLKKAITAKTKVLMLNSPSNPVGSIYSKEELTQIAKVLEGTQITVLSDEMYEKLRYDGFDFVAFASVSEDALKRTVTINGLSKCGAMPGWRFGYMASKNKALISAVKRLQGQSTSNICSITQHAAIPALNGKCDKDIEKMRQAFEKRRNLALDMLKQIPNISVYKPEGAFYLFVNIQKIEKDSMKFCQKLLEQEKVAVVPGIGFGTDGYFRLSYATSDELIEKGLERIANFIKNYK

SEQ ID NO: 145896 - DNA, 1197 bp, Dehalococcoides ethenogenes 195
  CDS (1)..(1197): transl_table=11
atgacatcacaggtggaaacggacaaaggttttatctcagacagagccaaagagctcaagccttctggcatacgcaaattctttgacctggccgccaagatgggcagcggagctatatctctgggtgtgggtgaacctgactttacaaccccgtggcatatccgcgaatctgccatttacgctctggaaaagggctacaccatgtatacctctaacgccgggcttttggaactccgccaggagatagccaaatacctgtaccaaacctacaaactggagtacaaccccgaaaccgaaatcttaataaccgtgggctcaagtgaggctttggacctggttatgcgggctaccctgaaccccggtgacgaagtgcttatgactgacccggcttatgtagcttatccttcctgtgtctttatggcatacggcaacccggtccagatacccacttttgaagctaataattttgaaataagtgcggcagatattgcccccagaattacccccaagacccgttcaattttgctggggtatccttcaaaccccaccggggcggttatgcccaaggccaaactggccgagattgccaagctagcgtgcgagaagaacctgctggtggtatctgacgagatatatgacaagattatctactccggttttgaacatacctgctttgccactttgccgggtatgcgcgaacggagtgtaattatcaacggcttttccaaaacatatgccatgaccggctggcggattggctatgcggccggtccggcggatattattcaggctatgaccaagatacatcagcataccatgctgtgtgctcccattgctgcccagaaagccgccctggaagccctgaagaatggtcatgatgacgtgcggctgatggtagaggaatatgaccgccgccgccggtttatagtaaaaagtttcaacgatatggggctgtcctgctttgagcccaaaggcgctttttacacctttccttcagtcaaaaaaaccggactgagttcagccgaatttgccgaaaagctgctcctggaagaaacggtggccgccgtacccggcactgcttttggtgatagcggcgagggttacctgcgctgctgttacgctacctccatgaaagatctagaagaagccatgaagcgtttccgccactttttaaagcacaactgccccgggatgtaa

SEQ ID NO: 145897 - protein, 398 aa, Dehalococcoides ethenogenes 195
MTSQVETDKGFISDRAKELKPSGIRKFFDLAAKMGSGAISLGVGEPDFTTPWHIRESAIYALEKGYTMYTSNAGLLELRQEIAKYLYQTYKLEYNPETEILITVGSSEALDLVMRATLNPGDEVLMTDPAYVAYPSCVFMAYGNPVQIPTFEANNFEISAADIAPRITPKTRSILLGYPSNPTGAVMPKAKLAEIAKLACEKNLLVVSDEIYDKIIYSGFEHTCFATLPGMRERSVIINGFSKTYAMTGWRIGYAAGPADIIQAMTKIHQHTMLCAPIAAQKAALEALKNGHDDVRLMVEEYDRRRRFIVKSFNDMGLSCFEPKGAFYTFPSVKKTGLSSAEFAEKLLLEETVAAVPGTAFGDSGEGYLRCCYATSMKDLEEAMKRFRHFLKHNCPGM

SEQ ID NO: 145898 - DNA, 1200 bp, Thermococcus kodakarensis KOD1
  CDS (1)..(1200): transl_table=11
atgatcaaaccttccgaaagggcgatgggcgttgagtacgccataagggatgtcgtcctcccggcgagggagcttgagaaaaagggcatcgaggtaatcagactcaacataggcgaccccgggaagtacgacttccagccgccggaacacatgaaggaggcatactgcagggccataaaagagggccacaactactacggaccgagtgaaggtctccccgagatgagggaggccgtcgtccagcgtgagaagaggaagaacggcgtggacatcacccccgatgacgtccgcgtcacaactgccgtcaccgaggcacttcagctcctctttggtgcactcctcgaccctggagacaacatcctcgttccaagtccgagctatccgccttacaccggcctcgtcaagttctacggcggaatacccaatgagtacgatacaatagaggagaacggctggcagccggacattgacgacatgaggaagcgcataaacgagaggactaaagcgatagccgttatcaaccctaacaaccccaccggagcgctatacgagaagaagaccgtgaaagaaatccttgatctggccggcgagtacgacatacccgtcatcagcgacgagatttacgacctcatgacctacgagggggagcacgtctcacccggctcgctcacaaaggacgttcccgttatagtcatgaacggcctctccaaggtctacttcgccacaggctggcgcttgggctacttctactacgttgatcctgaaaacaagcttgccgaggtcagggaagccgttgacaagctcatgcgcataaggatatgcccgagtaccccggcccagttcgcggccatagcgggtctaactggcccgatggattacctggaagagtacatgaaaaagctcaaggagaggagggactacatctacaagcgcctgacggagataccaggagttagcacccagaaaccgcagggggcgttctatatcttcccacgcattgacgagcgctccaagtggaagagtgacaaggagttcgtcctcgatgtcctccacgaggcccacgtcctcttcgtccacggttcgggcttcggaagggctggaaactggcacttccgcatagtcttccttccgccggttgagatactggagaaggcaatggacaggttcgaagagttcatgagaaagaggctggcggagtga

SEQ ID NO: 145899 - protein, 399 aa, Thermococcus kodakarensis KOD1
MIKPSERAMGVEYAIRDVVLPARELEKKGIEVIRLNIGDPGKYDFQPPEHMKEAYCRAIKEGHNYYGPSEGLPEMREAVVQREKRKNGVDITPDDVRVTTAVTEALQLLFGALLDPGDNILVPSPSYPPYTGLVKFYGGIPNEYDTIEENGWQPDIDDMRKRINERTKAIAVINPNNPTGALYEKKTVKEILDLAGEYDIPVISDEIYDLMTYEGEHVSPGSLTKDVPVIVMNGLSKVYFATGWRLGYFYYVDPENKLAEVREAVDKLMRIRICPSTPAQFAAIAGLTGPMDYLEEYMKKLKERRDYIYKRLTEIPGVSTQKPQGAFYIFPRIDERSKWKSDKEFVLDVLHEAHVLFVHGSGFGRAGNWHFRIVFLPPVEILEKAMDRFEEFMRKRLAE

SEQ ID NO: 145900 - DNA, 1194 bp, Bacteroides fragilis NCTC 9343
  CDS (1)..(1194): transl_table=11
atgaatcaagtttccagtcatgtaacccgtttatccccttcagctacactcttgatgtcccaaaagagtgcagagttgaaggctaaaggagtagatgtcattaatatgagtgtgggagaacccgactttaatactcccggacatattaaaaaggcagcaatcgaagccatagaacagaactattcttattattcgcccgtaatgggctttttgtctttacgggaagccattgcgaataaattgaataatgaaaatggggtgaactactcagcctcccaaattatatgttcaaatggtgctaaacaatctgtttgcaatgctatattggcagtagtgaatccgggagatgaggtgataattccggctccttattgggtaagctatccggaaatggtaaaactggctgaaggtgtacctgtagttgtacctactgaaatagaacaagattttaaaataacaccttcacaattggaagccgtcattacttcaaagacacgtgcaatcattctgagttctcccaacaatcccaccggaactgtttattcccggcaagaacttcaagaattagcaaacgtgttatccaaacatgagcatgtactcattttatccgatgaaatatacgaacacgtaaattatgtggacaagcatgaaagtatagctcaatttccgactatcaaagaacgggttatcattatcaatggagtatccaaagcatatgctatgaccggatggagaataggattcgttgccggtccggaatgggttgtaaaaggatgttctaaattacaaggacaatataccagtggtccttgttctatctctcagaaagccgcagaagccgcatatagaggtttgcagaactgtgtggaagaaatgcgtttagcatttgagcgacgtagagatttggtagtgagactaggaaaagaaattgcaggtctggaagtcaatatacctgaaggggcattctatttattccctaaatgcagcagtttttttggtaagagatacaaagactgggtaatcaacaattccacagacttggtgatgtacttgctggaagtcggacacgtggcagctgtcagtggagacgctttcggcgcacccggatattttcgtatcagctatgcgacaagtgatgagaacattgtagaagcaatgaaaagaatcaagagtgctttggaacttctggtatag

SEQ ID NO: 145901 - protein, 397 aa, Bacteroides fragilis NCTC 9343
MNQVSSHVTRLSPSATLLMSQKSAELKAKGVDVINMSVGEPDFNTPGHIKKAAIEAIEQNYSYYSPVMGFLSLREAIANKLNNENGVNYSASQIICSNGAKQSVCNAILAVVNPGDEVIIPAPYWVSYPEMVKLAEGVPVVVPTEIEQDFKITPSQLEAVITSKTRAIILSSPNNPTGTVYSRQELQELANVLSKHEHVLILSDEIYEHVNYVDKHESIAQFPTIKERVIIINGVSKAYAMTGWRIGFVAGPEWVVKGCSKLQGQYTSGPCSISQKAAEAAYRGLQNCVEEMRLAFERRRDLVVRLGKEIAGLEVNIPEGAFYLFPKCSSFFGKRYKDWVINNSTDLVMYLLEVGHVAAVSGDAFGAPGYFRISYATSDENIVEAMKRIKSALELLV

SEQ ID NO: 145902 - DNA, 1215 bp, Haemophilus influenzae 86-028NP
  CDS (1)..(1215): transl_table=11
atgcgattattcccaaaatccgacaaattagaacacgtatgttatgacattcgcgggcctgtgcataaagaagcactacgcttagaagaagaaggcaataaaattttaaaacttaatatcggcaacccagcccctttcggttttgaagcaccagatgaaattttagtggatgtgctacgtaatttgccatcagctcaaggctactgtgattcaaaagggttatattctgctcgtaaagccattgttcaatattaccaatcaaaagggattctcggcgcgaccgtcaatgatgtgtatattggtaacggcgtatctgagcttatcacaatggctatgcaagcactgctcaatgatggcgatgaagtactcgtgccgatgcctgattatccgctttggactgctgcggtaaccctttctggcggtaaagcagtgcattatctctgtgatgaagaagcaaattggtttcccgctattgatgatattaaagcaaaggtgaatgcgaaaactaaagcgattgttatcatcaacccgaacaacccaacgggtgctgtgtatagcaaagaattattacaagaaatagtggaaatcgcgcgtcaaaataatttgattatcttcgcagacgaaatctacgacaaaattttatatgatggcgcggtgcatcatcacattgccgcactagctcctgatttattaaccgttacgctgaatgggttatcaaaagcttatcgagttgcaggcttccgccaaggctggatgattttaaacggtccaaaacataatgcgaaaggttatattgaaggcttggatatgctggcatcaatgcgtttatgtgccaacgtaccaatgcaacatgcaattcaaaccgcacttggtggctatcaaagtattaatgaatttattttaccgggcggtcgattacttgagcaacgaaacaaagcctatgatctcatcactcaaatacccggcattacttgcgtgaaaccaatgggggcgatgtatatgttcccgaaaattgatgtgaaaaaattcaatattcgcagtgatgaaaaaatggtgctggatttactccgccaagaaaaagtgctacttgtgcacggtaaaggatttaattggcattcgccagatcacttccgtgttgttactcttccttatgtaaatcaacttgaggaagccattacaaaattagcaagatttttgtctgattaccgtcaataa

SEQ ID NO: 145903 - protein, 404 aa, Haemophilus influenzae 86-028NP
MRLFPKSDKLEHVCYDIRGPVHKEALRLEEEGNKILKLNIGNPAPFGFEAPDEILVDVLRNLPSAQGYCDSKGLYSARKAIVQYYQSKGILGATVNDVYIGNGVSELITMAMQALLNDGDEVLVPMPDYPLWTAAVTLSGGKAVHYLCDEEANWFPAIDDIKAKVNAKTKAIVIINPNNPTGAVYSKELLQEIVEIARQNNLIIFADEIYDKILYDGAVHHHIAALAPDLLTVTLNGLSKAYRVAGFRQGWMILNGPKHNAKGYIEGLDMLASMRLCANVPMQHAIQTALGGYQSINEFILPGGRLLEQRNKAYDLITQIPGITCVKPMGAMYMFPKIDVKKFNIRSDEKMVLDLLRQEKVLLVHGKGFNWHSPDHFRVVTLPYVNQLEEAITKLARFLSDYRQ

SEQ ID NO: 145904 - DNA, 1212 bp, Pseudomonas fluorescens Pf-5
  CDS (1)..(1212): transl_table=11
atgcaggtcagcaaatcgaacaagctcgccaacgtctgttatgacattcgcggcccagtgctcaagcacgccaaacgtctggaagaggaaggccaccgcatcctcaagctgaatatcggcaacccggcgccctttggtttcgaagcgccggacgaaattctccaggacgtgatccgcaacctgcccactgcccagggctacagcgactccaagggcctgttcagtgcccgcaaggcggtgatgcagtactaccagcagaagcaggtggaaggcatcggtatcgaagacatctacctgggcaacggtgtttccgagctgatcgtgatggccatgcaggccctgctcaacaacggcgacgaagtgctggtaccggcccccgactacccgctgtggaccgccgcggtgagcctggccggcggcaacccggtgcactacctgtgcgacgagcaggccaactggtggccggacctggccgacatcaaggccaagatcaccccgaacaccaaggccctggtgatcatcaacccgaacaaccccaccggcgccgtctaccccagggaagtactgctgggcatgctggagctggcccgccagcacaacctggtggtgttctcggacgagatctacgacaagatcctctacgatgacgccgtgcacatctgcaccgcctcgctggccccggacctgctgtgcctgaccttcaacggcctgtccaagtcctatcgggtagccggttttcgttccggctgggtggccatttccggtcccaagcagcacgcccagagctacatcgaaggcatcgacatgctggccaacatgcgcctgtgcgccaacgtgcccagccagcacgccatccagaccgccctgggcggctaccagagcatcaacgatctggtgctgcccccgggccgcctgctggaacagcgcaaccgcacctgggaactgctcaacgacattcccggggtcagttgcgtcaagcccatgggcgcgctgtatgccttcccgcggatcgacccgaagatctgcccgatccacaacgacgagaagttcgtcctcgacctgctgctctcggaaaagctcctggtggtgcaaggcacggccttcaactggccatggccggatcacttccgcgtcgtgaccctgccgcgggtggatgacctggagcaggccattggtcggatcggcagcttcctcaagtcctaccgccagtaa

SEQ ID NO: 145905 - protein, 403 aa, Pseudomonas fluorescens Pf-5
MQVSKSNKLANVCYDIRGPVLKHAKRLEEEGHRILKLNIGNPAPFGFEAPDEILQDVIRNLPTAQGYSDSKGLFSARKAVMQYYQQKQVEGIGIEDIYLGNGVSELIVMAMQALLNNGDEVLVPAPDYPLWTAAVSLAGGNPVHYLCDEQANWWPDLADIKAKITPNTKALVIINPNNPTGAVYPREVLLGMLELARQHNLVVFSDEIYDKILYDDAVHICTASLAPDLLCLTFNGLSKSYRVAGFRSGWVAISGPKQHAQSYIEGIDMLANMRLCANVPSQHAIQTALGGYQSINDLVLPPGRLLEQRNRTWELLNDIPGVSCVKPMGALYAFPRIDPKICPIHNDEKFVLDLLLSEKLLVVQGTAFNWPWPDHFRVVTLPRVDDLEQAIGRIGSFLKSYRQ

SEQ ID NO: 145906 - DNA, 1641 bp, Psychrobacter arcticus 273-4
  CDS (1)..(1641): transl_table=11
atgatggctgatgacaagactaaaagcacacaagctgaacgactggtacagctgcgccgtgacaaaggaatgacggcagagcagttggcacaagcgatgactgctgctggcgctaaagtcagtcgtggtgccatctctaattgggagcgtgggacgaatgggattgtctcatctaagctacctactctcgcgcgtattttaggctgtagcgaaggatatttattgcgcggtgagcttgaaagtgacagcaaatcagatgtcgatttaaagaatatagcgtcagacaataccaacgtatatgtcgaatccgatgagcaagctcatagtgccagtcaaatcacacacacaacgacaataccctctactccccgcaaaatttcaccaaataacctgatgagtggtccctttatgaatacaataaaaaaatccgataaattacaaaacgtctgctacgacattcgcggtcctctgttgcaaactgccaataaaatggaagcagaaggcaaacgtattttaaagctgaatattggcaatcccgctccttttggtttagaagcaccgcatgagattttgcgtgatgtggcgatgaatctgccggaagcgacgggctattcagactcgcaagggattttttcagcgcgtaaagcggtattgcaatactatcaatcaaaagggcttctatcggcagttgatgttcgtgatgtttacctaggtaatggcgtctctgagctgattgtcatgaccttgcaggcactgatgaatgatggcgatgaagtattgattccaatgccagactacccgctttggacagcagctaccaatctagcaggcggtacagcggtacattatcgctgtaatgaagaagacaactggcatcctgatattgaagacatcaaatctaaaatcactagcaaaaccaaaggcattgtggttattaatcccaataatccgacaggcgcactttatagtgatgaagtactgctgcaaattatcgaggtcgcaaaagagcatgatttaattattatggccgatgaaatttatgaccgtattctttatgacgatatggaacatacgccgatgagtaccttgaccgatgaagtactggtgttgtcctataatggtttgtcaaaatcgcatcgcatcgcaggctttcgtgccggttggatgatgatctcaggtcgcaaagaacacgccgctgactttatcgaaggtttggatatgctcgcctctatgcgtctatgttctaacgttcaaggacaatatgcgattcagacagccatgggcggctatcaaagcatgaaagacttaacttctaaaaaaggtcgcttgtacaagcagcgcgagttggcagtgacccgccttaatgcgatcaaaggtatttcttgtaccatgccacaaggcgcgttttactgctttccaaagatggatcctgagatttaccctatcaaagatgatatgcagtttatgatggatttattgttggaagaaaacgtattgatggtacaaggaacagggtttaactgggacaaacatgaccatttccgcttggtatttttacccaacttacacgatttagaagacgccatggatcgcttagaccgcttctttgctaaaaagcgtaagcaatttggtaccgactaa

SEQ ID NO: 145907 - protein, 546 aa, Psychrobacter arcticus 273-4
MMADDKTKSTQAERLVQLRRDKGMTAEQLAQAMTAAGAKVSRGAISNWERGTNGIVSSKLPTLARILGCSEGYLLRGELESDSKSDVDLKNIASDNTNVYVESDEQAHSASQITHTTTIPSTPRKISPNNLMSGPFMNTIKKSDKLQNVCYDIRGPLLQTANKMEAEGKRILKLNIGNPAPFGLEAPHEILRDVAMNLPEATGYSDSQGIFSARKAVLQYYQSKGLLSAVDVRDVYLGNGVSELIVMTLQALMNDGDEVLIPMPDYPLWTAATNLAGGTAVHYRCNEEDNWHPDIEDIKSKITSKTKGIVVINPNNPTGALYSDEVLLQIIEVAKEHDLIIMADEIYDRILYDDMEHTPMSTLTDEVLVLSYNGLSKSHRIAGFRAGWMMISGRKEHAADFIEGLDMLASMRLCSNVQGQYAIQTAMGGYQSMKDLTSKKGRLYKQRELAVTRLNAIKGISCTMPQGAFYCFPKMDPEIYPIKDDMQFMMDLLLEENVLMVQGTGFNWDKHDHFRLVFLPNLHDLEDAMDRLDRFFAKKRKQFGTD

SEQ ID NO: 145908 - DNA, 1236 bp, Colwellia psychrerythraea 34H
  CDS (1)..(1236): transl_table=11
atgaaagctattaccaagtcatctaaattacataatgtttgttacgatattagaggacaagtagccgtcgaggcgaaacgccttgaagatgaaggtcataaaattcttaagttaaatattggtaaccccgccccttttggctttgaagcccctgatgatattttaaaagatgttatccataacttacctaactcacagggttattccgaatctcaaggaatttactctgccagagttgctgtcatgcaatattttcagcagcaaggtattaaagatgtcatggtcgatgatatctttattggtaatggcgtcagtgaactgattgtgatggcaatgcaagcattacttgataatggcgacgaagtattgatccctgcacccgattatccattatggactgcagcagtatcactttcaggcggtaaacctgtgcattatcgatgtgatgagcagaatcattggtttccagatctagaagatatggaaagtaaaattacaaaaaaaaccaaagccattgtattgatcaaccctaataatccaactggtgcggtttattcagaagaggttttacacgctataattgccctagcaaggaaacatggtctaataatttatagcgatgagatctacgataaaattctttatgatgaagctaaacatgtcccaactgctgcattagcgacagatgtgtttatcattacactgggtggtttatcaaaaaattatcgtattgctggctttagagcgggttggatggtcatttctggtccaaaattacatgctgaagactatattaaaggcataaaattactctcatctatgcgaatgtgcgccaatgtaccgagccaacacgccatacaaactgcattaggtggttaccaaagtattaatgaattaattcgtgatgacggccgtttaattaagcaacgtaatgttgcttacaaaatgattaatgatattgatggtttatcatgtaaccctgccatgggtgctttatatctatttgttaaagtagataataaaaaattcaatatcaccaacgatgaacgcatggttttagacttactaaaacaagaaaagatactattagttcatggtcgagcttttaatgttaaagagcataattattttcgtttagtctttttacctcatgttgatgagttaattcctgctcttgaaaagttaaaaagcttttttgctagctataaacaagttcagccgagtaaatcagcataa

SEQ ID NO: 145909 - protein, 411 aa, Colwellia psychrerythraea 34H
MKAITKSSKLHNVCYDIRGQVAVEAKRLEDEGHKILKLNIGNPAPFGFEAPDDILKDVIHNLPNSQGYSESQGIYSARVAVMQYFQQQGIKDVMVDDIFIGNGVSELIVMAMQALLDNGDEVLIPAPDYPLWTAAVSLSGGKPVHYRCDEQNHWFPDLEDMESKITKKTKAIVLINPNNPTGAVYSEEVLHAIIALARKHGLIIYSDEIYDKILYDEAKHVPTAALATDVFIITLGGLSKNYRIAGFRAGWMVISGPKLHAEDYIKGIKLLSSMRMCANVPSQHAIQTALGGYQSINELIRDDGRLIKQRNVAYKMINDIDGLSCNPAMGALYLFVKVDNKKFNITNDERMVLDLLKQEKILLVHGRAFNVKEHNYFRLVFLPHVDELIPALEKLKSFFASYKQVQPSKSA

SEQ ID NO: 145910 - DNA, 1245 bp, Dechloromonas aromatica RCB
  CDS (1)..(1245): transl_table=11
atgaaacacgtcaagaaatccgccaaactcgccaacgtctgctacgacattcgcggccccgtgctgcaaaaagccaagcagatggaggaagagggtcacaagatcatcaagctgaacatcggcaacctggccgcgttcggttttgattcgcccgaggaaatccagcaggacatgatccgcaacctgccgaatgcggctggttatacggattccaagggtattttcgcggcgcgtaaggcgatcatgcattacacccaacagaagggcatcaagggcgtgacgctggaggatatctacgtcggtaacggcgtgtccgaactgatcgtcatggccatgaacgccttgctcgatgccggtgacgaagtgctggtcccggcgccggattacccgctatggacggcagcgatcagcctgtccggcggaacgccaaagcattacctgtgcgacgagagcaagggctggctgccagatctcgacgatatccgcagcaagatcaacgcccacaccaaggcgatcgtgctgatcaacccgaataatccgaccggcgccctttacccggatgatctgctgtacgagatcattgacatcgcccgtcagcatcacctgactatctacgccgacgaggtgtacgacaaggtgctctacgacgatgtgaagcacacgtcgattgcctcgctggccgaggatgtgctgatgatcacgttcaatggtctgtcgaagaactatcgttcttgcggttatcgtgccggctggatggtggtttccggcgacaagcgccatgccaaggactatatcgaaggcctcgacatgctggcctcgatgcgtctgtgtgctaacgcaccggggcagcacggtatccagacggccttgggtggttatcagagtatcaatgatctaatcaaggacggcggtcgcctacgtcgtcagcgcgacatcgcccacgagctgattacagccattcctggcgtcacctgcgtcaagccgaaggccgcgttgtacatgttcccaaggcttgacccgaagatttacccgatcaagaacgatcaacagttcatttccgagctgttgcaggaagagaaagtgttactggttcaggggactggcttcaactggccgcatcccgaccatttccgtcttgtcttcctgccgcacgaggatgacctgcgggaagcagtcgcacgtattgcccgctttcttgaaaattatcgcaaacgtcacaacaccaaccaacttatcaaagactga

SEQ ID NO: 145911 - protein, 414 aa, Dechloromonas aromatica RCB
MKHVKKSAKLANVCYDIRGPVLQKAKQMEEEGHKIIKLNIGNLAAFGFDSPEEIQQDMIRNLPNAAGYTDSKGIFAARKAIMHYTQQKGIKGVTLEDIYVGNGVSELIVMAMNALLDAGDEVLVPAPDYPLWTAAISLSGGTPKHYLCDESKGWLPDLDDIRSKINAHTKAIVLINPNNPTGALYPDDLLYEIIDIARQHHLTIYADEVYDKVLYDDVKHTSIASLAEDVLMITFNGLSKNYRSCGYRAGWMVVSGDKRHAKDYIEGLDMLASMRLCANAPGQHGIQTALGGYQSINDLIKDGGRLRRQRDIAHELITAIPGVTCVKPKAALYMFPRLDPKIYPIKNDQQFISELLQEEKVLLVQGTGFNWPHPDHFRLVFLPHEDDLREAVARIARFLENYRKRHNTNQLIKD

SEQ ID NO: 145912 - DNA, 1209 bp, Thermobifida fusca YX
  CDS (1)..(1209): transl_table=11
atgactgaccgacctcgtatctccgcacgcatcggcggtatctccgagtcagcgaccctggcggtggacgccaaggccaaggccctgaaggccgctgggcatcccgtgatcggcttcggcgccggggagcctgacttccccacgcccgactacatcgtggaggcagcggtcgccgcctgccgcgactcgcgcttccaccgctacaccccggcgggaggcctccccgaactcaaggaagccatcgcggctaagacgctgcgcgactccggctaccgggtggagccgaaccaagtcctggtcaccaacggcggcaagcaagcgatctacgaggcgttcgccacgctgctcgatccgggcgacgaggtcatcgtgatcgcgccctactggaccacctaccctgaatcgatccggctggccggaggaaccccggtctacgtggtcaccgacgagtccactggctacctggccacggtcgagcagctggaggcggcccgcaccgaccgcaccaaggtgctgctgttcgtctccccctcgaacccgaccggcgcggtgtactcgcccgagcaggtccgcgagatcggccggtgggccctcgaacacaacctgtgggtgctcaccgacgagatctacgagcacctcgtctacggggacgcccggttctcctcgatgccggtggaagttccggaactggccgaccgcaccgtggtggtcaacggggtggccaagacctacgccatgaccgggtggcgggtcggctggctcatcggccccgtggacgtggtcaaggctgcgaccaacctgcagtcgcacgccacctccaatgtggccaacgtctcgcaggccgcggctctggcagcggtctccggcgacctgtcggccgtggaggagatgaagcaggccttcgaccggcggcggcagaccattgtgcggatgctcaacgagatccccggtgtggtgtgccccgagccccagggcgcgttctacgcctacccgtcggtcaaggagatcctcggcaaggagatccgcggtcagcgtccgcagacctccagcgagctggcgtcgctgatcctggagcacgccaaggtcgcggtggtcccgggcgaggcgttcggcactccgggctacctgcggttgtcctacgcgttgagcgacgccgatctggtcgaaggggtcagccggatcgccaagctgctgagcgaagcccactga

SEQ ID NO: 145913 - protein, 402 aa, Thermobifida fusca YX
MTDRPRISARIGGISESATLAVDAKAKALKAAGHPVIGFGAGEPDFPTPDYIVEAAVAACRDSRFHRYTPAGGLPELKEAIAAKTLRDSGYRVEPNQVLVTNGGKQAIYEAFATLLDPGDEVIVIAPYWTTYPESIRLAGGTPVYVVTDESTGYLATVEQLEAARTDRTKVLLFVSPSNPTGAVYSPEQVREIGRWALEHNLWVLTDEIYEHLVYGDARFSSMPVEVPELADRTVVVNGVAKTYAMTGWRVGWLIGPVDVVKAATNLQSHATSNVANVSQAAALAAVSGDLSAVEEMKQAFDRRRQTIVRMLNEIPGVVCPEPQGAFYAYPSVKEILGKEIRGQRPQTSSELASLILEHAKVAVVPGEAFGTPGYLRLSYALSDADLVEGVSRIAKLLSEAH

SEQ ID NO: 145914 - DNA, 1284 bp, Ralstonia eutropha JMP134
  CDS (1)..(1284): transl_table=11
atgttcgctgccgccgacgcggcagttttcgcctccgccgatatcgccgtgaaacccatccagaaatccaacaaactcaataacgtttgctacgacatccgcggcccggtgctggaaaaggccaagcagatggaggaagaggggcacaagatcatcaagctgaatatcggcaacctggccgtattcggtttcgatgccccggaggaaatccagcaggacatgatgcgcaacctgccgaattcggcgggctattcggattccaagggcattttcgccgcgcgcaaggcgatcatgcattacacgcagcagaaaaatatccagggcgtcggcctggaagacatctacgtgggcaatggcgcctcggaactgatcgtgatggcggtcaacgcgctgctcaacagcggcgacgaggttctggtgccggcgccggactatccgctgtggactgcggcagtgagcctgtcgggtggcacgccggtgcactatatctgcgacgagtccaacgagtggatgcctgatccggccgatatccgtgcccgcatcacgccgcacaccaaggccatcgtcatcatcaacccgaacaacccgaccggcgcgctgtattcggacgaactgctgctcgagatcgtcgcgatcgcgcgcgagcacgggctgatcatcttcgccgacgagatctacgacaaggtcctgtacgacggcaatgtccacacctcaatcgcctcgctgtcgaccgacgtgctgacggtgaccttcaacggcctgtccaagaactaccgctcgtgcggctaccgtgccggatggatggtggtgtcgggcgacaagcgtccggcgctcgactatatcgagggcctgaacatgctgtcctcgatgcgtctgtgcgcgaacgtgccggggcagtgggccatccagaccgcgctgggcggctaccagagcatcaacgacctggttgccgaaggcggccgcctgcgtcgccaacgcgacctggcctatgagctgatcaccgcgattccgggcgtgagctgcgtcaagcccaaggccgcgctgtacctgttcccgaagctggacctgtcgatgtacccggtgcaggacgaccaggagttcatttacgaactgctgcaggagtccaaggtgctgctggtacagggctccggcttcaactgggacaagccggaccacttccgaatcgtattcctgccgcatgaggaggatctgcgcgaggcgatcaatcgcattgcgcgcttcctggaggcgtatcgaaaacgccacggcaaggtggctgcctga

SEQ ID NO: 145915 - protein, 427 aa, Ralstonia eutropha JMP134
MFAAADAAVFASADIAVKPIQKSNKLNNVCYDIRGPVLEKAKQMEEEGHKIIKLNIGNLAVFGFDAPEEIQQDMMRNLPNSAGYSDSKGIFAARKAIMHYTQQKNIQGVGLEDIYVGNGASELIVMAVNALLNSGDEVLVPAPDYPLWTAAVSLSGGTPVHYICDESNEWMPDPADIRARITPHTKAIVIINPNNPTGALYSDELLLEIVAIAREHGLIIFADEIYDKVLYDGNVHTSIASLSTDVLTVTFNGLSKNYRSCGYRAGWMVVSGDKRPALDYIEGLNMLSSMRLCANVPGQWAIQTALGGYQSINDLVAEGGRLRRQRDLAYELITAIPGVSCVKPKAALYLFPKLDLSMYPVQDDQEFIYELLQESKVLLVQGSGFNWDKPDHFRIVFLPHEEDLREAINRIARFLEAYRKRHGKVAA

SEQ ID NO: 145916 - DNA, 1197 bp, Ehrlichia canis str. Jake
  CDS (1)..(1197): transl_table=11
atgtcgcttatagctggaagaatggattgtattaaaccttcacctacacttgaaattgcaagtcaggcacaaaaattgaagatgtcaggggtagatgtaatttctttaagtgctggtgaacctgattttgatacaccacaacacgttaagcaagcagcaattgatgcaattaatgctggtaaaactaaatatacagcggttgatggaattattgaattaaaaaaagcaattgttgataggtttaaacaagatcatgatttgacttatgatgttaatcaagtttctgtagggaatggagctaagcaatgcatttataatttattaatggctactataaatgatggtgatgaagtaataataccagctccatattgggtctcttatccagatgtagtaaaaatatctggtggaaatcctgtaattgttgattgtagtgaaacatttaaattaactcctgatttgctagaatctgtgattactgaaaaaactaaatggttgattattaattctccaaataatcctacaggattaatgtatacatatgaagagttacaatgtatagctgaagttttactgaaatatccaaatatatatatcatgactgatgatatatattcaaagatagtatatgacggttttaaattctttactatcgcacaagtagaaccacgtttgtatgatagagtatttacagttaatggtgtatcaaaagcttatgcaatgactgggtggaggattgggtatgtagctggtgattcaaaagttattagtgcaatttctgttatacaatcacaaagtacaactaatcctaatagtattgcacagtttgcttcagttcatgctttaactggagatcaggaatttctaaaagaaaggaataaaatatttgcagaacgccgtgatatgatgatgaatatggtgaataatacttcagtgttatctgtgaaaaaacctcaaggtgcattttatgtgtttatttcctgtaaagaattgataggtaaaagtgcaaaaaatggtttagttataaatagtggtattgattttactaggtatttattagaagattataatgttgctgcagtaccaggtgaagcttttggagtacaagggttttttagaatatcttatgctacttctactgaacaattatctaaggcttgtgaccgtattttagatgcatgtaataaattattgtaa

SEQ ID NO: 145917 - protein, 398 aa, Ehrlichia canis str. Jake
MSLIAGRMDCIKPSPTLEIASQAQKLKMSGVDVISLSAGEPDFDTPQHVKQAAIDAINAGKTKYTAVDGIIELKKAIVDRFKQDHDLTYDVNQVSVGNGAKQCIYNLLMATINDGDEVIIPAPYWVSYPDVVKISGGNPVIVDCSETFKLTPDLLESVITEKTKWLIINSPNNPTGLMYTYEELQCIAEVLLKYPNIYIMTDDIYSKIVYDGFKFFTIAQVEPRLYDRVFTVNGVSKAYAMTGWRIGYVAGDSKVISAISVIQSQSTTNPNSIAQFASVHALTGDQEFLKERNKIFAERRDMMMNMVNNTSVLSVKKPQGAFYVFISCKELIGKSAKNGLVINSGIDFTRYLLEDYNVAAVPGEAFGVQGFFRISYATSTEQLSKACDRILDACNKLL

SEQ ID NO: 145918 - DNA, 1197 bp, Dehalococcoides sp. CBDB1
  CDS (1)..(1197): transl_table=11
atgacatcacaggtgggaacggacaaaggttttatctctgacagagccaaagagctcaagccctccggcatacgcaaattctttgacctggccgccaagatgggtagcggagcgatatctctgggtgtgggcgaacctgactttactaccccctggcatatccgcgaatctgccatttatgctctggaaaagggatataccatgtatacctctaacgccgggcttttggaactccgtcaggaaatatccaaatacctttaccagacctatgggctggagtacaaccctgaaaccgaggtattaataacagtgggctcaagcgaggctctggacctggttatgcgggctaccctgaaccccggtgatgaagtactgatgacagacccagcttatgtagcctatccttcctgcgtctttatgtcatacggcaacccggtacagatacccacctttgaagctaataattttgagataagtgcggccgatatagcccccagaattacccccaagacccgctctattctgctgggttacccttcaaatcccactggggcggttatgcccaagaataaactggcggagattgccaagctggcctgtgacaaaaacctgctggtggtatctgacgagatatatgacaagattatctactccggttttgaacatacctgttttgccactctgccgggtatgcgggaacgcagtgttattataaacggtttttccaagacctatgccatgaccggctggcggattggttatgcagtaggcccggccgctattattcaggccatgaccaagattcaccagcacaccatgctctgcgcccctattgccgcccagaaagccgccctagaggccttgaggaacggtcaggatgatgtccgtctgatggtagaggaatatgaccgcagacgccgttttatagtaaaaaatttcaacgatatgggtttgtcctgttttgagcccaaaggggctttttacaccttcccttcagtgcgaaaaaccggactgagttcgaacgaatttgctgaaaaactgcttatggaagaaaaagtggcagctgtacccggtactgcctttggtgagagcggcgaaggttacctccgctgttgttacgctacctccctgaaggatattgaagaggccatgaaacgtttccgccactttttaaaacacaactgcccgcagatgtag

SEQ ID NO: 145919 - protein, 398 aa, Dehalococcoides sp. CBDB1
MTSQVGTDKGFISDRAKELKPSGIRKFFDLAAKMGSGAISLGVGEPDFTTPWHIRESAIYALEKGYTMYTSNAGLLELRQEISKYLYQTYGLEYNPETEVLITVGSSEALDLVMRATLNPGDEVLMTDPAYVAYPSCVFMSYGNPVQIPTFEANNFEISAADIAPRITPKTRSILLGYPSNPTGAVMPKNKLAEIAKLACDKNLLVVSDEIYDKIIYSGFEHTCFATLPGMRERSVIINGFSKTYAMTGWRIGYAVGPAAIIQAMTKIHQHTMLCAPIAAQKAALEALRNGQDDVRLMVEEYDRRRRFIVKNFNDMGLSCFEPKGAFYTFPSVRKTGLSSNEFAEKLLMEEKVAAVPGTAFGESGEGYLRCCYATSLKDIEEAMKRFRHFLKHNCPQM

SEQ ID NO: 145920 - DNA, 1167 bp, Anabaena variabilis ATCC 29413
  CDS (1)..(1167): transl_table=11
atgaaactggcagcaagagtaagtcaggtaacaccttcgataaccttagcgatcgcagcgaaagctaaggccatgaaggcagagggtatagacgtttgtagttttagcgctggtgaacccgactttgataccccagcgcatatcaaagcagcagccgccaaggctttggatgaaggcaaaaccaagtatggtgcagcagctggagaaccaaagttaagggaagcgatcgcccacaagttgcaaaaggataatcatctggattacaagccagagaatgtcattgtcactaatggcggtaagcattcgctttacaacttgattgtggcgctgattgatccaggtgatgaggtaattatccctgctccctattggttgagttatcccgaaatggtgactctggtaggtgggaagtcggtaattgtccccacagatgcttccactggttataaaattactcccgaacaactgcggaaagctattacccccaaaaccaagctatttgtcctcaactccccatctaaccccacaggaatggtgtatacaccagaggaaatcaaggctttggctcaggtagtagttgatgcagatatctatgttgtgtctgatgagatttacgaaaaaattctctatgatggcgcacagcatatcagcatcggttcgctagggaaggaaatttttaaccgcactttgattagtaatggctttgccaaagcttattctatgacggggtggcgcttggggtatttagccgggccagtggacattatcaaggctgctagttccattcaagggcatagtacatcgaatgtgtgtacctttgctcaatatggggcgatcgctgctttggaagattcccaagactgtgtggaagaaatgcgccaagctttcgctaaacgtcgtcaggtaatgctagatcgactcaacgccattcccggcttgagtactgcaaaaccagacggtgcattttatctgtttccagatatcagcaaaaccggtttgaaatccctcgaattttgtgatgctttgattgaagaacacaaggttgcagtgattccagggatagcttttggtgctgatgacaacatccgcctctcctacgccaccgatttggcaacaattgagaaaggtttggatcggttagagaagtttgtccgttctcgcatttag

SEQ ID NO: 145921 - protein, 388 aa, Anabaena variabilis ATCC 29413
MKLAARVSQVTPSITLAIAAKAKAMKAEGIDVCSFSAGEPDFDTPAHIKAAAAKALDEGKTKYGAAAGEPKLREAIAHKLQKDNHLDYKPENVIVTNGGKHSLYNLIVALIDPGDEVIIPAPYWLSYPEMVTLVGGKSVIVPTDASTGYKITPEQLRKAITPKTKLFVLNSPSNPTGMVYTPEEIKALAQVVVDADIYVVSDEIYEKILYDGAQHISIGSLGKEIFNRTLISNGFAKAYSMTGWRLGYLAGPVDIIKAASSIQGHSTSNVCTFAQYGAIAALEDSQDCVEEMRQAFAKRRQVMLDRLNAIPGLSTAKPDGAFYLFPDISKTGLKSLEFCDALIEEHKVAVIPGIAFGADDNIRLSYATDLATIEKGLDRLEKFVRSRI

SEQ ID NO: 145922 - DNA, 1212 bp, Pseudomonas fluorescens PfO-1
  CDS (1)..(1212): transl_table=11
atgcagttcagcaaatcgaacaagctcgccaacgtctgctacgacattcgcggcccggtgctcaagcacgccaaacgcctggaagaggaaggccatcgcatcctcaagctgaacatcggcaacccggcaccctttggtttcgaagcgccagacgaaattctccaggatgtgatccgcaacctgccgaccgcccagggctacagcgattccaaaggcctgttcagcgcgcgcaaggcggtgatgcagtactaccagcagaagcaggtcgaaggtgtcggcatcgaagacatctatctgggcaacggcgtgtccgagctgatcgtgatgtcgctgcaggcactgctcaacaacggtgacgaagtgctggtgccggcgccagactacccgctgtggaccgcagccgtgagcctggccggcggtaacgctgtgcattacctgtgcgacgagggcgccgactggttcccggacctggccgacatcaaggccaagatcaccccgaacaccaaggcgatggtgatcatcaacccgaacaacccgaccggcgcggtgtattcgaaggaagtgctgttgggcatgctcgaactggctcgccagcacaatctggtggtgttctccgacgaaatctacgacaagattctttacgacgacgccgtgcacatctgcaccgcttcgctggccccggacctgctgtgcctgaccttcaacggcctgtccaagtcgtatcgcgtggcgggtttccgttccggctggatcgccatttccgggccgaaacacaacgctcacagctacatcgaaggcatcgacatgctggccaacatgcgcctgtgcgccaacgtgccgagtcagcatgcgatccagaccgccctgggtggctatcagagcatcaacgatctggtactgccgcaaggtcgcctgctggaacagcgcaaccgcacctgggagctgctcaacgacattcccggcgttagctgcgtgaagccgatgggcgcactgtacgcgttcccgaagatcgacccgaaagtctgcccgatccacaacgacgagaaattcgtgctcgacctgctgctctccgagaagctgctggtggtgcagggcacggcgttcaactggccgtggcctgaccacttccgcgtggtcaccctgccgcgggtcgatgacctggacatggccatcggtcgcatcggcaacttcctcaagtcctaccgccagtaa

SEQ ID NO: 145923 - protein, 403 aa, Pseudomonas fluorescens PfO-1
MQFSKSNKLANVCYDIRGPVLKHAKRLEEEGHRILKLNIGNPAPFGFEAPDEILQDVIRNLPTAQGYSDSKGLFSARKAVMQYYQQKQVEGVGIEDIYLGNGVSELIVMSLQALLNNGDEVLVPAPDYPLWTAAVSLAGGNAVHYLCDEGADWFPDLADIKAKITPNTKAMVIINPNNPTGAVYSKEVLLGMLELARQHNLVVFSDEIYDKILYDDAVHICTASLAPDLLCLTFNGLSKSYRVAGFRSGWIAISGPKHNAHSYIEGIDMLANMRLCANVPSQHAIQTALGGYQSINDLVLPQGRLLEQRNRTWELLNDIPGVSCVKPMGALYAFPKIDPKVCPIHNDEKFVLDLLLSEKLLVVQGTAFNWPWPDHFRVVTLPRVDDLDMAIGRIGNFLKSYRQ

SEQ ID NO: 145924 - DNA, 1209 bp, Rhodobacter sphaeroides 2.4.1
  CDS (1)..(1209): transl_table=11
atgaccagctcccgcctctcctcccgccttcaggccgtgcagccctcgcccaccatcgccatgacgcgccttgcagcccagctccgccgcgagggcaaggacatcatcggcctgtcgcagggcgagcccgatttcgacacgcccgtccatatccggcaggccgcggccgccgccatcgaggcaggccagacccgctacaccgacgtggacggcacgcccgagctgaaggccgccatcgtcgagaaattccgccgcgagaacgggctctcctacgagacgaaccagatcagcgtcggcaccggcggcaagcaggtgctctacaacgcgctgctggccacgctcgacgagggcgacgaggtgatcgtgcccgcgccctactgggtctcctaccccgacatggtgcggctcgcgggcggggtgccggtcaccgtttcctgccccgaggaggacgatttcctgctgaccgcgcccgcgctgcgggccgcgatcacgccgcgcaccaaatgggtgatcctgaactcaccctcgaacccgaccggcatgggctattcggccgcccatctgcgcgcgctggccgacgtgctgctcgagttcccgcatgtgctggtgatgaccgacgacatgtacgagcatctgcgctacgacggctgggaattcgccaccatcgcgcaggtcgagccgaagctcatggaccgggtgctgacctgcaacggcgtgtcgaaggccttctcgatgaccggctggcgcatcggctatgccgggggtccggccgacatcatcaaggcgatggccacgctccagtcgcaatcgacctcgaacccctcctcggtgagccaggccgcggcgctcgcggccctgacggggccgatggagttcctggccgagcgcaacgagatcttccgccagcggcgcgacctgtgcctctcggcgctgaaccagatcgaggggctgagctgcgtgcgcccgaacggcgccttctacctcttcccctcctgcgcgggcatgatcggccgcacccgtcccgacgggcgcaagatcgagaccgacacggatttcgtgatgtatctcgtcgaggaggcgggcgtggccgcggtgccgggcagcgccttcggcctcgcgccctacttccgcatctcctttgccaccgacaccgagcggctgcgcaccgcctgcgagcggatccgcgcggcctcggcccggctgacctga

SEQ ID NO: 145925 - protein, 402 aa, Rhodobacter sphaeroides 2.4.1
MTSSRLSSRLQAVQPSPTIAMTRLAAQLRREGKDIIGLSQGEPDFDTPVHIRQAAAAAIEAGQTRYTDVDGTPELKAAIVEKFRRENGLSYETNQISVGTGGKQVLYNALLATLDEGDEVIVPAPYWVSYPDMVRLAGGVPVTVSCPEEDDFLLTAPALRAAITPRTKWVILNSPSNPTGMGYSAAHLRALADVLLEFPHVLVMTDDMYEHLRYDGWEFATIAQVEPKLMDRVLTCNGVSKAFSMTGWRIGYAGGPADIIKAMATLQSQSTSNPSSVSQAAALAALTGPMEFLAERNEIFRQRRDLCLSALNQIEGLSCVRPNGAFYLFPSCAGMIGRTRPDGRKIETDTDFVMYLVEEAGVAAVPGSAFGLAPYFRISFATDTERLRTACERIRAASARLT

SEQ ID NO: 145926 - DNA, 1179 bp, Synechococcus elongatus PCC 7942
  CDS (1)..(1179): transl_table=11
atgaaactatccgagcgtgtggggcgagtgtcaccatcgttgactctcgcgatcgctgcccaagccaaagcgatgaaagctgagggcttggatgtctgcagcttcagcgccggggagcccgactttgaaacacctttgcacattcgcaatgcagcagctcaagcgctagcagagggcaaaactcgctacggtcctgcagccggtgaacctgatctgcgcgaagcgatcgcccaaaaattgcgcgccgacaacggactcgattaccaagccgccaacattctcgtcaccaatggcggtaagcagtcactctacaacctgatgcaggtgctgctcgatccgggcgatgaggtgattatccccgcaccttactggttgagctatcccgaaatggtcaagttggcgggcggtgtgcccgtcatcgttgaaactttcgccagcgacggctttaaactccagccgcagcaattggcaggggcgattacgcctcggacacggctgctagtgctgaattccccctccaatcccacggggatggtctatagccggcaagaactggaagcgatcgcgccgatcattgaagcccatgacttttgggtcgtttctgatgaaatttacgaaaagatcctttacgacggagccgatcaccacagcattggcagcttgagccccgcctgttttgaacgaacgctgatcagcaacggcttcgccaaagcctactcgatgacaggatggcgggttggctacctcgcgggtccgagcgagctaattgctgctgctgcatcgctgcaaagccacagcacctcaaacgtctgcacctttgcccagtacggcgcgatcgcagctctgcaaggtccacaggattgtgtggcagaaatgctggctgcctttacggagcggcgtcagttgatcttgaacggactgaatcaaatcgcggggctctcctgtccaataccggaaggggcgttctacgtcttcgtggacatcagcaaaacaggtctcgactcgatgacctattgccgtcaactgttggatcaacatcaagttgcagccattcccggcattgcctttggcgacgatcgcagcatccggctctcctacgccactgactgccaaacgattgaaaagggtctggaacggttacagctcttccaaaacagcctgcttggtgtctcggtttga

SEQ ID NO: 145927 - protein, 392 aa, Synechococcus elongatus PCC 7942
MKLSERVGRVSPSLTLAIAAQAKAMKAEGLDVCSFSAGEPDFETPLHIRNAAAQALAEGKTRYGPAAGEPDLREAIAQKLRADNGLDYQAANILVTNGGKQSLYNLMQVLLDPGDEVIIPAPYWLSYPEMVKLAGGVPVIVETFASDGFKLQPQQLAGAITPRTRLLVLNSPSNPTGMVYSRQELEAIAPIIEAHDFWVVSDEIYEKILYDGADHHSIGSLSPACFERTLISNGFAKAYSMTGWRVGYLAGPSELIAAAASLQSHSTSNVCTFAQYGAIAALQGPQDCVAEMLAAFTERRQLILNGLNQIAGLSCPIPEGAFYVFVDISKTGLDSMTYCRQLLDQHQVAAIPGIAFGDDRSIRLSYATDCQTIEKGLERLQLFQNSLLGVSV

SEQ ID NO: 145928 - DNA, 1203 bp, Rhodospirillum rubrum ATCC 11170
  CDS (1)..(1203): transl_table=11
atgtcgatcgtcgccgagcgtctgtccgccatcaaaccgtcgccgaccctggcggttaccaccaaggccgccgaactcaaggccgccggccgtgacattatcggtctgggcgcgggcgaacccgacttcgatacccccgatcacatcaaacaggcggcgatcgccgccatcgagcgcggcgagaccaaatacaccgccgttcccggcaccgccgccctgcgcaaggcgatctgcgccaagctcaagcgcgagaacgatcttgagtacacgatcgaagagatcagcgtcggctgcggtggcaagcagaccatctacaacgccctgatggcgacgctgaacccgggcgaggaggtgatcatccccgcgccttattgggtcagctatcccgatatcgccctgttggccggcggcgtgccggtgttcgttcccagcggccccgaggtcggcttcaagctgcagcccgccgatctggagcgcgccatcacgcccaagaccaaatggctgatcctcaacagcccgtccaatccgacgggcgtggcctattcggccgccgatctcaaggccctggccgaggttctgctcaagcatccccatgtctgggtgatgaccgacgatatgtacgagcacctcgtctatgacggcttcaagttcgccaccatcgcccaggtcgagcccaagctgaaggaccgcaccctgacgctgaacggcgtttccaagtcgttcgccatgaccggctggcgcgtcggctatgccgccggcccggtggcggtgatcaaggcgatcaacaagatccaaagccagtcgaccacccacaccagctcgatcagtcaggccgccgcccttgccgcccttgaagggccgatggacttcctgatcgaacgcaacgccatcttcaaggaacgccgcgatctggtcgtgcgcatgatcaatgattgcccgggcctgtcggtcggcacgccggaaggcgccttctatgtctatccgtcctgcgccggggtgatcggcaagacgacgcccgagggcaagctgctggaaaccgacagcgatttcgtcgccgccctgctcgaaagcgaaggggtcgccgccgttcagggcgtggccttcggcctgtcgccctatttccgcatcagctacgccacggcgaccgccaccctggaggacgcctgccagcgcatccgccgcttctgcgaaagcctgcgttga

SEQ ID NO: 145929 - protein, 400 aa, Rhodospirillum rubrum ATCC 11170
MSIVAERLSAIKPSPTLAVTTKAAELKAAGRDIIGLGAGEPDFDTPDHIKQAAIAAIERGETKYTAVPGTAALRKAICAKLKRENDLEYTIEEISVGCGGKQTIYNALMATLNPGEEVIIPAPYWVSYPDIALLAGGVPVFVPSGPEVGFKLQPADLERAITPKTKWLILNSPSNPTGVAYSAADLKALAEVLLKHPHVWVMTDDMYEHLVYDGFKFATIAQVEPKLKDRTLTLNGVSKSFAMTGWRVGYAAGPVAVIKAINKIQSQSTTHTSSISQAAALAALEGPMDFLIERNAIFKERRDLVVRMINDCPGLSVGTPEGAFYVYPSCAGVIGKTTPEGKLLETDSDFVAALLESEGVAAVQGVAFGLSPYFRISYATATATLEDACQRIRRFCESLR

SEQ ID NO: 145930 - DNA, 1191 bp, Moorella thermoacetica ATCC 39073
  CDS (1)..(1191): transl_table=11
atgcaacttgcccagcgggctgccggtatcagtccttcacccaccctggccattgacgcccaggccaaagccatgaaggctaaaggggtgaaggtaataaacttcagcgccggcgagcctgatttcggtacaccggagcatatcaaacaggcagccatcgacgccctggcagccggctttacccgttacacgccggtagccgggattcctgaactgcgccaggcaatatgcgccagcctggctgcccggggagtgacctatgaaccggcagatatcgtcgtctcctgcggcgccaagcattccctctataatgccatgcaggttttacttaacgctggtgatgaggtgatccttagcgccccctactgggtaagctattacgaacaggttaaactcgccggcggtgtcccggtggtagtcaccaccggccccgacaccggctttaagttgacgccagggttgctggaagcggccattaccccgcggacaaggctcttaatcctcaattcgccatgtaacccaaccggcgctgtctacagccgggaggaactggcagccctggctgaagtaattgttgcccgggacctgatagtcatttccgatgaaatttatgccgccctcctctacgacggcctgacccacaccagcatcgcctccctggcgccggaggtaaaagaacggaccatcctcattgacggggtgtccaagacctacgccatgaccggctggcggattggctatgccgctgcgccgcggcccgtggccaaagccatgacggatctccagagccactcgacttccaatcccacctccatcgcccagaaggcggccgtggctgccctgaccggcagccaggaagccgtggaaatgatgcgtcgcgagtttgaacaacgccgcaaccgcatcctggcgggcctgcgggagttaccgggcatcgaatgcaaccagcccggcggcgctttctacgttttcccctatatcggcaagttgttcggccgcaaattccggggtcgggtcctgggcaactccaccgatgtcgctacagccctgctgaatgaattccaggtggcagtggtaccgggcgtcgccttcggcgccgaaccttacctgcgcctctcctatgccacctccatggaccagatcgaagccggcctggaaagactccgggcctttgtaaccgaactggaatag

SEQ ID NO: 145931 - protein, 396 aa, Moorella thermoacetica ATCC 39073
MQLAQRAAGISPSPTLAIDAQAKAMKAKGVKVINFSAGEPDFGTPEHIKQAAIDALAAGFTRYTPVAGIPELRQAICASLAARGVTYEPADIVVSCGAKHSLYNAMQVLLNAGDEVILSAPYWVSYYEQVKLAGGVPVVVTTGPDTGFKLTPGLLEAAITPRTRLLILNSPCNPTGAVYSREELAALAEVIVARDLIVISDEIYAALLYDGLTHTSIASLAPEVKERTILIDGVSKTYAMTGWRIGYAAAPRPVAKAMTDLQSHSTSNPTSIAQKAAVAALTGSQEAVEMMRREFEQRRNRILAGLRELPGIECNQPGGAFYVFPYIGKLFGRKFRGRVLGNSTDVATALLNEFQVAVVPGVAFGAEPYLRLSYATSMDQIEAGLERLRAFVTELE

SEQ ID NO: 145932 - DNA, 1179 bp, Moorella thermoacetica ATCC 39073
  CDS (1)..(1179): transl_table=11
atgttcgaaaaaatctttgccgacaaaatggccaatctggggaccgaaacggcctttatggtcctggccaaggccaaagctctggaagcccagggcaaggagatcatccacctggaaatcggcgaacccgatttcgctaccccccgcaacataatcgacgccggcatccgggccctgaacgaaggttatactcattacacccccgcccccgggctgccggaagtccgggcgaccattgctgagtatgccacccggcagaagggcgttcattacgacccggaagaagtcgtcatcgttcccgggggtaaacccataatgttctttaccatcctggccctggtaaacccgggtgacgaggtcatctaccccaatcccggcttccctatttatgaatccgtcatcaacttcgtcggcggcaaggcagttcccctgcccatccgggaagaaaacgacttccgcctggatgtagatgaactggcagggctcatcacccccaaaaccaaactcctgatcatcaattcccccgccaaccccaccggcggcgtcctcacggctgaagatatcggccgcatcgccgacctggtccggggtaagaacattgtcgtcctggccgacgagatctacgatcgcatcgtttacgacggtgcccgtcccgtatccattgccgcccagccgggtatgaaggactggaccattatcctggacggtttctccaagacctacgccatgaccggttggcggatcggctacggcctgatgcaccgggagctcgccgaccgcatcgcccagttgatggtcaactccaactcctgcaccgccgcctttacccaaaaggctgcccaggaggccctgaccggaccccaggacgccgccgaggccatggtggccgaatttaagaagcggcgggacatcattgttgatggcctgaacagcattcccggtattacctgcaaacggcctctgggttccttctacgtcttccccaacatcaagggtctgggcctctccagccaggagctggaagccttcctgatggaaaaggcgggcgtagccgccctgagcggtacggccttcggtaaatacggggaaggctacctgcgtctctcctatgccaactcggtggagaacatcgagaaagccctggagaaaatagcggctgccgtaaaggagctgcggtag

SEQ ID NO: 145933 - protein, 392 aa, Moorella thermoacetica ATCC 39073
MFEKIFADKMANLGTETAFMVLAKAKALEAQGKEIIHLEIGEPDFATPRNIIDAGIRALNEGYTHYTPAPGLPEVRATIAEYATRQKGVHYDPEEVVIVPGGKPIMFFTILALVNPGDEVIYPNPGFPIYESVINFVGGKAVPLPIREENDFRLDVDELAGLITPKTKLLIINSPANPTGGVLTAEDIGRIADLVRGKNIVVLADEIYDRIVYDGARPVSIAAQPGMKDWTIILDGFSKTYAMTGWRIGYGLMHRELADRIAQLMVNSNSCTAAFTQKAAQEALTGPQDAAEAMVAEFKKRRDIIVDGLNSIPGITCKRPLGSFYVFPNIKGLGLSSQELEAFLMEKAGVAALSGTAFGKYGEGYLRLSYANSVENIEKALEKIAAAVKELR

SEQ ID NO: 145934 - DNA, 1248 bp, Frankia sp. CcI3
  CDS (1)..(1248): transl_table=11
atggagttcacccagtccgacaagctcgccgacgtctgctacgacgtccgtgggcctgtcctcgacgaagcgacccggctggaagctgcggggtcgcgcatcctcaagctgaacatcggcaatcccgcgccgttcggcttctccgcaccgccggaggtactcgaggccgtcgtggcaaaccttgcggatgcacagggttacagcgactccaagggactactcgccgcccgggaagcggtcgtgcgctatcacctccgcaagggggtcaccggcatcgaccccggcggggtctacctcggcaacggcgtctccgaactgatcatgatgtcgttgcaggcgttgctcaacaacggcgacgaggtgctgctccccgcgcccgactatccactgtggacggccgtggtcagcctgtgcggtggccggcccgtgcactacctctgcgacgagtccgccggctgggcgcccgacctcgacgacatcgccgccaaggtcaccccgcggacacgagcgatcgtcgtcatcaacccgaacaacccgactggtgccgtctacgaccggcaggtgctggagaacatcgtcgaggtcgcccgccgccaccacctgatgctgctgtccgatgagatctacgaccggatcctctacgaggacgccgagcacatcgcgaccgcagcgctcgcgccggacctggtctgcatgaccttcaacgggctgtcgaagtcctatcggctggccgggttccgggccgggtggatggtgatgtccggtccgcgcggccacgcctcgagctacatcgagggagtgaacatcctcgcgaacatgcgcctgtgcgccaacgcgcccgggcagttcgccacggtcgccgccctcacggaggacggcggcgcaggggacctcgtcctgcccggcggccggctgcgcgaacaacgagacacggtcgtgaagctcctcaacgacatccccggggtgtcgtgcgtcccgccgcggggggcgctgtacgccttcccccggctggaccccgccgtctacccgatccgggacgacgagcgcttcgtcctcgatctgctgttggccgagaagatcctgctcgtccagggcagcggcttcaactggccgcatcccgaccatgtccggatcgtgaccctgcccgcggtggacgatctcacggacgccatcggccggatcgatcgcttcctggcctcctacaaacgcccctcccaacaacagtgcccctcccaacgacggaactga

SEQ ID NO: 145935 - protein, 415 aa, Frankia sp. CcI3
MEFTQSDKLADVCYDVRGPVLDEATRLEAAGSRILKLNIGNPAPFGFSAPPEVLEAVVANLADAQGYSDSKGLLAAREAVVRYHLRKGVTGIDPGGVYLGNGVSELIMMSLQALLNNGDEVLLPAPDYPLWTAVVSLCGGRPVHYLCDESAGWAPDLDDIAAKVTPRTRAIVVINPNNPTGAVYDRQVLENIVEVARRHHLMLLSDEIYDRILYEDAEHIATAALAPDLVCMTFNGLSKSYRLAGFRAGWMVMSGPRGHASSYIEGVNILANMRLCANAPGQFATVAALTEDGGAGDLVLPGGRLREQRDTVVKLLNDIPGVSCVPPRGALYAFPRLDPAVYPIRDDERFVLDLLLAEKILLVQGSGFNWPHPDHVRIVTLPAVDDLTDAIGRIDRFLASYKRPSQQQCPSQRRN

SEQ ID NO: 145936 - DNA, 1170 bp, Novosphingobium aromaticivorans DSM 12444
  CDS (1)..(1170): transl_table=11
atgaaccagctctcccgggcgcttgcgcgcatcgctccttcccgtaccaccgctatcaccgaccgcgcgatccagcttcgcgccgaaggccgcgacgtgatctcgctctcggtgggcgagcctgatttcgccacgcccgcgcacgtcgtccaggccaccaaggacgcgctcgacgcaggcgacaccaagtataccgccgtcgtgggcacagccgccctgcgcagcgccgccgcgctgcacttcagccgtgacctcggcctggaagtcccgccctcgcaggtgatcgtcagtgccggcggcaagcaggcgatcttccacgcccttctcgccacgctcgatcccggcgacgaagtactgatccccagcccctggtgggtcagctaccctgaaatcgtgcgtttcgccggagcagaggtcgtggacctgccgaccgacgccgcaggcggtttccgcattacggccgcgcaactcgaggccgcaatcacccccgccacccgctggctgctgcttaacagccccggcaaccccactggcgccacctatccggcgcaggaactgcgcgcgctgggcgaggttctgcgccgtcatccccgcgtgctggtgatgagcgacgacatctatgcgcccctgcgttacggcgagggccgccacgccacgctggcggtggagtgccccgatctcgcggatcgcatcctgaccgtctccggcgtttcgaaaagccacgcgatgaccggtttccggatcggcgtcgccgccggccccgcatggctgatctctgcgatgggccgcctgcaatcgcattcctcgggcaaccctgcctcgataagccaggccgctgcggtcgccgcgttcgaaggcccgcaggacttcctgctggactggcgcgagcgcttccgtgcgcgccgggacatggtctgcgcgcgcgttaacgcgatccccggcctgtccacgcctgttcccgatggcgccttctactgtatggtcgatgctgcgccgttgatggcgcgcttcggcgatgacgaagcgctctgcctccatctgttggaaagcggcgtggccgtggtgccggcatccgcgttcggcggaagggacggcttccgcatcagcttcgcggcggacgaggcgaaactcgaagaagcgctgcggcgtatagaaaaggccgttgcatga

SEQ ID NO: 145937 - protein, 389 aa, Novosphingobium aromaticivorans DSM 12444
MNQLSRALARIAPSRTTAITDRAIQLRAEGRDVISLSVGEPDFATPAHVVQATKDALDAGDTKYTAVVGTAALRSAAALHFSRDLGLEVPPSQVIVSAGGKQAIFHALLATLDPGDEVLIPSPWWVSYPEIVRFAGAEVVDLPTDAAGGFRITAAQLEAAITPATRWLLLNSPGNPTGATYPAQELRALGEVLRRHPRVLVMSDDIYAPLRYGEGRHATLAVECPDLADRILTVSGVSKSHAMTGFRIGVAAGPAWLISAMGRLQSHSSGNPASISQAAAVAAFEGPQDFLLDWRERFRARRDMVCARVNAIPGLSTPVPDGAFYCMVDAAPLMARFGDDEALCLHLLESGVAVVPASAFGGRDGFRISFAADEAKLEEALRRIEKAVA

SEQ ID NO: 145938 - DNA, 1185 bp, Anaplasma phagocytophilum HZ
  CDS (1)..(1185): transl_table=11
atgctaagcgaaaggatgaattgtatcaaaccgtcacctaccttagagctttctagacttacgttagaacttagggctcaagggcttgacataatatctctaggtgcaggggaacccgactttgatactccagatcatgtaaaggatgcggcgattgctgccattaatgcaggaaaaactaaatacactccagtggaaggtattcccgaattgaaagattccattattcgcagtgtgcgtcgggactatggtatagactacgtagcaaatcaagtattagtaggggctggggctaagcagtgcatatataacctgtttatggctaccataaacgagggagatgaggttattattcctgcgccgtattgggtttcgtatccagacatggtaaaaatagcagggggagctccagttattgtaaattgcggtgactatttgaagttgactccagaattacttcgtggagcaataaccccgaagactaaatggctcattattaactctccgtccaaccctaccggtgcagtgtatagtagagaagagttagccgctatagcagaggttttaaagcagcataaacatgtcttagttattactgatgacatatacgcaaagcttgtctatgatgctgagttttgcggcattctgcaggtagaaccatcactttatgatagagtctatatagttaatggggtctcaaaagcgtattccatgacaggctggcggatagggtacatattaggtaacgcggaagctataaaagcggtatccacaatacagtctcagagtacaactaatgctaattccatagcgcagtatgctgcaatagccgcgctggatggtgatcaatcttttttagacactagaattaaggcatttgcgcgtagaagggatagggttatggatgcagtgctttcttcaggagtgttgcaggcagatgtgccacaaggagccttttatgtgttcatatcatgcggtaatgcgataggtaaacacgctcctaaagttggtgtgataaacgacggaagtgatatggcgaagcatttgctaaatcatagggtggctgtagttcctggtgttgcctttggagctcctaactttttccgtatttcatatgctctctcagatgataggttatctgaagcatgtgagaggattttggaggcttgttcgtacctaagctag

SEQ ID NO: 145939 - protein, 394 aa, Anaplasma phagocytophilum HZ
MLSERMNCIKPSPTLELSRLTLELRAQGLDIISLGAGEPDFDTPDHVKDAAIAAINAGKTKYTPVEGIPELKDSIIRSVRRDYGIDYVANQVLVGAGAKQCIYNLFMATINEGDEVIIPAPYWVSYPDMVKIAGGAPVIVNCGDYLKLTPELLRGAITPKTKWLIINSPSNPTGAVYSREELAAIAEVLKQHKHVLVITDDIYAKLVYDAEFCGILQVEPSLYDRVYIVNGVSKAYSMTGWRIGYILGNAEAIKAVSTIQSQSTTNANSIAQYAAIAALDGDQSFLDTRIKAFARRRDRVMDAVLSSGVLQADVPQGAFYVFISCGNAIGKHAPKVGVINDGSDMAKHLLNHRVAVVPGVAFGAPNFFRISYALSDDRLSEACERILEACSYLS

SEQ ID NO: 145940 - DNA, 1194 bp, Neorickettsia sennetsu str. Miyayama
  CDS (1)..(1194): transl_table=11
atgttgtcaaaaaagattgagagtattaaaccttctgcgacggctgcagctacacgtagggtatgtgagttgagggcgcgtggaaaagatgtaatatccttgtgtataggggagcctgacttttctacacctttcctaggtcaggagatggccatacaggccataaaagattgtgatgataattactctcctgttgctggaacaatggtgcttcgcgaggagatcgctgcgaagtttgtccgcgataatgcattgcattattcaccgcacgagattgttgtgggtaatggagcaaagcaagtgttgtataacgttcttggtgcgattcttaatccagaggatgaggtagtgcttattgctccttattgggtctcttattgtgaaatagtgcgtatcttttcaggtaagcctgttgtcgtgccaagtacaaaaaagtttaggatagatattacggcaatacgggaggcacttaacacaaaaaccaaagcaatactgattaactctcctaataatccatccggagtgtgttatgaagaaagtgaactcagggatttggctagtgccttgagagcgcatccgcaggtccatatcatatccgatgacatatacgagcatatcacttatgcggagtctagctttctcaatatcgcgaatgttgcaccagaattgggggagcgcataattttagtaaacggtgtttctaagtgttatgctatgaccggttggcgagtaggttatgcagctattccaaataaagcagtcatttctctggtgtgtagattacaggagcacagtacgtttggtgtatgtacaatagctcaggctgctgctttaggggccctgcgttcaggagcagatgttctttctgaaaggcttgctgtctttgcaaggaagagaaacaaggctgtcgaagtgctttctatgttgcctgagttgtgttgttataagccagatggtgggttttacctctttctctcttgttctgccttcttcgggaagaaaagtcccagtggcttcgaagtgaaaacggattccgatgttgcagactatcttcttgaggagcacgctgttgcggttgtgcctggggaagagtttggagtaccagggtattttaggatttcttatgctttgtcaatggatctgctagagcaagcttgtatgcgtatagtgaaggcatttaaagcgcttagatga

SEQ ID NO: 145941 - protein, 397 aa, Neorickettsia sennetsu str. Miyayama
MLSKKIESIKPSATAAATRRVCELRARGKDVISLCIGEPDFSTPFLGQEMAIQAIKDCDDNYSPVAGTMVLREEIAAKFVRDNALHYSPHEIVVGNGAKQVLYNVLGAILNPEDEVVLIAPYWVSYCEIVRIFSGKPVVVPSTKKFRIDITAIREALNTKTKAILINSPNNPSGVCYEESELRDLASALRAHPQVHIISDDIYEHITYAESSFLNIANVAPELGERIILVNGVSKCYAMTGWRVGYAAIPNKAVISLVCRLQEHSTFGVCTIAQAAALGALRSGADVLSERLAVFARKRNKAVEVLSMLPELCCYKPDGGFYLFLSCSAFFGKKSPSGFEVKTDSDVADYLLEEHAVAVVPGEEFGVPGYFRISYALSMDLLEQACMRIVKAFKALR

SEQ ID NO: 145942 - DNA, 1272 bp, Saccharophagus degradans 2-40
  CDS (1)..(1272): transl_table=11
atgacactgccgaaagaccccgagtcgtccacggttaaaccggtgaaaaaggacaagcgcaaaaacatcattaaatctgaaaagctactaggcgtatgctacgacattcgcggcccagtgcttgagcacgccaaccgccttgaagaagaaggccaccgcatattgaagttaaacattggcaacccagcaccttttggttttgaagcgccagatgaaattatcaccgatgtggtttataacattcgcgaggcgcagggctataccgcatcgcgcggcttgttccccgcacgcaaagccatcatgcacgagtgccaacgccaggaaatacccaacgtagaaatagaagatatcttcttgggcaacggcgtatcagaacttattgttatggccaaccaggccctgcttaacaatggtgatgaagtacttgttccctcaccagactaccctctgtggaccgccgctgtgaacctcgctgggggcaaagcagtgcactacatgtgcgacgagcagtcggactggttccccgatatagatgatatgcgcagtaaaataaccagccgcacacgtgcaatagtggttataaacccaaacaaccctaccggcgcggtatacagccaagagctgttagagcaaattgtagcgcttgcacgcgagcatcaactggtgattttcgccgacgaaatttacagcaagattctgtacgatgacgccgaatttgtgcccatggggcgcatcgcaaaagatgtgctgtgcgtaacctttaacggcttgtctaaatcttaccgactggcgggtttccgctcgggttggataattctaagtggtgccaagcacttggcaaaagactatattcgcggcatagatatgctggcctctatgcgcctgtgtgccaacgttcccgctatgctggcagtgcaaacagcgcttggcggctaccaaagtattaatgagctaatcctgccgggcggacgtttgcttgagcagcgcgacgcggccattgaagagctagcaaaaataccaggagtaagctgtgtggtgcccaaaggggcaatatacctgttccctaaaattgatcgcaccatgtacgactttgatgacgaccaacagttaatattagattttctaattcaagagaaaattctgttggtgcaaggtactgccttcaactggaagcaaccggaccactttagaattgtgtttctaccgcaagcagaccaattgcgtcaggcgattattaagtttggcgagtttttgcagcaataccgcatttaa

SEQ ID NO: 145943 - protein, 423 aa, Saccharophagus degradans 2-40
MTLPKDPESSTVKPVKKDKRKNIIKSEKLLGVCYDIRGPVLEHANRLEEEGHRILKLNIGNPAPFGFEAPDEIITDVVYNIREAQGYTASRGLFPARKAIMHECQRQEIPNVEIEDIFLGNGVSELIVMANQALLNNGDEVLVPSPDYPLWTAAVNLAGGKAVHYMCDEQSDWFPDIDDMRSKITSRTRAIVVINPNNPTGAVYSQELLEQIVALAREHQLVIFADEIYSKILYDDAEFVPMGRIAKDVLCVTFNGLSKSYRLAGFRSGWIILSGAKHLAKDYIRGIDMLASMRLCANVPAMLAVQTALGGYQSINELILPGGRLLEQRDAAIEELAKIPGVSCVVPKGAIYLFPKIDRTMYDFDDDQQLILDFLIQEKILLVQGTAFNWKQPDHFRIVFLPQADQLRQAIIKFGEFLQQYRI

SEQ ID NO: 145944 - DNA, 1290 bp, Methylobacillus flagellatus KT
  CDS (1)..(1290): transl_table=11
atgcaagaaatttccaagtccagcaagctcagcaacgtatgctacgacattcgtggcccggtgctggaccgagcgcggcagatggaggaggacgggcaccgcatcatcaagctcaatatcggcaatcctgcgccttttggttttgccgcgcccgaggaaatcctgcaggacgtgattcgcaacatggattccgcttccggttatacggattccaagggtctgttcgccgcacgtaaggcgattatgcattacacccagcagaagaatatccagggtgtgaccatcgatgacatcatcatcggcaatggcgtttccgagctgatcgtcatggccatgcaggcattgctcaacaacggtgaccaggtactggtgccgatgcctgattatccgttgtggactgcggcagtgaacctggcgggcgggacggcgcggcactatgtctgcgacgagcagactggctggctacccgacctccgggatatcgagaacaaaatcacggcgaatacgcgcggcatcgtcattatcaacccgaacaacccgacgggtgccttgtatccgcgggaaacgctggaaggcatcatcgagatcgcacgccatcacggcctggtgattttcgcggacgaaatctacgacaaggtattgttcgacggcaatacgcacacctcgattgcttcattggctgatgatgtgctgttcgtgaccttcaacggtctgtccaagaattatcgtacctgcggttaccgcgccggttggctggtgatctcgggagagaagcggcatgcgggagactacatcgaggggttgaacatgctggcttcgatgcgcctgtgcgccaatgtgcccgggcagttggcgatccagaccgcgctgggcggctaccagagcatagacgaccttgtggcgccgaccggccggttatgcaagcagcgcgaccttgcctacaagatgctgaccgatattcctggtgtaagttgcgtcaagcccaaggctggcctgtacctgtttccgcgccttgatcccaaaatatatcccatccaggatgaccagcaattcatcctcgacctgttgctggaggagaaagtcctgctggtgcagggcacgggcttcaactggcgcgcgccggatcatttccgcgtcgtgttcctgccgaatgtggatgacctcaccgaggcatttacccgaattgcccgcttcctggaaaattaccgcaagcagcacagcaccatcaccatagtggaaggcaaagcctcgaaagaggcacaaacaacctcccaaagcgcgtcggcatga

SEQ ID NO: 145945 - protein, 429 aa, Methylobacillus flagellatus KT
MQEISKSSKLSNVCYDIRGPVLDRARQMEEDGHRIIKLNIGNPAPFGFAAPEEILQDVIRNMDSASGYTDSKGLFAARKAIMHYTQQKNIQGVTIDDIIIGNGVSELIVMAMQALLNNGDQVLVPMPDYPLWTAAVNLAGGTARHYVCDEQTGWLPDLRDIENKITANTRGIVIINPNNPTGALYPRETLEGIIEIARHHGLVIFADEIYDKVLFDGNTHTSIASLADDVLFVTFNGLSKNYRTCGYRAGWLVISGEKRHAGDYIEGLNMLASMRLCANVPGQLAIQTALGGYQSIDDLVAPTGRLCKQRDLAYKMLTDIPGVSCVKPKAGLYLFPRLDPKIYPIQDDQQFILDLLLEEKVLLVQGTGFNWRAPDHFRVVFLPNVDDLTEAFTRIARFLENYRKQHSTITIVEGKASKEAQTTSQSASA

SEQ ID NO: 145946 - DNA, 1215 bp, Acidobacteria bacterium Ellin345
  CDS (1)..(1215): transl_table=11
atgtccacgttgaccaaagccacgcccattcaagccgcagaccgcatggtgaatgttcgctatgcgattcgcgatcttgccgttcttgccgaccaggttgcctcgcagggaaacaagatcctctactgcaacatcggcgacccctgcaagtacgacttccctgtccccgtgcacatcatggaagccgccatcaaagcgatgcgcgacggctacaacggatacggcgagtcgctcggcatcaaaccggcggtcgaagcgatccgaaatgaagctgaacgcgatggtttcaagaacatccaaggtgtgttcgttggcctcggcagcggtgaagccatcgactcctgcctgacggcgttgctcaatcccggcgagaattttctcgcgcccagccccgaatatccgctctacggcgccatcaccgccaagcttggtgctgaacccaacgcctatttcctcgatgaatcgaacgactggcagcccgacgtggaagacctcgagcgccgcatcaacgccaagacgcgcgcactgctgatcattaatcccaacaacccgaccggcgccgtgtactcgcgcgaaacgttggagaaaattgccgacgtggcgcgccgccacaatttgcttctgatctccgacgagatctataacaagctcgtcttcgaccccagcgcgaaacacatctccatcgctacgctcgcgccggatgttccgtgtattaccttcaacggcttgtcgaaggcatatctcgtgcccggatggcgtatcgggtggggcgtcggcaccggaccggcggaactgatcaagcccttcctcgagaacatctacaagttgcttcgtgcgcgtctctccgcgccgcatccgtaccagtacgccgtgaaggctgcgctcgaaggcccgcaggaccatctcaagtgggtgaatgaaaaactcgcagcgcgcgccaaggtcacaaaagactgggccgccagcgaaccgcgcgtcaacctggtcgcgccgaagggcgcgttctacgccttcccgtcgctcgacatcccggaagatgacctaacctttgtcagcgaactcctgatacaaaaacacgtcctgctcgttcacggcagcggcttcggccagaaacccggcacacaccactgccgtattgtcacgctgccgcaggaagcagtgctgaccaacgcctacgcgaaggtcagcgagttcttgaaagagcgataccagtag

SEQ ID NO: 145947 - protein, 404 aa, Acidobacteria bacterium Ellin345
MSTLTKATPIQAADRMVNVRYAIRDLAVLADQVASQGNKILYCNIGDPCKYDFPVPVHIMEAAIKAMRDGYNGYGESLGIKPAVEAIRNEAERDGFKNIQGVFVGLGSGEAIDSCLTALLNPGENFLAPSPEYPLYGAITAKLGAEPNAYFLDESNDWQPDVEDLERRINAKTRALLIINPNNPTGAVYSRETLEKIADVARRHNLLLISDEIYNKLVFDPSAKHISIATLAPDVPCITFNGLSKAYLVPGWRIGWGVGTGPAELIKPFLENIYKLLRARLSAPHPYQYAVKAALEGPQDHLKWVNEKLAARAKVTKDWAASEPRVNLVAPKGAFYAFPSLDIPEDDLTFVSELLIQKHVLLVHGSGFGQKPGTHHCRIVTLPQEAVLTNAYAKVSEFLKERYQ

SEQ ID NO: 145948 - DNA, 1203 bp, Silicibacter sp. TM1040
  CDS (1)..(1203): transl_table=11
atgtccgttctttctgcgacactttcccgcgtgaagccttccccgaccattgccgtcaccaataaggcgcgtgaattgaaagccgccggtcgcgacgtgatcggccttggtgcgggggaaccggatttcgacacgccacaatccatcaaggatgccgctgtccgtgccattgccgagggcaagaccaaatacacagccgtcgatggcatcccggagctgaagcagaccatctgcgaaaagttcaagcgtgacaatggcctggactatcgcccggagcaggtcacggtaaactctggcggcaagcagacgctgtataacgccctgatggcgaccctcaatcccggcgatgaggtgatcatccccgcgccctattgggtgagctatcctgacatggtgctccttgcaggaggcactccggttccggtggaggccagccttgagagcagcttcaaactgacgcccgatcagttggaggccgccatcaccgacaagaccaaatggttcatcttcaattctccctccaacccgaccggagccggatattcgcgcgccgaattgaaagctctgacggatgtcttgatgcgtcatccccatgtctgggtgatgaccgatgacatgtatgaacacctcgcctatgacgatttcgaattctgcacaccggcgcaggttgaaccgggactctatgaccgcaccctcacctgcaacggggtttccaaagcctatgcgatgactggctggcggatcggctatgcggcgggtccggaaactctgattgcggcgatgcgcaaggtgcagtcgcagtctacctcgaacccctgttcggtcagccaatatgccgcgctcgaagcgctcacggggccgcaggatttcctcgccagcaacaatgagatcttcgtgcggcggcgcaatctggtggtgtcgatgctgtcggagatcgatggcttgacctgcccggtgccggagggcgctttttatgtctacccctcgatcgcgggtctcattggcaagacaacgccaaaaggcgtaaccatcaacagcgatgaggattttgccaccgcccttctggaagaggccgatgtggccgtggtgtttggcgcagcctttggcctctcgccgaattttcgtgtgagctatgcaacctccgatgacgccctcaaggaagcctgcacgcgcatccagcgcttctgcgcctcgctcagctga

SEQ ID NO: 145949 - protein, 400 aa, Silicibacter sp. TM1040
MSVLSATLSRVKPSPTIAVTNKARELKAAGRDVIGLGAGEPDFDTPQSIKDAAVRAIAEGKTKYTAVDGIPELKQTICEKFKRDNGLDYRPEQVTVNSGGKQTLYNALMATLNPGDEVIIPAPYWVSYPDMVLLAGGTPVPVEASLESSFKLTPDQLEAAITDKTKWFIFNSPSNPTGAGYSRAELKALTDVLMRHPHVWVMTDDMYEHLAYDDFEFCTPAQVEPGLYDRTLTCNGVSKAYAMTGWRIGYAAGPETLIAAMRKVQSQSTSNPCSVSQYAALEALTGPQDFLASNNEIFVRRRNLVVSMLSEIDGLTCPVPEGAFYVYPSIAGLIGKTTPKGVTINSDEDFATALLEEADVAVVFGAAFGLSPNFRVSYATSDDALKEACTRIQRFCASLS

SEQ ID NO: 145950 - DNA, 1191 bp, Myxococcus xanthus DK 1622
  CDS (1)..(1191): transl_table=11
atgaaactcgctcaccggctccaggccatcaagccgtctccgacgctcgctctcaactcgcgcgccaaggcgctcgtcgccaagggtgtggatgtagtagtcctggccgcgggagagccggacttcgacacgccggattacgtgaagcaggccgcggtggacgcactgcgagcgggcttcaccaagtacaccccgaccaacggcatcccggagctgcgcgaggccatctgcgccaagctcgagcgggacaacggcttgcgctacacgccggaccaggtgctcgtcacgtccggtggcaagcagggcctctacaacttctgccaggcggcgctggaggagggggacgaggtcatcatcttcgcgcccttctgggtcagctacccggacatggtgcggctggcgggtgccacgcccgtcatcgtccccacgcgcgaggaggacggcttcgcgccggacccggacgccatccgccgcgcgctcacgccgcgcacgcgcgccgtcatcatcaacagcccaggcaatcccaccggcgccgtctattcgcgcgcggcgctggagcgcatcgcggaggtgctgcggccccacgactgcctcatcgtcacggacgacatctacgagaagctgctctacaccgacgaacgcctgggcatcagcgacgtagcgccggacctggtgccgcggctggtggtcgtgaacggcatgagcaaggcgtactccatgacgggctggcgcatgggctacgtcgccgggcccaagccgcttttggccggcatgcagatggtgcaggaccagtccacgtccaacgcctcctccattggccagaaggccgcgctggcggcgttgcaggggccgccggacaccatcgccgccatggtgaaggagtaccgcgagcgccgtgacttcttcatcgcgggactgaacgcgctggatggcgtgcgctgccggatgcccgagggcgccttctacgccttcgcggacgtgcggggcctgctgggccggtcgtacaagggcaagccggtgacgtccgcgatgcagctgtcggaaatcctcctcgacgacttccgcgtcgccgccgtgcccggcgagccgttcggcgcggagggctacgtgcgcatgagcttcgtcacctcgcgcgaggtgctgcagaagggccttgcccggctgggtgagctggtcaaggccctgagctga

SEQ ID NO: 145951 - protein, 396 aa, Myxococcus xanthus DK 1622
MKLAHRLQAIKPSPTLALNSRAKALVAKGVDVVVLAAGEPDFDTPDYVKQAAVDALRAGFTKYTPTNGIPELREAICAKLERDNGLRYTPDQVLVTSGGKQGLYNFCQAALEEGDEVIIFAPFWVSYPDMVRLAGATPVIVPTREEDGFAPDPDAIRRALTPRTRAVIINSPGNPTGAVYSRAALERIAEVLRPHDCLIVTDDIYEKLLYTDERLGISDVAPDLVPRLVVVNGMSKAYSMTGWRMGYVAGPKPLLAGMQMVQDQSTSNASSIGQKAALAALQGPPDTIAAMVKEYRERRDFFIAGLNALDGVRCRMPEGAFYAFADVRGLLGRSYKGKPVTSAMQLSEILLDDFRVAAVPGEPFGAEGYVRMSFVTSREVLQKGLARLGELVKALS

SEQ ID NO: 145952 - DNA, 1287 bp, Mycobacterium sp. MCS
  CDS (1)..(1287): transl_table=11
atggacgacgtgaccatgcctcagacgccggccgagcggacctggcacccccagggccaccagccgcggccccgtacgttcacgcagtcgtcgaagctgcaggacgtcctctacgagatccgcggcccggtacacgagcacgcgtcgcggctggaggccgagggccaccgcatcctcaagctcaacatcggcaacccggcgccgttcggcttcgaggcacccgatgtgatcatgcgcgacatcatccaggcgctgccgtacgcgcagggctactcggactccaagggcatcatgcccgcgcgccgggcggtgttcacccgctacgaactcgtcgacgggttcccgcgcttcgacgtcgacgacgtgttcctcggcaacggggcctccgagctcatccagatggtgctgcaggcactgctggacaacggcgatcaggtgctgatcccggcgccggactatccgctgtggacggcgtgcacctcgctggcgggcggcaccccggtgcactacctgtgtgacgagacgcagggctggaatcccgacgtcgccgacatcgagtcgaagatcaccgaccgcaccaaggcgatcgtcgtcatcaacccgaacaacccgaccggcgcggtgtacagccgcgagacgctggagcggatcgccgatctcgcccggaaacaccagctgctgctgctggccgacgagatctacgacaagatcctctacgacgatgccaagcacatctcgctggcctcggtcgcgcccgacgtgttgaccctgacgttcaacgggctgtcgaaggcctaccgggtggcgggttaccgctcgggctggctggtgatcaccggacccaaggagcacgccagcagcttcatcgagggcatcagcctgctggccaacatgcggttgtgcccgaatgtgcctgcacagcatgcgattcaggtggcgctcggcggccatcagagcatcgacgatctggtgttgcccggcgggcggttgctcgagcagcgcgacgtggcctgggagaagctcaacgagattcccggcgtctcgtgcgtgaagccggccggcgcgctgtacgcgttcccgcggctggatcccgaggtctacgagatccacgacgacgagctgctggtgctcgacctgctgctgcaggaaaaaatcctggttgtgcagggcaccgggttcaactggccgacaccggatcacctgcgcatcgtcacgctgccgtgggctcgtgacctggccaacgccatcgagcgtctcggcaacttcctggtcagctaccggcagtag

SEQ ID NO: 145953 - protein, 428 aa, Mycobacterium sp. MCS
MDDVTMPQTPAERTWHPQGHQPRPRTFTQSSKLQDVLYEIRGPVHEHASRLEAEGHRILKLNIGNPAPFGFEAPDVIMRDIIQALPYAQGYSDSKGIMPARRAVFTRYELVDGFPRFDVDDVFLGNGASELIQMVLQALLDNGDQVLIPAPDYPLWTACTSLAGGTPVHYLCDETQGWNPDVADIESKITDRTKAIVVINPNNPTGAVYSRETLERIADLARKHQLLLLADEIYDKILYDDAKHISLASVAPDVLTLTFNGLSKAYRVAGYRSGWLVITGPKEHASSFIEGISLLANMRLCPNVPAQHAIQVALGGHQSIDDLVLPGGRLLEQRDVAWEKLNEIPGVSCVKPAGALYAFPRLDPEVYEIHDDELLVLDLLLQEKILVVQGTGFNWPTPDHLRIVTLPWARDLANAIERLGNFLVSYRQ

SEQ ID NO: 145954 - DNA, 1203 bp, Mesorhizobium sp. BNC1
  CDS (1)..(1203): transl_table=11
atggctttccttgccgatgctctttcacgcgtgaagccctccgccaccattgccgtcacccagaaggcgcgggagctcaaagcgcagggtcgcgatgtcatcggactgggggccggcgaaccggatttcgatacgccggacaatatcaaacaggccgcgatcgaagccatcaagcgcggcgaaacgaaatatccgcccgtctccggcattcagcctctgcgcgaggcgatcgccgcaaagttcaagcgcgagaacaatctcgactacgactggaagcagaccatcgtcggaacgggtggtaagcagatcctcttcaacgccttcatggcgacactgaaccccggtgatgaagtggtgatcccgacgccctattgggtgagctatcccgagatggtgtcaatctgcggcggcacgtcggtcttcgcggagacccggctggaagacaacttcaagctccagccggaggtgcttgaaagggcgatcacgcccagaaccaagtggcttatcatgaactcgccatcgaacccctcaggcgcagcctatacgcgcgaggaactgaaggcggtggccgatgtgctgcttaagcatccgcatgtctgggttctgaccgacgacatgtatgagcacctgacctatggcgatttcacctatcacaccattgccgaggtggaaccgcagctttacggacgcacgctcaccatgaacggcgtctcgaaggcttatgccatgacgggctggcggatcggctatgcggcaggaccgatcgagctcatcaaggccatggacatgatccagggccagcagacctctggagcggccaccgtctgccagtttgcggcgctggaggcgctgaccggaccgcaggacttcatccaccagagcaaaaaggtctttcaggagcgccgcgatctcgtggtctcgatgctcaaccaggcgaaaggcatcagttgcccggtgccggaaggtgcgttctacgtctatccttcctgcgcgggcacgatcggcaaaaaggcgccctccggcaagctgatcgaaagcgacaccgatttcgtctccgaacttctggagactgaaggcgttgccgtggtccagggttcggccttcggccttggccccaatttccgcatctcctacgccacttcggacgcgctgttggaagaggcctgcagccgcatccagcgctttaccgcgaaccttcgctag

SEQ ID NO: 145955 - protein, 400 aa, Mesorhizobium sp. BNC1
MAFLADALSRVKPSATIAVTQKARELKAQGRDVIGLGAGEPDFDTPDNIKQAAIEAIKRGETKYPPVSGIQPLREAIAAKFKRENNLDYDWKQTIVGTGGKQILFNAFMATLNPGDEVVIPTPYWVSYPEMVSICGGTSVFAETRLEDNFKLQPEVLERAITPRTKWLIMNSPSNPSGAAYTREELKAVADVLLKHPHVWVLTDDMYEHLTYGDFTYHTIAEVEPQLYGRTLTMNGVSKAYAMTGWRIGYAAGPIELIKAMDMIQGQQTSGAATVCQFAALEALTGPQDFIHQSKKVFQERRDLVVSMLNQAKGISCPVPEGAFYVYPSCAGTIGKKAPSGKLIESDTDFVSELLETEGVAVVQGSAFGLGPNFRISYATSDALLEEACSRIQRFTANLR

SEQ ID NO: 145956 - DNA, 1263 bp, Rhodococcus sp. RHA1
  CDS (1)..(1263): transl_table=11
atgacgctcgtgagcaacccagaccacggccatcaccgcaagccgcaccgcaagctggagcagtccaccaagcttcagaacgtgctctacgagattcgtggaccggtacatgcccacgccgcccggctggaggcggaaggccaccggatcctcaagctcaacatcggcaaccccgcgccgttcggtttcgacgcgccggacgtgatcatgcgcgacatgatcgccgcgctcccgtacgcgcaggggtattccgagtccaagggcatcctgtcggcgcggcgcgcgatcgtcacccgctacgagctggtcgccgggttccccgaactcgacgtcgacgacatctacctgggcaacggtgtgtccgagctcatcacgatgacgatgcaggcgctcctcgacaacggcgacgaggtgctgatcccggcaccggactacccgctgtggacggcgatgacgagcctcgccggcggcaccccggtgcactacctgtgcgacgagggcaacgactggaaccccgacatcgcggacatcgagtcgaagatcaccgacaagaccaaggcgctgctcgtcatcaacccgaacaatccgacgggtgcggtgtactcgatggaggtgctgcagcagctcgtcgacctggcgcgcaagcatcagctgctgcttctcgcggacgagatctacgacaagatcctctacgacgacgccaaacacatctcactcgccacgctggccccggacctgctgtgcctgacgttcaacggcctgtcgaaggcgtaccgcgtcgccggctaccggtccggttgggtggccatcacgggcccgaaggaacacgccgcgggtttcctcgagggactcgacctgctcgcgtcgacgcgtctgtgcccgaacgtgcccggtcaacacgccatccaggtggcgctcggtgggcaccagagcatcgaagacctgatcctgccgggtgggcgactgctcgagcagcgtgatgtggcgtgggaacgcctcaacatgattcccggtgtctcctgcgtgaagccgaagggcgcgctgtacgcattcccccgcctcgacccgaacgtgtacgagatctacgacgacgagaagctggtccaggaccttctgctgcaggagaagatcctgatggttcagggcaccggcttcaactggccggaccacgaccatctccgcatcgtgacgttgccgtgggcgcgtgatctcgctgtcgccatcgagcggttcggaaatttcctcaccagctacaagcagtag

SEQ ID NO: 145957 - protein, 420 aa, Rhodococcus sp. RHA1
MTLVSNPDHGHHRKPHRKLEQSTKLQNVLYEIRGPVHAHAARLEAEGHRILKLNIGNPAPFGFDAPDVIMRDMIAALPYAQGYSESKGILSARRAIVTRYELVAGFPELDVDDIYLGNGVSELITMTMQALLDNGDEVLIPAPDYPLWTAMTSLAGGTPVHYLCDEGNDWNPDIADIESKITDKTKALLVINPNNPTGAVYSMEVLQQLVDLARKHQLLLLADEIYDKILYDDAKHISLATLAPDLLCLTFNGLSKAYRVAGYRSGWVAITGPKEHAAGFLEGLDLLASTRLCPNVPGQHAIQVALGGHQSIEDLILPGGRLLEQRDVAWERLNMIPGVSCVKPKGALYAFPRLDPNVYEIYDDEKLVQDLLLQEKILMVQGTGFNWPDHDHLRIVTLPWARDLAVAIERFGNFLTSYKQ

SEQ ID NO: 145958 - DNA, 1215 bp, Haemophilus somnus 129PT
  CDS (1)..(1215): transl_table=11
atgcgagttttccctaaatccgataagttagaacatgtatgctacgatattcgtggaccggtacatcaagaggcgttacgtttggaagaagaaggcaaaaagatcttaaaattaaatattggtaatccagcaccattcggttttgaagctcctgatgagattttggtagatattttgcgtaatttgcctgccgcacaaggatattgtgattcaaaaggtctatattctgcacgtaaagctattgttcaatattaccaatctaagaatattttaagtgcgaccgtaaatgatgtatacatcggtaatggtgtttctgaacttattactatgtcattacaagcattgttgaatgatggtgatgaggtgttaatcccaatgcctgattacccattatggacggctgctgcaacgttagccggcggaaaagcggttcattatttatgtgatgaacaagctgattggtttcctgatgtggcagatataaaaagtaaggttacttctcgcacaaaagccattgttattattaatcctaataatccaacgggagctgtttatagtaaagaattattattagatatagttgaagtagctcgccaaaatggattgatgatttttgccgatgaaatttacgataaaattttatatgacaacgctgttcatcatcatatcgccgcattagcaccggatttgttaacggttactttcaacggcttatcaaaatcttatcgtgtagcaggatttcgccaaggttggatgattttaaatggaccaaaacatcaagcaaaaggctatattgaaggcttggatatgttggcatcaatgcgtttatgtgcaaatcatcctatgcaacatgcgatccaaactgctttaggtggatatcagagtatcaatgaatttattttaccgggtggtcgtttattagaacaacgtaataaggcttatgagctgattaatcaaattccgggattaagttgcacaaaaccgatgggcgcactttatatgttcccgaaaattgatactaaaaaattcaatatctatgatgatgaaaaaatggtattggatttattgcgtcaagagaaagtgttattagttcatggacgtggttttaactggcagcaaccagaccattttagaatagtaaccttaccttatgttaatcaaattgaagacgctttaggtcgattagcaagatttttagagtattatcgtcagtaa

SEQ ID NO: 145959 - protein, 404 aa, Haemophilus somnus 129PT
MRVFPKSDKLEHVCYDIRGPVHQEALRLEEEGKKILKLNIGNPAPFGFEAPDEILVDILRNLPAAQGYCDSKGLYSARKAIVQYYQSKNILSATVNDVYIGNGVSELITMSLQALLNDGDEVLIPMPDYPLWTAAATLAGGKAVHYLCDEQADWFPDVADIKSKVTSRTKAIVIINPNNPTGAVYSKELLLDIVEVARQNGLMIFADEIYDKILYDNAVHHHIAALAPDLLTVTFNGLSKSYRVAGFRQGWMILNGPKHQAKGYIEGLDMLASMRLCANHPMQHAIQTALGGYQSINEFILPGGRLLEQRNKAYELINQIPGLSCTKPMGALYMFPKIDTKKFNIYDDEKMVLDLLRQEKVLLVHGRGFNWQQPDHFRIVTLPYVNQIEDALGRLARFLEYYRQ

SEQ ID NO: 145960 - DNA, 1164 bp, Trichodesmium erythraeum IMS101
  CDS (1)..(1164): transl_table=11
atgaattttgcaacaagaatgaatagcttaggcggagatgctgcaattgaagtttttactaaagcaaaacaattagaatctcaaggtcgaaatattattcatttagaaataggtcaacctgattttaagactcctaaaaatattcgcgaagctgctttccaagctatgaatgatggctatacaacttatactccagcagcaggtttattaaagttacgagaagtcatagcagaacatatttctcaaactagaaatatatcagttaattctgatgaagtagtagtaatgccaggagcaaaaccagtcatattttttactcttttagcattaataaattcaggagatgaagtgatttatccaaaccctggatttcctgtttatgaatcagtaattaatttagtgggagggaaacctattccattacctttgttagaggaattagattttcaatttagtatagataatctagttaattctatttcagaaaaaacaaaattattaattattaattctccccataaccctactggtagtgtgttaactcctgagtatttagaagccatagctaaattagcagttaaacataatttttatgttctctctgatgaaatttactcccacttaaactacgactcaaaatttaccagtatcatcagttttcctagtatgaaagaacgtacaattttattagatgggcactcaaaaacttatgctatgactggatggcgtttaggttattctatttctcccaaagcaatagcagaaaagttagataaattgatgttaaattctaattcctgtgcttgttcatttactcaaatagctggcatagaagccatcaaaaattctcaggagtttgtcaaaaaaatattcgcagaatttaaacaaagacgtgatgttattgtggatggtttaaattctatttcaggtattaattgtcgaaaaccagcaggtgctttttatgcttttccaaatgtgaaacaattaccaataagttccaataaattggcagattatttattagctgaagctggagttgctttattacccggaactgcttatggaaaatttggagatggatatttaaggttgtcttatgctaattctattgaaaatattcgcgaaggtattagtcggatagaaacagcgatcgctaaactatag

SEQ ID NO: 145961 - protein, 387 aa, Trichodesmium erythraeum IMS101
MNFATRMNSLGGDAAIEVFTKAKQLESQGRNIIHLEIGQPDFKTPKNIREAAFQAMNDGYTTYTPAAGLLKLREVIAEHISQTRNISVNSDEVVVMPGAKPVIFFTLLALINSGDEVIYPNPGFPVYESVINLVGGKPIPLPLLEELDFQFSIDNLVNSISEKTKLLIINSPHNPTGSVLTPEYLEAIAKLAVKHNFYVLSDEIYSHLNYDSKFTSIISFPSMKERTILLDGHSKTYAMTGWRLGYSISPKAIAEKLDKLMLNSNSCACSFTQIAGIEAIKNSQEFVKKIFAEFKQRRDVIVDGLNSISGINCRKPAGAFYAFPNVKQLPISSNKLADYLLAEAGVALLPGTAYGKFGDGYLRLSYANSIENIREGISRIETAIAKL

SEQ ID NO: 145962 - DNA, 1215 bp, Shewanella sp. MR-4
  CDS (1)..(1215): transl_table=11
atgcgccctatcatcaagtccaacaagttggatactgtttgctacgacatccgcggcccagtgcacaaggaagccagacgtttagaagacgagggacaccgcatcctcaaactcaacattggtaaccccgcccccttcggttttgaagcgccggaagaaattgtgcgcgatgtgatcctcaatcttcccagcgctcaaggctactgtgagtcgaaaggattattctctgcccgcaaggcgattgtgcagcattatcaagcacagggcattaaaggcgtcgatatcgaagatgtctatatcggtaatggtgtgtcagagctgattatgatggccatgcagggcttattaaacaccgatgatgaagtgcttatcccctctcccgactatccgctatggaccgcggcggcgaatttagccggcggtaaagcggtacattaccgctgcgatgaagaggcggattggttcccggatcttgatgatattaagagcaaaatttcgtctcgtacccgtggtattgtgctgattaacccgaacaaccctacgggcgctgtttacagcaaagaattactgctgcaagttatcgagctctgccgcgagcacaacctgatcctgtttgccgatgaaatctacgataagattttatacgacgaggccaaacatattccggccgcgagcctctctgacgatatcttaaccgtgacctttaatggtctttcaaaagcctatcgcgcagcgggctttcgtgtcggttggatgatgttgtctggcaatcttaaggcagccaagagttatatcgaaggtttagagatgctctcctcgatgcgcctatgtgccaacgtgccgaatcaacacgcgattcaaaccgcgctcggcggttaccaaagcattaatgagctgattttacctagcggccgcttaacggttcagcgcgatacctgttatgagttattgaaccaaattcccggtgtgagcgtgaaaaagcccaagggggcactgtacgccttccccaaactggacatgaaaaagttcaacctcagggatgatgagcgcttagtactcgatttgctcagggataaaaaaatcctcctcgtccacggcagcgcctttaactggccagagccggatcatttaagagtggtgtttttaccctataaggaagatttgactaaagcattgacagagtttggcaatttcctcgagacctacaaacaataa

SEQ ID NO: 145963 - protein, 404 aa, Shewanella sp. MR-4
MRPIIKSNKLDTVCYDIRGPVHKEARRLEDEGHRILKLNIGNPAPFGFEAPEEIVRDVILNLPSAQGYCESKGLFSARKAIVQHYQAQGIKGVDIEDVYIGNGVSELIMMAMQGLLNTDDEVLIPSPDYPLWTAAANLAGGKAVHYRCDEEADWFPDLDDIKSKISSRTRGIVLINPNNPTGAVYSKELLLQVIELCREHNLILFADEIYDKILYDEAKHIPAASLSDDILTVTFNGLSKAYRAAGFRVGWMMLSGNLKAAKSYIEGLEMLSSMRLCANVPNQHAIQTALGGYQSINELILPSGRLTVQRDTCYELLNQIPGVSVKKPKGALYAFPKLDMKKFNLRDDERLVLDLLRDKKILLVHGSAFNWPEPDHLRVVFLPYKEDLTKALTEFGNFLETYKQ

SEQ ID NO: 145964 - DNA, 1215 bp, Shewanella sp. MR-7
  CDS (1)..(1215): transl_table=11
atgcgccctatcatcaagtccaacaagttggatactgtttgctacgacatccgcggcccagtgcacaaggaagccagacgtttagaagacgagggacaccgcatcctcaaactcaacattggtaaccccgcccccttcggttttgaagcgccggaagaaattgtgcgcgatgtgatcctcaatcttcccagcgcccaaggctactgtgagtcgaaaggattattctctgcccgcaaggcgattgtgcagcattatcaagctcaaggaatttttggtgttgatattgaagatatctatataggcaacggcgtctctgaacttattatgatggcgatgcaaggtctgcttaacacagatgatgagatcttaatcccctcgcctgactatccattatggacagcggcggccaatctcgccggcggtaaagcggtgcattaccgttgtgatgaagacgcggattggttccccgatcttgatgatattaagagcaaaatttcatctcgcacccgcggtattgtattgatcaacccgaacaatcctactggcgcggtttacagcaaagaattactgctgcaagttgtcgagctttgccgcgagcacaacctgatcctgtttgccgatgaaatctacgataagattttatacgacgaggccaaacatattccggccgcgagcctctctgacgatatcttaaccgtgacctttaatggtctatcaaaggcttatcgcgctgcgggctttcgtgttggttggatgatgttgtctggtaatcttaaggctgcaaagagttatatcgaaggtttagagatgctctcctcgatgcgcctgtgtgccaacgtgccgaatcaacatgcgattcaaaccgcgctcggcggttaccaaagcattaatgagctgattttacctagtggccgcttaaccgtgcagcgcgatacctgttatgagttattgaaccaaattcccggtgtgagcgtgaaaaagccgaagggtgcactctatgctttccctaaattggatatgaaaaaattcaaccttagggatgatgagcgcttagtcctcgatttactcagagaaaagaaaatcctgttagtacacggcagtgcctttaactggccagagccggatcacctcagggtggtatttttaccctataaagaagatttgactaaggcattgactgagtttggccatttcctcgagacctataaacaataa

SEQ ID NO: 145965 - protein, 404 aa, Shewanella sp. MR-7
MRPIIKSNKLDTVCYDIRGPVHKEARRLEDEGHRILKLNIGNPAPFGFEAPEEIVRDVILNLPSAQGYCESKGLFSARKAIVQHYQAQGIFGVDIEDIYIGNGVSELIMMAMQGLLNTDDEILIPSPDYPLWTAAANLAGGKAVHYRCDEDADWFPDLDDIKSKISSRTRGIVLINPNNPTGAVYSKELLLQVVELCREHNLILFADEIYDKILYDEAKHIPAASLSDDILTVTFNGLSKAYRAAGFRVGWMMLSGNLKAAKSYIEGLEMLSSMRLCANVPNQHAIQTALGGYQSINELILPSGRLTVQRDTCYELLNQIPGVSVKKPKGALYAFPKLDMKKFNLRDDERLVLDLLREKKILLVHGSAFNWPEPDHLRVVFLPYKEDLTKALTEFGHFLETYKQ

SEQ ID NO: 145966 - DNA, 1254 bp, Alkalilimnicola ehrlichei MLHE-1
  CDS (1)..(1254): transl_table=11
atggggcgacgatcacccgtcatccgcagccgctgcataggaggatcgggcatggtggcggatccggtcgagctggagtattccgaaaccccggaacccatgtggaatccggccctgagggcgctgcccatcccgggcatccggcgcatggtcaacatggccgccgagatggatgacgtgatccatctctccattggccagccggactttcccgtgcccgaccatgtgatcgaggcgcacatcgatgccctgcgccacggccagaccggttacaccatggacgccggcctgccggaactgctggagaccatcgccgagtattacgccgaccgctatcagcggccgatcgccccggagaacgtgttggtcaccaccggcgcgaccgaggccatctacctggcgctggcggccaccgccgcacccggccggcagtttctggtgccggacccctcctttccgctctatgccccgctgatccgcatgaacggcggcgaggtgaaggccatccccacccgcgcagagaatggccatcagctcgacccccaggaggtgatcgacaacatcgggatgcgcaccttcggcatcatccttaactcgccgagcaatcccaccggcacggtctatccgcgcgagacggtggaggccatcgtccaggaggccgcctaccgcggggtgtatgtctacagcgacgaggtctacgaccacctgctgctggatgacctgcaatacgccagcgtgctcaactgcacctccgacctggaccacgtgatgatgatgtccagcttctccaagacctacagcatgtcgggcctgcggatcggttggatcatctccagccagggggccatcaagaagctgcgccggttccatatcttcaccaccaccgtggccaataccccggcgcagtgggcgggtgtggccgcgctgcgcggggagaagacctgcctggacagcatggtggcggagtaccgccggcgccgggaccgggtggtgcaactggtcagcgatgcgccccacctcaccggttactggccccagggcgccttttacatcttcccgtcactgccgccgaacaccgatgccaccaccgtggccatccgcatgctgcaggagaccggcgtctgcgtggtgccgggggacgccttcggcgacagttgccccaattcgctgcgcatcagtttctccgcgagcatggatgatattgaggaggccttcgagcgggtcatcccctggctggccaagcagcgcttctga

SEQ ID NO: 145967 - protein, 417 aa, Alkalilimnicola ehrlichei MLHE-1
MGRRSPVIRSRCIGGSGMVADPVELEYSETPEPMWNPALRALPIPGIRRMVNMAAEMDDVIHLSIGQPDFPVPDHVIEAHIDALRHGQTGYTMDAGLPELLETIAEYYADRYQRPIAPENVLVTTGATEAIYLALAATAAPGRQFLVPDPSFPLYAPLIRMNGGEVKAIPTRAENGHQLDPQEVIDNIGMRTFGIILNSPSNPTGTVYPRETVEAIVQEAAYRGVYVYSDEVYDHLLLDDLQYASVLNCTSDLDHVMMMSSFSKTYSMSGLRIGWIISSQGAIKKLRRFHIFTTTVANTPAQWAGVAALRGEKTCLDSMVAEYRRRRDRVVQLVSDAPHLTGYWPQGAFYIFPSLPPNTDATTVAIRMLQETGVCVVPGDAFGDSCPNSLRISFSASMDDIEEAFERVIPWLAKQRF

SEQ ID NO: 145968 - DNA, 1212 bp, Pseudomonas aeruginosa UCBPP-PA14
  CDS (1)..(1212): transl_table=11
atgcaggtcagcaaatcgaacaagctcgccaacgtctgctatgacattcgcgggccggtgctcaagcacgccaaacgcctagaggaagagggtcaccgcatcctcaagctgaatatcggcaacccggcgccgttcggtttcgaagctcccgaggaaatcctccaggacgtcatccgcaacctgccgaccgcccagggctacagcgactccaagggtctgttcagcgcgcgcaaggcagtgatgcagtattaccagcagaagcaggtggagggcgtcggcatcgaggacatctacctcggcaacggcgtgtcggaactgatcgtgatgtccatgcaggcgctgctgaacaacggcgacgaggtgctgatccccgctcccgactacccgctgtggaccgccgcggtcagcctcgccggcggcaagccggtgcactacctgtgcgacgagcaggccaactggtggccggacctcgaagacatcaaggcgaagatcacgccgaacaccagggcgatggtgatcatcaacccgaacaaccccaccggtgcggtgtattccagggaagtgctggaaggcatggtcgagctggcccgccagcacaacctggtgctgttctccgacgagatctacgacaagatcctctacgacggcgccgtccacgtctccaccgcctcgctggcgccggacgtgctctgcctgaccttcaacggcctgtccaaatcctaccgggtggccggcttccgctccggctgggtggcgatctccggacccaagcagcgggcacagagctatatcgaaggtctcgacatcctcgccaacatgcgcctgtgcgccaacgtcccggcgcagcacgcgatccagaccgccctgggcggctaccagagcatcaacgatctggtcctgccgccggggcgcctgctggagcagcgcaaccgcgcctgggaactgctcaacgacatccccggcgtcagttgcgtgaagccgatgggcgcgctgtacgccttcccgcggatcgacccgaaggtctgcccgatccacaacgacgaaaagttcgtcctcgacctgctgctctcggaaaaactgctgatcgtccagggcaccgccttcaactggccgtggcccgaccacttccgggtggtcaccctgccccgcgtcgatgacctggagcaggcgatcctgcgcatcggcagcttcctcaagggctaccagcagtaa

SEQ ID NO: 145969 - protein, 403 aa, Pseudomonas aeruginosa UCBPP-PA14
MQVSKSNKLANVCYDIRGPVLKHAKRLEEEGHRILKLNIGNPAPFGFEAPEEILQDVIRNLPTAQGYSDSKGLFSARKAVMQYYQQKQVEGVGIEDIYLGNGVSELIVMSMQALLNNGDEVLIPAPDYPLWTAAVSLAGGKPVHYLCDEQANWWPDLEDIKAKITPNTRAMVIINPNNPTGAVYSREVLEGMVELARQHNLVLFSDEIYDKILYDGAVHVSTASLAPDVLCLTFNGLSKSYRVAGFRSGWVAISGPKQRAQSYIEGLDILANMRLCANVPAQHAIQTALGGYQSINDLVLPPGRLLEQRNRAWELLNDIPGVSCVKPMGALYAFPRIDPKVCPIHNDEKFVLDLLLSEKLLIVQGTAFNWPWPDHFRVVTLPRVDDLEQAILRIGSFLKGYQQ

SEQ ID NO: 145970 - DNA, 1176 bp, Pediococcus pentosaceus ATCC 25745
  CDS (1)..(1176): transl_table=11
atggaattttcgaagcgggctaatcaagttagtccatcagcaacattagcagtttcaactgaggcaaaaaaaatgcaggcggccggcatcgacgttgttaatttgagtacgggagaaccggattttgctactcctaaggcgattattaaagcggcgatggaaagcatggaatctggtaaagcaagttattacacaccagtcggagggctcccagaacttcgccaagcagttgctacgcacattaaaaccgatacaggttatgatgccaaaatggaacaagtggcagtaacggtaggggctaaaatggggctgttcgaaactttccaagctttattgaatgaaggcgatgaagtcatgatcgttgccccattctgggttagttatgaggaacaggtgaaattagccgggggttcggtgattgccatccatcctcaagctagtgacttgaaaactactccttcagaattaagtcgttttaaaacagccagcacaaaattgttaattttaaatacgcctcaaaatccctcgggattggtatattcagaagaagaaacacgggcgattgcacaatgggcggtcgataacaacgtaatattagttgcagatgagatttacggtaaattagtttacaatggggcaaaattcagttcagttatgagtatggggaatgaaattgttaataataccattttaatcgatggggtttcaaaagcgtatgcaatgactggatggcgaattggatatgttgtagctgctccgcaaattattcgaaaaatattggctttacaaggtcatatgacatcaaatccgacagcggtagcgcagtatgccgctctggaagctttgcgtggagaccaatatccagtggaagaaatgcgattggcatttgaaaaaaggttgaaccaaacttttgatttaatgcaagtaatccctggttttagttttgattataagccggaaggggctttctatttatttccggatgttactgaagctatgaaaattaaaggatatgccacatctacggacttggcgatggctttactaaaggaagcgcatgtagccgttgtcgccggtgaagcgtttggaatgccgggacatattcgactttcgtatgcgacgagccaaacattattgagtgaagcagttcgtcggatccaaaattttatgaattaa

SEQ ID NO: 145971 - protein, 391 aa, Pediococcus pentosaceus ATCC 25745
MEFSKRANQVSPSATLAVSTEAKKMQAAGIDVVNLSTGEPDFATPKAIIKAAMESMESGKASYYTPVGGLPELRQAVATHIKTDTGYDAKMEQVAVTVGAKMGLFETFQALLNEGDEVMIVAPFWVSYEEQVKLAGGSVIAIHPQASDLKTTPSELSRFKTASTKLLILNTPQNPSGLVYSEEETRAIAQWAVDNNVILVADEIYGKLVYNGAKFSSVMSMGNEIVNNTILIDGVSKAYAMTGWRIGYVVAAPQIIRKILALQGHMTSNPTAVAQYAALEALRGDQYPVEEMRLAFEKRLNQTFDLMQVIPGFSFDYKPEGAFYLFPDVTEAMKIKGYATSTDLAMALLKEAHVAVVAGEAFGMPGHIRLSYATSQTLLSEAVRRIQNFMN

SEQ ID NO: 145972 - DNA, 1215 bp, Oenococcus oeni PSU-1
  CDS (1)..(1215): transl_table=11
atgccagaagttaaaaagaatttagacaagaaaaccaattcatttgttcagggagcaaaaccgagtcaaatcatttctttgaataaagaattcaaaaaaatcgacaatatcgtcctgctcacagttggcgaaccggattttaatacgcccgaacatattaaaaaagcggccattgccgatattcaagcaaacgactcacactatggtccgtcaagtggaacacctgaactgttgcaaagtgttgctgattttttaaagaatcattatcacttgaattatgatccggcaacggaaattgtgaacacacttggagttaccgagggaatttgcgatacgatgaaaacaattcttaatccgggtgacgaattaattgttcctgagccgacttttccggtctatgcagcagcagcctcggcttttggcggaaaaatagttccggtttcaaccgaagagagtggttttattttaacagccgaaaaattaaaacaggtattgttggcgcatccccaagctaaagcaattgttttgacgactccaggcaatccgaccggagttgcttataacgaaaaacagattcaggcacttgtcaacgttttaaagaatcatgatatttttgttatttccgacgagatatattctgaattgacttatgatcgtcctcacagttcttttgcagcagctttgccggggcaaacgattctctttaatggtgtttccaaatcgcatgcaatgaccggttatcgtcttggaattattgccggaccgcaatcgataatttctcaaattgctgttattcaccagttgataacaactgcactccctgatgttgttatggctgcagcaacagaagctttttctgccggtgaaaatgatgccgctaccatgcgagttgaatataagaaacgtcgggattatttaatcgatgctttcacaaaactagacatttcttttgcctatccggacggcgccttttatttcttttttaagattcccgattatcttgaacaggatggttttaaactggcaagacaaatcgctgaagaagcgaaagtcggtttgacaccgggagttgcttttggccaagccggttatcttcgactttcctatgctgcttcgcttgatcaaattaaaattgccgtgaatcgtttatcagaattcttttccaaacaaaaacaggcacaggcaaagatatatgagaagtcgactacaaaatag

SEQ ID NO: 145973 - protein, 404 aa, Oenococcus oeni PSU-1
MPEVKKNLDKKTNSFVQGAKPSQIISLNKEFKKIDNIVLLTVGEPDFNTPEHIKKAAIADIQANDSHYGPSSGTPELLQSVADFLKNHYHLNYDPATEIVNTLGVTEGICDTMKTILNPGDELIVPEPTFPVYAAAASAFGGKIVPVSTEESGFILTAEKLKQVLLAHPQAKAIVLTTPGNPTGVAYNEKQIQALVNVLKNHDIFVISDEIYSELTYDRPHSSFAAALPGQTILFNGVSKSHAMTGYRLGIIAGPQSIISQIAVIHQLITTALPDVVMAAATEAFSAGENDAATMRVEYKKRRDYLIDAFTKLDISFAYPDGAFYFFFKIPDYLEQDGFKLARQIAEEAKVGLTPGVAFGQAGYLRLSYAASLDQIKIAVNRLSEFFSKQKQAQAKIYEKSTTK

SEQ ID NO: 145974 - DNA, 1206 bp, Magnetococcus sp. MC-1
  CDS (1)..(1206): transl_table=11
atgggtattttgtcaaatcgtgttgccaaagtaaaaccctcagccacactggcggttaccgccaaggccaaggagttaaaggcagccggacgtgacgtcatcgggctgggttcaggcgagcccgactttgacacgcccgatcacattaaacaagccgccattgacgccctgaacgctggctacaccaaatatgtggccgtagcgggtacgccagagctgcgtcaggccatcgccgataaatataagcgcgagaccggcctggactactccgccgagcagaccgtggtgacggttggtggcaaacaggcgttcttcaacttggcccaagccacccttaacagtggggatgaggttattattcctgcgccttattgggtctcttatcctgacatgaccctgctggcggatggcacccctgtgattgtggatacccaggagagccatggttttaagatcacacctgctgagttagaggcggccattaccccgcgcaccaagtttgtggtgctcaattcgccctccaaccctacgggtaacgcctacagcattgccgagctgcacgctctggccgaggtgctgcgcaagcacccccatgtatgggtgatcagcgacgatatctatgaaaagatcatctatgatggctttgagtttgccaccatggttaaggttgcgcccgatttgcaagatcgcaccgttattctgaatggcgtcgccaaggcttactccatgaccggttggcgtattggctatgcggtgggaccgctggatgtgattaaggccatgacgaaaattcagggacagagcacctccaacgccacctcttttgccatgaagggcgccttagaggccatcaccggcccccaggattgcgttgagcccatggtcaaggcattcaaggagcgccgtgactatgtggttgcccgtttgaacgccatgcccggcattagctgtctgactcctgagggtgctttttacgtctaccccaacgtcgcgggcttggtgggtaaaaaagcccccgatggcagcgacctgaaagatagcgtggatctggcctcttacatgttagaagccgagggggtcgcggtggtcccaggggttgcttttggtctggatccttacttgcgtctctcctacgccaccagcatggaagatctgattaaggccatggaccgcattgaaaagattgcgcagcagctcgccggttaa

SEQ ID NO: 145975 - protein, 401 aa, Magnetococcus sp. MC-1
MGILSNRVAKVKPSATLAVTAKAKELKAAGRDVIGLGSGEPDFDTPDHIKQAAIDALNAGYTKYVAVAGTPELRQAIADKYKRETGLDYSAEQTVVTVGGKQAFFNLAQATLNSGDEVIIPAPYWVSYPDMTLLADGTPVIVDTQESHGFKITPAELEAAITPRTKFVVLNSPSNPTGNAYSIAELHALAEVLRKHPHVWVISDDIYEKIIYDGFEFATMVKVAPDLQDRTVILNGVAKAYSMTGWRIGYAVGPLDVIKAMTKIQGQSTSNATSFAMKGALEAITGPQDCVEPMVKAFKERRDYVVARLNAMPGISCLTPEGAFYVYPNVAGLVGKKAPDGSDLKDSVDLASYMLEAEGVAVVPGVAFGLDPYLRLSYATSMEDLIKAMDRIEKIAQQLAG

SEQ ID NO: 145976 - DNA, 1215 bp, Shewanella sp. ANA-3
  CDS (1)..(1215): transl_table=11
atgcgccctatcatcaagtccaacaagttggatactgtttgctacgacatccgcggcccagtgcacaaggaagccagacgtttagaagacgagggacaccgcatcctcaaactcaacattggtaaccccgcccccttcggttttgaagcgccggaagaaattgtgcgcgatgtgatcctcaatcttcccagcgcccaaggctactgtgagtcgaaaggattattctctgcccgcaaggcgattgtgcagcattatcaagcgcagggcattaaaggcgtcgatatcgaagatgtctatatcggtaatggtgtgtcagagctgattatgatggccatgcagggcttattaaacaccgatgatgaagtgctgctcccctctcccgactatccgctatggaccgcggcggcgaatttagccggcggtaaagcggtacattaccgctgcgatgaagaggcggattggttcccggatcttgatgatattaagagcaaaatttcgtctcgtacccgtggtattgtgctgattaacccgaacaacccaacgggcgctgtttacagtaaagaattactgctgcaagttatcgagctctgccgcgagcacaacctgatcctgtttgccgatgaaatctacgataagattttatacgacgaggccaaacatattccggccgcgagcctctctgacgatatcttaaccgtgacctttaatggtctttcaaaagcctatcgcgcagcgggctttcgtgtcggttggatgatgttgtctggcaatcttaaggctgccaagagttatatcgaaggtttagagatgctttcctcgatgcgcctgtgtgccaacgtgccgaatcaacatgcgattcaaaccgcgctcggcggttaccaaagcattaatgagctgattttacctagcggccgcttaaccgtgcagcgcgatacctgttatgagttattgaaccaaattcccggtgtgagcgtgaaaaagcccaagggggcactgtacgccttccccaaactggacatgaaaaagttcaacctcagggatgatgagcgcttagtactcgatttgctcagggataaaaaaatcctcctcgtacacggcagcgcctttaactggccagagccggatcatttaagagtggtgtttttaccctataaggaagatttgactaaagcattgacagagtttggcaatttcctcgagacctacaaacaataa

SEQ ID NO: 145977 - protein, 404 aa, Shewanella sp. ANA-3
MRPIIKSNKLDTVCYDIRGPVHKEARRLEDEGHRILKLNIGNPAPFGFEAPEEIVRDVILNLPSAQGYCESKGLFSARKAIVQHYQAQGIKGVDIEDVYIGNGVSELIMMAMQGLLNTDDEVLLPSPDYPLWTAAANLAGGKAVHYRCDEEADWFPDLDDIKSKISSRTRGIVLINPNNPTGAVYSKELLLQVIELCREHNLILFADEIYDKILYDEAKHIPAASLSDDILTVTFNGLSKAYRAAGFRVGWMMLSGNLKAAKSYIEGLEMLSSMRLCANVPNQHAIQTALGGYQSINELILPSGRLTVQRDTCYELLNQIPGVSVKKPKGALYAFPKLDMKKFNLRDDERLVLDLLRDKKILLVHGSAFNWPEPDHLRVVFLPYKEDLTKALTEFGNFLETYKQ

SEQ ID NO: 145978 - DNA, 1275 bp, Mycobacterium smegmatis str. MC2 155
  CDS (1)..(1275): transl_table=11
atggaacgcgtgactacccaccagttgccgtggcagagcaccggggaacaccggaagccgcgcacgttcacccagtccacgaagctgcaggacgtcctgtacgagatccgtgggccggtacacgagcacgcctcacggctggaagctgaagggcatcgcatcctcaagctgaacatcggcaaccccgcgccgttcgggttcgaggcccccgacgtcatcatgcgggacatcatccaggccctgccgaccgcgcagggctattcagactccaagggaatcctcagcgcccggcgcgccgttttcacgcgctacgagctggtcgagggcttccccaagttcgacgtcgacgacgtctacctgggcaacggcgtctccgagctcatcaccatgacgctgcaggcgctgctggacaacggcgaccaggtgctcatcccggcacccgactacccgctgtggacggcgtcgacctcgctggccggcggcaccccggtacactacctgtgcgacgagacgcagggctggaaccccgacgtcgccgacatcgaatcgaagatcaccgaacgcaccaaggcgatcgtggtgatcaacccgaacaacccgacgggcgcggtgtacagccgcgaaaccctcgagcagatcgtcgacctggcgcgcaaacatcagctgctgctgctggccgacgagatctacgacaagatcctctacgacgacgccaagcacatctcactggcgacgttggcgcctgacctactctgtttgactttcaacgggctgtcgaaggcctaccgggtggccggctaccggtcggggtggctggtgatcaccggccccaaggagcacgccaccagtttcatcgagggcatcagcctgctggccaacatgcgcctgtgcccgaatgtccccgcgcagcacgccatccaggtggccctgggcggacaccagagcatcgacgcgttggtgctgcccggcgggcggctgctcgaacagcgtgacgtggcgtgggagaagctcaacgagatccccggggtgtcgtgcgtgaagccgcgcggtgcgctgtacgcgttcccccggttggaccccgaggtgtacgacatccacgacgacgagcagctggtcctcgacctgctgctgcaggagaagatcctgctgacccagggcacggggttcaactggcccacacccgatcacctgcgcatcgtgacgttgccgtgggcgcgcgatctggcctcggcgatcgagcggctggggaacttcctggcgagctaccgtcagtag

SEQ ID NO: 145979 - protein, 424 aa, Mycobacterium smegmatis str. MC2 155
MERVTTHQLPWQSTGEHRKPRTFTQSTKLQDVLYEIRGPVHEHASRLEAEGHRILKLNIGNPAPFGFEAPDVIMRDIIQALPTAQGYSDSKGILSARRAVFTRYELVEGFPKFDVDDVYLGNGVSELITMTLQALLDNGDQVLIPAPDYPLWTASTSLAGGTPVHYLCDETQGWNPDVADIESKITERTKAIVVINPNNPTGAVYSRETLEQIVDLARKHQLLLLADEIYDKILYDDAKHISLATLAPDLLCLTFNGLSKAYRVAGYRSGWLVITGPKEHATSFIEGISLLANMRLCPNVPAQHAIQVALGGHQSIDALVLPGGRLLEQRDVAWEKLNEIPGVSCVKPRGALYAFPRLDPEVYDIHDDEQLVLDLLLQEKILLTQGTGFNWPTPDHLRIVTLPWARDLASAIERLGNFLASYRQ

SEQ ID NO: 145980 - DNA, 1329 bp, Azoarcus sp. BH72
  CDS (1)..(1329): transl_table=11
atgaacgcggcgaagactctgaatctggcaccagcccccaccgaacccctggttgcggtcgaggccggtgcagccgccgcgagtccgtcaccgctctccacgccgcgcgcggtgcgcaaatccgccaagctggcggacgtctgctacgacatccgcggtccggtgctcacgcgcgcaaagcagatggaggacgagggccacaagatcatcaagctgaacatcggcaacctcgcctcgttcggcttcgacgcgcccgaagaaatccagatggacatgatccgcaacctgccgaattcggcgggctactcggattccaagggcatcttcgccgcgcgcaaggcggtgatgcactacacccagcagaagcacatcaagggtgtgggcatggaagacatctacatcggcaacggcgtgtccgagctgatcgtgatggcgatgaacgcgctgctcaacccgggcgacgaagtgctggttcccgcgccggactatccgctgtggaccgcggcggtgagcctttcgggcggcacgccggtgcattacatctgcgacgaaggcaacggctggctgcccgatctggccgacatgcgcgagcgcatcacgcccaacacccgcgcgatcgtggtgatcaacccgaataacccgaccggcgcgctgtaccccgaagcggtgctgaaaggcatcatcgcgctggcccgcgagttcgacctgatcctgtacgccgacgaggtgtacgacaaggtgttgtacgaaggcgcagtgcacacctcgctggcggctttgtcggaagacgtgctgaccatcatcttcaacggcctgtcgaaaaactaccgttcctgcggttaccgtgccggctggatggtggtgtgtggcgacaagcgcaacgcccaggactacatcgaaggcctcaacatgctggcctcgatgcgcctgtgcgccaacgtgccgggccaatacgcgatccagaccgcactgggcggctaccagagcatcgacgacctcgtcgccgacggcggccggctgcggcgccagcgcgacctcgcgcacgaactgatcaccgccatccccggcgtgagctgcgtcaagcccaaggcggcgctgtacatgttcccgcgcctcgatccgaagatctacccgatcgaggacgatcaggccttcattgccgaactgctcgaagccgagcgcgtgctgctggtgcagggcacgggcttcaactggcccgatccggaccacttccgcctggtcttcctgccgcacgaggacgacctgcgcgacgccatcggccgcgttgcgcgcttcctcgaaggctatcgcaagcgccacggcacctga

SEQ ID NO: 145981 - protein, 442 aa, Azoarcus sp. BH72
MNAAKTLNLAPAPTEPLVAVEAGAAAASPSPLSTPRAVRKSAKLADVCYDIRGPVLTRAKQMEDEGHKIIKLNIGNLASFGFDAPEEIQMDMIRNLPNSAGYSDSKGIFAARKAVMHYTQQKHIKGVGMEDIYIGNGVSELIVMAMNALLNPGDEVLVPAPDYPLWTAAVSLSGGTPVHYICDEGNGWLPDLADMRERITPNTRAIVVINPNNPTGALYPEAVLKGIIALAREFDLILYADEVYDKVLYEGAVHTSLAALSEDVLTIIFNGLSKNYRSCGYRAGWMVVCGDKRNAQDYIEGLNMLASMRLCANVPGQYAIQTALGGYQSIDDLVADGGRLRRQRDLAHELITAIPGVSCVKPKAALYMFPRLDPKIYPIEDDQAFIAELLEAERVLLVQGTGFNWPDPDHFRLVFLPHEDDLRDAIGRVARFLEGYRKRHGT

SEQ ID NO: 145982 - DNA, 1215 bp, Neisseria meningitidis FAM18
  CDS (1)..(1215): transl_table=11
atggataaatttcccaagtctgcaaagctcgatcacgtctgttacgacatacgcgggccggttcacaaaaaagcccttcagttggaagaggagggcaataaaatccttaaactcaatatcggcaaccctgcgccgttcggctttgaagcccctgatgaaatcttggtcgatgtcatccgcaacctgccgacttcgcaaggctattgcgattctaaagggctgtattccgcccgcaaagccattgttcactactatcagaccaaaggtttgcgcgatattacggttgatgatgtctatatcggcaacggcgtgtccgagctgattacgatgtctatgcaggcattgctcaacgacggcgacgaaatcctgattcccgcgcccgactaccctttgtggacggcggcggcaacgcttgcgggcggtacggtacgccattatctgtgcgacgaagaaaacggctggttccccaaccttgccgatatggaagccaaaatcacgcccaaaaccaaagccatcgtcgtcatcaatcccaataatccgacaggcgcggtgtacagcagggaaatcctgttggaaatcgccgaactggcgcgcaagcacggtttgattattttcgccgacgagatttacgataaaatcctttatgacggcgcggttcaccaccacatcgccgcgcttgcccccgaccttttgacggtaacgttcaacggtttgtccaaatcctaccgcgtcgccggcttccgccaaggctggatggtgctcaacgggccgaaacatcacgcaaaaggttacatcgagggtttggatatgctctcgtctatgcgcctgtgtgccaatacgccgatgcagcacgcgattcagacggcattgggcggctatcagagcatcaacgaatttattttgcccggcgggcggcttttggaacagcgcaacagggcgtgggaactggtcagccaaatccccggcgtgtcctgcgtcaaaccgatgggcgcgatgtatatgttcccaaaaatcgataccgaaatgtaccgtatccacgatgacatgaaattcgtttacgatttgctggtgcgcgaaaaagtcttgctggtacagggaacggggtttaattggattaaacctgaccatttccgcattgtcacgctgccttacgtccatcagattgaagaggcgatgggcaggttggcaagattcctgcaaacctaccgccaataa

SEQ ID NO: 145983 - protein, 404 aa, Neisseria meningitidis FAM18
MDKFPKSAKLDHVCYDIRGPVHKKALQLEEEGNKILKLNIGNPAPFGFEAPDEILVDVIRNLPTSQGYCDSKGLYSARKAIVHYYQTKGLRDITVDDVYIGNGVSELITMSMQALLNDGDEILIPAPDYPLWTAAATLAGGTVRHYLCDEENGWFPNLADMEAKITPKTKAIVVINPNNPTGAVYSREILLEIAELARKHGLIIFADEIYDKILYDGAVHHHIAALAPDLLTVTFNGLSKSYRVAGFRQGWMVLNGPKHHAKGYIEGLDMLSSMRLCANTPMQHAIQTALGGYQSINEFILPGGRLLEQRNRAWELVSQIPGVSCVKPMGAMYMFPKIDTEMYRIHDDMKFVYDLLVREKVLLVQGTGFNWIKPDHFRIVTLPYVHQIEEAMGRLARFLQTYRQ

SEQ ID NO: 145984 - DNA, 1233 bp, Acidovorax sp. JS42
  CDS (1)..(1233): transl_table=11
atgaagcccatccgcaaatccgccaagctcaacaatgttctctacgatgtccggggccccatcgtggacgcggccaagcagatggaggacgagggccagaagatcatcaagctgaacatcggcaacctggcgccgttcggctttgacgcgcccgaggagatccagcaggacatgatccgcaacctgcccaactcggcgggctactcggacagcaagggcatctttgcggcgcgcaaggccgtgatgcactacagccagcagcagggcgtggccggcgtgacgctggacgatatttacctgggcaacggcgcgagcgacctgatcaccatggccaccaacgcgctgctcgacgacggcgacgagctgctggtgcccgcacccgactatccgctgtggacggcggcggccagcctgtcgggcggtcggcctgtgcactacctgtgcgatgaagacaacggctggatgcccagcctgacggacatccgcgccaagatcaccccgcgcacgcgcggcatcgtggtcatcaaccccaacaaccccacgggcgcgctgtactcggacgagctgctcaagggcatcgtgcagatcgcgcgcgagcacaacctggtgctgtttgccgacgaggtgtacgacaaggtgctgtacgacggtgtcaagcacacggccatggccagcctgtcgaccgacgtggtcacgctcacgttcaactcgctctccaaggcctaccgctcctgcggctaccgcgccgggtggatggtgatctcgggcgacaagacggccgcgcgcgactacatcgaaggcatcaacatgctggccaacatcaagctcggctccaacgtgccgggccagtgggccatccagaccgcgctgggcggctaccagagcatcaacgacctggtcaaacccggcgggcgcctgtgccgccagcgtgacctggcctacgagctgatcaccgccatccccggcgtcacctgcgtcaagccgcaggcggcgctgtacatgttcccccgcctggaccccgagatgtaccccatcgcggacgaccgccagttctttatggaagtgctgcgcgccacgcgggtcatgctggtgcagggctcgggcttcaattaccccgacaaccagcactttcgcatcgtgttcctgccgcacgaagacgacctgcgcgaggccatcggccggcttgcgggcttcctggccgcctaccggcagcgccacgccaaggcggcgtga

SEQ ID NO: 145985 - protein, 410 aa, Acidovorax sp. JS42
MKPIRKSAKLNNVLYDVRGPIVDAAKQMEDEGQKIIKLNIGNLAPFGFDAPEEIQQDMIRNLPNSAGYSDSKGIFAARKAVMHYSQQQGVAGVTLDDIYLGNGASDLITMATNALLDDGDELLVPAPDYPLWTAAASLSGGRPVHYLCDEDNGWMPSLTDIRAKITPRTRGIVVINPNNPTGALYSDELLKGIVQIAREHNLVLFADEVYDKVLYDGVKHTAMASLSTDVVTLTFNSLSKAYRSCGYRAGWMVISGDKTAARDYIEGINMLANIKLGSNVPGQWAIQTALGGYQSINDLVKPGGRLCRQRDLAYELITAIPGVTCVKPQAALYMFPRLDPEMYPIADDRQFFMEVLRATRVMLVQGSGFNYPDNQHFRIVFLPHEDDLREAIGRLAGFLAAYRQRHAKAA

SEQ ID NO: 145986 - DNA, 1167 bp, Nostoc punctiforme PCC 73102
  CDS (1)..(1167): transl_table=11
atgaagctggcagcaagagtaagtcaggtaacaccttcattgaccttagcgatcgcagccaaggctaaggcactgaaggcagaaggaatagatgtttgtagttttagcgctggagaaccagattttgataccccagcgcatattaaagccgcagcagtcaaagctttggatgaaggcaaaaccaagtatggtgcagcagccggagaaccaaagttaagggaagcgatcgcccataagctcaaaaatgataacggtcttgattacaagtcggagaatgtcatcgtcactaatggcggtaagcattctctgtacaacttgatagtggcgttaatcgatctaggcgatgaggtaattatccctgcaccctactggctaagttatcccgaaatggtgactttagtcggtggagttgcagtaattgtacccacagatgccacgacgggttataaaattactcccgaacaactccgtaaagcaatcacccccaaaacaaagttatttatcctcaactctccatctaatcccacagggatggtttacacgccagacgaaatcaaagcactggcgcaggtagtagttgatgcagatatctttgtcgtctctgatgagatttacgaaaagatcctctacgacggtgcagaacatatcagcatcggttctcttggaaaggaaatttttgatcgcactttgatcagtaatgggtttgcgaaggcttattctatgactggttggagaatcggctatttagcggggccagtggaaattattaaagcagcaagtaccatccaagggcatagtacatctaacgtgtgtacctttgctcaatatggtgcgatcgcagcgctacaaagttctcaagattgcgtcgaagaaatgcgccaagccttcgccaaacgccgacaggtaatgctagacagactcaatgccattcccggattgagtaccgcaaaaccagatggcgcgttttatctgttccctgatatcagcaaaaccggtctaaaatccctagaattttgtgacgctttgttggaaaaacatcaagttgcagtcattcctggaattgcttttggcgctgatgacaacattcgcctttcctacgctacagatatggcaaccattgaaaagggaatggataggttagagaaatttgtcaagtcacgtatttag

SEQ ID NO: 145987 - protein, 388 aa, Nostoc punctiforme PCC 73102
MKLAARVSQVTPSLTLAIAAKAKALKAEGIDVCSFSAGEPDFDTPAHIKAAAVKALDEGKTKYGAAAGEPKLREAIAHKLKNDNGLDYKSENVIVTNGGKHSLYNLIVALIDLGDEVIIPAPYWLSYPEMVTLVGGVAVIVPTDATTGYKITPEQLRKAITPKTKLFILNSPSNPTGMVYTPDEIKALAQVVVDADIFVVSDEIYEKILYDGAEHISIGSLGKEIFDRTLISNGFAKAYSMTGWRIGYLAGPVEIIKAASTIQGHSTSNVCTFAQYGAIAALQSSQDCVEEMRQAFAKRRQVMLDRLNAIPGLSTAKPDGAFYLFPDISKTGLKSLEFCDALLEKHQVAVIPGIAFGADDNIRLSYATDMATIEKGMDRLEKFVKSRI

SEQ ID NO: 145988 - DNA, 1518 bp, Bifidobacterium longum DJO10A
  CDS (1)..(1518): transl_table=11
atgaacagcaggggattgaagcaggtcgatttggtgcacgccgccgaacatcgtggcgtaaagatgggcaagagccacatcagccaatatgtggccggcaagaccatgccccgcgaggacgtgctcgaattcctggccagcgaactggacgtcgacacgaattggctgcgcggcgaggaatccaccacgcaattgaactcggacgcatccaacagcgtcacggacggcgaacacgccgccacaccgcttgccatgggtgccgccaagccccagacggacagcgagattcccgtgggccgccgccgcaccttcggcaaatcgcacaagctcgacaacgtgctctacgacgtgcgcggcccggtcgccgacgaggcgatgcgcatggaggccaacggcacccacatcctgaaattgaacatcggcaacccggcacccttcggcttccgcacgccggacgaagtcgtctacgacatggcccaccagctcaccgacaccgaaggctactcgccgtccaagggcctgttctccgcgcgcaaggccatcatgcagtacgcgcagctgaagaacatcccgaacgtcaccatcgacgacatctacaccggcaacggcgtcagcgagctcatcaacctgtccatgtccgcgctgctcgacaccggcgacgaagtgctcgtgccctccccggactacccgctgtggaccgcctgcgtgaacctggccggcggcaccgccgtgcactacctgtgcgacgaacagtccgaatggtatccggacatcgacgacatccgctccaagatcaccagcaacaccaaggcgattgtcatcatcaacccgaacaaccccaccggcgcactttacccaaaggaagtgctccagcagatcgtcgacatcgcgcgcgaacaccagctcatcatcttctccgacgaaatctacgatcgcctcgtcatggacggcctgcagcacatctccatcgcctcgatggccccggacctgttctgcgtgaccttctccggcctgtcgaaatcgcacatgatcgccggctaccgcatcggctggatgatcctgtccggcaacaagcgcattgccaaggactacatcgagggcctcaacatgctcgccaacatgcgcatgtgttcgaacgtgcccgcccagtccgtggtgcagaccgcgcttggcggccaccagagcgtcaacgactacatcgtgccgggcggccgcgtgcacgaccagcgcgacctcgtctacgacatgctcaaccagattcccggcatcaccgccgtcaagccgaaggccgcgttctacatcttcccgaagatcgacgtcaaacgcttcaacatccactcggacgagcagttcgcgctcgacctgctgcatgacaagcacatcctcatcagccacggcggcgcgttcaactggcatcgccccgaccacttccgcgtggtgtacctgccgcgcatgggcatgctgcgcgaaaccatgggggagatctccgacttcttcagctactactggcagagctga

SEQ ID NO: 145989 - protein, 505 aa, Bifidobacterium longum DJO10A
MNSRGLKQVDLVHAAEHRGVKMGKSHISQYVAGKTMPREDVLEFLASELDVDTNWLRGEESTTQLNSDASNSVTDGEHAATPLAMGAAKPQTDSEIPVGRRRTFGKSHKLDNVLYDVRGPVADEAMRMEANGTHILKLNIGNPAPFGFRTPDEVVYDMAHQLTDTEGYSPSKGLFSARKAIMQYAQLKNIPNVTIDDIYTGNGVSELINLSMSALLDTGDEVLVPSPDYPLWTACVNLAGGTAVHYLCDEQSEWYPDIDDIRSKITSNTKAIVIINPNNPTGALYPKEVLQQIVDIAREHQLIIFSDEIYDRLVMDGLQHISIASMAPDLFCVTFSGLSKSHMIAGYRIGWMILSGNKRIAKDYIEGLNMLANMRMCSNVPAQSVVQTALGGHQSVNDYIVPGGRVHDQRDLVYDMLNQIPGITAVKPKAAFYIFPKIDVKRFNIHSDEQFALDLLHDKHILISHGGAFNWHRPDHFRVVYLPRMGMLRETMGEISDFFSYYWQS

SEQ ID NO: 145990 - DNA, 1215 bp, Haemophilus somnus 2336
  CDS (1)..(1215): transl_table=11
atgcgagttttccctaaatccgataagttagaacatgtatgctacgatattcgtggaccggtacatcaagaggcgttacgtttggaagaagaaggcaaaaagatcttaaaattaaatattggtaatccagcaccattcggttttgaagctcctgatgagattttggtagatattttgcgtaatttgcctgccgcacaaggatattgtgattcaaaaggtctatattctgcacgtaaagctattgttcaatattaccaatctaagaatattttaagtgcgaccgtaaatgatgtatacatcggtaatggtgtttctgaacttattactatgtcattacaagcattgttgaatgatggtgatgaggtgttaatcccaatgcctgattacccattatggacggctgctgcaacattagccggcggaaaagcggttcattatttatgtgatgaacaagctgattggtttcctgatgtggcagatataaaaagtaaggttacttctcgcacaaaagccattgttattattaatcctaataatccaacgggagctgtttatagtaaagaattattattagatatagttgaagtagctcgccaaaatggattgatgattttcgccgatgaaatttacgataaaattttatatgacaacgctgttcatcatcatatcgccgcattagcaccagatttgttaacggttactttcaacggcttatcaaaatcttatcgtgtagcaggatttcgccaaggctggatgattttaaatggaccgaaacagcaagcgaaaggctatattgaaggtctagatatgttggcctcgatgcgtttatgtgccaatcatcctatgcaacatgctatacaaacagctttgggtgggtatcaaagtatcaatgaatttattttgccgggtgggcgtttattggaacagcggaacaaggcttatgagttgattaaccaaattccggggttaagttgtacaaagccaatgggagcactttatatgtttccgaaaattgatactaaaaaattcaatatctatgatgatgaaaaaatggtattggatttattgcgtcaagagaaagtgttattagttcatggacgtggttttaactggcaacaaccggatcattttagaattgtaaccttgccttatgtgaatcaaattgaagacgccttaggaagattagccaaatttttaacgcattatcgtcagtag

SEQ ID NO: 145991 - protein, 404 aa, Haemophilus somnus 2336
MRVFPKSDKLEHVCYDIRGPVHQEALRLEEEGKKILKLNIGNPAPFGFEAPDEILVDILRNLPAAQGYCDSKGLYSARKAIVQYYQSKNILSATVNDVYIGNGVSELITMSLQALLNDGDEVLIPMPDYPLWTAAATLAGGKAVHYLCDEQADWFPDVADIKSKVTSRTKAIVIINPNNPTGAVYSKELLLDIVEVARQNGLMIFADEIYDKILYDNAVHHHIAALAPDLLTVTFNGLSKSYRVAGFRQGWMILNGPKQQAKGYIEGLDMLASMRLCANHPMQHAIQTALGGYQSINEFILPGGRLLEQRNKAYELINQIPGLSCTKPMGALYMFPKIDTKKFNIYDDEKMVLDLLRQEKVLLVHGRGFNWQQPDHFRIVTLPYVNQIEDALGRLAKFLTHYRQ

SEQ ID NO: 145992 - DNA, 1215 bp, Haemophilus influenzae R2866
  CDS (1)..(1215): transl_table=11
atgcgattattcccaaaatccgacaaattagaacacgtatgttatgacattcgcggacctgtgcataaagaagcactacgcttagaagaagaaggcaataaaattttaaaactaaatatcggcaatcccgcacctttcggctttgaagcaccagatgaaattttggtggacgtattgcgtaatttgccgtcagctcaaggctactgcgattcaaaagggttatattctgctcgtaaagccattgttcaatattaccaatcaaaagggattctcggcgcgaccgtcaatgatgtgtatattggtaacggcgtatcagagcttatcacaatggcaatgcaagcattgctcaatgatggcgatgaagtgcttgtgccgatgcctgattatccgctttggactgctgcggtaacactttctggcggtaaagctgtgcattatctctgtgatgaagacgcaaattggtttcccgctattgatgatattaaagcaaaggtgaatgcgaaaactaaagcgattgtcatcatcaacccgaacaacccaacgggtgctgtgtatagcaaagaattattacaagaaattgtggaaatcgcgcgtcaaaataatttaattatcttcgctgacgaaatctacgacaaaattttatatgatggcgcggtgcatcatcacattgccgcgctagctcctgatttattaaccgttacgctgaatgggttatcaaaagcttatcgagttgcgggtttccgtcaaggttggatgattttgaacggtccaaaacataatgcgaaaggttatattgaaggcttggatatgctggcatcaatgcgtttatgtgccaacgtaccaatgcaacatgcaattcaaaccgcacttggtggctatcaaagtattaatgaatttattttaccgggcggtcgattacttgagcaacgaaataaagcctatgatctcatcactcaaatacccggcattacttgcgtgaaaccaatgggggcgatgtatatgttcccgaaaattgatgtgaaaaaattcaatattcacagtgatgaaaaaatggtgctggatttactccgccaagaaaaagtactacttgtgcacggtaaaggatttaattggcattcaccagatcacttccgtattgttactcttccttatgtgaatcagcttgaagaagccattacaaagttagcaagatttttgtcggattaccgtcaataa

SEQ ID NO: 145993 - protein, 404 aa, Haemophilus influenzae R2866
MRLFPKSDKLEHVCYDIRGPVHKEALRLEEEGNKILKLNIGNPAPFGFEAPDEILVDVLRNLPSAQGYCDSKGLYSARKAIVQYYQSKGILGATVNDVYIGNGVSELITMAMQALLNDGDEVLVPMPDYPLWTAAVTLSGGKAVHYLCDEDANWFPAIDDIKAKVNAKTKAIVIINPNNPTGAVYSKELLQEIVEIARQNNLIIFADEIYDKILYDGAVHHHIAALAPDLLTVTLNGLSKAYRVAGFRQGWMILNGPKHNAKGYIEGLDMLASMRLCANVPMQHAIQTALGGYQSINEFILPGGRLLEQRNKAYDLITQIPGITCVKPMGAMYMFPKIDVKKFNIHSDEKMVLDLLRQEKVLLVHGKGFNWHSPDHFRIVTLPYVNQLEEAITKLARFLSDYRQ

SEQ ID NO: 145994 - DNA, 1173 bp, Wolbachia endosymbiont of Drosophila simulans
  CDS (1)..(1173): transl_table=11
atgttcctaataaaaccatcacctacgattgctgtaactgataaggcaaataagttgaaaaatgaaggaaaaaagatctgtgttttagctgcaggagaaccggattttgatactccagatcatataaaaaaagcagctattcaagcaataagtgaaggtaagactaaatatactgctgttgatggaacgcgtgagctgaaagaagcaataattaataagttaagaaaggataataacctcgagtacacgcttaaccaaatctgtgttggtacaggtgctaagcaggtgttattcaatttgttcatggcaacaattaactctggagatgaagttattattccagctccttattgggtttcatatgttgatatggtaagtctttttggcggcttgccagttgtagtagaatgcaaacaaaattttaaactgacagcggaattattgaaaagcaggataactaaaaaaactaaatggttaattcttaactcaccgaacaaccctgcaggagctgtgtacacatgtgatgaattgaaagacatagcacaaatattgcttgaatatccacatatgaatgtcgttacagatgatatttatgagcatataatatacgacgaaaagttttttactatcgctcaggttgagccgaagctttatgatagagtttttgtagtcaatggagtatcaaaagcctatgcaatgacaggctggagaatagggtatattgcaggtagaagtgatgtggtaaaagctatctctacgctgcagtctcaaagcacttctaatccaaattcgatagcacaagcagcagcagcagcagcattaaacggtgatcatagttttttgaaagaaagaacaaggatttttaagagtcgtagagattttatggtgaaagagctaaattctgccccgggattatcagcgtctgttccacaaggtgcgttttatttatttgtctcatgtgaaggattgctcagtaaaagcacaaaaagtggtaagataataaataatgatttagattttactgaatacttactgggagatcatttggttgctgtggttccaggaattgcatttggtctagaaaattttatcagaatttcttatgcaacctctcaggaacaattagaaattggatgtgatagtattactaaagcgtgccaggagttaaaatga

SEQ ID NO: 145995 - protein, 390 aa, Wolbachia endosymbiont of Drosophila simulans
MFLIKPSPTIAVTDKANKLKNEGKKICVLAAGEPDFDTPDHIKKAAIQAISEGKTKYTAVDGTRELKEAIINKLRKDNNLEYTLNQICVGTGAKQVLFNLFMATINSGDEVIIPAPYWVSYVDMVSLFGGLPVVVECKQNFKLTAELLKSRITKKTKWLILNSPNNPAGAVYTCDELKDIAQILLEYPHMNVVTDDIYEHIIYDEKFFTIAQVEPKLYDRVFVVNGVSKAYAMTGWRIGYIAGRSDVVKAISTLQSQSTSNPNSIAQAAAAAALNGDHSFLKERTRIFKSRRDFMVKELNSAPGLSASVPQGAFYLFVSCEGLLSKSTKSGKIINNDLDFTEYLLGDHLVAVVPGIAFGLENFIRISYATSQEQLEIGCDSITKACQELK

SEQ ID NO: 145996 - DNA, 1188 bp, Crocosphaera watsonii WH 8501
  CDS (1)..(1188): transl_table=11
atgattcaattggccaatagggtaacacaagtaactccctccctcaccctagccattaccgccaaagccaaagaaatgaaggctcaaggggttgatatatgtagctttagttccggggaaccggactttgatactcctcaatacataaaagacgctgccgtgtcggctttagatcaagggaagacgaaatacggagcagtggcaggagaacccggactcagagaggcgatcgcaagaaagttaaataatgatagtcagttaaactatagccccaataacgtgattgtcactaacgggggcaaacattccctatttaacttaatgttggccttgattgagccaggagatgaagtcattatccctgctccttattggctaagttatccagaaatggtcaaactagcccaaggcaacccaattattgtcgacaccaccgcagaaaccgactataaaataaccccagagcaactgcgtcaagccattaccagcaagacaaaattattcgtactcaattctccctcaaatcccaccggaacagtttacaatccggcagaaattaaagccctagctgaagttattgtggaacataacttatgggtagtttccgatgaaatttacgagaaaattctctacgatggggtagtacatatcagcatcggctctctaggagaagaaatcttgaagcgcaccattatcagtaatggatttgctaaaagttactccatgacagggtggcgtattggttatttagccggccctgagccactaattaaagcagtcagcaccatccaaagccatagcacctccaacgtttgtacctttgctcaatacggagctattgctgccttagaaagcccaaaatctcccccttgtttgcaaaccatgcgcgatgcttttagtcaacgtcgtcaagtcatcctagaaaaaattagggccatccctcaactcagttgtccaactccaatggggtcgttttatgtctttgttgatattagcaaaacaggacttaactccctagaattttgcgatcagttgttagaaaaacaacaagtggctgctatcccaggtaaagccttcggggccgatcattgtattcgtctttcttatgctacagatttagcatccattgaaaaaggaatggatagaatcgaaagatttgtgcaagaaacaaaagtaaaccaactttag

SEQ ID NO: 145997 - protein, 395 aa, Crocosphaera watsonii WH 8501
MIQLANRVTQVTPSLTLAITAKAKEMKAQGVDICSFSSGEPDFDTPQYIKDAAVSALDQGKTKYGAVAGEPGLREAIARKLNNDSQLNYSPNNVIVTNGGKHSLFNLMLALIEPGDEVIIPAPYWLSYPEMVKLAQGNPIIVDTTAETDYKITPEQLRQAITSKTKLFVLNSPSNPTGTVYNPAEIKALAEVIVEHNLWVVSDEIYEKILYDGVVHISIGSLGEEILKRTIISNGFAKSYSMTGWRIGYLAGPEPLIKAVSTIQSHSTSNVCTFAQYGAIAALESPKSPPCLQTMRDAFSQRRQVILEKIRAIPQLSCPTPMGSFYVFVDISKTGLNSLEFCDQLLEKQQVAAIPGKAFGADHCIRLSYATDLASIEKGMDRIERFVQETKVNQL

SEQ ID NO: 145998 - DNA, 1215 bp, Prosthecochloris aestuarii DSM 271
  CDS (1)..(1215): transl_table=11
atgccctatactcattcacctgtattcactccagcacaacgagttcagaattataactatgccatacgcaatatcgtcacccatgccagaaaactggaagcacagggaaaaaaaataacctatctcaatattggcgatcctgtgctctacggctttcagccgccagaggaactcatcgaagcaaatgtcctggccctgcgccatggtcataatggttactctccttcttccggaagaaaagaagccgtcgaagctattgctgaagacgcctgccgacggggaatcagcacatcgccggacaatgtcatcatcacttttggagcatccgaagcggcagatctggtctgtacatcgatgctcaatccgggcgacgaggtactctgtccttctcccggatatccgctctacaatgccatcatcgccaaactcaacgcaagagaagttcgttacagcctcgatccggccaatgactggctgccggatcctgaacaagtcgaaaaaagcatcacgccacgaacaaaaattcttgtcgtcatcaatcccaacaatcccaccggggagctctactcgagggaaacactcgacatgttcgtcgacatcgcccgcaggcacaagctgctcatcattaccgatgaggtctatcacaaactcgtgtacgaaggagagcatatccccctggcatctcttgccagtgacgatgtcgccgttataaccattgacagcctttccaaaaactatatggctcccggctggcggacaggctggctcatgatcaccaacagcgctcttatccctgatgtccgccaggcattcatcaaacttgccgatgccaggttatgcgcaccgatggcaccccaatacaccatcaaagcagcgatgacaatgggaccggaatataatgaaacgatactctcccgtcttcgtgcccagagagagctgaccatcgacagactcaatgcgatcgaaggattcagctgcaataagccatcaggcgcattctatgtcatgggaaaactcgatcttgacgccaccccgttcaaaaccgatgaggaattcgtactgaagctgcttcaggaaaaacaggtcctctttgtccacggctcaggtttcggtaccgacccggcaagcggatatgccagaattgtctaccttcccgatgtcactatccttgaaaaggtctatgctgatgtcgcagatttcatcaacagcttataa

SEQ ID NO: 145999 - protein, 404 aa, Prosthecochloris aestuarii DSM 271
MPYTHSPVFTPAQRVQNYNYAIRNIVTHARKLEAQGKKITYLNIGDPVLYGFQPPEELIEANVLALRHGHNGYSPSSGRKEAVEAIAEDACRRGISTSPDNVIITFGASEAADLVCTSMLNPGDEVLCPSPGYPLYNAIIAKLNAREVRYSLDPANDWLPDPEQVEKSITPRTKILVVINPNNPTGELYSRETLDMFVDIARRHKLLIITDEVYHKLVYEGEHIPLASLASDDVAVITIDSLSKNYMAPGWRTGWLMITNSALIPDVRQAFIKLADARLCAPMAPQYTIKAAMTMGPEYNETILSRLRAQRELTIDRLNAIEGFSCNKPSGAFYVMGKLDLDATPFKTDEEFVLKLLQEKQVLFVHGSGFGTDPASGYARIVYLPDVTILEKVYADVADFINSL

SEQ ID NO: 146000 - DNA, 1275 bp, Xylella fastidiosa Ann-1
  CDS (1)..(1275): transl_table=11
atgtctaatagcccgcaaacgccgcttgttacgcgccagcgcctgtccgaagtccgctatgagatccgaggggagttggcgcgccgtgcgcgtgagcttgaggcggagggacgcaagcttatcaagctcaacatcggtaatccaggcgcgttcggttttcgggcgccagagcatctgcaacgtgctattgccgatgatatgggacgtaccgatccttatacgcatcagcagggtttgccaatcgcacgtgaggcgattgctgctgcttatgcgcgacgtcactatccagatgttgatgcagatcgggtctttgtggggaatggggtttctgagttaatcgatttgtcgttgcgggcgttgcttaatccaggcgatgaggtgttggttccttcaccggattatccgctgtggtcggcggcgacgattctcaacgatggtcggccggtgtattaccgttgtgcgccggagaacggtttccagccagatgcagttgagatcgaaacgctggtgtcttcacggacacgtgcgattgtgttgattaatccgaataatcccagtggtgccaattattcgcaggagttattggagcggattgtggcaatcgcagtgaaacatcatttgctgttgttggttgatgagatttacgatcagattttgtatgacggtgcggtgtttgttccagtggctcctttggcggggacgcatccatgtatcactttcagtgggctgagtaaggtgcatcgtgcgtgcggttggcgtgtgggttgggcgttgctgtccgggagtagcattcaagttgataatctgcgcaatgcgatggatttgctgggtgcgttgcgtttgtgtgcgaatgtcccagggcaatatgcgattgatgcggcggtcaatgggccagatacgattactccgttatgttcgcctggtggtcctttgtacgagacgcgccgtgcggtgattgatgcatgcgcggcgagtgagcatttgtcgttggtggtacctgctggggcgttatacgcgttcccatcggtcgtgggaccggctgcgcggcactttgatgattatgcttttgcgctagagttgatgaatgaggagggggtgctggtggtccctggatcaagttttaatgtgccatatcgggatcacttccgcgtgacgttgcttcctgatgctgggttgatacgtgaagtgttttctcgtatcgaccgggcattgtcgcgtcgtgctgaggtggctgataaggtggtgccgctcaagtcgcgtagcgccgccgcttga

SEQ ID NO: 146001 - protein, 424 aa, Xylella fastidiosa Ann-1
MSNSPQTPLVTRQRLSEVRYEIRGELARRARELEAEGRKLIKLNIGNPGAFGFRAPEHLQRAIADDMGRTDPYTHQQGLPIAREAIAAAYARRHYPDVDADRVFVGNGVSELIDLSLRALLNPGDEVLVPSPDYPLWSAATILNDGRPVYYRCAPENGFQPDAVEIETLVSSRTRAIVLINPNNPSGANYSQELLERIVAIAVKHHLLLLVDEIYDQILYDGAVFVPVAPLAGTHPCITFSGLSKVHRACGWRVGWALLSGSSIQVDNLRNAMDLLGALRLCANVPGQYAIDAAVNGPDTITPLCSPGGPLYETRRAVIDACAASEHLSLVVPAGALYAFPSVVGPAARHFDDYAFALELMNEEGVLVVPGSSFNVPYRDHFRVTLLPDAGLIREVFSRIDRALSRRAEVADKVVPLKSRSAAA

SEQ ID NO: 146002 - DNA, 1278 bp, Xylella fastidiosa Ann-1
  CDS (1)..(1278): transl_table=11
atgatgtctaatagcccgcaaacgccgcttgttacgcgccagcgcctgtccgaagtccgctatgagatccgaggggagttggcgcgccgtgcgcgtgagcttgaggcggagggacgcaagcttatcaagctcaacatcggtaatccaggtgcgttcggtttccgggcgccagagcatctgcaacgtgctattgccgatgatatgggacgtaccgatccttatacgcatcagcagggtttgccaatcgcacgtgaggcgattgctgctgcttatgcgcgacgtcactatccagatgctgatgcagatcgggtctttgtggggaatggggtttctgagttaatcgatttgtcgttgcgggcgttgcttaatccaggcgatgaggtgttggttccttcaccggattatccgctttggtcggcggcgacgattctcaacgatggtcggccggtgtattaccgttgtgcgccggagaacggtttccagcccgatgcagttgagatcgaaacgctggtgtcttcacggacacgtgcgattgtgttgattaatccgaataatcccagtggtgccaattattcgcaggagttattggagcggattgcggcaatcgcagtgaaacatcatctgctgttgttggttgatgagatttacgatcagattttgtatgacggtgcggtgtttgttccagtggctcctttggcggggacgcatccatgtatcactttcagtgggctgagtaaggtgcatcgtgcgtgcggttggcgtgtggggtgggcgttgctgtcagggagtagcattcaagttgataatctgcgcaatgcgatggatttgctgggtgcgttgcgtttgtgtgcgaatgtcccaggtcaatatgcgattgatgcggcggtcaatgggccagatacgatcactccgttatgttcgcctggtggtcctttgtacgagacgcgccgtgcggtgattgatgcatgcgcggcgagtgagcatttgtcgttggtggtgcctgctggggcgttatacgcgttcccatcggtcgtgggaccggctgcgcggcactttgatgattatgcttttgcgctagagttgatgaatgaggagggggtgctggtggtgcctggatcaagttttaatgtgccatatcgggatcacttccgcgtgacgttgcttcctgatgctgggttgatacgtgaagtgttttctcgtatcgaccgggcattgtcgcgccgtgctgaggtggctgagaaggtggtgccgctcaagttgcgtagcgccgccgcttga

SEQ ID NO: 146003 - protein, 425 aa, Xylella fastidiosa Ann-1
MMSNSPQTPLVTRQRLSEVRYEIRGELARRARELEAEGRKLIKLNIGNPGAFGFRAPEHLQRAIADDMGRTDPYTHQQGLPIAREAIAAAYARRHYPDADADRVFVGNGVSELIDLSLRALLNPGDEVLVPSPDYPLWSAATILNDGRPVYYRCAPENGFQPDAVEIETLVSSRTRAIVLINPNNPSGANYSQELLERIAAIAVKHHLLLLVDEIYDQILYDGAVFVPVAPLAGTHPCITFSGLSKVHRACGWRVGWALLSGSSIQVDNLRNAMDLLGALRLCANVPGQYAIDAAVNGPDTITPLCSPGGPLYETRRAVIDACAASEHLSLVVPAGALYAFPSVVGPAARHFDDYAFALELMNEEGVLVVPGSSFNVPYRDHFRVTLLPDAGLIREVFSRIDRALSRRAEVAEKVVPLKLRSAAA

SEQ ID NO: 146004 - DNA, 1215 bp, Streptococcus suis 89/1591
  CDS (1)..(1215): transl_table=11
atgaagcaatttaacaagtcaacaaaattggatgatgtagcatatgatattcgtgggcctgttttggaagaggccatgcgcatgcgtgccaatggagagcagattttacgtttgaatacggggaatcctgcagaatttggttttactgctccagatgaagttattcgtgacttgattcataacgcccgtaaatcagagggatattcgaacagtaagggaattttttctgcacgtaaggctatcatgcagtattgtcagctaaagaaatttccaaatgttgacattgaagatatttatcttggaaacggcgtgagtgagctgattgttatgtctatgcaaggtttgctagataatggtgatgaggtattggtgccaatgccagactatcctctctggactgccgcagttagtttggctggtggtaaagctgttcattatgtttgtgatgaagcagctgaatggtatccagatttggcagatatggagtccaaggtgacttctcgaaccaaggcaattgtccttatcaatccaaataatccaactggtgctctctatccgaaagaaattttaaaaggaatcattgatattgctcgtagacatgaattgatcattttctctgatgagatttatgatcgtatggtctttgatggagctgttcatatccctattgcgacactggctccagatttatttgttgtgacgatgaatggactgtctaaatcacatcgtatttgtggtttccgagtaggttggatggtcttatctggtccgaaaaagcatgtaaaaggttacattgaaggcttgaatatgttgtccaatatgcgtttgtgttcaaacgttttggctcaacaggttgttcaaacttctttgggaggttaccaatcggttgatgagctcttgatgcctggcggacgcttatatgaacaaagggagttcattaccaaggcgattaatgatattccgggactttctgctgtaaaacctaaggctggtctgtatgtattcccaaaaattgatcgtgagatgtacagagttgaggatgatgaacaatttgtattggatttcctcaagcaagaaaaagtacttttggtccatggtcgaggttttaactggaaggatccagatcatttccgtattgtgtatttaccacgtgttgatgagttggcagaaattcaagaaaaaatgtcacgattcttgcggcaatatcgtagataa

SEQ ID NO: 146005 - protein, 404 aa, Streptococcus suis 89/1591
MKQFNKSTKLDDVAYDIRGPVLEEAMRMRANGEQILRLNTGNPAEFGFTAPDEVIRDLIHNARKSEGYSNSKGIFSARKAIMQYCQLKKFPNVDIEDIYLGNGVSELIVMSMQGLLDNGDEVLVPMPDYPLWTAAVSLAGGKAVHYVCDEAAEWYPDLADMESKVTSRTKAIVLINPNNPTGALYPKEILKGIIDIARRHELIIFSDEIYDRMVFDGAVHIPIATLAPDLFVVTMNGLSKSHRICGFRVGWMVLSGPKKHVKGYIEGLNMLSNMRLCSNVLAQQVVQTSLGGYQSVDELLMPGGRLYEQREFITKAINDIPGLSAVKPKAGLYVFPKIDREMYRVEDDEQFVLDFLKQEKVLLVHGRGFNWKDPDHFRIVYLPRVDELAEIQEKMSRFLRQYRR

SEQ ID NO: 146006 - DNA, 1200 bp, Croceibacter atlanticus HTCC2559
  CDS (1)..(1200): transl_table=11
atgtcacaaacaacaactactcaactttcagaacgtattaacagcatgcaaacctctcaaacattggctatggcagccaaggctagagagttacgagcagaaggtaaagatattataggattaagtttgggagagccagactttaatacaccagattttgtaaaagatgctgcaaaacaagccatagatgataattataacggttacacacctgttgatggttatgttgaacttaaagatgcagtaattacaaagtttaaaagagacaatactcttacttataatcgcaatcaaattgtagtgtctactggagcaaaacaatctttagctaatgttgctatggtattgctagacaaaggagatgaagttattttaccttgtccttattgggtaagctatgccgaaattgtaaaacttggtgaaggtgttcctgttgaagtagcaacttctattgaaacagattttaagatgacagcagagcagttacgtgctgccattactcctaaaactaaaatgatttggtttagttctccttgtaatccaagtggtatgctttatagcaaggaagagttaagagccttagcagatgtattagtagactaccctaatattatcgtggtgagtgatgaaatttacgagcacataaattttgttggagaacatttttctatggcacaatttgaggatatgtatgaccgtaccgtagtagtaaatggtgtctcaaaagcttttgccatgacaggttggagaataggttatattggagctccagagtatattgctcgtgcatgtaataagatgcaaggtcaaattactagtggcgcaaactgtatagctcaacgtgcagtaattacagcattagaagctcctgtgagtaatattcaatttatgattgatgagtttaaaaagcgtcgtcaactaattttagggttattaaacaacatagaaggctttgaaacaacagagccacaaggtgctttttatgtatttcctaatgtatcttctttctttggcgagacgttaagaggtcataagattgaaaatgctacagatttctctatgtttttattagaagaagctttagttgctactgttactggtgatgcttttggtaatccagactgtattagaatttcgtatgctgcaagccaagaccaaattaaagaagctttacagcgcataaaagatgttgtttcttaa

SEQ ID NO: 146007 - protein, 399 aa, Croceibacter atlanticus HTCC2559
MSQTTTTQLSERINSMQTSQTLAMAAKARELRAEGKDIIGLSLGEPDFNTPDFVKDAAKQAIDDNYNGYTPVDGYVELKDAVITKFKRDNTLTYNRNQIVVSTGAKQSLANVAMVLLDKGDEVILPCPYWVSYAEIVKLGEGVPVEVATSIETDFKMTAEQLRAAITPKTKMIWFSSPCNPSGMLYSKEELRALADVLVDYPNIIVVSDEIYEHINFVGEHFSMAQFEDMYDRTVVVNGVSKAFAMTGWRIGYIGAPEYIARACNKMQGQITSGANCIAQRAVITALEAPVSNIQFMIDEFKKRRQLILGLLNNIEGFETTEPQGAFYVFPNVSSFFGETLRGHKIENATDFSMFLLEEALVATVTGDAFGNPDCIRISYAASQDQIKEALQRIKDVVS

SEQ ID NO: 146008 - DNA, 1203 bp, Oceanicola batsensis HTCC2597
  CDS (1)..(1203): transl_table=11
atgcctttcctgtccgacaccctgtcccgcgtcaaaccgtcgccgaccatcgccgtgaccaacatggccgccgagctcaaggcggcgggaaaggacgtgatcggcctgggcgccggtgagccggactttgacacgccggacaacgtcaaggctgcggcaattgcggccatcaatgacgggaaaacgaaatacaccgccgtcgacggcatccccgagctgaaaaaggccatctgcgccaagttcaagcgcgacaacggactggactacacgcccgagcaggtgacggtcggcaccggcggcaagcaggtcctctacaacgcgctgatggcgacgctgaacccgggcgacgaggtgctgatccccgcgccctactgggtgtcctaccccgacatggcgctgctcgccgggggcgaacccaagttcgtcgagggccagcttcagaccaggttcaagatcacgcccgaccagctcgaggcggcgatcacgcccaagaccaagtggttcatcttcaactcgccgtcgaacccgaccggcgcgggctattcccgcgacgaactcaaggccctgaccgacgtgctgaagaagcatccgcatgtctggatcatgaccgacgacatgtacgagcacctggcctatgacgggttcgacttctgcacccccgcccaggtcgagccggaactgtacgaccgcaccctcaccgtcaacggcgtctccaaggcctatgccatgaccggctggcggatcggctacgcggccggccccaaggaactgatcggcgcgatgcgcaaaatccagtcgcagtcgacctcgaacccttgttcgatctcccagtgggcggcggtcgaggcgctgaacggcacgcaggacttcatccccgccaacaacgagacgttcaaacggcgccgcgacatggtctgcgagatgctgaacgccgtggaggggatcacctgccccgtgcccgagggcgccttctacgtctatccgtccatctcggggctgatcggcaagaccaccccggacggggtgaagatcgaggatgacgagaccttcgccaaggcgctgctcgaggacaagggcgtggccgttgtcttcggcgcggccttcgggctctcgccgaacttccgggtctcctacgcgacctcggacgaggcgctgaaagaggcctgcacgcgcatccaggacttctgcgcgggcctgaactga

SEQ ID NO: 146009 - protein, 400 aa, Oceanicola batsensis HTCC2597
MPFLSDTLSRVKPSPTIAVTNMAAELKAAGKDVIGLGAGEPDFDTPDNVKAAAIAAINDGKTKYTAVDGIPELKKAICAKFKRDNGLDYTPEQVTVGTGGKQVLYNALMATLNPGDEVLIPAPYWVSYPDMALLAGGEPKFVEGQLQTRFKITPDQLEAAITPKTKWFIFNSPSNPTGAGYSRDELKALTDVLKKHPHVWIMTDDMYEHLAYDGFDFCTPAQVEPELYDRTLTVNGVSKAYAMTGWRIGYAAGPKELIGAMRKIQSQSTSNPCSISQWAAVEALNGTQDFIPANNETFKRRRDMVCEMLNAVEGITCPVPEGAFYVYPSISGLIGKTTPDGVKIEDDETFAKALLEDKGVAVVFGAAFGLSPNFRVSYATSDEALKEACTRIQDFCAGLN

SEQ ID NO: 146010 - DNA, 1221 bp, Pseudoalteromonas tunicata D2
  CDS (1)..(1221): transl_table=11
atgccgatcataaaaaagagtaacaaattagagggtgtgtgttatgacatacgagggccggttttaaaacaagctcgtcgtatggaagacgaaggacaaaaggtccttaaattaaatatcggtaaccctgcagcctttggttttgatatgcctgaggatatgcataaagacatcattcgtaatctttcctcagcacaaggctattgtgatgcaaagggcttgtattccgcccgagtcgcaatttatcagcattatcagcaaaaaaacttttttaatttagatgtcgataatatttatattggtaacggtgttagtgagttaattcaactcagtactcaggcattacttaatgatggtgatgaagtactgatccctgcacctgattacccactttggacagcagcggtgcgtctagctagcggtacgccagttcattatttatgtgatgaacagcaagactggttccctgatattaatgatatccgcagtaaaattaccagtaagacaaaagcgatagtcttgattaacccaaacaatccaacaggcgctgtttacgatgttgcgatgatccaagacctaataggtgttgctcgtgagcataagttattaattttttcggatgaaatttatgaaaaaattctttatgacggcgtcacttttacctcagttggcagtttatgtgatgatttgccaatcattactttcaatggcttagctaaaacctaccgcgcagcgggtttacgaatgggctggatggtattaagcggtaagcttgcctcgatgcatgattatattcaaggacttgatatgttggcatcaatgcgcttgtgcgcaaatgtgccggctcaatatgcgattcaacaggcattaggtggtgttcaatcaattgatgatttaattaggcccacagggcgtttataccaacaacgcgatattgtgtatcaaggtttaaatgcaattgacggcatctcatgtgttaaaccaaaaggggcactatacgcttttgcgaaatttgatcgtgcgaagtttaatgtgcatgatgatgaaaaattaatctacgatttattgatgcaagaaaagattttgctagtacatggccgcgcgttcaactggccagagcccgatcacttccgattagtatttttaccccatcaagatcaacttaaacctgcattagcccaaatggctcgcttttttgataactacaagcaagaccgatag

SEQ ID NO: 146011 - protein, 406 aa, Pseudoalteromonas tunicata D2
MPIIKKSNKLEGVCYDIRGPVLKQARRMEDEGQKVLKLNIGNPAAFGFDMPEDMHKDIIRNLSSAQGYCDAKGLYSARVAIYQHYQQKNFFNLDVDNIYIGNGVSELIQLSTQALLNDGDEVLIPAPDYPLWTAAVRLASGTPVHYLCDEQQDWFPDINDIRSKITSKTKAIVLINPNNPTGAVYDVAMIQDLIGVAREHKLLIFSDEIYEKILYDGVTFTSVGSLCDDLPIITFNGLAKTYRAAGLRMGWMVLSGKLASMHDYIQGLDMLASMRLCANVPAQYAIQQALGGVQSIDDLIRPTGRLYQQRDIVYQGLNAIDGISCVKPKGALYAFAKFDRAKFNVHDDEKLIYDLLMQEKILLVHGRAFNWPEPDHFRLVFLPHQDQLKPALAQMARFFDNYKQDR

SEQ ID NO: 146012 - DNA, 1215 bp, Photobacterium sp. SKA34
  CDS (1)..(1215): transl_table=11
atgcaaaaattcgggatgtcatccaagcttaataatgtttgctatgacatacgtggtcccgttctgaaacacgctaagcgtatggaagaagaaggacaaaaaatactcaaactaaacatcggtaatccagcgccgtttggttttgatgcccctgatgaaattcttgtggatgtgatccgtaatctaccaacatcccaaggttactgtgattcaaaaggtatttattctgcgcgtaaagccgttgttcaacactaccaaaagcgcggcttacttgatcttgatgtcgaagacgtttatatcggtaacggtgtctctgaattaatcgttatggcaatgcaagcactgctaaaccataaagatgaaatattggtcccatcacctgattacccattatggactgcagcggtctcattatctggtggtacccccgttcactacacgtgtgatgagcaatcagattggtatccagaccttgatgatataaagaaaaaaatcacgccaaacactcgcggtattgtattaatcaatccgaataacccgacgggtgcggtatatagccgagattttctgatcgaagtggttgaagttgcacgtcagcacgatttgattattttcgccgatgaaatctacgataaaattctttacgatggtgcacaacatacctctattgccccattagcagaagatgtggtttgtgtaacattcaatggcctttcaaaatcatatcgagtatgtggtttccgtgcaggctggatgatcatttcaggaccaagacaccgcgctaaaggttacatcgaagggttagaaatgctgtcatcaatgcgtttgtgtgccaacgtacctatgcagcatgccattcaaaccgcattaggtggttaccaaagtattaatgaattaatcttgccgggtggacgcctgctagaacagcgcaataaagcttatgatctattaacccaaatccctggcgtttcttgtgttaagccaaaaggcgcgttgtacctattccctaaattagatcagaagaagtttaatattcaagacgatcaaaaaatggcaatggactttttactacaagagaaagtgcttgttgtacatggaaccggatttaactggaaacaaccagatcacttccgcattgtaaccttaccccatgtcgatgatcttgaactagcaatgggacgcttagagcgcttcttacatagctatcgccaatag

SEQ ID NO: 146013 - protein, 404 aa, Photobacterium sp. SKA34
MQKFGMSSKLNNVCYDIRGPVLKHAKRMEEEGQKILKLNIGNPAPFGFDAPDEILVDVIRNLPTSQGYCDSKGIYSARKAVVQHYQKRGLLDLDVEDVYIGNGVSELIVMAMQALLNHKDEILVPSPDYPLWTAAVSLSGGTPVHYTCDEQSDWYPDLDDIKKKITPNTRGIVLINPNNPTGAVYSRDFLIEVVEVARQHDLIIFADEIYDKILYDGAQHTSIAPLAEDVVCVTFNGLSKSYRVCGFRAGWMIISGPRHRAKGYIEGLEMLSSMRLCANVPMQHAIQTALGGYQSINELILPGGRLLEQRNKAYDLLTQIPGVSCVKPKGALYLFPKLDQKKFNIQDDQKMAMDFLLQEKVLVVHGTGFNWKQPDHFRIVTLPHVDDLELAMGRLERFLHSYRQ

SEQ ID NO: 146014 - DNA, 1215 bp, Oceanospirillum sp. MED92
  CDS (1)..(1215): transl_table=11
atgccagttatccgtaaatcaaacaagctgatcaatgtatgttatgacattcgtggaccagttcttcaagaagccaagcggctggaagaggaaggtcaacgaatcttaaagctgaacattggtaatccggccccatgggggtttgaagcgccagaagagattgtgcaggacgtgatccttaacctgcccgcctcccagggctactgcgattcaaaaggcttgttttccgcccgtaaggcggtgatgcaggagtgccagaaaaacggcatcaaaaatgtaggcattgaagatatctacattggtaatggtgtttctgaactgatcgtgatggcgatgcagggtctgctcaacgacactgatgagatgctaattcctgctccggactatccattgtggacggctgctgtaagcctgagtggcggcaacccaatccactatcactgcgatgaagagaaagactgggcgccggatatcgaagatatgcgcagtaagattactgagcgcactaaaggcatcgtggttatcaacccaaacaaccctactggtgctgtttatcctaaacctgtacttgaacagatcatcgagttagcccgtgaacacaacctgattgtcttcgcagatgagatctatgacaagattctttacgatgaagcggagcacacttcaatggcttcgttggctgatgatgtgctgtgcatctcttttaacggtctgtctaagtcataccgcgctgctggattccgctccggctggatgatcgtcagcggccctaagcataatgcgcgcgactatatcgaaggtctggaaatgctttcgagcatgcgtttatgctcaaacgtcccaacacaacatgcgattcagacagctttaggtggataccaaagtgttaatgaattgatcgtgccaggcggccgtctttatgaacaacgcaatctagcctgggaaatgcttaatgagatccccggggttagctgtactaaaccagagggggcactttatatgttcccgaaacttgatcctgacgtttatccgattaaaaacgatgagaagatggctctggatctactgttacagcaaaaagtactaatcgttcagggcagcggtttcaacttgccggatacacagcatttccgcttagttatcctgcctcgggaagacgaactaagggatgcgatagaaaggattgcaaccttcttaaaaacctatgaacaataa

SEQ ID NO: 146015 - protein, 404 aa, Oceanospirillum sp. MED92
MPVIRKSNKLINVCYDIRGPVLQEAKRLEEEGQRILKLNIGNPAPWGFEAPEEIVQDVILNLPASQGYCDSKGLFSARKAVMQECQKNGIKNVGIEDIYIGNGVSELIVMAMQGLLNDTDEMLIPAPDYPLWTAAVSLSGGNPIHYHCDEEKDWAPDIEDMRSKITERTKGIVVINPNNPTGAVYPKPVLEQIIELAREHNLIVFADEIYDKILYDEAEHTSMASLADDVLCISFNGLSKSYRAAGFRSGWMIVSGPKHNARDYIEGLEMLSSMRLCSNVPTQHAIQTALGGYQSVNELIVPGGRLYEQRNLAWEMLNEIPGVSCTKPEGALYMFPKLDPDVYPIKNDEKMALDLLLQQKVLIVQGSGFNLPDTQHFRLVILPREDELRDAIERIATFLKTYEQ

SEQ ID NO: 146016 - DNA, 1188 bp, Flavobacteria bacterium BBFL7
  CDS (1)..(1188): transl_table=11
atgaaaaataatttatctgatcgcatcaataatctacccgtaagtgctacactcgcaatggctgccaaagcccgtgaattgagagaacaaggtaaagatatcataggactaagtctaggcgaacctgattttaacacacctgactttgtaaaggatgcagcgatacaggcaattaatgagaattacaactcatatacacctgtagatggctatgtagagttgaaggacgctatcatcttaaaatttaagagagataataatctagaatacacgagagatcaaattgtcgtatcgactggcgctaaacaatcgattgcaaatgtagcaatggtactacttaatgaaggtgatgaatgtattttaccagcaccatattgggtaagctatgccgctattgttcaactagcagaaggtgttcctgtagaagtaagagctggcgtagaacaaaattttaaaattactccggatcaattgcgtgcggctataacgcctcgcacaaaaatgatcttattttcttctcctaataacccaagcggcagtgtttatagtaaaaatgaattagaagaactggcggcagtacttaaggatcatcctcaaattgttgtggttagtgatgaaatatacgaacacattaattatggcgatggtcatgcaagcatggctagtgtaaatggaatgtatgaccgtaccgttacgataaatggagttagtaaagcatttgccatgaccggttggagagttggttatataggagctcccgcatggatagctcgtgcatgtaacaaaatgcaaggacaaatcactagcggaactaattgtatcgcacaacgtgccgtgattacggcattagaagctccagtttccgaaattcaatatatggtagacgcatttcataagcgtcgtgatttgatacttgaattattatcaaaaattcatgggttcataacagatattcctgaaggtgctttttacgtattcccagatatttcttcattttttgggaaaaccatcaaaggtcataaaattgaaaacgcaacagatttctctttactattattagaagaagctcttgtagccacggttactggtgatgcttttggcgcgcctaattgtataagactttcttatgcagcaagtgaagaccaaattactgaagcgattaaaaggattgatgaggtgttgtcatga

SEQ ID NO: 146017 - protein, 395 aa, Flavobacteria bacterium BBFL7
MKNNLSDRINNLPVSATLAMAAKARELREQGKDIIGLSLGEPDFNTPDFVKDAAIQAINENYNSYTPVDGYVELKDAIILKFKRDNNLEYTRDQIVVSTGAKQSIANVAMVLLNEGDECILPAPYWVSYAAIVQLAEGVPVEVRAGVEQNFKITPDQLRAAITPRTKMILFSSPNNPSGSVYSKNELEELAAVLKDHPQIVVVSDEIYEHINYGDGHASMASVNGMYDRTVTINGVSKAFAMTGWRVGYIGAPAWIARACNKMQGQITSGTNCIAQRAVITALEAPVSEIQYMVDAFHKRRDLILELLSKIHGFITDIPEGAFYVFPDISSFFGKTIKGHKIENATDFSLLLLEEALVATVTGDAFGAPNCIRLSYAASEDQITEAIKRIDEVLS

SEQ ID NO: 146018 - DNA, 1209 bp, delta proteobacterium MLMS-1
  CDS (1)..(1209): transl_table=11
atggctggcccaatcgaactggcggcgcgggtaaaagagatcaaggcctcaccgaccctggcggtggacgccaaggccaaggccctgaaggcccagggggccgatgtccttaacttcagcgtcggtgagccggatttcgataccccgccccacgtctgcgaggcgggtaaggcggccattgacgaaggctttacccgttatactccggtgcccggcatcctgccgctgcgccaggcggtttgtgatcgccaggccgccgaccatggccgccattatcaacccgacgaaatccagatctgctgtggcggcaagcacgggctctataatatggcccaggccatgttcggtcccggcgacgaggtgttgattccggctccctattgggtcagctatcctcccattgtccaactggccggggccaccccggtgatcgtgccgctggatgaaaaaagcgcttttgatcttgatcccgccatcctcgcagactacaccagcccccggacccgggggatcattttaaacagcccctccaaccccaccggttcggtgctctcggcccgggccctgaccgccattgctgcaatggcccttgagcaggggtgggtggtgatctccgatgatatctatgacaccatcgtctacggtactgaaaaattaccccatatccttgacctggagccgaagttgcgggatcagaccctgatcttaaacggagtttccaagtcctttgccatgaccggctggcggatcggctacaccgccggcccccagcatgtcatcgcggcgatgaacaagatccagagccagtccacctccaatccttcatccattgcccagaaagcggccctggcggccctgaccggcccccaggacttccccaccaccatgcgggatgcttttgtgcctcgcctggatttcatggtcggcgctttaaacgccatggcagggatcagttgcgtgcgctcccggggcgccttttatgtttttcccaatatgtcggcttattatggcaggaaaacgccggcgggtaccagtatcgatgggtcattggctctggccgattatctgctggaagatgctctgctggccacggtgccgggagtggccttcggggccgatgactttatccgtttctcctttgccacctcgctggcggttttggaggaagggatggagcggttggcggcggccctggccaaattgaactaa

SEQ ID NO: 146019 - protein, 402 aa, delta proteobacterium MLMS-1
MAGPIELAARVKEIKASPTLAVDAKAKALKAQGADVLNFSVGEPDFDTPPHVCEAGKAAIDEGFTRYTPVPGILPLRQAVCDRQAADHGRHYQPDEIQICCGGKHGLYNMAQAMFGPGDEVLIPAPYWVSYPPIVQLAGATPVIVPLDEKSAFDLDPAILADYTSPRTRGIILNSPSNPTGSVLSARALTAIAAMALEQGWVVISDDIYDTIVYGTEKLPHILDLEPKLRDQTLILNGVSKSFAMTGWRIGYTAGPQHVIAAMNKIQSQSTSNPSSIAQKAALAALTGPQDFPTTMRDAFVPRLDFMVGALNAMAGISCVRSRGAFYVFPNMSAYYGRKTPAGTSIDGSLALADYLLEDALLATVPGVAFGADDFIRFSFATSLAVLEEGMERLAAALAKLN

SEQ ID NO: 146020 - DNA, 1203 bp, Rickettsiella grylli
  CDS (1)..(1203): transl_table=11
atgaaaataaatctatcacaccgtgtttcccaaattaaaccctcacccacgttaagcctatcggcaacggctaatcagcttaaagctcagggaaaaccggttatcaatctgacggtaggcgaacccgattttgatacgccttaccacattaaacgcgctgcacaccaggcgatagacgatgggtttactaaatatactgccgttgatggtataccgcgtttaaaacaagccgttattgataaatttaagcgcgacaatcaattggattattccttggatcaggtcattatttcaagtggtgctaaacaatccatttataatctgatgcaatcattattaaacccaggggatgaagttatcattccggcaccctattgggtttcctatcctgatatcgttttattggcagaagccaaacctgtttttatccccacttccacagaatcttctttgaaaatcacaccgcaacaactccaagcagcgataaccgataaaacgcgtcttatgattattaatagtccttcaaacccctccgggatggtttatacacccactgaattaaaacaacttgctcaaatcttattacgcactcctcatgtctttattcttactgatgacatttatgagcatatctattggggggaccaaccttttaaaaacatccttaatgtttgtccagaattagccaacaggacccttgtattaaatggttgttcaaaagcttatgcgatgacaggttggcgcatcgggtatgcggccgggcctaaaacgatcattcgaggcatgatgaacctccagtcacaaagtacctctaacccgaattcaatcgctcaattcgcggctactgccgctttaaccggtcaacaaaccgatgtcctacacatgaataaaatttaccattggcgtcatgatttttttgtcgccgagctcaataaaatcccgggtatacattgcctacccgcacaaggtgctttttatagctttccttcatttcatgcctttattggcgaagataaaccgtttgcttctgattacgaactggccgatttcttactgaacaacgctcatgttgctgtagtcccaggttcagcttttggcgcaccgggttatttgcgactgtcctatgcacttgaagaaacccttttagaaaaagcattattacaattaaaaacaacattaatgaatgcaatgcctttaacgtaa

SEQ ID NO: 146021 - protein, 400 aa, Rickettsiella grylli
MKINLSHRVSQIKPSPTLSLSATANQLKAQGKPVINLTVGEPDFDTPYHIKRAAHQAIDDGFTKYTAVDGIPRLKQAVIDKFKRDNQLDYSLDQVIISSGAKQSIYNLMQSLLNPGDEVIIPAPYWVSYPDIVLLAEAKPVFIPTSTESSLKITPQQLQAAITDKTRLMIINSPSNPSGMVYTPTELKQLAQILLRTPHVFILTDDIYEHIYWGDQPFKNILNVCPELANRTLVLNGCSKAYAMTGWRIGYAAGPKTIIRGMMNLQSQSTSNPNSIAQFAATAALTGQQTDVLHMNKIYHWRHDFFVAELNKIPGIHCLPAQGAFYSFPSFHAFIGEDKPFASDYELADFLLNNAHVAVVPGSAFGAPGYLRLSYALEETLLEKALLQLKTTLMNAMPLT

SEQ ID NO: 146022 - DNA, 1215 bp, Oceanobacter sp. RED65
  CDS (1)..(1215): transl_table=11
atgcacgaatttcacaagtccaacaagctcgctaatgtgctgtacgacattcgaggacctgtgctcaccgccgccaagcgtatggaagaagaaggccatcgcatcctcaaacttaacatcggcaaccctgctcccttcgagttaaacgcaccggatgagattattcaagatgtcatccatgaattgcctaacgcggaaggctacagcgatagcaagggtatctacagtgctcgcaaagccgtgatgcaatacagccaacaaaaaggcattgatggcgttgaaatcgatgacatttatctaggcaatggcgttagtgagttaatagtcatggctctacaggcgttgatcaacaacggcgatgaagtcttaatacctgcgccagactacccgctttggaccggcgcagtgagcttagcaggtggcacaccgagacactatatctgtgatgagcaaagcaactggtatccagatctggatgacattcgtgccaaagtcacaccgcaaaccaaagccatggtgattattaacccgaataacccaaccggtgcgctctaccccaaagaagtattggaaggcatgatcgaaattgcccgcgaaaataatcttgtggttttcagtgatgagatttacgacaaaattatttttgatgaagtcgagcacacgtcaacagcatcgctggccgatgacttattattcataacgtttaatggtctatccaaaacgtatcgccttgctggattccgatcaggctggttgattgtcagtggcgccaagcataaggccaaagactatatggaaggtttggatatgctggcgaatatgcgtttgtgcgcaaatgtacccgcacagtacgcgattcaaacagcccttggtggttaccaaagcatcaacgatttgatcaagcccggtggtcgcatttatgagcaacgaatgactgctcacaatatgattaacgacatcccaggtttaagttgcaccttaccgcaaggtgctctttacagtttcataaaaatggatcagaagcgttttaacatcaaaaatgatgagaaaatggttttggacttattagagcaacaaaaaattctaatcgttcatggccgtgcttttaactggccagaacctgatcatttccgtttagtatttttaccccgtgtcgaggatttagaacaagccatcgaaaaaatggggcatttctttgaacgttattcgcaataa

SEQ ID NO: 146023 - protein, 404 aa, Oceanobacter sp. RED65
MHEFHKSNKLANVLYDIRGPVLTAAKRMEEEGHRILKLNIGNPAPFELNAPDEIIQDVIHELPNAEGYSDSKGIYSARKAVMQYSQQKGIDGVEIDDIYLGNGVSELIVMALQALINNGDEVLIPAPDYPLWTGAVSLAGGTPRHYICDEQSNWYPDLDDIRAKVTPQTKAMVIINPNNPTGALYPKEVLEGMIEIARENNLVVFSDEIYDKIIFDEVEHTSTASLADDLLFITFNGLSKTYRLAGFRSGWLIVSGAKHKAKDYMEGLDMLANMRLCANVPAQYAIQTALGGYQSINDLIKPGGRIYEQRMTAHNMINDIPGLSCTLPQGALYSFIKMDQKRFNIKNDEKMVLDLLEQQKILIVHGRAFNWPEPDHFRLVFLPRVEDLEQAIEKMGHFFERYSQ

SEQ ID NO: 146024 - DNA, 1212 bp, marine gamma proteobacterium HTCC2143
  CDS (1)..(1212): transl_table=11
atgaaaccgatcaaacagtccgaaaagcttgccaacgtctgctacgatattcgcggacccgttctggctgaagcaaaccgcctcgaggaagaaggacatcggatcctgaagctgaatataggcaacccggcagcgttcggtttcgatgcacctgatgaaatcatccaggatgttattcgacttttaccaactagccagggttattgtgagtctaaaggcctttactcggcgcggaaggctgttatgcagcattatcagcaacgaggcgtgctcgatgttgatatcgacgatatttatttaggcaatggcgtcagcgaactaattaccatgtcgatgcaggcactactaaacaatgacgacgaagtgctaatacctgcaccagactacccactctggacagcatccgtatcgctatcaggaggaactccagtacattatatctgtgatgaagaagccgactggtttccagacattgccgatattcggtccaagatcagcagtaaaaccagagctattgtcgttatcaacccaaacaatcctactggcgccgtttactctaaagaattactgcaagagatcgtcaagttagcggaagagcacagtctagtcattttcgctgatgagatatacgacaaaattctctatgatgaagcacaacatattccgctagccacgctggctgacaatgtcctctgtgttacgtttaacggcttatcgaaagcttatcgtctagccggtttccgtagcggctggatgatgctaaccggtgcaaaaagccatgctcaaggttatatcgaaggcctaaccatcttggcatcaatgcgcctatgtgccaatgtgccagcacaacatgccatacaaacctgccttggaggttatcaaagtatcaatgacctcgtgctgcccggtgggcggctgcttaaacagcgtaatgctgcgattgaactcctcaaccaaataccgggtgttagctgcgtaaagcccaagggagcaatttacatgttccccaagttagatgttaagaaattcgctattcagaatgacgaaaaactggtgctggattttttgcgtcacgaaaaaatcttgctggtacagggcaccgcatttaactggaagcaacccgaccacctgcgagttgtgtttttacctcaagtggacgaccttacccgagccatggaacgctttgctgcatatttgtcacgaattggatga

SEQ ID NO: 146025 - protein, 403 aa, marine gamma proteobacterium HTCC2143
MKPIKQSEKLANVCYDIRGPVLAEANRLEEEGHRILKLNIGNPAAFGFDAPDEIIQDVIRLLPTSQGYCESKGLYSARKAVMQHYQQRGVLDVDIDDIYLGNGVSELITMSMQALLNNDDEVLIPAPDYPLWTASVSLSGGTPVHYICDEEADWFPDIADIRSKISSKTRAIVVINPNNPTGAVYSKELLQEIVKLAEEHSLVIFADEIYDKILYDEAQHIPLATLADNVLCVTFNGLSKAYRLAGFRSGWMMLTGAKSHAQGYIEGLTILASMRLCANVPAQHAIQTCLGGYQSINDLVLPGGRLLKQRNAAIELLNQIPGVSCVKPKGAIYMFPKLDVKKFAIQNDEKLVLDFLRHEKILLVQGTAFNWKQPDHLRVVFLPQVDDLTRAMERFAAYLSRIG

SEQ ID NO: 146026 - DNA, 1212 bp, Pseudomonas putida GB-1
  CDS (1)..(1212): transl_table=11
atgcagttcagcaaatcgaacaagctcgccaatgtctgctacgacattcgcggcccagtgctcaagcacgccaaacgtctggaagaggaaggccaccgcatcctcaagctgaacatcggcaacccggcgccgtttggcttcgaggcgcccgatgaaatcctccaggatgtgatccgcaacctgcccaccgcccagggctacagtgactccaagggcctgttcagcgcgcgcaaggcggtgatgcagtactgccagcaaaaggaaatcgaaggcgtcaccatcgaggacatctacctcggcaacggtgtgtccgagctgatcgtcatgtcgatgcaggcgctgctgaacaacggcgacgaagtgctgatcccggcccccgactacccgctgtggaccgccgccgtgagcctggcgggcggcaagccggtgcattacctgtgcgacgagcaagccgactggttccccgaccttgaagacatcaaggccaagatcaccccgaacaccaaggccctggtgatcatcaacccgaacaacccgaccggcgccgtctactccaaagagctgctgctgggcatgctggagctggcccgccagcacaacctggtggtgttctccgacgagatctacgacaagatcctgtacgacgaagcggtgcacatcagcaccgcctcgctggcacccgacctgctgtgcctgactttcaacggcctgtccaagtcgtaccgagtggcgggcttccgttccggctggctgatcatctccgggccgaagcaccacgcccagagctatatcgaaggcatcgacatgctggccaacatgcgcctgtgcgccaacgtgccggcccagcatgccatccagaccgcgttgggtggctaccagagcatcaacgacctggtattgccgccaggccgcttgctagaacagcgcaaccgcacctacgagctgctcaacgatatcccgggggtgagctgtgtgaagccgatgggtgcgctgtatgcattcccgcgcatcgacccgaaggtgtgcccgatcctcaacgacgagaagttcgcccttgacctgctgctgtcggaaaaactgctgatcgtgcaaggtacggcgttcaactggccgtggccggaccacttccgcgtggtcaccttgcctcgggtggacgacctggaagcggcgattggccggattggcaatttcctgaaggggtattcgcagtaa

SEQ ID NO: 146027 - protein, 403 aa, Pseudomonas putida GB-1
MQFSKSNKLANVCYDIRGPVLKHAKRLEEEGHRILKLNIGNPAPFGFEAPDEILQDVIRNLPTAQGYSDSKGLFSARKAVMQYCQQKEIEGVTIEDIYLGNGVSELIVMSMQALLNNGDEVLIPAPDYPLWTAAVSLAGGKPVHYLCDEQADWFPDLEDIKAKITPNTKALVIINPNNPTGAVYSKELLLGMLELARQHNLVVFSDEIYDKILYDEAVHISTASLAPDLLCLTFNGLSKSYRVAGFRSGWLIISGPKHHAQSYIEGIDMLANMRLCANVPAQHAIQTALGGYQSINDLVLPPGRLLEQRNRTYELLNDIPGVSCVKPMGALYAFPRIDPKVCPILNDEKFALDLLLSEKLLIVQGTAFNWPWPDHFRVVTLPRVDDLEAAIGRIGNFLKGYSQ

SEQ ID NO: 146028 - DNA, 1215 bp, Marinobacter sp. ELB17
  CDS (1)..(1215): transl_table=11
atgcagaattatcacaaatccaccaaactggacaatgtgtgctacgacatacgcggcgtggttctgcgtgaagcgcggcgcctggaagaagaaggccatcgcgtactgaagctgaatatcggcaacccggccagctttgagctcgatgtacctgaagaaattcagcaagatgtcatctacaacatgcacctggcccagggctatgtggaatccaaaggcctgttttccgcgcgcaaagcggtgatgcactattgccagcagcgcggcatcgacaaagtcgacattgatgacatttacctgggcaacggggtcagcgaactgatcgtaatgtctatgcaggccatgctcaataccggcgacgaagtgttgatcccggcacctgattacccgctgtggaccgccgcggtagcgctttccagcggcaagcccgtgcattatcactgcgatgaacagcagggctggtttccggatattgatgacatccgccgcaaaatcaccaaacgcacccgggcgattgtgttgattaaccccaacaaccctacaggcgcagtctattccaccgaggtgctgcaccaagtgattgagctggcgcgggcccacaacctgatcattttatctgacgagatttacgacaagattctttacgatggcgtgacgcatgtttctaccgcgtccctcgccgatgacgtgctatttttcacctacaacggcctgtcgaaaaattatcgtgctgcaggctatcgatccggctggatgatcatcagcggcgccaaacacaaagccaccgacctggttgagggcatcgaaatgctctcgaacatgcgcctgtgcgccaacgtaccagcccagttggccatccagacggctttgggtggctatcaatccatcaacgatctggtgattcccggcggccgcctgttcgagcagcgccaggcggcgtgggaattgctcaacgacattcccggcgtcagttgcgtaaagccccagggtgcactctacttgttccccaaactggatcccaagcgctaccccatcgtcaacgatgagaaactggtactggacctgctgattcaggaaaagatactgctggtgcagggttccgcttttaatgtaaaagacagacagcatctgcgggttgttttccttccgcgcaaagacactctggccgatgccgtgggccgcctggggcgattcctggaacaatacaagcagtaa

SEQ ID NO: 146029 - protein, 404 aa, Marinobacter sp. ELB17
MQNYHKSTKLDNVCYDIRGVVLREARRLEEEGHRVLKLNIGNPASFELDVPEEIQQDVIYNMHLAQGYVESKGLFSARKAVMHYCQQRGIDKVDIDDIYLGNGVSELIVMSMQAMLNTGDEVLIPAPDYPLWTAAVALSSGKPVHYHCDEQQGWFPDIDDIRRKITKRTRAIVLINPNNPTGAVYSTEVLHQVIELARAHNLIILSDEIYDKILYDGVTHVSTASLADDVLFFTYNGLSKNYRAAGYRSGWMIISGAKHKATDLVEGIEMLSNMRLCANVPAQLAIQTALGGYQSINDLVIPGGRLFEQRQAAWELLNDIPGVSCVKPQGALYLFPKLDPKRYPIVNDEKLVLDLLIQEKILLVQGSAFNVKDRQHLRVVFLPRKDTLADAVGRLGRFLEQYKQ

SEQ ID NO: 146030 - DNA, 1206 bp, Bacillus sp. SG-1
  CDS (1)..(1206): transl_table=11
atgtggatgaaatgggaattagcggaaagggtcagcgcgttaacaccatcaacaacccttgctattacagcaaaagcaaaagaaatgaaagcacaaggcatcgatgtgatcgggcttggagcaggagaacctgatttcaatacaccccagcatattatgtcagctgcaacagcttcgatggaagaaggacatacaaaatacactccggcgagcggtcttgccggattaaagaatgccatcatcgataaatttaaagatgatcaaggcatatcttatgagccatcggaagtgattgtcacaagcggggctaaacatggcttatatacattgttccaagtccttctcaatgaaggggatgaagtcattatcccaactccatactgggtcagttaccctgagcaagtaaaacttgcaggcggtgttccagttttcattgaaggaaaggaagacaatcaattcaaaattacccctgaacagcttaaagaagcagttacaggcaatactaaagcggtgatcatcaactcgccaagcaacccgacaggcatgctctacagcaaggaagagctggaagcaatcgggcaggcctgcctggagaaaaatatcctcatcatttcagatgaaatttatgagaagttagtctatgaaggaaaccaacatgtttcaatcgcagaaatttctcctcagttgaaagagcagacggtggtcatcaacggtgtctcaaaatcgcattcaatgacaggctggagaattggttatgcagccggtgacgctaagattattaaagcaatgacaaacctagcaagccattcgacttccaatcctacgacaacttcccagtacggtgccattgcagcctatgagggtacacaggagcctgtagaggagatgcggaaagctttcgaggaacgattgaacattgtttttgaaaaattgaatgctatccctggattcaactgtattaaaccacaaggcgcattctatcttttccctaatgtcaaggaagcagcagaaatgacagggtatgagtcagttgattcatttgtaaaagcgctgcttgaagaggcagaagtagcggtcattccaggttccggattcggaacaccggataacattcgtctgtcatatgcaacatcgcttgatttatttgaaaaagcgttggaaagaatccattcttttgtcaatcgaaaaatcgaagagtctaaataa

SEQ ID NO: 146031 - protein, 401 aa, Bacillus sp. SG-1
MWMKWELAERVSALTPSTTLAITAKAKEMKAQGIDVIGLGAGEPDFNTPQHIMSAATASMEEGHTKYTPASGLAGLKNAIIDKFKDDQGISYEPSEVIVTSGAKHGLYTLFQVLLNEGDEVIIPTPYWVSYPEQVKLAGGVPVFIEGKEDNQFKITPEQLKEAVTGNTKAVIINSPSNPTGMLYSKEELEAIGQACLEKNILIISDEIYEKLVYEGNQHVSIAEISPQLKEQTVVINGVSKSHSMTGWRIGYAAGDAKIIKAMTNLASHSTSNPTTTSQYGAIAAYEGTQEPVEEMRKAFEERLNIVFEKLNAIPGFNCIKPQGAFYLFPNVKEAAEMTGYESVDSFVKALLEEAEVAVIPGSGFGTPDNIRLSYATSLDLFEKALERIHSFVNRKIEESK

SEQ ID NO: 146032 - DNA, 1188 bp, unidentified eubacterium SCB49
  CDS (1)..(1188): transl_table=11
atggacaacagactttcaaacagagtaaacagcatggctacttctgccacattagccatggctgcaaaagcaagagaattaagagcagaaggaaaaaacattataggactgagtttaggagaacctgactttaatgtgccagattttgtaaaagacgccgctataaaagccgttaatgacaattttcacgcctatacaccagtagacggttatgccgatttaaaagaagctattatcacaaaatttaaacgtgacaataatcttacatatacccctagtcaaattgtagtttcgacaggtgccaaacaatcattgtacaatcttgctcaagttttattaaatgaaggtgacgaagttttattacctgcgccttactgggttagttatagtgatatagcaaaagtagcgggcggtgttccagtagaaataaaaacttctattgacaatgattttaaagtaacagccgaagagcttgaagcggcaattacacctaaaacaaaaatgattatttacagttcaccttgtaacccaagtggatctgtatatagcgaagcagaattaagagcattagcagatgttttggtaaaatatccaaaaatcatcgtgataagcgacgaaatttatgagcacattaattttacaggagctcatgcttctatggctcaatttgaagacatgtatgaccaaacagtaactgtaaacggtgtttctaaagcatttgcaatgacaggatggcgtattggttttataggagctccagaatggattgctcgtgcttgtaataaaattcaaggacagataacaagtggtacaaactgtattggacagaaagcaacagtaattgcgcttaacaaccctccaagtaaaattaaatatatggttgatgcttttaaagctcgccgtagtatgattttagacttattaaatgatattccaggctttaaaacaaacgtaccagaaggtgccttttatgtttttccagatatttcatattacttcggaaaagaactaaagggaactaccattaataatgcatctgactttagtctttatttactagaacaggcaaatgtagctacggttacaggtgaagcttttggaaacccagattgtatacgtatttcttacgcagcagcagaagaagacatacagcaagcaatgaagcaaattaaagatgcgttaatctaa

SEQ ID NO: 146033 - protein, 395 aa, unidentified eubacterium SCB49
MDNRLSNRVNSMATSATLAMAAKARELRAEGKNIIGLSLGEPDFNVPDFVKDAAIKAVNDNFHAYTPVDGYADLKEAIITKFKRDNNLTYTPSQIVVSTGAKQSLYNLAQVLLNEGDEVLLPAPYWVSYSDIAKVAGGVPVEIKTSIDNDFKVTAEELEAAITPKTKMIIYSSPCNPSGSVYSEAELRALADVLVKYPKIIVISDEIYEHINFTGAHASMAQFEDMYDQTVTVNGVSKAFAMTGWRIGFIGAPEWIARACNKIQGQITSGTNCIGQKATVIALNNPPSKIKYMVDAFKARRSMILDLLNDIPGFKTNVPEGAFYVFPDISYYFGKELKGTTINNASDFSLYLLEQANVATVTGEAFGNPDCIRISYAAAEEDIQQAMKQIKDALI

SEQ ID NO: 146034 - DNA, 1218 bp, Moritella sp. PE36
  CDS (1)..(1218): transl_table=11
atgtactcaatagaaaaatctcataagttagataacgtatgttatgacatacgtggaccagtattaaaagaagcgaatcgcttagaagaagaaggtcatcgagtaatcaaattaaacatcgggaatcccgccccatttggttttgaagccccagaagaaattgtaaaagacgttattcataacctcccatcgagccaaggttactgtgactcaaaagggttatattctgcgcgcaaagccgtgatgcaacattaccaacagaaaggtctgttaaacatctcgattgacaatatttacctgggtaatggcgtttcagaattaatcatgatgtcgatgcaggcattactgaataatggtgatgaagtgttagttccgtcacctgattatccattatggacagcagcaattaccctctctggtggtaaagcaacgcactatatttgtgatgaagaatcagattggtatccggatctggatgacattaaagccaagatcacaccgaataccaaaggtattgtattaatcaatccaaacaacccaacgggtgcggtatataataaagaatttttgctagaagtggttgaagttgctcgccaacacaatctgatcattttttctgatgagatctatgacaagatcctatatgacggtgttgaacatgtgcctatgtgcacactggcgcaagatattctgattgttaccttcaatggtttgtctaaagcttaccgtatcgctggtttccgctctggttggttagtactgagtggtgcaacccatcttgctaaggattatattgctgggttggaaatgctcgcctccatgcgtctgtgttcgaatgtaccgatgcaacatgcgatacaaacggcactgggtggttatcaaagtattaatgaattgattttaccgggtggtcgtttactggaacaacgtgatttagcctggaagatgttaaatgatattccgggtatcacctgtgtgaaaccaaaaggtgcgctgtatctgttccctaaaattgatatggaaatgttcaatatcaaagacgatcagaaatttgcattagatctgttgcaacaagaaaagctattaattgtgcaaggtaccggttttaactggagccgccctgatcacttccgcgtggtattcttaccgcgtgttgaagagctgactattgcgattaataaactagctaacttcttatcaacttaccgtcaggcttag

SEQ ID NO: 146035 - protein, 405 aa, Moritella sp. PE36
MYSIEKSHKLDNVCYDIRGPVLKEANRLEEEGHRVIKLNIGNPAPFGFEAPEEIVKDVIHNLPSSQGYCDSKGLYSARKAVMQHYQQKGLLNISIDNIYLGNGVSELIMMSMQALLNNGDEVLVPSPDYPLWTAAITLSGGKATHYICDEESDWYPDLDDIKAKITPNTKGIVLINPNNPTGAVYNKEFLLEVVEVARQHNLIIFSDEIYDKILYDGVEHVPMCTLAQDILIVTFNGLSKAYRIAGFRSGWLVLSGATHLAKDYIAGLEMLASMRLCSNVPMQHAIQTALGGYQSINELILPGGRLLEQRDLAWKMLNDIPGITCVKPKGALYLFPKIDMEMFNIKDDQKFALDLLQQEKLLIVQGTGFNWSRPDHFRVVFLPRVEELTIAINKLANFLSTYRQA

SEQ ID NO: 146036 - DNA, 1188 bp, Opitutaceae bacterium TAV2
  CDS (1)..(1188): transl_table=11
atgagttctgcacctgcgcctctctctgtctgggccaagaatatctcgccttcgccgacgctcgccgtcgatgccaaggccaaggcactcctcgccgctggcgaggacgtttgcggattcgccgccggcgaacccgattttgacacacccgagcacatcaaagaggcctgcatcgccgccctcaaggccggcaagaccaagtatgcccccacccccggcatcgagccgcttcgccaggccatcgccgacgactacgccgcccgcctcggcctcaaagtcgcctcctcgcaagtgattgtttcccccggcggcaaattttcctgttatctctccatcctcgccgtctgctcccccggcgacgaagtcatcatccccgcgccctactgggtcagctatcccgagatggccaaactcgccggcgccaagcccgttttcgtgctcgccgacgaccgcaccggcttccgcctcacgcccgcgcaactcgaagccgccatcacgccgaagagcaaactcctcatcctcaattcaccctccaacccgaccggtgccgtttacactcgcgccgaactggaggccatcgtggccgttgcgctcaagcacaacctctacatcatgtcggacgaaatctacgagcacctcctctacgatggagcgcagcacgtttcgcccgccaccttctccgccgaagccgccgcgcgcaccatcatcgtatccggcttcgccaagacctactccatgaccggctggcgccttggcaccactgttgcccccgcgcccatcgccaaggccgtggccgaactccagagccagaccagttccaacgccacgaccttcgcccaatacggcgcgcttgccgcgctcaaggaaaaggaaaaaacgcaggcctcgcttacgcagatgctcgccgcctttgaccgccgccgcaaattcctgcacgccgaactcaacaaaatccccggtgtgaagtgcctgctcgcgcaaggtgcgttttacctgttcccgaacatttccagcttcggactcagctcggcggacttctgttccaaactcctcgaacaacaaaaagtcgccgccgtctttggcagcgcctttggagccgaggggtatttgcgcctcagctacgccacgagcgacgagatcatcaagaagggcgtcgaacgcctcgctgccttctgcaaaacgctctaa

SEQ ID NO: 146037 - protein, 395 aa, Opitutaceae bacterium TAV2
MSSAPAPLSVWAKNISPSPTLAVDAKAKALLAAGEDVCGFAAGEPDFDTPEHIKEACIAALKAGKTKYAPTPGIEPLRQAIADDYAARLGLKVASSQVIVSPGGKFSCYLSILAVCSPGDEVIIPAPYWVSYPEMAKLAGAKPVFVLADDRTGFRLTPAQLEAAITPKSKLLILNSPSNPTGAVYTRAELEAIVAVALKHNLYIMSDEIYEHLLYDGAQHVSPATFSAEAAARTIIVSGFAKTYSMTGWRLGTTVAPAPIAKAVAELQSQTSSNATTFAQYGALAALKEKEKTQASLTQMLAAFDRRRKFLHAELNKIPGVKCLLAQGAFYLFPNISSFGLSSADFCSKLLEQQKVAAVFGSAFGAEGYLRLSYATSDEIIKKGVERLAAFCKTL

SEQ ID NO: 146038 - DNA, 1212 bp, Streptomyces griseus
  CDS (1)..(1212): transl_table=11
atgcaggtcatccagtccacgaagctctccaacgtctgttacgagatccggggtcccgtgctggaggaggcgatgcggctggaagcggccggtcagcgcatcctcaagctgaacacgggcaaccccgccgccttcgggttcgaatgcccgccggagatcctcgaggacatcctgcgcaacgtcgcgggcgcgcacggctacggcgacgcgaagggcctgctgtcggcgcgccgcgcggtggtgcagcactaccagaccaagggcatcgagctcgacgtcgaggacatctacctgggcaacggcgtctccgagctgatccagatgtcgatgcaggcgctgctggacgacggcgacgaggtcctcgtaccggctcccgactatccgctgtggaccgcgtcggtctcgctggcgggcgggacggccgtgcactaccggtgcgacgagcaggccgactggatgccggacctcgcggacgtcgagcggaagatcaccgaccgcaccaaggccctggtgatcatcaacccgaacaacccgaccggtgcggtctacgacgacgagatgctgcgcggtctcaccgagatcgcccggcggcacaacctgatcgtctgctccgacgagatctacgaccggatcctctacgacggcgcgacccacaccccgaccgcggcgctggccccggacctcatggtgctgaccttcaacgggctctccaagaactaccgggtcgccggctaccgctccggctggatggccgtctgcggcccgaaggcgcacgccacctcgtacatcgaggggctgacgatcctcgccaacatgcggctctgcgccaacatgccctcgcagcacgcggtggccaccgcgctcggcggccggcagtcgatccaggacctggtgctgccgggcggccggatcctggagcagcgggacgcggcgtacgacctgctgacctcgatccccggggtgagctgcgtgaagccgaagggggcgctgtacctcttcccccgcctcgaccccaaggtctacaagatcaaggacgaccggcagatggtgctggacctgctgcgggccgagaagatcatggtggtgcaggggaccggcttcaactggcccgagcccgatcacttccggatcgtcacgctgccgacggtggaggacctgaccgacgcggtgaccaggatcggcaccttcctggacggttacggacagccctag

SEQ ID NO: 146039 - protein, 403 aa, Streptomyces griseus
MQVIQSTKLSNVCYEIRGPVLEEAMRLEAAGQRILKLNTGNPAAFGFECPPEILEDILRNVAGAHGYGDAKGLLSARRAVVQHYQTKGIELDVEDIYLGNGVSELIQMSMQALLDDGDEVLVPAPDYPLWTASVSLAGGTAVHYRCDEQADWMPDLADVERKITDRTKALVIINPNNPTGAVYDDEMLRGLTEIARRHNLIVCSDEIYDRILYDGATHTPTAALAPDLMVLTFNGLSKNYRVAGYRSGWMAVCGPKAHATSYIEGLTILANMRLCANMPSQHAVATALGGRQSIQDLVLPGGRILEQRDAAYDLLTSIPGVSCVKPKGALYLFPRLDPKVYKIKDDRQMVLDLLRAEKIMVVQGTGFNWPEPDHFRIVTLPTVEDLTDAVTRIGTFLDGYGQP

SEQ ID NO: 146040 - DNA, 1203 bp, Magnetospirillum gryphiswaldense
  CDS (1)..(1203): transl_table=11
atgccgttcatcgctgacaggctgtcggccatcaagccgtctccgaccatcgccgtgacgcaaaaggccgccgagctgaaagccgccggccgcgacgtcatcggattgggtgcgggcgagcccgatttcgacacccccgacaacatcaaggccgccgccaaaaccgcgctggacaagggcgccaccaagtacggcccgcccgccggtaccgtcgaattgcgcaaggccatcgtcgccaagttcaagcgcgagaacggcctggactacaccgtcgatcaggtcaccgtcggcgtcggcggcaagggcgtgatcttcaacgccttcatggccaccatcaatcccggcgacgaagtcatcgtccccgcgccctattgggtgtcgtacccggacatcgccctgatgttcggcggcgtgccgaaattcatcgcctgtccggaagacaagggcttcaagctgcaggccgccgacctggaagccgccatcacccccaagaccaagtggttggtgctgaactcgccgtccaaccccaccggcgccgcctattcgtgggacgagatgaaggcgctgaccgacgtgctggtcaagcacccgcatgtgtggatcatgtccgacgacatgtacgagcatctggtctatgacggcttcaagttctgcaccccggcccaggtcgaacccagcctgtacgaccgcaccttgaccatgaacggcgtgtcgaaggcctatgccatgaccggctggcgcgtcggctatgccgccggtccgctgccgctcatcaaagccatcaacatgatccagtcgcagtcggtgacccacaccgccaccgtcagccaggcggcggcggtcgaggccctgaacggcacccaggacttcatcccgaagaaccaggagatcttcaaggcccggcgcgatctggtggtcaagctgttgaacgagtgcaagggcctgacctgccgcacgccggaaggcgccttttatgtctatccgtcctgcgccggcgtgatcggcaagaagaccagcgacggcaaggtgatcagctcggacggtgatttcgccacctatctgctggaaggcgaaggcgtcgccgtggtccagggcgaggccttcggcctgtcgccttacttccgcatctcctacgccacctcgaccgaggcgttgcaacaggcctgcgaacgcatcaagcggttctgcgacagcctgagctga

SEQ ID NO: 146041 - protein, 400 aa, Magnetospirillum gryphiswaldense
MPFIADRLSAIKPSPTIAVTQKAAELKAAGRDVIGLGAGEPDFDTPDNIKAAAKTALDKGATKYGPPAGTVELRKAIVAKFKRENGLDYTVDQVTVGVGGKGVIFNAFMATINPGDEVIVPAPYWVSYPDIALMFGGVPKFIACPEDKGFKLQAADLEAAITPKTKWLVLNSPSNPTGAAYSWDEMKALTDVLVKHPHVWIMSDDMYEHLVYDGFKFCTPAQVEPSLYDRTLTMNGVSKAYAMTGWRVGYAAGPLPLIKAINMIQSQSVTHTATVSQAAAVEALNGTQDFIPKNQEIFKARRDLVVKLLNECKGLTCRTPEGAFYVYPSCAGVIGKKTSDGKVISSDGDFATYLLEGEGVAVVQGEAFGLSPYFRISYATSTEALQQACERIKRFCDSLS

SEQ ID NO: 146042 - DNA, 1215 bp, Vibrio sp
  CDS (1)..(1215)
atgcaaaatatcgggatgtcgtcaaaactcgataatgtctgctacgacattaggggtcctgtactcaaacatgctaagcgcatggaggaagaagggcataaaatcctaaagctaaacattggtaaccctgccccatttggttttgacgcccctgatgagattttagtcgacgtgattcgtaatctgccgacttctcaaggctattgtgattccaaaggcatttactctgctcgtaaagccgtggtccaacactatcaacgtaaaggtatccgctctctagatgtcgaagatgtgtatgtgggtaacggcgtgtctgagctgatcgtgatggccatgcaagcgctattaaacaatggcgacgaaatgctgatcccagcacctgattacccgttgtggacagcttcagttgcactatcaggcggtaagccggttcattacctatgtgatgaaggtgcagactggtaccctgaccttgaagacatcaaaaagaaaatcacaccgaagacacgtggcattgttctgatcaacccgaacaacccgacaggtgcggtatacagccgtgacttcctacttgaagtgattgaaatcgcgcgccagcacaaactgatcattttcgcagatgagatctacgacaaagtgttgtacgacggtgcaacacatacctcagtcgcaacactcactgaagacgtgctcgtcatgacattcaatggcctttcaaaagcctaccgtgtttgcggtttccgtggtggctggatgttcctaacgggacctaaacacctagctcaagggtacgtgaatggcttggagctgctttcatcgatgcgtttatgtgcaaatgtaccaatgcaacatgcgattcaaaccgcgttaggtggataccagagtatcaatgaactgattttacctggcggacgcttattagagcagcgcaatagagcgtatgaactgatcaatcagattcctggtgtttcttgtgtcaaacctaagggtgcgatgtacctcttcccgaaaatcgacacaaaaatgtacaacatcaagaacgatcagcagatggttttagatttcttaaaacaagagaaggtcttactggtgcaaggttccggtttcaactggccaaaaccagaccatttccgcatagttacactgccacacgttgaagatctagaaatcgccattggacgttttgagcgattcctatcaacctacagccagtaa

SEQ ID NO: 146043 - protein, 404 aa, Vibrio sp
MQNIGMSSKLDNVCYDIRGPVLKHAKRMEEEGHKILKLNIGNPAPFGFDAPDEILVDVIRNLPTSQGYCDSKGIYSARKAVVQHYQRKGIRSLDVEDVYVGNGVSELIVMAMQALLNNGDEMLIPAPDYPLWTASVALSGGKPVHYLCDEGADWYPDLEDIKKKITPKTRGIVLINPNNPTGAVYSRDFLLEVIEIARQHKLIIFADEIYDKVLYDGATHTSVATLTEDVLVMTFNGLSKAYRVCGFRGGWMFLTGPKHLAQGYVNGLELLSSMRLCANVPMQHAIQTALGGYQSINELILPGGRLLEQRNRAYELINQIPGVSCVKPKGAMYLFPKIDTKMYNIKNDQQMVLDFLKQEKVLLVQGSGFNWPKPDHFRIVTLPHVEDLEIAIGRFERFLSTYSQ

SEQ ID NO: 146044 - DNA, 1209 bp, Streptomyces chrysomallus
  CDS (1)..(1209): transl_table=11
atggagttccggcagtcgagcaagctcagcgaggtctgttacgagatccggggccccgtcatcgagcacgccaacgccctggaggaggcgggccacagcgtcctgcgcctcaacaccggcaaccccgcgctcttcggcttcgaggcgcccgaggagatcgtccaggacatgatccggatgcttccgcaggcgcacggctacacggactcgcgcggcgtcctgtccgcccgccgcgccgtcgcccagcgctatcaggcgctcggcctcgacgaggtctcggtggacgacgtcttcctcggcaacggcgtgtccgagctggtcacgatggcggtccaggcgctcctggaggacggcgacgaaatcctcatccccgcgcccgacttcccgctgtggaccgcggtgacgaccctctccggaggcaaggccgtccactacgtctgcgacgaggcggcggactggtaccccgacctcgacgacatggcctcgaagatcaccgaccagaccaaggccgtcgagatcatcaaccccacgggcgcggtctatccgaaggagatcctggagggcatcctcgatctcgcgcggcggcacggcctgatggtcttcgccgacgagatctacgaccagatcctgtacgacgacgccgtgcaccacagcgtggccgccctcgccccggatctcgtggtcctcaccttctgcggtctttcgaagacgtaccgcgtggcgggtttccgttcgggctggctggtcatcaccggcccgcggcagcacgcgcgcgactacctggaggggctgacgatgctcgcctccatgcgcctgtgccccaacgcgcccgcgcagttcgccatccaggccgcgctcggcggccgccagtcgatccgtgaactgaccgcgcccggcggggcgttgcacgagcagcgggaccgggcctgggagaagctgaacgagatccccggcgtctcctgcgtcaagccgaagggcgcgctgtacgccttcccgcgcctggacccgaaggtccatccgatccacgacgacgagaagttcgtgctggacctcctgctccaggagaagatccaggtggtccagggcaccggcttcaactggccccgccccgaccacttccgcatcctcaccctcccccacgccgacgatctcgacgcggcgatcagccgcatcggccgcttcctgagcggctaccgccagggccgctga

SEQ ID NO: 146045 - protein, 402 aa, Streptomyces chrysomallus
MEFRQSSKLSEVCYEIRGPVIEHANALEEAGHSVLRLNTGNPALFGFEAPEEIVQDMIRMLPQAHGYTDSRGVLSARRAVAQRYQALGLDEVSVDDVFLGNGVSELVTMAVQALLEDGDEILIPAPDFPLWTAVTTLSGGKAVHYVCDEAADWYPDLDDMASKITDQTKAVEIINPTGAVYPKEILEGILDLARRHGLMVFADEIYDQILYDDAVHHSVAALAPDLVVLTFCGLSKTYRVAGFRSGWLVITGPRQHARDYLEGLTMLASMRLCPNAPAQFAIQAALGGRQSIRELTAPGGALHEQRDRAWEKLNEIPGVSCVKPKGALYAFPRLDPKVHPIHDDEKFVLDLLLQEKIQVVQGTGFNWPRPDHFRILTLPHADDLDAAISRIGRFLSGYRQGR

SEQ ID NO: 146046 - DNA, 1497 bp, Aspergillus oryzae
  CDS (1)..(1497)
atggcgactcagactacagtgtcctacactactacacgcaccttgtccaccccggctcgttgcctgaaccctgataacatcaacccccacgtcacggaggccaagtatgccgtccgtggtgagcttgctgtcaaggccgaggagtaccgcgtgaaactggccaatggagacaaatcgttacctttcgacagtgtcatctttgccaacatcggcaatccccaacagctcgaccagaaacccatcaccttcttccgccaagtactcagtctcctcgagaaccctcaactgttgaacaacacggaagcacttcgtacatcctttttttatgaacaagatgtcgttgaccgggccaagaagctcctcgcggatgtccagagcgttggtgcttacagtcacagccagggagcgcctgtgatccgccaaagtatcgccaaattcattgaggagcgtgatggattcccggccaaccctcaggatttgttctgctgcgctggtgcctcgtctggcgtcagcaccattctcaatatcatctgcaacggcccccaggccggtgtcctcgtccctattccgcaataccctctttacactgccaccctttctctcctgaatgcgcaatgtgtaccctacctcctcgaagagcaaaaggcttggggtaccgatgtgactgccatccgtaactcgttggcgcaggcccggtctaccggcactgacgttcgttcgattgtggtcatcaaccccggtaaccctactggtgcctctttgagcgccgaggatatcaagaatgttcttgaccttgctgcggaggagaagcttgttgttattgcggacgaggtttaccagacgaacgttttcgagggcgagttcatttcgttcaagaagaggcttcgtcagctgcaacaggagacaccaggcaagtatgattatgtggagttggtctctcttcacagtgtgtctaaaggtatggtgggcgagtgtggccaccgtggtggctactttgagctggttggattcgaccctgaggttcaggcccagatctacaagcttgtgagcatcggactttgcccaccagtcattggacagtgtttgcttgagcttatggtgaacccacccaaggagggcgaaggcagctatgagctgtaccagaaggagtacaatggaatcagcgagggactgcacaagcgcgcctttgccttatacgaggccttccaacagatggagggcgttgagtgtcagaaacctcagggtgccatgtatctcttccccaccatcactctcccacccaaggccattgaggctgccaaggctgagaaccgtgccgccgatgagttctactgcttgcgtctcctcgacgctaccggtgtctgtgttgtccctggctccggcttcggccagaaggagaacactctgcacttccgcacaactttcctggcccctggcactgattgggttgaacggatcgtcaagttccactccgaatttatggccaagtacaaataa

SEQ ID NO: 146047 - protein, 498 aa, Aspergillus oryzae
MATQTTVSYTTTRTLSTPARCLNPDNINPHVTEAKYAVRGELAVKAEEYRVKLANGDKSLPFDSVIFANIGNPQQLDQKPITFFRQVLSLLENPQLLNNTEALRTSFFYEQDVVDRAKKLLADVQSVGAYSHSQGAPVIRQSIAKFIEERDGFPANPQDLFCCAGASSGVSTILNIICNGPQAGVLVPIPQYPLYTATLSLLNAQCVPYLLEEQKAWGTDVTAIRNSLAQARSTGTDVRSIVVINPGNPTGASLSAEDIKNVLDLAAEEKLVVIADEVYQTNVFEGEFISFKKRLRQLQQETPGKYDYVELVSLHSVSKGMVGECGHRGGYFELVGFDPEVQAQIYKLVSIGLCPPVIGQCLLELMVNPPKEGEGSYELYQKEYNGISEGLHKRAFALYEAFQQMEGVECQKPQGAMYLFPTITLPPKAIEAAKAENRAADEFYCLRLLDATGVCVVPGSGFGQKENTLHFRTTFLAPGTDWVERIVKFHSEFMAKYK

SEQ ID NO: 146048 - DNA, 1455 bp, Vitis vinifera
  CDS (1)..(1455)
atgtcgcataagggactagactacgagacactgaatgaaaacgtgaagaaggttcaatatgctgttaggggcgagttgtatcttcgtgcttctgagcttcagaaggaagggaaaaagattattttcacaaacgtgggcaaccctcatgctctaggacagaaaccactgacttttcctcgccaggtggttgctctatgccaagctccatttctattagatgatcctaatgtaggactcgtattcccagcagatgcaattgcaagagctaaacactacctttcattgacttcgggtggtctaggtgcttatagtgactctcgaggtcttcctggaataaggaaggaagtggcagagttcattgggaggcgtgatgggtatccaagtgatccagagctcatatttctcacggatggtgccagcaaaggagtaatgcagattttgaatacaattatccgtggtgaaagggatgggattttggttcctgtcccacaatatccgctttactcagctgcaatatctctctttggtggttctcttgttccatattatctggaagagacagcaaactggggtcttgatgtaaataaccttcactcgtcagttgcagcagctcgctccaaaggaataactgtccgagcaatggtgattataaaccctggaaatcctactggtcagtgtcttagtgaagccaatttaaaagaaatattgcacttctgttaccaagaaaacttagtcttgcttggagatgaagtttaccaacagaatatttaccaggatgagcgcccttttatcagtgctagaaaggttttgatggacatgggcccacccataagcaaggagctccagcttgtttctttccacacagtctctaaaggatattggggtgaatgtggacagcgtggtggatactttgagatgaccaacattcctccacagactgttgatgagatttataaggttgcatcaatatcactcagtccaaatgtccctgggcagatatttttaggtgtcatggtcaatccacccacacctggagatatttcatatctgcagtttatgagagagagcaaaggtatccttgagtcactgaggagaagggcacagataatgactgatggattcaacagttgcagaaatgtagtttgtaatttcacagaaggggccatgtactcattccctcaaatacgattgccaccaaaagctattgaggctgccaaaaaggctggtaaagtcgctgatgttttctactgcctcaagctcttggaagccactggaatttccactgtccctggttcaggatttggacagaaagaaggggtcttccacttaagaacaaccatcttgccagctgaggaagagatgcctgcaattatggaaagtttcaagaagttcaatgatgagttcatggaacaatatgaagaccatagaggctattcaaggatgaaaaatcactag

SEQ ID NO: 146049 - protein, 484 aa, Vitis vinifera
MSHKGLDYETLNENVKKVQYAVRGELYLRASELQKEGKKIIFTNVGNPHALGQKPLTFPRQVVALCQAPFLLDDPNVGLVFPADAIARAKHYLSLTSGGLGAYSDSRGLPGIRKEVAEFIGRRDGYPSDPELIFLTDGASKGVMQILNTIIRGERDGILVPVPQYPLYSAAISLFGGSLVPYYLEETANWGLDVNNLHSSVAAARSKGITVRAMVIINPGNPTGQCLSEANLKEILHFCYQENLVLLGDEVYQQNIYQDERPFISARKVLMDMGPPISKELQLVSFHTVSKGYWGECGQRGGYFEMTNIPPQTVDEIYKVASISLSPNVPGQIFLGVMVNPPTPGDISYLQFMRESKGILESLRRRAQIMTDGFNSCRNVVCNFTEGAMYSFPQIRLPPKAIEAAKKAGKVADVFYCLKLLEATGISTVPGSGFGQKEGVFHLRTTILPAEEEMPAIMESFKKFNDEFMEQYEDHRGYSRMKNH

SEQ ID NO: 146050 - DNA, 1551 bp, Zea mays
  CDS (1)..(1551)
atggcggccgccatggtgaggaccatgtccacgacggccgcgggcacgcccccagtgtcggtcgccaccatcaaccccaagcttgtttgggttgctctgatctgtgatcgaatagcggggcgtttgaaagtttcgatctcggtcttgaagtgtgaatatgcagttcgaggagagattgttacacatgctcagaacttacaacaagaattgcagaaaaatccagaatcacttcctttcgacgagatactctactgtaatattggaaatccccaatcacttgggcaacaaccagttacctatttcagagaagttctctctctatgtgatcatccagctctcctggacaaaagtgaaactcatgctttgtacagttcagatgctatagagagagcatggcaaattctagagaagataccaggtagagcgacaggagcatatagccatagtcagggtataaaaggtttacgtgatgaaattgctgctggaattgctgcccgtgatgggtttcatgcaagtggagataacatctttctaacagatggagcaagcccagcagtgcacatgatgatgcagttgttgataagttctgagagcgatggcattctctgccctattccacagtacccactgtactctgcatcgattgctcttcacggtggttcccttgttccttatttccttaatgaagagacagggtggggactcgatgttgatgagctgaagaaacaactggaggaggctcgatctaagggcatcactgtcagggcgcttgtggtcataaatccaggaaatccaacaggacaggttcttgttgaggaaaaccaaaagaaaattgtcgaattctgcaagaatgaaggacttgttcttctcgcagatgaggtttaccaggaaaatatatatgttgaagataagccattccactcattcaaaaaaattgcacggtcactgggatacactgatgatgatcttcctttggtatcattccagtcagtttctaaaggctactacggagaatgtggaaaacgaggcggttatatggagataactggattcagtcctgaagtacgggaacaaatttacaaggtggcatcagtaaacctgtgctccaatgtttcggggcaaattcttgctagccttgtaatgaacccaccaaaggctggggatgaatcctttgaatccttcatgtcagagaaggatggtatcctttcatcgttggctcggcgtgcaaaggctttggaagaagcattcaacagtttagaaggaattacatgcaacaaagccgaaggtgcaatgtatctgttcccacgccttcatttaccccagaaggcaattggagcagcccaagcagtcggcactgcgccagatgcatactacgcaaaacgcctactggaagccactggaatcgtcgtcgtccccggttctgggtttggacaggtccctggaacgtggcacttcaggtgcacgatactgccgcaggaggacaagatacctgcgatagtatccaggctcaaggagttccacgagaagttcatggatgaattccgtgattga

SEQ ID NO: 146051 - protein, 516 aa, Zea mays
MAAAMVRTMSTTAAGTPPVSVATINPKLVWVALICDRIAGRLKVSISVLKCEYAVRGEIVTHAQNLQQELQKNPESLPFDEILYCNIGNPQSLGQQPVTYFREVLSLCDHPALLDKSETHALYSSDAIERAWQILEKIPGRATGAYSHSQGIKGLRDEIAAGIAARDGFHASGDNIFLTDGASPAVHMMMQLLISSESDGILCPIPQYPLYSASIALHGGSLVPYFLNEETGWGLDVDELKKQLEEARSKGITVRALVVINPGNPTGQVLVEENQKKIVEFCKNEGLVLLADEVYQENIYVEDKPFHSFKKIARSLGYTDDDLPLVSFQSVSKGYYGECGKRGGYMEITGFSPEVREQIYKVASVNLCSNVSGQILASLVMNPPKAGDESFESFMSEKDGILSSLARRAKALEEAFNSLEGITCNKAEGAMYLFPRLHLPQKAIGAAQAVGTAPDAYYAKRLLEATGIVVVPGSGFGQVPGTWHFRCTILPQEDKIPAIVSRLKEFHEKFMDEFRD

SEQ ID NO: 146052 - DNA, 1191 bp, Cystobacter fuscus
  CDS (1)..(1191): transl_table=11
atgaatcttgcgaaccggctcaaggtcatcaaaccgtcccccacgctcgccctcaacacgaaggccaaggagctggcggcccagggtgtggacgtggtgagcttcgccgcgggcgagcccgacttcgacacgcccgacttcatcaagcaggcggcgatcgaggccctgaacaagggcttcaccaagtacaccgcctgcgcgggcatcccggagctgcgcgaggccatctgcgccaagctccagcgcgacaaccacctcacctacaagccggatcaggtgctggtgtcggtgggcgccaagcactcgctctacaacatcttccaggcgctcttgaacgagggcgacgaggtcatcatcctgtcgccctactgggtgagctacccggagatggtgcagctggccggcggcaagcccgtcatcgtgcacacccgggaggaggacggcttcgcgccggatcccgatgccatccgcaaggcgctctcgccgcgcaccaaggcgctcatcatcaacagcccgagcaatccctccggcgtggtgttctcgcgcgacacgctcgcgaagatcgccgacgcggtgcgcgggcatgagtgcctgctggtgagcgacgacatctacgagaagctgctctacacgggcgagttcgccaacatcggcaacgtggcgccggatctgctgccgcgcctggtcgtcgtcaacggcatgagcaaggccttctccatgacgggctggcgcctgggctacacggcggggcccaagtggctcatcgccggcatgcagatggtccaggatcagtccacgtccaacgcctcgtccttctcgcagaaggccgcggtggcggcgctcaaggggcccgactccatcttcgagcccatggtgaaggaatatcgggcgcggcgggacatggtggtggagctgctcaactcgttcgacggcgtgcgctgtcgcacgcccgagggcgccttctacgtgctgcccaacatctcgggcctgtacgggcgctcgtacaagggcacgccgctgcagggctcgatccaggtgtcggagatcctcctcaacgacttccggatcgccgcggtgccgggcgcgcccttcggcgtggacgagaacatccgcctgagcttcgccacctcgcgcgagcagctgcaaaagggcctggagcgcttccgggagttcaccgcctccgtgcgctga

SEQ ID NO: 146053 - protein, 396 aa, Cystobacter fuscus
MNLANRLKVIKPSPTLALNTKAKELAAQGVDVVSFAAGEPDFDTPDFIKQAAIEALNKGFTKYTACAGIPELREAICAKLQRDNHLTYKPDQVLVSVGAKHSLYNIFQALLNEGDEVIILSPYWVSYPEMVQLAGGKPVIVHTREEDGFAPDPDAIRKALSPRTKALIINSPSNPSGVVFSRDTLAKIADAVRGHECLLVSDDIYEKLLYTGEFANIGNVAPDLLPRLVVVNGMSKAFSMTGWRLGYTAGPKWLIAGMQMVQDQSTSNASSFSQKAAVAALKGPDSIFEPMVKEYRARRDMVVELLNSFDGVRCRTPEGAFYVLPNISGLYGRSYKGTPLQGSIQVSEILLNDFRIAAVPGAPFGVDENIRLSFATSREQLQKGLERFREFTASVR

SEQ ID NO: 146054 - DNA, 1446 bp, Capsicum annuum
  CDS (1)..(1446)
atggattccatcactattgataccattaatcccaaggttttgaaatgtgagtatgctgttcgtggagaaattgttacaattgctcagaaattgcagcaagacctcaaggacaatccaggttctcatccctttgatgagatcttatactgcaatattggaaatcctcaatcactggcccagcagcctatcactttctttagagaggtccttgcattatgtgaccatccatccattttggacaaaagtgaaacccaaggtctgttcagtgcggatgccatagaacgagctttccagatccttgatcaaattcctgggagagcaactggtgcatacagccacagtcagggtataaaaggattacgtgacacaatcgcttctggtattgaagctcgtgatggcttccctgctgatccaaatgatcttttcttgactgatggtgctagcccagcggttcacatgatgatgcagctactcatcaggtcacagaatgatggaattctctgtcccattccccagtatcctctttactctgcttcaatcgccctccatggtggaactcttgttccttattatcttgatgaacaaacaggatgggggcttgagatatcagagctagagcatcagttaaacactgcaaaatccaacggtattgacgttagggctttggttgtgatcaatccgggcaacccaactgggcaggttcttggtgaggccaaccaacgggaaattgtagaattctgcaagaaggaaggcctcgtccttctggctgatgaggtctatcaagaaaatgtttatgtgcctgacaagaaattccactcatttaagaaaattacccgctctatgggatacggggaaaaggatatatctttagtgtctttccagtctgtgtcaaaagggttttacggagagtgtggaaaacgaggaggttacatggagatcactggttttagccctgaagtgagggaacaaatatacaaattggcttctgtcaatctgtgttccaatatctctgggcagatacttgcaagcctcgtcatgagtcccccaaaggtaggagatgaatcatatgagtctttttctgccgagaaagaagcagtactctcatccttggcgagacgtgcacaggcgctacaagatgcactgaatagtttggaaggagtgacatgcaatagagcagaaggggctatgtatctctttccgcgtattaacttacccgacaaagcaataaaagcagcagaagtagctaaaactgcaccagacgctttctatgctaaacttcttcttaatgccacaggaatcgttgttgttccaggctctggattccgccaggttcctggaacctggcattttaggtgcacaatattaccacaagaagagaagataccagctatcgtatctcgtcttacagaattccataaaaagttcatggatgaattctgcggctaa

SEQ ID NO: 146055 - protein, 481 aa, Capsicum annuum
MDSITIDTINPKVLKCEYAVRGEIVTIAQKLQQDLKDNPGSHPFDEILYCNIGNPQSLAQQPITFFREVLALCDHPSILDKSETQGLFSADAIERAFQILDQIPGRATGAYSHSQGIKGLRDTIASGIEARDGFPADPNDLFLTDGASPAVHMMMQLLIRSQNDGILCPIPQYPLYSASIALHGGTLVPYYLDEQTGWGLEISELEHQLNTAKSNGIDVRALVVINPGNPTGQVLGEANQREIVEFCKKEGLVLLADEVYQENVYVPDKKFHSFKKITRSMGYGEKDISLVSFQSVSKGFYGECGKRGGYMEITGFSPEVREQIYKLASVNLCSNISGQILASLVMSPPKVGDESYESFSAEKEAVLSSLARRAQALQDALNSLEGVTCNRAEGAMYLFPRINLPDKAIKAAEVAKTAPDAFYAKLLLNATGIVVVPGSGFRQVPGTWHFRCTILPQEEKIPAIVSRLTEFHKKFMDEFCG

SEQ ID NO: 146056 - DNA, 1455 bp, Oryza sativa subsp
  CDS (1)..(1455)
atgttcggcggcggcggcggcgggaggaagccgctggactacgaggagctgaacgagaacgtgaagaaggtgcagtacgcggtgcggggggagctgtacctgcgcgcctccgagctccagaaggagggcaagaagatcatcttcaccaacgtcggcaacccacacgcgctcggccagaagccgctcaccttcccccgccaggttgtggcgctgtgccaggcccccttcctgctcgatgatcccaacgtcggccttatcttccccgccgacgccatcgcgcgggccaagcactacctcgccatggcacccggtggactaggtgcttacagtgattcccgaggtatccctggtattaggaaggaagtcgccgagttcatcgagaggcgtgatggttatccaagtgatccagaacttatttacctcacagatggtgccagcaaaggtgtgatgcaaatgctgaataccattatcagaaatgagagagatgggattctggttcctgttccacaatacccgctttattctgctgccatttccccctttggtggttctctcgtgccatactacttagaagaagaggctaactggggacttgacttcgtcaatctccgacagactgtggcgtcagcgcggtcaaagggaatcactgttcgagcaatggtgattatcaacccaggaaaccctactggccaatgccttagtgaaggaaacataaaggaacttctcaaattctgcttccatgagaacttagttctgcttgcagatgaagtctatcaacagaacatttatcaagatgagcgcccatttataagtgctagaaaggttctgtttgacatgggtcctcctatgagcagggaagttcagctggtttctttccatactgtgtcaaaaggatattggggggagtgtggacaacgtggagggtattttgaaatgacaaatcttcctcccaagacagtagacgagatctacaaggttgcatcaatcgcactcagtccaaatgttcctgggcagatctttatgggtttaatggttaaccctcctaagcctggagatatctcttatctgaagttttctgctgaaagcaagtctatcctcgagtctttgaggaggagagcacgcctgatgacagatggtttcaatagttgccgaaatgttgtctgcaatttcacagaaggagctatgtactctttcccccaaatacgcttaccaccaaaagctatagatgcagccaaaagggctggcaaagcggccgatgttttctactgcctcaagcttcttgaagcaactggaatatccactgttccagggtcaggtttcggacaaaaagaaggggtgttccacctgaggacgaccatcctgccagctgaggaggacatgcctgccatcatgaccagcttcaagaagttcaacgacactttcatggatcagtacgatggctactccaggatgtga

SEQ ID NO: 146057 - protein, 484 aa, Oryza sativa subsp
MFGGGGGGRKPLDYEELNENVKKVQYAVRGELYLRASELQKEGKKIIFTNVGNPHALGQKPLTFPRQVVALCQAPFLLDDPNVGLIFPADAIARAKHYLAMAPGGLGAYSDSRGIPGIRKEVAEFIERRDGYPSDPELIYLTDGASKGVMQMLNTIIRNERDGILVPVPQYPLYSAAISPFGGSLVPYYLEEEANWGLDFVNLRQTVASARSKGITVRAMVIINPGNPTGQCLSEGNIKELLKFCFHENLVLLADEVYQQNIYQDERPFISARKVLFDMGPPMSREVQLVSFHTVSKGYWGECGQRGGYFEMTNLPPKTVDEIYKVASIALSPNVPGQIFMGLMVNPPKPGDISYLKFSAESKSILESLRRRARLMTDGFNSCRNVVCNFTEGAMYSFPQIRLPPKAIDAAKRAGKAADVFYCLKLLEATGISTVPGSGFGQKEGVFHLRTTILPAEEDMPAIMTSFKKFNDTFMDQYDGYSRM

SEQ ID NO: 146058 - DNA, 1278 bp, Xylella fastidiosa
  CDS (1)..(1278): transl_table=11
gtgatgtctaatagcccgcaaacgccgcttgttacgcgccagcgcctgtccgaagtccgctatgagatccgaggggagttggcgcgccgtgcgcgtgagcttgaggcggagggacgcaagcttatcaagctcaacatcggtaatccaggtgcgttcggttttcgggcgccagagcatctgcaacgtgctattgccgatgatatgggacgtaccgatccttatacgcatcagcagggtttgccaatcgcacgtgaggcgattgctgctgcttatgcgcgacgtcactatccagatgttgatgcagatcgggtctttgtggggaatggggtttctgagttaatcgatttgtcgttgcgggcgttgcttaatccaggcgatgaggtgttggttccttcaccggattatccgctgtggtcggcggcgacgattctcaacgatggtcggccggtgtattaccgttgtgcgccggagaacggtttccagccagatgcagttgagatcgaaacgctggtgtcttcacggacacgtgcgattgtgttgattaatccgaataatcccagtggtgccaattattcgcaggagttattggagcggattgtggcaatctcagtgaaacatcatctgctgttgttggttgatgagatttacgatcagattttgtatgacggtgcggtgtttgttccagtggctcctttggcggggacgcatccatgtatcactttcagtgggctgagtaaggtgcatcgtgcgtgcggttggcgtgtgggttgggcgttgctgtccgggagtagcattcaagttgataatctgcgcaatgcgatggatttgctgggtgcgttgcgtttgtgtgcgaatgtcccagggcaatatgcgattgatgcggcggtcaatgggccagatacgatcactccgttatgttcgcctggtggtcctttgtacgagacgcgccgtgcggtgattgatgcatgcgcggcgagtgagcatttgtcgttggtggtgcctgctggggcattatacgcgttcccatcggtcgtgggaccagcggcgcggcactttgatgattatgcttttgcgctggagttgatgaatgaggagggagtgctggtggtgcctggatcaagttttaatgtgccatatcgggatcacttccgcgtgacgttgcttcctgatgctgggttgatacgtgaagtgttttctcgtattgaccgggcattgtcgcgccgtgctgaggtggctgagaaggtggtgccgctcaagtcgcgtagcgccgccgcttga

SEQ ID NO: 146059 - protein, 425 aa, Xylella fastidiosa
MMSNSPQTPLVTRQRLSEVRYEIRGELARRARELEAEGRKLIKLNIGNPGAFGFRAPEHLQRAIADDMGRTDPYTHQQGLPIAREAIAAAYARRHYPDVDADRVFVGNGVSELIDLSLRALLNPGDEVLVPSPDYPLWSAATILNDGRPVYYRCAPENGFQPDAVEIETLVSSRTRAIVLINPNNPSGANYSQELLERIVAISVKHHLLLLVDEIYDQILYDGAVFVPVAPLAGTHPCITFSGLSKVHRACGWRVGWALLSGSSIQVDNLRNAMDLLGALRLCANVPGQYAIDAAVNGPDTITPLCSPGGPLYETRRAVIDACAASEHLSLVVPAGALYAFPSVVGPAARHFDDYAFALELMNEEGVLVVPGSSFNVPYRDHFRVTLLPDAGLIREVFSRIDRALSRRAEVAEKVVPLKSRSAAA

SEQ ID NO: 146060 - DNA, 1311 bp, Photorhabdus temperata
  CDS (1)..(1311): transl_table=11
atgcatcttcaaaacacctggagggaagagtacattaaatgtcagacgctatatgccaggcaccccctttttaccaagattaaggtaagactctctatgctagcagttaaaaaatccagcaaattggataatgtttgttacgacatccgcggccccgtactcaaggaggctaaacgccttgaagaagaaggcaacaaagtcctcaaattaaatatcggtaatccagccccttttggttttgaagcacccgatgaaatcctggtagatgttatccgcaacttaccaacagcacagggttattcagattcaaaaggtctgtattctgcacgtaaagcgatcatgcaacattatcaagcccggaatatgctggatgtgagtgttgaagatatttatatcggcaatggtgtttctgaattaatcgttcaggcaatgcaagcattactgaataccggtgatgaaatgctggttcctgcccccgattatcctctctggaccgctgcggtttcactttccagcggtaaagccgtacattatatgtgtgatgaagggtcggattggtttcctgacttagatgatatccgtaacaaaattactcctcgcacgcgtgggattgtgattattaaccccaataatccaacgggtgctgtatatagcaaggcgctgttattggaaattgttgaaatagcccgtcagcataatttgattatttttgctgatgagatttacgacaaaatcttatatgacgatgcagagcatcattccattgccgcacttgcccctgacctgttaacggtaacatttaacggattatctaaaacatatcgggttgccggttttcgtcagggctggatggtattaaacggtccgaagaagcacgccaagagctatattgaaggtttggagatgctggcatcaatgcgtttatgcgccaatgtgccaatgcaacacgctattcaaaccgcgttaggcggttaccagagtatcagtgaattcattttacctggtggtcgtttgtatgaacaacgtaaccgcgcatgggaattaattaatcaaatccctggcgtttcctgtgtgaaacctaagggagctttatatatgttcccgaaaattgatgcgaagcgttttaacgttcatgatgaccagaagatggtgcttgatctcttattacaggagaaggtcctgctcgtgcagggaactgcatttaactggccggaacctgatcatttccgcatcgtaacactgccaaggcttgatgaactggagatggctattcagaaattcgcccgatttattggcaaatatcatcagtaa

SEQ ID NO: 146061 - protein, 436 aa, Photorhabdus temperata
MHLQNTWREEYIKCQTLYARHPLFTKIKVRLSMLAVKKSSKLDNVCYDIRGPVLKEAKRLEEEGNKVLKLNIGNPAPFGFEAPDEILVDVIRNLPTAQGYSDSKGLYSARKAIMQHYQARNMLDVSVEDIYIGNGVSELIVQAMQALLNTGDEMLVPAPDYPLWTAAVSLSSGKAVHYMCDEGSDWFPDLDDIRNKITPRTRGIVIINPNNPTGAVYSKALLLEIVEIARQHNLIIFADEIYDKILYDDAEHHSIAALAPDLLTVTFNGLSKTYRVAGFRQGWMVLNGPKKHAKSYIEGLEMLASMRLCANVPMQHAIQTALGGYQSISEFILPGGRLYEQRNRAWELINQIPGVSCVKPKGALYMFPKIDAKRFNVHDDQKMVLDLLLQEKVLLVQGTAFNWPEPDHFRIVTLPRLDELEMAIQKFARFIGKYHQ

SEQ ID NO: 146062 - DNA, 1446 bp, Arabidopsis thaliana
  CDS (1)..(1446)
atgtctctcaaggcgttagactacgagtccttgaatgaaaacgtgaagaattgtcagtatgcagtcagaggtgaactttatcttcgtgcttctgagcttcagaaagaatgcaaaaagattattttcacaaatgttggaaaccctcatgctttaggacagaaacctctgacttttcctcgtcaggtggtttctttatgccaagcaccatttctgttagatgatccaaatgttggtatgatattcccagcagatgctattgcaagagctaagcattatctttccttgacttctggtggtcttggtgcttacagtgactcaagaggtcttccgggagttcggaaagaggtcgctgatttcattgaacggcgtgatggatatccaagcgatccagaactcatatttctaactgatggagcgagcaaaggtgtgatgcaaatcttgaattgtgtcatacgcggtcagaaagacggaattctggttccagttccacagtatccactctactcggctactatatctctgttaggtggtactcttgttccttactatcttgaagagtctgaaaactggggacttgatgttaacaaccttcgccaatctgttgctcaagctcgctctcaaggaataacagtaagggcaatggtgattattaaccccggaaacccaactggccagtgtcttagcgaagctaacataagagagatactacggttctgttgtgatgagagattagttcttctcggagacgaagtgtatcagcaaaatatataccaagatgaacgtccctttatcagttccaagaaggttttgatggatatgggagcaccgatcagcaaggaagttcagctcatatctttccacaccgtttccaaaggatactggggcgaatgtgggcaacggggaggttactttgagatgacaaatatccctcccaggaccgttgaggagatatacaaggtggcctctatagctctcagccccaacgtctctgcgcagatatttatgggtttaatggttagcccaccaaagcctggagacatttcatatgaccaattcgttcgtgagagcaagggaatactagaatcactgagaagaagagcaaggatgatgactgatggattcaacagctgcaaaaacgtcgtctgtaatttcacagaaggtgctatgtattcattccctcaaataaagttgccgtcgaaagcaatccaagcagcaaaacaagccggaaaagtccctgacgttttctactgccttaaactcttagaagccacaggaatctccacagttccaggctctggatttggacaaaaagaaggggtgtttcatttaaggacaacaattctgccagcagaagaagaaatgccagagattatggacagtttcaaaaagttcaatgatgagtttatgtctcagtacgctgataactttggttactccagaatgtga

SEQ ID NO: 146063 - protein, 481 aa, Arabidopsis thaliana
MSLKALDYESLNENVKNCQYAVRGELYLRASELQKECKKIIFTNVGNPHALGQKPLTFPRQVVSLCQAPFLLDDPNVGMIFPADAIARAKHYLSLTSGGLGAYSDSRGLPGVRKEVADFIERRDGYPSDPELIFLTDGASKGVMQILNCVIRGQKDGILVPVPQYPLYSATISLLGGTLVPYYLEESENWGLDVNNLRQSVAQARSQGITVRAMVIINPGNPTGQCLSEANIREILRFCCDERLVLLGDEVYQQNIYQDERPFISSKKVLMDMGAPISKEVQLISFHTVSKGYWGECGQRGGYFEMTNIPPRTVEEIYKVASIALSPNVSAQIFMGLMVSPPKPGDISYDQFVRESKGILESLRRRARMMTDGFNSCKNVVCNFTEGAMYSFPQIKLPSKAIQAAKQAGKVPDVFYCLKLLEATGISTVPGSGFGQKEGVFHLRTTILPAEEEMPEIMDSFKKFNDEFMSQYADNFGYSRM

SEQ ID NO: 146064 - DNA, 1428 bp, Arabidopsis thaliana
  CDS (1)..(1428)
  misc_feature (1321)..(1321): s is g or c
atggcttctcagagttcagtcgccgtcatttcctccgccgccgccagaggtgaatcattcccagattcaaagaaaccaatcgggtcagttcggttccaacaacccctccgtctctccttctcgtactgtaagtcagggaatatgtcatctagaatctgcgctatggccaaaccaaatgatgctgagactctttcatcatcagtagatatgtcacttagcccgcgagttcagtccttaaaaccttccaagactatggttataaccgatcttgcagccactcttgttcaatccggtgttccggttattagactagctgcgggagaacccgatttcgacactcccaaagtcgtagctgaggctgggatcaacgcgattcgagaaggttttactaggtatacgttaaatgcaggtattacagaactcagagaagcaatatgtcgaaagctaaaagaggagaatggattgtcttatgcgcctgatcagatcttggttagtaatggagctaaacaaagtctcttacaagcagtgcttgcagtttgttctcctggagatgaagttataattcctgcaccgtattgggtgagttacacagaacaggcgagattggctgatgcaacgcccgtggttattcctaccaagatttctaacaattttttgttggatccaaaggatcttgagtctaaattgactgaaaaatctagacttcttattctctgctctccttccaaccctactggatctgtttaccccaagagtttgctcgaagagattgcacggatcattgctaagcatccaagacttctggtgctttcggatgaaatatatgaacacattatttatgcacctgcaacacacacaagctttgcttctttgcctgacatgtatgaaagaactttgacagtaaacggtttctcaaaggctttcgcaatgacgggttggaggcttggatatcttgctggtcctaaacatattgtggcagcttgcagtaaattacaaggccaggttagttcaggagctagtagcattgctcagaaagcaggtgttgctgcgcttgggttaggcaaagctggaggagaaacggttgcagagatggttaaagcttatagagaaagacgagatttcttggttaaaagcttaggtgatatcaaaggtgttaagatctctgaacctcagggagctttttatctctttattgacttcagtgcttactatggatcagaagctgaaggttttggtttgatcaatgattcgtcgtctcttgcactatactttcttgacaagtttcaggttgcaatggttcctggtgatgcttttggagatsatagttgtatccgaatatcttatgccacatctctcgacgttcttcaagcagctgttgagaagatcaggaaagcccttgagccactccgtgccactgtctccgtttaa

SEQ ID NO: 146065 - protein, 475 aa, Arabidopsis thaliana
  misc_feature (441)..(441): The Xaa at location 441 stands for Asp, or His.
MASQSSVAVISSAAARGESFPDSKKPIGSVRFQQPLRLSFSYCKSGNMSSRICAMAKPNDAETLSSSVDMSLSPRVQSLKPSKTMVITDLAATLVQSGVPVIRLAAGEPDFDTPKVVAEAGINAIREGFTRYTLNAGITELREAICRKLKEENGLSYAPDQILVSNGAKQSLLQAVLAVCSPGDEVIIPAPYWVSYTEQARLADATPVVIPTKISNNFLLDPKDLESKLTEKSRLLILCSPSNPTGSVYPKSLLEEIARIIAKHPRLLVLSDEIYEHIIYAPATHTSFASLPDMYERTLTVNGFSKAFAMTGWRLGYLAGPKHIVAACSKLQGQVSSGASSIAQKAGVAALGLGKAGGETVAEMVKAYRERRDFLVKSLGDIKGVKISEPQGAFYLFIDFSAYYGSEAEGFGLINDSSSLALYFLDKFQVAMVPGDAFGDXSCIRISYATSLDVLQAAVEKIRKALEPLRATVSV

SEQ ID NO: 146066 - DNA, 1260 bp, Corynebacterium glutamicum
  CDS (1)..(1260): transl_table=11
gtgggcgcggatcaggcagcgcgtcccactcggcgaacaactcgccgcatcttcgatcagtcggagaagatgaaggacgtgctgtacgagatccgtggcccggtggccgcggaggcggaacgcatggagcttgatgggcataacatcttaaagctcaacacgggaaatccagccgtgttcggattcgatgcccccgacgtgattatgcgtgacatgatcgccaaccttccaacttcccaagggtattccacctccaaaggcattattccggcccggcgagcagtggtcacccgctacgaagttgtgcccggattcccccacttcgatgttgatgatgtgttcttaggcaacggtgtctcagaactaatcaccatgaccacccaagcactcctcaacgacggcgatgaagttcttatccccgcaccggactacccactgtggactgccgcaacctccctggctggtggtaagcctgtgcactacctctgtgatgaggaagatgactggaacccatccatcgaagacatcaagtccaaaatctcagagaaaaccaaagctattgtggtgatcaaccccaacaaccccacgggagctgtctacccgcgccgggtgttggaacaaatcgtcgagattgcacgcgagcatgacctgctgattttggccgatgaaatctacgaccgcattctctacgatgatgccgagcacatcagcctggcaacccttgcaccagatctcctttgcatcacatacaacggtctatccaaggcataccgcgtcgcaggataccgagctggctggatggtattgactggaccaaagcaatacgcacgtggatttattgagggcctcgaactcctcgcaggcactcgactctgcccaaatgtcccagctcagcacgctattcaggtagctctcggtggacgccagtccatctacgacctcactggcgaacacggccgactcctggaacagcgcaacatggcatggacgaaactcaacgaaatcccaggtgtcagctgtgtgaaaccaatgggagctctatacgcgttccccaagctcgaccccaacgtgtacgaaatccacgacgacacccaactcatgctggatcttctccgtgccgagaaaatcctcatggttcagggcactggcttcaactggccacatcacgatcacttccgagtggtcaccctgccatgggcatcccagttggaaaacgcaattgagcgcctgggtaacttcctgtccacttacaagcagtag

SEQ ID NO: 146067 - protein, 419 aa, Corynebacterium glutamicum
MGADQAARPTRRTTRRIFDQSEKMKDVLYEIRGPVAAEAERMELDGHNILKLNTGNPAVFGFDAPDVIMRDMIANLPTSQGYSTSKGIIPARRAVVTRYEVVPGFPHFDVDDVFLGNGVSELITMTTQALLNDGDEVLIPAPDYPLWTAATSLAGGKPVHYLCDEEDDWNPSIEDIKSKISEKTKAIVVINPNNPTGAVYPRRVLEQIVEIAREHDLLILADEIYDRILYDDAEHISLATLAPDLLCITYNGLSKAYRVAGYRAGWMVLTGPKQYARGFIEGLELLAGTRLCPNVPAQHAIQVALGGRQSIYDLTGEHGRLLEQRNMAWTKLNEIPGVSCVKPMGALYAFPKLDPNVYEIHDDTQLMLDLLRAEKILMVQGTGFNWPHHDHFRVVTLPWASQLENAIERLGNFLSTYKQ

SEQ ID NO: 146068 - DNA, 1167 bp, Phormidium lapideum
  CDS (1)..(1167): transl_table=11
atgaaactggcagcacgggtagaaagcgtatcgccgtcgatgacgctgattattgacgcaaaggccaaagccatgaaggcagagggtattgacgtatgcagctttagcgccggagagccagatttcaacacgcccaagcatattgtagaagccgccaaagccgcgctagagcagggcaaaacccgctacggcccggccgctggggaacccagattgcgagaggcgatcgcccagaagctccagcgcgacaacgggctatgttacggcgcagacaacattctggtcaccaacggcggtaagcagtccatctttaacctgatgctggcaatgatcgagccaggcgacgaggtgataatccctgcgcccttttgggtcagctatcccgaaatggtgaagctggcggagggcacgcccgtgattctgccaactacggtcgaaacccagttcaaagtctcgccagagcagatccggcaagccattacgcccaaaaccaagctgctcgttttcaacacgccctccaacccgacgggcatggtctacacgccagacgaggtgcgggcgatcgcccaggtggccgtcgaggcgggcctctgggtgctgtcggatgagatttacgaaaaaattctttacgacgacgctcagcatctcagcatcggcgcagccagcccagaagcctacgaacgctctgtcgtgtgcagcgggtttgccaaaacctacgctatgacgggctggcgcgttggcttcttggcagggccagtgcctctggtaaaagcggcaacaaaaatccagggccacagcacctccaatgtctgcacctttgcccaatatggggcgatcgccgcctatgaaaattcccaagactgcgtacaggaaatgctagccgcctttgccgagcgccgccgctatatgctggatgccctcaacgccatgccagggctagagtgtcccaaacccgatggcgcattctatatgttccccagcatcgccaaaacgggacggtcttcccttgatttttgcagcgaactgctagatcagcatcaagttgctacagttccgggcgcggcttttggcgcagacgactgcatccggctgtcctatgcgaccgatctagacaccatcaagcgcggcatggagcggctagaaaaattcctacacggaattctatag

SEQ ID NO: 146069 - protein, 388 aa, Phormidium lapideum
MKLAARVESVSPSMTLIIDAKAKAMKAEGIDVCSFSAGEPDFNTPKHIVEAAKAALEQGKTRYGPAAGEPRLREAIAQKLQRDNGLCYGADNILVTNGGKQSIFNLMLAMIEPGDEVIIPAPFWVSYPEMVKLAEGTPVILPTTVETQFKVSPEQIRQAITPKTKLLVFNTPSNPTGMVYTPDEVRAIAQVAVEAGLWVLSDEIYEKILYDDAQHLSIGAASPEAYERSVVCSGFAKTYAMTGWRVGFLAGPVPLVKAATKIQGHSTSNVCTFAQYGAIAAYENSQDCVQEMLAAFAERRRYMLDALNAMPGLECPKPDGAFYMFPSIAKTGRSSLDFCSELLDQHQVATVPGAAFGADDCIRLSYATDLDTIKRGMERLEKFLHGIL

SEQ ID NO: 146070 - DNA, 1707 bp, Drosophila melanogaster
  CDS (1)..(1707)
atgagtcgaatgctaattaaacctgctgccgccacagtttcggccgctttgcagcagcaccagcgccagcagcaacagtacgttattcgccgctggaaatcgttcctgcacaacaacagcaacaatgccaatcgacgtgcggcgaaatcaacggcaacagcaacggtgacggcggcagcgacgtcgcagcgccatggaacaagcggcgatttcattcaaccgttagacgtccgccgttccttttcaaccagccacaaaatgccgtcgtcgtcgaaagcgctcacactggataacataaatcccaactttattgccatggaatatgccgttcgcggtcctctggtgattcgtgctggggaaatcgagaaggaactggaaaagggtgtcaagaagccattcgaccaggtgatccgtgccaacatcggtgattgccatgcgatgggccagcagcccttgaccttcctgcgacagctgttggcgctgaccttcgagaaacgtctgctggattcacccgattatcccgaggacgtcaagaagcgcgcctgtgccattttgaacggctgccagggtcaatcggtgggctcgtacaccgactccgccggtctggaggtggtgcgtcgccaggttgctcagtacatcgagaaaagggatggcggcatcgcctccaattggcaggacatctatctaaccggcggtgcctctcccggcatcaagagcattctctccatgatcaacgccgaggtgggatgcaaggcgccaggtgtcatggtgcccattccgcagtacccactgtactcggccaccatctctgaatatggcatgaccaaggtggattactatctggaggaggagaccggttggagcctggacaggaaggagctgcaacggtcctacgatgaggcgaagaaggtctgcaatccgcgtgccctggtcgtgatcaatccgggcaatcccaccggacaggtactgacccgcgagaacatcgaggagatcattaagttcgcacacgataacaaggtgctggtgctggccgatgaggtgtaccaggacaatgtctacgacaagaactccaagttctggtcgttcaagaaggtggcctacgaaatgggcgacccctatcgtaatctggaaatggtcagtttcctgtccacctcgaagggctatctgggcgagtgcggcattcgcggcggttacatggaggttctcaatcttgatcccaaggtcaaggccatgctgaccaagtcgataacggcggcgctttgcagcaccaccgctggccaggtggccgtgagtgccctggtcaatccaccgcagcccggagagccatcatacgatctgtacaagaaggagcgcgatggcattctggccgctctaaaagaacgggccgagctcgtccacaaggcactgaacagcttcgaaggctacaaggttaaccccgtacagggcgccatgtacgtctttccacagatcgagatcccgcccaaggcgatcgaggcggccaaggccaagggcatggcccccgatgttttctacgcatttgagctgctcgagacgagcggcatttgcattgttcctggcagtggatttggtcagaagcccggtacgtggcatttccgaagcacgatcctcccgcaaacggacaagctgaagctgatgatggagaagttccgcgtgttccacgccgagttcatgaagaagtacaagtag

SEQ ID NO: 146071 - protein, 568 aa, Drosophila melanogaster
MSRMLIKPAAATVSAALQQHQRQQQQYVIRRWKSFLHNNSNNANRRAAKSTATATVTAAATSQRHGTSGDFIQPLDVRRSFSTSHKMPSSSKALTLDNINPNFIAMEYAVRGPLVIRAGEIEKELEKGVKKPFDQVIRANIGDCHAMGQQPLTFLRQLLALTFEKRLLDSPDYPEDVKKRACAILNGCQGQSVGSYTDSAGLEVVRRQVAQYIEKRDGGIASNWQDIYLTGGASPGIKSILSMINAEVGCKAPGVMVPIPQYPLYSATISEYGMTKVDYYLEEETGWSLDRKELQRSYDEAKKVCNPRALVVINPGNPTGQVLTRENIEEIIKFAHDNKVLVLADEVYQDNVYDKNSKFWSFKKVAYEMGDPYRNLEMVSFLSTSKGYLGECGIRGGYMEVLNLDPKVKAMLTKSITAALCSTTAGQVAVSALVNPPQPGEPSYDLYKKERDGILAALKERAELVHKALNSFEGYKVNPVQGAMYVFPQIEIPPKAIEAAKAKGMAPDVFYAFELLETSGICIVPGSGFGQKPGTWHFRSTILPQTDKLKLMMEKFRVFHAEFMKKYK

SEQ ID NO: 146072 - DNA, 1278 bp, Xylella fastidiosa
  CDS (1)..(1278): transl_table=11
atgatgtctaatagcccgcaaacgccgcttgccacgcgccagcgattgtccgaagttcgctatgagatccgaggggagttggcgcgccgtgcgcgtgagcttgaggcggagggacgcaagcttatcaagctcaacatcggtaatccaggtgcgttcggtttccgggcgccagagcatctgcaacgtgccatcgccgatgatatgggacgtaccgatccttatacgcatcagcagggtttgccaatcgcacgtgaggcgattgctgctgcttatgtacgacgtcactatccagatgctgatgcagatcgggtctttgtggggaatggggtttctgagttaattgatttgtcgttgcgggcgttgcttaatccaggcgatgaggtgttggttccttcaccggattatccgctgtggtcggcggcgacgattctcaacgatggtcggcccgtgtattaccgttgtgcgccggagaacggtttccagcccgatgcagtcgagatcgaaacgctggtgtcttcacggacacgtgcgattgtgttgattaatccgaataatcccagtggtgccaattattcgcaggagttattggagcggattgtggcaatcgcagtgaaacatcatctgctgttgttggttgatgagatttacgatcagattttgtatgacggtgcggtgtttgttccagtggctcctttggcggggacgcatccatgtatcactttcagtgggctgagtaaggtgcatcgtgcgtgcggttggcgtgtgggttgggcgttgctgtccgggagtagcattcaaattgataatctgcgcaatgcgatggatttgctgggtgcgttgcgtttgtgtgcgaatgtcccagggcaatatgcgattgatgcggcggtcaatgggccagatacgatcactccgttatgttcgcctggtggtcctttgtacgagacgcgccgtgcggtgattgaggcctgcgtggtgagtgagcatttgtcgttggtggtgcctgctggggcgttatacgcgttcccatcggtcgtgggaccggcggcgcggcactttgatgattatgcttttgcgctggagttgatgaatgacgagggggtgctggtggtgcctggatcaagttttaatgtgccatatcgggatcacttccgcgtgacgttgcttcctgatgctgcgttgatacgtgaagtgttttctcgtattgaccgggccttgtcgcgccgtgctgaggtggctgagaaggtggtgccgctcaagtcgcgtagcgccgccgcttga

SEQ ID NO: 146073 - protein, 425 aa, Xylella fastidiosa
MMSNSPQTPLATRQRLSEVRYEIRGELARRARELEAEGRKLIKLNIGNPGAFGFRAPEHLQRAIADDMGRTDPYTHQQGLPIAREAIAAAYVRRHYPDADADRVFVGNGVSELIDLSLRALLNPGDEVLVPSPDYPLWSAATILNDGRPVYYRCAPENGFQPDAVEIETLVSSRTRAIVLINPNNPSGANYSQELLERIVAIAVKHHLLLLVDEIYDQILYDGAVFVPVAPLAGTHPCITFSGLSKVHRACGWRVGWALLSGSSIQIDNLRNAMDLLGALRLCANVPGQYAIDAAVNGPDTITPLCSPGGPLYETRRAVIEACVVSEHLSLVVPAGALYAFPSVVGPAARHFDDYAFALELMNDEGVLVVPGSSFNVPYRDHFRVTLLPDAALIREVFSRIDRALSRRAEVAEKVVPLKSRSAAA

SEQ ID NO: 146074 - DNA, 1290 bp, Methylobacillus flagellatum
  CDS (1)..(1290): transl_table=11
atgcaagaaatttccaagtccagcaagctcagcaacgtatgctacgacattcgtggcccggtgctggaccgagcgcggcagatggaggaggacgggcaccgcatcatcaagctcaatatcggcaatcctgcgccttttggttttgccgcgcccgaggaaatcctgcaggacgtgattcgcaacatggattccgcttccggttatacggattccaagggtctgttcgccgcacgtaaggcgattatgcattacacccagcagaagaatatccagggtgtgaccatcgatgacatcatcatcggcaatggcgtttccgagctgatcgtcatggccatgcaggcattgctcaacaacggtgaccaggtactggtgccgatgcctgattatccgttgtggactgcggcagtgaacctggcgggcgggacggcgcggcactatgtctgcgacgagcagactggctggctacccgacctccgggatatcgagaacaaaatcacggcgaatacgcgcggcatcgtcattatcaacccgaacaacccgacgggtgccttgtatccgcgggaaacgctggaaggcatcatcgagatcgcacgccatcacggcctggtgattttcgcggacgaaatctacgacaaggtattgttcgacggcaatacgcacacctcgattgcttcattggctgatgatgtgctgttcgtgaccttcaacggtctgtccaagaattatcgtacctgcggttaccgcgccggttggctggtgatctcgggagagaagcggcatgcgggagactacatcgaggggttgaacatgctggcttcgatgcgcctgtcgcgccaatgtgcccgggcagttggcgatccagaccgcgctgggcgctaccagagcatagacgaccttgtggcgccgaccggccggttatgcaagcagcgcgaccttgcctacaagatgctgaccgatattcctggtgtaagttgcgtcaagcccaaggctggcctgtacctgtttccgcgccttgatcccaaaatatatcccatccaggatgaccagcaattcatcctcgacctgttgctggaggagaaagtcctgctggtgcagggcacgggcttcaactggcgcgcgccggatcatttccgcgtcgtgttcctgccgaatgtggatgacctcaccgaggcatttacccgaattgcccgcttcctggaaaattaccgcaagcagcacagcaccatcaccatagtggaagcaaagcctcgaaagagggcacaaacaacctcccaaagcgcgtcggcatga

SEQ ID NO: 146075 - protein, 429 aa, Methylobacillus flagellatum
MQEISKSSKLSNVCYDIRGPVLDRARQMEEDGHRIIKLNIGNPAPFGFAAPEEILQDVIRNMDSASGYTDSKGLFAARKAIMHYTQQKNIQGVTIDDIIIGNGVSELIVMAMQALLNNGDQVLVPMPDYPLWTAAVNLAGGTARHYVCDEQTGWLPDLRDIENKITANTRGIVIINPNNPTGALYPRETLEGIIEIARHHGLVIFADEIYDKVLFDGNTHTSIASLADDVLFVTFNGLSKNYRTCGYRAGWLVISGEKRHAGDYIEGLNMLASMRLSRQCARAVGDPDRAGRYQSIDDLVAPTGRLCKQRDLAYKMLTDIPGVSCVKPKAGLYLFPRLDPKIYPIQDDQQFILDLLLEEKVLLVQGTGFNWRAPDHFRVVFLPNVDDLTEAFTRIARFLENYRKQHSTITIVEAKPRKRAQTTSQSASA

SEQ ID NO: 146076 - DNA, 1128 bp, Methanococcus jannaschii
  CDS (1)..(1128): transl_table=11
atgataagcagtagatgcaaaaatataaaaccatcagcaattagggagatatttaacttagctacatctgattgcataaatttaggaataggagagccagattttgacactccaaagcatatcattgaggctgcaaaaagggctttagatgaggggaaaactcactactctccaaacaatggaattccagagcttagagaggagataagcaataagttaaaggatgattacaacttagacgttgataaggacaatattattgttacctgtggagcttcagaggcgttaatgttatctattatgactttgattgacagaggggatgaggttttaattccaaatccatcttttgtgtcttatttttcactaacagagtttgctgagggtaagattaagaatatagatttagatgaaaactttaatattgatttagagaaagttaaagaatcaataactaaaaaaacaaagctaataatatttaactctccatcaaatcctactggaaaagtctatgataaggagaccataaaaggcttggcagagattgctgaggattataatctaattattgtttcagatgaagtctatgataagattatctacgataagaagcattactctccaatgcaatttactgatagatgcatattaattaacggtttctctaaaacctatgccatgactggatggaggattggatatttggctgtttctgatgaactaaataaggagttagatttaatcaacaatatgattaagattcatcagtatagctttgcatgtgctacaacctttgctcaatatggggcattagcagctttaagaggtagtcaaaagtgtgttgaggatatggttagagagtttaaaatgaggagagatttaatctataatggattgaaggatatctttaaagtcaataagccagatggggcattctatatattcccagatgtttctgagtatggagatggggtagaggtagctaagaaattgattgagaataaggttttatgtgttcctggagttgcatttggtgagaatggagctaactatattaggttcagctatgctacaaaatatgaagatatagagaaagctttagggattataaaagagatttttgagtga

SEQ ID NO: 146077 - protein, 375 aa, Methanococcus jannaschii
MISSRCKNIKPSAIREIFNLATSDCINLGIGEPDFDTPKHIIEAAKRALDEGKTHYSPNNGIPELREEISNKLKDDYNLDVDKDNIIVTCGASEALMLSIMTLIDRGDEVLIPNPSFVSYFSLTEFAEGKIKNIDLDENFNIDLEKVKESITKKTKLIIFNSPSNPTGKVYDKETIKGLAEIAEDYNLIIVSDEVYDKIIYDKKHYSPMQFTDRCILINGFSKTYAMTGWRIGYLAVSDELNKELDLINNMIKIHQYSFACATTFAQYGALAALRGSQKCVEDMVREFKMRRDLIYNGLKDIFKVNKPDGAFYIFPDVSEYGDGVEVAKKLIENKVLCVPGVAFGENGANYIRFSYATKYEDIEKALGIIKEIFE

SEQ ID NO: 146078 - DNA, 1203 bp, Rhizobium meliloti
  CDS (1)..(1203): transl_table=11
atggccttccttgccgatgccctttcccgtgtaaagccttccgccaccatcgctgtttcgcagaaagcccgcgagttgaaagcgaaaggccgcgatgtcatcggcctcggcgcaggggagccggacttcgacacgcctgacaacatcaagaaggccgcgatcgacgcgatcgatcgcggcgagacgaagtacacgccggtctccggcattccggaactgcgcgaagccatcgcgaagaaattcaagcgcgagaacaatctcgactacaccgcggcgcagacgatcgtcggcaccggcggaaagcagattctcttcaacgccttcatggcgacgctcaacccgggcgacgaagtggtgattccggcaccgtactgggtctcctatccggaaatggtggcgctgtgcggcggcacacccgtcttcgtcccgaccaggcaggaaaacaatttcaagctcaaggccgaggatctcgaccgcgcgatcacgccgaagaccaagtggttcgtcttcaactcgccgtccaacccctcgggtgcggcctattcgcatgaggagctcaaggcgctcacggacgttctcatgaagcatccgcatgtctgggtcctgacggacgacatgtacgagcacctgacctatggcgacttcaggttcgcgaccccggtcgaagtggagcccggcctctacgagcgcacgctgacgatgaacggcgtctccaaggcctatgcgatgaccggctggcgcatcggctacgcggccgggccgcttcatctcatcaaggcgatggacatgatccagggccagcagacttcgggcgccgcctcgatcgcgcagtgggcggccgtcgaggcgctcaacggtccgcaggacttcatcgggcgcaacaaggagatcttccagggccgccgcgatctcgtcgtctcgatgctgaaccaggccaagggcatttcctgcccgacgccggagggcgccttctacgtctatccgtcctgcgccggcctgatcggcaagaccgcgccttcgggcaaggtgatcgaaacggatgaggatttcgtctccgagcttttggagaccgaaggcgtggctgtggtccacggctcggccttcggcctcggcccgaacttccgcatctcctacgcgacttccgaggcgctgctggaggaggcttgccgccgcatccagcgcttctgcgccgcctgcagataa

SEQ ID NO: 146079 - protein, 400 aa, Rhizobium meliloti
MAFLADALSRVKPSATIAVSQKARELKAKGRDVIGLGAGEPDFDTPDNIKKAAIDAIDRGETKYTPVSGIPELREAIAKKFKRENNLDYTAAQTIVGTGGKQILFNAFMATLNPGDEVVIPAPYWVSYPEMVALCGGTPVFVPTRQENNFKLKAEDLDRAITPKTKWFVFNSPSNPSGAAYSHEELKALTDVLMKHPHVWVLTDDMYEHLTYGDFRFATPVEVEPGLYERTLTMNGVSKAYAMTGWRIGYAAGPLHLIKAMDMIQGQQTSGAASIAQWAAVEALNGPQDFIGRNKEIFQGRRDLVVSMLNQAKGISCPTPEGAFYVYPSCAGLIGKTAPSGKVIETDEDFVSELLETEGVAVVHGSAFGLGPNFRISYATSEALLEEACRRIQRFCAACR

SEQ ID NO: 146080 - DNA, 1182 bp, Bacillus stearothermophilus
  CDS (1)..(1182): transl_table=11
atgaaattggcaaaacgggtggcgtcgctgacgccatcggcgactttggccattacggagaaagcaaaagaactaaaagcggccgggcatgacgtgattggtctcggagctggcgaaccggatttcaacacgccacagcacattcttgatgccgccatcaaggcaatgaacgaaggacatacgaaatatacaccatcgggcggtttgccggcgttaaaggaggaaattataaaaaaattcgcccgcgaccaaggcttggattatgagccggctgaagtgattgtatgcgtcggagcgaagcacgccctttacacgctgttccaagtattgctcgatgaaggcgacgaagtgatcattccgacgccatactgggtgagctatccggaacaagtgaaactggcgggcggtgttccggtttacgtcgaagggcttgaacaaaatcattttaaaattacgccggagcagctgaaacaggcaatcacgccgcggacgaaagcggttatcatcaactcgccgagcaacccgactggcatgatttatacagccgaagagttgaaggcgcttggtgaggtgtgcctagcgcatggtgtattgatcgtgtcagatgaaatttacgaaaaattgacttacggcggggcgaagcatgtgtccatcgctgagttgtcgccggagctgaaggcgcagacagtcatcattaacggcgtgtcaaagtcgcattcgatgacgggctggcgcattggttatgcggcggggccgaaagatattattaaggcaatgacagatttggcgagccacagcacgtccaacccgacgtcaatcgcccaatacgcggccatcgctgcttacagcgggccgcaggagccggtcgaacaaatgcgccaagcgtttgaacaacggctcaatatcatttacgacaagctcgtgcaaattccaggattcacgtgcgttaagccacaaggggcgttttatttgttcccgaacgcccgcgaagcggctgcaatggccggctgccgcacggtcgacgagttcgtcgctgccttgttggaggaagcgaaagtcgcgcttgtgcccggctctgggtttggagcgccggataacgttcgcttgtcatacgcgacatcgctcgatgcactggaaaccgccgtggaacgcatccaccggtttatggaagcgcgcgcttaa

SEQ ID NO: 146081 - protein, 393 aa, Bacillus stearothermophilus
MKLAKRVASLTPSATLAITEKAKELKAAGHDVIGLGAGEPDFNTPQHILDAAIKAMNEGHTKYTPSGGLPALKEEIIKKFARDQGLDYEPAEVIVCVGAKHALYTLFQVLLDEGDEVIIPTPYWVSYPEQVKLAGGVPVYVEGLEQNHFKITPEQLKQAITPRTKAVIINSPSNPTGMIYTAEELKALGEVCLAHGVLIVSDEIYEKLTYGGAKHVSIAELSPELKAQTVIINGVSKSHSMTGWRIGYAAGPKDIIKAMTDLASHSTSNPTSIAQYAAIAAYSGPQEPVEQMRQAFEQRLNIIYDKLVQIPGFTCVKPQGAFYLFPNAREAAAMAGCRTVDEFVAALLEEAKVALVPGSGFGAPDNVRLSYATSLDALETAVERIHRFMEARA

SEQ ID NO: 146082 - DNA, 1290 bp, Mycobacterium bovis
  CDS (1)..(1290): transl_table=11
gtggacaacgatggcaccattgtggacgtgacaacccaccagctgccctggcacaccgccagccatcagcggcagcgcgccttcgctcagtcggccaagctgcaggacgtcctgtacgagatccgcggcccggtgcaccagcacgccgcgcggctcgaagccgaaggtcaccgcatcctcaaactcaacatcggcaacccggcgccgttcggcttcgaagcacccgacgtgatcatgcgcgatatcatccaggcgctgccctacgcgcaggggtactccgactcgcagggcatcctgtcggcccggcgtgcggtggtcacgcgctacgagctggtgcccggatttccccgattcgacgtggacgacgtctacctgggtaacggggtctccgagctgatcacgatgacgctgcaagccctgctggacaacggcgatcaggtgctgattccatcaccggactacccgctgtggacggcgtcgacctcgctggctggcggcactccggtccactacctgtgcgatgagacccaaggctggcagcccgatatcgccgacctggaatccaagatcaccgagcgcaccaaggcgctggtcgtgatcaaccccaacaacccaaccggcgcggtgtacagctgcgaaatcctcacccagatggtcgatctggcccgcaagcatcaactgctgctgttggcggacgaaatctacgacaaaatcctctacgacgacgccaagcacatcagcctggcatcgatcgccccggatatgttgtgcctgaccttcaatgggctgtcgaaggcctaccgcgtcgccggataccgggccggctggctggcgatcaccggacccaaggagcacgccagcagcttcatcgagggcatcggcctgctggccaatatgcggttgtgcccaaatgtcccggcccagcatgccattcaggttgcactgggcggccatcagagcatcgaggacctggtgctgcccggcggccggctgctcgagcagcgcgacatcgcctggaccaagctcaacgagatcccgggggtgtcgtgcgtcaaaccggcgggcgcgctgtatgcgtttccccggctagaccccgaggtctacgacatcgacgacgacgagcaactcgtgctcgatctgctgctgtcggagaagatcctggtcacccagggcaccgggttcaactggcccgcaccggatcatctgcgcctggtgacgctgccatggtcccgcgatctggcggccgccatcgagcggctgggtaacttcctggtcagttaccggcaatag

SEQ ID NO: 146083 - protein, 429 aa, Mycobacterium bovis
MDNDGTIVDVTTHQLPWHTASHQRQRAFAQSAKLQDVLYEIRGPVHQHAARLEAEGHRILKLNIGNPAPFGFEAPDVIMRDIIQALPYAQGYSDSQGILSARRAVVTRYELVPGFPRFDVDDVYLGNGVSELITMTLQALLDNGDQVLIPSPDYPLWTASTSLAGGTPVHYLCDETQGWQPDIADLESKITERTKALVVINPNNPTGAVYSCEILTQMVDLARKHQLLLLADEIYDKILYDDAKHISLASIAPDMLCLTFNGLSKAYRVAGYRAGWLAITGPKEHASSFIEGIGLLANMRLCPNVPAQHAIQVALGGHQSIEDLVLPGGRLLEQRDIAWTKLNEIPGVSCVKPAGALYAFPRLDPEVYDIDDDEQLVLDLLLSEKILVTQGTGFNWPAPDHLRLVTLPWSRDLAAAIERLGNFLVSYRQ

SEQ ID NO: 146084 - DNA, 1203 bp, Rhizobium leguminosarum bv
  CDS (1)..(1203): transl_table=11
atggctttccttgccgatgctctttcccgtgtgaagccttcagccaccatcgccgtctcccagaaagcgcgcgagctgaaagcaaaaggacgtgacgtcattggcctcggcgccggtgagccggatttcgatacgcccgataatatcaagaaggcggccatcgacgcgatcaaccgcggcgaaacgaagtacacgccggtttccggtatcccggaattgcgcaaggcgatcgccgccaagttcaagcgcgagaacggcctcgactattcctgggagcagaccatcgtcggcaccggcggcaagcagatcctcttcaacgccttcatggcaacgctgaaccccggcgacgaagtctccatcccggcgccttactgggtttcctatcctgagatggtggcactgtgcggcggcacccgttttttcgtttctgccacccaggagcataacttcaagcttcaggcggccgatctcgaaaaggcgatcacgccgaagaccaagtggttcatcttcaactcgccgtccaacccgacgggggccgcctatacgcatgacgagctgaaggcgctgacggatgtgctgatgaagaatccgcaggtctgggtgctgaccgacgacatgtacgagcacctgacctatggcgacttcaagttcgtcacgcctgtggaagtcgagccgcagctttacgaccgcacgctgacgatgaacggcgtctccaaggcctatgcgatgaccggctggcgtatcggctatgcggccggcccgatccagctcatcaaggccatggacatgatccagggtcagcagacctcgggtgcgacgtcgatcgcccagtgggcggctgtcgaagcgctgaacggcacgcaggacttcatccctgagaacaagaagatcttcgaaggccgtcgcgatctcgtcgtttcgatgctgaatcaggccaagggtattgtctgcccggtgccggaaggcgccttctatgtctatccctcgtgcaagggtctgattggcaagaccgcgccctccggcaaggtcatcgagacggacgaggatttcgtctccgagctgctggaatcggaaggcgtcgccgttgttcacggttcggccttcggcctcggcccgaacttccgtatctcctatgcgacttcggaagagcagctcgaggaagcctgccgccgcatccagcgcttctgcggcgcctgcaagtaa

SEQ ID NO: 146085 - protein, 400 aa, Rhizobium leguminosarum bv
MAFLADALSRVKPSATIAVSQKARELKAKGRDVIGLGAGEPDFDTPDNIKKAAIDAINRGETKYTPVSGIPELRKAIAAKFKRENGLDYSWEQTIVGTGGKQILFNAFMATLNPGDEVSIPAPYWVSYPEMVALCGGTRFFVSATQEHNFKLQAADLEKAITPKTKWFIFNSPSNPTGAAYTHDELKALTDVLMKNPQVWVLTDDMYEHLTYGDFKFVTPVEVEPQLYDRTLTMNGVSKAYAMTGWRIGYAAGPIQLIKAMDMIQGQQTSGATSIAQWAAVEALNGTQDFIPENKKIFEGRRDLVVSMLNQAKGIVCPVPEGAFYVYPSCKGLIGKTAPSGKVIETDEDFVSELLESEGVAVVHGSAFGLGPNFRISYATSEEQLEEACRRIQRFCGACK

SEQ ID NO: 146086 - DNA, 1206 bp, Rickettsia conorii
  CDS (1)..(1206): transl_table=11
atgtcaattatttctacgaggctaagttctataaaaccgtcgccgacccttgcagtcgttaaaaaaactcttgaacttaaaaaagcgggagttgatattatcacactcggtgccggtgagcctgattttgatacgcctgacaatattaaggaaggagcgattaaagcgattaaagacggctttactaaatatactaacgttgagggtatgcctcttttaaagcaagcaataaaagacaaattcaaacgtgaaaataatatagattacgaacttgatgaaataatagtaagcaccggcggtaaacaagttatatataatttgtttatggcatctttagaccaaggggatgaggtaattattccagcaccctattgggtttcatatcctgatatggttgcacttagcacaggaacacctgtttttgtaaattgcggaattgaaaataactttaaattaagtgcagaagctttagaacgttcaattacggataaaactaagtggcttattattaactcacctagtaatccaacaggtgcaagctataattttgaagaactagaaaatattgctaaagttttaagaaaatattcacatgtaaacgtaatgtccgatgatatttacgagcatattacttttgatgattttaaattttatacattagcccaaatagcacctgatttaaaaaagagaatatttaccgtaaacggagtatctaaagcttattctatgacgggttggcgtataggctacggtgcaggctctaaaactttgattaaagcaatgactattattcagtcgcaaagtacttcaaacccttgttcaataagtcaaatggctgctattgaagcattaaacggtcctcaagattatataaagcctaatgctttaaattgtcaaaaaaagcgtgatcttgctttatcaattttgaaaagagtaaaatattttgaatgctataagccggaaggggcgttttacttatttgttaaatgcgataaaatatttgggcataaaactaaatcaggaacaattattgcaaatagtaatgattttgccgaatatttacttgaagaagcaaaagttgcagtagtacctggtatcgctttcggcttagagggatattttagaatctcttatgctacttctatggaagagctagaaaaagcttgtattagaattgagaaaacaattgatgtcattcctgcttaa

SEQ ID NO: 146087 - protein, 401 aa, Rickettsia conorii
MSIISTRLSSIKPSPTLAVVKKTLELKKAGVDIITLGAGEPDFDTPDNIKEGAIKAIKDGFTKYTNVEGMPLLKQAIKDKFKRENNIDYELDEIIVSTGGKQVIYNLFMASLDQGDEVIIPAPYWVSYPDMVALSTGTPVFVNCGIENNFKLSAEALERSITDKTKWLIINSPSNPTGASYNFEELENIAKVLRKYSHVNVMSDDIYEHITFDDFKFYTLAQIAPDLKKRIFTVNGVSKAYSMTGWRIGYGAGSKTLIKAMTIIQSQSTSNPCSISQMAAIEALNGPQDYIKPNALNCQKKRDLALSILKRVKYFECYKPEGAFYLFVKCDKIFGHKTKSGTIIANSNDFAEYLLEEAKVAVVPGIAFGLEGYFRISYATSMEELEKACIRIEKTIDVIPA

SEQ ID NO: 146088 - DNA, 1152 bp, Thermus aquaticus
  CDS (1)..(1152): transl_table=11
atgcggggcctttcccaaagggtgaagtccatgaagccctcggccacggtggcggtcaacgcccgcgccctggagctgaggcgaaaaggggtggacctggtggccctcaccgccggggagcccgactttgacacccccgagcacgtcaaggaggcgggcaggcgggccctggcccagggcaagaccaagtacgcccctcccgccggcatccccgagctgagggaagctgtggccgagaagttccgccgggaaaacggcctggaggtgacccccgaggagaccatcgtcaccgtggggggcaagcaggccctcttcaacctcttccaggccatcctggaccccggggacgaggtcatcgtcctggccccctattgggtgagttacccggaaatggtgcgcttcgccgggggggtgccggtggaggtccccaccctgcccgaggagggctttgtccctgaccccgagcgggtgcgccgggccatcacccctaggaccaaggccctggtggtcaactcccccaacaaccccacgggggtcgtctacccggaggaagttttgcgggccctggccgagatggcccttcagcacgacttctacctggtcagcgacgagatctacgagcacctcatctacgagggggcccacttctcccccggcaccctggccccagagcacaccatcaccgtgaacggcgccgccaaggccttcgccatgacgggctggcgcatcggctacgcctgcggccccaaggcggtcatcaaggccatggccgacgtctccagtcagtccaccaccagccccgacaccatcgcccagtgggccaccctcgaggccctcaccaaccgggaggcctccatggccttcatcgccatggccagggaagcctacaggaaaaggcgggacctcctcctggaggggctttctcggattggcctcgaggcggtgcgccccagcggggccttttacgtcctcatggacacctcccccttcgccccaaacgaggtggaggcggcggagaggctccttatggcgggggtagcggtggtgccgggcaccgaatttgccgcctttggccacgtgcgcctttcctacgccacgggcgaggagaacctgaagaaggccctggagcgcttcgcccaggcccttcagtag

SEQ ID NO: 146089 - protein, 383 aa, Thermus aquaticus
MRGLSQRVKSMKPSATVAVNARALELRRKGVDLVALTAGEPDFDTPEHVKEAGRRALAQGKTKYAPPAGIPELREAVAEKFRRENGLEVTPEETIVTVGGKQALFNLFQAILDPGDEVIVLAPYWVSYPEMVRFAGGVPVEVPTLPEEGFVPDPERVRRAITPRTKALVVNSPNNPTGVVYPEEVLRALAEMALQHDFYLVSDEIYEHLIYEGAHFSPGTLAPEHTITVNGAAKAFAMTGWRIGYACGPKAVIKAMADVSSQSTTSPDTIAQWATLEALTNREASMAFIAMAREAYRKRRDLLLEGLSRIGLEAVRPSGAFYVLMDTSPFAPNEVEAAERLLMAGVAVVPGTEFAAFGHVRLSYATGEENLKKALERFAQALQ

SEQ ID NO: 146090 - DNA, 1449 bp, Hordeum vulgare
  CDS (1)..(1449)
atggctgccaccgtcgccgtggacaacctgaaccccaaggttttaaaatgtgagtatgctgtgcgtggagagattgtcatccatgctcagcgcttgcaggaacagctaaagactcaaccagggtctctaccttttgatgagatcctctattgtaacattgggaacccacaatctcttggtcagcaaccagttacattcttcagggaggttcttgccctttgtgatcatccagacctgttgcaaagagaggaaatcaaaacattgttcagtgctgattctatttctcgagcaaagcagattcttgccatgatacctggaagagcaacaggagcatacagccatagccagggtattaaaggacttcgtgatgcaattgcttctgggatcgcttcacgagatggattccctgctaatgctgatgacatttttctcacagatggagcaagtcctggggtgcacctgatgatgcaattactgataaggaatgagaaagatggcattcttgtcccgattcctcagtaccccttgtactcggcttccatagctcttcatggcggagctcttgtcccatactatctcaatgaatcgacgggctggggtttggaaacctctgatgttaagaagcaacttgaagatgctcggtcaagaggcatcaacgttagggctttggtggttatcaatccaggaaatccaactggacaggtacttgctgaagaaaaccaatatgacatagtgaagttctgcaaaaatgagggtcttgttcttctagctgatgaggtataccaagagaacatctatgttgacaacaagaaattccactctttcaagaagatagtgagatccttgggatacggcgaggaggatctccctctagtatcatatcaatctgtttctaagggatattatggtgagtgtggtaaaagaggtggttactttgagattactggcttcagtgctccagtaagagagcagatctacaaaatagcatcagtgaacctatgctccaatatcactggccagatccttgctagtcttgtcatgaacccaccaaaggctagtgatgaatcatacgcttcatacaaggcagaaaaagatggaatcctcgcatctttagctcgtcgtgcgaaggcattggagcatgcattcaataaacttgagggaattacttgcaacgaggctgaaggagcaatgtacgtgttccctcaaatctgtctgccacagaaggcaattgaggctgctaaagctgctaacaaagcacctgatgcattctatgctcttcgtctcctcgagtcgactggaatcgtcgttgtccctggatcaggatttggccaggttcctggcacatggcacttcaggtgcacgatccttccgcaggaggataagatcccggcagtcatctcccgcttcacggtgttccatgaggcgttcatgtcagagtatcgtgactaa

SEQ ID NO: 146091 - protein, 482 aa, Hordeum vulgare
MAATVAVDNLNPKVLKCEYAVRGEIVIHAQRLQEQLKTQPGSLPFDEILYCNIGNPQSLGQQPVTFFREVLALCDHPDLLQREEIKTLFSADSISRAKQILAMIPGRATGAYSHSQGIKGLRDAIASGIASRDGFPANADDIFLTDGASPGVHLMMQLLIRNEKDGILVPIPQYPLYSASIALHGGALVPYYLNESTGWGLETSDVKKQLEDARSRGINVRALVVINPGNPTGQVLAEENQYDIVKFCKNEGLVLLADEVYQENIYVDNKKFHSFKKIVRSLGYGEEDLPLVSYQSVSKGYYGECGKRGGYFEITGFSAPVREQIYKIASVNLCSNITGQILASLVMNPPKASDESYASYKAEKDGILASLARRAKALEHAFNKLEGITCNEAEGAMYVFPQICLPQKAIEAAKAANKAPDAFYALRLLESTGIVVVPGSGFGQVPGTWHFRCTILPQEDKIPAVISRFTVFHEAFMSEYRD

SEQ ID NO: 146092 - DNA, 1779 bp, Saccharomyces cerevisiae
  CDS (1)..(1779)
atgttatcactgtctgccaaaaatcacttcacagtgagtaattctataactcacgttattaagtcatatcatataaggactctcacttcaagcgcagaaaaaatgccacatatcactactcctttttctacctcagccagtagtacaaagttaaaagctttcaggaaagttagacccgtcctacagagacatagctcttcctggattgttgctcaaaatcatagacgttcattatctggtcaatcttcgctaaacgacctgcgtcatttgaatcgctttccacaccacacgttgaaaacttcgaataacgagttttatcccgccgaacaattgactttggaagacgtaaatgaaaatgtcttgaaggctaagtacgccgttagaggtgccatcccaatgagagctgaagaattgaaagctcaactggagaaggatcctcaatctctgccatttgacaggattatcaacgccaatattggtaatcctcagcaactacaacagaaacctctgacttactacagacaggtcttgtctctcttacaatacccagaactattaaaccaaaacgaacagcagctagttgattcgaaattgtttaaactagatgccattaaacgtgcaaagagtttaatggaagatatcggtggttctgttggtgcttactcttcttctcaaggtgtagaaggtataaggaaaagtgtcgctgaatttataacgaagagggacgaaggcgagatatcatacccagaggatattttcctaactgctggtgcatccgcagctgtcaattacttgttatcaattttctgtagagggccagaaacgggtgtcttgattccaattcctcaatatccattatataccgctactctagctttgaacaattctcaagctttaccatactatttagatgagaattcaggttggtcaactaatccagaagaaattgaaactgtcgtcaaagaggctatacagaacgaaatcaaacctacagttctagtggttatcaatccaggtaatcctacaggagctgtcctatcacctgagtctatagctcagatttttgaagtcgcagccaagtacggtacagtagtgatagctgacgaagtttatcaagaaaatatcttcccgggcaccaagttccattctatgaagaaaattttgagacatttacagagggaacatccaggtaaattcgataatgttcagctagcttctttgcattcgacttctaagggtgtttctggtgaatgtggtcaaaggggtggctacatggaactcactggattcagccatgagatgagacaagttatcttgaaactagcctcgatttcattgtgtcccgttgtcacaggtcaagctttggttgatttgatggttcgtccaccagtggaaggggaggaatcattcgagtcggaccaagcagaacgtaactccatccatgaaaagttaattacaagagcaatgacactgtatgagacatttaactctttagaaggcattgaatgtcaaaagcctcaaggtgccatgtatttattccctaagatagacttacctttcaaggcagttcaagaagctcgccacttagagttaactccggatgaattttattgtaagaagttgttagaatctactggcatttgcactgttcccggttctgggtttggtcaagaacctggtacttaccatttaagaacaacatttttggcacctggtctggaatggattaagaaatgggaaagtttccataaagaattttttgaccaataccgtgactga

SEQ ID NO: 146093 - protein, 592 aa, Saccharomyces cerevisiae
MLSLSAKNHFTVSNSITHVIKSYHIRTLTSSAEKMPHITTPFSTSASSTKLKAFRKVRPVLQRHSSSWIVAQNHRRSLSGQSSLNDLRHLNRFPHHTLKTSNNEFYPAEQLTLEDVNENVLKAKYAVRGAIPMRAEELKAQLEKDPQSLPFDRIINANIGNPQQLQQKPLTYYRQVLSLLQYPELLNQNEQQLVDSKLFKLDAIKRAKSLMEDIGGSVGAYSSSQGVEGIRKSVAEFITKRDEGEISYPEDIFLTAGASAAVNYLLSIFCRGPETGVLIPIPQYPLYTATLALNNSQALPYYLDENSGWSTNPEEIETVVKEAIQNEIKPTVLVVINPGNPTGAVLSPESIAQIFEVAAKYGTVVIADEVYQENIFPGTKFHSMKKILRHLQREHPGKFDNVQLASLHSTSKGVSGECGQRGGYMELTGFSHEMRQVILKLASISLCPVVTGQALVDLMVRPPVEGEESFESDQAERNSIHEKLITRAMTLYETFNSLEGIECQKPQGAMYLFPKIDLPFKAVQEARHLELTPDEFYCKKLLESTGICTVPGSGFGQEPGTYHLRTTFLAPGLEWIKKWESFHKEFFDQYRD

SEQ ID NO: 146094 - DNA, 1518 bp, Schizosaccharomyces pombe
  CDS (1)..(1518)
atgtttacagattatccaaatgatattaactgtgagtctccaagaatgtcggaccttgatggattttgtcaaaatgcgttctcagaccttaattctttgaatcaacaagtatttaaggcaaattacgccgtccgtggagctttagccattcttgcggacgagatccaagatgatttacttgaaaatccttcttcatatcctttcagtgagatcgtctatgcaaacatcggtaatcctcagcagatgggacagtctcctattacattcgttcgacaggttttatctctttgccagtaccctaccttgttagaccatgctgaggaaaagtggtttcaaaatttgttccctacggatgtcgtacaacgatccaaaatgctcttaaaggaatctggaagtttgggtgcctatagtgcttctcaaggtattccgcttgtaaggcgacatgttgcggatttcattagagcgagagatggatttgattgcgagccatctgacatatatttgactagtggtgcctcacacgctgcccggcttataatgactttgataatcgctaggccaacagatggtgtaatggttcccgctcctcaatatcctttgtacggtgcccaaattgatctcatgagtggatctatggtatcttacagcctctccgaggaaaataattgggacattgattttgaccaatttaaaaaatcatttgatgaagcatctaaaaaaggtatcaacgttcgtttatgcgtggttattaatcccggtaatcctactggagcttgcatttctgaaaatagcatggaaaaagttttgcgctttgctaaggcaaagggcatagtattgcttgccgacgaagtctatcaaaacaatatttaccaaaacaagtttcattcttttaggagaaaacttggtgaattaagagaaaaggaacccgacaatcattgggaccaagtttcgcttatttccgtaaattctgttagcaaaggtcaatttggtgaatgtggtcaaagaggtggatatttggacgttgttaatattccagagcccgctaaggatcaaatcctcaaactagctaccattgacatttgtccaccagttgctggtcaattattagtagacatgctagtaaatcctcctaaacctggtgatcccagttatgatttgttcatcaaagaagttgatgagattcatgaagcactgcgtttacaatgccgtcagctctacgagggaacaaagcgcatgaagagagtttcatgtttagaaccccacggggccatgtatttgcatcccagcgtctcacttcccgaaaagttaatcactacagccaaagctcagaaaattcaacctgacgaattctatgcgatagaattgcttaagcgttcaggtatatgtgttgttcctggaagtggatttgggcaaccagaaggtgattatcatattcgaatcacgtttttggctaaaggaactgaatacattgaacgatttgtcaaagctcataatgaaataatggacctctatgaataa

SEQ ID NO: 146095 - protein, 505 aa, Schizosaccharomyces pombe
MFTDYPNDINCESPRMSDLDGFCQNAFSDLNSLNQQVFKANYAVRGALAILADEIQDDLLENPSSYPFSEIVYANIGNPQQMGQSPITFVRQVLSLCQYPTLLDHAEEKWFQNLFPTDVVQRSKMLLKESGSLGAYSASQGIPLVRRHVADFIRARDGFDCEPSDIYLTSGASHAARLIMTLIIARPTDGVMVPAPQYPLYGAQIDLMSGSMVSYSLSEENNWDIDFDQFKKSFDEASKKGINVRLCVVINPGNPTGACISENSMEKVLRFAKAKGIVLLADEVYQNNIYQNKFHSFRRKLGELREKEPDNHWDQVSLISVNSVSKGQFGECGQRGGYLDVVNIPEPAKDQILKLATIDICPPVAGQLLVDMLVNPPKPGDPSYDLFIKEVDEIHEALRLQCRQLYEGTKRMKRVSCLEPHGAMYLHPSVSLPEKLITTAKAQKIQPDEFYAIELLKRSGICVVPGSGFGQPEGDYHIRITFLAKGTEYIERFVKAHNEIMDLYE

SEQ ID NO: 146096 - DNA, 1524 bp, Saccharomyces cerevisiae
  CDS (1)..(1524)
atgacaatgacacaccaacaggatttgaaaggtgtgttcaccgcaaaggatttggattttaagcccgctggcaagattactaaaaaagatttgaatacaggtgtcactaaggcagaatatgctgtaagaggagctattccaaccagagctgacgagctaaaagaggaattgaaaaaaaacccagaagttttgcctttcgatgatattatcaatgcgaacattggtaatccgcagcaactggatcagaagcctttgacctttaccaggcaagtactggccatcctggagtacccggaaattttacgagtaggccataatgaactggcttctttgaacttgttttccagggacgccttggaaagagctgagcgcctcttgaatgatattggcggttctataggggcatattcgcattctcaaggtgtgccaggaataaggcaaacagttgctgacttcattactagaagagacggcggtgagcccgctacaccggaagatatttatttaaccactggcgcttcgtccgcggcaacttctttgttatctttattgtgtaaagattctcaaacaggcctgctgattccaattccgcagtatccgctttatactgcatccgcatctcttttcaatgcacaagtgctgccatactacttagatgaggagtcaaattggtctacaaacagcgacgaaattgaaaaagtagtgcaagatgctttgaaaaaacagatcagaccatctgtgctgatagttattaatccaggtaacccaaccggtgcagttctttctgaagaaaccattgccaggatctgtttgatcgctgcgaaatacggcattacaatcatttctgatgaggtctatcaagaaaacattttcaacgatgttaaatttcattcgatgaagaaagtcctaagaaaattgcagcatctttatccaggaaaattcgataacgttcagctcgcctctttacactccatttctaaaggattcatggatgagtgcggccaaagaggcggttacatggaaattattgggttttctcaagaaataagagatgctcttttcaaactcatgtctatatccatatgttctgttgtcacaggacaagctgtggttgatttaatggtcaaaccaccccagcctggagacgagtcctatgaacaagatcatgacgaaaggctgaaaatttttcatgaaatgcgtacgagagcaaacttattgtacgagacgtttaaggaactagagggtatcgaatgccaaaaacctcagggtgcaatgtatcttttccctaggcttgttttacctaagaaagctctttgtgaaagcgaacgccttggcatcgaacctgatgagttctattgcacatctttgctagaatctacaggtatttgtactgtcccagggtctgggttcggacaaagacccgggacttatcatgtgcgaacaacgtttttggctccagggactaaatggattcaagactggaaagaatttcatcaagatttcttcagcaagtatcgtaattga

SEQ ID NO: 146097 - protein, 507 aa, Saccharomyces cerevisiae
MTMTHQQDLKGVFTAKDLDFKPAGKITKKDLNTGVTKAEYAVRGAIPTRADELKEELKKNPEVLPFDDIINANIGNPQQLDQKPLTFTRQVLAILEYPEILRVGHNELASLNLFSRDALERAERLLNDIGGSIGAYSHSQGVPGIRQTVADFITRRDGGEPATPEDIYLTTGASSAATSLLSLLCKDSQTGLLIPIPQYPLYTASASLFNAQVLPYYLDEESNWSTNSDEIEKVVQDALKKQIRPSVLIVINPGNPTGAVLSEETIARICLIAAKYGITIISDEVYQENIFNDVKFHSMKKVLRKLQHLYPGKFDNVQLASLHSISKGFMDECGQRGGYMEIIGFSQEIRDALFKLMSISICSVVTGQAVVDLMVKPPQPGDESYEQDHDERLKIFHEMRTRANLLYETFKELEGIECQKPQGAMYLFPRLVLPKKALCESERLGIEPDEFYCTSLLESTGICTVPGSGFGQRPGTYHVRTTFLAPGTKWIQDWKEFHQDFFSKYRN

SEQ ID NO: 146098 - DNA, 1215 bp, Haemophilus influenzae
  CDS (1)..(1215): transl_table=11
atgcgattattcccaaaatccgacaaattagaacacgtatgttatgacattcgcggacctgtgcataaagaagcactacgcttagaagaagaaggcaataaaattttaaaacttaatatcggcaatcccgcacctttcggctttgaagcaccagatgaaattttggtggacgtattgcgtaatttgccgtcagctcaaggctactgcgattcaaaaggattatattctgctcgtaaagccattgttcaatattaccaatcaaaagggattctcggcgcgaccgtcaatgatgtgtatattggtaacggcgtatctgagcttatcacaatggcaatgcaagcattgctcaatgatggcgatgaagtgcttgtgccgatgcctgattatccgctttggactgctgcggtaaccctttctggcggtaaagcagtgcattatctctgtgatgaagacgcaaattggtttcccactattgatgatattaaagcaaaggtgaatgcgaaaactaaagcgattgtcatcatcaacccgaacaacccaacgggtgctgtgtatagcaaagaattattacaagaaattgtggaaatcgcgcgtcaaaataatttaattatcttcgctgacgaaatctacgacaaaattttatatgatggcgcggtgcatcatcacattgccgcacttgctcctgatttattaaccgttacattgaatgggttatcaaaagcttatcgagttgcaggcttccgccaaggctggatgattttgaacggcccaaaacataatgcgaaaggttatattgaaggcttggatatgctggcatcaatgcgtttatgtgccaacgtaccaatgcaacatgcaattcaaaccgcacttggtggctatcaaagtattaatgaatttattttaccaggcggtcgattacttgagcaacgaaacaaagcctatgatctcatcactcaaattccaggcattacttgcgtgaaaccaatgggggcgatgtatatgttcccgaaaattgatgtgaaaaaattcaatattcacagtgatgaaaaaatggtgctggatttactccgccaagaaaaagtactacttgtgcacggtaaaggatttaattggcattcaccagatcacttccgtattgttactcttccttatgtgaatcagcttgaagaagccattacaaaattagcaagatttttgtcggattaccgtcaataa

SEQ ID NO: 146099 - protein, 404 aa, Haemophilus influenzae
MRLFPKSDKLEHVCYDIRGPVHKEALRLEEEGNKILKLNIGNPAPFGFEAPDEILVDVLRNLPSAQGYCDSKGLYSARKAIVQYYQSKGILGATVNDVYIGNGVSELITMAMQALLNDGDEVLVPMPDYPLWTAAVTLSGGKAVHYLCDEDANWFPTIDDIKAKVNAKTKAIVIINPNNPTGAVYSKELLQEIVEIARQNNLIIFADEIYDKILYDGAVHHHIAALAPDLLTVTLNGLSKAYRVAGFRQGWMILNGPKHNAKGYIEGLDMLASMRLCANVPMQHAIQTALGGYQSINEFILPGGRLLEQRNKAYDLITQIPGITCVKPMGAMYMFPKIDVKKFNIHSDEKMVLDLLRQEKVLLVHGKGFNWHSPDHFRIVTLPYVNQLEEAITKLARFLSDYRQ

SEQ ID NO: 146100 - DNA, 1377 bp, Oryza sativa
  CDS (1)..(1377)
atggcggcctccacctccgccacctccttctccactcccaccaagcccgcctcctcctcctcctcctcctcaagtcccaactccgtctgcttcgccagggcgtcggggaggtgcaggatggcgtcggtggtggtgagggcggaggcggtggacgcgaccatcagcccgacggtgagcgcgctgcggccgtccaagaccatggccatcaccgaccaggccacggcgctgcggcaggctggcgtcccggtcatcggcctcgccgccggggagcccgacttcgacacgccgcacgtgattgctgaggctgggatgaatgcaattaaggatggttatacaaggtacactcctaatgctgggactttggagctgagaaaggctatctgcaataaactccaagaggaaaatgggatatcctacagtccagatcaggtgctggtgagcaatggagctaagcaatgcattacgcaagccgtacttgccgtttgctcacctggtgatgaggttttgataccagcaccatactgggtcagttatcctgagatggctacattggctggtgcaactccagtgatccttcctacaagcatatcagagaatttcttgctaaggccagagctgcttgcttcaaagatcaacgagaaatcgaggcttttgattctctgctctccttctaatccaactggatcagtatatccaaaggagctgcttgaagaaatagctgacatagtcaagaagtatcctaggcttcttgttttgtctgatgagatttatgagcatatcatctatcagccagcaaaacacacaagctttgcttcattgcctggaatgtgggatagaacattaactgtaaatggtttttctaaggcttttgcaatgacgggctggcgacttggataccttgcagccccaaaacattttgttgcagcctgtggaaagatccaaagccagtttacttcaggtgctagtagcatatcacagaaggcagggctcgctgctttgaaccttggctacgctggtggtgaagcagtctcaactatggtcaaagcattccaggaacgtcgtgattaccttgtaaaaagtttcaaggaactgccaggtgtgaagatatcagagcctcagggtgccttttatttgttcatcgacttcagctcctactatggatctgaagtagagggttttggcactatcaaggactctgagtccctctgcatgttcctcttggagaaagcacaggttgcacttgtcccgggcgatgcatttggggacgacaaatgcatccgcatgtcatatgctgcagcactatctacgcttcaaactgctatggagaaaatcaaagaagctgttgcgctgatcaaaccccgtgttgctgctaagtga

SEQ ID NO: 146101 - protein, 458 aa, Oryza sativa
MAASTSATSFSTPTKPASSSSSSSSPNSVCFARASGRCRMASVVVRAEAVDATISPTVSALRPSKTMAITDQATALRQAGVPVIGLAAGEPDFDTPHVIAEAGMNAIKDGYTRYTPNAGTLELRKAICNKLQEENGISYSPDQVLVSNGAKQCITQAVLAVCSPGDEVLIPAPYWVSYPEMATLAGATPVILPTSISENFLLRPELLASKINEKSRLLILCSPSNPTGSVYPKELLEEIADIVKKYPRLLVLSDEIYEHIIYQPAKHTSFASLPGMWDRTLTVNGFSKAFAMTGWRLGYLAAPKHFVAACGKIQSQFTSGASSISQKAGLAALNLGYAGGEAVSTMVKAFQERRDYLVKSFKELPGVKISEPQGAFYLFIDFSSYYGSEVEGFGTIKDSESLCMFLLEKAQVALVPGDAFGDDKCIRMSYAAALSTLQTAMEKIKEAVALIKPRVAAK

SEQ ID NO: 146102 - DNA, 1179 bp, Oryza sativa
  CDS (1)..(1179)
atggccatcaccgaccaggccacggcgctgcggcaggctggcgtcccggtcatcggcctcgccgccggggagcccgacttcgacacgccgcacgtgattgctgaggctgggatgaatgcaattaaggatggttatacaaggtacactcctaatgctgggactttggagctgagaaaggctatctgcaataaactccaagaggaaaatgggatatcctacagtccagatcaggtgctggtgagcaatggagctaagcaatgcattacgcaagccgtacttgccgtttgctcacctggtgatgaggttttgataccagcaccatactgggtcagttatcctgagatggctacattggctggtgcaactccagtgatccttcctacaagcatatcagagaatttcttgctaaggccagagctgcttgcttcaaagatcaacgagaaatcgaggcttttgattctctgctctccttctaatccaactggatcagtatatccaaaggagctgcttgaagaaatagctgacatagtcaagaagtatcctaggcttcttgttttgtctgatgagatttatgagcatatcatctatcagccagcaaaacacacaagctttgcttcattgcctggaatgtgggatagaacattaactgtaaatggtttttctaaggcttttgcaatgacgggctggcgacttggataccttgcagccccaaaacattttgttgcagcctgtggaaagatccaaagccagtttacttcaggtgctagtagcatatcacagaaggcagggctcgctgctttgaaccttggctacgctggtggtgaagcagtctcaactatggtcaaagcattccaggaacgtcgtgattaccttgtaaaaagtttcaaggaactgccaggtgtgaagatatcagagcctcagggtgccttttatttgttcatcgacttcagctcctactatggatctgaagtagagggttttggcactatcaaggactctgagtccctctgcatgttcctcttggagaaagcacaggttgcacttgtcccgggcgatgcatttggggacgacaaatgcatccgcatgtcatatgctgcagcactatctacgcttcaaactgctatggagaaaatcaaagaagctgttgcgctgatcaaaccccgtgttgctgctaagtga

SEQ ID NO: 146103 - protein, 392 aa, Oryza sativa
MAITDQATALRQAGVPVIGLAAGEPDFDTPHVIAEAGMNAIKDGYTRYTPNAGTLELRKAICNKLQEENGISYSPDQVLVSNGAKQCITQAVLAVCSPGDEVLIPAPYWVSYPEMATLAGATPVILPTSISENFLLRPELLASKINEKSRLLILCSPSNPTGSVYPKELLEEIADIVKKYPRLLVLSDEIYEHIIYQPAKHTSFASLPGMWDRTLTVNGFSKAFAMTGWRLGYLAAPKHFVAACGKIQSQFTSGASSISQKAGLAALNLGYAGGEAVSTMVKAFQERRDYLVKSFKELPGVKISEPQGAFYLFIDFSSYYGSEVEGFGTIKDSESLCMFLLEKAQVALVPGDAFGDDKCIRMSYAAALSTLQTAMEKIKEAVALIKPRVAAK

SEQ ID NO: 146104 - DNA, 1458 bp, Oryza sativa
  CDS (1)..(1458)
atgttcggcggcggcggcggcggcgggaggaagccgctggactacgaggagctgaacgagaacgtgaagaaggtgcagtacgcggtgcggggggagctgtacctgcgcgcctccgagctccagaaggagggcaagaagatcatcttcaccaacgtcggcaacccacacgcgctcggccagaagccgctcaccttcccccgccaggttgtggcgctgtgccaggcccccttcctgctcgatgatcccaacgtcggccttatcttccccgccgacgccatcgcgcgggccaagcactacctcgccatggcacccggtggactaggtgcttacagtgattcccgaggtatccctggtattaggaaggaagtcgccgagttcatcgagaggcgtgatggttatccaagtgatccagaacttatttacctcacagatggtgccagcaaaggtgtgatgcaaatgctgaataccattatcagaaatgagagagatgggattctggttcctgttccacaatacccgctttattctgctgccatttccctctttggtggttctctcgtgccatactacttagaagaagaggctaactggggacttgacttcgtcaatctccgacagactgtggcgtcagcgcggtcaaagggaatcactgttcgagcaatggtgattatcaacccaggaaaccctactggccaatgccttagtgaaggaaacataaaggaacttctcaaattctgcttccatgagaacttagttctgcttgcagatgaagtctatcaacagaacatttatcaagatgagcgcccatttataagtgctagaaaggttctgtttgacatgggtcctcctatgagcagggaagttcagctggtttctttccatactgtgtcaaaaggatattggggggagtgtggacaacgtggagggtattttgaaatgacaaatcttcctcccaagacagtagacgagatctacaaggttgcatcaatcgcactcagtccaaatgttcctgggcagatctttatgggtttaatggttaaccctcctaagcctggagatatctcttatctgaagttttctgctgaaagcaagtctatcctcgagtctttgaggaggagagcacgcctgatgacagatggtttcaatagttgccgaaatgttgtctgcaatttcacagaaggagctatgtactctttcccccaaatacgcttaccaccaaaagctatagatgcagccaaaagggctggcaaagcggccgatgttttctactgcctcaagcttcttgaagcaactggaatatccactgttccagggtcaggtttcggacaaaaagaaggggtgttccacctgaggacgaccatcctgccagctgaggaggacatgcctgccatcatgaccagcttcaagaagttcaacgacactttcatggatcagtacgatggctactccaggatgtga

SEQ ID NO: 146105 - protein, 485 aa, Oryza sativa
MFGGGGGGGRKPLDYEELNENVKKVQYAVRGELYLRASELQKEGKKIIFTNVGNPHALGQKPLTFPRQVVALCQAPFLLDDPNVGLIFPADAIARAKHYLAMAPGGLGAYSDSRGIPGIRKEVAEFIERRDGYPSDPELIYLTDGASKGVMQMLNTIIRNERDGILVPVPQYPLYSAAISLFGGSLVPYYLEEEANWGLDFVNLRQTVASARSKGITVRAMVIINPGNPTGQCLSEGNIKELLKFCFHENLVLLADEVYQQNIYQDERPFISARKVLFDMGPPMSREVQLVSFHTVSKGYWGECGQRGGYFEMTNLPPKTVDEIYKVASIALSPNVPGQIFMGLMVNPPKPGDISYLKFSAESKSILESLRRRARLMTDGFNSCRNVVCNFTEGAMYSFPQIRLPPKAIDAAKRAGKAADVFYCLKLLEATGISTVPGSGFGQKEGVFHLRTTILPAEEDMPAIMTSFKKFNDTFMDQYDGYSRM

SEQ ID NO: 146106 - DNA, 1641 bp, Oryza sativa
  CDS (1)..(1641)
atgcgccgcttcgtcgccgaccgggcgcggcgcgcggtgacctcctccgccgcttcgatgcgcgcggccgccaccagatcagccgcgccgtctgccggggctgccccctcggcgccatccccgccgccggccgcggcggcggcgctggccatggcttccgccatggtgagggccatgtcgaccgcggctgccggcgcggcgccggtgtcactcgacaccatcaaccccaaggtgttgaagtgtgaatatgctgtccgtggagagattgttacacatgctcagaatttacaacaagaattacagaaaaacccagactcacttccttttgacgagatactttattgcaacattggaaatccccaatctcttggccagcagccagttacatttttcagagaggtcttgtcgttatgtgatcatccagctctgctggataaaagtgaaactcatgctctgtacagttcagatgctatagaaagagcatggcaaattctagacaagatcccaggaagagcaacaggagcctatagccatagtcagggtataaagggtttgcgtgatgaaattgctgctggaattgctgcccgtgatggttttcatgctagtggagataacatattcctaacagatggagcaagcccagcagtgcacatgatgatgcaattattgataagatctgagaatgatggcattctctgccctattccgcaatacccgctctactccgcgtcaattgctctccatggtggttctcttgttccttatttccttgatgaagagacaggttggggactggaggttgatgagcttaagaaacaattggaggaggctcagtctaagggtatcactgttagagcacttgttgttataaatccagggaacccaactgggcaggttcttgctgaggaaaatcaaaagaaaattgtcgaattctgcaaaaatgaaggacttgttcttcttgcagatgaggtgtaccaagaaaacatatatgtagaagacaagaaattccattctttcaaaaagatcgcacgatcaatgggatacacagatgatgatcttcctttagtatcattccaatcagtttcgaaaggttactacggagaatgtggaaaacgaggaggctatatggaagtaactggatttagcgctgatgtaagggaacaaatttacaaggtggcatcagtaaacctgtgttccaacgtgtctggccaaatactcgctagcctcataatgaacccaccgaaggctggggatgaatcctatgaatccttcatggtagagaaagacgggatcctctcctctctggctcgacgtgcaaaggctttggaagaagccttcaacagcttagaaggcataacatgcaacaaggccgagggtgcgatgtatctcttccctcgcatctatttgccccagaaggcaattggagctgcccaagcagctggtactgccccagatgcgtattatgcccgccgccttcttgaagctactggaattgttgttgttcctggttctggatttgggcaggttcctggaacgtggcattttagatgcacaattttgccacaggaggacaaaataccagcgatcatatccaagttcaaggagttccacgagaagttcatggatgaattccgggattaa

SEQ ID NO: 146107 - protein, 546 aa, Oryza sativa
MRRFVADRARRAVTSSAASMRAAATRSAAPSAGAAPSAPSPPPAAAAALAMASAMVRAMSTAAAGAAPVSLDTINPKVLKCEYAVRGEIVTHAQNLQQELQKNPDSLPFDEILYCNIGNPQSLGQQPVTFFREVLSLCDHPALLDKSETHALYSSDAIERAWQILDKIPGRATGAYSHSQGIKGLRDEIAAGIAARDGFHASGDNIFLTDGASPAVHMMMQLLIRSENDGILCPIPQYPLYSASIALHGGSLVPYFLDEETGWGLEVDELKKQLEEAQSKGITVRALVVINPGNPTGQVLAEENQKKIVEFCKNEGLVLLADEVYQENIYVEDKKFHSFKKIARSMGYTDDDLPLVSFQSVSKGYYGECGKRGGYMEVTGFSADVREQIYKVASVNLCSNVSGQILASLIMNPPKAGDESYESFMVEKDGILSSLARRAKALEEAFNSLEGITCNKAEGAMYLFPRIYLPQKAIGAAQAAGTAPDAYYARRLLEATGIVVVPGSGFGQVPGTWHFRCTILPQEDKIPAIISKFKEFHEKFMDEFRD

SEQ ID NO: 146108 - DNA, 1461 bp, Oryza sativa
  CDS (1)..(1461)
atgtcgtacaaccattcgccgtccatcaccgcagagaccataaaccagaaggtcaggatcttcacctacgagccatgtggggagattgtccgccacgcacggcggttagagaaggagatatacgaaaatccaggctctctcccttttcaagagataatatactgcaatcttgggaaccctcaggctcttggccaacgaccaatcaatttctttcgcgaggttctttctctgtgtgacaatccatctctcatagacagagacgaagctcgtgcattattcagtccatgtgcgctaaaacgagccaggaagattattgaatcacttccaggcagagattctggttcctatactagtagtcagggagtcagaggtttgcgtgaagcagttgctgatggaatagctgccagagatggttttccatcaaaaccagataacatttttctgacagatggagcaagttcagcaatcaacatgatgatgcaaatactcatcaggtcccatgaagatggcattttgtgcccgctgcctgaatatcccttatactctgcttctattattcttcatggtggaacaatggtaccgtataatcttactgaagacagtatttgggggcttgagattttcgaagtcaagaggtgtttagaggacgcccgtgcatcgggtttgactattagagctatggtggtcataaatcccggcaatcctactggccaggtactgtctataaccaaccaggaggagattgtggaattctgtaggaaagaagggttggttattcttgctgatgaggtataccaagaaaatgtctatacagagaataagaggttcaattccttcaaaaaggtggccagatcacttggttatgatcaccatgacctctctatagtgtcatttcactcggtctctatgggatactatggagaatgtggtagaaggggaggctacatggagatttgtggttttggagatgatgtgatcgatgagatgtacaagttggcttctctaactatttgtcccaacatagctggccaaatccttatcagccttgttatggatccacctaagctaggggatgaggcttttgagattttcatggtcgagaaggaagagacttattcatctctactcaagcgcgcaaaggctttgcagaaagcgttcaacggtttggaaggcgtgtcgtgtaacaagttcgagggagccatgtacctcttcccacggctgcgcctgccacaggcggcgatcaaagcggcgcagctggagggcgtctcccccgacgtgttctacgcgcaccgcctgctcgacgccacggggatcgccgtcgtcccaggctctggatttcacccagtctccgggacatcgcacatccggtgcaccatcctccccggcgaggagacgatcacggcgatggttcccagcctccaggcgttccatgaggcgttcatggacgagtttcgcggctga

SEQ ID NO: 146109 - protein, 486 aa, Oryza sativa
MSYNHSPSITAETINQKVRIFTYEPCGEIVRHARRLEKEIYENPGSLPFQEIIYCNLGNPQALGQRPINFFREVLSLCDNPSLIDRDEARALFSPCALKRARKIIESLPGRDSGSYTSSQGVRGLREAVADGIAARDGFPSKPDNIFLTDGASSAINMMMQILIRSHEDGILCPLPEYPLYSASIILHGGTMVPYNLTEDSIWGLEIFEVKRCLEDARASGLTIRAMVVINPGNPTGQVLSITNQEEIVEFCRKEGLVILADEVYQENVYTENKRFNSFKKVARSLGYDHHDLSIVSFHSVSMGYYGECGRRGGYMEICGFGDDVIDEMYKLASLTICPNIAGQILISLVMDPPKLGDEAFEIFMVEKEETYSSLLKRAKALQKAFNGLEGVSCNKFEGAMYLFPRLRLPQAAIKAAQLEGVSPDVFYAHRLLDATGIAVVPGSGFHPVSGTSHIRCTILPGEETITAMVPSLQAFHEAFMDEFRG

SEQ ID NO: 146110 - DNA, 1452 bp, Oryza sativa
  CDS (1)..(1452)
atggctgctcccagcgtcgccgtcgacaacctcaaccccaaggttttgaattgtgagtatgcagtgcgtggagagattgtgatccatgctcagcgcctgcagcaacagctacagactcaaccagggtctcttccttttgatgagatcctatactgcaacattgggaatccccagtctcttggtcagaagccagttacattcttcagggaggttattgctctttgtgatcatccatgcttgttggaaaaggaggaaaccaaatcattgttcagtgctgatgccatttctcgagcaacaacaattcttgcctcgattcctggaagagcaactggagcatacagccacagccagggcatcaaagggctgcgtgatgcaattgctgctggaattgcatcacgtgacggataccctgcaaatgcagacgacattttccttactgacggagcaagccctggagttcacatgatgatgcagttactgataaggaacgagaaagatggcattctctgcccaattcctcaatatcctttgtactcagcctccattgctcttcatggtggagctcttgtcccgtattatcttaatgaatcaacaggctggggtttggagatctctgaccttaagaagcaactcgaagattctcggttgaaaggcattgatgttagggctttggtagttatcaatccaggaaatccaactgggcaggttcttgctgaggaaaaccaacgggacatagtgaagttctgcaaaaatgagggacttgttcttctggctgatgaggtgtaccaagagaacatctatgttgacaacaagaaatttaactctttcaagaagatagcgagatccatgggatacaacgaggatgatctccctttagtatcatttcaatctgtttctaagggatattatggtgaatgtggcaaaagaggaggctacatggagattactggcttcagtgctccagttagagagcagatctacaaagtggcgtcagtgaacttatgttccaatatcactggccagatccttgccagcctcgtcatgaatccaccaaaggctggagatgcatcatatgcttcatacaaggcagagaaagatggaatcctccaatcattagctcgccgtgcaaaggcattggagaatgctttcaacagtcttgagggaattacatgcaacaaaactgaaggagcaatgtacctcttccctcagcttagtctgccacaaaaggcaattgacgctgctaaagctgctaacaaagcacctgatgctttctatgcccttcgtctcctcgaggcaaccggaattgttgttgtccctggatctggatttggccaagttcctggcacatggcacatcagatgcacaatcctgccacaggaggagaagatccccgcgatcatctcccgcttcaaggcattccatgagggcttcatggcagcgtaccgcgactga

SEQ ID NO: 146111 - protein, 483 aa, Oryza sativa
MAAPSVAVDNLNPKVLNCEYAVRGEIVIHAQRLQQQLQTQPGSLPFDEILYCNIGNPQSLGQKPVTFFREVIALCDHPCLLEKEETKSLFSADAISRATTILASIPGRATGAYSHSQGIKGLRDAIAAGIASRDGYPANADDIFLTDGASPGVHMMMQLLIRNEKDGILCPIPQYPLYSASIALHGGALVPYYLNESTGWGLEISDLKKQLEDSRLKGIDVRALVVINPGNPTGQVLAEENQRDIVKFCKNEGLVLLADEVYQENIYVDNKKFNSFKKIARSMGYNEDDLPLVSFQSVSKGYYGECGKRGGYMEITGFSAPVREQIYKVASVNLCSNITGQILASLVMNPPKAGDASYASYKAEKDGILQSLARRAKALENAFNSLEGITCNKTEGAMYLFPQLSLPQKAIDAAKAANKAPDAFYALRLLEATGIVVVPGSGFGQVPGTWHIRCTILPQEEKIPAIISRFKAFHEGFMAAYRD

SEQ ID NO: 146112 - DNA, 1239 bp, Brassica napus
  CDS (1)..(1239)
atggcaaacaacagctgcattgggtggaagttcagcggcagcgaggcggccaaggaagcctcagctgcttccctaaccacttacacctcaaaactctttgccctgtgcgatcctcagggaaagcccattttgcctcctcgaggtgaaaccgccgagacttgccataccgctgaaaaggctgttgttaaagccgtcctctgcggtactggtaacgcttatgctcccggtaaaggtcttcccgcggcaaaatgtgccgttgccgagtacctaaaccgtgatgatattccgaagaaactgacaccagaagacgtgtttatgaccgttgggtgcaaacaagccatcgagcttgcggttgacatcttggctaatccaaaagccaacgtcctgcttccaagcccgggctacccatgggactttgttaactgcatcttaaaaaaacttgaggtccgcagatatgaattcctccctgaaaagaactatgagatcaactttgaaagcgtccgaaagcaagtggatgagaacacgtttgcgatatttataaccaaccctcacaatcccaatggaaacatctactctgaagctcatctcaagcagatcgctttgctggctcgggaactcgggataatggtggtttctgacgaagtttttcgatggaccgtttttgggagtaatccctttgttcccatggggaaattctcgtcaattgtacccgtgatgacacttgggtccatatcgaagggatggagtgtccccggatggcgaactggctgggtcgccctgcacgatctagatggtgtctttaaatgcacaaaggtcttagatgctgctaaacaatttcttgagataaattctaaaccaccaactgttatccaggcggctattcctaccatcttgaaggatactcctaaagatttcttccacaggaggcagatgtttctgaaagataaagcggatttggcttattctaagctcgcggacataccttccctcaaatgctatttaaaacctgaagcatgcaccttcctatggacccagctgaaattgtcaagctttctgaacattaaagatgatgaagacttctgtgaaaagcttgctactgaagaaaacctcgtccttttaccagggattggttttggtctgaggggctgggcgaggcattctatcgacatggatacccaaactttggaggatgcctttaaaagattgaagagcttctgtgaccgccattctgggtgctaa

SEQ ID NO: 146113 - protein, 412 aa, Brassica napus
MANNSCIGWKFSGSEAAKEASAASLTTYTSKLFALCDPQGKPILPPRGETAETCHTAEKAVVKAVLCGTGNAYAPGKGLPAAKCAVAEYLNRDDIPKKLTPEDVFMTVGCKQAIELAVDILANPKANVLLPSPGYPWDFVNCILKKLEVRRYEFLPEKNYEINFESVRKQVDENTFAIFITNPHNPNGNIYSEAHLKQIALLARELGIMVVSDEVFRWTVFGSNPFVPMGKFSSIVPVMTLGSISKGWSVPGWRTGWVALHDLDGVFKCTKVLDAAKQFLEINSKPPTVIQAAIPTILKDTPKDFFHRRQMFLKDKADLAYSKLADIPSLKCYLKPEACTFLWTQLKLSSFLNIKDDEDFCEKLATEENLVLLPGIGFGLRGWARHSIDMDTQTLEDAFKRLKSFCDRHSGC

SEQ ID NO: 146114 - DNA, 1275 bp, Brassica napus
  CDS (1)..(1275)
atggcaaacgacagcaacgttgactggcagttcagtggtagcgaggcggccaaagaagcctcagctgccgcgctaagcgcttactcctctaagctctttgctctttgcgatcctaatggaaagcccattttgcctcctcgagttgaaaccgctgagaccagccataccgctgaaaaggctgttgttcattccgtcctctgcggattaggaaacgcctacgcacccagtataggccttccagcggccaaaagtgccgtagcggagtacctaaaccgagatcttccgaacaaactgacagctaatgacgtgtttatgaccgttggatgcaaacaagccatcgagcttgcggttgatatcctggccaaaccaaatgccaacgtcttgcttcccaagccaggcttcccatgggacatggtccgtaccatctacaagaaacttgaggtccgcaaatacgacttcgtccctgaaaaggactatgagattgaccttgatagcgtccgagcgcaagtggatgagaacacgtttgcgatatttataatcaacccgcacaatcccattgggaacatctacactgaagctcatctcaaggagatcgctgagttggctcgggaactgaagataatggtggtttctgacgaagtgtttcgatggactgtgtttgggagtaatccctttgtccccatggcgaaattttcgtcgattgtaccggtggttaccctcgggtccatttccaagggatggactgtccccggatggcgtactggctggctagcgctgcacgacctagatggtgtctttagaaccaccaagatcttcgatgctgcaaaacaatttcttgagataaattctaaaccaccaacggtgatccaggcggctattcccaccatcttggacaaaactcctgaagatttcttcgttaggaggcagaaatatctgaaagataaagccgattatgcatattctgtggtcaagggcataccttgcctcacctgctaccagaaaactgaagcatgcaccttcttatggaccgagctgaacatatcatgcttcgtggacattaaagatgctgaagacttctgtgaaaagcttgctactgaggaaaacctcgtccttttaccaggggttgcttttggtgtgaccaactgggcgaggcattctatcgacatggatagtgcaactctgcaggatgcatttggaagattgaagagcttttgtaaacgccactccatcactattggtgaagcttcacccgaagacgtcaacggggtcaactaa

SEQ ID NO: 146115 - protein, 424 aa, Brassica napus
MANDSNVDWQFSGSEAAKEASAAALSAYSSKLFALCDPNGKPILPPRVETAETSHTAEKAVVHSVLCGLGNAYAPSIGLPAAKSAVAEYLNRDLPNKLTANDVFMTVGCKQAIELAVDILAKPNANVLLPKPGFPWDMVRTIYKKLEVRKYDFVPEKDYEIDLDSVRAQVDENTFAIFIINPHNPIGNIYTEAHLKEIAELARELKIMVVSDEVFRWTVFGSNPFVPMAKFSSIVPVVTLGSISKGWTVPGWRTGWLALHDLDGVFRTTKIFDAAKQFLEINSKPPTVIQAAIPTILDKTPEDFFVRRQKYLKDKADYAYSVVKGIPCLTCYQKTEACTFLWTELNISCFVDIKDAEDFCEKLATEENLVLLPGVAFGVTNWARHSIDMDSATLQDAFGRLKSFCKRHSITIGEASPEDVNGVN

SEQ ID NO: 146116 - DNA, 1254 bp, Brassica napus
  CDS (1)..(1254)
atggataatggaggatcgacaatcacaattaaagggattctgagtttgctgatggaaagcatctcagagttggaagatgaagaaggaagatgcgtgaagagagttatatcacttggaatgggagacccaacactctactcgtgtttccgtacaacacaagtttcacttcaagctgtttcagattctcttctctccaacaagttccatggttatgctcccaccgttggtcttcctcaaactcgaagggcaatcgcagagtatctatcgcgtgatcttccatacaaactatctcaggacgatgtattcatcacatctggttgcacacaagcaatcgatgtagcattggcaatgttggctcgtcccagggccaatatacttcttccaaggcccggtttcccgatctatgaactctgtgctaagtttagaaacctcgaggttcgctacttcgaccttcttccagaaaacggatgggagatcgatcttgatgctgtcgagtctcttgcagacgaaaacacagttgctttggttgttataaaccctggtaatccttgcgggaatgtctatagttacctgcatttgatgaagattgcggaaacggcgaaaaaactagggattcttgtgattgctgatgaagtttatggtcatcttgcttttgggagcaaaccatttgtgccaatgggtgtgtttggatctatcgttccggttcttactcttggatctttatcaaagagatggatagttcctggttggcggctcggctggttcgtgaccactgacccttctggctcgtttaaagacccaaagatcatcgagcggttcaagaaatactttgatattcttggtggaccagccacatttatccaggctgcagttcccacgattcttgaacagacggacgaaccattcttcaagaaaacgttgaactcgttgaagaactcttcggatatttgctatgactggatcaacgagattccttgcattgattcctcgcatcgaccagaaggatccatggcaatgatggttaagctgaatctctcgttactagaagatataagcgacgatatcgacttctgtttcaagctagctagagaagaatcagtcatccttcttcctgggactgcggtggggcttaagaactggctgaggataacgtttgcggctgatgcttcttcgattgaagaagcttttaaaaggatcaaatatttttatctcagacatgccaagactcaatctcaaatcatagttgatttgtga

SEQ ID NO: 146117 - protein, 417 aa, Brassica napus
MDNGGSTITIKGILSLLMESISELEDEEGRCVKRVISLGMGDPTLYSCFRTTQVSLQAVSDSLLSNKFHGYAPTVGLPQTRRAIAEYLSRDLPYKLSQDDVFITSGCTQAIDVALAMLARPRANILLPRPGFPIYELCAKFRNLEVRYFDLLPENGWEIDLDAVESLADENTVALVVINPGNPCGNVYSYLHLMKIAETAKKLGILVIADEVYGHLAFGSKPFVPMGVFGSIVPVLTLGSLSKRWIVPGWRLGWFVTTDPSGSFKDPKIIERFKKYFDILGGPATFIQAAVPTILEQTDEPFFKKTLNSLKNSSDICYDWINEIPCIDSSHRPEGSMAMMVKLNLSLLEDISDDIDFCFKLAREESVILLPGTAVGLKNWLRITFAADASSIEEAFKRIKYFYLRHAKTQSQIIVDL

SEQ ID NO: 146118 - DNA, 1275 bp, Brassica napus
  CDS (1)..(1275)
atggcgaccacccccatgtgcactgagtggcagttcagcgggaacgaggcagccaaagaagctgctgcggccgccctaggtgcctacacctctaaactcatggctctttgtgatcctaatggcaagcccattttgcccccgagtaacaaggccgtggagaccagcaattcagcggaaaaggctgtcgttaaagttattctctccggcactggaaacgcctatgctcctagcattggccttccgctcgccaaaagtgccgtagcagagtatctaaacagagatcttccaaagaagctaacagcagctgacgtgtttatgactgttggatgcaaacgagcaattgaccttgccgtggatattctggctaaaccaaaagccaacgttttgcttccgaggccaggcttcccgtgggatgtagtacgctgcatctataagaaactcgaggtccgttactatgatttcatccctgaacaaaactttgagatcgacttcgaaagcgtcaaaaaggtgacagacaagaacacctttgctatatttatcatcaaccctcacaatcccaatggaaacacttactcggaggctcatctcaaacagctcgctgaattggctaaggaactctcgattatggtggtttctgatgaagtttttagatggaccgtcttcgggaataacccttttgtgccgatgggaaagttttcttccatcgtaccagtggttacactcggatccttatctaagggatggaatgtcccaggatggcgaactgactggctcgcgctgcacgatctagacggtgtcttcagaaacactaagatattacaagctgccaacgaatttctccagataaatgccaaacctccgactgttattcaggcggctatgcctgacattttggagagaactccaaaacatttcttccacgagaggggaagttttctgaaacataaagtagatattggatattctaaggtcaagcacatacctggcctcacttgttacatgaaacccgaagcgtgcacctttttatggaccaagctggatatatcgtgctttgctgacattgaagacgatcaagacttctgcaggaagcttgctatggaagaaaatctcgtcgttttgccagggattgcatttaggcagaagaattggctgaggcattctatcgacatggagacgcaaacagttgaggacgcatttgaaagattgaagagcttctgtgaacgccattccgctgaacgtggagcttcactcaaaaacgtcaatggcgtgaactag

SEQ ID NO: 146119 - protein, 424 aa, Brassica napus
MATTPMCTEWQFSGNEAAKEAAAAALGAYTSKLMALCDPNGKPILPPSNKAVETSNSAEKAVVKVILSGTGNAYAPSIGLPLAKSAVAEYLNRDLPKKLTAADVFMTVGCKRAIDLAVDILAKPKANVLLPRPGFPWDVVRCIYKKLEVRYYDFIPEQNFEIDFESVKKVTDKNTFAIFIINPHNPNGNTYSEAHLKQLAELAKELSIMVVSDEVFRWTVFGNNPFVPMGKFSSIVPVVTLGSLSKGWNVPGWRTDWLALHDLDGVFRNTKILQAANEFLQINAKPPTVIQAAMPDILERTPKHFFHERGSFLKHKVDIGYSKVKHIPGLTCYMKPEACTFLWTKLDISCFADIEDDQDFCRKLAMEENLVVLPGIAFRQKNWLRHSIDMETQTVEDAFERLKSFCERHSAERGASLKNVNGVN

SEQ ID NO: 146120 - DNA, 1362 bp, Brassica napus
  CDS (1)..(1362)
atgagcgaagaagaagcacacgccaaccttgcggttcccgcgtttcgaactgagaaagtggccaaaacgcaaacgcagaatggccacggtactgtttggcggttcggtggagctgataaggccgcaaaagccgcgaccgtaacgctgagaggtgttatttacatgctcttcgacaactgcagcaaagacgtcaataagactgtcttgcccctcggccacggagatccttctgtctatccttgcttccgcacctgtatcgaggccgaagacgccgtcgtcaacgtcctccgctccggcaaaagcaattcttactgtcccggagctggaattctcccggccagaagagccgtcgccgattatctgaaccgagatcttccgaacaaactaacgccggacgacatcttcctgaccgctggatgcaaccaagggatagagctggtgttcgaatcgctggctcgaccaaacgcaaacatattgctcccacgtcccggtttccctcactacgacgctcgcgctgtctacagtggtctcgagatccgcaagttcgatcttctccccgacagagaatgggagatcgatctcgaaggcgtcgaagccgttgcagacgagaacactgtggccattgttgtgatcaacccaaacaacccatgtggaaacgtctactctcacgaccatctccacaaggtggcagagacggctcggaagctggggataatggtgatcacagacgaagtgtacgaccagactatattcggagacaaccctttcgttcccatggccaagttcgcatccatcgtccctgtcttgaccctgggaggcatatccaaaggttgggttgtccctggatggaagattggcgggatcgccttgaatgatcccgagggcgttttcgagtccaccaaggtggctcaatccatcaagcagagtcttgacataactcctgacccttccactatcattcaggcggcacttcctgagatcctggagaaagtggataaaaacttctttgcaaagaagaacaagatactcaaacataatgtcgatttggtgtgtgataggctcaaggatatcccctgcgtcgtctgtcccaagaaacccgagtcttgcacttatctattgaccaagcttgagctgtcattgttggatgacatcaaggatgacattgatttttgcgtgaagctggccagagaggaaaacctcgtgtttctaccaggagaggctctggggttgaagaactggatgaggataactatcggagtggaagctcatatgcttgaggatgcacttgagggactcaagggtttctgtacacgccataccaagaagacagttacagaaactgagtcaccttcaagcgtttaa

SEQ ID NO: 146121 - protein, 453 aa, Brassica napus
MSEEEAHANLAVPAFRTEKVAKTQTQNGHGTVWRFGGADKAAKAATVTLRGVIYMLFDNCSKDVNKTVLPLGHGDPSVYPCFRTCIEAEDAVVNVLRSGKSNSYCPGAGILPARRAVADYLNRDLPNKLTPDDIFLTAGCNQGIELVFESLARPNANILLPRPGFPHYDARAVYSGLEIRKFDLLPDREWEIDLEGVEAVADENTVAIVVINPNNPCGNVYSHDHLHKVAETARKLGIMVITDEVYDQTIFGDNPFVPMAKFASIVPVLTLGGISKGWVVPGWKIGGIALNDPEGVFESTKVAQSIKQSLDITPDPSTIIQAALPEILEKVDKNFFAKKNKILKHNVDLVCDRLKDIPCVVCPKKPESCTYLLTKLELSLLDDIKDDIDFCVKLAREENLVFLPGEALGLKNWMRITIGVEAHMLEDALEGLKGFCTRHTKKTVTETESPSSV

SEQ ID NO: 146122 - DNA, 1380 bp, Triticum aestivum
  CDS (1)..(1380)
atggcgttctcctccctcgccaccccttcctcctcctccccctcctcgtctttcaccctccccaccaagccctccccgggcgcaggctccctctccttctccagggcgtccacggggaagttcaggatggcggcggtgagggcggaggcggtggacacgtccatcagcccgcgggtgagcgcgctgcggccgtccaagaccatggccatcaccgacatggccagcgcgctgcggcaggccggggtgcccgtcatcggactcgccgctggggagcccgacttcgacacgccggcggtgatcgccgaggctgggataaatgcaatcagggatgggtctactaggtacacacctaatgcagggactatggagctgaggaaagctatctgcaacaagcttcaggaggagaatggtctaacctacagcccagatcaggtgctagtgagcaatggagctaaacagtgcattacacaagctgttcttgctgtttgctcacctggtgatgaggttttgataccagcaccattttgggtcagctatcctgaaatggctaggttggctggtgcaacaccagtgatcctcccgacaagcatatcagacaatttcctgctaaagccagagtcacttgcctcagtgatcactgaaaaatcaaggctcttgattctatgctctccatctaatccaacaggctctgtgtatcccagggagctgcttgaggagattgctgctatagtcaagaagtatcctaggctcctggttctatctgatgagatctatgagcatattatctatcatcctgctaaacacacaagctttgctgcattacctggaatgtatgacagaacattaactgtaaatgggttttctaaggcttttgctatgactggctggcgacttggatacttagctgcccctaaacattttgtctcagcttgtggaaagatccaaagccagtacacatctggtgccagtagtatatcacagaaggcagggcttgcagccttgaaccttggttatgccggcggtgaagcagttgcaaccatggtcaaagcattccaggagcgccgggattaccttgtaagtagtttcagggaactgccaggagtaaaaatatcagaacctcagggtgctttctatttgttcatcgacttcagctcctactacgggtctgaggtagagggttttggcaccatcaaggattctgagaccctctgcatgttcctgctagagaaagcacaggtcgcgcttgtccccggagatgcatttggagatgacaagggtgttcgtatctcctatgctgctgcactgtcaacgctacaatctgcgatggagaagataaaagacgcaatggctctgctcaaggcccctgccgcggttcaatga

SEQ ID NO: 146123 - protein, 459 aa, Triticum aestivum
MAFSSLATPSSSSPSSSFTLPTKPSPGAGSLSFSRASTGKFRMAAVRAEAVDTSISPRVSALRPSKTMAITDMASALRQAGVPVIGLAAGEPDFDTPAVIAEAGINAIRDGSTRYTPNAGTMELRKAICNKLQEENGLTYSPDQVLVSNGAKQCITQAVLAVCSPGDEVLIPAPFWVSYPEMARLAGATPVILPTSISDNFLLKPESLASVITEKSRLLILCSPSNPTGSVYPRELLEEIAAIVKKYPRLLVLSDEIYEHIIYHPAKHTSFAALPGMYDRTLTVNGFSKAFAMTGWRLGYLAAPKHFVSACGKIQSQYTSGASSISQKAGLAALNLGYAGGEAVATMVKAFQERRDYLVSSFRELPGVKISEPQGAFYLFIDFSSYYGSEVEGFGTIKDSETLCMFLLEKAQVALVPGDAFGDDKGVRISYAAALSTLQSAMEKIKDAMALLKAPAAVQ

SEQ ID NO: 146124 - DNA, 1323 bp, Zea mays
  CDS (1)..(1323)
atggcgacccacgccggcgagaacggcagcgggcacgagaacggcggcgggcacgcggagtggcggttcgcgcgggcggcgaaggagggcgcgctggccgttgcgggggacaagatgagcatccgggcggtgcggttcaagatcagcgcgagcctggacgcgcgcgacccgcggcccgtgctgccgctggcgcacggggacccctcggtgttcccggccttccgcaccgccgccgaggccgaggacgccgtggccgccgcgctccggaccggcaagttcaactgctaccccgccggcgtcggcctccccgaagcccgccgtgctctggcggagcacctgtcgagcgaccttccatacaagctgtcgagcgacgacatcttcgtcaccgccggaggcacgcaagccatcgaggtggtggtctcagtcctcgcgcagccgggcaccaacatactgctcccgaggccgggctatccgaactacgaggcgcgcgcagggctgcacaacctggaagttcgccggttcaatctgatccccgagagagggtgggagattgacatcgacggtctggagtcgatcgccgacaagaacaccaccgccatggtcatcataaaccccaacaacccttgcgggagtgtctacacccgagagcatttggccaaggtcgcggaggtggcaaggaagcttggaatactggtcatcgctgatgaggtgtacggaaatctggtgtttggggacacccctttcgtccccatgggtgtctttggccacattgcccctgtgttgaccataggatcactgtccaagagatggatagtgcctgggtggcgacttggttgggtggccgtatgtgatcccaacaaggttctgcaagaaaccaagatcattgcatcgatcacaaacttccttaacgtttcaacagatccggcaacttttgttcagggagcgcttccccatattcttaagaacacaaaggaagattttttcaagaggatcattggtctgctagcggaaacatcagagatatgtttcagcggaataaaggacatcaagtgcatcacatgccctcacaagccagaaggttccatgtttgtcatggtgaaactaaatttgtatcttttggagagcatccatgatgatattgatttttgttgcaagctggcaaaagaagagtccgtgattttgtgtccagggagtgttttgggaatggaaaactggatccgtatcactttcgccattgattcatcttctcttcttgatggtcttgagaggctgaaatctttctgccaaaggcataagaagaagaatttgcttaatggccattaa

SEQ ID NO: 146125 - protein, 440 aa, Zea mays
MATHAGENGSGHENGGGHAEWRFARAAKEGALAVAGDKMSIRAVRFKISASLDARDPRPVLPLAHGDPSVFPAFRTAAEAEDAVAAALRTGKFNCYPAGVGLPEARRALAEHLSSDLPYKLSSDDIFVTAGGTQAIEVVVSVLAQPGTNILLPRPGYPNYEARAGLHNLEVRRFNLIPERGWEIDIDGLESIADKNTTAMVIINPNNPCGSVYTREHLAKVAEVARKLGILVIADEVYGNLVFGDTPFVPMGVFGHIAPVLTIGSLSKRWIVPGWRLGWVAVCDPNKVLQETKIIASITNFLNVSTDPATFVQGALPHILKNTKEDFFKRIIGLLAETSEICFSGIKDIKCITCPHKPEGSMFVMVKLNLYLLESIHDDIDFCCKLAKEESVILCPGSVLGMENWIRITFAIDSSSLLDGLERLKSFCQRHKKKNLLNGH

SEQ ID NO: 146126 - DNA, 1305 bp, Zea mays
  CDS (1)..(1305)
atggcgacccacgccagcgacaatggcagcgggcacgcggagtggcggttcgctcgggcggcgaaggagggtgcgctggccgtggccggggacaagatgagcatccgggcggcgcggttcaagatcagcgcgagcgtggacgggcgcgacccgcggcccgtgctgccgcttgcgcacggggacccctcggtgttcccggccttccgcaccgccgccgaggccgaggacgccgtggccgccgcgctccggacgggcaagttcaactgctaccccgccggcgtgggcctccccgaagcccgccgtgctctggcggagcacctgtcaagtgatcttccatacaagctgtcaactgatgacatcttcctcaccgctggaggcactcaagccattgaggttgtcgtctcagtccttgcccaaccgggcgccaacatattgctcccaagaccaggctatccaaattatgaggcgcgtgcaggactgcacaacttacaagttcgccatttcgatctgattcctgagagagggtgggaaatcgatatcgactctctggagtcgattgctgacaagaacaccaccgcaatggtcatcataaaccccaacaatccttgcggcagtgtctacacccgtgaacatttagccaaggtcgcggaggtagcaaggaagcttggaatactagtcatcgctgatgaagtgtatggaaacctggtgtttggggacaccccttacgtcccaatgggtgtctttggccacattgcccctgtcttgagcataggatcactatcgaagaggtggatagtgcctgggtggcgacttggttgggtagctgtatgtgatcccaacaagattctgcaagaaaccaagatcattgcatcaataacaaacttccttaacgtttcaactgatccggcaacttttgttcagggagcacttccccatattcttgggaacacaaaggaagattttttcaggaggatcattggtctgctagcagaaacctcagagatatgttacagagaaataaaggacatcaagtgcatcacctgccctcacaagccagaaggttccatgtttgtcatggtgaaattaaatttgtatcttttggaggggattcatgacgatattgatttttgctgcaagctggcaaaagaagagtctgtgattttgtgtccagggagtgttttgggaatggaaaactggatccgcatcactttcgccattgattcatcttctcttcttgatggtcttgagaggatcaaatctttctgccaaaggcataagaagaagaatttgcttaatggccattaa

SEQ ID NO: 146127 - protein, 434 aa, Zea mays
MATHASDNGSGHAEWRFARAAKEGALAVAGDKMSIRAARFKISASVDGRDPRPVLPLAHGDPSVFPAFRTAAEAEDAVAAALRTGKFNCYPAGVGLPEARRALAEHLSSDLPYKLSTDDIFLTAGGTQAIEVVVSVLAQPGANILLPRPGYPNYEARAGLHNLQVRHFDLIPERGWEIDIDSLESIADKNTTAMVIINPNNPCGSVYTREHLAKVAEVARKLGILVIADEVYGNLVFGDTPYVPMGVFGHIAPVLSIGSLSKRWIVPGWRLGWVAVCDPNKILQETKIIASITNFLNVSTDPATFVQGALPHILGNTKEDFFRRIIGLLAETSEICYREIKDIKCITCPHKPEGSMFVMVKLNLYLLEGIHDDIDFCCKLAKEESVILCPGSVLGMENWIRITFAIDSSSLLDGLERIKSFCQRHKKKNLLNGH

SEQ ID NO: 146128 - DNA, 1323 bp, Zea mays
  CDS (1)..(1323)
atggcgacccacgccggcgagaacggcagcgggcacgagaacggcggcgggcacgcggagtggcggttcgcgcgggcggcgaaggagggcgcgctggccgtggcgggggacaagatgagcatccgggcggtgcggttcaagatcagcgcgagcctggacgcgcgcgacccgcggcccgtgctgccgctggcgcacggggacccctcggcgttcccggccttccgcaccgccgccgaggccgaggacgccgtggccgccgcgctccggaccggcaagttcaactgctaccccgccggcgtcggcctccccgaagcccgccgtgctctggcggagcacctgtcgagcgaccttccatacaagctgtcgagcgacgacatcttcgtcaccgccggaggcacgcaagccatcgaggtggtggtctcagtcctcgcgcagccgggcaccaacatactgctcccgaggccgggctatccgaactacgaggcgcgcgcagggctgcacaacctggaagttcgccggttcaatctgatccccgagagagggtgggagattgacatcgacggtctggagtcgatcgccgacaagaacaccaccgccatggtcatcataaaccccaacaacccttgcgggagtgtctacactcgtgagcatttggccaaggtcgcggaggtggcaaggaagcttggaatactggtcatcgctgatgaggtgtatggaaatctggtgtttggggacacccctttcgtccccatgggtgtctatggccacattgcccctgtgttgaccataggatcactgtccaagagatggatagtgcctgggtggcgacttggttgggtggccgtatgtgatcccaacaaggttctgcaagaaaccaagatcattgcatcgatcacaaacttccttaacgtttcaacagatccggcaacttttgttcagggagcacttccccatattcttaagaacacaaaggaagattttttcaagaggatcattggtctgctagcggaaacatcagagatatgtttcagcggaataaaggacatcaagtgcatcacatgccctcacaagccagaaggttccatgtttgtcatggtgaaactaaatttgtatcttttggagagcatccatgatgatattgatttttgttgcaagctggcaaaagaagagtccgtgattttgtgtccagggagtgttttgggaatggaaaactggatccgtatcactttcgccattgattcatcttctcttcttgatggtcttgagaggctgaaatctttctgccaaaggcataagaagaagaatttgcttaatggccattaa

SEQ ID NO: 146129 - protein, 440 aa, Zea mays
MATHAGENGSGHENGGGHAEWRFARAAKEGALAVAGDKMSIRAVRFKISASLDARDPRPVLPLAHGDPSAFPAFRTAAEAEDAVAAALRTGKFNCYPAGVGLPEARRALAEHLSSDLPYKLSSDDIFVTAGGTQAIEVVVSVLAQPGTNILLPRPGYPNYEARAGLHNLEVRRFNLIPERGWEIDIDGLESIADKNTTAMVIINPNNPCGSVYTREHLAKVAEVARKLGILVIADEVYGNLVFGDTPFVPMGVYGHIAPVLTIGSLSKRWIVPGWRLGWVAVCDPNKVLQETKIIASITNFLNVSTDPATFVQGALPHILKNTKEDFFKRIIGLLAETSEICFSGIKDIKCITCPHKPEGSMFVMVKLNLYLLESIHDDIDFCCKLAKEESVILCPGSVLGMENWIRITFAIDSSSLLDGLERLKSFCQRHKKKNLLNGH

SEQ ID NO: 146130 - DNA, 1449 bp, Zea mays
  CDS (1)..(1449)
atggcccccagcgtcgccgtggaaaacctcaaccccaaggtcttgaaatgtgagtatgcagtccgtggcgagattgtcatccatgctcagcgcttgcagcaacaactacaaacacaaccagggtctcttccttttgatgagatcctgttctgcaacattgggaatcctcaatcccttggtcagcaacctgtgacgttcttcagggaggttcttgctctttgtgatcatccatgcctcttggaaaaagaggaaaccaaatcattgttcagtgctgatgctatttctcgagcaaagcagattcttgcaactattcctggacgggcaacaggtgcatatagtcacagtcagggtatcaaaggattgcgtgatgcaattgctgctgggatcacctcacgtgacggattccctgcaaatgcagatgacattttcattacagacggagcaagtcctggggtccacatgatgatgcaattactgattaggaatgagaaagatggcattctgtgcccaattcctcagtaccccttgtactcggcctccatagctcttcatggtggagctcttgtcccctattaccttgatgaaaaaactgggtggggtttggagatctctgatcttaagaaacaactcgaagatgctcggtcaaaaggcattgatgttagggccttggtggttatcaatccaggaaatccgactgggcaggttcttgctgaagacaaccaatatgatatagtgaaattctgtaaaaatgagggccttgttcttctagctgatgaggtatatcaagagaacatctatgttgacaacaagaaatttaactctttcaagaagattgcaagatccatgggatacggcgaggatgatctccctctagtatcatttcagtctgtctccaaaggatactatggagagtgtggtaaaagaggaggttacatggagattactggcttcagtgctccggtaagagagcagatctacaaggtagcttcagtgaacctgtgctccaatatcactggtcaaatccttgcgagcctcgtcatgaatccaccaaaggttggggacgaatcatatgcttcctacaaggcagagaaagatggaatccttcagtctttagctcgccgtgcaaaggcactggaagatgcattcaacacgcttgagggattttcatgtaacaaggctgaaggagcaatgtaccttttccctcagatccatctgccacataaggcaattgaggctgctaaagctgccaagaaagcacctgatgcattctatgcgctccgtctccttgaatcaactggaattgttgtggttcctggatctggatttggccaagttcctggaacatggcacgtcagatgcacgatcctgccgcaggaagataaaatccccgcggtgatcacccgcttcaaggctttccatgaggcgttcatggctgagtaccgtgactga

SEQ ID NO: 146131 - protein, 482 aa, Zea mays
MAPSVAVENLNPKVLKCEYAVRGEIVIHAQRLQQQLQTQPGSLPFDEILFCNIGNPQSLGQQPVTFFREVLALCDHPCLLEKEETKSLFSADAISRAKQILATIPGRATGAYSHSQGIKGLRDAIAAGITSRDGFPANADDIFITDGASPGVHMMMQLLIRNEKDGILCPIPQYPLYSASIALHGGALVPYYLDEKTGWGLEISDLKKQLEDARSKGIDVRALVVINPGNPTGQVLAEDNQYDIVKFCKNEGLVLLADEVYQENIYVDNKKFNSFKKIARSMGYGEDDLPLVSFQSVSKGYYGECGKRGGYMEITGFSAPVREQIYKVASVNLCSNITGQILASLVMNPPKVGDESYASYKAEKDGILQSLARRAKALEDAFNTLEGFSCNKAEGAMYLFPQIHLPHKAIEAAKAAKKAPDAFYALRLLESTGIVVVPGSGFGQVPGTWHVRCTILPQEDKIPAVITRFKAFHEAFMAEYRD

SEQ ID NO: 146132 - DNA, 1275 bp, Brassica napus
  CDS (1)..(1275)
atggcgaccacccccatgtgcactgagtggcagttcagcgggaacgaggcagccaaagaagctgctgcggccgccctaggtgcctacacctctaaactcatggctctttgtgatcctaatggcaagcccattttgcccccgagtaacaaggccgtggagaccagcaattcagcggaaaaggctgtcgttaaagttattctctccggcactggaaacgcctatgctcctagcattggccttccgctcgccaaaagtgccgtagcagagtatctaaacagagatcttccaaagaagctaacagcagctgacgtgtttatgactgttggatgcaaacgagcaattgaccttgcggtggatattctggctaaaccaaaagccaacgttttgcttccgaggccaggcttcccgtgggatgtagtacgctgcatctataagaaactcgaggtccgttactatgatttcatccctgaacaaaactttgagatcgacttcgaaagcgtcaaaaaggtgacagacaagaacacctttgctatatttatcatcaaccctcacaatcccaatggaaacacttactcggaggctcatctcaaacagctcgctgaattggctaaggaactctcgattatggtggtttctgatgaagtttttagatggaccgtcttcgggaataacccttttgtgccgatgggaaagttttcttccatcgtaccagtggttacactcggatccttatctaagggatggaatgtcccaggatggcgaactggctggctcgcgctgcacgatctagacggtgtcttcagaaacactaagatattacaagctgccaacgaatttctccagataaatgccaaacctccgactgttattcaggcggctatgcctgacattttggagagaactccaaaacatttcttccacgagaggggaagttttctcaaacataaagtagatattggatattctaaggtcaagcacatacctggcctcacttgttacatgaaacccgaagcgtgcacctttttatggaccaagctggatatatcgtgctttgctgacattgaagacgatcaagacttctgcaggaagcttgctatggaagaaaatctcgtcgttttgccagggattgcatttaggcagaagaattggctgaggcattctatcgacatggagacgccaacagttgaggacgcatttgaaagattgaagagcttctgtgaacgccattccgctgaacgtggagcttcactcaaaaacgtcaatggcgtgaactag

SEQ ID NO: 146133 - protein, 424 aa, Brassica napus
MATTPMCTEWQFSGNEAAKEAAAAALGAYTSKLMALCDPNGKPILPPSNKAVETSNSAEKAVVKVILSGTGNAYAPSIGLPLAKSAVAEYLNRDLPKKLTAADVFMTVGCKRAIDLAVDILAKPKANVLLPRPGFPWDVVRCIYKKLEVRYYDFIPEQNFEIDFESVKKVTDKNTFAIFIINPHNPNGNTYSEAHLKQLAELAKELSIMVVSDEVFRWTVFGNNPFVPMGKFSSIVPVVTLGSLSKGWNVPGWRTGWLALHDLDGVFRNTKILQAANEFLQINAKPPTVIQAAMPDILERTPKHFFHERGSFLKHKVDIGYSKVKHIPGLTCYMKPEACTFLWTKLDISCFADIEDDQDFCRKLAMEENLVVLPGIAFRQKNWLRHSIDMETPTVEDAFERLKSFCERHSAERGASLKNVNGVN

SEQ ID NO: 146134 - DNA, 1371 bp, Brassica napus
  CDS (1)..(1371)
atgagcgaagaagaagcacacgccaaccttgcggttcccgcgtttcgaactgagaaagtggccaaaacgcaaacgcagaatggccacggtactgtttggcggttcggtggagctgataaggccgcgaaagccgcgaccgtaacgctgagaggcgttatttacatgctcttcgacaactgcagcaaagacgtcaaaaagactgtcttgcccctcggccacggagatccttccgtctatccttgcttccgcacctgtatcgaggccgaagacgccgtcgtcaacgtcctccgctccggcaaaagcaattcttactgtcccggagctggaattctcccggccagaagagccgtcgccgattatctgaaccgagatcttccgaacaaactaacgccggacgacatcttcctgaccgctggatgcaaccaagggatagagctggtgttcgaatcgttggctcgaccaaacgcaaacatattgctcccacgtcccggtttccctcactacgacgctcgtgctgtttacagtggtctagagatccgcaagttcgatcttcttcccgacagagaatgggagatcgatctcgaaggcgtcgaagccgttgcagacgagaacactgtggccattgttgtgatcaacccaaacaacccatgtggaaacgtctactctcacgaccatctccacaaggtggcagagacggctcggaagctggggataatggtgatcacagacgaagtgtacgaccagactatattcggagacaaccctttcgttccgatggccaagttcgcatcgatcgtccctgtgttgacgctgggaggcatatccaaaggttgggttgtccctggatggaagattggctggatcgccttgaatgatcccgagggcgttttcgagtccaccaaggtggttcaatccatcaagcagagtctagacataacacctgacccttccactatcattcaggctgcacttcctgagatcctggagaaagtggataaaaacttctttgcaaagaagaacaagatactcaaacataatgtcgatttggtgtgtgataggctcaaggatattccctgcgtcgtctgtcccaagaaacccgagtcttgcacttatctattgacaaagcttgagctgtcattgttggatggcatcaaggatgacattgatttttgcgtgaagctggccagagaggaaaacctcgtgtttcttccaggagaggctctgggggtgaagaactggatgaggataactatcggagtggaagctcatatgcttgaggatgcacttgagagactcaagggtttctgtacacgccataccaagaaaacagatacagaaactgagtcaccttcaagcgttgaaaatgagtga

SEQ ID NO: 146135 - protein, 456 aa, Brassica napus
MSEEEAHANLAVPAFRTEKVAKTQTQNGHGTVWRFGGADKAAKAATVTLRGVIYMLFDNCSKDVKKTVLPLGHGDPSVYPCFRTCIEAEDAVVNVLRSGKSNSYCPGAGILPARRAVADYLNRDLPNKLTPDDIFLTAGCNQGIELVFESLARPNANILLPRPGFPHYDARAVYSGLEIRKFDLLPDREWEIDLEGVEAVADENTVAIVVINPNNPCGNVYSHDHLHKVAETARKLGIMVITDEVYDQTIFGDNPFVPMAKFASIVPVLTLGGISKGWVVPGWKIGWIALNDPEGVFESTKVVQSIKQSLDITPDPSTIIQAALPEILEKVDKNFFAKKNKILKHNVDLVCDRLKDIPCVVCPKKPESCTYLLTKLELSLLDGIKDDIDFCVKLAREENLVFLPGEALGVKNWMRITIGVEAHMLEDALERLKGFCTRHTKKTDTETESPSSVENE

SEQ ID NO: 146136 - DNA, 1431 bp, Brassica napus
  CDS (1)..(1431)
atgtctactcagacctccgccgccgtcatttcctcctccgtcgccgccgctagagtcgaaccatacccagattcaaagaagccaatcgggtcaatccgtttccaacctcttcctctctccctctcgtactgtagtaagtcagggaaggtttcatctagaatctgcgccatgtccaaaccaaatgatgcagagactctctcttcagtagatacttcacttagccctcgtgtcaaatccttgaaaccttccaagaccatggtcataaccgatctcgccgcaactctggttcagtccggtgttcccgttgtcagactagctgctggagaacccgatttcgacactcctaaaatcgttgctgaggctgggatcaacgcgattcgagatggtttcactaggtattcgctgaatgcaggtattacagaactcagagaagctatatgtcggaagctaaaagaggagaatggattgtcttatgcaccggatcagatcttggttagtaacggagcgaaacaaagtatcttacaagcagtgcttgcagtttgttctcctggtgatgaagttataatccctgcaccgtattgggttagctacacagaacaggcgagattggctgatgcaacacctgtgattattcctacaaagatctctgataacttcttgttggatccaaaggttctggagtctaagctgactgagaaatctagactccttatcctctgctctccttctaaccctactggttctgtttaccccaagagtttgcttgaagagattgcacggatcattgctaaacacccaaggcttatggtgctatcagatgaaatatatgaacatattatatatgcgcctgcaacacacacaagctttgcttctttgcctaacatgtatgaaagaactttgacagtaaacggtttctctaaggcttttgcaatgacgggttggaggcttggatatcttgctggtcctaaacatatagtggcagcttgcagtaaattacaaggccaggttagttcaggagctagtagcatttctcagaaggcaggtgttgctgcacttgggttaggaaaagccggaggagagattgtagctgagatggtgaaagcatacagagagagacgtgatttcttggttaaaagcttccgtgaaatggaaggtgttaagatctctgaacctcagggagctttttatctctttattgacttcagtgcatactatggatcagaagctgaaggttttggtttgatcagtgactcatcctctcttgctttatactttcttgacaagtttcaggttgcaatggttcctggagatgcgtttggggacgatagttgtattcggatatcatacgccacatctctcgatgttctacgagtcgcagttgacaagatcaggaaagcccttgagcccctgcgtgccactgtttctgtgtaa

SEQ ID NO: 146137 - protein, 476 aa, Brassica napus
MSTQTSAAVISSSVAAARVEPYPDSKKPIGSIRFQPLPLSLSYCSKSGKVSSRICAMSKPNDAETLSSVDTSLSPRVKSLKPSKTMVITDLAATLVQSGVPVVRLAAGEPDFDTPKIVAEAGINAIRDGFTRYSLNAGITELREAICRKLKEENGLSYAPDQILVSNGAKQSILQAVLAVCSPGDEVIIPAPYWVSYTEQARLADATPVIIPTKISDNFLLDPKVLESKLTEKSRLLILCSPSNPTGSVYPKSLLEEIARIIAKHPRLMVLSDEIYEHIIYAPATHTSFASLPNMYERTLTVNGFSKAFAMTGWRLGYLAGPKHIVAACSKLQGQVSSGASSISQKAGVAALGLGKAGGEIVAEMVKAYRERRDFLVKSFREMEGVKISEPQGAFYLFIDFSAYYGSEAEGFGLISDSSSLALYFLDKFQVAMVPGDAFGDDSCIRISYATSLDVLRVAVDKIRKALEPLRATVSV

SEQ ID NO: 146138 - DNA, 1254 bp, Brassica napus
  CDS (1)..(1254)
atggataatggaggatcgacaatcacaattaaagggattctgagtttgctgatggaaagcatctcagagttggaagatgaagaaggaagatgcgtgaagagagttatatcacttggaatgggagacccaacactctactcgtgcttccgcacaacacaagtttcacttcaagctgtttcagattctcttctctccaacaagttccatggttatgctcccaccgttggtcttcctcaaactcgaagggcaatcgcagagtatctatcgcgtgatcttccatacaaactatctcaggacgatgtattcatcacatctggttgcacacaagcaatcgatgtagcactggcaatgttggctcgtcccagggccaatatacttcttccaaggcccggtttcccgatctatgaactctgtgctaagtttagaaacctcgaggttcgctacttcgaccttctcccagaaaacggatgggagatcgatcttgacgctgtcgagtctcttgcagacgaaaacacagttgctttggttgttataaaccctggtaatccttgcgggaatgtctatagttacctgcatttgatgaagattgcggaaacggcgaaaaaactagggattcttgtgattgctgatgaagtttatggccatcttgcttttgggagcaaaccatttgtgccaatgggtgtgtttggatctatcgttccggtgcttactcttggatctttatcaaagagatggatagttcctggttggcggctcggctggttcgtgaccactgacccttctggctcgtttaaagacccaaagatcatcgagcggttcaagaaatactttgatattcttggtggaccagccacatttatccaggctgcagttcccacgattctggaacagacggacgaaccattcttcaagaaaacgttgaactcgttgaagaactcttcggatatttgctatgactggatcaacgagattccttgcattgattcctcgcatcgaccagaaggatccatggcaatgatggttaagctgaatctctcgttactagaagatataagcgacgatatcgacttctgtttcaagctagctagagaagaatcagtcatccttcttcctgggactgcggtggggcttaagaactggctgaggataacgtttgcggctgatgcttcttcgattgaagaagcttttaaaaggatcaaatgtttttatctcagacatgccaagactcagtctcaaatcatagttgatttgtga

SEQ ID NO: 146139 - protein, 417 aa, Brassica napus
MDNGGSTITIKGILSLLMESISELEDEEGRCVKRVISLGMGDPTLYSCFRTTQVSLQAVSDSLLSNKFHGYAPTVGLPQTRRAIAEYLSRDLPYKLSQDDVFITSGCTQAIDVALAMLARPRANILLPRPGFPIYELCAKFRNLEVRYFDLLPENGWEIDLDAVESLADENTVALVVINPGNPCGNVYSYLHLMKIAETAKKLGILVIADEVYGHLAFGSKPFVPMGVFGSIVPVLTLGSLSKRWIVPGWRLGWFVTTDPSGSFKDPKIIERFKKYFDILGGPATFIQAAVPTILEQTDEPFFKKTLNSLKNSSDICYDWINEIPCIDSSHRPEGSMAMMVKLNLSLLEDISDDIDFCFKLAREESVILLPGTAVGLKNWLRITFAADASSIEEAFKRIKCFYLRHAKTQSQIIVDL

SEQ ID NO: 146140 - DNA, 1263 bp, Brassica napus
  CDS (1)..(1263)
atgggtgaaatcggagccaagcgatggaacttcggagccaacgaggtggtcgaacgttcaagctccttaagcattcgtgagtatcttaataccttaatcagtaatctcgacgaaggtgacaccagacccgtcatcgccctcggacatggcgacccttctccgttcccgagattcagtactgatccatcagctgttaaagccatctgcgacgctgttagctccaccaagtttaacaactatgcttctgcttccggtattcctgccgctaggaaagctgttgcagagtacctctctcgagatctctcttaccagatatctccaaatgatgttcatatcacttctggttgtttgcaagcaattgagattttgatctcagcactcgcaaatcctggtgccaacattctgctgcctaggcccacttaccccatgtatgattccagagcgtctttcagtcagctagaggttcgttatttcgacctcctaccagaaaatggttgggatgttgatctggacgctgttgaagctcttgcagacgacaaaaccgtagctatagttgttgtcaacccttgcaatccttgtggaaacgttttttcccgccaacatcttcaaaagattgcagagacagcttgcaagcttggaatacttttgatcgcagacgaagtttacgaccattatgcatttggggataaaccatttgtgtccatggcagagtttgcagagatagtgcctgtaattttgttaggcgccatatcgaaaagatggtttgttcctggctggagacttggctggatggtgactcttgaccctcattgcatcatgaaagattctgggtttgttcagtctcttaccaacgtcatcaacatttcgacggacgccgtaacgttcattcagggtgccattcctgagatccttgggaatacgaaagaagaattcttctcagtgaaacttgaaaagatgagagaatgtgcagagatttgttatgaagagattatgaagatcccttgcatcacttgccccagcaaacccgaggggtccatgttcacgatggtgaagttaaacctgtcactactcgaagatatcagtgatgatttggatttctgctgcaagctggctaaagaggaatcgttgatcatcctacccggtcgagctgttgggctcaagaactggctacgtatcacttttgcgattgagctcgatctcctcatagacggcttttccaggctaaagaacttttcccagagacactccaagaaaaagccatga

SEQ ID NO: 146141 - protein, 420 aa, Brassica napus
MGEIGAKRWNFGANEVVERSSSLSIREYLNTLISNLDEGDTRPVIALGHGDPSPFPRFSTDPSAVKAICDAVSSTKFNNYASASGIPAARKAVAEYLSRDLSYQISPNDVHITSGCLQAIEILISALANPGANILLPRPTYPMYDSRASFSQLEVRYFDLLPENGWDVDLDAVEALADDKTVAIVVVNPCNPCGNVFSRQHLQKIAETACKLGILLIADEVYDHYAFGDKPFVSMAEFAEIVPVILLGAISKRWFVPGWRLGWMVTLDPHCIMKDSGFVQSLTNVINISTDAVTFIQGAIPEILGNTKEEFFSVKLEKMRECAEICYEEIMKIPCITCPSKPEGSMFTMVKLNLSLLEDISDDLDFCCKLAKEESLIILPGRAVGLKNWLRITFAIELDLLIDGFSRLKNFSQRHSKKKP

SEQ ID NO: 146142 - DNA, 1275 bp, Brassica napus
  CDS (1)..(1275)
atggcgaccacccccatgtgcactgagtggcagttcagcgggaacgaggcagccaaagaagctgctgcggccgccctaggtgcctacacctctaaactcatggctctttgtgatcctaatggcaagcccattttgcccccgagtaacaaggccgtggagaccagcaattcagcggaaaaagctgtcgttaaagttattctctccggcactggaaacgcctatgctcctagcattggccttccgctcgccaaaagtgccgtagcagagtatctaaacagagatcttccaaagaagctaacagcagctgacgtgtttatgactgttggatgcaaacgagcaattgaccttgcggtggatattctggctaaaccaaaagccaacgttttgcttccgaggccaggcttcccgtgggatgtagtacgctgcatctataagaaactcgaggtccgttactatgatttcatccctgaacaaaactttgagatcgacttcgaaagcgtcaaaaaggtgacagacaagaacacctttgctatatttatcatcaaccctcacaatcccaatggaaacacttactcggaggctcatctcaaacagctcgctgaattggctaaggaactctcgattatggtggtttctgatgaagtttttagatggaccgtcttcgggaataacccttttgtgccgatgggaaagttttcttccatcgtaccagtggttacactcggatccttatctaagggatggaatgtcccaggatggcgaactggctggctcgcgctgcacgatctagacggtgtcttcagaaacactaagatattacaagctgccaacgaatttctccagataaatgccaaacctccgactgttattcaggcggctatgcctgacattttggagagaactccaaaacatttcttccacgagaggggaagttttctgaaacataaagtagatattggatattctaaggtcaagcacatacctggcctcacttgttacatgaaacccgaagcgtgcacctttttatggaccaagctggatatatcgtgctttgctgacattgaagacgatcaagacttctgcaggaagcttgctatggaagaaaatctcgtcgttttgccagggattgcatttaggcagaagaattggctgaggcattctatcgacatggagacgcaaacagttgaggacgcatttgaaagattgaagagcttctgtgaacgccattccgctgaacgtggagcttcactcaaaaacgtcaatggcgtgaactag

SEQ ID NO: 146143 - protein, 424 aa, Brassica napus
MATTPMCTEWQFSGNEAAKEAAAAALGAYTSKLMALCDPNGKPILPPSNKAVETSNSAEKAVVKVILSGTGNAYAPSIGLPLAKSAVAEYLNRDLPKKLTAADVFMTVGCKRAIDLAVDILAKPKANVLLPRPGFPWDVVRCIYKKLEVRYYDFIPEQNFEIDFESVKKVTDKNTFAIFIINPHNPNGNTYSEAHLKQLAELAKELSIMVVSDEVFRWTVFGNNPFVPMGKFSSIVPVVTLGSLSKGWNVPGWRTGWLALHDLDGVFRNTKILQAANEFLQINAKPPTVIQAAMPDILERTPKHFFHERGSFLKHKVDIGYSKVKHIPGLTCYMKPEACTFLWTKLDISCFADIEDDQDFCRKLAMEENLVVLPGIAFRQKNWLRHSIDMETQTVEDAFERLKSFCERHSAERGASLKNVNGVN

SEQ ID NO: 146144 - DNA, 1320 bp, Brassica napus
  CDS (1)..(1320)
atggcgaccagcggtaatgacaactgcaatgcaaacgacagtgtttggcagttcagaggaaaccgtgcgacgagtgatgcagctgcggtaacattgagaaaactcgtgtttggaatgtttaagaactgcaacttcaacaatggaaagaccatcttgccctccacgactcatagcttcaagacttgccctgaagcggaggaagctgtggctgcagccgtccgctccggcatggccaactcatatgcacctagccctggaattttcaacgccagaagagcggtggcagattatctaaattgcgagcttcctactaagctaagaccggaggatgtgtatatcacgggcggatgcaaccaagcgattgagatcgtaatagattctctcgcaggcaatccagcaggcaacattctgcttcctaatccaggatatcctcactatgatgctcgcgctattcacagcggcgtcgaggttcgcaaatacgatctcctcccggaaagagattttgagattgatctggatgccctcgaggctgctgccgataagaataccgtcgcacttgtcctcatcaaccccaacaatccatgtggaaacgtctacacctacgatcatcttaagaaggttgcggagatggctaaaaaactcggtatagtggttatatccgacgaagtatatgataaggttgtatatggagacaggccctttgttccaatgggcacatttgcatcgatagctccggtgatcacgctcggatccatatccaaaggatgggttgtacctggctggagaatcggctggatggccatgaacgatcctaatcgcattcttaaaaatgcaggggtagttgaatcaatcgaggattgtcttgatctaactccacagccttcatttcttcttcaggaagcacttcctgaaatattggagaaaacacccaaggagtacttcgccaagaagaataaagctatgaaacgcaatgtagagctttcatttgagaggctacgggacatcccttgtcttttttgccacaagaaacctgaatcttgttcttacttatggttaaggcttgacacatcagtgttagattatatagaaaatgatctcgatttttgcacaaagctagtcagtgaagagagtctaatccttgtaccaggagtggctttaggagcaaagaattgggtgaggatctcgatcggcactgaagaatcagagttagcggaaacattcgacagattaaaaagtttctacagtcgtcatgccatttccaaagaaaatatcaaatcccatggtgataccgttaatcagatagttgtcgctgtcatctga

SEQ ID NO: 146145 - protein, 439 aa, Brassica napus
MATSGNDNCNANDSVWQFRGNRATSDAAAVTLRKLVFGMFKNCNFNNGKTILPSTTHSFKTCPEAEEAVAAAVRSGMANSYAPSPGIFNARRAVADYLNCELPTKLRPEDVYITGGCNQAIEIVIDSLAGNPAGNILLPNPGYPHYDARAIHSGVEVRKYDLLPERDFEIDLDALEAAADKNTVALVLINPNNPCGNVYTYDHLKKVAEMAKKLGIVVISDEVYDKVVYGDRPFVPMGTFASIAPVITLGSISKGWVVPGWRIGWMAMNDPNRILKNAGVVESIEDCLDLTPQPSFLLQEALPEILEKTPKEYFAKKNKAMKRNVELSFERLRDIPCLFCHKKPESCSYLWLRLDTSVLDYIENDLDFCTKLVSEESLILVPGVALGAKNWVRISIGTEESELAETFDRLKSFYSRHAISKENIKSHGDTVNQIVVAVI

SEQ ID NO: 146146 - DNA, 1614 bp, Glycine max
  CDS (1)..(1614)
atgacccagaccagaaagcccagaaagcccaacccgcaagcccgcgaagcccaacagaaccacccttcttcttcattctccagcaccggcatgaaactcatcgtccccctccagggcgtggtgcagggacgcggaggccttctcctcgggaccctcgtcccctgcacgctcttctacttcctccagctctacctcaaacgacgccgttccaacttctcccctccctccccctcttcttccgaacccaccctcccacgcacctcctcccgctccaatttgtcgacgcgtggctccatttcccgcgtccgcgtctccaagctcgccacgtcgatttccaaacccgacgagtcactctattacgtagggttggagagggtctcgcgagatccctacgatgcattggagaatcccaatgggattattcagttgggcttgtcggataacaagctgtgcttggatttgataggggaatgggtggcgcggaacttggaaggttccatcagtggtggtgttggtttgggaatcaatgggattgtgccgtatcagtcgtttgatggggtgatggaattgaaaatggctttgtcagattttatgcatcaggtgattgggggatcagtgaaatttgacccatctaacatggtactaacagctggggcaactcctgcaattgagatattgtccttctgtttggcagaccatggaaatgcattccttgtccctacaccatattatcctggctttgacagagatgtaagatggcgtcctggggtagacctaatacctgttcattgtcgcagtactgacaatttcgatttaaatatcactgctcttgaacaagcatttagtcaagcaagaaaacgaggagtcaaagttcgtggaattctaatttccaacccttcaaatcctgttggcaatatgatgacacaagacatgctttacagtcttttagactttgctgaagagaaaaatattcatatcattgctgatgaagtatttgcaggctccacgtatggaagtgagaagtttgtgagcatagctgaaattcttgattcagattatatagacaagagccgggtccatataatatatggtctgtcaaaagacctttcgcttgctggctttagagtcggggttatatgttcattcaatgagagtgttttggctgctgccaagaagttgagtagattttcctctatatccgctccgacccagaggttagttacttcaatgctttcagataaaagatttattcgggagtactttgaaaccaaccagaaaagaatacgacaagtgcacgatgaatttgtgggttgtttaagtaaactaggaatcaagtgtgccaagagcagtgctggtatgtactgttgggctgatatgagtggattaatccgaccttatagtgagaaaggagaaattgaattatgggagaagtttttgagtgttgctaagatcaatataactcctgggtcagcctgtcattgcatagaaccaggatggtttaggatttgttttaccactataacattagaggagatccctttggtaattgaacgaattcaggaaagcttgttgaaagttgtaattcttctagttgaagttccattgtttcattga

SEQ ID NO: 146147 - protein, 537 aa, Glycine max
MTQTRKPRKPNPQAREAQQNHPSSSFSSTGMKLIVPLQGVVQGRGGLLLGTLVPCTLFYFLQLYLKRRRSNFSPPSPSSSEPTLPRTSSRSNLSTRGSISRVRVSKLATSISKPDESLYYVGLERVSRDPYDALENPNGIIQLGLSDNKLCLDLIGEWVARNLEGSISGGVGLGINGIVPYQSFDGVMELKMALSDFMHQVIGGSVKFDPSNMVLTAGATPAIEILSFCLADHGNAFLVPTPYYPGFDRDVRWRPGVDLIPVHCRSTDNFDLNITALEQAFSQARKRGVKVRGILISNPSNPVGNMMTQDMLYSLLDFAEEKNIHIIADEVFAGSTYGSEKFVSIAEILDSDYIDKSRVHIIYGLSKDLSLAGFRVGVICSFNESVLAAAKKLSRFSSISAPTQRLVTSMLSDKRFIREYFETNQKRIRQVHDEFVGCLSKLGIKCAKSSAGMYCWADMSGLIRPYSEKGEIELWEKFLSVAKINITPGSACHCIEPGWFRICFTTITLEEIPLVIERIQESLLKVVILLVEVPLFH

SEQ ID NO: 146148 - DNA, 1446 bp, Glycine max
  CDS (1)..(1446)
atgccaccaaagcctttagactatgggtcaataaatgaaaacgtgaagaagagtcaatatgctgtcagaggtgaattataccttcgagcttctgaacttcagaaagagggcaaaaagattatctttactaatgttggcaacccgcatgcattgggacagaaaccactgagcttccctcgccaggttgttgctttgtgccaagctccattcctacttgatgatcctaatgttggactgctattccctgctgatgcaattgcaagagctaaacactatctttcattgacctcgggtggtttaggtgcttatagtgactcccgtggccttccaggagtgaggaaggaagttgctgagttcatactcaggcgtgatggttatccaactgatccagagctcatatatctcactgatggtgcaagcaaaggagtgatgcagatattaaatactatcatcaggggtcaagacgatgggattttggttccagtcccacaatacccactctactcagcaacaattgctctgcttggtggtacccttgttccatactaccttgaagagacagcaaattggggtcttgatgttaatgaacttcgtcaatcagttgaacaggctcgctttaaaggaataactgttaaagcaatggtgatcataaatcctggaaaccctactggtcaatgccttagtgaagctaatctaagagaggttttgcaattctgctatcaagaaaatttagccttgcttggagatgaggtttaccagacgaatatatatcaggatgaacgacccttcatcagttctagaaaggttttgatggaattggggccacctataagcaaggaagttcagcttatttcttttcactctgtgtcaaaaggttattatggtgaatgtggacagcgaggtggatattttgaaatgaccaacattcctccagagacagttgatgagatctacaaggttgcatcaatatcacttagtccaaatgttccagcacaaatatttatgggagttatgctcaatccacctcaacctggagatatttcttatgacaaatttgttagggagagcaccggaatacttgaatcactgagaagaagagcaaggataatgactgatggattcaacagttgcagaaatgtggtttgtaattttactgaaggtgccatgtattcattccctcaaatacgcttgccgccaagagctttagaggctgctaaacaggctggaaaggttccagatgtttactactgcctcaagcttttggaagccactggcatatccactgttcctggttcaggatttggtcagaaagaaggggtgttccatttgaggacaactattttaccagctgaggaagacatgcctgatattatggatagtttcaaaaagttcaatgatgaattcatggagcaatacgaagacgatagaggttattcaaggttgtaa

SEQ ID NO: 146149 - protein, 481 aa, Glycine max
MPPKPLDYGSINENVKKSQYAVRGELYLRASELQKEGKKIIFTNVGNPHALGQKPLSFPRQVVALCQAPFLLDDPNVGLLFPADAIARAKHYLSLTSGGLGAYSDSRGLPGVRKEVAEFILRRDGYPTDPELIYLTDGASKGVMQILNTIIRGQDDGILVPVPQYPLYSATIALLGGTLVPYYLEETANWGLDVNELRQSVEQARFKGITVKAMVIINPGNPTGQCLSEANLREVLQFCYQENLALLGDEVYQTNIYQDERPFISSRKVLMELGPPISKEVQLISFHSVSKGYYGECGQRGGYFEMTNIPPETVDEIYKVASISLSPNVPAQIFMGVMLNPPQPGDISYDKFVRESTGILESLRRRARIMTDGFNSCRNVVCNFTEGAMYSFPQIRLPPRALEAAKQAGKVPDVYYCLKLLEATGISTVPGSGFGQKEGVFHLRTTILPAEEDMPDIMDSFKKFNDEFMEQYEDDRGYSRL

SEQ ID NO: 146150 - DNA, 1278 bp, Glycine max
  CDS (1)..(1278)
atggaaagtggggttgtggctgtgaacaacaacatcaacaactatgaatccaaggcaacttccaccatcaccattaagggcattctcagccttctaatggaaagcattgatgatgagaattgtgatggtggtggaagcaagaagagagttatttctcttggtatgggtgacccaactctcaccacattgttccacacaccaaaggttgttgaagaggctgtcgctgatgctcttcaatctcgcaagtttcatggctatgctcccactgctggacttctccaggctagaattgcaattgctgaatatctatctcgtgaccttccttatcaattatcacgagatgatgtcttcatcacttgtggatgcacacaagccattgatgtttcggtggcgatgcttgctcgccctggtgcaaacatcttgcttccaaggccaggcttcccaatctatgaactttgtgctgcatttagaggggttgaagtgaggcattatgatctgcttccagagaaaggttgggaggttgatctagatgctgttgaagctcttgctgatcagaacacagtggcgttggcgatcataaaccctgggaatccttgtgggaatgtgtacagttaccaccatttggagaagattgctgaaactgcaaaacgggttggaacaattgtgatctctgatgaagtttatggtcaccttgcatttgggagcaagccttttgtaccgatgggagtttttggctctactgttcctgttctcactcttggctcactttctaagagatggatagttcctgggtggaggcttggttggtttgtgacaaatgatccatctggcacttttagagaaccaaaggtagtcgagcgtatcaaaaagtattttgatcttctaggaggtccagcaaccttcttgcaggctgctgtacctcagataattgcaaataccgaagaaattttcttcgagaaaaccattgataatttgaggcatacagcagatatatgttgtaaagagatagaggatattccctgcattttttgcccttacaaaccagaaggatccatggctatgatggtgaaattaaacctttcacttctggaagatattagtgatgatattgacttctgtttcaaacttgcaaaggaggaatctgtgatcattcttccaggaactgcagtaggcctaaaagattggcttcgtattactttcgctgctgatccatctgctcttggagagggtatgagaaggataaaatctttctatcaaaggcatgcaagaaaattgtaa

SEQ ID NO: 146151 - protein, 425 aa, Glycine max
MESGVVAVNNNINNYESKATSTITIKGILSLLMESIDDENCDGGGSKKRVISLGMGDPTLTTLFHTPKVVEEAVADALQSRKFHGYAPTAGLLQARIAIAEYLSRDLPYQLSRDDVFITCGCTQAIDVSVAMLARPGANILLPRPGFPIYELCAAFRGVEVRHYDLLPEKGWEVDLDAVEALADQNTVALAIINPGNPCGNVYSYHHLEKIAETAKRVGTIVISDEVYGHLAFGSKPFVPMGVFGSTVPVLTLGSLSKRWIVPGWRLGWFVTNDPSGTFREPKVVERIKKYFDLLGGPATFLQAAVPQIIANTEEIFFEKTIDNLRHTADICCKEIEDIPCIFCPYKPEGSMAMMVKLNLSLLEDISDDIDFCFKLAKEESVIILPGTAVGLKDWLRITFAADPSALGEGMRRIKSFYQRHARKL

SEQ ID NO: 146152 - DNA, 1437 bp, Glycine max
  CDS (1)..(1437)
atgccgaatccctctccggaaccaatccctggccttctctcgccacgtttgcagatccctctctttcctccctatgtgagttctctcctctcttcttccctgcaatttcacttcacacaccaattgctctctctcacccttcgcagaacacgtgcggcaaaacaacccaacgcaattgcggttaaggcttcttcgcactctgacttcgacgttgacctttcgctcagtcctcgtgtcaatgccgtcaagccttccaaaaccgtcgccatcagcgaccacgccaccgctctcgtccaagccggcgttcccgtcatccgcctcgccgccggcgagcccgatttcgacacgcccgctcccatagccgaggctgggattaatgcaattcgtgaaggttacacgaggtacacgcccaatgccggaaccatggaactgcgccaagcgatttgtcacaagctaaaagaagagaatgggattacttatactcctgaccaagttgtggttagtaacggagccaaacagagtattgctcaggcagtgcttgcagtttcctcccctggagatgaggttattattccagctccattctgggttagttacccagaaatggcaaggttggctgatgcaacacctgtgattcttccaaccttaatatctgataatttccttttggatcccaaactcctcgaatccaaaattactgaaagatcaagactgcttattctttgttctccatctaacccaacgggatctgtctaccccaaagaattacttgaagagatagcccggattgttgcaaagcaccccaggctcctggttctctccgatgaaatttatgaacacataatttatgcaccagcaactcacacaagttttgcatctttaccaggaatgtgggacagaactcttactgtgaatggattttccaaggcctttgcaatgactggttggcggcttggatatattgctggtccaaaacattttgttgcagcatgtggaaagatccaaagtcagttcacttcaggggccagtagtatagctcagaaagctgcagttgctgcattaggactaggccatgctggtggggaggcagtttctaccatggtgaaagcatttagggagcgaagggatttcttggtaaaaagttttagagaaatagatggtgtcaagatatctgaaccccagggagcattttatctattccttgatttcagcttctattatggaagagaagctgaaggattcggtaaaattgaggattctgagtccctctgtcgatatctactggatgtgggccaggtagccctggtgccagggagtgcatttggagatgacacttgcatccgcatctcttatgcagaatcccttactaccctacaggcagctgtagaaagagttaagagagcacttatcccgctgagctctgctgcacttgtttaa

SEQ ID NO: 146153 - protein, 478 aa, Glycine max
MPNPSPEPIPGLLSPRLQIPLFPPYVSSLLSSSLQFHFTHQLLSLTLRRTRAAKQPNAIAVKASSHSDFDVDLSLSPRVNAVKPSKTVAISDHATALVQAGVPVIRLAAGEPDFDTPAPIAEAGINAIREGYTRYTPNAGTMELRQAICHKLKEENGITYTPDQVVVSNGAKQSIAQAVLAVSSPGDEVIIPAPFWVSYPEMARLADATPVILPTLISDNFLLDPKLLESKITERSRLLILCSPSNPTGSVYPKELLEEIARIVAKHPRLLVLSDEIYEHIIYAPATHTSFASLPGMWDRTLTVNGFSKAFAMTGWRLGYIAGPKHFVAACGKIQSQFTSGASSIAQKAAVAALGLGHAGGEAVSTMVKAFRERRDFLVKSFREIDGVKISEPQGAFYLFLDFSFYYGREAEGFGKIEDSESLCRYLLDVGQVALVPGSAFGDDTCIRISYAESLTTLQAAVERVKRALIPLSSAALV

SEQ ID NO: 146154 - DNA, 1437 bp, Glycine max
  CDS (1)..(1437)
atgccgaatccctctccggaaccaatccctggccttctctcgccacgtttgcagatccctctctttcctccctatgtgagttctctcctctcttcttccctgcaatttcacttcacacaccaattgctctctctcacccttcgcagaacacgtgcggcaaaacaacccaacgcaattgcggttaaggcttcttcgcactctgacttcgacgttgacctttcgctcagtcctcgtgtcaatgccgtcaagccttccaaaaccgtcgccatcagcgaccacgccaccgctctcgtccaagccggcgttcccgtcatccgcctcgccgccggcgagcccgatttcgacacgcccgctcccatagccgaggctgggattaatgcaattcgtgaaggttacacgaggtacacgcccaatgccggaaccatggaactgcgccaagcgatttgtcacaagctaaaagaagagaatgggattacttatactcctgaccaagttgtggttagtaacggagccaaacagagtattgctcaggcagtgcttgcagtttcctcccctggagatgaggttattattccagctccattctgggttagttacccagaaatggcaaggttggctgatgcaacacctgtgattcttccaaccttaatatctgataatttccttttggatcccaaactcctcgaatccaaaattactgaaagatcaagactgcttattctttgttctccatctaacccaacgggatctgtctaccccaaagaattacttgaagagatagcccgaattgttgcaaagcaccccaggcttctggttctctctgatgaaatttacgaacacataatttatgcaccagcaactcacacaagctttgcatctttaccaggaatgtgggacagaactcttactgtgaatggattttctaaggcctttgcaatgactggttggcggcttggatatattgctggtccaaaacattttgttgcagcatgtggaaagatccaaagtcagttcacttcaggggccagtagtatagctcagaaagctgcagttgctgcattaggactaggccatgctggtggggaggcagtttctaccatggtgaaagcatttagggagcgaagggatttcttggtacaaagttttagagaaatagatggtgtcaagatatctgaaccccagggagcattttatctattccttgatttcagcttctattatggaagagaagctgaaggattcggtaaaattgaggattctgagtccctctgtcgatatctactggatgtgggccaggtagccctggtgccagggagtgcatttggagatgacacttgcatccgcatctcttatgcagaatcccttactaccctacaggcagctgtagaaagagttaagagagcacttatcccgctgagctctgctgcacttgtttaa

SEQ ID NO: 146155 - protein, 478 aa, Glycine max
MPNPSPEPIPGLLSPRLQIPLFPPYVSSLLSSSLQFHFTHQLLSLTLRRTRAAKQPNAIAVKASSHSDFDVDLSLSPRVNAVKPSKTVAISDHATALVQAGVPVIRLAAGEPDFDTPAPIAEAGINAIREGYTRYTPNAGTMELRQAICHKLKEENGITYTPDQVVVSNGAKQSIAQAVLAVSSPGDEVIIPAPFWVSYPEMARLADATPVILPTLISDNFLLDPKLLESKITERSRLLILCSPSNPTGSVYPKELLEEIARIVAKHPRLLVLSDEIYEHIIYAPATHTSFASLPGMWDRTLTVNGFSKAFAMTGWRLGYIAGPKHFVAACGKIQSQFTSGASSIAQKAAVAALGLGHAGGEAVSTMVKAFRERRDFLVQSFREIDGVKISEPQGAFYLFLDFSFYYGREAEGFGKIEDSESLCRYLLDVGQVALVPGSAFGDDTCIRISYAESLTTLQAAVERVKRALIPLSSAALV

SEQ ID NO: 146156 - DNA, 1437 bp, Brassica napus
  CDS (1)..(1437)
atggctttagagtacgagtctctgaatgaaaacgtgaagaagtgtcagtatgctgtaagaggtgaactctatctccgtgcttctgagcttcagaaagaaggcaaaaagattattttcacaaacgttgggaaccctcatgctttaggacagaagccactgacatttcctcgccaggtggttgcgctctgtcaagcaccgtttctactagatgacccgaacgttggaatgatattcccagctgatgctattgcaagagctaagcattatctttccttgacctcaggcggttttggtgcttacagtgactcaagaggccttccaggagttagaaaggaagttgctgagttcatccaacggcgtgatggttatccaagcgacccggaactcatatttttaactgatggagctagcaaaggagtgatgcaaatcttgaactgtatcatacgcaaccagaaagacggaattctggttccagtgccacagtatccactctactcagctaccatatctctgttaggaggcactcttgttccttactatcttgaagagactgacaactggggacttgatgttaacaaccttcgccaatctgttgctcaggctcgctctcaaggaataacagtaagggcaatggtgatcattaaccccggaaacccaactggtcagtgtctaagcgaagctaacttaagagagatattgaagttctgttgtgacgagagattggttctacttggagacgaagtctatcagcagaacatatatcaagatgaaagacccttcatcagctcaaagaaagttttgatggatatgggagccccgtcgagcaaggaagttcagctcatatctttccacacagtttcaaaaggttactggggtgaatgtggacaacgaggtggttacttcgagatgacaaacatccccccaaggaccgttgaggagatatacaaggttgcatctatagctcttagtcccaacgtctctgcgcagatatttatgggtttaatggttagtccaccaaagcctggagacatttcatatgaccagttcgtccgtgaaagcaagggaatactagagtcactgagaagaagagcaaggatcatgactgatgggttcaacagctgcaaaaacgttgtctgtaacttcacggaaggtgcaatgtattcgtttcctcagataaagttgccaccgaaagcaatccaagcagcgaaacaagctggaaaggtttctgatgttttctactgccttaagctcttagaagccacgggaatctccacagttcctggctctggatttggacagaaagaaggggtgtttcatctgaggacaacgattctgcctgcagaagaagagatgccagagattatggaaagtttcaagaagtttaatgatgagttcatgtctcagtacggtgataactttggttactcaaggatgtga

SEQ ID NO: 146157 - protein, 478 aa, Brassica napus
MALEYESLNENVKKCQYAVRGELYLRASELQKEGKKIIFTNVGNPHALGQKPLTFPRQVVALCQAPFLLDDPNVGMIFPADAIARAKHYLSLTSGGFGAYSDSRGLPGVRKEVAEFIQRRDGYPSDPELIFLTDGASKGVMQILNCIIRNQKDGILVPVPQYPLYSATISLLGGTLVPYYLEETDNWGLDVNNLRQSVAQARSQGITVRAMVIINPGNPTGQCLSEANLREILKFCCDERLVLLGDEVYQQNIYQDERPFISSKKVLMDMGAPSSKEVQLISFHTVSKGYWGECGQRGGYFEMTNIPPRTVEEIYKVASIALSPNVSAQIFMGLMVSPPKPGDISYDQFVRESKGILESLRRRARIMTDGFNSCKNVVCNFTEGAMYSFPQIKLPPKAIQAAKQAGKVSDVFYCLKLLEATGISTVPGSGFGQKEGVFHLRTTILPAEEEMPEIMESFKKFNDEFMSQYGDNFGYSRM

SEQ ID NO: 146158 - DNA, 1329 bp, Oryza sativa
  CDS (1)..(1329)
atggagggcggccgcggggggaagcgatggcgcttcgcgaccccgaatctggccgtggccgcggccggggaacgcagcatccagcggtacctccttcagctgcacgcgtgcctggacgagaacgggccacggcccgtcatcccgctcagccacggcgacccttcctcctccgcctgcttccgcaccgcgcccgaggcagaggaagccgtcgccgccgccgtccgctccggcgactacaacggctactcctcccccgccaccagcctccctgctcgccgatcggctattgcagagtacctatcctgtgatcttccttacaagctttgcacagatgatattttcctcacatctggaggtacccaagcaatcgagattgttatgtctgtttttggccaaccaggtgccaatatattgcttccaaagcccgggtacccaaaacatgaagcacatgcggtgttccacaggatggaagtgcggctctatgatcttgttccagagagaggatgggagattaatgttgaagctgttgaagctttagcagatgagaatactgttgcaatagtgattactaaccccaataacccttgtggtaatgtgtacacttatgagcatctgtccaagattgcagatacagcaagcaagttcggtctgttagtcattgctgatgaagtatatggtcaccttgtttatggaagcactccttttgtgccaatgggtgtgtttggagagactgttccagtactcacattgggagctatatcaaagagatgggttgtccctggctggagatttggatggatagcaatttgtgatcctaaaggcattctgaaagaaacaaaggtcgtcgattcactcagaagctttcgaaacctaacaacaggtcctgcaacatttattcagggagctattcctcatattatgaagaacacaaatgatgaattcttcagaaagactctcgagttgttaaaggaaactgctgagatatgttttggtgaaataaaagaaataaagtgtatcacctgtcctcacaaacctgaggggtcgttttttatgatggtaaaacttgatatatcacaattatcggacatttgtgacgacatcgatttctgcagcaagttggtaaaggaggagtctgtcgtacttttgcctgggagagccttaggcatggaaaactggttgcgcatcacctttgcattggatcccccaaggctaaagcaaggattagaaagggtcaagtccttttgccggaggcatcagtcacatgctaatatgctcaatataagtgcgtcggcgaaagtggagccccatttcggaatgtcaaagagttag

SEQ ID NO: 146159 - protein, 442 aa, Oryza sativa
MEGGRGGKRWRFATPNLAVAAAGERSIQRYLLQLHACLDENGPRPVIPLSHGDPSSSACFRTAPEAEEAVAAAVRSGDYNGYSSPATSLPARRSAIAEYLSCDLPYKLCTDDIFLTSGGTQAIEIVMSVFGQPGANILLPKPGYPKHEAHAVFHRMEVRLYDLVPERGWEINVEAVEALADENTVAIVITNPNNPCGNVYTYEHLSKIADTASKFGLLVIADEVYGHLVYGSTPFVPMGVFGETVPVLTLGAISKRWVVPGWRFGWIAICDPKGILKETKVVDSLRSFRNLTTGPATFIQGAIPHIMKNTNDEFFRKTLELLKETAEICFGEIKEIKCITCPHKPEGSFFMMVKLDISQLSDICDDIDFCSKLVKEESVVLLPGRALGMENWLRITFALDPPRLKQGLERVKSFCRRHQSHANMLNISASAKVEPHFGMSKS

SEQ ID NO: 146160 - DNA, 1239 bp, Oryza sativa
  CDS (1)..(1239)
atggaggcgaagctgtcggcggcgtcgaggcggctggcgccgtcgcccatccagcagctctcccacctggcgcagcgcgccggcgccgtcaacctcgccgagggcttccccgacttcccggcccccgcccacgtcaaggccgccgccgccgccgccatcgccgccgacctcaaccagtacaggcatgtgcaggggatctgcgacgccctcgcggagacgatgaagcgggaccatggcctccgcgtcgaccctctcaccgacttcgccgtttgctgcggccagtctgaggcgtttgctgcagcgatatttgcaataattgaccaaggggatgaagttttgctctttgatccaccttttgaaacctatcaaacgtgcattgaactagcccgaggtgtccctgtgtatgtgccgttggatccaccttcttggactttgaatgaagataaatttttgaaatcatttacaaaccggacaaaggcagtggtcttgaatagcccgcacaatccaacaggaaaggtttttagcagagaggaattgcttatcattgctcaagcttgtcagaaaatggactgctttgcaataactgatgaggtttatgagtacattacttacgatgagaacaagcatatctcattggcttcgcttccaggaatgcaagaaaggaccatcattacttcctcactgtcaaaaacttacagcgtaactggttggagaattggatgggcttgtgctccagctaatatcgcctcagcaataagaaacatccatgtcaagctaactgattcagcccctgcaccattccaagaagctgcgttggttgcgttaacaagcccaccagacttctattcatccttgaaacaggactacacggcgagaagagacttcatccttcaggtgcttactgattttggcttccgcattagcttcaagccacaaggctcgatctttgtatttgttgagcttccaaggtcatggcaactttcagatatggatttcgtgacgaacttgataaaaaatgctggtgtggcggccgtgcctggtcggggattcttccactcaagtaccgacgacccaagctaccatcaccggtatgtcaggtttgcgttttgcaagagcaatgacaccctaaacgctgctgccgagaagatgaggaagctagcagtcagtcatgatgcaaggttattgaggcctactgatgatggagaagcaggtcagactgcatcagccacctctccttga

SEQ ID NO: 146161 - protein, 412 aa, Oryza sativa
MEAKLSAASRRLAPSPIQQLSHLAQRAGAVNLAEGFPDFPAPAHVKAAAAAAIAADLNQYRHVQGICDALAETMKRDHGLRVDPLTDFAVCCGQSEAFAAAIFAIIDQGDEVLLFDPPFETYQTCIELARGVPVYVPLDPPSWTLNEDKFLKSFTNRTKAVVLNSPHNPTGKVFSREELLIIAQACQKMDCFAITDEVYEYITYDENKHISLASLPGMQERTIITSSLSKTYSVTGWRIGWACAPANIASAIRNIHVKLTDSAPAPFQEAALVALTSPPDFYSSLKQDYTARRDFILQVLTDFGFRISFKPQGSIFVFVELPRSWQLSDMDFVTNLIKNAGVAAVPGRGFFHSSTDDPSYHHRYVRFAFCKSNDTLNAAAEKMRKLAVSHDARLLRPTDDGEAGQTASATSP

SEQ ID NO: 146162 - DNA, 1335 bp, Oryza sativa
  CDS (1)..(1335)
atggcaccgacgacggcggcggcggcggcgagcagcaacggcggcggcgagagcgacggcagcagcaaggagtggaggctgacggcgccgacgaggggcggcgcgatggcggcggcgggggacaagatgagcatccgggcggtgcggtacaagatcagcgccagcgtcgacgaccgcggcccgcgccccgtcctgccgctcgcccacggcgacccctccgtgttccccgagttccgcaccgccgccgaggccgaggacgccgtcgccgacgcgctccgctccggcgacttcaactgctaccccgccggcgtcggcctccccgccgcgcgacgtgctgtggcagatcatttgtcacgcgacctcccatacaagctatcttctgatgacatcttcctaaccgctggaggaactcaggccatcgaggtcgtaatctcaatccttgcccaacctggcacaaacatattgcttcctagaccaggctacccaaactatgaagctcgagccgcgttcaacaaccttgaagttcgtcactttgatcttattcctgagaagggctgggagattgaccttaactccctagaatctattgcggacaagaacactactgcgatagtcatcataaatcccaataatccatgcgggaatgtgtacacttacgagcatttatccaaggtggcagaggtagcaaggaagcttgggatattggtaattactgatgaggtgtatggtaatttggtttttgggagttccccatttgtcccaatgggttgctttgggcacatcgtaccaatattaaccataggatcgctatcaaagaggtggatagtgccgggatggcgacttggttgggtagcaatatgtgaccccaagaagactctacaagaaaccaagattgcaacattaattactaatttccttaatgtttcaactgatccagcaactttcattcagggagctctaccgaatattcttaagaataccaaggaagaattctttaagaggataattgatttgcttacggaaacatcagatatttgctatagaggaataaaggatattaaatgcatcacttgtcctcacaagcccgaaggatccatgtttgtgatggtgaaattgaacctatatcttttggagggaatccatgatgatgttgatttttgttgccaacttgcgaaagaagagtcggtgattctttgcccagggagtgtgctgggaatgaagaattgggttcgcattacttttgctattgattcatcttctctcctggatggtcttgagaggatcaaatccttctgccaaaggcacaagaagaaaaaccctttaaattatatctag

SEQ ID NO: 146163 - protein, 444 aa, Oryza sativa
MAPTTAAAAASSNGGGESDGSSKEWRLTAPTRGGAMAAAGDKMSIRAVRYKISASVDDRGPRPVLPLAHGDPSVFPEFRTAAEAEDAVADALRSGDFNCYPAGVGLPAARRAVADHLSRDLPYKLSSDDIFLTAGGTQAIEVVISILAQPGTNILLPRPGYPNYEARAAFNNLEVRHFDLIPEKGWEIDLNSLESIADKNTTAIVIINPNNPCGNVYTYEHLSKVAEVARKLGILVITDEVYGNLVFGSSPFVPMGCFGHIVPILTIGSLSKRWIVPGWRLGWVAICDPKKTLQETKIATLITNFLNVSTDPATFIQGALPNILKNTKEEFFKRIIDLLTETSDICYRGIKDIKCITCPHKPEGSMFVMVKLNLYLLEGIHDDVDFCCQLAKEESVILCPGSVLGMKNWVRITFAIDSSSLLDGLERIKSFCQRHKKKNPLNYI

SEQ ID NO: 146164 - DNA, 1320 bp, Oryza sativa
  CDS (1)..(1320)
atggagggtgtcggtggcggcaagcgccgcggggacgacggggcggaggccacgccgcggtggcgcttctcccggccgtcgtcgcagggcgggcccctggcggccgccggcctcacgagcatccgcgcggtgctcaaccgcgtcaactcctccgtcgacgccgccgccgccggcgggccgcgccccgtcctgcggcttggcaacggcgaccccaccgcgtccgcctgctaccgcaccgcgcccgccgccgaggacgccgtcgtcgacgcgctccgctccggggcgcacaacggctactccctaaccgtcggcgtcctctcggcgcgccgtgctattgcagaatacctatctcgagatcttccttatgagctttcggcaaatgatatttacctgacctccggatgtgtccaagcgatcgaagtcatgatctctgttttggctcagcccggatccaacatcttacttcccaaacccggctttccattgtatgaatcacggactacattcagcaatctagaggttcgacatttcgatctcattccagagagaggctgggaggtagacctagagggtgtgcaagctattgctgatgagaacactgttgcaattgtcgtgatcaatcccagtaacccttgtggaagcgtgtattcgtatgatcatttggcaaaaattgccgagaccgccaggaaacttggtttgctgataattgctgatgaggtatatgaccatttggcatttgggaataatccttttatacctattggtgtttttgggaagaccgtcccagtgatcaccttaggatctatttcaaaaagatggcttgtacctggttggcgacttggttggatagcaacatgtgatccaaatggcattttaaaggaagccaaggttaaccaatcaattgagaactatattaacatctcaactgatcctgcaacgtttgttcagggagcaatccctcaaattatagccaacacaaaagaagattacttcaacaaaattctcgatcaattaaggaacgcagcggatttatgttatgataaaataaaggacatcaagggcattacatgtccacacaagccagaaggatcaatgtttgtgatggtaaaattggatctctcttacttggatggcttccatgatgatatggacttctgctgcaggttggcaaaagaggagtctgtgatagttttgccagggagtgcattaggattgaagaattgggttcgcatcactttcgccatcgatataccatctcttgtggatgcctttgaaaggataaaatctttctgccagaggcatggcaaactggaaacctaa

SEQ ID NO: 146165 - protein, 439 aa, Oryza sativa
MEGVGGGKRRGDDGAEATPRWRFSRPSSQGGPLAAAGLTSIRAVLNRVNSSVDAAAAGGPRPVLRLGNGDPTASACYRTAPAAEDAVVDALRSGAHNGYSLTVGVLSARRAIAEYLSRDLPYELSANDIYLTSGCVQAIEVMISVLAQPGSNILLPKPGFPLYESRTTFSNLEVRHFDLIPERGWEVDLEGVQAIADENTVAIVVINPSNPCGSVYSYDHLAKIAETARKLGLLIIADEVYDHLAFGNNPFIPIGVFGKTVPVITLGSISKRWLVPGWRLGWIATCDPNGILKEAKVNQSIENYINISTDPATFVQGAIPQIIANTKEDYFNKILDQLRNAADLCYDKIKDIKGITCPHKPEGSMFVMVKLDLSYLDGFHDDMDFCCRLAKEESVIVLPGSALGLKNWVRITFAIDIPSLVDAFERIKSFCQRHGKLET

SEQ ID NO: 146166 - DNA, 1200 bp, Zea mays
  CDS (1)..(1200)
atggagcggaggctgtcggcgacgtccaggcggtccgcgccgtcggccatccaacggctgtcccacctggcgcagcgcgtcggcgccgtcaacctcgccgagggcttccccgacttccccgcaccgccccacgtcaaggccgccgccgtcgccgccattgccgcggacctcaaccagtacaggcatgtgcaggggatctgcgacatcctcgccaacacgatgaaacgtgaccatgacctcgacgtggacccgctcacggactttgtcatctgctgcggccaatccgaagcattcgccgcggccatctttgcaataatcgaccaaggagacgaagttctcatcttcgaccctgcttatgaaacgtatgagacaagcattgagctagctcgaggcgtccctgtgtatgtgccattggatccaccttcttggactctgaacgaagaaaaatttctgaaatcttttacaagtcggaccaaggcgttggtcttgaacagcccacacaatccaacagggaaggtcttcagcaaagaggagctgcttattatctcccaagcttgtcagaaaatggactgctttgtgataactgatgaggtttatgagtatattacttacgatgcgaacaagcatatctcactggcttctcttccagggatgcaagagaggaccatcatcacatcctcactgtcaaaaacttacagtgtgactggttggagactcggttgggcttgtgcagcagcaagcatcgcctcagctattagaaatatccacataaaattaacagattcagctcctgcaccattccaagaagctgcattgattgcattaacaagcacagcagattactacatatccctgagaaaagactatgaggtgaaaagagacttcatccttctgttgctgaaagacttgggcttcaaaatcagcgtcaagccacaaggttcagtatttgtgtttgctgagctgccaaggtcctgccaactttcagatgtagaatttgtgacaaagttgatcaacgatgctggtgtggttgccgtgcctggccgtgggttcttccacaagacttgtgactgtgaaagctactgccaccgatatgtcaggtttgcgttctgcaagggcgacgacacacttaaggctgctgccatgaagatgaggaagctggcaagcaggcagggagaaccatggcttactggcagacaatag

SEQ ID NO: 146167 - protein, 399 aa, Zea mays
MERRLSATSRRSAPSAIQRLSHLAQRVGAVNLAEGFPDFPAPPHVKAAAVAAIAADLNQYRHVQGICDILANTMKRDHDLDVDPLTDFVICCGQSEAFAAAIFAIIDQGDEVLIFDPAYETYETSIELARGVPVYVPLDPPSWTLNEEKFLKSFTSRTKALVLNSPHNPTGKVFSKEELLIISQACQKMDCFVITDEVYEYITYDANKHISLASLPGMQERTIITSSLSKTYSVTGWRLGWACAAASIASAIRNIHIKLTDSAPAPFQEAALIALTSTADYYISLRKDYEVKRDFILLLLKDLGFKISVKPQGSVFVFAELPRSCQLSDVEFVTKLINDAGVVAVPGRGFFHKTCDCESYCHRYVRFAFCKGDDTLKAAAMKMRKLASRQGEPWLTGRQ

SEQ ID NO: 146168 - DNA, 1680 bp, Zea mays
  CDS (1)..(1680)
atgcaccgcttcgccgccgacagggcgcgccgcgcggtggccgcgtccctgcgcggcgcagcttccagagcagcagcagcgccgtcgcgtcacgctccggcgcctcgccatccaacctccccagtcggggcggcggcgccggttgctgccgccgccatggcgagggccgccatgtccacggcggtcgcgggcgtgccaccaccggtgtcgctcgacaccatcagccccaaggtgccgccagtgtcgctcgacaccatcaaccccaaggtcttgaagtgtcaatttgcagtccggggagagattgtcacacgtgctcagaaactgcaacaagaactgcagagaaatccagagtcgcttccttttgatgagatactctactgtaacattggaaatccccattccattggccaacagccagttacctatttcagagaagttctatctttatgtgagaatccagctctcctggacaaaagtgaaacgcatgctttatacaggtcagatgctatagagagagcacggaaaattctagacaaaataccaggaagagctacaggagcatatagccacagtcagggtataaaaggtttacgtgatgaaattgctgccggaattgctgcccgagatgggtttcatgcaagcgcagataacatcttcctaacagatggagcaagcccagcagtacacatgattctgcagttattgataaggtccgagaaggatggcattctttgtcctattccacagtacccattgtactctgcatcaattgctcttcatggtggttcccttgttccttatttccttgatgaagagacagggtgggcacttgaggttgatgagctcaagaaacaacttgaggaggctcgatctaagggcatcagtgtcagggcgcttgttgtcataaatccaggaaatccaacaggacaggtccttaccgaggaaaaccagaagaaaattgttgagttctgcaagaatgaaaggctcgttcttctcgcggatgaggtttaccaagaaaacatatatgtcgaagacaagcaattccactcgttcaaaaaaatcgcacggtcgctgggatacactgatgacgaccttcctttggtatcgttccagtcgatttctaaaggctactatggagaatgtggaaagcgaggtggttacatggagataactgggttcagtcctcaagtacgggaccaaatctacaagatggcatcgataaatctgtgctccaatatcaccggccaaattcttgctagccttgtcatgaacccaccaaaggctggggatgaatccttcgaatccttcaggttagagagggatggtatcctttcatcgttgggtcgccgtgcaaaggctttggaagaagcattcaacagtttagaaggtattacatgcaataaagccgaaggcgcgatgtatctgttcccacgccttcacttaccccagaaggcgattggagctgcccaagcagccggcactgccccagatgcttactacgctaaacgcctactagaggccactgggatcgtcttcgtccctggttctggttttggacaggtccccggaacatggcacatcagatccacgatactgccgcaggaggacaaaatacctgggatagtatctaggttcaaggagtttcacgacaagttcatggatgaattccgtgattattga

SEQ ID NO: 146169 - protein, 559 aa, Zea mays
MHRFAADRARRAVAASLRGAASRAAAAPSRHAPAPRHPTSPVGAAAPVAAAAMARAAMSTAVAGVPPPVSLDTISPKVPPVSLDTINPKVLKCQFAVRGEIVTRAQKLQQELQRNPESLPFDEILYCNIGNPHSIGQQPVTYFREVLSLCENPALLDKSETHALYRSDAIERARKILDKIPGRATGAYSHSQGIKGLRDEIAAGIAARDGFHASADNIFLTDGASPAVHMILQLLIRSEKDGILCPIPQYPLYSASIALHGGSLVPYFLDEETGWALEVDELKKQLEEARSKGISVRALVVINPGNPTGQVLTEENQKKIVEFCKNERLVLLADEVYQENIYVEDKQFHSFKKIARSLGYTDDDLPLVSFQSISKGYYGECGKRGGYMEITGFSPQVRDQIYKMASINLCSNITGQILASLVMNPPKAGDESFESFRLERDGILSSLGRRAKALEEAFNSLEGITCNKAEGAMYLFPRLHLPQKAIGAAQAAGTAPDAYYAKRLLEATGIVFVPGSGFGQVPGTWHIRSTILPQEDKIPGIVSRFKEFHDKFMDEFRDY

SEQ ID NO: 146170 - DNA, 1293 bp, Zea mays
  CDS (1)..(1293)
atggaagacagcgccaccaatggccatggggttgtgacggctgtcccggcctcgtggaacttcgagccaaacgagaccctcctgggtcttccggcgctctcggttcgcggcgtgctgaccagagtcatggccgggatgttgcccgacggtgggcgggcggtggtccggttgggcagcggcgacccgacagcgttcccgtgcttccggacggcgccagaggccgtggacgccgtcgccagcgcggtccagtccgggcagtacaactcctattccactagcgtcggccttgagcccgcacggaggtccattgctcagtacttatcctgtgatttgccatataaactgtcacctgatgatgtctacctcacaagtggttgcactcaagcaattgagatactctgctctgcgttagctcgtcctggtgcaaacatcctgcttccaagacctggatttatgttctatgaggcgcgtgctatcttcaatggcatggaagcccggtacttcaatcttctacctgggaacggctgggaggttgacattgatggcgtccaagctcttgccgacaagaatactgttgccatggtcattgtgaacccaggaaacccatgtggcaatgtgtactcctatgagcacctggccaaggtcgctgagaccgcgcgaaagcttggcatattcgtcatagcagatgaggtttacgcacacttgacatttggagagaggaaatttgtgccgatgggtgtgtttggggctgtggctccagtgttaacactggggtccatatcaaagagatggatggtgcctggatggcggcttggatggattgttaccaatgatccgaatggtgtatttcagaggactaaggtagtgcacagcatcaagagctaccttgatatctcctctgatcctgcaacatttgtccagggagcaataccaaaactcgtggagaacacaaaggaggaattcttcgaaaaaactatcgaaattctaaaacgatgtgtagatatatgctgtgaaaagctgaagggcatcaatgcaatcacgtgcccaagcaaaccagagggatccatgtttgtaatggtgaaactggatctgtcctgcctggagggcatcaaagatgacatggacttctgctgccggctggcaaaggaagaattagtggttgttctgccaggatgtgctgtcggatacaaggattggcttcgcatcacctttgcgattgatccatcttctctggaagaggggcttgacaggctcaagtccttctgcttgcgatacagaaagccaacaaagtga

SEQ ID NO: 146171 - protein, 430 aa, Zea mays
MEDSATNGHGVVTAVPASWNFEPNETLLGLPALSVRGVLTRVMAGMLPDGGRAVVRLGSGDPTAFPCFRTAPEAVDAVASAVQSGQYNSYSTSVGLEPARRSIAQYLSCDLPYKLSPDDVYLTSGCTQAIEILCSALARPGANILLPRPGFMFYEARAIFNGMEARYFNLLPGNGWEVDIDGVQALADKNTVAMVIVNPGNPCGNVYSYEHLAKVAETARKLGIFVIADEVYAHLTFGERKFVPMGVFGAVAPVLTLGSISKRWMVPGWRLGWIVTNDPNGVFQRTKVVHSIKSYLDISSDPATFVQGAIPKLVENTKEEFFEKTIEILKRCVDICCEKLKGINAITCPSKPEGSMFVMVKLDLSCLEGIKDDMDFCCRLAKEELVVVLPGCAVGYKDWLRITFAIDPSSLEEGLDRLKSFCLRYRKPTK

SEQ ID NO: 146172 - DNA, 1449 bp, Zea mays
  CDS (1)..(1449)
atggccgccagcgtcaccgtggaaaacctcaaccccaaggtcttaaaatgtgagtatgcagtccgtggggagattgtcatccatgctcagcgcctgcagcaacaactacaaacacaaccagggtctcttccttttgatgagatcctctattgcaacattgggaatccccaatctcttggtcagcaacctgtgacattcttcagggaggttcttgctctttgtgatcatccgtgcctcttggaaaaagaggaaaccaaatcattgttcagtgctgatgcaatttctcgagcaaagcagattcttgcaactattcctggaagggcaacaggtgcatatagtcacagtcagggtatcaaaggactgcgtgatgcaattgctgctggaatcatgtcacgtgatggattccctgcaaatgcagatgacattttcattacagacggagcaagtcctggggtccacatgatgatgcaattactgattaggaatgagaaagatggcattctgtgcccaattcctcagtaccctttgtactcagcctccatagctcttcatggtggagctcttgtcccctattaccttaatgaaaaaactgggtggggtttggagatctctgatcttaagatgcaactggaaaatgctcggtcaaaaggcattgatgttagggccttggtggttatcaatccaggaaatccgactgggcaggttcttgctgaagacaaccaatatgatatagtgaaattctgcaaaaatgagggccttgttcttctagctgatgaggtatatcaagagaacatctatgtggacaacaagaaatttaactctttcaagaagattgtaagatccatggggtatggcgaggatgatctccctctagtatcgttacagtctgtttccaaaggatactatggagagtgtggtaaaagaggagggtacatggagattactggcttcagtgctccagtaagagagcagatctacaagatagcttcagtgaacctgtgctccaatatcactggtcaaatccttgcgagcctcgtcatgaatccaccaaaggttggagacgaatcatatgcttcctacaaggcagagaaagatggaatccttgagtctttagctcgtcgtgcaaaggcgttggaggatgcattcaacaagcttgagggattttcatgtaacaaggccgaaggagcaatgtatcttttccctcagattcatctgccacagaaggcaatcgaggctgctaaagctgctaagaaagcgcctgacgctttctacgctctccgtctccttgaatcaactggaatcgtcgtggtccctggatctggatttggtcaagttcctggaacatggcacatcagatgcacgatcctgccgcaggaagacaagatccccgcggtgatcagccgcttcagggctttccatgaggcgttcttggccgaataccgcgactaa

SEQ ID NO: 146173 - protein, 482 aa, Zea mays
MAASVTVENLNPKVLKCEYAVRGEIVIHAQRLQQQLQTQPGSLPFDEILYCNIGNPQSLGQQPVTFFREVLALCDHPCLLEKEETKSLFSADAISRAKQILATIPGRATGAYSHSQGIKGLRDAIAAGIMSRDGFPANADDIFITDGASPGVHMMMQLLIRNEKDGILCPIPQYPLYSASIALHGGALVPYYLNEKTGWGLEISDLKMQLENARSKGIDVRALVVINPGNPTGQVLAEDNQYDIVKFCKNEGLVLLADEVYQENIYVDNKKFNSFKKIVRSMGYGEDDLPLVSLQSVSKGYYGECGKRGGYMEITGFSAPVREQIYKIASVNLCSNITGQILASLVMNPPKVGDESYASYKAEKDGILESLARRAKALEDAFNKLEGFSCNKAEGAMYLFPQIHLPQKAIEAAKAAKKAPDAFYALRLLESTGIVVVPGSGFGQVPGTWHIRCTILPQEDKIPAVISRFRAFHEAFLAEYRD

SEQ ID NO: 146174 - DNA, 1278 bp, Glycine max
  CDS (1)..(1278)
atggaaagtggggttgtggctgtgaacaacaacatcaacaactatgaatccaaggcaacttccaccatcaccattaagggcattctcagccttctaatggaaagcattgatgatgagaattgtgatggtggtggaagcaagaagagagttatttctcttggtatgggtgacccaactctcaccacattgttccacacaccaaaggttgttgaagaggctgtcgctgatgctcttcaatctcgcaagtttcatggctatgctcccactgctggacttctccaggctagaattgcaattgctgaatatctatctcgtgaccttccttatcaattatcacgagatgatgtcttcatcacttgtggatgcacacaagccattgatgtttcggtggcgatgcttgctcgccctggtgcaaacatcttgcttccaaggccaggcttcccaatctatgaactttgtgctgcatttagaggggttgaagtgaggcattatgatctgcttccagagaaaggttgggaggttgatctagatgctgttgaagctcttgctgatcagaacacagtggcgttggcgatcataaaccctgggaatccttgtgggaatgtgtacagttaccaccatttggagaagattgctgaaactgcaaaacgggttggaacaattgtgatctctgatgaagtttatggtcaccttgcatttgggagcaagccttttgtaccgatgggagtttttggctctactgttcctgttctcactcttggctcactttctaagagatggatagttcctgggtggaggcttggttggtttgtgacaaatgatccatctggcacttttagagaaccaaaggtagtcgagcgtatcaaaaagtattttgatcttctaggaggtccagcaaccttcttgcaggctgctgtacctcagataattgcaaataccgaagaaattttcttcgagaaaaccattgataatttgaggcatacagcagatatatgttgtaaagagataaaggatattccatgcattttttgcccttacaaaccagaaggatccatggctatgatggtgaaattaaacctttcacttctggaagatattagtgatgatattgacttctgtttcaaacttgcaaaggaggaatctgtgatcattcttccaggaactgcagtaggcctaaaagattggcttcgtattattttcgctgctgatccatctgctcttggagagggtatgagaaggataaaatctttttgtgaaaggcatgcaagaaaattgtaa

SEQ ID NO: 146175 - protein, 425 aa, Glycine max
MESGVVAVNNNINNYESKATSTITIKGILSLLMESIDDENCDGGGSKKRVISLGMGDPTLTTLFHTPKVVEEAVADALQSRKFHGYAPTAGLLQARIAIAEYLSRDLPYQLSRDDVFITCGCTQAIDVSVAMLARPGANILLPRPGFPIYELCAAFRGVEVRHYDLLPEKGWEVDLDAVEALADQNTVALAIINPGNPCGNVYSYHHLEKIAETAKRVGTIVISDEVYGHLAFGSKPFVPMGVFGSTVPVLTLGSLSKRWIVPGWRLGWFVTNDPSGTFREPKVVERIKKYFDLLGGPATFLQAAVPQIIANTEEIFFEKTIDNLRHTADICCKEIKDIPCIFCPYKPEGSMAMMVKLNLSLLEDISDDIDFCFKLAKEESVIILPGTAVGLKDWLRIIFAADPSALGEGMRRIKSFCERHARKL

SEQ ID NO: 146176 - DNA, 1305 bp, Zea mays
  CDS (1)..(1305)
atggcgacccacgccagcgacaatggcagcgggcacgcggagtggcggttcgctcgggcggcgaaggagggtgcgctggccgtggccggggacaagatgagcatccgggcggcgcggttcaagatcagcgcgagcgtggacgggcgcgacccgcggcccgtgctgccgcttgcgcacggggacccctcggtgttcccggccttccgcaccgccgccgaggccgaggacgccgtggccgccgcgctccggacgggcaagttcaactgctaccccgccggcgtcggcctccccgaagcccgccgtgctctggcggagcacctgtcaagtgatcttccatacaagctgtcaactgatgacatcttcctcaccgctggaggcactcaagccattgaggttgtcgtctcagtccttgcccaaccgggcgccaacatattgctcccaagaccaggctatccaaattatgaggcgcgtgcaggactgcacaacttacaagttcgccatttcgatctgattcctgagagagggtgggaaattgatatcgactctctggagtcgattgctgacaagaacaccaccgcaatggtcatcataaaccccaacaatccttgcggcagtgtctacacccgtgaacatttagccaaggtcgcggaggtagcaaggaagcttggaatactagtcatcgctgatgaagtgtatggaaacctggtgtttggggacaccccttacgtcccaatgggtgtctttggccacattgcccctgtcttgagcataggatcactatcgaagagatggatagtgcctgggtggcgacttggttgggtagctgtatgtgatcccaacaagattctgcaagaaaccaagatcattgcatcaataacaaacttccttaacgtttcaactgatccggcaacttttgttcagggagcacttccccatattcttgagaacacaaaggaagattttttcaggaggatcattggtctgctagcagaaacctcagagatatgttacagagaaataaaggacatcaagtgcatcacctgccctcacaagccagaaggttccatgtttgtcatggtgaaattaaatttgtatcttttggaggggattcatgacgatattgatttttgctgcaagctggcaaaagaagagtctgtgattttgtgtccagggagtgttttgggaatggaaaactggatccgcatcactttcgccattgattcatcttctcttcttgatggtcttgagaggatcaaatctttctgccaaaggcataagaagaagaatttgcttaatggccattaa

SEQ ID NO: 146177 - protein, 434 aa, Zea mays
MATHASDNGSGHAEWRFARAAKEGALAVAGDKMSIRAARFKISASVDGRDPRPVLPLAHGDPSVFPAFRTAAEAEDAVAAALRTGKFNCYPAGVGLPEARRALAEHLSSDLPYKLSTDDIFLTAGGTQAIEVVVSVLAQPGANILLPRPGYPNYEARAGLHNLQVRHFDLIPERGWEIDIDSLESIADKNTTAMVIINPNNPCGSVYTREHLAKVAEVARKLGILVIADEVYGNLVFGDTPYVPMGVFGHIAPVLSIGSLSKRWIVPGWRLGWVAVCDPNKILQETKIIASITNFLNVSTDPATFVQGALPHILENTKEDFFRRIIGLLAETSEICYREIKDIKCITCPHKPEGSMFVMVKLNLYLLEGIHDDIDFCCKLAKEESVILCPGSVLGMENWIRITFAIDSSSLLDGLERIKSFCQRHKKKNLLNGH

SEQ ID NO: 146178 - DNA, 1200 bp, Zea mays
  CDS (1)..(1200)
atggagcggaggctgtcggcgacgtccaggcggtccgcgccgtcggccatccaacggctgtcccacctggcgcagcgcgtcggcgccgtcaacctcgccgagggcttccccgacttccccgcaccgccccacgtcaaggccgccgccgtcgccgccattgccgcggacctcaaccagtacaggcatgtgcaggggatctgcgacatcctcgccaacacgatgaaacgtgaccatgacctcgacgtggacccgctcacggactttgtcatctgctgcggccaatccgaagcattcgccgcggccatctttgcaataatcgaccaaggagacgaagttctcatcttcgaccctgcttatgaaacgtatgagacaagcattgagctagctcgaggcgtccctgtgtatgtgccattggatccaccttcttggactctgaacgaagaaaaatttctgaaatcttttacaagtcggaccaaggcgttggtcttgaacagcccacacaatccaacagggaaggtcttcagcaaagaggagctgcttattatctcccaagcttgtcagaaaatggactgctttgtgataactgatgaaggttatgagtatattacttacgatgcgaacaagcatatctcactggcttctcttccagggatgcaagaaaagaccatcatcacatcctcactgtcaaaaacttacagtgtgactggttggagactcggttgggcttgtgcagcagcaagcatcgcctcagctattagaaatatccacataaaattaacagattcagctcctgcaccattccaagaagctgcattgattgcattaacaagcacagcagattactacatatccctgagaaaagactatgaggtgaaaagagacttcatccttctgttgctgaaagacttgggcttcaaaatcagcgtcaagccacaaggttcagtatttgtgtttgctgagctgccaaggtcctgccaactttcagatgtagaatttgtgacaaagttgatcaacgatgctggtgtggttgccgtgcctggccgtgggttcttccacaagacttgtgacggtgaaagctactgccaccgatatgtcaggtttgcgttctgcaagggcgacgacacacttaaggctgctgccatgaagatgaggaagctggcaagcaggcagggagaaccatggcttactggcagacaatag

SEQ ID NO: 146179 - protein, 399 aa, Zea mays
MERRLSATSRRSAPSAIQRLSHLAQRVGAVNLAEGFPDFPAPPHVKAAAVAAIAADLNQYRHVQGICDILANTMKRDHDLDVDPLTDFVICCGQSEAFAAAIFAIIDQGDEVLIFDPAYETYETSIELARGVPVYVPLDPPSWTLNEEKFLKSFTSRTKALVLNSPHNPTGKVFSKEELLIISQACQKMDCFVITDEGYEYITYDANKHISLASLPGMQEKTIITSSLSKTYSVTGWRLGWACAAASIASAIRNIHIKLTDSAPAPFQEAALIALTSTADYYISLRKDYEVKRDFILLLLKDLGFKISVKPQGSVFVFAELPRSCQLSDVEFVTKLINDAGVVAVPGRGFFHKTCDGESYCHRYVRFAFCKGDDTLKAAAMKMRKLASRQGEPWLTGRQ

SEQ ID NO: 146180 - DNA, 1461 bp, Zea mays
  CDS (1)..(1461)
atggccggtagcagcgcggagcagctcctctccaggatcgccgccggcgacggccacggcgagaactcgtcctacttcgacgggtggaaggcctacgacatgaaccctttcgacctgcgccacaaccgcgacggcgtcatccagatgggcctcgccgagaaccaactgtcgttggacctgatcgagcaatggagcgtggaccacccggaggcgtccatctgcacggcgcagggcgcgccgcagttccggaggatagccaacttccaggactaccacggcctgccggagttcagagaggcgatggccaagttcatggggcaggtgaggggcggcaaggtgacgttcgaccccgaccgcgtcgtcatgtgcggaggagccaccggcgcgcaggacactctcgccttctgcctcgctgacccgggcgacgcctacctcgtgccgacgccttattacccagctttcgaccgcgactgttgctggaggtcaggagtgaagctgctgcccatcgaatgccacagctcgaacaacttcaccctcaccagggaggcgctcgtgtcggcctacgacggcgcgcggaggcagggcgtccgcgtcaggggcatcctcatcaccaacccctccaacccgctgggcaccacaatggaccgcggcacgctggcgatgctcgccgcgttcgccacagagcgccgcgtccacctcatctgcgacgagatctacgcgggctccgtcttcgccaagccgggcttcgtgagcatcgccgaggtcatcgagcgcggcgacgccccgggctgcaacacggacctcgtccacatcgcgtacagcctctccaaggacttcggcctcccgggcttccgcgtcggcatcgtctactcctacaacgacgacgtggtggcctgcgcgcgcaagatgtccagcttcggcctcgtctcgtcgcagacgcagcacttcctggcgaggatgctcgccgacgcggagttcatggcacgcttcctcgcggagagcgcgcggcggctggcggcgcgccacgaccgcttcgtcgcgggcctccgcgaggtcggcatcgcgtgcctgccgggcaacgcgggcctcttctcgtggatggacctgcggggcatgctccgggagaagacgcacgacgcggagctcgagctgtggcgggtcatcgtacacagggtgaagctcaacgtgtcgcccggcacgtcgttccactgcaacgagcccggctggttccgcgtctgctacgccaacatggacgacgacaccatggaggtcgcgctcgaccggatccgccgcttcgtgcgccagcaccagcacagcaaggccaaggccgagcgctgggcggccacgcggcccctccgcctcagcttgccgcgccggggagcaaccaccgcttcgcacctcgccatctccagccccttggcgttgctgtcgccgcagtccccgatggtccacgccagctag

SEQ ID NO: 146181 - protein, 486 aa, Zea mays
MAGSSAEQLLSRIAAGDGHGENSSYFDGWKAYDMNPFDLRHNRDGVIQMGLAENQLSLDLIEQWSVDHPEASICTAQGAPQFRRIANFQDYHGLPEFREAMAKFMGQVRGGKVTFDPDRVVMCGGATGAQDTLAFCLADPGDAYLVPTPYYPAFDRDCCWRSGVKLLPIECHSSNNFTLTREALVSAYDGARRQGVRVRGILITNPSNPLGTTMDRGTLAMLAAFATERRVHLICDEIYAGSVFAKPGFVSIAEVIERGDAPGCNTDLVHIAYSLSKDFGLPGFRVGIVYSYNDDVVACARKMSSFGLVSSQTQHFLARMLADAEFMARFLAESARRLAARHDRFVAGLREVGIACLPGNAGLFSWMDLRGMLREKTHDAELELWRVIVHRVKLNVSPGTSFHCNEPGWFRVCYANMDDDTMEVALDRIRRFVRQHQHSKAKAERWAATRPLRLSLPRRGATTASHLAISSPLALLSPQSPMVHAS

SEQ ID NO: 146182 - DNA, 1386 bp, Zea mays
  CDS (1)..(1386)
atggcctccttctcctccctctctgcctcctcctccacctccaccccgtccttcaacctccccgcaaaaacctccgctggcacaggctccctgtcattccacagggcgagggagtcgcagaagtccagggccaggatggtgacggtgcgggcggaggcggttgacacgaccatcagcccgcgggtgaatgcgctcaggccgtccaagaccatggccatcaccgaccaggccacggcgctgcgacaggccggcgtgccagtcatcggactcgccgctggggagcccgacttcgacacgccagccgtgatcgccgaggctgggataaatgccatcagagatggggccacaagatacacgcctaatgctggaactctggagctgaggaaggctatctgcaaaaagcttgaggaggagaatggtctatcatactccgccgatcaggtgctagtaagcaatggagccaagcagtgcattacacaagcagtactcgctgtctgctcacctggcgatgaagttttgatacctgcaccatattgggtcagctaccctgagatggctagactggctggtgcaacgccagttattctccctacaagcatatcagacaattacctgctaaggccagagtcacttgcctcagtgatcaatgaaaattcaaggatcttgattctctgctctccatctaatccaacagggtctgtgtatcctaaggagttgcttgaggagattgctgctatagtcagaaagcaccctagactcctagttttatccgatgagatctatgagcatattatctatcaacctgctaaacacacaagctttgcttcattgcctggaatgtgggaaagaacgttaactgtgaatggattttctaaggcttttgctatgactggttggagacttggatacttagctgcccctaaacattttgtcgcggcctgtggaaagatccaaagccagtatacctctggagccagtagtatatcacagaaggcagggcttgcagctttgaacctaggttatgctggtggtgaagcagtatcaaccatggtgaaagcattccaggagcgtcgtgattaccttgtaagaagctttagggagctgccaggtgtcaagatatcggaacctcagggagccttctatttattcatcgacttcagctcgtactatgggtctgaggtggaaggttttggtaccatcaaggactctgagtccctctgtctgttcctgttggagaaggcacaggttgcgcttgtccctggggatgcatttggcgatgacaagggtgttcgcatttcatatgctgcagctatgtcgacactgcaaactgcaatgggaaagataaaagaagcgatggctctgctcaggccccctgttgccgtttaa

SEQ ID NO: 146183 - protein, 461 aa, Zea mays
MASFSSLSASSSTSTPSFNLPAKTSAGTGSLSFHRARESQKSRARMVTVRAEAVDTTISPRVNALRPSKTMAITDQATALRQAGVPVIGLAAGEPDFDTPAVIAEAGINAIRDGATRYTPNAGTLELRKAICKKLEEENGLSYSADQVLVSNGAKQCITQAVLAVCSPGDEVLIPAPYWVSYPEMARLAGATPVILPTSISDNYLLRPESLASVINENSRILILCSPSNPTGSVYPKELLEEIAAIVRKHPRLLVLSDEIYEHIIYQPAKHTSFASLPGMWERTLTVNGFSKAFAMTGWRLGYLAAPKHFVAACGKIQSQYTSGASSISQKAGLAALNLGYAGGEAVSTMVKAFQERRDYLVRSFRELPGVKISEPQGAFYLFIDFSSYYGSEVEGFGTIKDSESLCLFLLEKAQVALVPGDAFGDDKGVRISYAAAMSTLQTAMGKIKEAMALLRPPVAV

SEQ ID NO: 146184 - DNA, 1626 bp, Zea mays
  CDS (1)..(1626)
atgcgccgcttcgcagccgacagggcgcgccgcgcggtggccgcgtctctgcacggtgcagcgtccagatcagcagcgccgtcgcctcacgctcaggcgccacgtcatccagcctccccggtgggggcggcggcgatggcggccgccatggtgaggaccatgtccacgacggccgcgggcacgcccccagtgtcggtcgccaccatcaaccccaaggtcttgaagtgtgaatatgcagttcgaggagagattgttacacatgctcagaacttacaacaagaattgcagaaaaatccagaatcacttcctttcgacgagatactctactgtaatattggaaatccccaatcacttggacaacaaccagttacctatttcagagaagttctctctctatgtgatcatccagctctcctggacaaaagtgaaactcatgctttgtacagttcagatgctatagagagagcatggcaaattctagagaagataccaggtagagcgacaggagcatatagccatagtcagggtataaaaggtttacgtgatgaaattgctgctggaattgctgcccgtgatgggtttcatgcaagcggagataacatctttctaacagatggagcaagcccagcagtgcacatgatgatgcagttgttaataagttctgagagcgatggcattctctgccctattccacagtacccactgtactctgcatcgattgctcttcacggtggttcccttgttccttatttccttaatgaagagacagggtggggactcgatgttgatgagctgaagaaacaactggaggaggctcgatctaagggcatcactgtcagggcgcttgtggtcataaatccaggaaatccaacaggacaggttcttgttgaggaaaaccaaaagaaaattgtcgaattctgcaagaatgaaggacttgttcttctcgcagatgaggtttaccaggaaaatatatatgttgaagataagccattccactcattcaaaaaaattgcacggtcactgggatacactgatgatgatcttcctttggtatcattccagtcagtttctaaaggctactacggagaatgtggaaaacgaggcggttatatggagataactggattcagtcctgatgtacgggaacaaatttacaaggtggcatcagtaaacctgtgctccaatgtttcggggcaaattcttgctagccttgtaatgaacccaccaaaggctggggatgaatcctttgaatccttcatgtcagagagggatggtatcctttcatcgttggctcggcgtgcaaaggctttggaagaagcattcaacagtttagaaggaattacatgcaacaaagccgaaggtgcaatgtatctgttcccacgccttcatttaccccagaaggcaattggagctgcccaagcagtcggcactgcgccagatgcatactacgcaaaacgcctactggaagccactggaatcgtcgtcgtccccggttctgggtttggacaggtccctggaacgtggcacttcaggtgcacgatactgccgcaggaggacaagatacctgcgatagtatccaggctcaaggagttccacgagaagttcatggatgaattccgtgattga

SEQ ID NO: 146185 - protein, 541 aa, Zea mays
MRRFAADRARRAVAASLHGAASRSAAPSPHAQAPRHPASPVGAAAMAAAMVRTMSTTAAGTPPVSVATINPKVLKCEYAVRGEIVTHAQNLQQELQKNPESLPFDEILYCNIGNPQSLGQQPVTYFREVLSLCDHPALLDKSETHALYSSDAIERAWQILEKIPGRATGAYSHSQGIKGLRDEIAAGIAARDGFHASGDNIFLTDGASPAVHMMMQLLISSESDGILCPIPQYPLYSASIALHGGSLVPYFLNEETGWGLDVDELKKQLEEARSKGITVRALVVINPGNPTGQVLVEENQKKIVEFCKNEGLVLLADEVYQENIYVEDKPFHSFKKIARSLGYTDDDLPLVSFQSVSKGYYGECGKRGGYMEITGFSPDVREQIYKVASVNLCSNVSGQILASLVMNPPKAGDESFESFMSERDGILSSLARRAKALEEAFNSLEGITCNKAEGAMYLFPRLHLPQKAIGAAQAVGTAPDAYYAKRLLEATGIVVVPGSGFGQVPGTWHFRCTILPQEDKIPAIVSRLKEFHEKFMDEFRD

SEQ ID NO: 146186 - DNA, 1449 bp, Zea mays
  CDS (1)..(1449)
atggctgccaccgtcgccgtggaaaacctcaaccccaaggtcttaaaatgtgagtatgcagtccgtggagagattgtcatccatgctcagcgcttgcagcaacaactacaaacacaaccagggtctcttccttttgatgagatcctctattgcaacattgggaatccacaatctcttggtcagcaacctgtgacattcttcagggaggttcttgctctttgtgatcatccatgcctcttggaaaaagaggaaaccaaatcattgttcagtgctgatgctatttctcgagcaaagcagattcttgcaactattcctggacgggcaacaggtgcatatagtcacagtcagggtatcaaaggactgcgtgatgcaattgctgctgggatcacctcacgtgatggattccctgcaaatgcagatgacattttcattacagacggagcaagtcctggggtccacatgatgatgcaattactgattaggaatgagaaagatggcattctgtgcccaattcctcagtaccccttgtactcggcctccatagctcttcatggtggagctcttgtcccctattaccttgatgaaaaaactgggtggggtttggagatctctgatcttaagaaacaactcgaagatgctcggtcaaaaggcattgatgttagggccttggtggttatcaatccaggaaatccgactgggcaggttcttgctgaagacaaccaatatgatatagtgaaattctgtaaaaatgagggccttgttcttctagctgatgaggtatatcaagagaacatctatgttgacaacaagaaatttaactctttcaagaagattgcaagatccatgggatacggcgaggatgatctccctctagtatcatttcagtctgtctccaaaggatactatggagagtgtggtaaaagaggaggttacatggagattactggcttcagtgctccggtaagagagcagatctacaaggtagcttcagtgaacctgtgctccaatatcactggtcaaatccttgcgagcctcgtcatgaatccaccaaaggttggggacgaatcatatgcttcctacaaggcagagaaagatggaatccttcagtctttagctcgccgtgcaaaggcactggaagatgcattcaacacgcttgagggattttcatgtaacaaggctgaaggagcaatgtaccttttccctcagatccatctgccacataaggcaattgaggctgctaaagctgccaagaaagcacctgatgcattctatgcgctccgtctccttgaatcaactggaattgttgtggttcctggatctggatttggccaagttcctggaacatggcacgtcagatgcacgatcctgccgcaggaagacaaaatccccgcggtgatcacccgcttcaaggctttccatgaggcgttcatggctgagtaccgtgactga

SEQ ID NO: 146187 - protein, 482 aa, Zea mays
MAATVAVENLNPKVLKCEYAVRGEIVIHAQRLQQQLQTQPGSLPFDEILYCNIGNPQSLGQQPVTFFREVLALCDHPCLLEKEETKSLFSADAISRAKQILATIPGRATGAYSHSQGIKGLRDAIAAGITSRDGFPANADDIFITDGASPGVHMMMQLLIRNEKDGILCPIPQYPLYSASIALHGGALVPYYLDEKTGWGLEISDLKKQLEDARSKGIDVRALVVINPGNPTGQVLAEDNQYDIVKFCKNEGLVLLADEVYQENIYVDNKKFNSFKKIARSMGYGEDDLPLVSFQSVSKGYYGECGKRGGYMEITGFSAPVREQIYKVASVNLCSNITGQILASLVMNPPKVGDESYASYKAEKDGILQSLARRAKALEDAFNTLEGFSCNKAEGAMYLFPQIHLPHKAIEAAKAAKKAPDAFYALRLLESTGIVVVPGSGFGQVPGTWHVRCTILPQEDKIPAVITRFKAFHEAFMAEYRD

SEQ ID NO: 146188 - DNA, 1449 bp, Zea mays
  CDS (1)..(1449)
atggccgccagcgtcaccgtggaaaacctcaaccccaaggtcttaaaatgtgagtatgcagtccgtggggagattgtcatccatgctcagcgcctgcagcaacaactacaaacacaaccagggtctcttccttttgatgagatcctctattgcaacattgggaatccccaatctcttggtcagcaacctgtgacattcttcagggaggttcttgctctttgtgatcatccgtgcctcttggaaaaagaggaaaccaaatcattgttcagtgctgatgcaatttctcgagcaaagcagattcttgcaactattcctggaagggcaacaggtgcatatagtcacagtcagggtatcaaaggactgcgtgatgcaattgctgctggaatcatgtcacgtgatggattccctgcaaatgcagatgacattttcattacagacggagcaagtcctggggtccacatgatgatgcaattactgattaggaatgagaaagatggcattctgtgcccaattcctcagtaccctttgtactcagcctccatagctcttcatggtggagctcttgtcccctattaccttaatgaaaaaactgggtggggtttggagatctctgatcttaagacgcaactggaaaatgctcggtcaaaaggcattgatgttagggccttggtggttatcaatccaggaaatccgactgggcaggttcttgctgaagacaaccaatatgatatagtgaaattctgcaaaaatgagggccttgttcttctagctgatgaggtatatcaagagaacatctatgtggacaacaagaaatttaactctttcaagaagattgtaagatccatggggtatggcgaggatgatctccctctagtatcgttacagtctgtttccaaaggatactatggagagtgtggtaaaagaggagggtacatggagattactggcttcagtgctccagtaagagagcagatctacaagatagcttcagtgaacctgtgctccaatatcactggtcaaatccttgcgagcctcgtcatgaatccaccaaaggttggagacgaatcatatgcttcctacaaggcagagaaagatggaatccttgagtctttagctcgtcgtgcaaaggcgttggaggatgcattcaacaagcttgagggattttcatgtaacaaggccgaaggagcaatgtatcttttccctcagattcttctgccacagaaggcaatcgaggctgctaaagctgctaagaaagcgcctgacgctttctacgctctccgtctccttgaatcgactggaatcgtcgtggtccctggatctggatttggtcaagttcctggaacatggcacatcagatgcacgatcctgccgcaggaagacaagatccccgcggtgatcagccgcttcagggctttccatgaggcgttcttggccgaataccgcgactaa

SEQ ID NO: 146189 - protein, 482 aa, Zea mays
MAASVTVENLNPKVLKCEYAVRGEIVIHAQRLQQQLQTQPGSLPFDEILYCNIGNPQSLGQQPVTFFREVLALCDHPCLLEKEETKSLFSADAISRAKQILATIPGRATGAYSHSQGIKGLRDAIAAGIMSRDGFPANADDIFITDGASPGVHMMMQLLIRNEKDGILCPIPQYPLYSASIALHGGALVPYYLNEKTGWGLEISDLKTQLENARSKGIDVRALVVINPGNPTGQVLAEDNQYDIVKFCKNEGLVLLADEVYQENIYVDNKKFNSFKKIVRSMGYGEDDLPLVSLQSVSKGYYGECGKRGGYMEITGFSAPVREQIYKIASVNLCSNITGQILASLVMNPPKVGDESYASYKAEKDGILESLARRAKALEDAFNKLEGFSCNKAEGAMYLFPQILLPQKAIEAAKAAKKAPDAFYALRLLESTGIVVVPGSGFGQVPGTWHIRCTILPQEDKIPAVISRFRAFHEAFLAEYRD

SEQ ID NO: 146190 - DNA, 1293 bp, Zea mays
  CDS (1)..(1293)
atggaagacagcgccaccaatggccatggggttgtgacggctgtcccggcctcgtggaacttcgagccaaacgagaccctcctgggtcttccggcgctctcggttcgcggcgtgctgaccagagtcatggccgggatgttgcccgacggtgggcgggcggtggtccggttgggcagcggcgacccgacagcgttcccgtgcttccggacggtgccagaggccgtggacgccgtcgccagcgcggtccagtccgggcagtacaactcctattccactagcgtcggccttgagctcgcacggaggtccattgctcagtacttatcctgtgatttgccatataaactgtcacctgatgatgtctacctcacaagtggttgcactcaagcaattgagatactctgctctgcgttagctcgtcctggtgcaaacatcctgcttccaagacctggatttatgttctatgaggcgcgtgctatcttcaatggcatggaagcccgttacttcaatcttctacctgggaacggctgggaggttgacattgatggcgtccaagttcttgccgacaagaatattgttgccatggtcattgtgaacccaggaaacccatgtggcaatgtgtactcctatgagcacctggccaaggtcgctgagaccgcgcgaaagcttggcatattcgtcatagcagatgaggtttacgcacacttgacatttggagagaggaaatttgtgccgatgggtgtgtttggggctgtggctccagtgttaacactggggtccatatcaaagagatggatggtgcctggatggcggcttggatggattgttaccaatgatccgaatggtgtatttcagaggactaaggtagtgcacagcatcaagagctaccttgatatctcctctgatcctgcaacatttgtccagggagcaataccaaaactcgtggagaacacaaaggaggaattcttcgaaaaaactatcgaaattctaaaacgatgtgtagatatatgctgtgaaaagctgaagggcatcaatgcaatcacgtgcccaagcaaaccagagggatccatgtttgtaatggtgaaactggatctgtcctgcctggagggcatcaaagatgacatggacttctgctgccggctggcaaaggaagaattagttgttgttctgccaggatgtgctgtcggatacaaggattggcttcgcatcacctttgcgattgatccatcttctctggaagaggggcttgacaggctcaagtccttctgcttgcgatacagaaagccaacaaagtga

SEQ ID NO: 146191 - protein, 430 aa, Zea mays
MEDSATNGHGVVTAVPASWNFEPNETLLGLPALSVRGVLTRVMAGMLPDGGRAVVRLGSGDPTAFPCFRTVPEAVDAVASAVQSGQYNSYSTSVGLELARRSIAQYLSCDLPYKLSPDDVYLTSGCTQAIEILCSALARPGANILLPRPGFMFYEARAIFNGMEARYFNLLPGNGWEVDIDGVQVLADKNIVAMVIVNPGNPCGNVYSYEHLAKVAETARKLGIFVIADEVYAHLTFGERKFVPMGVFGAVAPVLTLGSISKRWMVPGWRLGWIVTNDPNGVFQRTKVVHSIKSYLDISSDPATFVQGAIPKLVENTKEEFFEKTIEILKRCVDICCEKLKGINAITCPSKPEGSMFVMVKLDLSCLEGIKDDMDFCCRLAKEELVVVLPGCAVGYKDWLRITFAIDPSSLEEGLDRLKSFCLRYRKPTK

SEQ ID NO: 146192 - DNA, 1449 bp, Zea mays
  CDS (1)..(1449)
atggccgccagcgtcaccgtggaaaacctcaaccccaaggtcttaaaatgtgagtatgcagtccgtggggagattgtcatccatgctcagcgcctgcagcaacaactacaaacacaaccagggtctcttccttttgatgagatcctctattgcaacattgggaatccccaatctcttggtcagcaacctgtgacattcttcagggaggttcttgctctttgtgatcatccgtgcctcttggaaaaagaggaaaccaaatcattgttcagtgctgatgcaatttctcgagcaaagcagattcttgcaactattcctggaagggcaacaggtgcatatagtcacagtcagggtatcaaaggactgcgtgatgcaattgctgctggaatcatgtcacgtgatggattccctgcaaatgcagatgacattttcattacagacggagcaagtcctggggtccacatgatgatgcaattactgattaggaatgagaaagatggcattctgtgcccaattcctcagtaccctttgtactcagcctccatagctcttcatggtggagctcttgtcccctattaccttaatgaaaaaactgggtggggtttggagatctctgatcttaagatgcaactggaaaatgctcggtcaaaaggcattgatgttagggccttggtggttatcaatccaggaaatccgactgggcaggttcttgctgaagacaaccaatatgatatagtgaaaattctgcaaaatgagggccttgttcttctagctgatgaggtatatcaagagaacatctatgtggacaacaagaaatttaactctttcaagaagattgtaagatccatggggtatggcgaggatgatctccctctagtatcgttacagtctgtttccaaaggatactatggagagtgtggtaaaagaggagggtacatggagattactggcttcagtgctccagtaagagagcagatctacaagatagcttcagtgaacttgtgctccaatatcactggtcaaatccttgcgagcctcgtcatgaatccaccaaaggctggggacgaatcatatgcttcctacaaggcagagaaggatggaatccttgagtctttagctcgtcgtgcaaaggcgttggaggatgcattcaacaagcttgagggattttcatgtaacaaggccgaaggagcaatgtatcttttccctcagattcatctgccacagaaggcaatcgaggctgctaaagctgctaagaaagcgcctgacgctttctacgctctccgtctccttgaatcaactggaatcgtcgtggtccctggatctggatttggtcaagttcctggaacatggcacatcagatgcacgatcctgccgcaggaagacaagatccccgcggtgatcagccgcttcagggctttccatgaggcgttcttggccgagtaccgcgactaa

SEQ ID NO: 146193 - protein, 482 aa, Zea mays
MAASVTVENLNPKVLKCEYAVRGEIVIHAQRLQQQLQTQPGSLPFDEILYCNIGNPQSLGQQPVTFFREVLALCDHPCLLEKEETKSLFSADAISRAKQILATIPGRATGAYSHSQGIKGLRDAIAAGIMSRDGFPANADDIFITDGASPGVHMMMQLLIRNEKDGILCPIPQYPLYSASIALHGGALVPYYLNEKTGWGLEISDLKMQLENARSKGIDVRALVVINPGNPTGQVLAEDNQYDIVKILQNEGLVLLADEVYQENIYVDNKKFNSFKKIVRSMGYGEDDLPLVSLQSVSKGYYGECGKRGGYMEITGFSAPVREQIYKIASVNLCSNITGQILASLVMNPPKAGDESYASYKAEKDGILESLARRAKALEDAFNKLEGFSCNKAEGAMYLFPQIHLPQKAIEAAKAAKKAPDAFYALRLLESTGIVVVPGSGFGQVPGTWHIRCTILPQEDKIPAVISRFRAFHEAFLAEYRD

SEQ ID NO: 146194 - DNA, 1440 bp, Zea mays
  CDS (1)..(1440)
atggcgaggaggaggccgatggactacgaggagctgaacgagaaagtcaagaaggcgcagtacgcggtgcgcggggagctgtacctccgcgcctccgagctccagaaggagggcaagaagatcatcttcaccaacgtcggcaacccgcacgccctcggccagaagccgctcaccttcccgcgccaggtggtggcgctgtgccaggctccgttcctcctcgatgaccccaatgtcggcctcatgttcccgcccgatgccatcgtgcgggccaagcgctatctcgccatggcgccgggaggtctaggtgcgtacagtgatgcccgtggtatccccggaatcaggaaggaagttgctgacttcatccacaagcgtgatggatatccgagtgacccagaactcatttacctgacagacggcgccagcaaaggtgtgatgcaaatgctgaatgccatcattagaaacgagagggatgggatcttggttcctgttcctcagtacccactttattctgctatcatttccctctttggtgggtctctggtcccatactacttggaagaagaggctaactggaaccttgactttgcaaacatccgacaagcagtggccgaggcacgttcgaagggaatcactgttcgagcgacggtgattataaatccaggaaatcccactggccagtgccttagtgaagcaaatataagggaacttgtgcgatattgctaccatgaaaacttagttctgcttgcagacgaagtgtatcagcagaacgtttatcaagatgagcgcccatttataagcgcaagaaaggttatgttcgacatgggtccgccaataagcagggaggttcagcttgtttctttccacactgtgtccaaagggtactggggagagagtggacaacgtggtggatacttcgaaatgacaaatcttcctccaaagacagtagatgagatatacaaggttgcatcaatagtactgagtccgaatgttcccgggcaaatctttatgggagtgatggttaaccctcctaaacctggagatatctcatacccgaagttcactgccgaaagcaagtccatcctcgaatctttgaggaggagagcgcgcatgatgacagacggtttcaacagctgccgaaacgtggtgtgcaatttcacagaaggagctatgtactctttcccccaaatacagctgccagcaagagccatcgaggcggcaaagagagccggcaaagcagcagacgttttctactgcctcaagctcctggaggcaacggggatttccactgttccgggatctggttttgggcagaaggaaggggtgttccaccttcggacaactatccttccagccgaggaagacttccctaccatcatgtcgagcttcaagaagttcaacgactcattcatggagcaatacgagggctactccaggatgtga

SEQ ID NO: 146195 - protein, 479 aa, Zea mays
MARRRPMDYEELNEKVKKAQYAVRGELYLRASELQKEGKKIIFTNVGNPHALGQKPLTFPRQVVALCQAPFLLDDPNVGLMFPPDAIVRAKRYLAMAPGGLGAYSDARGIPGIRKEVADFIHKRDGYPSDPELIYLTDGASKGVMQMLNAIIRNERDGILVPVPQYPLYSAIISLFGGSLVPYYLEEEANWNLDFANIRQAVAEARSKGITVRATVIINPGNPTGQCLSEANIRELVRYCYHENLVLLADEVYQQNVYQDERPFISARKVMFDMGPPISREVQLVSFHTVSKGYWGESGQRGGYFEMTNLPPKTVDEIYKVASIVLSPNVPGQIFMGVMVNPPKPGDISYPKFTAESKSILESLRRRARMMTDGFNSCRNVVCNFTEGAMYSFPQIQLPARAIEAAKRAGKAADVFYCLKLLEATGISTVPGSGFGQKEGVFHLRTTILPAEEDFPTIMSSFKKFNDSFMEQYEGYSRM

SEQ ID NO: 146196 - DNA, 1251 bp, Zea mays
  CDS (1)..(1251)
atggcgattgtgcgggaggaggcagtggacacgtccatcagcccaagggtgagcgcgctgcggccgtccaaaaccatggccatcaccgatcaggccatggcgctgcggcaggccggcgtgccggttatcggtctagccgcgggggagccagacttcgacacgccgcccgcgatcgcggaggccgggatggatgcaattaggaatggttatacaagatacactcctaatgctgggactttggagctgaggaaggctatttgtactaaactccaggaggagaacggggtatcctacctcccagatgaggtgctggtgagcaatggagctaagcaatgcatcacacaagctgtgcttgcagtttgctcacctggtgatgaggttttgattccagccccatattgggtcagttatcctgagatggctagactggctgatgcgactccagtgattcttcctacaaacatatcagagaatttcttgttaaggccagagttgcttaccgacaagatcaatgagaaatcgaggctcttaattctctgctctccatctaatccaacagggtcagtatatccaaaggagttgcttgacaaaatagctgatatagtcaagaagcatccgaggcttttggttttatctgatgaaatttatgagcatattatctatcagcctgcaaaacacacaagctttgcttcactacctggaatgtgggaaagaacattaactgtaaatggtttttctaaggcttttgcaatgacgggttggcgtcttggttaccttgcagcccctaaacattttgttgcagcatgtggaaagatccaaagccagttcacctcaggtgccaacagcatatcacagaaggcagggcttgcagctctgaatcttggctatgctggtggtgaagcagtatcaactatggtcaaagcattccaggaacgccgtgactatcttgtgaaaaatttcaaggaactgcctggtgtgaaaatatcagaacctcagggtgccttttatttgttcattgacttcagcgcctactatgggtctgaagtagaggggtttggcactatcaagaattccgagtccctttgcatcttcctattagagaaagcacaggttgcccttgtccctggtgacgcatttggggatgacaagtgcattcgtatttcatatgctgcatccctaactacacttcagactgcgatgtcaaaattaaaggaagctgttgctctgctcaagccctgtgttgctgcgtag

SEQ ID NO: 146197 - protein, 416 aa, Zea mays
MAIVREEAVDTSISPRVSALRPSKTMAITDQAMALRQAGVPVIGLAAGEPDFDTPPAIAEAGMDAIRNGYTRYTPNAGTLELRKAICTKLQEENGVSYLPDEVLVSNGAKQCITQAVLAVCSPGDEVLIPAPYWVSYPEMARLADATPVILPTNISENFLLRPELLTDKINEKSRLLILCSPSNPTGSVYPKELLDKIADIVKKHPRLLVLSDEIYEHIIYQPAKHTSFASLPGMWERTLTVNGFSKAFAMTGWRLGYLAAPKHFVAACGKIQSQFTSGANSISQKAGLAALNLGYAGGEAVSTMVKAFQERRDYLVKNFKELPGVKISEPQGAFYLFIDFSAYYGSEVEGFGTIKNSESLCIFLLEKAQVALVPGDAFGDDKCIRISYAASLTTLQTAMSKLKEAVALLKPCVAA

SEQ ID NO: 146198 - DNA, 1293 bp, Zea mays
  CDS (1)..(1293)
atggaagacagcgccaccaatggccatggggttgtgacggctgtcccggcctcgtggaacttcgagccaaacgagaccctcctgggtcttccggcgctctcggttcgcggcgtgctgaccagagtcatggccgggatgttgcccgacggtgggcgggcggtggtccggttgggcagcggcgacccgacagcgttcccgtgcttccggacggtgccagaggccgtggacgccgtcgccagcgcggtccagtccgggcagtacaactcctattccactagcgtcggccttgagctcgcacggaggtccattgctcagtacttatcctgtgatttgccatataaactgtcacctgatgatgtctacctcacaagtggttgcactcaagcaattgagatactctgctctgcgttagctcgtcctggtgcaaacatcctgcttccaagacctggatttatgttctatgaggcgcgtgctatcttcaatggcatggaagcccgttacttcaatcttctacctgggaacggctgggaggttgacattgatggcgtccaagctcttgccgacaagaatactgttgccatggtcattgtgaacccaggaaacccatgtggcaatgtgtactcctatgagcacctggccaaggtcgctgagaccgcgcgaaagcttggcatattcgtcatagcagatgaggtttacgcacacttgacatttggagagaggaaatttgtgccgatgggtgtgtttggggctgtggctccagtgttaacactggggtccatatcaaagagatggatggtgcctggatggcggcttggatggattgttaccaatgatccgaatggtgtatttcagaggactaaggtagtgcacagcatcaagagctaccttgatatctcctctgatcctgcaacatttgtccagggagcaataccaaaactcgtggagaacacaaaggaggaattcttcgaaaaaactatcgaaattctaaaacgatgtgtagatatatgctgtgaaaagctgaagggcatcaatgcaatcacgtgcccaagcaaaccagagggatccatgtttgtaatggtgaaactggatctgtcctgcctggagggcatcaaagatgacatggacttctgctgccggctggcaaaggaagaattagtggttgttctgccaggatgtgctgtcggatacaaggattggcttcgcatcacctttgcgattgatccatcttctctggaagaggggcttgacaggctcaagtccttctgcttgcgatacagaaagccaacaaagtga

SEQ ID NO: 146199 - protein, 430 aa, Zea mays
MEDSATNGHGVVTAVPASWNFEPNETLLGLPALSVRGVLTRVMAGMLPDGGRAVVRLGSGDPTAFPCFRTVPEAVDAVASAVQSGQYNSYSTSVGLELARRSIAQYLSCDLPYKLSPDDVYLTSGCTQAIEILCSALARPGANILLPRPGFMFYEARAIFNGMEARYFNLLPGNGWEVDIDGVQALADKNTVAMVIVNPGNPCGNVYSYEHLAKVAETARKLGIFVIADEVYAHLTFGERKFVPMGVFGAVAPVLTLGSISKRWMVPGWRLGWIVTNDPNGVFQRTKVVHSIKSYLDISSDPATFVQGAIPKLVENTKEEFFEKTIEILKRCVDICCEKLKGINAITCPSKPEGSMFVMVKLDLSCLEGIKDDMDFCCRLAKEELVVVLPGCAVGYKDWLRITFAIDPSSLEEGLDRLKSFCLRYRKPTK

SEQ ID NO: 146200 - DNA, 23 bp, Artificial sequence
  primer
atgtcccccattgaaaaatccag

SEQ ID NO: 146201 - DNA, 25 bp, Artificial sequence
  primer
ttacagctgatgataaccagaaagg

SEQ ID NO: 146202 - protein, 445 aa, Artificial sequence
  consensus sequence
  Variant (2)..(10): Xaa in position 2 to 10 is any amino acid
  Variant (11)..(27): Xaa in position 11 to 27 is any or no amino acid
  Variant (29)..(52): Xaa in position 29 to 52 is any amino acid
  Variant (53)..(88): Xaa in position 53 to 88 is any or no amino acid
  Variant (90)..(93): Xaa in position 90 to 93 is any amino acid
  Variant (95)..(95): Xaa in position 95 is any amino acid
  Variant (96)..(98): Xaa in position 96 to 98 is any or no amino acid
  Variant (100)..(121): Xaa in position 100 to 121 is any amino acid
  Variant (122)..(125): Xaa in position 122 to 125 is any or no amino acid
  Variant (127)..(142): Xaa in position 127 to 142 is any amino acid
  Variant (143)..(146): Xaa in position 143 to 146 is any or no amino acid
  Variant (148)..(151): Xaa in position 148 to 151 is any amino acid
  Variant (153)..(153): Xaa in position 153 is any amino acid
  Variant (155)..(201): Xaa in position 155 to 201 is any amino acid
  Variant (202)..(210): Xaa in position 202 to 210 is any or no amino acid
  Variant (212)..(212): Xaa in position 212 is any amino acid
  Variant (217)..(236): Xaa in position 217 to 236 is any amino acid
  Variant (237)..(241): Xaa in position 237 to 241 is any or no amino acid
  Variant (244)..(244): Xaa in position 244 is any amino acid
  Variant (246)..(270): Xaa in position 246 to 270 is any amino acid
  Variant (271)..(284): Xaa in position 271 to 284 is any or no amino acid
  Variant (287)..(291): Xaa in position 287 to 291 is any amino acid
  Variant (292)..(292): Xaa in position 292 is any or no amino acid
  Variant (294)..(294): Xaa in position 294 is any amino acid
  Variant (296)..(296): Xaa in position 296 is any amino acid
  Variant (298)..(362): Xaa in position 298 to 362 is any amino acid
  Variant (363)..(379): Xaa in position 363 to 379 is any or no amino acid
  Variant (381)..(381): Xaa in position 381 is any amino acid
  Variant (384)..(384): Xaa in position 384 is any amino acid
  Variant (386)..(386): Xaa in position 386 is any amino acid
  Variant (388)..(398): Xaa in position 388 to 398 is any amino acid
  Variant (399)..(414): Xaa in position 399 to 414 is any or no amino acid
  Variant (417)..(424): Xaa in position 417 to 424 is any amino acid
  Variant (425)..(425): Xaa in position 425 is any or no amino acid
  Variant (427)..(428): Xaa in position 427 to 428 is any amino acid
  Variant (430)..(435): Xaa in position 430 to 435 is any amino acid
  Variant (436)..(444): Xaa in position 436 to 444 is any or no amino acid
AXXXXXXXXXXXXXXXXXXXXXXXXXXGXXXXXXXXXXXXXXXXXXXXXXXXXXXXXXXXXXXXXXXXXXXXXXXXXXXXXXXXXXXXYXXXXGXXXXRXXXXXXXXXXXXXXXXXXXXXXXXXXGXXXXXXXXXXXXXXXXXXXXDXXXXPXPXXXXXXXXXXXXXXXXXXXXXXXXXXXXXXXXXXXXXXXXXXXXXXXXXXXXXXXXPXNPTGXXXXXXXXXXXXXXXXXXXXXXXXXDEXYXXXXXXXXXXXXXXXXXXXXXXXXXXXXXXXXXXXXXXXSKXXXXXXGXRXGXXXXXXXXXXXXXXXXXXXXXXXXXXXXXXXXXXXXXXXXXXXXXXXXXXXXXXXXXXXXXXXXXXXXXXXXXXXXXXXXXXPXGAXYXFXXXXXXXXXXXXXXXXXXXXXXXXXXXLLXXXXXXXXXGXXFXXXXXXXXXXXXXXXR

SEQ ID NO: 146203 - protein, 19 aa, Artificial sequence
  protein pattern
  Variant (2)..(2): Xaa in position 2 is any or no amino acid
  Variant (4)..(4): Xaa in position 4 is Gly, Asn or Ser
  Variant (7)..(7): Xaa in position 7 is Cys, Ser or Thr
  Variant (9)..(18): Xaa in position 9 to 18 is any amino acid
  Variant (19)..(19): Xaa in position 19 is Ile, Leu, Met or Val
NXPXNPXGXXXXXXXXXXX

SEQ ID NO: 146204 - DNA, 564 bp, Escherichia coli
  CDS (1)..(564): transl_table=11
atgcagcgcatatacgtggagaacaaaatgtcatttattaaaactttttccgggaagcatttttattatgacaagataaataaagacgacatcgtgattaacgatatcgcggtttccctttcaaatatctgccgctttgccggtcatctttctcacttctacagtgtcgcccaacatgcggtgctttgcagccagctggtgccgcaggaatttgcttttgaagcattaatgcatgatgcaacagaagcgtattgccaggacatccccgcaccactgaaacgccttcttcctgactataaacggatggaagaaaaaatagatgcagtaatccgtgagaaatacgggttacctcctgttatgagcacgccagtgaaatatgccgatctcattatgctggcaaccgaacgccgtgatctcgggcttgatgatggctctttctggcctgtactggaaggcatcccggcaacagagatgttcaacgtgattccactggcaccgggtcatgcctacgggatgtttatggaacgttttaacgatttatcggagttacgcaaatgcgcataa

SEQ ID NO: 146205 - protein, 187 aa, Escherichia coli
MQRIYVENKMSFIKTFSGKHFYYDKINKDDIVINDIAVSLSNICRFAGHLSHFYSVAQHAVLCSQLVPQEFAFEALMHDATEAYCQDIPAPLKRLLPDYKRMEEKIDAVIREKYGLPPVMSTPVKYADLIMLATERRDLGLDDGSFWPVLEGIPATEMFNVIPLAPGHAYGMFMERFNDLSELRKCA

SEQ ID NO: 146206 - DNA, 636 bp, Mesorhizobium loti MAFF303099
  CDS (1)..(636): transl_table=11
atggcggcggaccgcaccggggcgccgccgcgcgcctggcagcgcatgctgtccggccgccggctcgacctgctcgatccctctccgctcgacatcgagatttcggacattgcccatgggctcgcccgcgtcgcccgctggaacggccagaccagcggcgagcatgcgttttcagtcgcccagcactcgttgctggtcgaagccctgttcaatgacctggtgcctcaggcttctgccaccgaccggcttgccgcgctgctgcatgacgcgcctgaatatgtcattggcgacatgatctcgccgtttaagtcggtgatgggcggcagctacaaggactgcgaattgcgcctgcagcgtgccatccaccagcgcttttcgctgccggccgaaccggccgcggcggtgcgcagggacatcaagcgcgccgaccagatcgcagcctatttcgaggcaacgctgcttgccggcttctcgaccgccgaagcgaccgaattcttcggccgtccgcgcggtttttcagccgagcgcttcgatttcacaccacgctcggtcacctgggcgcaggatgccttcctgaagcggttttcggcgcttgagaaatcgcggcatccagttgcgacgtcggtggtagggtag

SEQ ID NO: 146207 - protein, 211 aa, Mesorhizobium loti MAFF303099
MAADRTGAPPRAWQRMLSGRRLDLLDPSPLDIEISDIAHGLARVARWNGQTSGEHAFSVAQHSLLVEALFNDLVPQASATDRLAALLHDAPEYVIGDMISPFKSVMGGSYKDCELRLQRAIHQRFSLPAEPAAAVRRDIKRADQIAAYFEATLLAGFSTAEATEFFGRPRGFSAERFDFTPRSVTWAQDAFLKRFSALEKSRHPVATSVVG

SEQ ID NO: 146208 - DNA, 681 bp, Agrobacterium tumefaciens str. C58
  CDS (1)..(681): transl_table=11
gtggagcgggctttcattcccggcggccgatccggcggctcgggcggaggactaagagtggcccccgcaaaaagtccgcgcgcctggcagcgcatgctgtcgggacgacggctcgacctgctcgacccttccccgctcgatgtggaaattgccgacattgctcatggccttgcccgcgtcgcccgctggaacggccagacgcgcggcgaccacgcctttaccgtcgcccagcattgcctcatcgtcgagaccattttctgccgcatgtgcccgggtgccacgcctgacgagatgcagatggcgcttctgcacgatgcgccggaatatgtgatcggcgacatgatctcgccgttcaaatccgtggtcggcggcggttacaagaccgtggaaaagcggctggaagccgccgtgcatctgcgtttcggcctgccaccgcatgcgtcccgcgagttgaaggatcgcatcaagaaggccgacacagtggccgcctttttcgaagcgaccgagcttgccggtttttccaccgccgaggcgcagaaattcttcggcctgccgcgcggcatcacccgcgatatgttcgatatcatcccccttccctcgacggaggcgcaaagactgttcatcgcccgcttcgaggcaatcgagacgctgcgcgtgaccagaaccgggggcgcagtatga

SEQ ID NO: 146209 - protein, 226 aa, Agrobacterium tumefaciens str. C58
MERAFIPGGRSGGSGGGLRVAPAKSPRAWQRMLSGRRLDLLDPSPLDVEIADIAHGLARVARWNGQTRGDHAFTVAQHCLIVETIFCRMCPGATPDEMQMALLHDAPEYVIGDMISPFKSVVGGGYKTVEKRLEAAVHLRFGLPPHASRELKDRIKKADTVAAFFEATELAGFSTAEAQKFFGLPRGITRDMFDIIPLPSTEAQRLFIARFEAIETLRVTRTGGAV

SEQ ID NO: 146210 - DNA, 753 bp, Caulobacter crescentus CB15
  CDS (1)..(753): transl_table=11
atgatcgaactccctttcgagggcatttccacagatgacggcgacgcccacattgatctttctcaaccgatgcgccagtcaaccgacttcatcgtgaggaacgaacacgtggccaaagggctgcatcggggcggaccgccccgcgcatggcaaaggatgctctccggacgacggctcgatctgctcgacccgtcgccgatggacatcgagatcgaggacatcgcccatggtctggcgcgcgtggcgcgctggaatgggcagaccgtgggcgatcacggcttctcggtcgcccagcacagcctggtggtcgaggagatcgccgcgcacatcaagccggacctggagccgcgctggcgcctggccgccctgctgcacgacgccagcgaatatgtgatcggcgacatgatcagcccgttcaaggcggcgctgggcgtcagctacaaggatttcgagacccggctggaagacgcgatccacatccgctttggactgccggtgaagacccccaccccgatcaagaagctgatcaagcaggccgaccgcgcctgcgccttcttcgaggcgacccaactggcaggcttcgagcacgccgagtccctggccatcttcggcgcaccgccggcgggctacgagctgcggatcacgcccctggcgccgtttgaggcccaggcgcgctatgtgaaacgcttccacgtattgtcacgggcggcgggctatgaatccgcgccaggcgaggcgttcgaaaccgaatga

SEQ ID NO: 146211 - protein, 250 aa, Caulobacter crescentus CB15
MIELPFEGISTDDGDAHIDLSQPMRQSTDFIVRNEHVAKGLHRGGPPRAWQRMLSGRRLDLLDPSPMDIEIEDIAHGLARVARWNGQTVGDHGFSVAQHSLVVEEIAAHIKPDLEPRWRLAALLHDASEYVIGDMISPFKAALGVSYKDFETRLEDAIHIRFGLPVKTPTPIKKLIKQADRACAFFEATQLAGFEHAESLAIFGAPPAGYELRITPLAPFEAQARYVKRFHVLSRAAGYESAPGEAFETE

SEQ ID NO: 146212 - DNA, 624 bp, Agrobacterium tumefaciens str. C58
  CDS (1)..(624): transl_table=11
gtggcccccgcaaaaagtccgcgcgcctggcagcgcatgctgtcgggacgacggctcgacctgctcgacccttccccgctcgatgtggaaattgccgacattgctcatggccttgcccgcgtcgcccgctggaacggccagacgcgcggcgaccacgcctttaccgtcgcccagcattgcctcatcgtcgagaccattttctgccgcatgtgcccgggtgccacgcctgacgagatgcagatggcgcttctgcacgatgcgccggaatatgtgatcggcgacatgatctcgccgttcaaatccgtggtcggcggcggttacaagaccgtggaaaagcggctggaagccgccgtgcatctgcgtttcggcctgccaccgcatgcgtcccgcgagttgaaggatcgcatcaagaaggccgacacagtggccgcctttttcgaagcgaccgagcttgccggtttttccaccgccgaggcgcagaaattcttcggcctgccgcgcggcatcacccgcgatatgttcgatatcatcccccttccctcgacggaggcgcaaagactgttcatcgcccgcttcgaggcaatcgagacgctgcgcgtgaccagaaccgggggcgcagtatga

SEQ ID NO: 146213 - protein, 207 aa, Agrobacterium tumefaciens str. C58
MAPAKSPRAWQRMLSGRRLDLLDPSPLDVEIADIAHGLARVARWNGQTRGDHAFTVAQHCLIVETIFCRMCPGATPDEMQMALLHDAPEYVIGDMISPFKSVVGGGYKTVEKRLEAAVHLRFGLPPHASRELKDRIKKADTVAAFFEATELAGFSTAEAQKFFGLPRGITRDMFDIIPLPSTEAQRLFIARFEAIETLRVTRTGGAV

SEQ ID NO: 146214 - DNA, 552 bp, Escherichia coli CFT073
  CDS (1)..(552): transl_table=11
gtgcagcgcatatacgtggagaacaaaatgtcatttattaaaactttttccgggaagcatttttattatgacaggataaataaagacgacatcgttattaacgatatcgcggtttctctttcaaatatctgtcgctttgcaggacatctttcacatttctacagcgtcgcccaacatgcggtgctttgcagccaactggtaccgcaggaatttgcttttgaagcgttaatgcatgatgcaacagaagcgcattgccaggacatcccggcgccactgaaacgccttcttcctgactataaacggatggaagaaaaaatagacgccgtaatccgtgagaaatacgggttacccccggttatgagtacgcccgtgaaatatgccgatctcatcatgctggcaaccgaacgccgcgatctcgggcttgatgatggctctttctggcccgtactggaaggtatcccggcaacagagatgttcaaagttattccactgtcgccaggccatacctatgggatgtttatggaacgctttaaagagttaactgagtcgtaa

SEQ ID NO: 146215 - protein, 183 aa, Escherichia coli CFT073
MQRIYVENKMSFIKTFSGKHFYYDRINKDDIVINDIAVSLSNICRFAGHLSHFYSVAQHAVLCSQLVPQEFAFEALMHDATEAHCQDIPAPLKRLLPDYKRMEEKIDAVIREKYGLPPVMSTPVKYADLIMLATERRDLGLDDGSFWPVLEGIPATEMFKVIPLSPGHTYGMFMERFKELTES

SEQ ID NO: 146216 - DNA, 567 bp, Chromobacterium violaceum ATCC 12472
  CDS (1)..(567): transl_table=11
atgaggagcgcattcgtgcaaacggcatcgggacgctacctggatgtgcaagatccgcagccggacgatatcgacattgccgatatcgcccatcacctggcgcatctttgccgcttcggcggcgcctgccgccagtattacagcgaagcggagcatgcggtcagaatggcggaaatcctgccgccgcggctgaagctggcgggcttgctgtacggcgcggccaaggcctatgccggcgaggcggtgcgaccgggcggacaggccggtcccgcgccgcaacacaggctgacggcggcggtggaggcgcgcttcggcctgcacctgtcgggcgacgacagggccgagctggcgatggccgacgcccgcttattggcgaccgagcggcgcgacctgatgccgcccgacaatatcgagtggccgatcctgaccggcgtgcagccgctggcggagcggatctggccgatgaccatcgcccaggcgctggccagcttctgcgcggtgtacgagcaatgtcgggcctggtcatcgtcggcgcagatacggctgcggcagccttcggtgcgctga

SEQ ID NO: 146217 - protein, 188 aa, Chromobacterium violaceum ATCC 12472
MRSAFVQTASGRYLDVQDPQPDDIDIADIAHHLAHLCRFGGACRQYYSEAEHAVRMAEILPPRLKLAGLLYGAAKAYAGEAVRPGGQAGPAPQHRLTAAVEARFGLHLSGDDRAELAMADARLLATERRDLMPPDNIEWPILTGVQPLAERIWPMTIAQALASFCAVYEQCRAWSSSAQIRLRQPSVR

SEQ ID NO: 146218 - DNA, 579 bp, Bdellovibrio bacteriovorus HD100
  CDS (1)..(579): transl_table=11
atgaacatcgaaatgcccattctgccggaaaatttgaatcgtcctgaaatcgtggaaaaatcctgggttgtgaccctgtcgggaagccgcttcagcattctgaagccggatccggatgcgattatgattgaagacatcgcctgcgcgctggctcgtcaggcaagatttaatgggcacacacgcttcttctacagcgtgggtcagcactcttgcctgggggcggaagtttccccaaccaaagagatcgccttgcacatgcttttccatgatgcgaccgaagcctatgtgggtgatctggtgtctccggtgaaggctttgctgccggattttgaaatcatcgaatcccgcattcactgggcgatttccaaacgcttcaacctggaatacccactgccaaaagtggtgaagcagatcgaccgccgcctgctggcgacggaagtccgtgacctgatcaccaaagatctgaagtcctggaatatttcagaagatgagccgtttgatttcccgatcatcccttggccgtcggaagtcaccgaggcccgcttcctggatctggcaaaaagccttttgaaaaaataa

SEQ ID NO: 146219 - protein, 192 aa, Bdellovibrio bacteriovorus HD100
MNIEMPILPENLNRPEIVEKSWVVTLSGSRFSILKPDPDAIMIEDIACALARQARFNGHTRFFYSVGQHSCLGAEVSPTKEIALHMLFHDATEAYVGDLVSPVKALLPDFEIIESRIHWAISKRFNLEYPLPKVVKQIDRRLLATEVRDLITKDLKSWNISEDEPFDFPIIPWPSEVTEARFLDLAKSLLKK

SEQ ID NO: 146220 - DNA, 621 bp, Bartonella henselae str. Houston-1
  CDS (1)..(621): transl_table=11
atggctaaagctcaattatcacaaaatggagaagcgcgcgcttggcaaagaatgctttctggccggcgacttgatcttctaaacccctctcctttcgatatcgaaatcgaagatattgctcatggactagctcgcgtcgcacgttggaacggtcaaacacaaggagaatatgcctattctgttgcacaacattcactcttggtagaacaaatatttcagaaactttttccacaatcgcagaacaatgaatgcctttgtgctcttcttcatgatgcaccagagtatgtcatcggtgatataatttcaccctttaaagctgttataggaaaacaatatgaactcattgaaaaacgtatacaagatgctatacatatgcgcttttctctccccgttgctccctctcaaaaactcttaaaaaaaatcaaacaagctgatcgcattgctgcatttcatgaatctattattcttgccggatttaatacagaagaagcccttcgctatttcggtcacccaaataatatttcacccgaaggactcaatttgcaaccatgctccacaacgaaaattgagaacgcttttttaaaacgttttcatgatcttgatgttgaaagattacattga

SEQ ID NO: 146221 - protein, 206 aa, Bartonella henselae str. Houston-1
MAKAQLSQNGEARAWQRMLSGRRLDLLNPSPFDIEIEDIAHGLARVARWNGQTQGEYAYSVAQHSLLVEQIFQKLFPQSQNNECLCALLHDAPEYVIGDIISPFKAVIGKQYELIEKRIQDAIHMRFSLPVAPSQKLLKKIKQADRIAAFHESIILAGFNTEEALRYFGHPNNISPEGLNLQPCSTTKIENAFLKRFHDLDVERLH

SEQ ID NO: 146222 - DNA, 675 bp, Rhodospirillum rubrum ATCC 11170
  CDS (1)..(675): transl_table=11
atggccccccgccccccccccgatggcgccccgaagccgaccgacccggcccttcacgcccggctgcgcgcccaggcgccgcgcacctggcaacgcatgctctcgggccggcgccttaatctgatcgatccctcgcccatcgatatcgagatcatcgatatcgcgctgggcctgtcgcgcaacacccgctggaacggccagacgatcggcgcccacggctggtcggtcgcccagcattccctgctggtcagcgccatcgtcgccgaccgcctgggcgcccaggccgatccccggttggtgatgacggcgctgctgcacgatgccagcgaatatgtcacccatgatctgatcaccccgctcaaggcggcggtcggcgatgtcttcaaggaactggaagatcgcctgatgtgcgcggttcacctgcgcttcggcctgcccgcccgccccgcgcccgaggtcaaggcgctgatcaagaccgccgattggatcgccggggcgaccgaggccgttcaactggccggcttcaccgcccgcgaggtgaaatcggttctgggcatcgccgaaaagcccctgcgcgacgtcacgttggttccgctgcccgtcgccgaggcccaggcccggttcctcgaggccttccaccgcctggaagccgccatggagtcttcgtcgcgatga

SEQ ID NO: 146223 - protein, 224 aa, Rhodospirillum rubrum ATCC 11170
MAPRPPPDGAPKPTDPALHARLRAQAPRTWQRMLSGRRLNLIDPSPIDIEIIDIALGLSRNTRWNGQTIGAHGWSVAQHSLLVSAIVADRLGAQADPRLVMTALLHDASEYVTHDLITPLKAAVGDVFKELEDRLMCAVHLRFGLPARPAPEVKALIKTADWIAGATEAVQLAGFTAREVKSVLGIAEKPLRDVTLVPLPVAEAQARFLEAFHRLEAAMESSSR

SEQ ID NO: 146224 - DNA, 612 bp, Hyphomonas neptunium ATCC 15444
  CDS (1)..(612): transl_table=11
ttgaagcgttctgttaagccccctcgcgtctggcagcggatgttgtctggccggcgccttgatctggcacatccctcgccgatggatgtggaaatcgaggatattgcccatgggctggcccgtgtggcgcgctggaacgggcagacgcggggcgagcatgccttttccgtggctgaacactcggtgctggtggagcagatcgtgcgcaagctggaacccggtctcccgccggaggcctggctgaccgccctgctgcatgacagcccggaatatgtgatcggggacatgatctccccgttcaaggcgctgctgggggagagctataaggatattgaagcccgtttgcaggaagccattcacatccggttcggcctgaaacccctgacaacggcgaagctgaagaagacgatcaagaaggccgaccatatctgcgcctggtttgaggcggtgcagctggcgggcttcagcgaggcggaatccgacggcttcttcgggcacccccctgaaggcatgaagtttcgcctgaagcccctgcccgcgcccgatgcgcagaggctgttcctgaagcgctttgaggatattcaggccgtgatcgcggcggaggctgcctga

SEQ ID NO: 146225 - protein, 203 aa, Hyphomonas neptunium ATCC 15444
MKRSVKPPRVWQRMLSGRRLDLAHPSPMDVEIEDIAHGLARVARWNGQTRGEHAFSVAEHSVLVEQIVRKLEPGLPPEAWLTALLHDSPEYVIGDMISPFKALLGESYKDIEARLQEAIHIRFGLKPLTTAKLKKTIKKADHICAWFEAVQLAGFSEAESDGFFGHPPEGMKFRLKPLPAPDAQRLFLKRFEDIQAVIAAEAA

SEQ ID NO: 146226 - DNA, 567 bp, Magnetococcus sp. MC-1
  CDS (1)..(567): transl_table=11
atgtgtgaaaagcgtttaggctcctggatccagacttttgccggcaaacagttctggccaatggatgctcgccctggtgaagtggacattcaagatatcgctcatgctctctctatgctgtgtcgcttcaatggtcactgtaatcgcttctattctgtagcggagcactctgtccatctatccagagtggtggagccacagcatgctctatggggattgcttcatgatgcagcagaagcctatgtgtcagatgttccaaggccggtgaagcagcatgttgagcagtttaaagagattgagagccagctcatggccgtggttgctgattgttttgggctgcatccagaacagcctcgtgaagtaaaaaaggctgacatgcagctattggctacagaaaaggtggccctgatgaagcctgagccagccccatggccaggattggttcagggactggatggggtggagatccatggatggagcccgtctgaggccaaacaggcatttcttgaccgatttgcagaactgatgtccgacagggatcatgatatttgcgccaaagcttcatag

SEQ ID NO: 146227 - protein, 188 aa, Magnetococcus sp. MC-1
MCEKRLGSWIQTFAGKQFWPMDARPGEVDIQDIAHALSMLCRFNGHCNRFYSVAEHSVHLSRVVEPQHALWGLLHDAAEAYVSDVPRPVKQHVEQFKEIESQLMAVVADCFGLHPEQPREVKKADMQLLATEKVALMKPEPAPWPGLVQGLDGVEIHGWSPSEAKQAFLDRFAELMSDRDHDICAKAS

SEQ ID NO: 146228 - DNA, 597 bp, Azoarcus sp. BH72
  CDS (1)..(597): transl_table=11
atgaagccttaccccaccggatcccggacagggcggcggcccctttcgcccgccgacaacccggcttggccgggcgccagcgccgaagcgatacggcgcgcgacgcattacatccgtatcgaggacatcgcccacgcgctcgccaacgcctgctgcatccagggccagacgaaggcgttctactcggtcgcacagcacaactacctcgccagcatgctggtcccgccacaggacgccctcgccgcactgctgctccacaccgacgaaaccctcgagcggctgctccccgaatacctcgagatcgaaggccacagcgctgcggaggtgctcgctaggttcggcgccccggccaccccgccgctctcggtcgaatgcgccgacctggtcctcagggcgaccgaacagcgagatctggggccgagttccgacgccaccaagaacgaatccgcgggcgtcccgcccttgacgctgaagatccagcccctgccgccgatcgtggcgaaacacctcttcctcgatcgctactacgagctccggcccgaggcggacgcggagcggctccgccatatggaggcaaagcggagggccgcgaaatga

SEQ ID NO: 146229 - protein, 198 aa, Azoarcus sp. BH72
MKPYPTGSRTGRRPLSPADNPAWPGASAEAIRRATHYIRIEDIAHALANACCIQGQTKAFYSVAQHNYLASMLVPPQDALAALLLHTDETLERLLPEYLEIEGHSAAEVLARFGAPATPPLSVECADLVLRATEQRDLGPSSDATKNESAGVPPLTLKIQPLPPIVAKHLFLDRYYELRPEADAERLRHMEAKRRAAK

SEQ ID NO: 146230 - DNA, 537 bp, Escherichia coli
  CDS (1)..(537): transl_table=11
atgtcatttattaaaactttttccgggaagcatttttattatgacaagataaataaagacgacatcgtgattaacgatatcgcggtttccctttcaaatatctgccgctttgccggtcatctttctcacttctacagtgtcgcccaacatgcggtgctttgcagccagctggtgccgcaggaatttgcttttgaagcattaatgcatgatgcaacagaagcgtattgccaggacatccccgcaccactgaaacgccttcttcctgactataaacggatggaagaaaaaatagatgcagtaatccgtgagaaatacgggttacctcctgttatgagcacgccagtgaaatatgccgatctcattatgctggcaaccgaacgccgtgatctcgggcttgatgatggctctttctggcctgtactggaaggcatcccggcaacagagatgttcaacgtgattccactggcaccgggtcatgcctacgggatgtttatggaacgttttaacgatttatcggagttacgcaaatgcgcatga

SEQ ID NO: 146231 - protein, 178 aa, Escherichia coli
MSFIKTFSGKHFYYDKINKDDIVINDIAVSLSNICRFAGHLSHFYSVAQHAVLCSQLVPQEFAFEALMHDATEAYCQDIPAPLKRLLPDYKRMEEKIDAVIREKYGLPPVMSTPVKYADLIMLATERRDLGLDDGSFWPVLEGIPATEMFNVIPLAPGHAYGMFMERFNDLSELRKCA

SEQ ID NO: 146232 - DNA, 24 bp, Artificial sequence
  primer
atgcagcgcatatacgtggagaac

SEQ ID NO: 146233 - DNA, 25 bp, Artificial sequence
  primer
ttatgcgcatttgcgtaactccgat

SEQ ID NO: 146234 - protein, 175 aa, Artificial sequence
  consensus sequence
  Variant (3)..(16): Xaa in position 3 to 16 is any amino acid
  Variant (18)..(18): Xaa in position 18 is any amino acid
  Variant (22)..(23): Xaa in position 22 to 23 is any amino acid
  Variant (25)..(28): Xaa in position 25 to 28 is any amino acid
  Variant (30)..(31): Xaa in position 30 to 31 is any amino acid
  Variant (33)..(38): Xaa in position 33 to 38 is any amino acid
  Variant (39)..(40): Xaa in position 39 to 40 is any or no amino acid
  Variant (44)..(44): Xaa in position 44 is any amino acid
  Variant (46)..(61): Xaa in position 46 to 61 is any amino acid
  Variant (62)..(69): Xaa in position 62 to 69 is any or no amino acid
  Variant (71)..(71): Xaa in position 71 is any amino acid
  Variant (75)..(75): Xaa in position 75 is any amino acid
  Variant (77)..(80): Xaa in position 77 to 80 is any amino acid
  Variant (82)..(83): Xaa in position 82 to 83 is any amino acid
  Variant (84)..(84): Xaa in position 84 is any or no amino acid
  Variant (86)..(86): Xaa in position 86 is any amino acid
  Variant (88)..(92): Xaa in position 88 to 92 is any amino acid
  Variant (93)..(97): Xaa in position 93 to 97 is any or no amino acid
  Variant (99)..(110): Xaa in position 99 to 110 is any amino acid
  Variant (112)..(119): Xaa in position 112 to 119 is any amino acid
  Variant (120)..(123): Xaa in position 120 to 123 is any or no amino acid
  Variant (125)..(125): Xaa in position 125 is any amino acid
  Variant (128)..(133): Xaa in position 128 to 133 is any amino acid
  Variant (135)..(137): Xaa in position 135 to 137 is any amino acid
  Variant (139)..(159): Xaa in position 139 to 159 is any amino acid
  Variant (160)..(164): Xaa in position 160 to 164 is any or no amino acid
  Variant (166)..(174): Xaa in position 166 to 174 is any amino acid
SGXXXXXXXXXXXXXXIXDIAXXLXXXXRXXGXXXXXXXXSVAXHXXXXXXXXXXXXXXXXXXXXXXXXLXHDAXEXXXXDXXXPXKXXXXXXXXXXEXXXXXXXXXXXXLXXXXXXXXXXXXKXADXXXXXXEXXXLXXXXXXXXXXXXXXXXXXXXXXXXXXPXXXXXXXXXF

SEQ ID NO: 146235 - protein, 18 aa, Artificial sequence
  protein pattern
  Variant (2)..(2): Xaa in position 2 is any amino acid
  Variant (3)..(4): Xaa in position 3 to 4 is any or no amino acid
  Variant (8)..(8): Xaa in position 8 is any amino acid
  Variant (9)..(9): Xaa in position 9 is Ala, Gly or Ser
  Variant (11)..(11): Xaa in position 11 is Ala or Ser
  Variant (12)..(13): Xaa in position 12 to 13 is any amino acid
  Variant (14)..(14): Xaa in position 14 is Ala, Cys or Thr
  Variant (16)..(16): Xaa in position 16 is Phe or Trp
  Variant (17)..(17): Xaa in position 17 is Ala or Asn
IXXXDIAXXLXXXXRXXG

SEQ ID NO: 146236 - protein, 21 aa, Artificial sequence
  protein pattern
  Variant (2)..(2): Xaa in position 2 is Phe, Leu or Met
  Variant (5)..(5): Xaa in position 5 is Ala or Ser
  Variant (6)..(6): Xaa in position 6 is Ala, Pro, Ser or Thr
  Variant (8)..(11): Xaa in position 8 to 11 is any amino acid
  Variant (13)..(13): Xaa in position 13 is Ile, Leu, Met or Val
  Variant (14)..(14): Xaa in position 14 is Ile, Pro or Val
  Variant (15)..(15): Xaa in position 15 is any amino acid
  Variant (17)..(17): Xaa in position 17 is Phe, Leu or Val
  Variant (19)..(20): Xaa in position 19 to 20 is any amino acid
  Variant (21)..(21): Xaa in position 21 is Ile, Leu, Met or Val
LXHDXXEXXXXDXXXPXKXXX

SEQ ID NO: 146237 - protein, 17 aa, Artificial sequence
  protein pattern
  Variant (2)..(3): Xaa in position 2 to 3 is any amino acid
  Variant (4)..(4): Xaa in position 4 is Ile or Leu
  Variant (5)..(6): Xaa in position 5 to 6 is any amino acid
  Variant (7)..(7): Xaa in position 7 is Ala or Val
  Variant (8)..(8): Xaa in position 8 is Ile or Val
  Variant (9)..(11): Xaa in position 9 to 11 is any amino acid
  Variant (12)..(12): Xaa in position 12 is Phe or Tyr
  Variant (13)..(13): Xaa in position 13 is Gly, Asn or Ser
  Variant (15)..(16): Xaa in position 15 to 16 is any or no amino acid
EXXXXXXXXXXXXLXXP

SEQ ID NO: 146238 - DNA, 1257 bp, Escherichia coli
  CDS (1)..(1257): transl_table=11
atgctccatccgcgagccagaaccatgttgttattatcgctccccgccgtggcaattgggattgcgtccagtcttattctgattgtggtgatgaaaatcgcctcggtattacagaatttgctctggcaacgactgccgggaactctggggatagcccaggattcacccctctggatcatcggtgtattaacgctaacgggtattgcggtggggttggttatccgtttcagccagggtcatgccggaccagaccccgcctgtgaaccgctgatcggcgcaccggttccgccctctgcgctacctggacttatcgtagcattaattctcggtcttgctggcggcgtcagcctggggccggaacatccgatcatgaccgtcaatatcgcccttgcggttgccattggcgctcgtctgttaccgcgcgtcaaccgaatggagtggactattttagcctctgccggaaccatcggcgcactgtttggcactcctgttgcggcggcgttgatattttcgcaaaccttaaatggcagtagtgaagttccgctatgggatcgtctctttgcgccgttaatggcggcagcagctggtgcacttactaccggattatttttccatcctcatttttcactgcccattgctcattacggacagatggaaatgaccgatattctcagcggtgcaattgtcgcggcgattgccatcgcagcagggatggtcgccgtatggtgcttaccacggttgcacgcgatgatgcatcaaatgaaaaatccggtgctcgtgctgggtattggcggatttattctcggtattctgggggttattggtggaccagtttcgctgtttaaagggctggatgagatgcagcagatggtggcaaatcaggctttcagcaccagcgattactttttgctggcggtaattaaacttgccgccctggtcgttgctgccgccagtggctttcgcggtgggcgaatcttcccggcagtgtttgtcggcgtggcattagggttgatgctgcatgagcacgttcccgccgtaccagcggcaataaccgtttcttgcgctattctcggcatcgtgctggtggtaacacgcgatggctggttaagtctttttatggcggcagtcgttgtacccaataccacattgctaccgctgctctgtatcgtcatgcttccggcatggctgttattagcaggtaagccgatgatgatggtcaatcgtccgaagcaacagccaccccacgataacgtttaa

SEQ ID NO: 146239 - protein, 418 aa, Escherichia coli
MLHPRARTMLLLSLPAVAIGIASSLILIVVMKIASVLQNLLWQRLPGTLGIAQDSPLWIIGVLTLTGIAVGLVIRFSQGHAGPDPACEPLIGAPVPPSALPGLIVALILGLAGGVSLGPEHPIMTVNIALAVAIGARLLPRVNRMEWTILASAGTIGALFGTPVAAALIFSQTLNGSSEVPLWDRLFAPLMAAAAGALTTGLFFHPHFSLPIAHYGQMEMTDILSGAIVAAIAIAAGMVAVWCLPRLHAMMHQMKNPVLVLGIGGFILGILGVIGGPVSLFKGLDEMQQMVANQAFSTSDYFLLAVIKLAALVVAAASGFRGGRIFPAVFVGVALGLMLHEHVPAVPAAITVSCAILGIVLVVTRDGWLSLFMAAVVVPNTTLLPLLCIVMLPAWLLLAGKPMMMVNRPKQQPPHDNV

SEQ ID NO: 146240 - DNA, 1359 bp, Streptomyces coelicolor A3(2)
  CDS (1)..(1359): transl_table=11
gtgaccgcgccggcgaacgccgtcccggaccgggcggagcggtccctgcggcagaccctgctcagtcccggctaccggcggctgttgctgctgtgcgtgctgctgggggtgcccatcgcgctggcctgcttcttcttcgtcggacttcagcacgagttgcagcactgggtgtggacctcgctgcccgaggcggccggatacgacaccccaccgtggtggtggccgctgcccgcgctggtgctcgccgggctgatcctggcgccgatcgtgacccggatgccgggcggcggcggccatctccccgtcaacggcctgggcggggcgccggtcggcccccgcgcgctgcccggcgcggtgctggcggcgctggccacgctgccgctcggcgtggtgctgggccccgaggccccgctcatggccgtcggcagcgggctcgccctgctggcggtgcggcgggcgggcgcgggcggcgaccagcaggcgagcgcgattctcgccacggccggctccaccgccgcgatctccaccatcctcggcggcccgatcgcggcggcggtgctgctcatcgagggggcggggctggccggcacccagctggtcgccctgctgctgccctgcctgctggccagcgcgaccggtgccctggtcttcaccggcttcgggcagtggacggggctggagatcggcgcgctgagcctgcccgacctgccgccgcaggccaatccggacgcgggtgacttcctgtggggcctgcccaccgcggccctgatcgccgtactggtgacgctggcccgggcgctgggccgccgcaccgtctcctggacccggcaccgcacggccgcccgcaccgtcgcctgcgccaccgcggtcggcgtctgtgtcgcggcgtacgcgctgatcaccggccgctccccggccgaggcggcgctgtccggccaggccaccctcgcccagctcgccgcgcatccgcacgcctggtccgtgggggcgctcgtcgcgctggtcgcctgcaaggggctggcctggggcatcgcgctgggcgcgctgcgcggcggcccgatcttcccggccgtcctgctgggcgcggcgacggccctggcctgctccgggctgcccggcttcggcgcgaccccggcgctcgccctcggcatcgccgccgcggcggccgcggtgacggggctgccgctggccagctcggtcctcgcggtgctgctgatgggccgggactcccacgaccagatgccgctgatcgtcatggcctcggtcgtcgcgttcgtcgtggcgcaactggtgcgccggaccccgccggaggcgggcgggtcgccgggcggggcgccgtcggcgggagcggcacggtga

SEQ ID NO: 146241 - protein, 452 aa, Streptomyces coelicolor A3(2)
MTAPANAVPDRAERSLRQTLLSPGYRRLLLLCVLLGVPIALACFFFVGLQHELQHWVWTSLPEAAGYDTPPWWWPLPALVLAGLILAPIVTRMPGGGGHLPVNGLGGAPVGPRALPGAVLAALATLPLGVVLGPEAPLMAVGSGLALLAVRRAGAGGDQQASAILATAGSTAAISTILGGPIAAAVLLIEGAGLAGTQLVALLLPCLLASATGALVFTGFGQWTGLEIGALSLPDLPPQANPDAGDFLWGLPTAALIAVLVTLARALGRRTVSWTRHRTAARTVACATAVGVCVAAYALITGRSPAEAALSGQATLAQLAAHPHAWSVGALVALVACKGLAWGIALGALRGGPIFPAVLLGAATALACSGLPGFGATPALALGIAAAAAAVTGLPLASSVLAVLLMGRDSHDQMPLIVMASVVAFVVAQLVRRTPPEAGGSPGGAPSAGAAR

SEQ ID NO: 146242 - DNA, 1263 bp, Thermosynechococcus elongatus BP-1
  CDS (1)..(1263): transl_table=11
atggcaagagcctcctgcccctatccccgtttgctcctgtatgccctaatcattggtcttctcagcggctgtgtgaccacggctttttatctgggtctcaagctaggatttgccctgttgtgggggactgatcctagccaagtgagcattgccacttgggagcacctctatccttacattccgctggttacggcttttggcggcttgctggtgggtttatcggtcaaattctttggggcaaagggggaactcgcggatgcgatcgcagagttacaccatgggggtcggttaagttatcgctttctacccggtatggcactggcttctggcctatccttgctctttggcagtagtgctggccctgaaagtccaatgattgacatcaatggtggcttaggcacttggttggcagctcgtttgaatctatcccccgctagcacccgcattctcaccctctgtgggatggcagcgggcatgagcgtgttttttgagtcgccccttggcgcaacgctgttcgttttggaaattccccatcgccgtagtgttgagttttatgaggcaatcattccagctttgatttctgctgccgctgggtttaccctttttcgcgtgatcacaggcacaaccattggcgccatttaccgcttccccacctacgatagcctgcgtcctcaggatattggctttgcagtgttactcggcttcattggcgctgccgtgggaacgctctttgtctttttagatcggcagattcaacgctggctgaccccctatcggcaatatcctctcctcttaatcgtggtggtgggttttctgattggcgtaattgccctgattcacccgatcacactgttctacggtgagcgccaaattgaacaagtcatcgaagtggtcaaccgctacagcattggcattttgctgagggtcgccttctttaaactccttgccctgagtctctgtctgcggggcgggttccgtgggggagtggtctttcccctattttttgtaggtgcctgtgtgggcatggctgtgcaccaagcactcccgaatacccccttgagtgtggccttggctgggatgatggcggcagtaacggtggtggtgaccaaaacgcctttgggcctggcgatcattctgacggtgatttcccatacggcaatgcttcccctgatgacgatcgcgacgctaaccagttatctattgaccttgcctattggttggatccccagccagcgatcgcgggaggacacccctgatccctga

SEQ ID NO: 146243 - protein, 420 aa, Thermosynechococcus elongatus BP-1
MARASCPYPRLLLYALIIGLLSGCVTTAFYLGLKLGFALLWGTDPSQVSIATWEHLYPYIPLVTAFGGLLVGLSVKFFGAKGELADAIAELHHGGRLSYRFLPGMALASGLSLLFGSSAGPESPMIDINGGLGTWLAARLNLSPASTRILTLCGMAAGMSVFFESPLGATLFVLEIPHRRSVEFYEAIIPALISAAAGFTLFRVITGTTIGAIYRFPTYDSLRPQDIGFAVLLGFIGAAVGTLFVFLDRQIQRWLTPYRQYPLLLIVVVGFLIGVIALIHPITLFYGERQIEQVIEVVNRYSIGILLRVAFFKLLALSLCLRGGFRGGVVFPLFFVGACVGMAVHQALPNTPLSVALAGMMAAVTVVVTKTPLGLAIILTVISHTAMLPLMTIATLTSYLLTLPIGWIPSQRSREDTPDP

SEQ ID NO: 146244 - DNA, 1284 bp, Streptomyces avermitilis MA-4680
  CDS (1)..(1284): transl_table=11
gtggcccacgacaccgtgcacccggcacccgctccggcgacccccgcgcgtgtcctgctgccgcagatcctcccggcactggtcgtcggggtcgcggccagtctcctgttcgtgggggtgagcgcgctcgccgggaagctccagaacgtcctgtggcaggacctgcccgacgcgctgggcatcgggcggtactcggtgctctggatgatcatcatgctcacctgcacgggtgtgctggtcgggctgatcgtctggaaggtgccgggtcacgcgggacccgacccggcgaccctcggactcggcggggccccgccgctggcgcccgccgtcctgccggggctgctgctggcgaccgggctgatgctggcgggcggtccgagcctcggccccgagaacccgatcatcgcctccaacatcgcgctggcctactggctgggccgcaggttcgtaccccggctgcccggcggcctgtggatcgcgctggccgaggcggcgacgatcggcgcgctgttcgggacgcccgtcgccgcggcactgctcctgtccgaggcgctcgccgggcagcaggccaaggggccgctgtgggacagcgtcttcgccccgctggtcgcggccggcgcgggtgccatcacgaccaccctggtggcccatccgaccctcgacctcggcctgcccccgctggccaggcccggctggaccgacgtcctggccgcgatggtcgtcgccgccgcggccgcggcgctcgggatggtcgcggtctatgccttcccgtacgtccacggcgccttcttacgcctgcggcaccccatggtggcgctgccggccggcgggctcgtcctcggcctgctggccgccctgggcggccatctgaccctcttcaaggggctggacgaggtgggggacctggcgaaggacccggacggctggtcggccgggcagttcctgaccatggcggtggtgaagctggcggcgctgctggtcgccgcgtcctgcgggttccgcggcgggcggatcttcccgtccgtcttcatcggtgcggcgttcggcctgttcgcccatgccctcgtatccgccgttcccccggccctcggtgtcgccgcgggcgtgctggggatgcttctcgccatcacccggcagggctgggtgagcctgttcacggccgccgtgctggtggcctcgcccgcgatcatcgccctgctctgcatcgcgtccctgccggcctggctgctggtgaccggcagaccccagatgcagcttcacgaagacggaaccccggtccgttag

SEQ ID NO: 146245 - protein, 427 aa, Streptomyces avermitilis MA-4680
MAHDTVHPAPAPATPARVLLPQILPALVVGVAASLLFVGVSALAGKLQNVLWQDLPDALGIGRYSVLWMIIMLTCTGVLVGLIVWKVPGHAGPDPATLGLGGAPPLAPAVLPGLLLATGLMLAGGPSLGPENPIIASNIALAYWLGRRFVPRLPGGLWIALAEAATIGALFGTPVAAALLLSEALAGQQAKGPLWDSVFAPLVAAGAGAITTTLVAHPTLDLGLPPLARPGWTDVLAAMVVAAAAAALGMVAVYAFPYVHGAFLRLRHPMVALPAGGLVLGLLAALGGHLTLFKGLDEVGDLAKDPDGWSAGQFLTMAVVKLAALLVAASCGFRGGRIFPSVFIGAAFGLFAHALVSAVPPALGVAAGVLGMLLAITRQGWVSLFTAAVLVASPAIIALLCIASLPAWLLVTGRPQMQLHEDGTPVR

SEQ ID NO: 146246 - DNA, 1212 bp, Synechococcus sp. WH 8102
  CDS (1)..(1212): transl_table=11
gtgactcagcttcgtctcagctcgctggctttgctcactggagccatcagtggagcaggggtcgctctgttcatggcactgatcggattgataacccgacagctctggggggatccggttgtgaaaggactggatgggcagattccgttagtttggtcgatcgcgatctgcggaggcatcggcctggtgctcagccagctccatcgcgccggtgaccacacactgctgccggaactgccggagacgatcgccgatctacgggatccagaccatgctccgccacgggacaacggccgagccatcctcggagcagctctggcccagatcggtggcggcagcatcggcccggaagctctgatgactcgtttggctgccctgctcagtcaacggatctggcgggaccgagaccatgagctgaaattcgccgccgccgctggcagtctcggcctgttcggctttccacttctagggggagccgtcgttcagacccatcagcgccgagatctgatcgctcgctggatccctggcgccctggggggcttggccgggttcgccgccttccatggcatcgaccaggccagtggcggcagcctgcaacgcatggcctacagctggcccagcaacctcggggaagatctgggcaccctcagctcaggggccctggcaggcgtggtggggtggggcctgggctggctgctgctgcactggcgaaactggcttgagcgacggcagcttctggcccactggcgctggtggccagcgctgaccggtctgttgctgggcatcacgatgcactggctgccgctggtgcccttcgccggagaggagcaactgcgtcccctgctggagggtgcaggcggcacaggttcctttcttttcatcatttcggcgctcgtcaaactggtgctgatgggcctctgcctggagaccggctggcgtggcggcatcttctttccgctgttcctgatcgcctgcgctgtgggtgtgggtctgcacgacctctggccaggcctgggcagcctggggagttggtgcggcggcatcaccggcgcgatctatctcacggtgctgcgctcacccctcgtcgccctgatcctggggctgggtttgctgcaaggccatggcgccacaggcgttgtggtgggtgtggccgtggcctggctgatcacccaccgctcgccatcaggtgatggccctccacctgcccagtaa

SEQ ID NO: 146247 - protein, 403 aa, Synechococcus sp. WH 8102
MTQLRLSSLALLTGAISGAGVALFMALIGLITRQLWGDPVVKGLDGQIPLVWSIAICGGIGLVLSQLHRAGDHTLLPELPETIADLRDPDHAPPRDNGRAILGAALAQIGGGSIGPEALMTRLAALLSQRIWRDRDHELKFAAAAGSLGLFGFPLLGGAVVQTHQRRDLIARWIPGALGGLAGFAAFHGIDQASGGSLQRMAYSWPSNLGEDLGTLSSGALAGVVGWGLGWLLLHWRNWLERRQLLAHWRWWPALTGLLLGITMHWLPLVPFAGEEQLRPLLEGAGGTGSFLFIISALVKLVLMGLCLETGWRGGIFFPLFLIACAVGVGLHDLWPGLGSLGSWCGGITGAIYLTVLRSPLVALILGLGLLQGHGATGVVVGVAVAWLITHRSPSGDGPPPAQ

SEQ ID NO: 146248 - DNA, 1257 bp, Clostridium perfringens ATCC 13124
  CDS (1)..(1257): transl_table=11
atgaaaaaatattttagtttaggaattttaattctttatggaatagttctaggtgggatagtaggagctgttagttggctctttttgtatgttgttagttcaggaatacattttatgtggaatgaactaccaggaaagtttaatttaccatactggacaatattagtatgtagtattggtggaattttagtaggattatgtcaaaaatatttaggggaatatccaaaacttatgccagaagttatggcagaatttaaagaaactaagagagtagattacaaaaatgttccaaaggcttgtgtatctgctttaattacactattttttggagctagtttaggacctgaagctgctcttgttaatattataggcggactttctactttagttggagattttttaaagtggattgttaaggataaagagttagaaaagtatgatagtttagtaacagaatttagtatggaagctacgataggacttatatttcatgcaccattaataggattaactccattgatagaagatgatgattcaagtgtaagaaagaatattaaaacaatagtttattcaataacaacggctgctggatttggtgttttaatattattatcacaaattgacaatagaccatcttttatagttcattttggaagttttaatctcggaatgagtgaaataatatcaataatttcactaataatttgtggaattttaatggcattactatatggtgggtatgggaaaattctacataagatttttttacctttaaaaaattataaaataataagggcattaattggaggcataattttgggaatagtgggaacatggttaccatatacactattttcaggagagcatgaagtaaaagtgttagttaaagaatggagtagtttatcaataagaattcttatattaattagtttggtgaaattattcttaacagaggtgtgcctatctactggatggagaggtggacatatattcccagtagtattttcaggagtttcaatgggatatgctctttcagcaatattctcaattgatccagttgtcacagttactatagttacaaccgcatttacaagttcagttttaaggaatgctgtagttactttacttttattagttttatttttcccaagctccttaatatggattatgttaatagctgcatttttatcagcttatgtcttaaaaagatgggattcaagaggaaataaagaagagagtgttaaaaaagttatctaa

SEQ ID NO: 146249 - protein, 418 aa, Clostridium perfringens ATCC 13124
MKKYFSLGILILYGIVLGGIVGAVSWLFLYVVSSGIHFMWNELPGKFNLPYWTILVCSIGGILVGLCQKYLGEYPKLMPEVMAEFKETKRVDYKNVPKACVSALITLFFGASLGPEAALVNIIGGLSTLVGDFLKWIVKDKELEKYDSLVTEFSMEATIGLIFHAPLIGLTPLIEDDDSSVRKNIKTIVYSITTAAGFGVLILLSQIDNRPSFIVHFGSFNLGMSEIISIISLIICGILMALLYGGYGKILHKIFLPLKNYKIIRALIGGIILGIVGTWLPYTLFSGEHEVKVLVKEWSSLSIRILILISLVKLFLTEVCLSTGWRGGHIFPVVFSGVSMGYALSAIFSIDPVVTVTIVTTAFTSSVLRNAVVTLLLLVLFFPSSLIWIMLIAAFLSAYVLKRWDSRGNKEESVKKVI

SEQ ID NO: 146250 - DNA, 1257 bp, Escherichia coli O6
  CDS (1)..(1257): transl_table=11
atgctccatccgcgagccagaaccatgttgttattatcgctccccgccgtggcaattgggattgcgtccagtcttattctgattatggtgatgaaaatcgcctcggtattacagaatttgctctggcaacgactgccgggaactctggggatagcccaggattcacctctctggatcatcggtgtattaacgctaacgggtattgcggtggggttggttatccgtttcagccagggtcatgccggaccagatcccgcctgtgaaccgcttatcggcgcaccgattccgccctctgcgctaccaggacttatcgtagcattaattctcggtcttgctggcggcgtcagcctggggccggaacatccgatcataaccgtcaatatcgcccttgccgtcgccattggcgctcgtctgttaccgcgcgtcaaccgaatggagtggactattttagcctctgccggaaccatcggcgcgctgtttggcacacctgttgcggcggcattgatattttcgcaaaccttaaatggcagtaatgaagttccgctatgggatcgtctctttgcgccgttaatggcggcagcagctggtgcacttactaccggattatttttccatcctcatttttcactgcccattgcgcattacggacagatggaaatgaccgatattctcagcggtgcaattgtcgcggcgattgccatcgcagcagggatggtcgccgtatggtgcttaccacggttgcacgcgatgatgcatcaaatgaaaaatccggtgttcgtgctgggtattggcggatttattctcggtattctgggggttattggtggaccggtttcgctgtttaaagggctggatgagatgcagcagatggtggcaaatcaggctttcagcaccagcgattactttttgctggcggtgataaaacttgccgccctggtcgttgctgccgccagtggctttcgcggtgggcgaatcttcccggcagtgtttgtcggcgtggcattagggttgatgcttcatgagcacgttcccgccgttccagcggcaataaccgtttcctgcgctatactcggcatcgtgctggtggtaacacgcgatggctggttaagtctttttatggcggcagtcgttgtacccaataccacattgctaccgctgctctgtatcgtcatgctcccggcatggctgttattagcaggtaagccgatgatgatggtcaatcgtcagaagcaacagccaccccacgataacgtttag

SEQ ID NO: 146251 - protein, 418 aa, Escherichia coli O6
MLHPRARTMLLLSLPAVAIGIASSLILIMVMKIASVLQNLLWQRLPGTLGIAQDSPLWIIGVLTLTGIAVGLVIRFSQGHAGPDPACEPLIGAPIPPSALPGLIVALILGLAGGVSLGPEHPIITVNIALAVAIGARLLPRVNRMEWTILASAGTIGALFGTPVAAALIFSQTLNGSNEVPLWDRLFAPLMAAAAGALTTGLFFHPHFSLPIAHYGQMEMTDILSGAIVAAIAIAAGMVAVWCLPRLHAMMHQMKNPVFVLGIGGFILGILGVIGGPVSLFKGLDEMQQMVANQAFSTSDYFLLAVIKLAALVVAAASGFRGGRIFPAVFVGVALGLMLHEHVPAVPAAITVSCAILGIVLVVTRDGWLSLFMAAVVVPNTTLLPLLCIVMLPAWLLLAGKPMMMVNRQKQQPPHDNV

SEQ ID NO: 146252 - DNA, 1236 bp, Salmonella typhimurium
  CDS (1)..(1236): transl_table=11
atgttccacccgcgtgcccgaacgatgctgctgctgtcgctccccgcgctgattattggcgtagcgtcaagcctggttttaatcgctgcgatgaaagtcgcgtcggtttttcagcaatttctttggcaacgactgcccaccagcatcggcatcgcttatgattcgccgttctggatagtgggtatgctcacgctaaccgggatcgtggtgggtttgattatccgttacagtcccggacacgctggccccgatccggccatcgaaccgttaatcagtatgccggtctcgccatctgcgctacccgggctgcttctcgccttaatcatcggccttgctggtggggtaagtttggggccagagcatccgataatgacaataaatatcgcgctggcggcggctttcggctcccgcctgtttccgcgtatcacggcgttagactggacgattctggcctcagcgggcaccatcggcgcgctgttcggcacgcccgtcgccgcagcgctgattttttcgcaaacacttagcggctctaacgatattcccatgtgggatcgcctgtttgcgccgttaatggcggcagcggcggggtcactcaccaccagtctgttctttcatccgcatttttcgttacccatcgcccattacacgcagatgcggctggtggacattgccagcggagcgatcgtcgcggcgatcgccattgccgccgggatggtcgccgtctggtgccttccgcgtctgcatgagttgctgcaccgcctgaaaaatccggtcctgattctcggcattggcggttttatactgggtattctgggcgtcattggcgggccgcttaccctgtttaaaggcctggacgaaatgcaacaaatggcgtttagccagacgctgggcgcgggagattattttaccttagccgtcgtcaaactcgccgcgctggtcatcgcggcggcgagcggctttcgcggcgggcgcatttttccggctgtgtttatcggcgcggcgctggggctcatgctccatgcccatgttgaggccgtacccgcggcgattaccgtctcctgcgcgattcttggcttagtgctggtagtgacgcgcgacggctggctcagtctgtttatggcggcagtcgtcgtaccggataccaatctgctgccgctgctctgcattgtgatgctccccgcctggctattgctggcgggaaaaccgttgctggccgccaaccgtcacgaaccctaa

SEQ ID NO: 146253 - protein, 411 aa, Salmonella typhimurium
MFHPRARTMLLLSLPALIIGVASSLVLIAAMKVASVFQQFLWQRLPTSIGIAYDSPFWIVGMLTLTGIVVGLIIRYSPGHAGPDPAIEPLISMPVSPSALPGLLLALIIGLAGGVSLGPEHPIMTINIALAAAFGSRLFPRITALDWTILASAGTIGALFGTPVAAALIFSQTLSGSNDIPMWDRLFAPLMAAAAGSLTTSLFFHPHFSLPIAHYTQMRLVDIASGAIVAAIAIAAGMVAVWCLPRLHELLHRLKNPVLILGIGGFILGILGVIGGPLTLFKGLDEMQQMAFSQTLGAGDYFTLAVVKLAALVIAAASGFRGGRIFPAVFIGAALGLMLHAHVEAVPAAITVSCAILGLVLVVTRDGWLSLFMAAVVVPDTNLLPLLCIVMLPAWLLLAGKPLLAANRHEP

SEQ ID NO: 146254 - DNA, 1257 bp, Shigella flexneri
  CDS (1)..(1257): transl_table=11
atgctccatccgcgagccagaaccatgttgttattatcgctccccgccgtggcaattgggattgcgtccagtcttattctgattgtggtgatgaaaatcgcctcggtattacagaatttgctctggcaacgactgccgggaactctggggatagcccaggattcacccctctggatcatcggtgtattaacgctaacgggtattgcggtggggttggttatccgtttcagccagggtcatgccggaccagaccccgcctgtgaaccgctgatcggcgcaccggttccgccctctgcgctacctagacttatcgtagcattaattctcggtcttgctggcggcgtcagcctggggccggaacatccgatcatgaccgtcaatatcgcccttgccgtcgccattggcgctcgtctgttaccgcgcgtcaaccgaatggagtggactattttagcctctgccggaaccatcggcgcgctgtttggtacacctgttgcggcggcgttgatattttcgcaaaccttaaatggcagtagtgaagttccgctatgggatcgtctttttgcgccgttaatggcggcagcagctggtgcacttactaccggattatttttccatccccatttttcactgcccattgcgcattacggacagatggaaatgaccgatattctcagcggtgcaattgtcgcggcgattgccatcgcagcagggatggtcgccgtatggtgcttaccacggttgcacgcgatgatgaatcaaatgaaaaatccggtgctcgtgctgggtattggcggatttattctcggaattctgggggttattggtggaccagtttcgctgtttaaagggctggatgagatgcagcagatggtggcaaatcaggctttcagcaccagcgattactttttgctggcggtaattaaacttgccgccctggtcgttgctgccgccagtggctttcgcggtgggcgaatcttcccggcagtgtttgtcggcgtggcattagggttgatgctgcatgagcacgttcccgccgttccagcggcaataaccgtttcctgcgctattctcggcatcgtgctggtggtaacacgcgatggctggttaagtctttttatggcggcagtcgttgtacccaataccacattgctaccgctgctctgtatcgtcatgcttccggcatggctgttattagcaggtaagccgatgatgatggtcaatcgtccgaagcaacagccaccccacgataatgtttag

SEQ ID NO: 146255 - protein, 418 aa, Shigella flexneri
MLHPRARTMLLLSLPAVAIGIASSLILIVVMKIASVLQNLLWQRLPGTLGIAQDSPLWIIGVLTLTGIAVGLVIRFSQGHAGPDPACEPLIGAPVPPSALPRLIVALILGLAGGVSLGPEHPIMTVNIALAVAIGARLLPRVNRMEWTILASAGTIGALFGTPVAAALIFSQTLNGSSEVPLWDRLFAPLMAAAAGALTTGLFFHPHFSLPIAHYGQMEMTDILSGAIVAAIAIAAGMVAVWCLPRLHAMMNQMKNPVLVLGIGGFILGILGVIGGPVSLFKGLDEMQQMVANQAFSTSDYFLLAVIKLAALVVAAASGFRGGRIFPAVFVGVALGLMLHEHVPAVPAAITVSCAILGIVLVVTRDGWLSLFMAAVVVPNTTLLPLLCIVMLPAWLLLAGKPMMMVNRPKQQPPHDNV

SEQ ID NO: 146256 - DNA, 20 bp, Artificial sequence
  primer
atgctccatccgcgagccag

SEQ ID NO: 146257 - DNA, 24 bp, Artificial sequence
  primer
ttaaacgttatcgtggggtggctg

SEQ ID NO: 146258 - protein, 408 aa, Artificial sequence
  consensus sequence
  Variant (2)..(2): Xaa in position 2 is any amino acid
  Variant (4)..(8): Xaa in position 4 to 8 is any amino acid
  Variant (10)..(30): Xaa in position 10 to 30 is any amino acid
  Variant (32)..(34): Xaa in position 32 to 34 is any amino acid
  Variant (36)..(42): Xaa in position 36 to 42 is any amino acid
  Variant (43)..(46): Xaa in position 43 to 46 is any or no amino acid
  Variant (48)..(55): Xaa in position 48 to 55 is any amino acid
  Variant (56)..(57): Xaa in position 56 to 57 is any or no amino acid
  Variant (59)..(79): Xaa in position 59 to 79 is any amino acid
  Variant (80)..(82): Xaa in position 80 to 82 is any or no amino acid
  Variant (84)..(93): Xaa in position 84 to 93 is any amino acid
  Variant (94)..(94): Xaa in position 94 is any or no amino acid
  Variant (96)..(104): Xaa in position 96 to 104 is any amino acid
  Variant (106)..(107): Xaa in position 106 to 107 is any amino acid
  Variant (109)..(109): Xaa in position 109 is any amino acid
  Variant (111)..(111): Xaa in position 111 is any amino acid
  Variant (115)..(123): Xaa in position 115 to 123 is any amino acid
  Variant (125)..(148): Xaa in position 125 to 148 is any amino acid
  Variant (149)..(157): Xaa in position 149 to 157 is any or no amino acid
  Variant (159)..(159): Xaa in position 159 is any amino acid
  Variant (161)..(162): Xaa in position 161 to 162 is any amino acid
  Variant (164)..(188): Xaa in position 164 to 188 is any amino acid
  Variant (189)..(193): Xaa in position 189 to 193 is any or no amino acid
  Variant (195)..(262): Xaa in position 195 to 262 is any amino acid
  Variant (263)..(271): Xaa in position 263 to 271 is any or no amino acid
  Variant (273)..(275): Xaa in position 273 to 275 is any amino acid
  Variant (277)..(286): Xaa in position 277 to 286 is any amino acid
  Variant (287)..(290): Xaa in position 287 to 290 is any or no amino acid
  Variant (292)..(292): Xaa in position 292 is any amino acid
  Variant (294)..(317): Xaa in position 294 to 317 is any amino acid
  Variant (318)..(318): Xaa in position 318 is any or no amino acid
  Variant (321)..(328): Xaa in position 321 to 328 is any amino acid
  Variant (329)..(329): Xaa in position 329 is any or no amino acid
  Variant (331)..(331): Xaa in position 331 is any amino acid
  Variant (335)..(336): Xaa in position 335 to 336 is any amino acid
  Variant (339)..(342): Xaa in position 339 to 342 is any amino acid
  Variant (344)..(346): Xaa in position 344 to 346 is any amino acid
  Variant (348)..(372): Xaa in position 348 to 372 is any amino acid
  Variant (373)..(374): Xaa in position 373 to 374 is any or no amino acid
  Variant (376)..(381): Xaa in position 376 to 381 is any amino acid
  Variant (382)..(382): Xaa in position 382 is any or no amino acid
  Variant (384)..(404): Xaa in position 384 to 404 is any amino acid
  Variant (405)..(407): Xaa in position 405 to 407 is any or no amino acid
LXLXXXXXGXXXXXXXXXXXXXXXXXXXXXWXXXPXXXXXXXXXXXWXXXXXXXXXXGXXXXXXXXXXXXXXXXXXXXXXXXLXXXXXXXXXXXPXXXXXXXXXLXXGXSXGPEXXXXXXXXXLXXXXXXXXXXXXXXXXXXXXXXXXXXXXXXXXXGXPXXAXXXXXXXXXXXXXXXXXXXXXXXXXXXXXXGXXXXXXXXXXXXXXXXXXXXXXXXXXXXXXXXXXXXXXXXXXXXXXXXXXXXXXXXXXXXXXXXXXXXXXXXXXXXXGXXXGXXXXXXXXXXXXXXFXGXXXXXXXXXXXXXXXXXXXXXXXXXKLXXXXXXXXXGXRGGXXFPXXXXGXXXGXXXXXXXXXXXXXXXXXXXXXXXXXXXVXXXXXXXLXXXXXXXXXXXXXXXXXXXXXXXXA

SEQ ID NO: 146259 - protein, 25 aa, Artificial sequence
  protein pattern
  Variant (2)..(2): Xaa in position 2 is any amino acid
  Variant (3)..(3): Xaa in position 3 is any or no amino acid
  Variant (7)..(7): Xaa in position 7 is any or no amino acid
  Variant (10)..(10): Xaa in position 10 is any or no amino acid
  Variant (12)..(12): Xaa in position 12 is any amino acid
  Variant (13)..(13): Xaa in position 13 is Phe or Val
  Variant (14)..(14): Xaa in position 14 is Phe or Leu
  Variant (15)..(15): Xaa in position 15 is any amino acid
  Variant (16)..(16): Xaa in position 16 is Ala or Gly
  Variant (17)..(17): Xaa in position 17 is Ala, Cys or Val
  Variant (18)..(18): Xaa in position 18 is Ala or Ser
  Variant (19)..(19): Xaa in position 19 is any amino acid
  Variant (20)..(20): Xaa in position 20 is Ala or Gly
  Variant (21)..(24): Xaa in position 21 to 24 is any amino acid
  Variant (25)..(25): Xaa in position 25 is Ala, Asp, Glu or Gly
GXXRGGXIFXPXXXXXXXXXXXXXX

SEQ ID NO: 146260 - protein, 25 aa, Artificial sequence
  protein pattern
  Variant (2)..(4): Xaa in position 2 to 4 is any amino acid
  Variant (5)..(5): Xaa in position 5 is Leu or Val
  Variant (6)..(6): Xaa in position 6 is Ala or Ser
  Variant (7)..(7): Xaa in position 7 is any amino acid
  Variant (8)..(8): Xaa in position 8 is Gly, Ile or Leu
  Variant (9)..(9): Xaa in position 9 is Ala, Ile or Leu
  Variant (10)..(10): Xaa in position 10 is any amino acid
  Variant (12)..(13): Xaa in position 12 to 13 is any amino acid
  Variant (15)..(15): Xaa in position 15 is any amino acid
  Variant (16)..(16): Xaa in position 16 is Ser or Val
  Variant (17)..(17): Xaa in position 17 is Ala or Leu
  Variant (21)..(21): Xaa in position 21 is any amino acid
  Variant (22)..(22): Xaa in position 22 is Ala or Pro
  Variant (23)..(23): Xaa in position 23 is Ile, Leu or Met
  Variant (24)..(24): Xaa in position 24 is Ile, Met or Val
  Variant (25)..(25): Xaa in position 25 is Ala, Asp, Asn or Thr
PXXXXXXXXXLXXGXXXGPEXXXXX

SEQ ID NO: 146261 - DNA, 1044 bp, Escherichia coli
  CDS (1)..(1044)
atgcgctatcgcattttccttctcttttttttcgctttgttgccgacgtctttggtgtgggcggcaccagcgcaacgggcgttttccgactggcaggtcacctgtaataaccaaaatttctgcgtggcgcgtaatacgggcgatcataatggactggtgatgaccctgagccgcagcgccggggcgcataccgatgccgttttacgtattgagcgcggcggattgaagtcgccggaggcgtcagaaggggagatagcgccacggctgctgttagatggcgagccgttggcgttaagtggtgacaagtggcggatttcaccatggttattagtaaccgatgatacggcaaccatcaccgcgtttttgcagatgattcaggaagggaaggcaatcaccttacgcgatggcgatcagaccatttctctgagtggcttaaaagcagcgttgttgtttattgatgctcagcaaaagcgcgttggcagtgaaaccgcgtggatcaagaaaggggacgaaccgccgctcagcgtaccgcccgcgcctgcgctgaaagaggtcgcggtggttaacccaacgccgacgccactctcactcgaagaacgcaacgatttgctggattatggaaactggcggatgaatggtctgcgctgctcgcttgatccattgcgtcgtgaggtgaatgtcactgcgctgactgatgataaagcgctgatgatgattagctgtgaggcaggggcctataacaccattgatttggcatggattgtgtcgcgtaaaaagccactagcttcgcgcccggttcggttgcgtttgccgttcaacaacggtcaggagacgaatgaactggaactgatgaacgcaacatttgatgagaaatcgcgtgaactggtgaccttagcgaaagggcgcggattaagcgattgtggcattcaggcgcgctggcgctttgacggtcagcgttttcgcctggtgcgttacgccgcagaacccacctgcgataactggcatgggccagacgcctggcccacgttgtggatcacccgttaa

SEQ ID NO: 146262 - protein, 347 aa, Escherichia coli
MRYRIFLLFFFALLPTSLVWAAPAQRAFSDWQVTCNNQNFCVARNTGDHNGLVMTLSRSAGAHTDAVLRIERGGLKSPEASEGEIAPRLLLDGEPLALSGDKWRISPWLLVTDDTATITAFLQMIQEGKAITLRDGDQTISLSGLKAALLFIDAQQKRVGSETAWIKKGDEPPLSVPPAPALKEVAVVNPTPTPLSLEERNDLLDYGNWRMNGLRCSLDPLRREVNVTALTDDKALMMISCEAGAYNTIDLAWIVSRKKPLASRPVRLRLPFNNGQETNELELMNATFDEKSRELVTLAKGRGLSDCGIQARWRFDGQRFRLVRYAAEPTCDNWHGPDAWPTLWITR

SEQ ID NO: 146263 - DNA, 1044 bp, Escherichia coli O157:H7 EDL933
  CDS (1)..(1044): transl_table=11
atgcgctatcgcattttccttctcttttttttcgctttgttgccgacgtctttggtgtgggcggcaccagcgcaacgggcgttttccgactggcaggtcacctgtaataaccaaaacttctgcgtggcgcgtaatacgggcgatcataatggactggtgatgaccctgagccgcagcgccggggcgcataccgatgccgttttacgtattgagcgcggcgggttgaagtcgccggatgcgtctgaaggggaaattgcgccacggctgctgttagatggcgagccgttggcgttaagtggtgacaagtggcggatttcaccatggttattagtaaccgatgatacggcaaccatcaccgcgtttttgcagatgattcaggaagggaaggcgatcaccttacgcgacggcaatcagaccatttctctgagtgacttaaaagcggcgttgttgtttattgatgctcagcaaaagcgcgttggcagtgaaaccgcgtggatcaagaaaggggacgaaccgccgctcagcgtaccgcccgcgcctgcgctgaaagaggtcgtggtggttaacccaacgccgacgccactctcactcgaagaacgcaacgatttgctggattatggaaactggcggatgaatggtctgcgctgctcgcttgatccattgcgtcgtgaggtgaatgtcactgcgctgactgatgataaagcgctgatgatgattagctgtgaggcaggggcctataacaccattgatttggcatggattgtgtcgcgtaaaaagccgctggcctcgcgcccggtccggctgcgtttgccgttcaacaacggtcaggagacgaatgaactggaactgatgaacgcaacatttgatgagaaatcgcgtgaactggtgaccttagcgaaagggcgcggattaagcgattgtggcattcaggcgcgctggcgctttgacggtcagcgttttcgcctggtgcgttacgccgcagaacccacctgcgataactggcatgggccagacgcctggcccacgttgtggatcacccgttaa

SEQ ID NO: 146264 - protein, 347 aa, Escherichia coli O157:H7 EDL933
MRYRIFLLFFFALLPTSLVWAAPAQRAFSDWQVTCNNQNFCVARNTGDHNGLVMTLSRSAGAHTDAVLRIERGGLKSPDASEGEIAPRLLLDGEPLALSGDKWRISPWLLVTDDTATITAFLQMIQEGKAITLRDGNQTISLSDLKAALLFIDAQQKRVGSETAWIKKGDEPPLSVPPAPALKEVVVVNPTPTPLSLEERNDLLDYGNWRMNGLRCSLDPLRREVNVTALTDDKALMMISCEAGAYNTIDLAWIVSRKKPLASRPVRLRLPFNNGQETNELELMNATFDEKSRELVTLAKGRGLSDCGIQARWRFDGQRFRLVRYAAEPTCDNWHGPDAWPTLWITR

SEQ ID NO: 146265 - DNA, 1044 bp, Salmonella enterica subsp. enterica serovar Typhi str. CT18
  CDS (1)..(1044): transl_table=11
atgcgctaccgcgttattcttttttgtctgtttggcctgttgccggtccagctactgtgggctgcgccagcgcaacggactttttccgactggcaggtcacctgcaataaccaaaatttttgcgtagcgcgcaatactggcgaacatcatgggctggtgatgacattaagccgcagcgccggggcgcgtaccgatgcggtactgcgtatcgaccgcggcggtttggcgccgcccgacgctaaagaagccgcaattgcgcctcgcttattgctggatggcaaaccgctttcgttcgacagttcacactggcgcgtgtcgccctggcatctcatgaccggcgatcctgccaccatcaccgcatttttacagacgattcaggatgcgcaggccatcaccttaaaaaacggcgttcagacgctttcgctggcgggattaaaagcggcattactgtttatcgacgcgcaacaaaaacgtgtgggcagcgaaaccgcctggattgaaaaaggaaacgaaccgccgctcagcgtgcccccggcaccggcattaaaggggatcgccgttattaatccaacgcccgtaccgctgagtgaggaagaacgcgacgatctgctggactacgccgcatggcgggtaaacggcattcgttgttcgcttgacccgctgcgtcgcgagacgcaggtcagcgcgttgacggatgataaagcgttattgattgttaactgcgaagccggcgcctataacactattgatctcgcctgggtagtttcacgcaaaaaaacgctcgtctcgcgcgccgtacgtttgcggctgccgtttaatcgcggcgtcgaaagtaatgacatggagttgatgaacgccttctttgacgagaaaacgcgcgagctggtgacgttggcgaaagggcgggggttaaccgactgtggtatccagacgcgctggcgctatgatggcgatcgttttcgtctggtacgttatgccgaagaaccgagctgcgatagctggcacgggccggatgcctggcctacgctgtggatcacgcgttga

SEQ ID NO: 146266 - protein, 347 aa, Salmonella enterica subsp. enterica serovar Typhi str. CT18
MRYRVILFCLFGLLPVQLLWAAPAQRTFSDWQVTCNNQNFCVARNTGEHHGLVMTLSRSAGARTDAVLRIDRGGLAPPDAKEAAIAPRLLLDGKPLSFDSSHWRVSPWHLMTGDPATITAFLQTIQDAQAITLKNGVQTLSLAGLKAALLFIDAQQKRVGSETAWIEKGNEPPLSVPPAPALKGIAVINPTPVPLSEEERDDLLDYAAWRVNGIRCSLDPLRRETQVSALTDDKALLIVNCEAGAYNTIDLAWVVSRKKTLVSRAVRLRLPFNRGVESNDMELMNAFFDEKTRELVTLAKGRGLTDCGIQTRWRYDGDRFRLVRYAEEPSCDSWHGPDAWPTLWITR

SEQ ID NO: 146267 - DNA, 1044 bp, Salmonella typhimurium LT2
  CDS (1)..(1044): transl_table=11
atgcgctaccgcgttattcttttttgtctgtttggcctgttgccggtccagctactgtgggctgcgccagcgcaacggactttttccgactggcaggtcacctgcaataaccaaaatttttgcgtagcgcgcaatactggcgaacatcatgggctggtgatgacattaagccgcagcgccggggcgcgtaccgatgcggtactgcgtatcgaccgcggcggtttggcgccgcccgacgctaaagaagccgcaattgcgcctcgcttattgctggatggcaaaccgctttcgttcaacagtccacactggcgcgtgtcgccctggcatctcatgaccggcgatcctgccaccatcaccgcatttttacagacgattcaggatgcgcaggccatcaccttaaaaaacggcgttcagacgctttcgctggcgggattaaaagcggcattactgtttatcgacgcgcaacaaaaacgtgtgggcagcgaaaccgcctggattgaaaaaggaaacgaaccgccgctcagcgtgcccccggcaccggcattaaaggggatcgccgtgattaatccaacgcccgtaccgctgagtgaggaagaacgcgacgatctgctggactacgcagcatggcgggtaaacggcattcgttgttcgcttgacccgctgcgtcgcgagacgcaggtcagcgcgttgacggatgataaagcgttattgattgttaactgcgaagccggcgcctataacactattgatctcgcctgggtagtttcacgcaaaaaaacgctcgtctcgcgcgccgtacgtttgcggctgccgtttaatcgcggcgtcgaaagtaatgacatggagttgatgaacgtcttctttgacgagaaaacgcgcgagctggtgacgttggcgaaagggcgggggttaaccgactgcggtatccagacgcgctggcgttatgatggcgatcgttttcgtctggtgcgttatgccgaagaaccgagctgcgatagctggcacgggccggatgcctggcctacgctgtggatcacgcgttga

SEQ ID NO: 146268 - protein, 347 aa, Salmonella typhimurium LT2
MRYRVILFCLFGLLPVQLLWAAPAQRTFSDWQVTCNNQNFCVARNTGEHHGLVMTLSRSAGARTDAVLRIDRGGLAPPDAKEAAIAPRLLLDGKPLSFNSPHWRVSPWHLMTGDPATITAFLQTIQDAQAITLKNGVQTLSLAGLKAALLFIDAQQKRVGSETAWIEKGNEPPLSVPPAPALKGIAVINPTPVPLSEEERDDLLDYAAWRVNGIRCSLDPLRRETQVSALTDDKALLIVNCEAGAYNTIDLAWVVSRKKTLVSRAVRLRLPFNRGVESNDMELMNVFFDEKTRELVTLAKGRGLTDCGIQTRWRYDGDRFRLVRYAEEPSCDSWHGPDAWPTLWITR

SEQ ID NO: 146269 - DNA, 1044 bp, Shigella flexneri 2a str. 301
  CDS (1)..(1044): transl_table=11
atgcgctatcgcattttccttctcttttttttcgctttgttgccgacgtctttggtgtgggcggcaccagcgcaacgggcgttttccgactggcaggtcacctgtaataatcaaaatttttgtgtggcgcgcaatacgggcgatcataatggactggtgatgaccctgagccgcagcgctggggcgcataccgatgccgttttacgtattgagcgcggtgggttgaagtcgccggatgcgtctgaaggggagatagcgccacggctgctattagatggtgagccgttggcattaagtggtgacaagtggcggatttcaccatggttattagtaaccgatgatacggcaaccatcaccgcgtttttgcagataattcaggaagggaaggcgatcaccttacgcgacggcaatcagaccatttctctgagcggcttaaaagcggcgttgttgtttattgatgctcagcaaaagcgcgttggcagtgaaaccgcgtggatcaagaaaggggacgaaccgcctctcagcgtaccgcccgcgcctgcgctgaaagaggtcgcggtggttaacccaacgccgacgccactctcactcgaagaacgtaacgatttgctggattatggaaactggcggatgaatggtctgcgctgctcgcttgatccgttacgtcgtgaggtgaatgtcactgcgctgaccgatgataaagcactgatgatgattagctgtgaggcaggggcctataacaccattgatttggcatggattgtgtcgcgtaaaaagccgctagcctcgcgcccggttcggttgcgtttgccgttcaacaacggccaggagacgaatgaactggaactgatgaacgcaacatttgatgagaaatcgcgtgaactggtgaccttagcgaaagggcgcggattaagcgattgtggcattcaggcgcgctggcgctttgacggtcagcgttttcgcctggtgcgttacgccgcagaacctacctgcgataactggcatgggccagacgccaggcccacgttgtggatcacccgttaa

SEQ ID NO: 146270 - protein, 347 aa, Shigella flexneri 2a str. 301
MRYRIFLLFFFALLPTSLVWAAPAQRAFSDWQVTCNNQNFCVARNTGDHNGLVMTLSRSAGAHTDAVLRIERGGLKSPDASEGEIAPRLLLDGEPLALSGDKWRISPWLLVTDDTATITAFLQIIQEGKAITLRDGNQTISLSGLKAALLFIDAQQKRVGSETAWIKKGDEPPLSVPPAPALKEVAVVNPTPTPLSLEERNDLLDYGNWRMNGLRCSLDPLRREVNVTALTDDKALMMISCEAGAYNTIDLAWIVSRKKPLASRPVRLRLPFNNGQETNELELMNATFDEKSRELVTLAKGRGLSDCGIQARWRFDGQRFRLVRYAAEPTCDNWHGPDARPTLWITR

SEQ ID NO: 146271 - DNA, 1044 bp, Salmonella enterica subsp. enterica serovar Typhi Ty2
  CDS (1)..(1044): transl_table=11
atgcgctaccgcgttattcttttttgtctgtttggcctgttgccggtccagctactgtgggctgcgccagcgcaacggactttttccgactggcaggtcacctgcaataaccaaaatttttgcgtagcgcgcaatactggcgaacatcatgggctggtgatgacattaagccgcagcgccggggcgcgtaccgatgcggtactgcgtatcgaccgcggcggtttggcgccgcccgacgctaaagaagccgcaattgcgcctcgcttattgctggatggcaaaccgctttcgttcaacagttcacactggcgcgtgtcgccctggcatctcatgaccggcgatcctgccaccatcaccgcatttttacagacgattcaggatgcgcaggccatcaccttaaaaaacggcgttcagacgctttcgctggcgggattaaaagcggcattactgtttatcgacgcgcaacaaaaacgtgtgggcagcgaaaccgcctggattgaaaaaggaaacgaaccgccgctcagcgtgcccccggcaccggcattaaaggggatcgccgttattaatccaacgcccgtaccgctgagtgaggaagaacgcgacgatctgctggactacgccgcatggcgggtaaacggcattcgttgttcgcttgacccgctgcgtcgcgagacgcaggtcagcgcgttgacggatgataaagcgttattgattgttaactgcgaagccggcgcctataacactattgatctcgcctgggtagtttcacgcaaaaaaacgctcgtctcgcgcgccgtacgtttgcggctgccgtttaatcgcggcgtcgaaagtaatgacatggagttgatgaacgccttctttgacgagaaaacgcgcgagctggtgacgttggcgaaagggcgggggttaaccgactgtggtatccagacgcgctggcgctatgatggcgatcgttttcgtctggtacgttatgccgaagaaccgagctgcgatagctggcacgggccggatgcctggcctacgctgtggatcacgcgttga

SEQ ID NO: 146272 - protein, 347 aa, Salmonella enterica subsp. enterica serovar Typhi Ty2
MRYRVILFCLFGLLPVQLLWAAPAQRTFSDWQVTCNNQNFCVARNTGEHHGLVMTLSRSAGARTDAVLRIDRGGLAPPDAKEAAIAPRLLLDGKPLSFNSSHWRVSPWHLMTGDPATITAFLQTIQDAQAITLKNGVQTLSLAGLKAALLFIDAQQKRVGSETAWIEKGNEPPLSVPPAPALKGIAVINPTPVPLSEEERDDLLDYAAWRVNGIRCSLDPLRRETQVSALTDDKALLIVNCEAGAYNTIDLAWVVSRKKTLVSRAVRLRLPFNRGVESNDMELMNAFFDEKTRELVTLAKGRGLTDCGIQTRWRYDGDRFRLVRYAEEPSCDSWHGPDAWPTLWITR

SEQ ID NO: 146273 - DNA, 999 bp, Chromobacterium violaceum ATCC 12472
  CDS (1)..(999): transl_table=11
atgcaacgcatcctgctcgcctccgccctgctggcgctggccctgcccgcctcggccaaagttttccagttcaaggactgggccgtggcctgcgacaacatccgccactgcgaggccaacggcacccaggccggggacggcgacaatccggtcagcctgttgctgtcgcgggacgccggccccggcagccgcttgagcgcccagctcgatgtcgacgacccggatggggacaaggtcggcaagctcacgttgaaggtaggcaggatcaaatggaccggcatcgacgccgaacaggcgttcagcgatgcgcagaccacgcagctgctggccgccatgctggatgccgacgaggtggcgctggccgacggcaagcgggaatggacgctgtcattggccggcctgaaagccgcgctgctgaagatggacgatgtgcaggggcgggtaggcaccgtcggcgcgctggtgaagaaaggcggcaagccggaatccgcggcgcccgccgcccagcccgcgccgctgctggttccgcttgcgcctcccgccgccaggcccggcgaccagaaactgctgccggccatcctgaagcagctgcgcgccgtcgacaaggcatgctgggacgagctgccggacgcggagcatcccgatgtccagctgtaccgcttgagcgccagccaagtgctggtgctgcgcgaatgcggccgcggcgcctatcagggcagctacaaggcttggaccagcggcgacgcgccgcccttccatccgcgcgaagtcccgctgcgcggcagcgacggcaaggagactttcctgatgaatgcctccttcgacaagggcgagctgtccagctacgccaagggccgcggcatcggcgattgcggcagcggcgccagctgggcctggaccggcaaggacttcaagctgatgtcggcccaagaggcgccgcaatgccgcggcatcgcaggcggcgtctcgctgcgcacctgggtcacccggcagaaataa

SEQ ID NO: 146274 - protein, 332 aa, Chromobacterium violaceum ATCC 12472
MQRILLASALLALALPASAKVFQFKDWAVACDNIRHCEANGTQAGDGDNPVSLLLSRDAGPGSRLSAQLDVDDPDGDKVGKLTLKVGRIKWTGIDAEQAFSDAQTTQLLAAMLDADEVALADGKREWTLSLAGLKAALLKMDDVQGRVGTVGALVKKGGKPESAAPAAQPAPLLVPLAPPAARPGDQKLLPAILKQLRAVDKACWDELPDAEHPDVQLYRLSASQVLVLRECGRGAYQGSYKAWTSGDAPPFHPREVPLRGSDGKETFLMNASFDKGELSSYAKGRGIGDCGSGASWAWTGKDFKLMSAQEAPQCRGIAGGVSLRTWVTRQK

SEQ ID NO: 146275 - DNA, 1149 bp, Burkholderia sp. 383
  CDS (1)..(1149): transl_table=11
atgtcgcaccgcctttcgctcgccatcgccgccctcctcgccgtttccccgatcgttgcccaggctcgcccgctcgcgcggccgccggtcgagcgcgatttcaagaactggtcggtcgtctgcgacaacggcaaccgttgcattgccgaaagccacgccgacgatatcgacgacgcacgcaccagcctcatcctgcgcgtgacgcgcgatgccggccccgatgcgcaagcctcgctcgacatttacgcctcggcgccgctggacctgcgcaccgcacgcgtggatggccgcccgttcgatgcaatggcggcccaatggcatgcgttcggcggcaaaccggatgacgacgaagcgcacccgttcaggatccggaccaacgatccggcaacggttgccgcatggctcaccgcatcgcgcaatgcgcaactgctgagcttcggcgatccggcgtcggcccaaaccgcccgcacgccgttgacgggattgaatgccgcgctgctgctgatcgacgacacgcagggccgtgtcggtaccgtcacggccctgctgcgcccgggcacccggcccgcgtcgtcggtgccggccgcgccggcattgccgcccgccgtcacgccggcaccggccgtcgcgaacctgtcagccgccgagcagcgcccgctcgtcgatgcagtgctcgcgaagttcggcggcgacgtgaagcaatgtgcggccgatgtcgaagacgaaatgccggcgagcgatcgcaggaaggcgtcgactgccgtcgcgatctccgccgacgaagcgctggtcgcaataccgtgccagaccagcagcatgtataaccacaccgacctgtggtatcgcgtgcgacgaactgcgccctactcgccgacggcgatgaatttcggcgagaacgcgaacgcggggctcgattcggcatcgttcgcgaacgaactgaccgaggccggctacgattccgccagcgcgacgctgtcgagcaaggtccggctgcgcagtgccggcgattgcggctcgaccgcatcgtggatcttcgacggccggcgcttcatgctcggcgatatcgccacgcacggcacgtgcaacggcctgttcgacgatcagtggccacgcctgtatcgacgggccgatgcggcaggaaaccgctga

SEQ ID NO: 146276 - protein, 382 aa, Burkholderia sp. 383
MSHRLSLAIAALLAVSPIVAQARPLARPPVERDFKNWSVVCDNGNRCIAESHADDIDDARTSLILRVTRDAGPDAQASLDIYASAPLDLRTARVDGRPFDAMAAQWHAFGGKPDDDEAHPFRIRTNDPATVAAWLTASRNAQLLSFGDPASAQTARTPLTGLNAALLLIDDTQGRVGTVTALLRPGTRPASSVPAAPALPPAVTPAPAVANLSAAEQRPLVDAVLAKFGGDVKQCAADVEDEMPASDRRKASTAVAISADEALVAIPCQTSSMYNHTDLWYRVRRTAPYSPTAMNFGENANAGLDSASFANELTEAGYDSASATLSSKVRLRSAGDCGSTASWIFDGRRFMLGDIATHGTCNGLFDDQWPRLYRRADAAGNR

SEQ ID NO: 146277 - DNA, 1086 bp, Burkholderia sp. 383
  CDS (1)..(1086): transl_table=11
atgaaaacgcgtgccattgcgctaaacgcggcgctcattgcgcttttcgccggcatagccgtcccgcttgtcgccaaggcaacgcctccccaggagaccagcgcggccagctacgacacctacaagtcgtggtgggtcgcgtgcgacaacggcctgacctgcgaagcgaagggtttcgcgagcggtggtgaagccagtgcggacctgcgcttcattcgggccgccgggccggacggctcgctcgaagcgcggctgcaggtcgtcactcatgccagtatcgatctcgatgatttgcgtgtagatggaaagccgctgcggttggacgcgtcggcctggagcgtgaacctcgactccaccaacgatatcgcgacgttgtcgacaaagcggccggcagccgtggcagccttcgtatcccggcttcgcaacggcgccaggctcgaggtcggttcggatacgaacgcttatgttcccctcgacggcctggccgccgccctgttgcgcatcgatgaccggcaggggcgcatcggcggtgttagcgcgttgatccgcaagggcctcgcgcccgcctcacaagtgacgcccgcaccttcactaccggtcgtaccggcacggaagatcgctgcgcagttgtccgatcaggaggaagcgcgcctgatcgcgcgcacgaaacgtatccaggacgccagcagctgcgaagagaatgcgtcggcgcatctcgaagaagccgcctatgcgctcgactcacggaatgcgctggtctttcttccctgcatcgcgggtgcctaccagggatcgtcggacgtgttcatcgcgccacgcaccggtggcggcgcaccgcagccgatcaagctggggggccctgtgggaggcgtgatggatccctcgctggtcgaaccacactttgacccggctaccggcaccctgtcgacttttgccaaggggcgcggtctggccgactgcggttttcaggccgaatggatctgggacggccgggcatttcagatttcggccgcgtcgcagcaggagacgtgcggcggtacggcaccgggcgactggcccacactctatcggtcgcgaaagaagtaa

SEQ ID NO: 146278 - protein, 361 aa, Burkholderia sp. 383
MKTRAIALNAALIALFAGIAVPLVAKATPPQETSAASYDTYKSWWVACDNGLTCEAKGFASGGEASADLRFIRAAGPDGSLEARLQVVTHASIDLDDLRVDGKPLRLDASAWSVNLDSTNDIATLSTKRPAAVAAFVSRLRNGARLEVGSDTNAYVPLDGLAAALLRIDDRQGRIGGVSALIRKGLAPASQVTPAPSLPVVPARKIAAQLSDQEEARLIARTKRIQDASSCEENASAHLEEAAYALDSRNALVFLPCIAGAYQGSSDVFIAPRTGGGAPQPIKLGGPVGGVMDPSLVEPHFDPATGTLSTFAKGRGLADCGFQAEWIWDGRAFQISAASQQETCGGTAPGDWPTLYRSRKK

SEQ ID NO: 146279 - DNA, 20 bp, Artificial sequence
  primer
atgcgctatcgcattttcct

SEQ ID NO: 146280 - DNA, 23 bp, Artificial sequence
  primer
ttaacgggtgatccacaacgtgg

SEQ ID NO: 146281 - protein, 358 aa, Artificial sequence
  consensus sequence
  Variant (2)..(4): Xaa in position 2 to 4 is any amino acid
  Variant (5)..(11): Xaa in position 5 to 11 is any or no amino acid
  Variant (13)..(14): Xaa in position 13 to 14 is any amino acid
  Variant (16)..(16): Xaa in position 16 is any amino acid
  Variant (18)..(18): Xaa in position 18 is any amino acid
  Variant (20)..(20): Xaa in position 20 is any amino acid
  Variant (22)..(24): Xaa in position 22 to 24 is any amino acid
  Variant (26)..(26): Xaa in position 26 is any amino acid
  Variant (28)..(67): Xaa in position 28 to 67 is any amino acid
  Variant (68)..(75): Xaa in position 68 to 75 is any or no amino acid
  Variant (78)..(78): Xaa in position 78 is any amino acid
  Variant (81)..(86): Xaa in position 81 to 86 is any amino acid
  Variant (88)..(94): Xaa in position 88 to 94 is any amino acid
  Variant (95)..(105): Xaa in position 95 to 105 is any or no amino acid
  Variant (107)..(109): Xaa in position 107 to 109 is any amino acid
  Variant (111)..(113): Xaa in position 111 to 113 is any amino acid
  Variant (115)..(115): Xaa in position 115 is any amino acid
  Variant (117)..(135): Xaa in position 117 to 135 is any amino acid
  Variant (136)..(139): Xaa in position 136 to 139 is any or no amino acid
  Variant (141)..(141): Xaa in position 141 is any amino acid
  Variant (144)..(144): Xaa in position 144 is any amino acid
  Variant (149)..(149): Xaa in position 149 is any amino acid
  Variant (152)..(153): Xaa in position 152 to 153 is any amino acid
  Variant (155)..(155): Xaa in position 155 is any amino acid
  Variant (159)..(161): Xaa in position 159 to 161 is any amino acid
  Variant (163)..(165): Xaa in position 163 to 165 is any amino acid
  Variant (168)..(169): Xaa in position 168 to 169 is any amino acid
  Variant (171)..(173): Xaa in position 171 to 173 is any amino acid
  Variant (176)..(176): Xaa in position 176 is any amino acid
  Variant (179)..(179): Xaa in position 179 is any amino acid
  Variant (181)..(186): Xaa in position 181 to 186 is any amino acid
  Variant (187)..(187): Xaa in position 187 is any or no amino acid
  Variant (189)..(192): Xaa in position 189 to 192 is any amino acid
  Variant (195)..(196): Xaa in position 195 to 196 is any amino acid
  Variant (198)..(200): Xaa in position 198 to 200 is any amino acid
  Variant (202)..(226): Xaa in position 202 to 226 is any amino acid
  Variant (227)..(236): Xaa in position 227 to 236 is any or no amino acid
  Variant (239)..(242): Xaa in position 239 to 242 is any amino acid
  Variant (245)..(248): Xaa in position 245 to 248 is any amino acid
  Variant (250)..(251): Xaa in position 250 to 251 is any amino acid
  Variant (255)..(257): Xaa in position 255 to 257 is any amino acid
  Variant (258)..(258): Xaa in position 258 is any or no amino acid
  Variant (260)..(275): Xaa in position 260 to 275 is any amino acid
  Variant (276)..(276): Xaa in position 276 is any or no amino acid
  Variant (278)..(286): Xaa in position 278 to 286 is any amino acid
  Variant (287)..(293): Xaa in position 287 to 293 is any or no amino acid
  Variant (295)..(298): Xaa in position 295 to 298 is any amino acid
  Variant (301)..(303): Xaa in position 301 to 303 is any amino acid
  Variant (304)..(305): Xaa in position 304 to 305 is any or no amino acid
  Variant (307)..(309): Xaa in position 307 to 309 is any amino acid
  Variant (315)..(316): Xaa in position 315 to 316 is any amino acid
  Variant (320)..(323): Xaa in position 320 to 323 is any amino acid
  Variant (325)..(326): Xaa in position 325 to 326 is any amino acid
  Variant (329)..(330): Xaa in position 329 to 330 is any amino acid
  Variant (332)..(332): Xaa in position 332 is any amino acid
  Variant (334)..(341): Xaa in position 334 to 341 is any amino acid
  Variant (343)..(350): Xaa in position 343 to 350 is any amino acid
  Variant (351)..(351): Xaa in position 351 is any or no amino acid
  Variant (353)..(353): Xaa in position 353 is any amino acid
  Variant (355)..(357): Xaa in position 355 to 357 is any amino acid
PXXXXXXXXXXFXXWXVXCXNXXXCXAXXXXXXXXXXXXXXXXXXXXXXXXXXXXXXXXXXXXXXXXXXXXXXXXDGXPLXXXXXXWXXXXXXXXXXXXXXXXXXTXXXAXXXAXLXXXXXXXXXXXXXXXXXXXXXXXLXGLXAALLXIDXXQXRVGXXXAXXXKGXXPXXXVPXAPXLXXXXXXXPXXXXLSXXEXXXLXXXXXXXXXXXXXXXXXXXXXXXXXXXXXXXXXXXALXXXXALXXXXCXXGAYXXXXDXXXXXXXXXXXXXXXXXLXXXXXXXXXXXXXXXXLXXXXFDXXXXXLXXXAKGRGXXDCGXXXXWXXDGXXFXLXXXXXXXXCXXXXXXXXXPXLXXXR

SEQ ID NO: 146282 - protein, 44 aa, Artificial sequence
  protein pattern
  Variant (2)..(2): Xaa in position 2 is Ser or Val
  Variant (3)..(3): Xaa in position 3 is Ser or Thr
  Variant (4)..(4): Xaa in position 4 is any amino acid
  Variant (10)..(10): Xaa in position 10 is Ile or Leu
  Variant (11)..(11): Xaa in position 11 is Ala, Gly, Ser or Thr
  Variant (15)..(15): Xaa in position 15 is any amino acid
  Variant (16)..(16): Xaa in position 16 is Gly or Gln
  Variant (17)..(17): Xaa in position 17 is Ala or Thr
  Variant (18)..(18): Xaa in position 18 is Glu, Arg or Ser
  Variant (20)..(20): Xaa in position 20 is any amino acid
  Variant (21)..(25): Xaa in position 21 to 25 is any or no amino acid
  Variant (27)..(27): Xaa in position 27 is any amino acid
  Variant (28)..(28): Xaa in position 28 is Gly, Ile or Leu
  Variant (29)..(31): Xaa in position 29 to 31 is any amino acid
  Variant (32)..(32): Xaa in position 32 is Ala, Gln or Ser
  Variant (33)..(34): Xaa in position 33 to 34 is Ala, Glu or Gln
  Variant (35)..(35): Xaa in position 35 is Glu or Pro
  Variant (36)..(36): Xaa in position 36 is Gln, Ser or Thr
  Variant (38)..(38): Xaa in position 38 is any amino acid
  Variant (39)..(39): Xaa in position 39 is Gly, Asn or Ser
  Variant (40)..(41): Xaa in position 40 to 41 is any amino acid
  Variant (42)..(43): Xaa in position 42 to 43 is Gly or Pro
  Variant (44)..(44): Xaa in position 44 is Asp or Val
LXXXAKGRGXXDCGXXXXWXXXXXXFXXXXXXXXXXCXXXXXXX

SEQ ID NO: 146283 - protein, 57 aa, Artificial sequence
  protein pattern
  Variant (2)..(2): Xaa in position 2 is any amino acid
  Variant (3)..(3): Xaa in position 3 is Ala or Ser
  Variant (4)..(4): Xaa in position 4 is any amino acid
  Variant (5)..(5): Xaa in position 5 is Ala, Ser or Val
  Variant (6)..(6): Xaa in position 6 is Asp, Gly or Pro
  Variant (8)..(8): Xaa in position 8 is any amino acid
  Variant (9)..(10): Xaa in position 9 to 10 is any or no amino acid
  Variant (13)..(13): Xaa in position 13 is any or no amino acid
  Variant (16)..(16): Xaa in position 16 is any amino acid
  Variant (17)..(17): Xaa in position 17 is Ile or Met
  Variant (19)..(19): Xaa in position 19 is Ala or Asp
  Variant (20)..(20): Xaa in position 20 is any amino acid
  Variant (22)..(22): Xaa in position 22 is any amino acid
  Variant (24)..(24): Xaa in position 24 is Ile or Val
  Variant (26)..(26): Xaa in position 26 is Gly, Ser or Thr
  Variant (27)..(27): Xaa in position 27 is any amino acid
  Variant (28)..(28): Xaa in position 28 is Gly, Ser or Thr
  Variant (30)..(30): Xaa in position 30 is any amino acid
  Variant (31)..(31): Xaa in position 31 is Ile or Val
  Variant (32)..(32): Xaa in position 32 is Glu, Lys or Arg
  Variant (35)..(36): Xaa in position 35 to 36 is any amino acid
  Variant (38)..(39): Xaa in position 38 to 39 is any amino acid
  Variant (40)..(40): Xaa in position 40 is Ala, Gln or Ser
  Variant (41)..(41): Xaa in position 41 is Ala or Val
  Variant (42)..(42): Xaa in position 42 is Pro or Thr
  Variant (43)..(43): Xaa in position 43 is Ala or Pro
  Variant (45)..(45): Xaa in position 45 is Pro or Gln
  Variant (46)..(46): Xaa in position 46 is Ala, Pro or Ser
  Variant (47)..(47): Xaa in position 47 is Ala or Leu
  Variant (48)..(49): Xaa in position 48 to 49 is any amino acid
  Variant (50)..(50): Xaa in position 50 is Ile, Leu or Val
  Variant (51)..(52): Xaa in position 51 to 52 is Ala, Pro or Val
  Variant (53)..(54): Xaa in position 53 to 54 is any amino acid
  Variant (55)..(55): Xaa in position 55 is Ile or Pro
  Variant (56)..(56): Xaa in position 56 is Ala, Pro or Thr
  Variant (57)..(57): Xaa in position 57 is Ala or Pro
TXXXXXLXXXAAXLLXXDXXQXRXGXXXAXXXKGXXPXXXXXXAXXXXXXXXXXXXX

SEQ ID NO: 146284 - protein, 36 aa, Artificial sequence
  protein pattern
  Variant (2)..(5): Xaa in position 2 to 5 is any amino acid
  Variant (6)..(6): Xaa in position 6 is any or no amino acid
  Variant (8)..(9): Xaa in position 8 to 9 is any amino acid
  Variant (10)..(11): Xaa in position 10 to 11 is any or no amino acid
  Variant (13)..(13): Xaa in position 13 is Ala, Gln or Ser
  Variant (15)..(15): Xaa in position 15 is Ala, Thr or Val
  Variant (17)..(17): Xaa in position 17 is Asp or Asn
  Variant (19)..(19): Xaa in position 19 is any amino acid
  Variant (20)..(20): Xaa in position 20 is Asn or Arg
  Variant (21)..(21): Xaa in position 21 is any amino acid
  Variant (23)..(23): Xaa in position 23 is any amino acid
  Variant (25)..(25): Xaa in position 25 is Glu, Asn or Arg
  Variant (26)..(26): Xaa in position 26 is Gly, Asn or Ser
  Variant (27)..(27): Xaa in position 27 is any amino acid
  Variant (28)..(28): Xaa in position 28 is Ala, Gly or Gln
  Variant (29)..(29): Xaa in position 29 is Ala, Asp or Glu
  Variant (30)..(31): Xaa in position 30 to 31 is any amino acid
  Variant (32)..(32): Xaa in position 32 is Asp or Gly
  Variant (33)..(33): Xaa in position 33 is any amino acid
  Variant (34)..(34): Xaa in position 34 is Ala, Asn or Val
  Variant (35)..(35): Xaa in position 35 is any amino acid
  Variant (36)..(36): Xaa in position 36 is Thr or Val
PXXXXXFXXXXWXVXCXNXXXCXAXXXXXXXXXXXX

SEQ ID NO: 146285 - protein, 15 aa, Artificial sequence
  protein pattern
  Variant (2)..(2): Xaa in position 2 is Leu, Met or Val
  Variant (3)..(3): Xaa in position 3 is Phe, Ile, Leu or Met
  Variant (4)..(4): Xaa in position 4 is any amino acid
  Variant (5)..(5): Xaa in position 5 is Glu, Asn, Pro or Ser
  Variant (7)..(7): Xaa in position 7 is any amino acid
  Variant (8)..(9): Xaa in position 8 to 9 is any or no amino acid
  Variant (11)..(12): Xaa in position 11 to 12 is any or no amino acid
  Variant (14)..(14): Xaa in position 14 is Ala or Ser
LXXXXCXXXAXXGXY

SEQ ID NO: 146286 - protein, 15 aa, Artificial sequence
  protein pattern
  Variant (2)..(3): Xaa in position 2 to 3 is any amino acid
  Variant (4)..(4): Xaa in position 4 is any or no amino acid
  Variant (6)..(6): Xaa in position 6 is Ala or Thr
  Variant (7)..(7): Xaa in position 7 is Ile or Val
  Variant (8)..(8): Xaa in position 8 is Ala or Thr
  Variant (10)..(10): Xaa in position 10 is Phe or Trp
  Variant (11)..(11): Xaa in position 11 is Leu or Val
  Variant (12)..(12): Xaa in position 12 is Gln, Ser or Thr
  Variant (13)..(14): Xaa in position 13 to 14 is any amino acid
  Variant (15)..(15): Xaa in position 15 is Gln or Arg
TXXXAXXXAXXXXXX

SEQ ID NO: 146287 - protein, 18 aa, Artificial sequence
  protein pattern
  Variant (2)..(2): Xaa in position 2 is any or no amino acid
  Variant (4)..(5): Xaa in position 4 to 5 is any amino acid
  Variant (6)..(7): Xaa in position 6 to 7 is any or no amino acid
  Variant (9)..(9): Xaa in position 9 is Met or Val
  Variant (10)..(10): Xaa in position 10 is Asp or Asn
  Variant (12)..(14): Xaa in position 12 to 14 is any amino acid
  Variant (15)..(15): Xaa in position 15 is Asp, Arg or Ser
  Variant (16)..(16): Xaa in position 16 is Ala or Leu
  Variant (17)..(17): Xaa in position 17 is any amino acid
  Variant (18)..(18): Xaa in position 18 is Ala or Pro
LXDXXXXRXXGXXXXXXX

SEQ ID NO: 146288 - DNA, 174 bp, Escherichia coli
  CDS (1)..(174): transl_table=11
atggaggcggtgtcgggttttatgtcgcgtgtaatcacgacccaaggtgaatgggaacgcataaaaatctgttatttacatcatatgatcatcatgtttattgcgtggtttataagtattgttattgcacactcaaggccctttagctcagtggttagagcaggcgactcataa

SEQ ID NO: 146289 - protein, 57 aa, Escherichia coli
MEAVSGFMSRVITTQGEWERIKICYLHHMIIMFIAWFISIVIAHSRPFSSVVRAGDS

SEQ ID NO: 146290 - DNA, 174 bp, Shigella flexneri 2a str. 2457T
  CDS (1)..(174): transl_table=11
atggaggcggtgtcgggttttatgtcgcgtgtaatcacgacccaaggtgaatgggaacgcataaaaatctgttatttacatcataagatcatcatgtttattgcgtggtttataagtattgttattgcatacttaaggccctttagctcagtggttagagcaggcgactcataa

SEQ ID NO: 146291 - protein, 57 aa, Shigella flexneri 2a str. 2457T
MEAVSGFMSRVITTQGEWERIKICYLHHKIIMFIAWFISIVIAYLRPFSSVVRAGDS

SEQ ID NO: 146292 - DNA, 22 bp, Artificial sequence
  primer
atggaggcggtgtcgggtttta

SEQ ID NO: 146293 - DNA, 23 bp, Artificial sequence
  primer
ttatgagtcgcctgctctaacca

SEQ ID NO: 146294 - DNA, 450 bp, Escherichia coli
  CDS (1)..(450): transl_table=11
atgttctcaccgcagtcacgcttgcgtcatgcagttgcagatacgttcgcgatggttgtttactgttctgtcgtgaacatgtgtattgaagttttcctctccggaatgagcttcgaacagtctttttattccagattggtagcgattccggtgaacatcttaattgcatggccatacggtatgtaccgtgatctgtttatgcgcgcggcacgcaaagttagcccgtcgggctggataaaaaatctggcggatatcctggcttatgtgacgttccagtcaccggtgtatgtggcgatcttgttagtggtgggcgcagactggcatcagattatggcggcggtcagttcaaacatcgttgtttcgatgttgatgggggcggtttatggctacttcctcgattattgccgccgactgtttaaagtcagccgttaccagcaggtaaaagcctaa

SEQ ID NO: 146295 - protein, 149 aa, Escherichia coli
MFSPQSRLRHAVADTFAMVVYCSVVNMCIEVFLSGMSFEQSFYSRLVAIPVNILIAWPYGMYRDLFMRAARKVSPSGWIKNLADILAYVTFQSPVYVAILLVVGADWHQIMAAVSSNIVVSMLMGAVYGYFLDYCRRLFKVSRYQQVKA

SEQ ID NO: 146296 - DNA, 564 bp, Klebsiella pneumoniae
  CDS (1)..(564): transl_table=11
ttgccacttttaatgcagagatatactctacgcacatcaaaacaggcagcccaaaaacgctataccaacgcgcatttttcggcgttaatgacttcattttcgaggagcactccgatgttctctgcgcactcccgcttgcggcatgcggttgcagacacctttgcgatggtggtttactgcaccgtcgtcaacatgatgatcgaaatttttctctctggtatgacgtttgagcagtcgttatcgtcgcgtctggtggcgatcccggtcaacattattattgccgtaccctatgggatttatcgcgatttcgccatgcgtcaggcccggcgcatcagcccggccaggtggatgaaaaatatggccgacgtgctggcctacgtcacctttcagtcgccggtgtatgtcgctattctgtggagcgtgggtgctgactggcaccagattgtcgccgcggtgagctcgaacctggcggtatcgatgatgatgggcgccgcctatggctacttcctcgactattgccgccgcctgttccgcgtggcgccctatcagcaggcgaaggcctga

SEQ ID NO: 146297 - protein, 187 aa, Klebsiella pneumoniae
LPLLMQRYTLRTSKQAAQKRYTNAHFSALMTSFSRSTPMFSAHSRLRHAVADTFAMVVYCTVVNMMIEIFLSGMTFEQSLSSRLVAIPVNIIIAVPYGIYRDFAMRQARRISPARWMKNMADVLAYVTFQSPVYVAILWSVGADWHQIVAAVSSNLAVSMMMGAAYGYFLDYCRRLFRVAPYQQAKA

SEQ ID NO: 146298 - DNA, 453 bp, Vibrio cholerae O1 biovar eltor str. N16961
  CDS (1)..(453): transl_table=11
atgaaagctcgtggtccgttttgtattcgtcatgcagcggctgatacttttgcgatggtcgtcttttgttttgtaacaggcatgattattgaaatttttgtgtcaggaatgacctttcagcaatcactcgcttcccgaaccctttccattcccgttaatatcgcgattgcttggccgtatggtgtgtttagagattatgttcttcgccaagggcgcaaaatttccccaaccggttggatgaaaaatctctccgatctcgtggcttacgttctctttcaatcgccagtttatgccgccattctcttcaccgtaggtgcttctaccgatcaaatcattactgctgtggccaccaatgcattggtgtcgtgtggaatgggggtgttgtacggctatttcctcgatatgtgccgccgctggtttaaagttccgggctatacagtatctgagggttaa

SEQ ID NO: 146299 - protein, 150 aa, Vibrio cholerae O1 biovar eltor str. N16961
MKARGPFCIRHAAADTFAMVVFCFVTGMIIEIFVSGMTFQQSLASRTLSIPVNIAIAWPYGVFRDYVLRQGRKISPTGWMKNLSDLVAYVLFQSPVYAAILFTVGASTDQIITAVATNALVSCGMGVLYGYFLDMCRRWFKVPGYTVSEG

SEQ ID NO: 146300 - DNA, 447 bp, Yersinia pestis CO92
  CDS (1)..(447): transl_table=11
atgacaatgttttcaactgggcctcgttggcgtagcgctgtagccgatacctttgcactcgtcgtgtattgttttgtcatcggcatggcaattgaagtggttatctcgggaatgaccttccggcaatcgctttcttcgcgcctgctctcaatacccgtcaatattcttattgcctggccttatggtatgtatcgagatgcttttatacgttttgcccagcgccatgctggccagcgtttttgggcacgtaatttggctgatctattagcttatgtcagtttccagtcaccggtttatgccatgattttgtggtcggttggggcagatttcgagcaaatgatatcagcggtcgccagtaacgccgtggtttcaatggttatgggggtggcctacggctattttttggaatattgtcgccggctattccgcgttgcaggttatgtttga

SEQ ID NO: 146301 - protein, 148 aa, Yersinia pestis CO92
MTMFSTGPRWRSAVADTFALVVYCFVIGMAIEVVISGMTFRQSLSSRLLSIPVNILIAWPYGMYRDAFIRFAQRHAGQRFWARNLADLLAYVSFQSPVYAMILWSVGADFEQMISAVASNAVVSMVMGVAYGYFLEYCRRLFRVAGYV

SEQ ID NO: 146302 - DNA, 450 bp, Salmonella typhimurium LT2
  CDS (1)..(450): transl_table=11
atgttctctccacagtcacgcttgcgtcatgccgtagcagacacgtttgcgatggttgtttactgttctgttgtgaacatgttgatcgagatattcctctccggaatgagctttgagcagtcgctttcttccaggctggtggcgatacctgtcaacattttgattgcatggccatacggcgtttaccgcgatctgattatgcgcgtcgcgcgtaaggcaagcccggcgggatgggccaaaaacctggcggatgtattggcttatgtcacctttcagtcacccgtttatattatcatcttgctgaccgtcggtgccggctggcatcagatagtggccgccgtgagttcaaacattgttgtttcaatgttaatgggcgcggtttatggctacttcctggattattgtcgccgcctgtttaaagtgagcagctatcatcaggctaaggcgtaa

SEQ ID NO: 146303 - protein, 149 aa, Salmonella typhimurium LT2
MFSPQSRLRHAVADTFAMVVYCSVVNMLIEIFLSGMSFEQSLSSRLVAIPVNILIAWPYGVYRDLIMRVARKASPAGWAKNLADVLAYVTFQSPVYIIILLTVGAGWHQIVAAVSSNIVVSMLMGAVYGYFLDYCRRLFKVSSYHQAKA

SEQ ID NO: 146304 - DNA, 456 bp, Yersinia pestis KIM
  CDS (1)..(456): transl_table=11
atggagtttatgacaatgttttcaactgggcctcgttggcgtagcgctgtagccgatacctttgcactcgtcgtgtattgttttgtcatcggcatggcaattgaagtggttatctcgggaatgaccttccggcaatcgctttcttcgcgcctgctctcaatacccgtcaatattcttattgcctggccttatggtatgtatcgagatgcttttatacgttttgcccagcgccatgctggccagcgtttttgggcacgtaatttggctgatctattagcttatgtcagtttccagtcaccggtttatgccatgattttgtggtcggttggggcagatttcgagcaaatgatatcagcggtcgccagtaacgccgtggtttcaatggttatgggggtggcctacggctattttttggaatattgtcgccggctattccgcgttgcaggttatgtttga

SEQ ID NO: 146305 - protein, 151 aa, Yersinia pestis KIM
MEFMTMFSTGPRWRSAVADTFALVVYCFVIGMAIEVVISGMTFRQSLSSRLLSIPVNILIAWPYGMYRDAFIRFAQRHAGQRFWARNLADLLAYVSFQSPVYAMILWSVGADFEQMISAVASNAVVSMVMGVAYGYFLEYCRRLFRVAGYV

SEQ ID NO: 146306 - DNA, 450 bp, Vibrio parahaemolyticus RIMD 2210633
  CDS (1)..(450): transl_table=11
atgaagtctcgtggaccattttgtattcgtcatgccgcagcggatacttttgctatggttgttttttgctttattacagggatgattatcgagattttgatttcaggaatgacgtttgagcagtctctggcatcacgcacgttgtctataccagtaaatatcgcgattgcttggccttatggcatgttccgtgattgggttttgcgccaaggtaacaaactttcaccttcttctttcatgaaaaatgtgtctgatcttgtatcgtatgtgcttttccaatcacctgtgtacgccggcattcttttagccgttggtgcatcgtatgatcaaattgttacggcagttgcgagcaacgctgtggtttcttgtggaatgggcgtgttatacggctactttttggatatgtgccgtcgttggttccgcgttccgggttatcatcaaggcgtttga

SEQ ID NO: 146307 - protein, 149 aa, Vibrio parahaemolyticus RIMD 2210633
MKSRGPFCIRHAAADTFAMVVFCFITGMIIEILISGMTFEQSLASRTLSIPVNIAIAWPYGMFRDWVLRQGNKLSPSSFMKNVSDLVSYVLFQSPVYAGILLAVGASYDQIVTAVASNAVVSCGMGVLYGYFLDMCRRWFRVPGYHQGV

SEQ ID NO: 146308 - DNA, 450 bp, Salmonella enterica subsp. enterica serovar Typhi Ty2
  CDS (1)..(450): transl_table=11
atgttctctccacagtcacgcttgcgtcatgccgtagcagacacgtttgcgatggttgttcactgttctgttgtgaacatgttgatcgagatattcctctccggaatgagctttgagcagtcgctttcttccaggctggtggcgatacctgtcaacattttgattgcatggccatacggcgtttaccgcgatctgattatgcgcgtcgcgcgtaaggcaagcccggcgggatgggccaaaaacctggcggatgtattggcttatgtcacctttcagtcacccgtttatattatcatcttgctgaccgtcggcgccggctggcatcagatagtggccgccgtgagttcaaacattgttgtttcaatgttaatgggcgcggtttatggctacttcctgaattattgtcgtcgcctgtttaaagtgagcagctatcatcaggctaaggcataa

SEQ ID NO: 146309 - protein, 149 aa, Salmonella enterica subsp. enterica serovar Typhi Ty2
MFSPQSRLRHAVADTFAMVVHCSVVNMLIEIFLSGMSFEQSLSSRLVAIPVNILIAWPYGVYRDLIMRVARKASPAGWAKNLADVLAYVTFQSPVYIIILLTVGAGWHQIVAAVSSNIVVSMLMGAVYGYFLNYCRRLFKVSSYHQAKA

SEQ ID NO: 146310 - DNA, 450 bp, Vibrio vulnificus YJ016
  CDS (1)..(450): transl_table=11
atgaaatctcgtgcgccattttgtatccgtcatgcggcagccgatacttttgctatggtggttttttgctttatctcagggatgattatcgagattctgatttctggaatgactttccagcaatctctggcatcaagaacgttatctattccggttaacatcgcgatcgcgtggccttatggtgtgtttcgtgattgggttcttcgccaaggtgcgcgtgtatcgaccagtggactgatgaaaaacgtatccgatttagtggcgtatgtgctttttcaatcgccagtctacgccggtattttgcttgcggtaggcgcatcgacagagcagatcatcaccgcagtgaccagcaatgcgattatctcttgcggtatgggcgttctgtacggctacttcctagatatgtgccgccgttggtttaaggttcctggttactatcagcaagcataa

SEQ ID NO: 146311 - protein, 149 aa, Vibrio vulnificus YJ016
MKSRAPFCIRHAAADTFAMVVFCFISGMIIEILISGMTFQQSLASRTLSIPVNIAIAWPYGVFRDWVLRQGARVSTSGLMKNVSDLVAYVLFQSPVYAGILLAVGASTEQIITAVTSNAIISCGMGVLYGYFLDMCRRWFKVPGYYQQA

SEQ ID NO: 146312 - DNA, 438 bp, Erwinia carotovora subsp. atroseptica SCRI1043
  CDS (1)..(438): transl_table=11
atgttttccccgacgtcacgattgcgaagcgccaccgctgatacctttgcgctcgttgtctactgtttcatcatcggtatggcgattgaaatcatgctttccgggatgagctttgagcagtcactgtcttcacgtctgctgtctatccccgtcaatattgctattgcctggccatacggactttatcgcgatcgcgtgttgaatgttgccaaacgccacggtggtgaccatttcttcgtgcgcagcgttgccgatctgtttgcgtatgtcagttttcaatcccctgtttatgctgcgattctctgggttatcggggcaagtcctgcacaaatcctgaccgcagtcaccagcaacctggtgatatcaatggtgatgggcgtaacgtatggctattttctggaatattgccgtcggctatttcgagtcgcattgccataa

SEQ ID NO: 146313 - protein, 145 aa, Erwinia carotovora subsp. atroseptica SCRI1043
MFSPTSRLRSATADTFALVVYCFIIGMAIEIMLSGMSFEQSLSSRLLSIPVNIAIAWPYGLYRDRVLNVAKRHGGDHFFVRSVADLFAYVSFQSPVYAAILWVIGASPAQILTAVTSNLVISMVMGVTYGYFLEYCRRLFRVALP

SEQ ID NO: 146314 - DNA, 441 bp, Yersinia pseudotuberculosis IP 32953
  CDS (1)..(441): transl_table=11
atgttttcaactgggcctcgttggcgtagcgctgtagccgatacctttgcactcgtcgtgtattgttttgtcatcggcatggcaattgaagtggttatctcgggaatgaccttccggcaatcgctttcttcgcgcctgctctcaatacccgtcaatattcttattgcctggccttatggtatgtatcgagatgcttttatacgttttgcccagcgccatgctggccagcgtttttgggcacgtaatttggctgatctattagcttatgtcagtttccagtcaccggtttatgccatgattttgtggtcggttggggcagatttcgagcaaatgatatcagcggtcgccagtaacgccgtggtttcaatggttatgggggtggcctacggctattttttggaatattgtcgccggctattccgcgttgcaggttatgtttga

SEQ ID NO: 146315 - protein, 146 aa, Yersinia pseudotuberculosis IP 32953
MFSTGPRWRSAVADTFALVVYCFVIGMAIEVVISGMTFRQSLSSRLLSIPVNILIAWPYGMYRDAFIRFAQRHAGQRFWARNLADLLAYVSFQSPVYAMILWSVGADFEQMISAVASNAVVSMVMGVAYGYFLEYCRRLFRVAGYV

SEQ ID NO: 146316 - DNA, 408 bp, Rhodobacter sphaeroides 2.4.1
  CDS (1)..(408): transl_table=11
atgcgcctcttcatcatcgacaccgttgccacggtcatcttcttcaccgcggtagcgaccttctcggagttgctcatcgcaggaatggcaccgtccgaggttctggccacacgtcttctcatggtgccagtcatggttttgacgggcagaccctacacgcgatggcgcgattggctggtgaggcgaacggccccccggaaccgctggagcgcctttctgaccgacattctggcattcctgtcgttccaggcgccggtctatggcgccacgcttctcatcgcgggagcgagcttcgctgaagccggaacggccatcgggtcggccattattctcatgatcctgctggcgcggcctttcggcctgtttgtcgaatggacgagaagcctcttcggggtcgagctgtcctga

SEQ ID NO: 146317 - protein, 135 aa, Rhodobacter sphaeroides 2.4.1
MRLFIIDTVATVIFFTAVATFSELLIAGMAPSEVLATRLLMVPVMVLTGRPYTRWRDWLVRRTAPRNRWSAFLTDILAFLSFQAPVYGATLLIAGASFAEAGTAIGSAIILMILLARPFGLFVEWTRSLFGVELS

SEQ ID NO: 146318 - DNA, 444 bp, Photobacterium sp. SKA34
  CDS (1)..(444): transl_table=11
atgtctgtaattaagtttcctttaaagtatagaaatgccgcagcagatacttttgcgatggttgtgtttagctttgccgctggcatgatgattgagatctttatttcaggtatgtcgtttgagcagtcgttagcatcgcgaacattatctatccctgttaatattgcgattgcttggccttatggcatgtttagagattacatgatccggacaggtatgcgtttttcaacaaaacgttggatgaaaggcttctctgatatggtggcctatgtgttatttcaatcaccgatctatgcttgcatattatttgttgtaggggcgaactttgatcagattgtcactgcggtaaccagtaatatcgtggtttctggtgcgttgggcattgtttatgggcagtttttagaaatgtgtcgccgcatgttccgcgtaccgaatgctgcatga

SEQ ID NO: 146319 - protein, 147 aa, Photobacterium sp. SKA34
MSVIKFPLKYRNAAADTFAMVVFSFAAGMMIEIFISGMSFEQSLASRTLSIPVNIAIAWPYGMFRDYMIRTGMRFSTKRWMKGFSDMVAYVLFQSPIYACILFVVGANFDQIVTAVTSNIVVSGALGIVYGQFLEMCRRMFRVPNAA

SEQ ID NO: 146320 - DNA, 450 bp, Vibrio sp. Ex25
  CDS (1)..(450): transl_table=11
atgaagtctcgcggaccattttgtattcgtcacgccgcagcggatacctttgctatggttgttttttgctttatcacagggatgattgtcgagattttgatttcagggatgacgtttgagcaatctttagcatcacgtacactatctattccagtgaatattgctattgcttggccgtatggcgtttttcgtgattgggtgctacgtcagggtaacaaggtatcgccgtcttcatttatgaaaaacgtatctgatctggtcgcttatgtgctttttcagtctccagtttatgcaggaattttattcgcagttggtgcgtctacagaccaaatagtgaccgcggtgacaagtaacgccattatttcttgcggtatgggtgtgttgtatgggtacttcttggacatgtgccgccgttggttccgtgttcccggttattctcaaagtatctaa

SEQ ID NO: 146321 - protein, 149 aa, Vibrio sp. Ex25
MKSRGPFCIRHAAADTFAMVVFCFITGMIVEILISGMTFEQSLASRTLSIPVNIAIAWPYGVFRDWVLRQGNKVSPSSFMKNVSDLVAYVLFQSPVYAGILFAVGASTDQIVTAVTSNAIISCGMGVLYGYFLDMCRRWFRVPGYSQSI

SEQ ID NO: 146322 - DNA, 21 bp, Artificial sequence
  primer
atgttctcaccgcagtcacgc

SEQ ID NO: 146323 - DNA, 25 bp, Artificial sequence
  primer
ttaggcttttacctgctggtaacgg

SEQ ID NO: 146324 - protein, 134 aa, Artificial sequence
  consensus sequence
  Variant (2)..(2): Xaa in position 2 is any amino acid
  Variant (4)..(4): Xaa in position 4 is any amino acid
  Variant (10)..(10): Xaa in position 10 is any amino acid
  Variant (13)..(13): Xaa in position 13 is any amino acid
  Variant (15)..(18): Xaa in position 15 to 18 is any amino acid
  Variant (20)..(20): Xaa in position 20 is any amino acid
  Variant (23)..(25): Xaa in position 23 to 25 is any amino acid
  Variant (29)..(29): Xaa in position 29 is any amino acid
  Variant (31)..(31): Xaa in position 31 is any amino acid
  Variant (35)..(35): Xaa in position 35 is any amino acid
  Variant (38)..(40): Xaa in position 38 to 40 is any amino acid
  Variant (46)..(46): Xaa in position 46 is any amino acid
  Variant (53)..(54): Xaa in position 53 to 54 is any amino acid
  Variant (57)..(59): Xaa in position 57 to 59 is any amino acid
  Variant (61)..(73): Xaa in position 61 to 73 is any amino acid
  Variant (74)..(76): Xaa in position 74 to 76 is any or no amino acid
  Variant (78)..(79): Xaa in position 78 to 79 is any amino acid
  Variant (83)..(83): Xaa in position 83 is any amino acid
  Variant (90)..(91): Xaa in position 90 to 91 is any amino acid
  Variant (94)..(95): Xaa in position 94 to 95 is any amino acid
  Variant (99)..(101): Xaa in position 99 to 101 is any amino acid
  Variant (103)..(105): Xaa in position 103 to 105 is any amino acid
  Variant (108)..(108): Xaa in position 108 is any amino acid
  Variant (111)..(113): Xaa in position 111 to 113 is any amino acid
  Variant (115)..(116): Xaa in position 115 to 116 is any amino acid
  Variant (119)..(120): Xaa in position 119 to 120 is any amino acid
  Variant (126)..(127): Xaa in position 126 to 127 is any amino acid
  Variant (131)..(131): Xaa in position 131 is any amino acid
  Variant (133)..(133): Xaa in position 133 is any amino acid
RXAXADTFAXVVXCXXXXMXIEXXXSGMXFXQSLXSRXXXIPVNIXIAWPYGXXRDXXXRXXXXXXXXXXXXXXXXDXXAYVXFQSPVYXXILXXVGAXXXQXXXAVXSNXXXSXXMGXXYGYFLXXCRRXFXV

SEQ ID NO: 146325 - protein, 62 aa, Artificial sequence
  protein pattern
  Variant (2)..(2): Xaa in position 2 is any amino acid
  Variant (3)..(3): Xaa in position 3 is any or no amino acid
  Variant (5)..(5): Xaa in position 5 is any or no amino acid
  Variant (7)..(7): Xaa in position 7 is any or no amino acid
  Variant (12)..(12): Xaa in position 12 is Leu or Met
  Variant (15)..(15): Xaa in position 15 is Phe, His or Tyr
  Variant (17)..(17): Xaa in position 17 is any amino acid
  Variant (18)..(18): Xaa in position 18 is Ile or Val
  Variant (19)..(19): Xaa in position 19 is any amino acid
  Variant (20)..(20): Xaa in position 20 is Gly or Asn
  Variant (22)..(22): Xaa in position 22 is any amino acid
  Variant (23)..(23): Xaa in position 23 is Ile or Val
  Variant (25)..(25): Xaa in position 25 is Ile or Val
  Variant (26)..(26): Xaa in position 26 is Phe, Leu, Met or Val
  Variant (27)..(27): Xaa in position 27 is Ile, Leu or Val
  Variant (31)..(31): Xaa in position 31 is Ser or Thr
  Variant (33)..(33): Xaa in position 33 is Glu, Gln or Arg
  Variant (36)..(36): Xaa in position 36 is Phe or Leu
  Variant (37)..(37): Xaa in position 37 is any amino acid
  Variant (40)..(40): Xaa in position 40 is any amino acid
  Variant (41)..(41): Xaa in position 41 is Leu or Val
  Variant (42)..(42): Xaa in position 42 is Ala or Ser
  Variant (48)..(48): Xaa in position 48 is Ala, Ile or Leu
  Variant (51)..(51): Xaa in position 51 is any amino acid
  Variant (55)..(55): Xaa in position 55 is Ile, Leu, Met or Val
  Variant (56)..(56): Xaa in position 56 is Phe or Tyr
  Variant (59)..(60): Xaa in position 59 to 60 is any amino acid
  Variant (61)..(61): Xaa in position 61 is Ile, Leu or Met
  Variant (62)..(62): Xaa in position 62 is Asn or Arg
RXXAXAXDTFAXVVXCXXXXMXXEXXXSGMXFXQSXXSRXXXIPVNIXIAXPYGXXRDXXXX

SEQ ID NO: 146326 - protein, 57 aa, Artificial sequence
  protein pattern
  Variant (2)..(2): Xaa in position 2 is Ile, Leu, Met or Val
  Variant (3)..(3): Xaa in position 3 is Leu or Val
  Variant (4)..(4): Xaa in position 4 is Ala or Ser
  Variant (7)..(7): Xaa in position 7 is any amino acid
  Variant (12)..(12): Xaa in position 12 is Ile or Val
  Variant (14)..(14): Xaa in position 14 is Ala, Ile or Val
  Variant (15)..(15): Xaa in position 15 is any amino acid
  Variant (18)..(18): Xaa in position 18 is any amino acid
  Variant (19)..(19): Xaa in position 19 is Ala, Ser, Thr or Val
  Variant (23)..(23): Xaa in position 23 is Asp, Gly, Asn or Ser
  Variant (24)..(24): Xaa in position 24 is any amino acid
  Variant (25)..(25): Xaa in position 25 is Asp, Glu or His
  Variant (27)..(27): Xaa in position 27 is any or no amino acid
  Variant (29)..(29): Xaa in position 29 is any amino acid
  Variant (30)..(30): Xaa in position 30 is any or no amino acid
  Variant (33)..(33): Xaa in position 33 is Ala, Ser or Thr
  Variant (34)..(34): Xaa in position 34 is Ser or Thr
  Variant (36)..(36): Xaa in position 36 is Ala, Ile or Leu
  Variant (37)..(37): Xaa in position 37 is Ala, Ile, Leu or Val
  Variant (38)..(38): Xaa in position 38 is Ile or Val
  Variant (40)..(41): Xaa in position 40 to 41 is any amino acid
  Variant (42)..(42): Xaa in position 42 is Leu or Met
  Variant (44)..(44): Xaa in position 44 is Ala, Ile or Val
  Variant (45)..(45): Xaa in position 45 is Ala, Leu or Val
  Variant (48)..(48): Xaa in position 48 is any amino acid
  Variant (51)..(51): Xaa in position 51 is Asp, Glu or Asn
  Variant (52)..(52): Xaa in position 52 is any amino acid
  Variant (56)..(56): Xaa in position 56 is any amino acid
DXXXYVXFQSPXYXXILXXVGAXXXQXIXXAVXXNXXXSXXXGXXYGXFLXXCRRXF

SEQ ID NO: 146327 - DNA, 357 bp, Escherichia coli
  CDS (1)..(357): transl_table=11
atgaaaaccaaagttgctgctatttatggcaagcgggatgtccgtctgcgcgtatttgaactgccagaaattaccgataatgaattactggtgagtgtaatttctgacagcgtctgtttatcgacctggaaagcggcgttactcggtagtgaacataaacgcgtacccgacgatttagaaaatcatccggtcattaccgggcatgaatgtgccggggttattgtcgaagtgggtaaaaatctcactggcaaatataaaaaggccagcgttttgtattgcaaccggcgatggggttaccaagcggatattcagcgggctacagctacgaatattttggcggcaatgccacttatataa

SEQ ID NO: 146328 - protein, 118 aa, Escherichia coli
MKTKVAAIYGKRDVRLRVFELPEITDNELLVSVISDSVCLSTWKAALLGSEHKRVPDDLENHPVITGHECAGVIVEVGKNLTGKYKKASVLYCNRRWGYQADIQRATATNILAAMPLI

SEQ ID NO: 146329 - DNA, 1242 bp, Escherichia coli O157:H7 EDL933
  CDS (1)..(1242): transl_table=11
atgaggtggtttatgaaaacaacagctctgcgtctttatggtaaacgtgatttacgcctggaaacctttgaccttcctgaaatgcaggaggatgaaatcctcgcgacggtggtcactgacagcctgtgcctctcttcctggaaagaggccaatctgggtgaaaaccataaaaaagtacccgacgatgtggcgaccaacccaatcatcatcggccacgagttttgcggcgatattctggccgtgggtaaaaagtggcagcacaaattccagccgggtcagcgttatgtgattcaggccaacctgcaactccccgaccgcccggactgccccggctactccttcccgtgggtaggcggcgaggccacgcatgtggttattcccaacgaggtcatggaacaagattgcctgctggcatacgacggcgaaacctattttgaaggctcgctggttgaaccgctttcctgcgtgattggcgcgttcaacgccaactatcatcttcaggaaggtagttataaccacacgatggggattcgcccgcaagggcgcatgctgatcctcggcggcaccggaccaatgggactgttggcgattgattatgcgctacatggacccgttaacccgtcgctgctcgtcattaccgataccgacaacgataaattgagttatgcgcgcaagcactatccatcagaaccgcaaacactgattcattatctcaatgccgccgatgcagcatttgatacgctaatggcgctgagtggcggtcacggcttcgatgatattttcgtctttgtgcctaatgaaggactggtgactctcgcctcttccttgctggcgacagatggttgcctgaatttcttcgccggaccgcaggataaacatttcagcgcgccaattaatttctacgatgtgcattatgcatttacccactacgtgggcacgtcaggcggcaataccgacgacatgcgcgcagcggtcaaattgattgaagagaaaaaagtgcaggccgcaaaagtggtaacacatattcttgggctgaatgccgcgggcgaaaccacgcttgaattgcctgccgtcggcggcggcaaaaagctggtgtataccgggaaatacctgccgctgacgtcactcacgcagattcaggatcaagcactggcggcgattctggcgcgtcatcaggggatctggtccggtgaggcggagcaatatctgctcactcatgcagaggcaatttcccatgattaa

SEQ ID NO: 146330 - protein, 413 aa, Escherichia coli O157:H7 EDL933
MRWFMKTTALRLYGKRDLRLETFDLPEMQEDEILATVVTDSLCLSSWKEANLGENHKKVPDDVATNPIIIGHEFCGDILAVGKKWQHKFQPGQRYVIQANLQLPDRPDCPGYSFPWVGGEATHVVIPNEVMEQDCLLAYDGETYFEGSLVEPLSCVIGAFNANYHLQEGSYNHTMGIRPQGRMLILGGTGPMGLLAIDYALHGPVNPSLLVITDTDNDKLSYARKHYPSEPQTLIHYLNAADAAFDTLMALSGGHGFDDIFVFVPNEGLVTLASSLLATDGCLNFFAGPQDKHFSAPINFYDVHYAFTHYVGTSGGNTDDMRAAVKLIEEKKVQAAKVVTHILGLNAAGETTLELPAVGGGKKLVYTGKYLPLTSLTQIQDQALAAILARHQGIWSGEAEQYLLTHAEAISHD

SEQ ID NO: 146331 - DNA, 1035 bp, Sulfolobus tokodaii str. 7
  CDS (1)..(1035): transl_table=11
atgaaagctatgttgattaaggaatttggaaagccgttaaaattagaagatgttgatgttcctaagcttaagcaaaatcaagttctcattagagtaagaagtgcgggcgtatgtcatactgatgtatcagtaagaagtggtacaatatataagagagtatctgtaaatccgcctaaactaccctttattcctggacatgaaatagcaggaataatagaagatgttggagatgaggttataggatttacaaaaggagataaggttatagtaaatccttggcaaggagaggggaattgctactactgtaagataggagaagaacaatattgtgattttcctacatggttaggaataagtactaatggtggttatgctgaatatgtagtttctaactttaactatgtatataaagtaaataagttatcagtagaggaggcttcacctttagcttgtgcgggagttacggcttatagggctgctagactagccaatttaactccatctaaatatgttatggttataggtgcgggaggcggattaggaagtttcggagttcaaatagttaaagcattatatggttctactgtgatagcagtagacatcaatgaagagggattaaaattagcgtcaagattaggatctgactatgtcatgaatgctaaagatcaaagtttacttcaagaaatattgaggataactgagggaagaggagttgatgcaatattagactttgtgggatctgagagtactacaaaaaactattatacaatattagcaaaattaggtagatacattaaagttggtacttttggtggaggtttgccacaagaagctgggttaaagttacactcaatgggttgggaatttattggtactctaactggtaatagaagagattttctagaaattataaaattggctgaaagtggaaagataagaattgttataaccaaattatcgttagaagaagctaatgaagctttaaataatttagaatctaataaagtaacgggaaggcaagtattaataccttaa

SEQ ID NO: 146332 - protein, 344 aa, Sulfolobus tokodaii str. 7
MKAMLIKEFGKPLKLEDVDVPKLKQNQVLIRVRSAGVCHTDVSVRSGTIYKRVSVNPPKLPFIPGHEIAGIIEDVGDEVIGFTKGDKVIVNPWQGEGNCYYCKIGEEQYCDFPTWLGISTNGGYAEYVVSNFNYVYKVNKLSVEEASPLACAGVTAYRAARLANLTPSKYVMVIGAGGGLGSFGVQIVKALYGSTVIAVDINEEGLKLASRLGSDYVMNAKDQSLLQEILRITEGRGVDAILDFVGSESTTKNYYTILAKLGRYIKVGTFGGGLPQEAGLKLHSMGWEFIGTLTGNRRDFLEIIKLAESGKIRIVITKLSLEEANEALNNLESNKVTGRQVLIP

SEQ ID NO: 146333 - DNA, 1230 bp, Escherichia coli CFT073
  CDS (1)..(1230): transl_table=11
atgaaaacaacagctctgcgtctttatggcaaacgtgacctgcgtctggaaacctttgaccttcctgaaatgcaggaggatgaaatcctcgcaacggtggtcactgacagcctgtgcctctcttcctggaaagaggccaatctgggtgaaaaccataaaaaagtacccgacgatgtggcgaccaatcccatcatcatcggccacgaattttgcggcgatattctggccgtgggtaaaaagtggcagcacaaattccagccgggtcagcgttatgtgattcaggccaacctgcaactccccgaccgcccggattgccccggctactccttcccgtgggtaggcggcgaagcgacgcatgtggttattcccaacgaggtcatggaacaagattgcctgctggcatacgacggcgaaacctattttgaaggctcgctggttgaaccgctttcctgcgtgattggcgcgttcaacgccaactatcatcttcaggaaggtagttataaccacacgatggggattcgcccgcaagggcgcacgctgatcctcggcggcaccggcccgatggggctgctggcgattgattatgcgttgcatggaccggttaacccgtcgctgctcgtcattaccgataccgacaacgacaaattgagttatgcacgcaagcactatccatcagaaccgcaaacactgattcattatctcaatgccgccgatgcagcatttgatacgttaatggcactgagtggcggtcacggcttcgatgatattttcgtctttgtgcctaatgaaggactggtgactctcgcctcttccttgctggcaacagatggttgtctgaatttcttcgccggaccgcaggataagcacttcagcgcgccaattaatttctacgatgtgcattatgcatttacccactacgtgggcacgtcaggcggcaatatcgacgacatgcgcgcagcggtcaaattgattgaagagaaaaaagtgcaggccgcaaaagtggtaacacatattcttgggctgaatgccgcgggcgaaaccacgcttgaattgcctgccgtcggcggcggcaaaaagctggtgtataccgggaaattcctgccgctgacgtcactcacgcagattcaggatcaagcactggcggcgattctggcgcgtcatcaggggatctggtccggtgaggcggagcaatacctgctcgcccatgcagaggcaatttcccatgattaa

SEQ ID NO: 146334 - protein, 409 aa, Escherichia coli CFT073
MKTTALRLYGKRDLRLETFDLPEMQEDEILATVVTDSLCLSSWKEANLGENHKKVPDDVATNPIIIGHEFCGDILAVGKKWQHKFQPGQRYVIQANLQLPDRPDCPGYSFPWVGGEATHVVIPNEVMEQDCLLAYDGETYFEGSLVEPLSCVIGAFNANYHLQEGSYNHTMGIRPQGRTLILGGTGPMGLLAIDYALHGPVNPSLLVITDTDNDKLSYARKHYPSEPQTLIHYLNAADAAFDTLMALSGGHGFDDIFVFVPNEGLVTLASSLLATDGCLNFFAGPQDKHFSAPINFYDVHYAFTHYVGTSGGNIDDMRAAVKLIEEKKVQAAKVVTHILGLNAAGETTLELPAVGGGKKLVYTGKFLPLTSLTQIQDQALAAILARHQGIWSGEAEQYLLAHAEAISHD

SEQ ID NO: 146335 - DNA, 1053 bp, Staphylococcus epidermidis ATCC 12228
  CDS (1)..(1053): transl_table=11
atgaaagcagcagtatggtatggacaaaaggatgtacgcgttgaagatcgcgaacccaaagcaataaaagacaatgaagtgcaagttaaagtctcttgggccggtatctgtggtactgatttacatgaatatttggaaggacctatctttatttcaactgatcaaccggacccactacttggtcaaactgcacctgtgactttaggtcatgaattttcaggtgtcatagaaaatgttggtaaagacgtatcacgttttaaaaaaggggatcgtgtggtagttaatccaacagtgtctaaaagagaaaagccggaaaatgttgacttgtatgatggttattcatttataggactaggttctgatggtgcatttgccgagtttactaatgctcctgaaacaaatgtttatcatctaccagataatgtttcagcacgagaaggtgctcttgtagaaccaacagccgttgctgtccaagcagttaaagaaggcgaattattattcggtgatactgtagcagtatttggcgctgggccaattggtttgttaactattgttgcagcaaaagctgctggtgcaagtaaaatatttgtctttgacttatcagaagaacgtttagcgaaagctaaaagtgtcggtgcgactcacgtgtataactcaggtaacgtcgatccagtacaaacggtttatgaacacactgacaacggtgtagatgtgtcatttgaagttgctggtgtaggtattactttacaacaatctattgaagtaacacgtccgcgtggtactgctgtcatcgtatcaatcttcggtcatcccgtagaattcaatccattattacaaatgaataaaggtgtcaagttaacaactacaattgcttatacaccaactacattccaacaaacaatagatttaatcgctaacggtagcttaaatgttaaagacgtcgtaacagatcaaattgaattagagaatattgttgaaagtggcttcaatcaacttgtaaacgataaatctcaagctaaaattttagtccgtttaaatggcgaccaaaaataa

SEQ ID NO: 146336 - protein, 350 aa, Staphylococcus epidermidis ATCC 12228
MKAAVWYGQKDVRVEDREPKAIKDNEVQVKVSWAGICGTDLHEYLEGPIFISTDQPDPLLGQTAPVTLGHEFSGVIENVGKDVSRFKKGDRVVVNPTVSKREKPENVDLYDGYSFIGLGSDGAFAEFTNAPETNVYHLPDNVSAREGALVEPTAVAVQAVKEGELLFGDTVAVFGAGPIGLLTIVAAKAAGASKIFVFDLSEERLAKAKSVGATHVYNSGNVDPVQTVYEHTDNGVDVSFEVAGVGITLQQSIEVTRPRGTAVIVSIFGHPVEFNPLLQMNKGVKLTTTIAYTPTTFQQTIDLIANGSLNVKDVVTDQIELENIVESGFNQLVNDKSQAKILVRLNGDQK

SEQ ID NO: 146337 - DNA, 1272 bp, Vibrio parahaemolyticus RIMD 2210633
  CDS (1)..(1272): transl_table=11
atggtaaaaacaacggcagcggttatctgtggtgagaaaaacgttcaattaagaacctttgatttaccaaacatttcagccgacgaacttctggttaaaaacatttcaaacagcatttgtctatccacttacaaagcagcattgttaggtagcaaacacaaacgcgttcctgaaaacattgacgaagtgccagtgatgacaggtcatgaatacgcaggtgtgattgttgaagtcggtgagaatctaaaagatcaattcaaagctggtgactactttgttttgcaacctgccatgggcttgccaacaggctactcagcaggctacagctatgagacatttggtggcaacgcgacgtattccgttattcctaaaatcgctatcgacctaggttgcgtactgccttaccacggcgattactttgctgatgcgtctctggctgagccaatgtcttgcattattggtgcgtaccacgcgagctaccacaccacgcaatacgtgtacgagcacgatatgggcattaaagaaggtggtgcgttagcgcttttggcgtgtgctggcccaatggggattggtgcaattgactacgcgatcaacggccctgtaaagccaaaactgatcgtggtgacggacatcgacgctgcgcgtttagaccgagctgaaagtctcattcccgttgcaaaagctaaagagcagggcgtagaactgcactacgtgaataccgctcaaatagacgatccggtcgcgtatctcaaagcactcaacggtggcaaaggctacgacgatgtaatggtctacgcggcggttgctcaagtgctagaacaagccgatgagctacttggcaatgatggctgcctcaacttctttgctggcccaacggataagaatttcaaagtgccgtttaacttctacaacgtgcattacgaatcaacccatattgtagggacgtccggtggttcaaagggtgacatggtggaatctatagagctttcctcgcaaggcaagatcaatccgtctttcatgatcacacatgttggtggcttacaagctgcgccacatacgattctgaatcaattggatattccgggcggtaagaagttgatttacccacatattgacctgccattgacggcgattgatgactttttatcgttggcagaccaagacccgttcttttcggaactcgatgcgattttgtgcgcgaacaactatgtgtggaacgcgcatgcagaaaaagcgttacttgagttttatgacgtgagcttaacggtttag

SEQ ID NO: 146338 - protein, 423 aa, Vibrio parahaemolyticus RIMD 2210633
MVKTTAAVICGEKNVQLRTFDLPNISADELLVKNISNSICLSTYKAALLGSKHKRVPENIDEVPVMTGHEYAGVIVEVGENLKDQFKAGDYFVLQPAMGLPTGYSAGYSYETFGGNATYSVIPKIAIDLGCVLPYHGDYFADASLAEPMSCIIGAYHASYHTTQYVYEHDMGIKEGGALALLACAGPMGIGAIDYAINGPVKPKLIVVTDIDAARLDRAESLIPVAKAKEQGVELHYVNTAQIDDPVAYLKALNGGKGYDDVMVYAAVAQVLEQADELLGNDGCLNFFAGPTDKNFKVPFNFYNVHYESTHIVGTSGGSKGDMVESIELSSQGKINPSFMITHVGGLQAAPHTILNQLDIPGGKKLIYPHIDLPLTAIDDFLSLADQDPFFSELDAILCANNYVWNAHAEKALLEFYDVSLTV

SEQ ID NO: 146339 - DNA, 1230 bp, Shigella flexneri 2a str. 2457T
  CDS (1)..(1230): transl_table=11
atgaaaacaacagctctgcgtctttatggtaaacgtgatttacgcctggaaacctttgaccttcctgaaatgcaggaggatgaaatcctcgcaacggtggtcactgacagcctgtgcctctcttcctggaaagaggccaatctgggtgaaaaccataaaaaagtacccgacgatgtgacgaccaacccaatcatcatcggccacgaattttgcggcgatattctggccgtgggtaaaaagtggcagcacaaattccagccgggtcagcgttatgtgattcaggccaacctgcaactccccgaccgcccggattgccccggctactccttcccgtgggtagacggcgaagcgacgcatgtggttattcccaacgaggtcatggaacaatattgcctgctggcatacgacggcgaaacctattttgaaggctcactggttgaaccgctttcctgcgtgattggcgcgttcaacgccaactatcatcttcaggaaggtagttataaccacacgatggggattcgcccgcaagggcacacgctgatcctcggcggcaccggaccaatgggactgttggcgattgattatgcgctgcatggaccagttaacccgtcgctgctcgtcattaccgataccgacaacgacaaattgagttatgcgcgcaagcactatccatcagaaccgcaaacactgattcattatctcaatgccaccgatgcagcatttgatacgttaatggcgctgagtggcggtcacggcttcgatgatattttcgtctttgtgcctaatgaaggactggtgactctcgcctcttccttgctggcgacagatggttgcctgaatttcttcgccggaccgcaggataaacatttcagcgcgccaattaatttctacgatgtgcattatgcatttacccactacgtgggcacgtcaggcggcaataccgacgacatgcgcgcggcggtcaaactgatcgaagagaaaaaagtgcaggccgcaaaagtggtaacacatattcttgggctgaatgccgcgggcgaaaccacgcttgaattgcctgccgtcggcggcggcaaaaagctggtgtataccgggaaatacctgccgctgacgtcactcacgcagattcaggatcaagcactggcggcgattctggcgcgtcatcaggggatctggtccggtgaggtggagcaatacctgctcgcccatgcagaggcaatttcccatgattaa

SEQ ID NO: 146340 - protein, 409 aa, Shigella flexneri 2a str. 2457T
MKTTALRLYGKRDLRLETFDLPEMQEDEILATVVTDSLCLSSWKEANLGENHKKVPDDVTTNPIIIGHEFCGDILAVGKKWQHKFQPGQRYVIQANLQLPDRPDCPGYSFPWVDGEATHVVIPNEVMEQYCLLAYDGETYFEGSLVEPLSCVIGAFNANYHLQEGSYNHTMGIRPQGHTLILGGTGPMGLLAIDYALHGPVNPSLLVITDTDNDKLSYARKHYPSEPQTLIHYLNATDAAFDTLMALSGGHGFDDIFVFVPNEGLVTLASSLLATDGCLNFFAGPQDKHFSAPINFYDVHYAFTHYVGTSGGNTDDMRAAVKLIEEKKVQAAKVVTHILGLNAAGETTLELPAVGGGKKLVYTGKYLPLTSLTQIQDQALAAILARHQGIWSGEVEQYLLAHAEAISHD

SEQ ID NO: 146341 - DNA, 1023 bp, Bacillus cereus E33L
  CDS (1)..(1023): transl_table=11
atgaaagccgcagtgtggtatggtgaaaaagatattcgtatcgaggaaagagaaacaaaagagttacaacccaatgatgtaaaagttaaagtggcatgggctggtatttgtggttctgatttacatgcatacttgcatccggattcagtaccaatgaataagaatacggtactcggacatgaattttctggtgaaattgtagaagttggttctcatgtaacaaaatttaaagaaggggacagagtatgtatttatccaatgatgcttaaagatccttcaaatgctgaaactgaacgttttatcactttagacgcagtaggtgcacaaatcgacggagggtttgctgaatacgtgatacttccacaaaaaacgatttttaaaattccagataatttatcactagaagtagcagcaatggtagaaccagcagctgtatcattccaatcaattaaggattcaaatgttgaagaaggagatactgttgttgtctatggagcaggtcctattggactatttgctgttttaggtgcaaaagctgctggtgcttctaatattattgttgttgatttatttgatagtcggcttggcaaagcaaccgaagtgggtgcgacgcatacttttaatgctaaagaagtaaaccctgtagaagaaattcgtaaattattcccagatggagcggatgtgacaattgaagctgcaggtgttgagtcaacatttaatcaagccattcaatcaactaaagttcgtggcacaatgatggttatcagcttccatactcaagatatccaatttaatgctcctgcttccttactctttagtggcgtaaaattaatgggatctgtggggtacagtaatgaaacttataatgaagtcattcaattacttgctaatggaagattacctgcgcaatccattattacaagtaaagttgatatagataatattgctgaacaaggttttgaagcgttaattcatgataaagcgcaagcaaaaattttagttaagttaagcggcgcacattaa

SEQ ID NO: 146342 - protein, 340 aa, Bacillus cereus E33L
MKAAVWYGEKDIRIEERETKELQPNDVKVKVAWAGICGSDLHAYLHPDSVPMNKNTVLGHEFSGEIVEVGSHVTKFKEGDRVCIYPMMLKDPSNAETERFITLDAVGAQIDGGFAEYVILPQKTIFKIPDNLSLEVAAMVEPAAVSFQSIKDSNVEEGDTVVVYGAGPIGLFAVLGAKAAGASNIIVVDLFDSRLGKATEVGATHTFNAKEVNPVEEIRKLFPDGADVTIEAAGVESTFNQAIQSTKVRGTMMVISFHTQDIQFNAPASLLFSGVKLMGSVGYSNETYNEVIQLLANGRLPAQSIITSKVDIDNIAEQGFEALIHDKAQAKILVKLSGAH

SEQ ID NO: 146343 - DNA, 1053 bp, Staphylococcus epidermidis RP62A
  CDS (1)..(1053): transl_table=11
atgaaagcagcagtatggtatggacaaaaggatgtacgcgttgaagatcgcgaacccaaagcaataaaagacaatgaagtgcaagttaaagtctcttgggccggtatctgtggtactgatttacatgaatatttggaaggacctatctttatttcaactgatcaaccggacccactacttggtcaaactgcacctgtgactttaggtcatgaattttcaggtgtcgtagaaaatgttggtaaagacgtatcacgttttaaaaaaggggatcgtgtggtagttaatccaacagtgtctaaaagagaaaagccggaaaatgttgacttgtatgatggttattcatttataggactaggttctgatggtgcatttgccgagtttactaatgctcctgaaacaaatgtttatcatctaccagataatgtttcagcacgagaaggtgctcttgtagaaccaacagccgttgctgtccaagcagttaaagaaggcgaattattattcggtgatactgtagcagtatttggcgctgggccaattggtttgttaactattgttgcagcaaaagctgctggtgcaagtaaaatatttgtctttgacttatcagaagaacgtttagcgaaagctaaaagtgtcggtgcgactcacgtgtataactcaggtaacgtcgatccagtacaaacggtttatgaacatactgacaacggtgtagatgtgtcatttgaagttgctggtgtaggtattactttacaacaatctattgaagtaacacgtccacgtggtactgctgtcatcgtatcaatcttcggtcatcccgtagaattcaatccattattacaaatgaataaaggtgtcaagttaacaactacaattgcttatacaccaactacattccaacaaacaatagatttaatcgctaacggtagcttaaatgttaaagacgtcgtaacagatcaaattgaattagataatattgttgaaagtggcttcaatcaacttgtaaacgataaatctcaagctaaaattttagtccgtttaaatggtgaccaaaaataa

SEQ ID NO: 146344 - protein, 350 aa, Staphylococcus epidermidis RP62A
MKAAVWYGQKDVRVEDREPKAIKDNEVQVKVSWAGICGTDLHEYLEGPIFISTDQPDPLLGQTAPVTLGHEFSGVVENVGKDVSRFKKGDRVVVNPTVSKREKPENVDLYDGYSFIGLGSDGAFAEFTNAPETNVYHLPDNVSAREGALVEPTAVAVQAVKEGELLFGDTVAVFGAGPIGLLTIVAAKAAGASKIFVFDLSEERLAKAKSVGATHVYNSGNVDPVQTVYEHTDNGVDVSFEVAGVGITLQQSIEVTRPRGTAVIVSIFGHPVEFNPLLQMNKGVKLTTTIAYTPTTFQQTIDLIANGSLNVKDVVTDQIELDNIVESGFNQLVNDKSQAKILVRLNGDQK

SEQ ID NO: 146345 - DNA, 1050 bp, Bacillus cereus E33L
  CDS (1)..(1050): transl_table=11
atgaaagcagcagtatggtacggacaaaaagatattcgcattgaggataaagaattaaaaccattaaaagataatgaagtgacagttcgtgtagcatgggcaggtatttgtggatctgatttacatgaatatcaagaaggaccggttttcgtacctgtagatgctccagatgagttaactggggaagtagctccaatcattatgggacatgaatttgcaggtgtagtagaaaaagttggttcagcagtaaaaaaatataaagttggtgatcgtgtagttgtcaatcctacaattacacatggtaacaaaccagaagacattgattgctatgatggttttagttttatcggtttacacggtgatggtggatttacaacctttgccaatgctcctgaacataatatttataaattacctgatactttaactttacaagatggtgcattagtagagccaactgctgtagcggttcaagcagttaaagaaggtggtatgcaatttggtgatactgtagctatctttggtgcaggtccaatcggtttattaacgacaattgcggcaaaagcagcaggtgcaagtaagattcttgtatttgacctatctgaaacacgtcttgaaaaggcaaaagaactgggcgcaactgaagtgtttaactctgggaaaataaatcctgttgaagcagtaaaacagcatgcccctaatggtgtggatgttacatttgaagtagcgggtgttgcaccaacttttaaatctgctatcgatgttacaagacctcgtggtacagttgttatcgtatcaatttttgctcattcaatcgaatggaatccaatgcaattgactaacacaggtgttaaagttacttctactattgcttatacaccaacttctttccagcaaactgttgatttaatgggaacaggacaattaaaacctcaaggtattgtaacgtctcaaattgaattggaaaatatcgtagaaaaagggtttgaagcattaacaagtgataaatcacaagcgaaaattttagtgaagttaagtggagaaatgtaa

SEQ ID NO: 146346 - protein, 349 aa, Bacillus cereus E33L
MKAAVWYGQKDIRIEDKELKPLKDNEVTVRVAWAGICGSDLHEYQEGPVFVPVDAPDELTGEVAPIIMGHEFAGVVEKVGSAVKKYKVGDRVVVNPTITHGNKPEDIDCYDGFSFIGLHGDGGFTTFANAPEHNIYKLPDTLTLQDGALVEPTAVAVQAVKEGGMQFGDTVAIFGAGPIGLLTTIAAKAAGASKILVFDLSETRLEKAKELGATEVFNSGKINPVEAVKQHAPNGVDVTFEVAGVAPTFKSAIDVTRPRGTVVIVSIFAHSIEWNPMQLTNTGVKVTSTIAYTPTSFQQTVDLMGTGQLKPQGIVTSQIELENIVEKGFEALTSDKSQAKILVKLSGEM

SEQ ID NO: 146347 - DNA, 1062 bp, Ralstonia metallidurans CH34; identical to SEQ ID NO: 42668
  CDS (1)..(1062): transl_table=11

SEQ ID NO: 146348 - protein, 353 aa, Ralstonia metallidurans CH34; identical to SEQ ID NO: 42669

SEQ ID NO: 146349 - DNA, 1038 bp, Oenococcus oeni PSU-1
  CDS (1)..(1038): transl_table=11
atggatggaaaagttgctgtattaactggaactaagaaaatcgaagttaaaaaactccctgttccagagataaatgatgatgaaatgctggtcaaagtagaaggttgtggcgtctgtggtacggatgtttttgagtacaagagcgatccatttaactatattccggttaaccttggtcacgaaggtaccggcgaaatcgtcaaaatgggaaagaacgtcaaaaatgattggactggtaagaccctgaaaatcggggacaagattgtttgtggtcctgctgctaatggagatatttatggtttgatgggtggcgaaaaacattatttcaatggttggcttgccaattacatggttattaatccaaatagcgttgtcttcaatgtcagcgatatgccgttggatttacggattttaattgaaccggcggccgtttcttgtcacgctgttgcaaaatccaaggaaatctacacctttaagcacagttcctcggtagttgttcaaggtgttggcccaattggtttgatggttatcgcacaaatgaagactttgggtgttcgccacattattgctgttgatggtaatgctagtcgactagaattggctaaaaagattggtgcaactgcgacggttaacatcgatgatggagattcagttgctgctgttaaggagctaaccgatggcaaaggtgccaattttgttttccaatgtactggctctacgaaaggtgccagcacggcttggaaattcttgaccgatcacggtggtatttgtgaagttggcttctttgtcgataatggcgaagctacttataacccacactttgatgtttgcatgccagaaaccaagatcactggttcatgggcttatgttccagaagactgggtggaagcaacagagttcttgcgcgagaccaaggatgaaggtcttgatatgactcaattgatcacgaatgtttatccgcttgaccaaatgaatgaagccatggctaagaatatgagtggcaccggcgttaagatcgtttacaagaataaccaataa

SEQ ID NO: 146350 - protein, 345 aa, Oenococcus oeni PSU-1
MDGKVAVLTGTKKIEVKKLPVPEINDDEMLVKVEGCGVCGTDVFEYKSDPFNYIPVNLGHEGTGEIVKMGKNVKNDWTGKTLKIGDKIVCGPAANGDIYGLMGGEKHYFNGWLANYMVINPNSVVFNVSDMPLDLRILIEPAAVSCHAVAKSKEIYTFKHSSSVVVQGVGPIGLMVIAQMKTLGVRHIIAVDGNASRLELAKKIGATATVNIDDGDSVAAVKELTDGKGANFVFQCTGSTKGASTAWKFLTDHGGICEVGFFVDNGEATYNPHFDVCMPETKITGSWAYVPEDWVEATEFLRETKDEGLDMTQLITNVYPLDQMNEAMAKNMSGTGVKIVYKNNQ

SEQ ID NO: 146351 - DNA, 1272 bp, Vibrio sp. Ex25
  CDS (1)..(1272): transl_table=11
atggtacaaacaacggcagcggttatctgtggtgagaaaaacgttcaattaagaacctttgatttaccaaacatttcagccgacgaacttctggttaaaaacatttcaaacagcatttgtctatccacttacaaagcagcattgttaggtagcaaacacaaacgcgttcctgaaaacattgacgaagtgccagtaatgacaggtcatgaatacgcaggtgtgattgttgaagtcggtgagaatctaaaagatcaattcaaagctggtgactactttgttttgcaacctgccatgggcttgccaacaggctactcggcgggctacagctatgagacatttggcggtaacgcgacgtattccattattcctaaaatcgctatcgacctaggctgcgtgctgccttaccacggcgattactttgctgatgcgtcgctggctgagccaatgtcttgcattatcggtgcgtaccatgcgagctaccacaccacgcaatacgtgtacgagcacgatatgggcattaaagaaggtggtgcgttagcgcttttggcgtgtgctggaccaatggggattggcgcgattgattacgcgattaacggacctgtgaagccaaaactgattgtggtgacagacatcgacgctgcacgtttagaccgagcagagtgcttaattccggttgagaaagcaaaagagcagggcgttgaactgcattacgtgaacaccgctcaagtcgatgaccctgtgacttatctgaaagcgctgaacgatggcaaaggttacgacgatgtgatggtgtatgcagcggtatcgcaagtgctagaacaagccgatgagctgttgggtaacgatggctgtctaaacttcttcgcaggccctaccgataagaaattcaaagtaccgtttaacttctacaacgtgcattacgaatcaacgcacattgtgggcacgtctggcggctcgaccggtgacatggtggaatctatcgagttgtcttcacaaggtaagatcaatccatcgttcatgatcacgcacgttggtggtctgcaagctgcgccacatacgattctgaatcagctggatattccgggtgggaagaagttgatttacccacatatcgacctgccattgaccgcgattgatgatttcctatcgttggcagaccaagacccgttcttcgccgaattagacgcaattttgaacgcgaataactatgtgtggaacgcacaggcagaaaaagcgttacttgagttttatgacgtgagcttaacggtttag

SEQ ID NO: 146352 - protein, 423 aa, Vibrio sp. Ex25
MVQTTAAVICGEKNVQLRTFDLPNISADELLVKNISNSICLSTYKAALLGSKHKRVPENIDEVPVMTGHEYAGVIVEVGENLKDQFKAGDYFVLQPAMGLPTGYSAGYSYETFGGNATYSIIPKIAIDLGCVLPYHGDYFADASLAEPMSCIIGAYHASYHTTQYVYEHDMGIKEGGALALLACAGPMGIGAIDYAINGPVKPKLIVVTDIDAARLDRAECLIPVEKAKEQGVELHYVNTAQVDDPVTYLKALNDGKGYDDVMVYAAVSQVLEQADELLGNDGCLNFFAGPTDKKFKVPFNFYNVHYESTHIVGTSGGSTGDMVESIELSSQGKINPSFMITHVGGLQAAPHTILNQLDIPGGKKLIYPHIDLPLTAIDDFLSLADQDPFFAELDAILNANNYVWNAQAEKALLEFYDVSLTV

SEQ ID NO: 146353 - DNA, 1239 bp, Lactobacillus casei
  CDS (1)..(1239): transl_table=11
atgcaaagcacagcattacgaatttacggtaagaaggatcttcgaattgacacctttgaccttcctgagatgaaggacgatgaaattcttgcaactgttgtgagcgacacgatgtgtatgtcatcatggaaacttgcaatggagggtgaagatcataagaagacaccagatgacttggcccataatccagcagtacttggccatgagttttctgggaagattttaaaagtgggtaaaaagtggcaatcaaagtttcatgccggccaaaactacgtgattcaaccaaatttggctcgtcaagatacgccgtttgttcctggatactcatacccatatattggcggggatgccacaaagattatcatccctgatgaagtaatgacgatgggctgcctaattccatttgaaggcgatgcttattatgagggctccttatgcgaaccagtaagttgcgtcatcgcagcatttagagcacagtaccatgttaacttccactcttatcaaccaaccacagggattaaagagggtggcaatatgttaatcatgggcggcacaggcccgatggggttgctggctattgattatgcattacatggtccaaagaagccatctacgcttgttgtgacggacgtcaatcaggacaaactggatcgcgcaaagaaactgtacccatctgattgggtagacatcaaatttgtcaacgtcaacggcttgtcaattgatgaacagaaagaagctcttctagatgcagtggatggcactgggtatgatgacgcgtttttgatgatcagcgttgcgccgttagcaactttagcagactccctgctcaatcctgacgggtgcttaaatcagttcgcaggcccaatgaagaaagacttctcagcttctgtaaatttctataacattcactataatttcactcattttgttggtacatcaggtggcgatgctaataatgaagctgaagcagcacagctaattgccgagaagaaactcgatgtctccaaagtcattacccatgttatgggtttgaatgacgcaggtgaaacgacgatgaatcaacctgaaattggcggtggaaaaaagttggtttacagtggcaaaaaattcgatcgtattgaattggcgaaagtagatcctgccacagacctaggtaaaattcttgccaagcatgacggtctgtggtcaaaagaagccgaagattggattcttgcaaatgaacctgactacgatgcttag

SEQ ID NO: 146354 - protein, 412 aa, Lactobacillus casei
MQSTALRIYGKKDLRIDTFDLPEMKDDEILATVVSDTMCMSSWKLAMEGEDHKKTPDDLAHNPAVLGHEFSGKILKVGKKWQSKFHAGQNYVIQPNLARQDTPFVPGYSYPYIGGDATKIIIPDEVMTMGCLIPFEGDAYYEGSLCEPVSCVIAAFRAQYHVNFHSYQPTTGIKEGGNMLIMGGTGPMGLLAIDYALHGPKKPSTLVVTDVNQDKLDRAKKLYPSDWVDIKFVNVNGLSIDEQKEALLDAVDGTGYDDAFLMISVAPLATLADSLLNPDGCLNQFAGPMKKDFSASVNFYNIHYNFTHFVGTSGGDANNEAEAAQLIAEKKLDVSKVITHVMGLNDAGETTMNQPEIGGGKKLVYSGKKFDRIELAKVDPATDLGKILAKHDGLWSKEAEDWILANEPDYDA

SEQ ID NO: 146355 - DNA, 1233 bp, Klebsiella pneumoniae
  CDS (1)..(1233): transl_table=11
atgcaaacaacaacggccctgcgcctgtatggcaaacgagacctgcgcctggaaacctttaccctcccggcgatgcaggacgatgagatcctcgcccgggtggtcacggacagcctgtgtctttcctcatggaaagaggccaatcagggtgccgatcataaaaaggtgccagatgatgtggccaccaggcccattattatcggtcatgaattctgcggcgaaatccttgccgtcggtaaaaagtggcagcataagtttcagccagggcagcgctacgtgatccaggccaacctgcagttgcccgaccgacccgactgccccggctactcattcccatggatcggtggcgaagccacccatgtggtgatccccaatgaggtgatggcgcaggattgcctgctcacctgggagggggatacctggtttgaaggatcgctggtggagccgctctcctgcgtcattggcgctttcaacgccaattatcatctgcaggaggggagttacaaccacgtgatggggatccgtccgcagggacacactctgatcctgggcgggacggggccgatggggctgctggctatcgactatgcgctgcacggccccatcaatccttcactactggtagtgaccgataccaataagccgaagctcagctacgcccgccgtcattacccctctgagccgcagacgctgatccactacctcgacggccatgaggccagtcgcgatacgctgctggcgctcagcggcggccatggcttcgacgatatcttcgtgtttgtgccaaacgaacagctgatcaccctggcctcctcgttgctggctccggacggctgcctgaatttctttgctggcccccaggataagcaattcagcgccccgatcaacttctacgacgtgcactacgccttcacccactacgtcggcacctccggcggtaatactgacgatatgcgcgccgcggtggcgctgatgcaggcgaaaaaggtccagacggcgaaagtggtcacccatattctcggcctgaacgccgcgggcgaaaccaccctcgatctgcctgccgtcggcgggggaaaaaagctggtgtataccggaaaagccttcccgctcacgccgctgggcgagatcgccgatcccgaactggcagcgattgtggcgcgtcaccatgggatctggtcccaggaggctgaagcgtatctgctggcccacgcggaggatattacgcatgattaa

SEQ ID NO: 146356 - protein, 410 aa, Klebsiella pneumoniae
MQTTTALRLYGKRDLRLETFTLPAMQDDEILARVVTDSLCLSSWKEANQGADHKKVPDDVATRPIIIGHEFCGEILAVGKKWQHKFQPGQRYVIQANLQLPDRPDCPGYSFPWIGGEATHVVIPNEVMAQDCLLTWEGDTWFEGSLVEPLSCVIGAFNANYHLQEGSYNHVMGIRPQGHTLILGGTGPMGLLAIDYALHGPINPSLLVVTDTNKPKLSYARRHYPSEPQTLIHYLDGHEASRDTLLALSGGHGFDDIFVFVPNEQLITLASSLLAPDGCLNFFAGPQDKQFSAPINFYDVHYAFTHYVGTSGGNTDDMRAAVALMQAKKVQTAKVVTHILGLNAAGETTLDLPAVGGGKKLVYTGKAFPLTPLGEIADPELAAIVARHHGIWSQEAEAYLLAHAEDITHD

SEQ ID NO: 146357 - DNA, 1278 bp, Escherichia coli
  CDS (1)..(1278): transl_table=11
atgaaaaccaaagttgctgctatttatggcaagcgggatgtccgtctgcgcgtatttgaactgccagaaattaccgataatgaattactggtgagtgtaatttctgacagcgtctgtttatcgacctggaaagcggcgttactcggtagtgaacataaacgcgtacccgacgatttagaaaatcatccggtcattaccgggcatgaatgtgccggggttattgtcgaagtgggtaaaaatctcactggcaaatataaaaaaggccagcgttttgtattgcaaccggcgatggggttaccaagcggatattcagcgggctacagctacgaatattttggcggcaatgccacttatatgattattcccgaaatcgccattaatttgggctgcgtattaccgtatcacggctcttattttgctgcggcgtcgctggcagagcctatgtgctgcattattggtgcttatcatgccaattatcacaccacgcaatatgtttatgagcatcgcatgggcgtcaaacctggcggcaatattgcactgctggcgtgtgcaggtccgatgggcattggcgctatcgattacgccattaacggcggcatacaaccgtcgcgggtggtggtggtcgatatcgacgacaaacgtctggcgcaggtacagaagctgctgccggtggaactggcggccagtaaaggcattgagctggtgtatgtgaataccaaagggatgagcgatcctgtccagatgctgcgggcgctgacaggagatgccgggttcgatgacatttttgtttatgcggcggtgcctgctgtcgttgagatggctgatgaattactggcggaagatggctgtctgaacttctttgccgggccgacggataaaaacttcaaagtgccgtttaatttctacaacgtccattacaacagcacgcacgtcgtcggtacatctggcggttcaacggacgacatgaaagaggcgattgcccttagcgccactgggcagttacagccgtcgtttatggtgacccatatcggtggcctggatgcggtgccagaaaccgtgctcaatctgccggatatccctggcggtaaaaaactcatttataacggcgtgaccatgccgctcactgccattgccgattttgccgaaaaaggcaaaaccgatccgctgtttaaagagttggcgcggctggttgaggaaacgcacggcatctggaatgaacaggccgagaaatatctgctggcacaatttggcgttgatatcggggaggccgcgcaatga

SEQ ID NO: 146358 - protein, 425 aa, Escherichia coli
MKTKVAAIYGKRDVRLRVFELPEITDNELLVSVISDSVCLSTWKAALLGSEHKRVPDDLENHPVITGHECAGVIVEVGKNLTGKYKKGQRFVLQPAMGLPSGYSAGYSYEYFGGNATYMIIPEIAINLGCVLPYHGSYFAAASLAEPMCCIIGAYHANYHTTQYVYEHRMGVKPGGNIALLACAGPMGIGAIDYAINGGIQPSRVVVVDIDDKRLAQVQKLLPVELAASKGIELVYVNTKGMSDPVQMLRALTGDAGFDDIFVYAAVPAVVEMADELLAEDGCLNFFAGPTDKNFKVPFNFYNVHYNSTHVVGTSGGSTDDMKEAIALSATGQLQPSFMVTHIGGLDAVPETVLNLPDIPGGKKLIYNGVTMPLTAIADFAEKGKTDPLFKELARLVEETHGIWNEQAEKYLLAQFGVDIGEAAQ

SEQ ID NO: 146359 - DNA, 26 bp, Artificial sequence
  primer
atgaaaaccaaagttgctgctattta

SEQ ID NO: 146360 - DNA, 26 bp, Artificial sequence
  primer
ttatataagtggcattgccgccaaaa

SEQ ID NO: 146361 - protein, 352 aa, Artificial sequence
  consensus sequence
  Variant (2)..(17): Xaa in position 2 to 17 is any amino acid
  Variant (18)..(19): Xaa in position 18 to 19 is any or no amino acid
  Variant (21)..(24): Xaa in position 21 to 24 is any amino acid
  Variant (26)..(30): Xaa in position 26 to 30 is any amino acid
  Variant (32)..(46): Xaa in position 32 to 46 is any amino acid
  Variant (47)..(58): Xaa in position 47 to 58 is any or no amino acid
  Variant (60)..(62): Xaa in position 60 to 62 is any amino acid
  Variant (66)..(67): Xaa in position 66 to 67 is any amino acid
  Variant (69)..(69): Xaa in position 69 is any amino acid
  Variant (71)..(72): Xaa in position 71 to 72 is any amino acid
  Variant (75)..(82): Xaa in position 75 to 82 is any amino acid
  Variant (83)..(83): Xaa in position 83 is any or no amino acid
  Variant (85)..(103): Xaa in position 85 to 103 is any amino acid
  Variant (104)..(176): Xaa in position 104 to 176 is any or no amino acid
  Variant (178)..(185): Xaa in position 178 to 185 is any amino acid
  Variant (188)..(188): Xaa in position 188 is any amino acid
  Variant (190)..(195): Xaa in position 190 to 195 is any amino acid
  Variant (197)..(198): Xaa in position 197 to 198 is any amino acid
  Variant (199)..(209): Xaa in position 199 to 209 is any or no amino acid
  Variant (211)..(215): Xaa in position 211 to 215 is any amino acid
  Variant (217)..(218): Xaa in position 217 to 218 is any amino acid
  Variant (220)..(228): Xaa in position 220 to 228 is any amino acid
  Variant (229)..(238): Xaa in position 229 to 238 is any or no amino acid
  Variant (240)..(254): Xaa in position 240 to 254 is any amino acid
  Variant (255)..(259): Xaa in position 255 to 259 is any or no amino acid
  Variant (261)..(261): Xaa in position 261 is any amino acid
  Variant (263)..(270): Xaa in position 263 to 270 is any amino acid
  Variant (271)..(284): Xaa in position 271 to 284 is any or no amino acid
  Variant (286)..(327): Xaa in position 286 to 327 is any amino acid
  Variant (328)..(333): Xaa in position 328 to 333 is any or no amino acid
  Variant (335)..(343): Xaa in position 335 to 343 is any amino acid
  Variant (344)..(346): Xaa in position 344 to 346 is any or no amino acid
  Variant (348)..(351): Xaa in position 348 to 351 is any amino acid
GXXXXXXXXXXXXXXXXXXEXXXXVXXXXXCXXXXXXXXXXXXXXXXXXXXXXXXXXXPXXXGHEXXGXIXXVGXXXXXXXXXGXXXXXXXXXXXXXXXXXXXXXXXXXXXXXXXXXXXXXXXXXXXXXXXXXXXXXXXXXXXXXXXXXXXXXXXXXXXXXXXXXXXXXXXXXXXXGXXXXXXXXGPXGXXXXXXAXXXXXXXXXXXXXDXXXXXLXXAXXXXXXXXXXXXXXXXXXXNXXXXXXXXXXXXXXXXXXXXGXDXXXXXXXXXXXXXXXXXXXXXXGXXXXXXXXXXXXXXXXXXXXXXXXXXXXXXXXXXXXXXXXXXXXXXXXLXXXXXXXXXXXXTXXXXL

SEQ ID NO: 146362 - protein, 22 aa, Artificial sequence
  protein pattern
  Variant (2)..(4): Xaa in position 2 to 4 is any amino acid
  Variant (5)..(5): Xaa in position 5 is any or no amino acid
  Variant (7)..(7): Xaa in position 7 is any or no amino acid
  Variant (9)..(9): Xaa in position 9 is Ile, Leu, Met or Val
  Variant (10)..(10): Xaa in position 10 is any amino acid
  Variant (11)..(11): Xaa in position 11 is Ala or Val
  Variant (12)..(12): Xaa in position 12 is any amino acid
  Variant (13)..(13): Xaa in position 13 is Asn or Val
  Variant (14)..(15): Xaa in position 14 to 15 is any amino acid
  Variant (16)..(16): Xaa in position 16 is Ala, Cys, Asp, Asn or Thr
  Variant (17)..(17): Xaa in position 17 is Gly, Ser or Thr
  Variant (18)..(18): Xaa in position 18 is Ile, Leu, Met or Val
  Variant (20)..(20): Xaa in position 20 is any amino acid
  Variant (21)..(21): Xaa in position 21 is Ser or Thr
  Variant (22)..(22): Xaa in position 22 is Asp, Ser or Thr
PXXXXDXEXXXXXXXXXXCXXX

SEQ ID NO: 146363 - protein, 16 aa, Artificial sequence
  protein pattern
  Variant (2)..(4): Xaa in position 2 to 4 is any amino acid
  Variant (8)..(8): Xaa in position 8 is any amino acid
  Variant (9)..(9): Xaa in position 9 is Ala, Cys or Ser
  Variant (11)..(11): Xaa in position 11 is any amino acid
  Variant (12)..(12): Xaa in position 12 is Ile or Val
  Variant (13)..(14): Xaa in position 13 to 14 is any amino acid
PXXXGHEXXGXXXXVG

SEQ ID NO: 146364 - DNA, 195 bp, Escherichia coli
  CDS (1)..(195): transl_table=11
atgtacgtttgtctttgtaatggtatcagcgataaaaaaattcgtcaggctgtgcgccagttttcccctcactcgttccagcaattaaaaaaatttattccggtcggcaatcagtgcggtaaatgtgtccgggccgcgcgtgaagtgatggaggatgaattaatgcagctgccggagtttaaggagtccgcataa

SEQ ID NO: 146365 - protein, 64 aa, Escherichia coli
MYVCLCNGISDKKIRQAVRQFSPHSFQQLKKFIPVGNQCGKCVRAAREVMEDELMQLPEFKESA

SEQ ID NO: 146366 - DNA, 195 bp, Escherichia coli O157:H7 EDL933
  CDS (1)..(195): transl_table=11
atgtacgtttgtttgtgtaatggtgtaagtgacaaaaaaattcgccaggcagtccgtcagtttcatccgcaatctttccaacaattgcgtaagtttattcctgtgggaaatcaatgcggtaagtgcattcgcgccgcgcgcgaagtgatgcaggacgagttgatgcagatgccagaatttaaagagattgcctga

SEQ ID NO: 146367 - protein, 64 aa, Escherichia coli O157:H7 EDL933
MYVCLCNGVSDKKIRQAVRQFHPQSFQQLRKFIPVGNQCGKCIRAAREVMQDELMQMPEFKEIA

SEQ ID NO: 146368 - DNA, 219 bp, Pseudomonas putida KT2440
  CDS (1)..(219): transl_table=11
atgtatgtgtgtctttgtgtcggcgttaccgacggacagatccgcgatgcgatctatgaaggatgctgcagttacaaggaagtgcgagccgccaccaatgtcgccagccagtgtgggaaatgcgcctgcgtggccaagcaggtggtccgcgagaccctgaccgagcttcaggtcagccaggcggccttgccctaccccgtcgaatttaccgctgcctga

SEQ ID NO: 146369 - protein, 72 aa, Pseudomonas putida KT2440
MYVCLCVGVTDGQIRDAIYEGCCSYKEVRAATNVASQCGKCACVAKQVVRETLTELQVSQAALPYPVEFTAA

SEQ ID NO: 146370 - DNA, 189 bp, Vibrio vulnificus CMCP6
  CDS (1)..(189): transl_table=11
atgtacgtttgtttgtgtcatggtgtttcagacaagaaaattcgcaagcttgttattgagcaaggtgttgcggatattcgcggaatcaaaaagtgcactgcattgggaagtcaatgtggcaaatgcatacgtatggcgaaagagattatcaacgagactgctccggcactattcaagcaagccagttaa

SEQ ID NO: 146371 - protein, 62 aa, Vibrio vulnificus CMCP6
MYVCLCHGVSDKKIRKLVIEQGVADIRGIKKCTALGSQCGKCIRMAKEIINETAPALFKQAS

SEQ ID NO: 146372 - DNA, 189 bp, Vibrio parahaemolyticus RIMD 2210633
  CDS (1)..(189): transl_table=11
atgtacgtttgtctttgccatggcgtctccgacaaaaaaattaggaagttggcgatagatgaaggtgtcactgatattcgaggtattaagagatgcactgctttggggagtcagtgtggtaagtgcattaagcaggcaaaagaaatcctagcagaaacacattacacagaattaagacaagccagttaa

SEQ ID NO: 146373 - protein, 62 aa, Vibrio parahaemolyticus RIMD 2210633
MYVCLCHGVSDKKIRKLAIDEGVTDIRGIKRCTALGSQCGKCIKQAKEILAETHYTELRQAS

SEQ ID NO: 146374 - DNA, 195 bp, Photorhabdus luminescens subsp. laumondii TTO1
  CDS (1)..(195): transl_table=11
atgtatgtctgcctatgtaatgcggtgagtgacaaaacaatacgtaatgcggtgcgtcaacatcatattcactctattaaagaactaaaatgtattgtgcctgtaggccgtgattgtggcaaatgcatacgccaagctagagagctaattaatgaggagattgcacagttacccaagatagataacgttgcttga

SEQ ID NO: 146375 - protein, 64 aa, Photorhabdus luminescens subsp. laumondii TTO1
MYVCLCNAVSDKTIRNAVRQHHIHSIKELKCIVPVGRDCGKCIRQARELINEEIAQLPKIDNVA

SEQ ID NO: 146376 - DNA, 201 bp, Vibrio vulnificus YJ016
  CDS (1)..(201): transl_table=11
ttgagttgtaatatgtacgtttgtttgtgtcatggtgtttcagacaagaaaattcgcaagcttgttattgagcaaggtgttgcggatattcgcggaatcaaaaagtgcactgcattgggaagtcaatgtggcaaatgtatacgtatggcgaaagagattatcaacgagactgctccggcactattcaagcaagccagttaa

SEQ ID NO: 146377 - protein, 66 aa, Vibrio vulnificus YJ016
MSCNMYVCLCHGVSDKKIRKLVIEQGVADIRGIKKCTALGSQCGKCIRMAKEIINETAPALFKQAS

SEQ ID NO: 146378 - DNA, 195 bp, Yersinia pestis biovar Microtus str. 91001
  CDS (1)..(195)
atgtacgtttgtctatgtaatgcggtttctgacaaagtcattcgcaaagctgtgcgccagcatcagccccatacagttaagcaactgcgacagcttgtgccgattggtagtgactgtgggaagtgcatccgacaagccagagagatcttgattgaggaactcgctaatattccagaaatgaatgatgttgcctaa

SEQ ID NO: 146379 - protein, 64 aa, Yersinia pestis biovar Microtus str. 91001
MYVCLCNAVSDKVIRKAVRQHQPHTVKQLRQLVPIGSDCGKCIRQAREILIEELANIPEMNDVA

SEQ ID NO: 146380 - DNA, 216 bp, Herminiimonas arsenicoxydans
  CDS (1)..(216)
atgattgtctgtgtatgcaacaacgtttctgaacggaaaattcgcctagcggtcgatagcggcctgacgtcgatggtagagttgcgcgacgaactggaagtcggcacctgctgcggcaaatgtcatgcctgtgcgaaacgcgtcctgcgcgagtcccttgccgatatgcgctcaactcaaactataatgtttcatccaaacgcaatggctgcataa

SEQ ID NO: 146381 - protein, 71 aa, Herminiimonas arsenicoxydans
MIVCVCNNVSERKIRLAVDSGLTSMVELRDELEVGTCCGKCHACAKRVLRESLADMRSTQTIMFHPNAMAA

SEQ ID NO: 146382 - DNA, 195 bp, Klebsiella pneumoniae subsp. pneumoniae MGH 78578
  CDS (1)..(195): transl_table=11
atgtacgtttgtttgtgcaatggcgtcagcgataaaaaaattcgtcaggttgtgcgccagtttcaaccgcaatcttttcagcaattacgtaagtttgttcccgtgggaaatcaatgcggtaagtgtgttcgtgccgcgcgtgaagtgatggaagatgaattaaccaccatgccggaattcaaagaaatcgcctga

SEQ ID NO: 146383 - protein, 64 aa, Klebsiella pneumoniae subsp. pneumoniae MGH 78578
MYVCLCNGVSDKKIRQVVRQFQPQSFQQLRKFVPVGNQCGKCVRAAREVMEDELTTMPEFKEIA

SEQ ID NO: 146384 - DNA, 210 bp, Acinetobacter sp. ADP1
  CDS (1)..(210): transl_table=11
atgcgaatgactctgatgtacgtttgtttgtgtcgtggtattacagatcaagatattaaagatgccgttgcaagcggtgctgaaagttaccgcgaagttcgtgagcgcttagatcttggtacgtgctgtggacgctgtgcaccagaagccaaaagtatcattaatgaagaacttgcagaaattgcagctcgcatctctgttgctgcatag

SEQ ID NO: 146385 - protein, 69 aa, Acinetobacter sp. ADP1
MRMTLMYVCLCRGITDQDIKDAVASGAESYREVRERLDLGTCCGRCAPEAKSIINEELAEIAARISVAA

SEQ ID NO: 146386 - DNA, 195 bp, Erwinia carotovora subsp. atroseptica SCRI1043
  CDS (1)..(195): transl_table=11
atgtatgtttgtttatgcaacgcaatttctgacaaagccattcgtaatgctgttcgtcagcaccagcctcaatctatgcaacaattacgcaaactcgttcctatcgggacagattgcggtaagtgcattcgtcaggcgcgtgttatttttgaggaagagcaggctaaaattcctgacatgtataaagtagcataa

SEQ ID NO: 146387 - protein, 64 aa, Erwinia carotovora subsp. atroseptica SCRI1043
MYVCLCNAISDKAIRNAVRQHQPQSMQQLRKLVPIGTDCGKCIRQARVIFEEEQAKIPDMYKVA

SEQ ID NO: 146388 - DNA, 204 bp, Methylococcus capsulatus str. Bath
  CDS (1)..(204): transl_table=11
atgtatgtctgcatctgtaggagcgtcactgaccgccaggttcgggaagtcgtcactcgccacggcgcgtacaatctgcgcaccttgcggacgcgcctggacgcctgcagccagtgcgggaaatgcgcgctggaagtcaagacgctgatccaggaaaccctggcggagaacgccgtattggaacagcagaacatggccgcctga

SEQ ID NO: 146389 - protein, 67 aa, Methylococcus capsulatus str. Bath
MYVCICRSVTDRQVREVVTRHGAYNLRTLRTRLDACSQCGKCALEVKTLIQETLAENAVLEQQNMAA

SEQ ID NO: 146390 - DNA, 231 bp, Azoarcus sp. EbN1
  CDS (1)..(231): transl_table=11
atgtacgtctgcgtctgcaacgcggtaacggatcgccatatcgaacaggcagtcagcgaaggggcatcgaccttgcgcgagctgcgcacgaaactcggcgtggcgagcgagtgcggtcgctgcgcgacatgcgctcgtgattgcctgcgttccgcgctggcagaacagatcgcgactccggcccccgccggcgtcgcgtcctcgttctcgtttgccgcggaggccttatga

SEQ ID NO: 146391 - protein, 76 aa, Azoarcus sp. EbN1
MYVCVCNAVTDRHIEQAVSEGASTLRELRTKLGVASECGRCATCARDCLRSALAEQIATPAPAGVASSFSFAAEAL

SEQ ID NO: 146392 - DNA, 219 bp, Pseudomonas fluorescens Pf-5
  CDS (1)..(219): transl_table=11
atgtatgtctgcctctgcaccggtgtcaccgacggacaaattcgcgaagcgatctacgaaggttgctgcagctaccgcgaagtacgccaggccaccggcgtcgccagccagtgcggcaaatgtgcctgcctggccaagcaagtggttcgcgaaaccctgaccgaattgcagagcagccaagcggcaatcccctaccctgtggaatttaatgtcgcctga

SEQ ID NO: 146393 - protein, 72 aa, Pseudomonas fluorescens Pf-5
MYVCLCTGVTDGQIREAIYEGCCSYREVRQATGVASQCGKCACLAKQVVRETLTELQSSQAAIPYPVEFNVA

SEQ ID NO: 146394 - DNA, 195 bp, Colwellia psychrerythraea 34H
  CDS (1)..(195): transl_table=11
atgtacgtttgtatttgccatggtgttaccgatacccagatagaatccgctattgataatggcgtagaaactatgaaagggttaacccaagagcttaatgtaggatcgcaatgtggtaaatgttgtcaatgtactaaacgcgtactcaacagaaagttaatacaaattgctgaggcacagccacaggtcgcttaa

SEQ ID NO: 146395 - protein, 64 aa, Colwellia psychrerythraea 34H
MYVCICHGVTDTQIESAIDNGVETMKGLTQELNVGSQCGKCCQCTKRVLNRKLIQIAEAQPQVA

SEQ ID NO: 146396 - DNA, 213 bp, Thiobacillus denitrificans ATCC 25259
  CDS (1)..(213): transl_table=11
atgtacgtctgcctgtgccacggcgtcaccgacaccgacattcgccgcctcgtgcgcaccgaaggtgtgtgcacgatgcgtgaactgagccaggaactcggcgttgcgacccagtgcggcaagtgcggtcgctgcgccaaggaagtgctgtgccaggccgtggccgacgtccgccaggaaaacgcctgctgcggcgccttgatggcggcctga

SEQ ID NO: 146397 - protein, 70 aa, Thiobacillus denitrificans ATCC 25259
MYVCLCHGVTDTDIRRLVRTEGVCTMRELSQELGVATQCGKCGRCAKEVLCQAVADVRQENACCGALMAA

SEQ ID NO: 146398 - DNA, 237 bp, Burkholderia sp. 383
  CDS (1)..(237): transl_table=11
atgatcgtctgcgtgtgcaagtctgtttccgatcgcaagattcgcgcgtccctcgcagagggcgtgaactctttcgatgaactccagttcgagctcggcgtggccacgtgctgcggcaagtgcgaggagtccgtacgcgacctcatggccgaacaaggcgtctgcgcgagccagtgcggtgtcgagcatcatgctcacccgatcccggtcacgttctacgaacgcaaggccgcctga

SEQ ID NO: 146399 - protein, 78 aa, Burkholderia sp. 383
MIVCVCKSVSDRKIRASLAEGVNSFDELQFELGVATCCGKCEESVRDLMAEQGVCASQCGVEHHAHPIPVTFYERKAA

SEQ ID NO: 146400 - DNA, 240 bp, Burkholderia thailandensis E264
  CDS (1)..(240): transl_table=11
atgatcgtctgcgtgtgcaagtccgtttccgatcggaagattcgcgcatccctcgcggaaggcgtgaacaccttcgaagaactccagttcgaactcggggtcgccacctgctgcggcaagtgcgaggaaaccgtgcgcgagatcatggcggaacagggcgtttgtgcgagccgctgcggtgtcgagccccccgcggccgtgccggtccccgtcacgttctacgaacgcaaggcggcctga

SEQ ID NO: 146401 - protein, 79 aa, Burkholderia thailandensis E264
MIVCVCKSVSDRKIRASLAEGVNTFEELQFELGVATCCGKCEETVREIMAEQGVCASRCGVEPPAAVPVPVTFYERKAA

SEQ ID NO: 146402 - DNA, 207 bp, Saccharophagus degradans 2-40
  CDS (1)..(207): transl_table=11
atgtatgtttgtctttgcaagggcataaccgattcgcaaatccgcactgcggttaacaatggcgcagaaagcatgcgcgctgtacgcgatcaactaggcgtggcatctcaatgcggcaaatgctcttctttttgcagagaaatcgttcgcgaaaccttagagaacaccgccgatcttggcgcaggaagcttctatcaggtagcttaa

SEQ ID NO: 146403 - protein, 68 aa, Saccharophagus degradans 2-40
MYVCLCKGITDSQIRTAVNNGAESMRAVRDQLGVASQCGKCSSFCREIVRETLENTADLGAGSFYQVA

SEQ ID NO: 146404 - DNA, 234 bp, Methylobacillus flagellatus KT
  CDS (1)..(234): transl_table=11
atgttgattcagcaagagaaagctgccgatagatttatgtacgtatgtgtgtgtcgagctattactgatcgccaaattctccaggcggcgcgcgcaggagccagtagtctcaaggatttgaggcgtgacctgggcgtggctacagaatgtggccaatgcgccagttgcgcgaagcagtgtttgcgtgaagcgcatcaggatagcgatattgccatgccgatcagtttcgcctga

SEQ ID NO: 146405 - protein, 77 aa, Methylobacillus flagellatus KT
MLIQQEKAADRFMYVCVCRAITDRQILQAARAGASSLKDLRRDLGVATECGQCASCAKQCLREAHQDSDIAMPISFA

SEQ ID NO: 146406 - DNA, 249 bp, Burkholderia xenovorans LB400
  CDS (1)..(249): transl_table=11
atgacgcctgccatgattgtctgtgtctgcaagtctgtttctgaccgaaagatccgtgcctcgatcgcggacggtgtcgattcgttcgacgagcttcagttcgagctcggcgtcgcctcctgctgcggcaaatgcgcggagtccgtgcgcgacgtcatgatgcagagcggcgtgtgcgcgacccggtgcggtttcgagcataatcagcaggctgtaccgctgacgttttacgaacgcaaggccgcctga

SEQ ID NO: 146407 - protein, 82 aa, Burkholderia xenovorans LB400
MTPAMIVCVCKSVSDRKIRASIADGVDSFDELQFELGVASCCGKCAESVRDVMMQSGVCATRCGFEHNQQAVPLTFYERKAA

SEQ ID NO: 146408 - DNA, 192 bp, Shewanella sp. MR-7
  CDS (1)..(192): transl_table=11
atgtacgtttgtctctgccatgccatcacagataggcaaatcaaaaacgccgtaagtcagggcgatactagccttgctgacgttaaaaagcgtttaggcgttgccgatcaatgcggtaagtgcgcgagaatggccgtacaaatcatccaaaaccaactggaaattgaacctaaatactacgaagtcgcttaa

SEQ ID NO: 146409 - protein, 63 aa, Shewanella sp. MR-7
MYVCLCHAITDRQIKNAVSQGDTSLADVKKRLGVADQCGKCARMAVQIIQNQLEIEPKYYEVA

SEQ ID NO: 146410 - DNA, 192 bp, Shewanella sp. ANA-3
  CDS (1)..(192): transl_table=11
atgtacgtttgtctctgccatgccatcacagatacgcaaatcaaaaacgcggtaagtcagggcgactctagccttgctgacgttaaaaagcgtttaggcgttgccgatcaatgcggtaagtgcgccagaatggccgtacaaattattcagaaccaattagaaattgaacctaattactacgaagtggcttaa

SEQ ID NO: 146411 - protein, 63 aa, Shewanella sp. ANA-3
MYVCLCHAITDTQIKNAVSQGDSSLADVKKRLGVADQCGKCARMAVQIIQNQLEIEPNYYEVA

SEQ ID NO: 146412 - DNA, 243 bp, Azoarcus sp. BH72
  CDS (1)..(243): transl_table=11
atgtacgtctgtgtctgcaacgcggtaaccgagcgccacatcaacgaagctgttcgcgaaggcgtgtccaccctgcgccatctccgcaaggagctgggggtgacagccgagtgcgggcgctgcgcggtgtgcgcgcgcgactgcctgcgctcggcgctcgccgagaagacccagcgtcctgcggcggcaccggtgcacatcggtgtcgctccctcgttttcccttgccgcggaggcctcatga

SEQ ID NO: 146413 - protein, 80 aa, Azoarcus sp. BH72
MYVCVCNAVTERHINEAVREGVSTLRHLRKELGVTAECGRCAVCARDCLRSALAEKTQRPAAAPVHIGVAPSFSLAAEAS

SEQ ID NO: 146414 - DNA, 201 bp, Pseudoalteromonas tunicata D2
  CDS (1)..(201): transl_table=11
atgtacgtttgtatttgccacgctgtaacagacaaaaaaattacccaagctgttgctgagggtgttgagtcaatgcgtcaattacgacattgtttaggtgtaggtagccaatgcggaaaatgcgtttgccatgctcaacaagtattaatggaagcgcaacaggtcaaaattagttttcagttgcaaagagaggtggcttag

SEQ ID NO: 146415 - protein, 66 aa, Pseudoalteromonas tunicata D2
MYVCICHAVTDKKITQAVAEGVESMRQLRHCLGVGSQCGKCVCHAQQVLMEAQQVKISFQLQREVA

SEQ ID NO: 146416 - DNA, 195 bp, Oceanospirillum sp. MED92
  CDS (1)..(195): transl_table=11
atgtttgtttgtatctgtgaaaatattacctgcagtgatgtccgcgatgcggttgatcagggcgcgcgttcagtgcgggatttgaataaagaactggcggttggtagccagtgtggcaagtgtgtttgtgcggcacgtaaagtgatgcaggaacatattgcagaatctgacttcgaactggcagtgcctgcttag

SEQ ID NO: 146417 - protein, 64 aa, Oceanospirillum sp. MED92
MFVCICENITCSDVRDAVDQGARSVRDLNKELAVGSQCGKCVCAARKVMQEHIAESDFELAVPA

SEQ ID NO: 146418 - DNA, 195 bp, Alteromonadales bacterium TW-7
  CDS (1)..(195)
atgtacatttgtctatgtcacggtgtcacagataaaaaaattgaacaaacaattgatgatggtgcaacaactatgcgtgagttggcaaaagagcttaacgtcggcagccaatgcggaaaatgctgtggttgtactaagaagattttgaatcgcaagctgattcaaattgcagacataacagatcaagtcgcttaa

SEQ ID NO: 146419 - protein, 64 aa, Alteromonadales bacterium TW-7
MYICLCHGVTDKKIEQTIDDGATTMRELAKELNVGSQCGKCCGCTKKILNRKLIQIADITDQVA

SEQ ID NO: 146420 - DNA, 204 bp, marine gamma proteobacterium HTCC2143
  CDS (1)..(204): transl_table=11
atgtacgtttgcatgtgcaatgctgtgaccgatagccaaatcagggaagctgtagagaaaggtgccacacggtttggccaagtccgtcgagagcttggcttagcaagccaatgcggtaagtgcggtattctcgcacgcaacatttttaatcaaagcctcgaactcaatgttgaacaagaacaactcttctacgccgttggatag

SEQ ID NO: 146421 - protein, 67 aa, marine gamma proteobacterium HTCC2143
MYVCMCNAVTDSQIREAVEKGATRFGQVRRELGLASQCGKCGILARNIFNQSLELNVEQEQLFYAVG

SEQ ID NO: 146422 - DNA, 222 bp, marine gamma proteobacterium HTCC2080
  CDS (1)..(222): transl_table=11
atgtttgtttgtatctgcaatggcgttaccgactcttccatccgtcgcgagatggaagccggcgctacttctttcgccgacgtccaaaatcgattgggcgtggctcgtcagtgcggctcctgtgaacacctggctcgcgccatcgtcaacgaattttccaaacccgacccccggtacttttacaacgcctgctccgacgaatctatggccgctgtagcctga

SEQ ID NO: 146423 - protein, 73 aa, marine gamma proteobacterium HTCC2080
MFVCICNGVTDSSIRREMEAGATSFADVQNRLGVARQCGSCEHLARAIVNEFSKPDPRYFYNACSDESMAAVA

SEQ ID NO: 146424 - DNA, 219 bp, Pseudomonas putida GB-1
  CDS (1)..(219): transl_table=11
atgtatgtgtgtctttgtgtcggcgttaccgacggacagatccgcgatgcgatctatgaaggatgctgcagttacaaggaagtgcgagccgcgaccaatgtcgccagccagtgtggcaaatgcgcctgcctggccaaacaggtggtccgcgagaccctgaccgagcttcaggtcagccaggcatccctgccctaccctgtagaatttaccgcagcctga

SEQ ID NO: 146425 - protein, 72 aa, Pseudomonas putida GB-1
MYVCLCVGVTDGQIRDAIYEGCCSYKEVRAATNVASQCGKCACLAKQVVRETLTELQVSQASLPYPVEFTAA

SEQ ID NO: 146426 - DNA, 207 bp, Marinobacter sp. ELB17
  CDS (1)..(207): transl_table=11
atgtatgtctgcctttgccacggcgtaaccgatcgtgatatccgtgccgcagcggacaacggtgtaacgtccatgcgccagttgggtaaagaactgggcgtgggcacgcagtgcggccgctgtgcacaaaccgctcgcgaaatcctccgcgatcacagctctccggattatatggctctggcgggtatgctggcccacccggtttga

SEQ ID NO: 146427 - protein, 68 aa, Marinobacter sp. ELB17
MYVCLCHGVTDRDIRAAADNGVTSMRQLGKELGVGTQCGRCAQTAREILRDHSSPDYMALAGMLAHPV

SEQ ID NO: 146428 - DNA, 195 bp, Moritella sp. PE36
  CDS (1)..(195): transl_table=11
atgtacgtatgtatttgtcgcggtattaccgataagcagatgattaaaagtattgatgacggtgctaacacaatgaaaaaattaagcggagagcttggtatcggtagtcagtgtggcaagtgctgccaatgtgcgaaaaagatcttaaatcagaccttaatcaaacaagcgcaacaacagccactggttgcctag

SEQ ID NO: 146429 - protein, 64 aa, Moritella sp. PE36
MYVCICRGITDKQMIKSIDDGANTMKKLSGELGIGSQCGKCCQCAKKILNQTLIKQAQQQPLVA

SEQ ID NO: 146430 - DNA, 222 bp, Azotobacter vinelandii
  CDS (1)..(222): transl_table=11
atgtacgtatgtctttgccaaggtattaccgatggtcaaatccgtagcgcaattcagggcggctgctgcacttatcgtgatgtgcggattgccttgggcgttggcacacagtgcggcaaatgcgcctgcgtcgccaaacagatcgcgcgagaaacccttggcgaaggggcacaaaacacccaggatgcaaccttctgcccggcggcactggctgcctcttga

SEQ ID NO: 146431 - protein, 73 aa, Azotobacter vinelandii
MYVCLCQGITDGQIRSAIQGGCCTYRDVRIALGVGTQCGKCACVAKQIARETLGEGAQNTQDATFCPAALAAS

SEQ ID NO: 146432 - DNA, 195 bp, Salmonella typhi
  CDS (1)..(195): transl_table=11
atgtacgtttgtttgtgtaatggtataagcgataaaaaaatccgccaggctgtacgacaatttcatccacagtcatttcaacagttgcgtaaatttattcctgtgggaaatcaatgtggtaagtgtattcgcgccgcgcgagaagtgatgcaggatgagttaacgcaaatgccggaatttaaagagatcgcctga

SEQ ID NO: 146433 - protein, 64 aa, Salmonella typhi
MYVCLCNGISDKKIRQAVRQFHPQSFQQLRKFIPVGNQCGKCIRAAREVMQDELTQMPEFKEIA

SEQ ID NO: 146434 - DNA, 195 bp, Serratia marcescens
  CDS (1)..(195): transl_table=11
atgtatgtatgtctgtgtaatgcggtgactgacaaagcgatccgtaatgcggtgcgtcagcacaacccccataccatgaagcaactgcgtgaacttgtgccgattggtaccgattgtggaaagtgcattcgtcaggcaagacagattatggtggaggaatgcggaactatcatcccaatgcatgaagttgcctaa

SEQ ID NO: 146435 - protein, 64 aa, Serratia marcescens
MYVCLCNAVTDKAIRNAVRQHNPHTMKQLRELVPIGTDCGKCIRQARQIMVEECGTIIPMHEVA

SEQ ID NO: 146436 - DNA, 26 bp, Artificial sequence
  primer
atgtacgtttgtctttgtaatggtat

SEQ ID NO: 146437 - DNA, 23 bp, Artificial sequence
  primer
ttatgcggactccttaaactccg

SEQ ID NO: 146438 - protein, 46 aa, Artificial sequence
  consensus sequence
  Variant (5)..(5): Xaa in position 5 is any amino acid
  Variant (7)..(10): Xaa in position 7 to 10 is any amino acid
  Variant (12)..(13): Xaa in position 12 to 13 is any amino acid
  Variant (15)..(37): Xaa in position 15 to 37 is any amino acid
  Variant (38)..(38): Xaa in position 38 is any or no amino acid
  Variant (43)..(45): Xaa in position 43 to 45 is any amino acid
MYVCXCXXXXDXXIXXXXXXXXXXXXXXXXXXXXXXXXCGKCXXXA

SEQ ID NO: 146439 - protein, 18 aa, Artificial sequence
  protein pattern
  Variant (5)..(5): Xaa in position 5 is Ile, Leu, Met or Val
  Variant (7)..(7): Xaa in position 7 is any amino acid
  Variant (8)..(8): Xaa in position 8 is Ala, Gly or Ser
  Variant (9)..(9): Xaa in position 9 is Ile or Val
  Variant (10)..(10): Xaa in position 10 is Ser or Thr
  Variant (11)..(11): Xaa in position 11 is Asp or Glu
  Variant (12)..(13): Xaa in position 12 to 13 is any amino acid
  Variant (14)..(14): Xaa in position 14 is Ile, Met or Val
  Variant (15)..(17): Xaa in position 15 to 17 is any amino acid
  Variant (18)..(18): Xaa in position 18 is Ala, Ile or Val
MYVCXCXXXXXXXXXXXX

SEQ ID NO: 146440 - DNA, 417 bp, ESCHERICHIA COLI
  CDS (1)..(417): transl_table=11
atgatgactaaaacccaaataaataaattaataaaaatgatgaatgatttagactatccatttgaagcaccgctcaaggaatcatttattgaaagtataatccaaatagaatttaattctaattcaactaattgcctggagaagttatgtaatgaagttagtattctttttaagaatcaacctgattatcttacttttttaagagcaatggatggattcgaagttaatggattacgattatttagcctctcgattccagaaccttcagttaaaaacctttttgccgtaaatgaattttatagaaataatgatgatttcataaaccctgatctacaagaacggttagtgatcggggattatagcatttcaatatttacttatgacattaaaggtgatgctgccaacttactgatttaa

SEQ ID NO: 146441 - protein, 138 aa, ESCHERICHIA COLI
MMTKTQINKLIKMMNDLDYPFEAPLKESFIESIIQIEFNSNSTNCLEKLCNEVSILFKNQPDYLTFLRAMDGFEVNGLRLFSLSIPEPSVKNLFAVNEFYRNNDDFINPDLQERLVIGDYSISIFTYDIKGDAANLLI

SEQ ID NO: 146442 - DNA, 414 bp, Escherichia coli str. K-12 substr. W3110
  CDS (1)..(414): transl_table=11
atgactaaaacccaaataaataaattaataaaaatgatgaatgatttagactatccatttgaagcaccgctcaaggaatcatttattgaaagtataatccaaatagaatttaattctaattcaactaattgcctggagaagttatgtaatgaagttagtattctttttaagaatcaacctgattatcttacttttttaagagcaatggatggattcgaagttaatggattacgattatttagcctctcgattccagaaccttcagttaaaaacctttttgccgtaaatgaattttatagaaataatgatgatttcataaaccctgatctacaagaacggttagtgatcggggattatagcatttcaatatttacttatgacattaaaggtgatgctgccaacttactgatttag

SEQ ID NO: 146443 - protein, 137 aa, Escherichia coli str. K-12 substr. W3110
MTKTQINKLIKMMNDLDYPFEAPLKESFIESIIQIEFNSNSTNCLEKLCNEVSILFKNQPDYLTFLRAMDGFEVNGLRLFSLSIPEPSVKNLFAVNEFYRNNDDFINPDLQERLVIGDYSISIFTYDIKGDAANLLI

SEQ ID NO: 146444 - DNA, 495 bp, Escherichia coli CFT073
  CDS (1)..(495): transl_table=11
atgatgactaaaacccaaataagtaaattaaaaaaaatgatgaatgatttagactatccatttgaagcaccgctcaaggaatcatttattgaaagtataatccaaataaaatttaattctaactcaactaattgcctggagaagttatgtaatgaagttagtattctctttaataatcaacctgattatcttacttttttaagagcaatggatggattcgaagttaatggattacgattatttagcctctcgattccagaaccttcagttaaaaacctttttgccgtaaatgaattttatagagataatgatgatttcataaatcctgacttacaagaacggttagtgatcggggatgatagcatttcaatatttacttatgacattaaaagtaacttttttgaaattagagataatattggcacagaaaatatattcagttcgtttagtgatttctcttcattcttaaacgaaatcatggacagttgttcataa

SEQ ID NO: 146445 - protein, 164 aa, Escherichia coli CFT073
MMTKTQISKLKKMMNDLDYPFEAPLKESFIESIIQIKFNSNSTNCLEKLCNEVSILFNNQPDYLTFLRAMDGFEVNGLRLFSLSIPEPSVKNLFAVNEFYRDNDDFINPDLQERLVIGDDSISIFTYDIKSNFFEIRDNIGTENIFSSFSDFSSFLNEIMDSCS

SEQ ID NO: 146446 - DNA, 495 bp, Escherichia coli E24377A
  CDS (1)..(495): transl_table=11
atgatgactaaaacccaaataaataaattaataaaaatgatgaatgatttagactatccatttgaagcaccgctcaaggaatcatttattgaaagtataatccaaatagaatttaattctaattcaactaattgcctggagaagttatgtaatgaagttagtattctttttaagaatcaacctgattatcttacttttttaagagcaatggatggattcgaagttaatggattacgattatttagcctctcgattccagaaccttcagttaaaaacctttttgccgtaaatgaattttatagaaataatgatgatttcataaaccctgatctacaagaacggttagtgatcggggatgatagcatttcaatatttacttatgacattaaaagtaacttttttgaaattagagataatattggcacagaaaatatattcagttcgtttagtgatttctcttcattcttaaacgaaatcatggacagttgttcataa

SEQ ID NO: 146447 - protein, 164 aa, Escherichia coli E24377A
MMTKTQINKLIKMMNDLDYPFEAPLKESFIESIIQIEFNSNSTNCLEKLCNEVSILFKNQPDYLTFLRAMDGFEVNGLRLFSLSIPEPSVKNLFAVNEFYRNNDDFINPDLQERLVIGDDSISIFTYDIKSNFFEIRDNIGTENIFSSFSDFSSFLNEIMDSCS

SEQ ID NO: 146448 - DNA, 492 bp, Escherichia coli S88
  CDS (1)..(492): transl_table=11
atgactaaaacccaaataaataaattaaaaaaaatgatgaatgatttagactatccatttgaagcaccgctcaaggaatcatttattgaaagtataatccaaataaaatttaattctaactcaactaattgcctggagaagttatgtaatgaagttagtattctctttaataatcaacctgattatcttacttttttaagagcaatggatggattcgaagttaatggattacgattatttagcctctcgattccagaaccttcagttaaaaacctttttgccgtaaatgaattttatagagataatgatgatttcataaatcctgacttacaagaacggttagtgatcgggaatgatagcatttcaatatttacttatgacattaaaagtaacttttttgaaattagagataatattggcacagaaaatatattcagttcgtttagtgatttctcttcattcttaaacgaaatcatggacagttgttcataa

SEQ ID NO: 146449 - protein, 163 aa, Escherichia coli S88
MTKTQINKLKKMMNDLDYPFEAPLKESFIESIIQIKFNSNSTNCLEKLCNEVSILFNNQPDYLTFLRAMDGFEVNGLRLFSLSIPEPSVKNLFAVNEFYRDNDDFINPDLQERLVIGNDSISIFTYDIKSNFFEIRDNIGTENIFSSFSDFSSFLNEIMDSCS

SEQ ID NO: 146450 - DNA, 495 bp, Escherichia coli 55989
  CDS (1)..(495): transl_table=11
atgatgactaaaacccaaataaataaattaataaaaatgatgaataatttagactatccatttgaagcaccgctcaaggaatcatttattgaaagtataatccaaatagaatttaattctaattcaactaattgcctggagaagttatgtaatgaagttagtattctttttaagaatcaacctgattatcttacttttttaagagcaatggatggattcgaagttaatggattacgattatttagcctctcgattccagaaccttcagttaaaaacctttttgccgtaaatgaattttatagaaataatgatgatttcataaaccctgatctacaagaacggttagtgatcggggatgatagcatttcaatatttacttatgacattaaaagtaacttttttgaaattagagataatattggcacagaaaatatattcagttcgtttagtgatttctcttcattcttaaacgaaatcatggacagttgttcataa

SEQ ID NO: 146451 - protein, 164 aa, Escherichia coli 55989
MMTKTQINKLIKMMNNLDYPFEAPLKESFIESIIQIEFNSNSTNCLEKLCNEVSILFKNQPDYLTFLRAMDGFEVNGLRLFSLSIPEPSVKNLFAVNEFYRNNDDFINPDLQERLVIGDDSISIFTYDIKSNFFEIRDNIGTENIFSSFSDFSSFLNEIMDSCS

SEQ ID NO: 146452 - DNA, 495 bp, Escherichia coli IAI39
  CDS (1)..(495): transl_table=11
atgatgactaaaacccaaataaataaattaaaaaaaatgatgaatgatttagactatccatttgaagcaccgctcaaggaatcatttattgaaagtataatccaaataaaatttaattctaattcaactaattgcctggagaagttatgtaatgaagttagtattctctttaataatcaacctgattatcttacttttttaagagcaatggatggattcgaagttaatggattacgattattcagcctctcgattccagaaccttcagttaaaaatctttttgccgtaaatgaattttatagaaataatgatgatttcataaaccctgatctacaagaacggttagtgatcggggatgatagcatttcaatatttacttatgacattaaaaataacttttttgaaattagagataatattggcacagaaaatatattcagttcgtttagtgatttctcttcattcttaaacgaaatcatggacagttgttcataa

SEQ ID NO: 146453 - protein, 164 aa, Escherichia coli IAI39
MMTKTQINKLKKMMNDLDYPFEAPLKESFIESIIQIKFNSNSTNCLEKLCNEVSILFNNQPDYLTFLRAMDGFEVNGLRLFSLSIPEPSVKNLFAVNEFYRNNDDFINPDLQERLVIGDDSISIFTYDIKNNFFEIRDNIGTENIFSSFSDFSSFLNEIMDSCS

SEQ ID NO: 146454 - DNA, 495 bp, Escherichia coli UMN026
  CDS (1)..(495): transl_table=11
atgatgactaaaacccaaataaataaattaaaaaaaatgatgaatgatttagactatccatttgaagcaccgctcaaggaatcatttattgaaagtataatccaaatagaatttaattctaattcaactaattgcctggagaaattatgtaatgaagttagtattctttttaataatcaacctgattatcttaattttttaagagcaatggatggattcgaagttaatggattacgattatttagcctctcgattccagaaccttcagttaaaaacctttttaccgtaaatgaattttatagaaataatgatgatttcataaaccctgatctacaagaacggttagtgatcggggatgatagcatttcaatatttacttatgacattaaaagtaacttttttgaaattagagataatattggcaccgaaaatatattcagttcgtttagtgatttctcttcattcttaaacgaaatcatggacagttgttcataa

SEQ ID NO: 146455 - protein, 164 aa, Escherichia coli UMN026
MMTKTQINKLKKMMNDLDYPFEAPLKESFIESIIQIEFNSNSTNCLEKLCNEVSILFNNQPDYLNFLRAMDGFEVNGLRLFSLSIPEPSVKNLFTVNEFYRNNDDFINPDLQERLVIGDDSISIFTYDIKSNFFEIRDNIGTENIFSSFSDFSSFLNEIMDSCS

SEQ ID NO: 146456 - DNA, 495 bp, Escherichia coli UTI89
  CDS (1)..(495): transl_table=11
atgatgactaaaacccaaataaataaattaaaaaaaatgatgaatgatttagactatccatttgaagcaccgctcaaggaatcatttattgaaagtataatccaaataaaatttaattctaactcaactaattgcctggagaagttatgtaatgaagttagtattctctttaataatcaacctgattatcttacttttttaagagcaatggatggattcgaagttaatggattacgattatttagcctctcgattccagaaccttcagttaaaaacctttttgccgtaaatgaattttatagagataatgatgatttcataaatcctgacttacaagaacggttagtgatcgggaatgatagcatttcaatatttacttatgacattaaaagtaacttttttgaaattagagataatattggcacagaaaatatattcagttcgtttagtgatttctcttcattcttaaacgaaatcatggacagttgttcataa

SEQ ID NO: 146457 - protein, 164 aa, Escherichia coli UTI89
MMTKTQINKLKKMMNDLDYPFEAPLKESFIESIIQIKFNSNSTNCLEKLCNEVSILFNNQPDYLTFLRAMDGFEVNGLRLFSLSIPEPSVKNLFAVNEFYRDNDDFINPDLQERLVIGNDSISIFTYDIKSNFFEIRDNIGTENIFSSFSDFSSFLNEIMDSCS

SEQ ID NO: 146458 - DNA, 456 bp, Escherichia coli 536
  CDS (1)..(456): transl_table=11
atgaatgatttagactatccatttgaagcaccgctcaaggaatcatttattgaaagtataatccaaataaaattcaattctaactcaactaattgcctggagaagttatgtaatgaagttagtattctctttaataatcaacctgattatcttacttttttaagagcaatggatggattcgaagttaatggattacgattatttagcctctcgattccagaaccttcagttaaaaacctttttgccgtaaatgaattttatagagataatgatgatttcataaatcctgacttacaagaacggttagtgatcggggatgatagcatttcaatatttacttatgacattaaaagtaacttttttgaaattagagataatattggcacagaaaatatattcagttcgtttagtgatttctcttcattcttaaacgaaatcatggacagttgttcataa

SEQ ID NO: 146459 - protein, 151 aa, Escherichia coli 536
MNDLDYPFEAPLKESFIESIIQIKFNSNSTNCLEKLCNEVSILFNNQPDYLTFLRAMDGFEVNGLRLFSLSIPEPSVKNLFAVNEFYRDNDDFINPDLQERLVIGDDSISIFTYDIKSNFFEIRDNIGTENIFSSFSDFSSFLNEIMDSCS

SEQ ID NO: 146460 - DNA, 492 bp, Escherichia coli F11
  CDS (1)..(492): transl_table=11
atgactaaaacccaaataaataaattaaaaaaaatgatgaatgatttagactatccatttgaagcaccgctcaaggaatcatttattgaaagtataatccaaataaaattcaattctaactcaactaattgcctggagaagttatgtaatgaagttagtattctctttaataatcaacctgattatcttacttttttaagagcaatggatggattcgaagttaatggattacgattatttagcctctcgattccagaaccttcagttaaaaacctttttgccgtaaatgaattttatagagataatgatgatttcataaatcctgacttacaagaacggttagtgatcggggatgatagcatttcaatatttacttatgacattaaaagtaacttttttgaaattagagataatattggcacagaaaatatattcagttcgtttagtgatttctcttcattcttaaacgaaatcatggacagttgttcataa

SEQ ID NO: 146461 - protein, 163 aa, Escherichia coli F11
MTKTQINKLKKMMNDLDYPFEAPLKESFIESIIQIKFNSNSTNCLEKLCNEVSILFNNQPDYLTFLRAMDGFEVNGLRLFSLSIPEPSVKNLFAVNEFYRDNDDFINPDLQERLVIGDDSISIFTYDIKSNFFEIRDNIGTENIFSSFSDFSSFLNEIMDSCS

SEQ ID NO: 146462 - DNA, 501 bp, Enterobacter cancerogenus ATCC 35316
  CDS (1)..(501): transl_table=11
atgagtaataatattagtgaaattctgaatgatttaaaaagcaaaatgactaattggaattatccaatagaagagcctatcacagaccaatacatagagagtataaccaggcgaaaatcaacttctagcttaagcccaatgcttgaaaagctaggtgatgaagtttgtttattattcgtaaatcagccggattatgttactttcttagaaacaatggatggatttgaatttgatgggctgatcttgtttagtctatccataccagagccattagtaagaaacttgtttgtgatgaatgatttttacaggaataataatgattacatcaatcctgatttaagtgagcgattagttattggcaatgacagcatttctgtatttacctacgacagtaaaacaaatctgtttgaaattagagataatgtaggtactgaaaatgtctttggttcattttcgaactttacagattttctatcagaaatattagatacagtagcttaa

SEQ ID NO: 146463 - protein, 166 aa, Enterobacter cancerogenus ATCC 35316
MSNNISEILNDLKSKMTNWNYPIEEPITDQYIESITRRKSTSSLSPMLEKLGDEVCLLFVNQPDYVTFLETMDGFEFDGLILFSLSIPEPLVRNLFVMNDFYRNNNDYINPDLSERLVIGNDSISVFTYDSKTNLFEIRDNVGTENVFGSFSNFTDFLSEILDTVA

SEQ ID NO: 146464 - DNA, 28 bp, Artificial sequence
  primer
atgatgactaaaacccaaataaataaat

SEQ ID NO: 146465 - DNA, 26 bp, Artificial sequence
  primer
ttaaatcagtaagttggcagcatcac

SEQ ID NO: 146466 - protein, 163 aa, Artificial sequence
  consensus sequence
  Variant (4)..(6): Xaa in position 4 to 6 is any amino acid
  Variant (13)..(13): Xaa in position 13 is any amino acid
  Variant (39)..(39): Xaa in position 39 is any amino acid
  Variant (60)..(60): Xaa in position 60 is any amino acid
  Variant (104)..(104): Xaa in position 104 is any amino acid
  Variant (121)..(121): Xaa in position 121 is any amino acid
  Variant (133)..(133): Xaa in position 133 is any amino acid
  Variant (135)..(135): Xaa in position 135 is any amino acid
  Variant (142)..(142): Xaa in position 142 is any amino acid
  Variant (147)..(147): Xaa in position 147 is any amino acid
  Variant (149)..(149): Xaa in position 149 is any amino acid
  Variant (155)..(156): Xaa in position 155 to 156 is any amino acid
  Variant (159)..(159): Xaa in position 159 is any amino acid
  Variant (162)..(162): Xaa in position 162 is any amino acid
MTKXXXTQINKLXKMMNDLDYPFEAPLKESFIESIIQIXFNSNSTNCLEKLCNEVSILFXNQPDYLTFLRAMDGFEVNGLRLFSLSIPEPSVKNLFAVNEFYRXNDDFINPDLQERLVIGXDSISIFTYDIKXNXFEIRDNXGTENXFXSFSDFXXFLXEIXD

SEQ ID NO: 146467 - protein, 60 aa, Artificial sequence
  protein pattern
  Variant (44)..(44): Xaa in position 44 is Asp or Asn
NQPDYLTFLRAMDGFEVNGLRLFSLSIPEPSVKNLFAVNEFYRXNDDFINPDLQERLVIG

SEQ ID NO: 146468 - protein, 41 aa, Artificial sequence
  protein pattern
  Variant (24)..(24): Xaa in position 24 is Glu or Lys
MNDLDYPFEAPLKESFIESIIQIXFNSNSTNCLEKLCNEVS

SEQ ID NO: 146469 - protein, 15 aa, Artificial sequence
  protein pattern
  Variant (5)..(5): Xaa in position 5 is Ile or Val
  Variant (10)..(10): Xaa in position 10 is any amino acid
  Variant (12)..(12): Xaa in position 12 is Asn, Ser or Thr
  Variant (14)..(14): Xaa in position 14 is any or no amino acid
DSISXFTYDXKXNXF

SEQ ID NO: 146470 - protein, 12 aa, Artificial sequence
  protein pattern
  Variant (6)..(6): Xaa in position 6 is Asn or Ser
  Variant (9)..(9): Xaa in position 9 is any or no amino acid
  Variant (11)..(11): Xaa in position 11 is any or no amino acid
TKTQIXKLXKXM

SEQ ID NO: 146471 - protein, 21 aa, Artificial sequence
  protein pattern
  Variant (2)..(6): Xaa in position 2 to 6 is any amino acid
  Variant (7)..(7): Xaa in position 7 is any or no amino acid
  Variant (9)..(9): Xaa in position 9 is any or no amino acid
  Variant (11)..(11): Xaa in position 11 is any amino acid
  Variant (12)..(12): Xaa in position 12 is Asp, Glu or Ser
  Variant (13)..(13): Xaa in position 13 is any amino acid
  Variant (14)..(14): Xaa in position 14 is Ile or Leu
  Variant (15)..(15): Xaa in position 15 is any amino acid
  Variant (16)..(16): Xaa in position 16 is Glu or Gln
  Variant (18)..(19): Xaa in position 18 to 19 is any amino acid
  Variant (20)..(20): Xaa in position 20 is Asn, Ser or Thr
  Variant (21)..(21): Xaa in position 21 is Cys, Ser or Val
EXXXXXXSXFXXXXXXIXXXX

SEQ ID NO: 146472 - DNA, 927 bp, Escherichia coli
  CDS (1)..(927): transl_table=11
atgtctgagcagtttttgtatttcttgcagcagatgtttaacggcgtcacgctgggcagtacctacgcgctgatagccatcggctacaccatggtttacggcattatcggcatgatcaacttcgcccacggcgaggtttatatgattggcagctacgtctcatttatgatcatcgccgcgctgatgatgatgggcattgataccggctggctgctggtagctgcgggattcgtcggcgcaatcgtcattgccagcgcctacggctggagtatcgaacgggtggcttaccgcccggtgcgtaactctaagcgcctgattgcactcatctctgcaatcggtatgtccatcttcctgcaaaactacgtcagcctgaccgaaggttcgcgcgacgtggcgctgccgagcctgtttaacggtcagtgggtggtggggcatagcgaaaacttctctgcctctattaccaccatgcaggcggtgatctggattgttaccttcctcgccatgctggcgctgacgattttcattcgctattcccgcatgggtcgcgcgtgtcgtgcctgcgcggaagatctgaaaatggcgagtctgcttggcattaacaccgaccgggtgattgcgctgacctttgtgattggcgcggcgatggcggcggtggcgggtgtgctgctcggtcagttctacggcgtcattaacccctacatcggctttatggccgggatgaaagcctttaccgcggcggtgctcggtgggattggcagcattccgggagcgatgattggcggcctgattctggggattgcggaggcgctctcttctgcctatctgagtacggaatataaagatgtggtctcattcgccctgctgattctggtgctgctggtgatgccgaccggtattctgggtcgcccggaggtagagaaagtataa

SEQ ID NO: 146473 - protein, 308 aa, Escherichia coli; identical to SEQ ID NO: 61523

SEQ ID NO: 146474 - DNA, 924 bp, Brucella melitensis; identical to SEQ ID NO: 61158
  CDS (1)..(924): transl_table=11

SEQ ID NO: 146475 - protein, 307 aa, Brucella melitensis; identical to SEQ ID NO: 61159

SEQ ID NO: 146476 - DNA, 918 bp, Bradyrhizobium japonicum
  CDS (1)..(918): transl_table=11
atggattatttcgcccagcagctcatcaacggcctcgtgctcggctccatctacggcctgatcgcgatcggctacacgatggtctacggcatcgtcggcatgatcaacttcgcccatggcgacgtcttcatgatcggcggcttcatcgccctgatcaccttcctgatcctgatctcgctcggcctgaccgcgatcccggtgatcctgctcgtcgtgctgctggtcgcgatggcgatcacggcgctctatggctggaccatcgagcgcatcgcctaccggccgctgcggcattccttccgtctcgctccgatgctgtcggcgatcggcatgtcgttcgtgctgaccaactattcgcaggtggcgcaaggcgcccgcgtcaagccgatcccgcccttcatcaccggcggctacacgctgcatgagagcgcggacggcttcgtcatccagctctccaacatccagatcatggtggtcatcaccaccatcgtgctgctggcgatcttcacctggctggtgtcgcacacgcggctcgggcgcgacatgcgcgcctgcgagcaggaccagaccatggcggccctgctgggcgtcgacgtcgaccgcaccatctccatgaccttcgtgatcggcgccgcgctcgccgcggtcgcgggtttcatgtacctgctctattacggtctggtcgatttcttcatgggcttcgtcgccggcatcaaggccttcacggcggccgtgctcggcggaatcggctcgctgccgggcgccatgctcggcggtcttgcgatcggcctgatcgagacgttctggtcggcctatttctcggtcgaatacaaggacgtcgcggcattctcgatcctgatcgtcgtgctgatcttcatgccgaccggcctgctcggccgtcccgaagtcgaaaaagtctga

SEQ ID NO: 146477 - protein, 305 aa, Bradyrhizobium japonicum
MDYFAQQLINGLVLGSIYGLIAIGYTMVYGIVGMINFAHGDVFMIGGFIALITFLILISLGLTAIPVILLVVLLVAMAITALYGWTIERIAYRPLRHSFRLAPMLSAIGMSFVLTNYSQVAQGARVKPIPPFITGGYTLHESADGFVIQLSNIQIMVVITTIVLLAIFTWLVSHTRLGRDMRACEQDQTMAALLGVDVDRTISMTFVIGAALAAVAGFMYLLYYGLVDFFMGFVAGIKAFTAAVLGGIGSLPGAMLGGLAIGLIETFWSAYFSVEYKDVAAFSILIVVLIFMPTGLLGRPEVEKV

SEQ ID NO: 146478 - DNA, 1485 bp, Agrobacterium tumefaciens str. C58
  CDS (1)..(1485): transl_table=11
gtgataatgccggctggctttttgccggttgccgcacaccgccatgtcacaccagatgcggcttctgttcttgctgcggtcgatgaacagccagccgcaattgccgcagatccgcagccgttcccgcgtctcgccggcaagcagcgacaaggcggaatggacggtggcgttggcgagactttcggaggttggaaatgcccgcagtgccgtgccgccgacagagaggagccgggccagcttgccatcatcatcagccccgcgggaaacagccgaacggaagtgatcgtcgatcgcctcgcgaagttcgaggaaaatgggccgcttgtccgcttccggcgcgacgagggcggggaacctgtcacgctccataccaagtcgtgtcgctgcttcggcgaaggtgacgatctgttccggcacggaaaagcggtcgagcgttcttgccgcgtccgagcgcaggatcacgctattggcgacatcaagcgccagtgctccccctgcgaaacgatgttctgtccagcgaaatgtcatatacatattataactggtaaaaagcattttaacagttataattccggcaggaggacgggcttggcttatttcctgcaacaattgctgaatgccgtgccggtcgcagccctctatgcggttctggccttcggctacgccatcgccttctcggtcacgaaacgcgccgatgtgacctatggcgccatctttgccttcgccgggcagacttgcctgctttttgctgacttcggctggaaccggctgtggctggttctgccggcaacattggcgctgggggcaggggccggcctgttcggcgggctttgggccgcgggtctcatcggtagggcggtcatgcggccgctggcaaaggcctctcccaacgcggtgaccgtggcctccatcggcgtgctgattgcgctcacggaaagcgcaaggctcgccgccgatacaaggcaattatggctgccgccgcttttgtcgcagccagtacgtttctggatcgagggcggctttgccgtcaccctgacaccgattcagatgttgaatacagccgtcttctgccttctcattctcacaggttcgctttatctcggccgttccgctttcggcaggcgctggaaggccgtgtcggacgatgcctttgccgcctcgctcctgggggtgaacgcgagcaggatatttctgctgtcctattgcgcggcgggtctcgtggcagccatcgccggcgtgctcgccacgttttattacggcaccatggattttggcgccggtctcgtttttggcctgaaagtcgtgctgatctcggcggcgggcggatatgccagcccgctcatctgcggcctgggggcggcagccatcggttttgcggaaacattctgggtcggttacggccccgtcgcctggcgggatgcggcggttcttgccttgctggttggctggctcatcgtcatgcgcagccgggttgaagcagcttag

SEQ ID NO: 146479 - protein, 494 aa, Agrobacterium tumefaciens str. C58
MIMPAGFLPVAAHRHVTPDAASVLAAVDEQPAAIAADPQPFPRLAGKQRQGGMDGGVGETFGGWKCPQCRAADREEPGQLAIIISPAGNSRTEVIVDRLAKFEENGPLVRFRRDEGGEPVTLHTKSCRCFGEGDDLFRHGKAVERSCRVRAQDHAIGDIKRQCSPCETMFCPAKCHIHIITGKKHFNSYNSGRRTGLAYFLQQLLNAVPVAALYAVLAFGYAIAFSVTKRADVTYGAIFAFAGQTCLLFADFGWNRLWLVLPATLALGAGAGLFGGLWAAGLIGRAVMRPLAKASPNAVTVASIGVLIALTESARLAADTRQLWLPPLLSQPVRFWIEGGFAVTLTPIQMLNTAVFCLLILTGSLYLGRSAFGRRWKAVSDDAFAASLLGVNASRIFLLSYCAAGLVAAIAGVLATFYYGTMDFGAGLVFGLKVVLISAAGGYASPLICGLGAAAIGFAETFWVGYGPVAWRDAAVLALLVGWLIVMRSRVEAA

SEQ ID NO: 146480 - DNA, 1788 bp, Agrobacterium tumefaciens str. C58
  CDS (1)..(1788): transl_table=11
atgaggaagagtgacatgaccttaggtaaacatctttatcccgcggtagctgcgctttttctcgtcgccatctttccgcttctgcctgttccgcccttctgggtgacgctcgccaacaatatcggccttgcttcgcttgtggccatcgggctcgtgctgttgaccggcgtcggcggcatgacctctttcggtcaggcagcattctgtggtttcggcgcctatacgacggcggttctgacctctgcctacggtttctcgccctggctgaccttgccgctgtccctcctcgtcggcgcggttgtcgctttgccgctgggcttgatgacggttcggctatctggccactacctgccgcttggcaccatcgcctggggtcttgcgatttattacctgttcggccgcatcgaacttctcggccgttatgacggaatttcaggcataccgccgctatcgcttggcggcgaagcgctgatgagcagcagttcgatctattacatcatctggatcttcgtcatcgcggtggcgatcggcgcacagaacctgctcgacagtcgcgtcgggcgcggcattcgcgctctacgcggcggttcgcaggcggcggaggccttcggtgtcaatatcgagcgcgccaagcttaccgtcttcgtgtttgcggccgtggtggccgcgctttccggctggctttacgcccatatgcagcgatcgatcaacccgacccccttcggcctcgacatgggcatcacctatatgctgatggccgtggtgggcggctccggccgtgttgtcggggcgatcttcggcgcaagtgtcgtgctggtgttgaaggaggtgctgcaacgggtactgcccggcctcctcggcacatcggtcaatttcgaaatgatcgtattcggtgtgctgctcgtccttatcctgcagctttcccgtgatggtctctggccgcttctggaaagatacctgcccgcgcggccgccccgcaccatccggcgtgatggcgaagcgttggacaaacgccccatgccgcaaacgggcagcccgctggtgcgggtcgacagggtccgcaaggcctttggcgggctgacagcagtcaatgatgtcagcttcgacatcaaggccgggcagatcatcggcctgatcggcccgaatggcgccggcaagagcaccaccttcaacctcatcaccggcatcctcaacctgtccggtggagaagtcacctatcagggacaaagattgtcgggcctcaatccgcggctgatcgcacgacggggcattgccagaaccttccagcacgccaaggtgctgccgacgatgtctgttctggagaacgtggcgctgggcgcacatctgcgcggcaatgcgggcatgttccgcagcttcttccggctcgaacgcaggcaggagcaggcccttctggccgaagccgccgaccagcttgaccgcgtcggcctcggcgcccatcgcgaccgtccggccggcgacctcgcgctcgggcagatccgtatcctcgaaatcgcgcgcgcgctctgcctcaacccgaccctgctgttgctcgacgaaccggcggcaggcctgcgccacggcgaaaaacaggagctcgccgatctcctgaagaaactgcgggcagaaggtgtgagcgtgctgcttgtcgagcacgacatgggcttcgtcatggggctggtcgatcatatcgtcgtgctggacttcggcacattgatcgccgaaggcaagcctgcggacataaggcaacatccggccgtgatcgcggcctatctagggggtgcggcgtga

SEQ ID NO: 146481 - protein, 595 aa, Agrobacterium tumefaciens str. C58
MRKSDMTLGKHLYPAVAALFLVAIFPLLPVPPFWVTLANNIGLASLVAIGLVLLTGVGGMTSFGQAAFCGFGAYTTAVLTSAYGFSPWLTLPLSLLVGAVVALPLGLMTVRLSGHYLPLGTIAWGLAIYYLFGRIELLGRYDGISGIPPLSLGGEALMSSSSIYYIIWIFVIAVAIGAQNLLDSRVGRGIRALRGGSQAAEAFGVNIERAKLTVFVFAAVVAALSGWLYAHMQRSINPTPFGLDMGITYMLMAVVGGSGRVVGAIFGASVVLVLKEVLQRVLPGLLGTSVNFEMIVFGVLLVLILQLSRDGLWPLLERYLPARPPRTIRRDGEALDKRPMPQTGSPLVRVDRVRKAFGGLTAVNDVSFDIKAGQIIGLIGPNGAGKSTTFNLITGILNLSGGEVTYQGQRLSGLNPRLIARRGIARTFQHAKVLPTMSVLENVALGAHLRGNAGMFRSFFRLERRQEQALLAEAADQLDRVGLGAHRDRPAGDLALGQIRILEIARALCLNPTLLLLDEPAAGLRHGEKQELADLLKKLRAEGVSVLLVEHDMGFVMGLVDHIVVLDFGTLIAEGKPADIRQHPAVIAAYLGGAA

SEQ ID NO: 146482 - DNA, 1851 bp, Agrobacterium tumefaciens str. C58; identical to SEQ ID NO: 61120
  CDS (1)..(1851): transl_table=11

SEQ ID NO: 146483 - protein, 616 aa, Agrobacterium tumefaciens str. C58; identical to SEQ ID NO: 61121

SEQ ID NO: 146484 - DNA, 903 bp, Agrobacterium tumefaciens str. C58; identical to SEQ ID NO: 61152
  CDS (1)..(903): transl_table=11

SEQ ID NO: 146485 - protein, 300 aa, Agrobacterium tumefaciens str. C58; identical to SEQ ID NO: 61153

SEQ ID NO: 146486 - DNA, 936 bp, Agrobacterium tumefaciens str. C58; identical to SEQ ID NO: 61122
  CDS (1)..(936): transl_table=11

SEQ ID NO: 146487 - protein, 311 aa, Agrobacterium tumefaciens str. C58; identical to SEQ ID NO: 61123

SEQ ID NO: 146488 - DNA, 888 bp, Agrobacterium tumefaciens str. C58; identical to SEQ ID NO: 61124
  CDS (1)..(888): transl_table=11

SEQ ID NO: 146489 - protein, 295 aa, Agrobacterium tumefaciens str. C58; identical to SEQ ID NO: 61125

SEQ ID NO: 146490 - DNA, 903 bp, Sinorhizobium meliloti 1021; identical to SEQ ID NO: 61128
  CDS (1)..(903): transl_table=11

SEQ ID NO: 146491 - protein, 300 aa, Sinorhizobium meliloti 1021; identical to SEQ ID NO: 61129

SEQ ID NO: 146492 - DNA, 897 bp, Agrobacterium tumefaciens str. C58; identical to SEQ ID NO: 61134
  CDS (1)..(897): transl_table=11

SEQ ID NO: 146493 - protein, 298 aa, Agrobacterium tumefaciens str. C58; identical to SEQ ID NO: 61135

SEQ ID NO: 146494 - DNA, 1158 bp, Agrobacterium tumefaciens str. C58; identical to SEQ ID NO: 61136
  CDS (1)..(1158): transl_table=11

SEQ ID NO: 146495 - protein, 385 aa, Agrobacterium tumefaciens str. C58; identical to SEQ ID NO: 61137

SEQ ID NO: 146496 - DNA, 951 bp, Nostoc sp. PCC 7120; identical to SEQ ID NO: 61144
  CDS (1)..(951): transl_table=11

SEQ ID NO: 146497 - protein, 316 aa, Nostoc sp. PCC 7120; identical to SEQ ID NO: 61145

SEQ ID NO: 146498 - DNA, 897 bp, Agrobacterium tumefaciens str. C58
  CDS (1)..(897): transl_table=11
ttggcttatttcctgcaacaattgctgaatgccgtgccggtcgcagccctctatgcggttctggccttcggctacgccatcgccttctcggtcacgaaacgcgccgatgtgacctatggcgccatctttgccttcgccgggcagacttgcctgctttttgctgacttcggctggaaccggctgtggctggttctgccggcaacattggcgctgggggcaggggccggcctgttcggcgggctttgggccgcgggtctcatcggtagggcggtcatgcggccgctggcaaaggcctctcccaacgcggtgaccgtggcctccatcggcgtgctgattgcgctcacggaaagcgcaaggctcgccgccgatacaaggcaattatggctgccgccgcttttgtcgcagccagtacgtttctggatcgagggcggctttgccgtcaccctgacaccgattcagatgttgaatacagccgtcttctgccttctcattctcacaggttcgctttatctcggccgttccgctttcggcaggcgctggaaggccgtgtcggacgatgcctttgccgcctcgctcctgggggtgaacgcgagcaggatatttctgctgtcctattgcgcggcgggtctcgtggcagccatcgccggcgtgctcgccacgttttattacggcaccatggattttggcgccggtctcgtttttggcctgaaagtcgtgctgatctcggcggcgggcggatatgccagcccgctcatctgcggcctgggggcggcagccatcggttttgcggaaacattctgggtcggttacggccccgtcgcctggcgggatgcggcggttcttgccttgctggttggctggctcatcgtcatgcgcagccgggttgaagcagcttag

SEQ ID NO: 146499 - protein, 298 aa, Agrobacterium tumefaciens str. C58
MAYFLQQLLNAVPVAALYAVLAFGYAIAFSVTKRADVTYGAIFAFAGQTCLLFADFGWNRLWLVLPATLALGAGAGLFGGLWAAGLIGRAVMRPLAKASPNAVTVASIGVLIALTESARLAADTRQLWLPPLLSQPVRFWIEGGFAVTLTPIQMLNTAVFCLLILTGSLYLGRSAFGRRWKAVSDDAFAASLLGVNASRIFLLSYCAAGLVAAIAGVLATFYYGTMDFGAGLVFGLKVVLISAAGGYASPLICGLGAAAIGFAETFWVGYGPVAWRDAAVLALLVGWLIVMRSRVEAA

SEQ ID NO: 146500 - DNA, 942 bp, Agrobacterium tumefaciens str. C58; identical to SEQ ID NO: 61150
  CDS (1)..(942): transl_table=11

SEQ ID NO: 146501 - protein, 313 aa, Agrobacterium tumefaciens str. C58; identical to SEQ ID NO: 61151

SEQ ID NO: 146502 - DNA, 864 bp, Agrobacterium tumefaciens str. C58; identical to SEQ ID NO: 61154
  CDS (1)..(864): transl_table=11

SEQ ID NO: 146503 - protein, 287 aa, Agrobacterium tumefaciens str. C58; identical to SEQ ID NO: 61155

SEQ ID NO: 146504 - DNA, 894 bp, Agrobacterium tumefaciens str. C58; identical to SEQ ID NO: 61156
  CDS (1)..(894): transl_table=11

SEQ ID NO: 146505 - protein, 297 aa, Agrobacterium tumefaciens str. C58; identical to SEQ ID NO: 61157

SEQ ID NO: 146506 - DNA, 885 bp, Corynebacterium glutamicum ATCC 13032; identical to SEQ ID NO: 61166
  CDS (1)..(885): transl_table=11

SEQ ID NO: 146507 - protein, 294 aa, Corynebacterium glutamicum ATCC 13032; identical to SEQ ID NO: 61167

SEQ ID NO: 146508 - DNA, 927 bp, Fusobacterium nucleatum subsp. nucleatum ATCC 25586
  CDS (1)..(927): transl_table=11
ttgttttatctttttagatatagaaaatgggagggtaaaatggagtttttacttcaaataattaatggtttacaaataggaagtatctatgctctagtgtctttaggatatacaatggtatatggtatagcacaacttattaactttgcacatggtgatattataatgataggggcatatacttcacttttttcaattccattattcacatcaatgggtttaccaatctggacaacagttattccagcaataattatttgtgcagttataggttgcttagctgaaagaatagcatatagaccacttagaaattcaccaaggatatcaaatttaataactgctattggagttagtttatttatagaaaatgtctttatgaaggtatttacaccaaatacaagatcatttcctaaaatttttaatcaagcaccaataacttttggaaatggaataaatattagtttcggagctgctataactatacttacaacagttattttatctgtgggattacaattatttatgaaaaaaactaaatatggaaaagctatgatagcaacaagtcaagattatgcagcttctgaattagttggaataaatgtagatagaacagtacaattaacatttgcaataggtagtggacttgcagcagtaggttctgtattatatgtttcagcttatccacaaatacaacctttaatgggttcaatgcttggaataaaggcctttattgcagcagttttaggtgggattggaatactgccaggtgctgttttaggtggatttatattaggaattgttgaaagtttaacaagagcatatttatcttcacaacttgcagatgcttttgtattttcaatattaattatagttttattatttaaacctactggaatacttggaaagaatgtaaaggagaaagtataa

SEQ ID NO: 146509 - protein, 308 aa, Fusobacterium nucleatum subsp. nucleatum ATCC 25586
MFYLFRYRKWEGKMEFLLQIINGLQIGSIYALVSLGYTMVYGIAQLINFAHGDIIMIGAYTSLFSIPLFTSMGLPIWTTVIPAIIICAVIGCLAERIAYRPLRNSPRISNLITAIGVSLFIENVFMKVFTPNTRSFPKIFNQAPITFGNGINISFGAAITILTTVILSVGLQLFMKKTKYGKAMIATSQDYAASELVGINVDRTVQLTFAIGSGLAAVGSVLYVSAYPQIQPLMGSMLGIKAFIAAVLGGIGILPGAVLGGFILGIVESLTRAYLSSQLADAFVFSILIIVLLFKPTGILGKNVKEKV

SEQ ID NO: 146510 - DNA, 1197 bp, Streptomyces coelicolor A3(2); identical to SEQ ID NO: 60887
  CDS (1)..(1197): transl_table=11

SEQ ID NO: 146511 - protein, 398 aa, Streptomyces coelicolor A3(2); identical to SEQ ID NO: 60888

SEQ ID NO: 146512 - DNA, 900 bp, Streptomyces coelicolor A3(2); identical to SEQ ID NO: 61168
  CDS (1)..(900): transl_table=11

SEQ ID NO: 146513 - protein, 299 aa, Streptomyces coelicolor A3(2); identical to SEQ ID NO: 61169

SEQ ID NO: 146514 - DNA, 933 bp, Streptomyces coelicolor A3(2); identical to SEQ ID NO: 61170
  CDS (1)..(933): transl_table=11

SEQ ID NO: 146515 - protein, 310 aa, Streptomyces coelicolor A3(2); identical to SEQ ID NO: 61171

SEQ ID NO: 146516 - DNA, 873 bp, Streptomyces coelicolor A3(2); identical to SEQ ID NO: 61172
  CDS (1)..(873): transl_table=11

SEQ ID NO: 146517 - protein, 290 aa, Streptomyces coelicolor A3(2); identical to SEQ ID NO: 61173

SEQ ID NO: 146518 - DNA, 927 bp, Yersinia pestis KIM; identical to SEQ ID NO: 119248
  CDS (1)..(927): transl_table=11

SEQ ID NO: 146519 - protein, 308 aa, Yersinia pestis KIM; identical to SEQ ID NO: 119249

SEQ ID NO: 146520 - DNA, 927 bp, Bifidobacterium longum NCC2705; identical to SEQ ID NO: 61180
  CDS (1)..(927): transl_table=11

SEQ ID NO: 146521 - protein, 308 aa, Bifidobacterium longum NCC2705; identical to SEQ ID NO: 61181

SEQ ID NO: 146522 - DNA, 909 bp, Brucella suis 1330
  CDS (1)..(909): transl_table=11
atggaatatttcttccagcaggtgatcaacgggcttgcgctcggttcgatctatggcctgatcgccatcggttatacgatggtctatggcattatcggcatgatcaactttgctcatggcgatatcttcatgctcggcgcgttcatggcgctgattgttttcctcattatcacgaccttcaccggaatgctgccggttgcactgatgctgcttttgatgatgatcgtcgccatgcttctgacgggtctgtggagctgggcgatcgagcgcgtggcctatcgaccgctgcgtggttcgttccgccttgcgccgctgatcacggctatcggcatgtcgattgccttgtcgaacttcgttcaggtcacgcagggtccgcgcaacaagccggttccccagcttctgaatggttcctacgagctgttcggcagcggcgtcacgatctcgctcaagcagatcgtggtgatcgtggttacggcaatattgctcacgatcttctggtatgtcgtcaaccgcacctcgctggggcgcgcgcaaagggcttgcgagcaggatcgcaagatggcggcccttcttggcatcaatgtcgaccgtgtcatctcgctcaccttcgtgatgggcgccatgctggcggccgtagccgggacgctttacctctccttctatggcgtgatttcgttcgctgacgggttcatccccggtgtgaaggcgttcacggcggcggttctgggcggcatcggctcgcttccgggggctgttgtcggcgggttgcttatcggtctcatcgaagcgttgtggtcggcctatttctcgatcgactacaaggacgtcgccgcgttctcgatcctggctatcgtgctgatcttcatgccgtccggcattcttggccgacctgaagtcgaaaaggtgtaa

SEQ ID NO: 146523 - protein, 302 aa, Brucella suis 1330
MEYFFQQVINGLALGSIYGLIAIGYTMVYGIIGMINFAHGDIFMLGAFMALIVFLIITTFTGMLPVALMLLLMMIVAMLLTGLWSWAIERVAYRPLRGSFRLAPLITAIGMSIALSNFVQVTQGPRNKPVPQLLNGSYELFGSGVTISLKQIVVIVVTAILLTIFWYVVNRTSLGRAQRACEQDRKMAALLGINVDRVISLTFVMGAMLAAVAGTLYLSFYGVISFADGFIPGVKAFTAAVLGGIGSLPGAVVGGLLIGLIEALWSAYFSIDYKDVAAFSILAIVLIFMPSGILGRPEVEKV

SEQ ID NO: 146524 - DNA, 927 bp, Shigella flexneri 2a str. 301; identical to SEQ ID NO: 61184
  CDS (1)..(927): transl_table=11

SEQ ID NO: 146525 - protein, 308 aa, Shigella flexneri 2a str. 301; identical to SEQ ID NO: 61185

SEQ ID NO: 146526 - DNA, 861 bp, Pseudomonas putida KT2440; identical to SEQ ID NO: 61188
  CDS (1)..(861): transl_table=11

SEQ ID NO: 146527 - protein, 286 aa, Pseudomonas putida KT2440; identical to SEQ ID NO: 61189

SEQ ID NO: 146528 - DNA, 924 bp, Pseudomonas putida KT2440; identical to SEQ ID NO: 61190
  CDS (1)..(924): transl_table=11

SEQ ID NO: 146529 - protein, 307 aa, Pseudomonas putida KT2440; identical to SEQ ID NO: 61191

SEQ ID NO: 146530 - DNA, 882 bp, Pseudomonas putida KT2440; identical to SEQ ID NO: 61192
  CDS (1)..(882): transl_table=11

SEQ ID NO: 146531 - protein, 293 aa, Pseudomonas putida KT2440; identical to SEQ ID NO: 61193

SEQ ID NO: 146532 - DNA, 882 bp, Pseudomonas putida KT2440; identical to SEQ ID NO: 61194
  CDS (1)..(882): transl_table=11

SEQ ID NO: 146533 - protein, 293 aa, Pseudomonas putida KT2440; identical to SEQ ID NO: 61195

SEQ ID NO: 146534 - DNA, 1041 bp, Pseudomonas putida KT2440; identical to SEQ ID NO: 60901
  CDS (1)..(1041): transl_table=11

SEQ ID NO: 146535 - protein, 346 aa, Pseudomonas putida KT2440; identical to SEQ ID NO: 60902

SEQ ID NO: 146536 - DNA, 1308 bp, Pseudomonas putida KT2440; identical to SEQ ID NO: 60905
  CDS (1)..(1308): transl_table=11

SEQ ID NO: 146537 - protein, 435 aa, Pseudomonas putida KT2440; identical to SEQ ID NO: 60906

SEQ ID NO: 146538 - DNA, 915 bp, Pseudomonas putida KT2440; identical to SEQ ID NO: 61198
  CDS (1)..(915): transl_table=11

SEQ ID NO: 146539 - protein, 304 aa, Pseudomonas putida KT2440; identical to SEQ ID NO: 61199

SEQ ID NO: 146540 - DNA, 924 bp, Pseudomonas syringae pv. tomato str. DC3000
  CDS (1)..(924): transl_table=11
atgcccgagtttttccactacatgcagcagctggtcaatggtctgaccattggcagtacgtatgcattgatcgccatcggctacacgatggtgtacggcatcattggaatgatcaacttcgcccatggcgaggtgtacatgatcggttcttatgtggccttcatggcactcgccggtctggcgatgctggggattcatagcctgccgttgctgatgattgccggctttgccgcagcgatcgtcgtaaccagcgcctacggatacagcatcgagcgtgtggcctatcggccattgcgcaacagcaaccgtctgattccactgatttctgcgatcggcatgtcgatctttctgcagaactcggttcagctttctcagggttccggcaactttgccatccccaacctgctgcccggcagcctgtcgttcgggcccggtggttcgcaggaagtgcttatttcctacatgcagatcgtggtgttcgtcgtcaccctgctggccatgaccggcctgaccctgttcatctcccgctcgcgaatgggccgcgcctgccgcgcctgcgccgaagacatgaaaatggccaacctgctgggcatcaacaccaacaacatcattgccctgaccttcgtggtcggcgcggcactggccgccgtcgccgcgatgctgctgagcatgcaatacggcgtgatcaacccgagtgccgggtttctggtcggcctgaaagcgttcacagcggcggtgctgggcggtataggatcgatccctggcgcggtgctcggcggtctggtattgggcgtcgccgaggcgttcggtgccgacattttcggtgatcagtacaaggacgtcgtggccttcggcctgctggttctggtgctgctgttccgaccgaccggtattctgggtcgtccggaggttgaaaaagtatga

SEQ ID NO: 146541 - protein, 307 aa, Pseudomonas syringae pv. tomato str. DC3000
MPEFFHYMQQLVNGLTIGSTYALIAIGYTMVYGIIGMINFAHGEVYMIGSYVAFMALAGLAMLGIHSLPLLMIAGFAAAIVVTSAYGYSIERVAYRPLRNSNRLIPLISAIGMSIFLQNSVQLSQGSGNFAIPNLLPGSLSFGPGGSQEVLISYMQIVVFVVTLLAMTGLTLFISRSRMGRACRACAEDMKMANLLGINTNNIIALTFVVGAALAAVAAMLLSMQYGVINPSAGFLVGLKAFTAAVLGGIGSIPGAVLGGLVLGVAEAFGADIFGDQYKDVVAFGLLVLVLLFRPTGILGRPEVEKV

SEQ ID NO: 146542 - DNA, 933 bp, Streptomyces avermitilis MA-4680
  CDS (1)..(933): transl_table=11
gtgcacaccctgccgcagcagctggccaacgggctgttcctcggctcgatgtacgggctgatcgccatcggttacacgatggtgtacggcatcgtccagctcatcaacttcgcccacggcgagatcttcatgaccggaggcttcggcgcactcacggtctacttctacgtcctgccagacggcacatccatgtggatagccctcccggcgatgctcatcggaggcggcctcatcgccgtactcatcgccgtcggggcggaacgcttcgcctaccggcccctgcgcggcgcaccacgcctcgcccccctcatcaccgccatcggcctctccctcggcctccagcaggtggtcttcaacttctacccggacgccaagaccgacaggaccttcccccagctgggcaccgagtccttcaacatcggctccgtccacatccagagcggccagctcttcatcatcatcgccgcccccatctgtatggccgctctcggcttcttcgtccgcctctcccgcaccggccgcgccatgcaggccaccgcccaggacccggacaccgcccagctcatgggcatcgacaccaaccgcatcatcgtcatcgccttcgccatcggcggactcttcgccgcggtcgccgccgtcgcctacggcctgcgctacggccagatcaagtacgacatgggcttccagatgggcctcaaggccttcaccgcggccgtcctcggcggcatcggcaacatctacggcgccatgctcggcggagtcgtcctcggcgtcgccgaaaccctcgccaccgcctacatcgacggcatccccggcatgcagcagctcggcggcggcagctgggcccccgtctgggccttcgtcctcctcatcctcgtactgctgctgcggccacaaggcctcctcggcgaacgcgtcgcggacagggcgtga

SEQ ID NO: 146543 - protein, 310 aa, Streptomyces avermitilis MA-4680
MHTLPQQLANGLFLGSMYGLIAIGYTMVYGIVQLINFAHGEIFMTGGFGALTVYFYVLPDGTSMWIALPAMLIGGGLIAVLIAVGAERFAYRPLRGAPRLAPLITAIGLSLGLQQVVFNFYPDAKTDRTFPQLGTESFNIGSVHIQSGQLFIIIAAPICMAALGFFVRLSRTGRAMQATAQDPDTAQLMGIDTNRIIVIAFAIGGLFAAVAAVAYGLRYGQIKYDMGFQMGLKAFTAAVLGGIGNIYGAMLGGVVLGVAETLATAYIDGIPGMQQLGGGSWAPVWAFVLLILVLLLRPQGLLGERVADRA

SEQ ID NO: 146544 - DNA, 927 bp, Bordetella bronchiseptica RB50
  CDS (1)..(927): transl_table=11
atgtcagacctcatcccacaacttacccagcagttcttcaacggactgtccctgggggcgatctacgcgttgattgccattggctacacaatggtctacggcatcatcggtatgatcaacttcgcccacggcgagatctacatgatcggcgcctacgtcggcctggtcacgctgacggccatcggcaccaacagcggcctgccgctgcctttcatcatcgccgccatgctggtggtcgccatcttcgtgaccggcgtctacggctatagcgtcgaacgcgtggcgtaccggcccgtgcgcggcagcccccgcctggtggcgctgatctcggccatcggcatgtcgatcttcctgcagaactgggtcgctctcgggcagggcgcgcgcgacatggccgtgccggcgctggtctcgggcgcggtgcagttccacatgggttccagcttcgacgtcaccgtaccgtattcgcgcatcatgatcatcgtggtgaccgtggtgctgatggtggcgctcacgctgttcatcaagtattcgcgcatggggcgcgcctcgcgcgcctgctcgcaggacatgcacatggccaacctgctgggcatcgacaccaaccgggtgatttccttcaccttcgtgctgggcgccatgctggccgcggtgggaggcgtgctgatcgccatcaccatcggcaagctgaatccgttcatcggcttcctggcgggcatcaaggcgttcaccgccgcggtgctgggcggcatcggcagcattcccggcgcgatgctgggcggcgtgctgctgggcctggccgaaaccttcgcggccgcctacatctcatcgcaatacaaggacatcgtggcttttgcgctgctggtgctgatcctgctgttccgtcccaccgggctgctcggcaaacctgaggtggaaaaagtctga

SEQ ID NO: 146545 - protein, 308 aa, Bordetella bronchiseptica RB50; identical to SEQ ID NO: 61209

SEQ ID NO: 146546 - DNA, 930 bp, Chromobacterium violaceum ATCC 12472; identical to SEQ ID NO: 61236
  CDS (1)..(930): transl_table=11

SEQ ID NO: 146547 - protein, 309 aa, Chromobacterium violaceum ATCC 12472; identical to SEQ ID NO: 61237

SEQ ID NO: 146548 - DNA, 903 bp, Wolinella succinogenes DSM 1740; identical to SEQ ID NO: 61238
  CDS (1)..(903): transl_table=11

SEQ ID NO: 146549 - protein, 300 aa, Wolinella succinogenes DSM 1740; identical to SEQ ID NO: 61239

SEQ ID NO: 146550 - DNA, 927 bp, Photorhabdus luminescens subsp. laumondii TTO1; identical to SEQ ID NO: 61240
  CDS (1)..(927): transl_table=11

SEQ ID NO: 146551 - protein, 308 aa, Photorhabdus luminescens subsp. laumondii TTO1; identical to SEQ ID NO: 61241

SEQ ID NO: 146552 - DNA, 918 bp, Rhodopseudomonas palustris CGA009
  CDS (1)..(918): transl_table=11
atggactatttcgcccagcagctcatcaacggtctcgtgctcggctcgatctatggcctgatcgcgatcggctacacgatggtgtacggcatcgtcggcatgatcaatttcgcccatggcgacatcttcatgatcggcggcttcatcgcgctgatcagcttcctgatcctggtgtcgttcggcctcaccttcgtcccgctcatcctcctggtggtgctgctggtgtcgatggcgatcaccgcgctgtacggctggacggtcgagcgcatagcgtaccgcccgttgcggcattcgttccgcctcgccccgatgctgtcggcgatcggcatgtcgttcgtgctgatgaactacgcccaggtgtcgcagggcgcccgcgtcaagccggtgccgccgatcatcaccggcggctatacgctgcacgagagcgccgacggcttcaacgtgcagctctccaacgtccagatccttgtggtggtcaccaccgtggtgctgctcggcatcttcacctggctggtggccaagacccggctcggccgcgacatgcgcgcctgcgagcaggatcagaccatggctgcgctgctcggcgtcgacgtcgaccgcaccatctcgatgaccttcgtgatcggcgccgcgctcgcctcggtcgcgggcatgatgtacctgctgtattacgggctgatcgacttcttcatgggcttcatcgccggcatcaaggctttcaccgcggctgtgctcggcggcatcggctcgctgcccggcgcgatgctcggcggcctgttgatcggcctgatcgagaccttctggtcggcctatttctcggtcgagtacaaggacgttgcggcgttctcgatcctgatcatcgtgctgatcttcatgccgaccggcctgctgggccggccggaagtcgaaaaagtctga

SEQ ID NO: 146553 - protein, 305 aa, Rhodopseudomonas palustris CGA009
MDYFAQQLINGLVLGSIYGLIAIGYTMVYGIVGMINFAHGDIFMIGGFIALISFLILVSFGLTFVPLILLVVLLVSMAITALYGWTVERIAYRPLRHSFRLAPMLSAIGMSFVLMNYAQVSQGARVKPVPPIITGGYTLHESADGFNVQLSNVQILVVVTTVVLLGIFTWLVAKTRLGRDMRACEQDQTMAALLGVDVDRTISMTFVIGAALASVAGMMYLLYYGLIDFFMGFIAGIKAFTAAVLGGIGSLPGAMLGGLLIGLIETFWSAYFSVEYKDVAAFSILIIVLIFMPTGLLGRPEVEKV

SEQ ID NO: 146554 - DNA, 876 bp, Geobacter sulfurreducens PCA; identical to SEQ ID NO: 61248
  CDS (1)..(876): transl_table=11

SEQ ID NO: 146555 - protein, 291 aa, Geobacter sulfurreducens PCA; identical to SEQ ID NO: 61249

SEQ ID NO: 146556 - DNA, 930 bp, Herminiimonas arsenicoxydans; identical to SEQ ID NO: 61258
  CDS (1)..(930): transl_table=11

SEQ ID NO: 146557 - protein, 309 aa, Herminiimonas arsenicoxydans; identical to SEQ ID NO: 61259

SEQ ID NO: 146558 - DNA, 927 bp, Burkholderia vietnamiensis G4; identical to SEQ ID NO: 61266
  CDS (1)..(927): transl_table=11

SEQ ID NO: 146559 - protein, 308 aa, Burkholderia vietnamiensis G4; identical to SEQ ID NO: 61267

SEQ ID NO: 146560 - DNA, 969 bp, Thermus thermophilus HB27; identical to SEQ ID NO: 61280
  CDS (1)..(969): transl_table=11

SEQ ID NO: 146561 - protein, 322 aa, Thermus thermophilus HB27; identical to SEQ ID NO: 61281

SEQ ID NO: 146562 - DNA, 909 bp, Desulfovibrio vulgaris subsp. vulgaris str. Hildenborough
  CDS (1)..(909): transl_table=11
atggattggcagtatttctgtgaactcttgttcggtgggctcacgcgcggcagcatctatgcacttatcgcgctcggctacaccatggtgtacgggatcatcgagctcatcaacttcgcccatggcgaggtctacatgatcggcgcgttcacggcgctcatcgtggcgggtgtgctcggcatctatggctttcccgaggcgggcatcctcatcatcgccgccatcgtcgcggtcatctactgcgccgcctacgggttcacgctggagaaggtggcgtacaagcccctgcgtgacgcgccacgcctttctccgctgatctcggccatcggcatgtccatctttctccagaactatgtcatcctcgcgcagacctcggacttcgtgccgtttccgcgcctcgtgcccgacctcgccatccttgagcccatcgcccacatcaccgggacgagtgatgttctgatcatcgtcacgagcgccatcaccatggtgggcctcaccctgttcatcaagtacacccgcatgggcaaggccatgcgcgccacggcgcagaaccgcaagatggccatgctgctcggcatcgacgccgacagggtcatctccctcaccttcatcatcggttcctcgctggcggccatcggcggcgtgctcatcgcctcgcatatcggtcaggtgaacttcgccatcggcttcatcgcaggcatcaaggcgttcaccgccgctgtgcttggcggcatcggctccattcctggcgccatggcgggcgggcttgtgctcggcctttgcgagagtttcgcaaccggctacgtgtccagcgactatgaagacgccctcgccttcgcgctgctcgtgctcattctcatcttcagaccctccggtatcctgggcaagcccaagacccagaaggtctag

SEQ ID NO: 146563 - protein, 302 aa, Desulfovibrio vulgaris subsp. vulgaris str. Hildenborough
MDWQYFCELLFGGLTRGSIYALIALGYTMVYGIIELINFAHGEVYMIGAFTALIVAGVLGIYGFPEAGILIIAAIVAVIYCAAYGFTLEKVAYKPLRDAPRLSPLISAIGMSIFLQNYVILAQTSDFVPFPRLVPDLAILEPIAHITGTSDVLIIVTSAITMVGLTLFIKYTRMGKAMRATAQNRKMAMLLGIDADRVISLTFIIGSSLAAIGGVLIASHIGQVNFAIGFIAGIKAFTAAVLGGIGSIPGAMAGGLVLGLCESFATGYVSSDYEDALAFALLVLILIFRPSGILGKPKTQKV

SEQ ID NO: 146564 - DNA, 927 bp, Erwinia carotovora subsp. atroseptica SCRI1043; identical to SEQ ID NO: 61288
  CDS (1)..(927): transl_table=11

SEQ ID NO: 146565 - protein, 308 aa, Erwinia carotovora subsp. atroseptica SCRI1043; identical to SEQ ID NO: 61289

SEQ ID NO: 146566 - DNA, 888 bp, Symbiobacterium thermophilum IAM 14863; identical to SEQ ID NO: 61294
  CDS (1)..(888): transl_table=11

SEQ ID NO: 146567 - protein, 295 aa, Symbiobacterium thermophilum IAM 14863; identical to SEQ ID NO: 61295

SEQ ID NO: 146568 - DNA, 891 bp, Symbiobacterium thermophilum IAM 14863; identical to SEQ ID NO: 61296
  CDS (1)..(891): transl_table=11

SEQ ID NO: 146569 - protein, 296 aa, Symbiobacterium thermophilum IAM 14863; identical to SEQ ID NO: 61297

SEQ ID NO: 146570 - DNA, 924 bp, Pseudomonas fluorescens Pf-5; identical to SEQ ID NO: 61320
  CDS (1)..(924): transl_table=11

SEQ ID NO: 146571 - protein, 307 aa, Pseudomonas fluorescens Pf-5; identical to SEQ ID NO: 61321

SEQ ID NO: 146572 - DNA, 927 bp, Ralstonia eutropha JMP134; identical to SEQ ID NO: 61328
  CDS (1)..(927): transl_table=11

SEQ ID NO: 146573 - protein, 308 aa, Ralstonia eutropha JMP134; identical to SEQ ID NO: 61329

SEQ ID NO: 146574 - DNA, 951 bp, Anabaena variabilis ATCC 29413; identical to SEQ ID NO: 61336
  CDS (1)..(951): transl_table=11

SEQ ID NO: 146575 - protein, 316 aa, Anabaena variabilis ATCC 29413; identical to SEQ ID NO: 61337

SEQ ID NO: 146576 - DNA, 924 bp, Pseudomonas fluorescens PfO-1; identical to SEQ ID NO: 61342
  CDS (1)..(924): transl_table=11

SEQ ID NO: 146577 - protein, 307 aa, Pseudomonas fluorescens PfO-1; identical to SEQ ID NO: 61343

SEQ ID NO: 146578 - DNA, 885 bp, Carboxydothermus hydrogenoformans Z-2901; identical to SEQ ID NO: 119294
  CDS (1)..(885): transl_table=11

SEQ ID NO: 146579 - protein, 294 aa, Carboxydothermus hydrogenoformans Z-2901; identical to SEQ ID NO: 119295

SEQ ID NO: 146580 - DNA, 960 bp, Burkholderia sp. 383; identical to SEQ ID NO: 61344
  CDS (1)..(960): transl_table=11

SEQ ID NO: 146581 - protein, 319 aa, Burkholderia sp. 383; identical to SEQ ID NO: 61345

SEQ ID NO: 146582 - DNA, 942 bp, Synechococcus elongatus PCC 7942; identical to SEQ ID NO: 61352
  CDS (1)..(942): transl_table=11

SEQ ID NO: 146583 - protein, 313 aa, Synechococcus elongatus PCC 7942; identical to SEQ ID NO: 61353

SEQ ID NO: 146584 - DNA, 915 bp, Rhodospirillum rubrum ATCC 11170
  CDS (1)..(915): transl_table=11
gtggcttactttctacagcaattgatcaacgggcttacgctcggagcgatctacggcctgatcgccattggctatacaatggtgtacggcattatcggcatgatcaacttcgcccatggcgaaatctacatgatcggtgccttcctcacggtgatctgctttgtgttgctgggggggccggagttcgccagcgttcccttggccctgctgctgatcctcgtggtctcgatggtcttcaccgccgcctatggctggacggtggagcgcctggcctaccggcccttgcgcggatccttccgcctcgcgccgctgatttcggcgatcggcatgtccatcgccctgcagaattatgtccagatcacccagggcgcccgcgtcaagccgatccaaccggtgatccgcggcgggttcgaggtgttcaatcagggcgggttcgccgttcaaatcagctacttgcagatcttcatctggattttgaccatcggtctgatgatgggcttcacctatgtgatcacccagacctcgatgggccgccagcaaagagcctgcgagcaggaccgcaagatggcctcgctgatcggcgtcaacgtcgaccgcaccatttcgctgaccttcgtcatcggcgcccttttggccgccgtcgccggcttgatcaccacgctttattacggcgtgatcgacttctatatcggcttcctggccggcatgaaggccttcaccgcggcggtgctgggggggatcggatcgctgcccggggccatgctgggcggcttgctgatcggcctgatcgaggccttctggtcggcctatttcaccattgaatacaaagatgtggctacctttggcattctggttctggtgctcatcttcaaacccaccggcttccttggcaaacccgaagtggagaaggtgtga

SEQ ID NO: 146585 - protein, 304 aa, Rhodospirillum rubrum ATCC 11170
MAYFLQQLINGLTLGAIYGLIAIGYTMVYGIIGMINFAHGEIYMIGAFLTVICFVLLGGPEFASVPLALLLILVVSMVFTAAYGWTVERLAYRPLRGSFRLAPLISAIGMSIALQNYVQITQGARVKPIQPVIRGGFEVFNQGGFAVQISYLQIFIWILTIGLMMGFTYVITQTSMGRQQRACEQDRKMASLIGVNVDRTISLTFVIGALLAAVAGLITTLYYGVIDFYIGFLAGMKAFTAAVLGGIGSLPGAMLGGLLIGLIEAFWSAYFTIEYKDVATFGILVLVLIFKPTGFLGKPEVEKV

SEQ ID NO: 146586 - DNA, 909 bp, Moorella thermoacetica ATCC 39073; identical to SEQ ID NO: 119304
  CDS (1)..(909): transl_table=11

SEQ ID NO: 146587 - protein, 302 aa, Moorella thermoacetica ATCC 39073; identical to SEQ ID NO: 119305

SEQ ID NO: 146588 - DNA, 903 bp, Syntrophus aciditrophicus SB; identical to SEQ ID NO: 61356
  CDS (1)..(903): transl_table=11

SEQ ID NO: 146589 - protein, 300 aa, Syntrophus aciditrophicus SB; identical to SEQ ID NO: 61357

SEQ ID NO: 146590 - DNA, 930 bp, Mesorhizobium sp. BNC1
  CDS (1)..(930): transl_table=11
atggagtactttattcagcagctgattaatgggctgacgctcgggtccatttatggcctgatcgctatcggctacacgatggtctacggcatcattggcatgatcaacttcgcccatggcgatattttcatgatcggcgcctttatctcgctcgccgtcttcctgatcctcacaagcgtgctcggcttcgcctttctgccggtggtgcttcttatcgtgatcatcgtggcgatgctgttcacctccgcatggggctggacggtggagcgcgtggcctaccggcccttgcgcggctcctttcgtctggcgccgctgataaccgccatcggcatgtcgatcgtgcttcagaatttcgtgcaggtcacccagggtgcgcgcgtgaagccgctgccgccgcaaatccggggcggcgtgacgcttatcgagggctcgaccgaggcgggcacaatcgtcgtgcagctttcctacatgcaaatcatcatcatcgtgaccacggtggtgctgatggcggcctttacgcttctgatctcccgcacatcgctgggccgcgcccagcgcgcctgcgaacaggaccgcaaaatggccgctcttcttggcgtcgacgtggaccggaccatttccctcaccttcgtcatgggcgccgcgctcgccgccgtggcgggtttcatgttcctgctgctttatggcgtgatcgatttctatatcggcttcgtcgctggcgtgaaggccttcacggcggcagtgctcggcggcatcggttcccttccaggagcgatgctgggcgggctcctgattggcttgatcgaggtgttctggtctggctatttctcagtcgagtataaagatgtggcggccttctcgatccttgccatcgtcctcatcttcctgccatcgggcctgcttgggcgtccagaagtggagaaggtctga

SEQ ID NO: 146591 - protein, 309 aa, Mesorhizobium sp. BNC1
MEYFIQQLINGLTLGSIYGLIAIGYTMVYGIIGMINFAHGDIFMIGAFISLAVFLILTSVLGFAFLPVVLLIVIIVAMLFTSAWGWTVERVAYRPLRGSFRLAPLITAIGMSIVLQNFVQVTQGARVKPLPPQIRGGVTLIEGSTEAGTIVVQLSYMQIIIIVTTVVLMAAFTLLISRTSLGRAQRACEQDRKMAALLGVDVDRTISLTFVMGAALAAVAGFMFLLLYGVIDFYIGFVAGVKAFTAAVLGGIGSLPGAMLGGLLIGLIEVFWSGYFSVEYKDVAAFSILAIVLIFLPSGLLGRPEVEKV

SEQ ID NO: 146592 - DNA, 915 bp, Pseudomonas aeruginosa UCBPP-PA14; identical to SEQ ID NO: 61404
  CDS (1)..(915): transl_table=11

SEQ ID NO: 146593 - protein, 304 aa, Pseudomonas aeruginosa UCBPP-PA14; identical to SEQ ID NO: 61405

SEQ ID NO: 146594 - DNA, 879 bp, Leuconostoc mesenteroides subsp. mesenteroides ATCC 8293
  CDS (1)..(879): transl_table=11
atgactactttcattcagcaattaatcaatggtcttatgctaggcagtgtctatgcgctactagctttaggctatacaatggtctacggtattattaaattaatcaattttgcacatggtgatatatacatgctcggtgcgtattttggctattttttcatcaaggttttacatttgaatttctttatagcgttaattctcgcaatggcagtaagcgccattattggtgtggtcattgagtatattgcctatcgaccattgcgtcattctccaagaattgcggttcttatctccgctttaggcatctcttttttactagaaaatggcatgacttatttatatgggtcagatcaacgttcatttccacaggcgattaagacagtacaataccacttttatggtatacaagtttcaaatattcagttgattattgctgtaacttcaatagttttgatgctgttattaacttacattgttaaaaatacaaaaatgggtcgtgcgatgcgagcagtatccgcagatccagatgcagcgtcattaatgggcatcaacatcaatcacacaatttcatttacatttgcaattgggtcagcattggcggcggctggtggcgttttgattggattatattataacagtattgacccattgatgggtatgactcctgggttgaaagcgtttgttgccgcggttttgggtggtataggcattattccaggggcagcagtaggtggttggctaatcggtatattggaaacaatggttcaagcgacagctttttcagattacaaagatgcgattgtgtatgcaatgttgattgtcatattgcttattaaaccgactggtattttagggaaaaacaagcgggagaaagtttga

SEQ ID NO: 146595 - protein, 292 aa, Leuconostoc mesenteroides subsp. mesenteroides ATCC 8293
MTTFIQQLINGLMLGSVYALLALGYTMVYGIIKLINFAHGDIYMLGAYFGYFFIKVLHLNFFIALILAMAVSAIIGVVIEYIAYRPLRHSPRIAVLISALGISFLLENGMTYLYGSDQRSFPQAIKTVQYHFYGIQVSNIQLIIAVTSIVLMLLLTYIVKNTKMGRAMRAVSADPDAASLMGININHTISFTFAIGSALAAAGGVLIGLYYNSIDPLMGMTPGLKAFVAAVLGGIGIIPGAAVGGWLIGILETMVQATAFSDYKDAIVYAMLIVILLIKPTGILGKNKREKV

SEQ ID NO: 146596 - DNA, 924 bp, Magnetococcus sp. MC-1; identical to SEQ ID NO: 61406
  CDS (1)..(924): transl_table=11

SEQ ID NO: 146597 - protein, 307 aa, Magnetococcus sp. MC-1; identical to SEQ ID NO: 61407

SEQ ID NO: 146598 - DNA, 933 bp, Azoarcus sp. BH72; identical to SEQ ID NO: 61422
  CDS (1)..(933): transl_table=11

SEQ ID NO: 146599 - protein, 310 aa, Azoarcus sp. BH72; identical to SEQ ID NO: 61423

SEQ ID NO: 146600 - DNA, 927 bp, Acidovorax sp. JS42; identical to SEQ ID NO: 61430
  CDS (1)..(927): transl_table=11

SEQ ID NO: 146601 - protein, 308 aa, Acidovorax sp. JS42; identical to SEQ ID NO: 61431

SEQ ID NO: 146602 - DNA, 930 bp, Acidovorax sp. JS42; identical to SEQ ID NO: 61432
  CDS (1)..(930): transl_table=11

SEQ ID NO: 146603 - protein, 309 aa, Acidovorax sp. JS42; identical to SEQ ID NO: 61433

SEQ ID NO: 146604 - DNA, 888 bp, Streptococcus suis 89/1591; identical to SEQ ID NO: 61444
  CDS (1)..(888): transl_table=11

SEQ ID NO: 146605 - protein, 295 aa, Streptococcus suis 89/1591; identical to SEQ ID NO: 61445

SEQ ID NO: 146606 - DNA, 927 bp, Oceanospirillum sp. MED92; identical to SEQ ID NO: 61464
  CDS (1)..(927): transl_table=11

SEQ ID NO: 146607 - protein, 308 aa, Oceanospirillum sp. MED92; identical to SEQ ID NO: 61465

SEQ ID NO: 146608 - DNA, 918 bp, Xanthobacter autotrophicus Py2
  CDS (1)..(918): transl_table=11
atggaagtgttcctccagcagctcatcaacggattgaccctcgggtcgatctacggattgatcgccatcgggtacacgatggtgttcggcatcatcggaatggtgaacttcgcccacggcgatgtcttcatggtgagtgccttcattggcctcatctgcgtcctgctgctcaccaccgtgctggggatgagctccatcttcctcatcctcgccattaccctcgtggtggccatggtgttcaccgggctggtgagctgggccatcgagcgggtggcgtaccggcccctgcgcggctccttccgcctcgcgcccatgatctccgccatcggcatgtccatcctgctctccaacttcgtgcaggtggcccagggcccgcgcaacaagccgctgccgcccatggtgccggacgtgatcgtggtgatggagcgcaatggctaccaggtcaccctcgcctacaagcagatcatcatcatggtggtcaccgcgacgctgctcgccggcttctggtggctggtgcagaagacctcgctgggccgcgcccagcgcgcctgcgagcaggaccgcaaaatggcggcactgctgggcgtgaacgtggaccgcaccatctcgctcaccttcgtcatcggtgccgcgctcgccgccgtcgccggcgtcatgtacctcatgtattacggcgtggtgaacttcgccgacggcttcgtgccgggcgtgaaggccttcaccgccgccgtgctggggggcatcggctcgctgccgggggcggttctgggcgggctgctgatcggcctcatcgagaccctgtggtccgcctatttctccattgaatacaaggatgtggcagcgttctccatccttgtggtcacgctcatcttcctgccccagggcctgctgggccggccggaagtggagaaggtctga

SEQ ID NO: 146609 - protein, 305 aa, Xanthobacter autotrophicus Py2
MEVFLQQLINGLTLGSIYGLIAIGYTMVFGIIGMVNFAHGDVFMVSAFIGLICVLLLTTVLGMSSIFLILAITLVVAMVFTGLVSWAIERVAYRPLRGSFRLAPMISAIGMSILLSNFVQVAQGPRNKPLPPMVPDVIVVMERNGYQVTLAYKQIIIMVVTATLLAGFWWLVQKTSLGRAQRACEQDRKMAALLGVNVDRTISLTFVIGAALAAVAGVMYLMYYGVVNFADGFVPGVKAFTAAVLGGIGSLPGAVLGGLLIGLIETLWSAYFSIEYKDVAAFSILVVTLIFLPQGLLGRPEVEKV

SEQ ID NO: 146610 - DNA, 1080 bp, Pseudomonas putida GB-1; identical to SEQ ID NO: 61039
  CDS (1)..(1080): transl_table=11

SEQ ID NO: 146611 - protein, 359 aa, Pseudomonas putida GB-1; identical to SEQ ID NO: 61040

SEQ ID NO: 146612 - DNA, 1488 bp, Pseudomonas putida GB-1
  CDS (1)..(1488): transl_table=11
atgctcagactcctgctcaccctgctcctgctactgccgctggcaacccaggccagcgagggcgaattcctccttaccgccaagcccgccgagcaagcccgtctgctcgaaggctgggcggcgcaacccgatgccgcgcgcctgccactgctgaatgaactgcgccaaggccgcatcgccgccgatgacacccgcaagttacgcctgaacaaccgcctgcgcggcctgatcgacaacgccctggccagccaccagttgctcagcgacaacagcgacacccgcctggccgccgcccaacacctgcaaaaaagcgcacaaccggcgcagatggccttcctcgaccggcgcttcgccgccgagccggacgccgccgtccacgccgccctgggcctggccctggccaacctgcaactgggcgccagcgaacccgccgttcgcctggccgccgtgcgcctgctgggtgaaaccggcgacccgctggcccgcacccgcctcgaagcgctgctgcaaccggatgcggaagccgatgccggcgtacgcaccgccgccgaaaccagcctggcccaggtcaagcgcaagctgctggtcggcgaactgctcggccaggcgttcagtggcctttcgctgggttcgatcctgctgctggcggcgctcggcctggcgatcacctttggcctgctcggggtgatcaacatggcccacggcgagatgctgatgctcggcgcgtacagcacctacatggtccaggtgctgctgcagcgctacgccccaggcgccattgagttctacccgctgatcgccctgccggtggccttcgcggtcagtgccggtgtgggcatggcgctggagcgcacggtcatccgccacctgtacggccgcccactggaaaccctgctggctacctggggcatcagcctgatcctgatccaggccattcgcctgctgttcggcgcgcagaacgtcgaggtgagcaacccggcctggctgtccggcggtatccaactgctgcccaacctggtgctgccgtacaaccgcctggtgatcatcggtttcgccctggccgtggtcctgctcacctggctgctgctcaaccgcacgcggctgggcctgaacgtgcgcgcagtcacccagaaccgcaacatggcggcttgctgcggggtgtccaccgggcgcgtcgacatgctcgcctttggcctgggttctggcatcgccgggctcggcggcgtagccctgagccaggtcggcaacgtcggccccgatctgggccaaagctacatcatcgactcgttcctggtggtggtgctgggtggcgtagggcaactggccggcagcctgtgggccgccttcggccttggcatcgccaacaagctgctggagccgcagatcggtgccgtgctcggcaagatcctcatccttgcgttgatcattctgttcatccagaagcgtccgcaaggcctgttcgccctcaagggacgggtaatcgactga

SEQ ID NO: 146613 - protein, 495 aa, Pseudomonas putida GB-1
MLRLLLTLLLLLPLATQASEGEFLLTAKPAEQARLLEGWAAQPDAARLPLLNELRQGRIAADDTRKLRLNNRLRGLIDNALASHQLLSDNSDTRLAAAQHLQKSAQPAQMAFLDRRFAAEPDAAVHAALGLALANLQLGASEPAVRLAAVRLLGETGDPLARTRLEALLQPDAEADAGVRTAAETSLAQVKRKLLVGELLGQAFSGLSLGSILLLAALGLAITFGLLGVINMAHGEMLMLGAYSTYMVQVLLQRYAPGAIEFYPLIALPVAFAVSAGVGMALERTVIRHLYGRPLETLLATWGISLILIQAIRLLFGAQNVEVSNPAWLSGGIQLLPNLVLPYNRLVIIGFALAVVLLTWLLLNRTRLGLNVRAVTQNRNMAACCGVSTGRVDMLAFGLGSGIAGLGGVALSQVGNVGPDLGQSYIIDSFLVVVLGGVGQLAGSLWAAFGLGIANKLLEPQIGAVLGKILILALIILFIQKRPQGLFALKGRVID

SEQ ID NO: 146614 - DNA, 915 bp, Pseudomonas putida GB-1; identical to SEQ ID NO: 61474
  CDS (1)..(915): transl_table=11

SEQ ID NO: 146615 - protein, 304 aa, Pseudomonas putida GB-1; identical to SEQ ID NO: 61475

SEQ ID NO: 146616 - DNA, 1302 bp, Pseudomonas putida GB-1; identical to SEQ ID NO: 61041
  CDS (1)..(1302): transl_table=11

SEQ ID NO: 146617 - protein, 433 aa, Pseudomonas putida GB-1; identical to SEQ ID NO: 61042

SEQ ID NO: 146618 - DNA, 861 bp, Pseudomonas putida GB-1; identical to SEQ ID NO: 61476
  CDS (1)..(861): transl_table=11

SEQ ID NO: 146619 - protein, 286 aa, Pseudomonas putida GB-1; identical to SEQ ID NO: 61477

SEQ ID NO: 146620 - DNA, 1257 bp, Pseudomonas putida GB-1; identical to SEQ ID NO: 61045
  CDS (1)..(1257): transl_table=11

SEQ ID NO: 146621 - protein, 418 aa, Pseudomonas putida GB-1; identical to SEQ ID NO: 61046

SEQ ID NO: 146622 - DNA, 876 bp, Marinobacter sp. ELB17; identical to SEQ ID NO: 61482
  CDS (1)..(876): transl_table=11

SEQ ID NO: 146623 - protein, 291 aa, Marinobacter sp. ELB17; identical to SEQ ID NO: 61483

SEQ ID NO: 146624 - DNA, 939 bp, Pseudomonas putida; identical to SEQ ID NO: 61498
  CDS (1)..(939): transl_table=11

SEQ ID NO: 146625 - protein, 312 aa, Pseudomonas putida; identical to SEQ ID NO: 61499

SEQ ID NO: 146626 - DNA, 924 bp, symbiont bacterium of Paederus fuscipes; identical to SEQ ID NO: 61502
  CDS (1)..(924): transl_table=11

SEQ ID NO: 146627 - protein, 307 aa, symbiont bacterium of Paederus fuscipes; identical to SEQ ID NO: 61503

SEQ ID NO: 146628 - DNA, 942 bp, Rhizobium leguminosarum bv; identical to SEQ ID NO: 61506
  CDS (1)..(942): transl_table=11

SEQ ID NO: 146629 - protein, 313 aa, Rhizobium leguminosarum bv; identical to SEQ ID NO: 61507

SEQ ID NO: 146630 - DNA, 873 bp, Rhizobium leguminosarum bv; identical to SEQ ID NO: 61510
  CDS (1)..(873): transl_table=11

SEQ ID NO: 146631 - protein, 290 aa, Rhizobium leguminosarum bv; identical to SEQ ID NO: 61511

SEQ ID NO: 146632 - DNA, 885 bp, Burkholderia cepacia; identical to SEQ ID NO: 61512
  CDS (1)..(885): transl_table=11

SEQ ID NO: 146633 - protein, 294 aa, Burkholderia cepacia; identical to SEQ ID NO: 61513

SEQ ID NO: 146634 - DNA, 867 bp, Agrobacterium tumefaciens; identical to SEQ ID NO: 61516
  CDS (1)..(867): transl_table=11

SEQ ID NO: 146635 - protein, 288 aa, Agrobacterium tumefaciens; identical to SEQ ID NO: 61517

SEQ ID NO: 146636 - DNA, 903 bp, Rhizobium leguminosarum bv; identical to SEQ ID NO: 61518
  CDS (1)..(903): transl_table=11

SEQ ID NO: 146637 - protein, 300 aa, Rhizobium leguminosarum bv; identical to SEQ ID NO: 61519

SEQ ID NO: 146638 - DNA, 1278 bp, Escherichia coli; identical to SEQ ID NO: 61061
  CDS (1)..(1278): transl_table=11

SEQ ID NO: 146639 - protein, 425 aa, Escherichia coli; identical to SEQ ID NO: 61062

SEQ ID NO: 146640 - DNA, 1278 bp, Salmonella typhimurium; identical to SEQ ID NO: 61063
  CDS (1)..(1278): transl_table=11

SEQ ID NO: 146641 - protein, 425 aa, Salmonella typhimurium; identical to SEQ ID NO: 61064

SEQ ID NO: 146642 - DNA, 26 bp, Artificial sequence
  primer
atgtctgagcagtttttgtatttctt

SEQ ID NO: 146643 - DNA, 24 bp, Artificial sequence
  primer
ttatactttctctacctccgggcg

SEQ ID NO: 146644 - protein, 358 aa, Artificial sequence
  consensus sequence
  Variant (2)..(4): Xaa in position 2 to 4 is any amino acid
  Variant (6)..(7): Xaa in position 6 to 7 is any amino acid
  Variant (9)..(9): Xaa in position 9 is any amino acid
  Variant (11)..(11): Xaa in position 11 is any amino acid
  Variant (12)..(21): Xaa in position 12 to 21 is any or no amino acid
  Variant (23)..(23): Xaa in position 23 is any amino acid
  Variant (25)..(29): Xaa in position 25 to 29 is any amino acid
  Variant (31)..(35): Xaa in position 31 to 35 is any amino acid
  Variant (37)..(37): Xaa in position 37 is any amino acid
  Variant (41)..(45): Xaa in position 41 to 45 is any amino acid
  Variant (47)..(77): Xaa in position 47 to 77 is any amino acid
  Variant (78)..(103): Xaa in position 78 to 103 is any or no amino acid
  Variant (105)..(123): Xaa in position 105 to 123 is any amino acid
  Variant (124)..(127): Xaa in position 124 to 127 is any or no amino acid
  Variant (129)..(145): Xaa in position 129 to 145 is any amino acid
  Variant (146)..(162): Xaa in position 146 to 162 is any or no amino acid
  Variant (164)..(201): Xaa in position 164 to 201 is any amino acid
  Variant (202)..(222): Xaa in position 202 to 222 is any or no amino acid
  Variant (224)..(226): Xaa in position 224 to 226 is any amino acid
  Variant (229)..(235): Xaa in position 229 to 235 is any amino acid
  Variant (237)..(239): Xaa in position 237 to 239 is any amino acid
  Variant (241)..(250): Xaa in position 241 to 250 is any amino acid
  Variant (252)..(257): Xaa in position 252 to 257 is any amino acid
  Variant (259)..(261): Xaa in position 259 to 261 is any amino acid
  Variant (263)..(274): Xaa in position 263 to 274 is any amino acid
  Variant (275)..(276): Xaa in position 275 to 276 is any or no amino acid
  Variant (278)..(288): Xaa in position 278 to 288 is any amino acid
  Variant (289)..(289): Xaa in position 289 is any or no amino acid
  Variant (291)..(291): Xaa in position 291 is any amino acid
  Variant (294)..(294): Xaa in position 294 is any amino acid
  Variant (296)..(298): Xaa in position 296 to 298 is any amino acid
  Variant (301)..(302): Xaa in position 301 to 302 is any amino acid
  Variant (304)..(307): Xaa in position 304 to 307 is any amino acid
  Variant (309)..(332): Xaa in position 309 to 332 is any amino acid
  Variant (333)..(351): Xaa in position 333 to 351 is any or no amino acid
  Variant (353)..(355): Xaa in position 353 to 355 is any amino acid
  Variant (357)..(357): Xaa in position 357 is any amino acid
GXXXGXXYXLXXXXXXXXXXXAXGXXXXXGXXXXXNXAHGXXXXXGXXXXXXXXXXXXXXXXXXXXXXXXXXXXXXXXXXXXXXXXXXXXXXXXXXXXXXXXXEXXXXXXXXXXXXXXXXXXXXXXXGXXXXXXXXXXXXXXXXXXXXXXXXXXXXXXXXXXPXXXXXXXXXXXXXXXXXXXXXXXXXXXXXXXXXXXXXXXXXXXXXXXXXXXXXXXXXXXGXXXRAXXXXXXXAXXXGXXXXXXXXXXFXXXXXXAXXXGXXXXXXXXXXXXXXGXXXXXXXXXXXXVXGGXGXXXGAXXGXXXXGXXXXXXXXXXXXXXXXXXXXXXXXXXXXXXXXXXXXXXXXXXXLXXXPXG

SEQ ID NO: 146645 - protein, 23 aa, Artificial sequence
  protein pattern
  Variant (2)..(12): Xaa in position 2 to 12 is any amino acid
  Variant (14)..(14): Xaa in position 14 is Phe, Leu or Met
  Variant (17)..(17): Xaa in position 17 is Ala, Gly or Ser
  Variant (18)..(18): Xaa in position 18 is Ala, Asp or Glu
  Variant (19)..(22): Xaa in position 19 to 22 is any amino acid
  Variant (23)..(23): Xaa in position 23 is Gly or Ser
GXXXXXXXXXXXNXAHXXXXXXX

SEQ ID NO: 146646 - DNA, 1650 bp, Escherichia coli
  CDS (1)..(1650): transl_table=11
atgctcaatcagaaaattcaaaaccctaatccagacgaactgatgatcgaagtcgatctctgctatgagctggacccgtatgaattaaaactggatgagatgatcgaggcagaaccggaacccgagatgattgaagggctgcctgcctctgatgcgctgacgcctgccgatcgctatctcgaactgttcgagcatgttcagtcggcgaaaattttccccgacagtaaaacctttcccgactgcgcacctaaaatggacccgctggatatcttaatccgctaccgtaaagtgcgccgtcatcgtgattttgacttgcgcaagtttgttgaaaaccacttctggctgccggaggtctactccagcgagtatgtatcggacccgcaaaattccctgaaagagcatatcgaccagctgtggccggtgctaacccgcgaaccacaggatcacattccgtggtcttctctgctggcgctgccgcagtcatatattgtcccgggcggccgttttagcgaaacctactattgggattcctatttcaccatgctggggctggcggaaagtggtcgggaagatttgctgaaatgcatggccgataacttcgcctggatgatcgaaaactacggtcacatccccaacggcaaccgcacctattatttgagccgctcgcaaccaccggtttttgcgctgatggtggagttgtttgaagaagatggtgtacgcggtgcgcgccgctatctcgaccaccttaaaatggaatatgccttctggatggacggtgcagaatcgttaatccctaatcaggcctatcgccatgttgtgcggatgccggacggatcgctgctcaaccgttactgggacgatcgcgacacgccgcgtgacgaatcctggcttgaggacgttgaaaccgcgaaacattctggtcgcccgcccaacgaggtgtaccgcgatttacgcgcgggggcggcctccggttgggattactcttcccgttggctgcgtgatactggtcgtctggcgagcattcgtaccacccagttcatccccatcgatctgaatgccttcctgtttaaactggagagcgccatcgccaacatctcggcgctgaaaggcgagaaagagacagaagcactgttccgccagaaagccagtgcccgtcgcgatgcggtaaaccgttacctctgggatgatgaaaacggcatctaccgcgattacgactggcgacgcgaacaactggcgctgttttccgctgccgccattgtgccactctatgtcggtatggcgaaccatgaacaggccgatcgtctggcaaacgccgtgcgcagtcggttactgacacctggcgggattctggcaagcgagtacgaaaccggtgaacagtgggataaacccaacggctgggcaccgttacaatggatggcgattcagggatttaaaatgtacggcgatgaccttctgggtgatgaaatcgcgcgaagctggctgaagacggtgaatcagttctatctggaacagcacaaactgatcgaaaaataccatattgccgatggtgttccccgcgaaggcggcggtggcgagtatccgttgcaggatgggtttggctggactaacggtgtggtacgccgtttaattggtttgtacggcgaaccataa

SEQ ID NO: 146647 - protein, 549 aa, Escherichia coli
MLNQKIQNPNPDELMIEVDLCYELDPYELKLDEMIEAEPEPEMIEGLPASDALTPADRYLELFEHVQSAKIFPDSKTFPDCAPKMDPLDILIRYRKVRRHRDFDLRKFVENHFWLPEVYSSEYVSDPQNSLKEHIDQLWPVLTREPQDHIPWSSLLALPQSYIVPGGRFSETYYWDSYFTMLGLAESGREDLLKCMADNFAWMIENYGHIPNGNRTYYLSRSQPPVFALMVELFEEDGVRGARRYLDHLKMEYAFWMDGAESLIPNQAYRHVVRMPDGSLLNRYWDDRDTPRDESWLEDVETAKHSGRPPNEVYRDLRAGAASGWDYSSRWLRDTGRLASIRTTQFIPIDLNAFLFKLESAIANISALKGEKETEALFRQKASARRDAVNRYLWDDENGIYRDYDWRREQLALFSAAAIVPLYVGMANHEQADRLANAVRSRLLTPGGILASEYETGEQWDKPNGWAPLQWMAIQGFKMYGDDLLGDEIARSWLKTVNQFYLEQHKLIEKYHIADGVPREGGGGEYPLQDGFGWTNGVVRRLIGLYGEP

SEQ ID NO: 146648 - DNA, 2207 bp, Solanum tuberosum; var. Kardal
  CDS (161)..(1906)
cttttctgagtaataacataggcattgattttttttcaattaataacacctgcaaacattcccattgccggcattctctgttcttacaaaaaaaaacatttttttgttcacataaattagttatggcatcagtattgaaccctttaacttgttatacaatatgggtaaagctataatttttatgatttttactatgtctatgaatatgattaaagctgaaacttgcaaatccattgataagggtcctgtaatcccaacaacccctttagtgatttttcttgaaaaagttcaagaagctgctcttcaaacttatggccataaagggtttgatgctaaactgtttgttgatatgtcactgagagagagtctttcagaaacagttgaagcttttaataagcttccaagagttgtgaatggttcaatatcaaaaagtgatttggatggttttataggtagttacttgagtagtcctgataaggatttggtttatgttgagcctatggattttgtggctgagcctgaaggctttttgccaaaggtgaagaattctgaggtgagggcatgggcattggaggtgcattcactttggaagaatttaagtaggaaagtggctgatcatgtattggaaaaaccagagttgtatactttgcttccattgaaaaatccagttattataccgggatcgcgttttaaggaggtttattattgggattcttattgggtaataaggggtttgttagcaagcaaaatgtatgaaactgcaaaagggattgtgactaatctggtttctctgatagatcaatttggttatgttcttaacggtgcaagagcatactacagtaacagaagtcagcctcctgtcctggccacgatgattgttgacatattcaatcagacaggtgatttaaatttggttagaagatcccttcctgctttgctcaaggagaatcatttttggaattcaggaatacataaggtgactattcaagatgctcagggatcaaaccacagcttgagtcggtactatgctatgtggaataagccccgtccagaatcgtcaactatagacagtgaaacagcttccgtactcccaaatatatgtgaaaaaagagaattataccgtgaactggcatcagctgctgaaagtggatgggatttcagttcaagatggatgagcaacggatctgatctgacaacaactagtacaacatcaattctaccagttgatttgaatgcattccttctgaagatggaacttgacattgcctttctagcaaatcttgttggagaaagtagcacggcttcacattttacagaagctgctcaaaatagacagaaggctataaactgtatcttttggaacgcagagatggggcaatggcttgattactggcttaccaacagcgacacatctgaggatatttataaatgggaagatttgcaccagaacaagaagtcatttgcctctaattttgttccgctgtggactgaaatttcttgttcagataataatatcacaactcagaaagtagttcaaagtctcatgagctcgggcttgcttcagcctgcagggattgcaatgaccttgtctaatactggacagcaatgggattttccgaatggttggcccccccttcaacacataatcattgaaggtctcttaaggtctggactagaagaggcaagaaccttagcaaaagacattgctattcgctggttaagaactaactatgtgacttacaagaaaaccggtgctatgtatgaaaaatatgatgtcacaaaatgtggagcatatggaggtggtggtgaatatatgtcccaaacgggtttcggatggtcaaatggcgttgtactggcacttctagaggaatttggatggcctgaagatttgaagattgattgctaatgagcaagtagaaaagccaaatgaaacatcattgagttttattttcttcttttgttaaaataagctgcaatggtttgctgatagtttatgttttgtattactatttcataaggtttttgtaccatatcaagtgatattaccatgaactatgtcgttcggactcttcaaatcggattttgcaaaaataatgcagttttggagaatccgataacatagaccatgtatggatctaaattgtaaacagcttactatattaagtaaaagaaagatgattcctctgctttaaaaaaaaaaaaaaaaa

SEQ ID NO: 146649 - protein, 581 aa, Solanum tuberosum; var. Kardal
MGKAIIFMIFTMSMNMIKAETCKSIDKGPVIPTTPLVIFLEKVQEAALQTYGHKGFDAKLFVDMSLRESLSETVEAFNKLPRVVNGSISKSDLDGFIGSYLSSPDKDLVYVEPMDFVAEPEGFLPKVKNSEVRAWALEVHSLWKNLSRKVADHVLEKPELYTLLPLKNPVIIPGSRFKEVYYWDSYWVIRGLLASKMYETAKGIVTNLVSLIDQFGYVLNGARAYYSNRSQPPVLATMIVDIFNQTGDLNLVRRSLPALLKENHFWNSGIHKVTIQDAQGSNHSLSRYYAMWNKPRPESSTIDSETASVLPNICEKRELYRELASAAESGWDFSSRWMSNGSDLTTTSTTSILPVDLNAFLLKMELDIAFLANLVGESSTASHFTEAAQNRQKAINCIFWNAEMGQWLDYWLTNSDTSEDIYKWEDLHQNKKSFASNFVPLWTEISCSDNNITTQKVVQSLMSSGLLQPAGIAMTLSNTGQQWDFPNGWPPLQHIIIEGLLRSGLEEARTLAKDIAIRWLRTNYVTYKKTGAMYEKYDVTKCGAYGGGGEYMSQTGFGWSNGVVLALLEEFGWPEDLKIDC

SEQ ID NO: 146650 - DNA, 1929 bp, Bombyx mori
  CDS (1)..(1929)
atgtttatagtgtggctttgggtcggttttgcgatggccgctagtgtcgttgctgatcgtagcaaactacctcctgcctgtgatagtatgatttactgccacgggccactgttaaacacggtccaaatggccggcctctacaatgactccaagacgtttgtggatatgaaaattaaaatgtcaccaaacatcaccttggagcacttctatgacatgatgagcaggacagattctaatccgactaaagcggacatacaggagttcgtgaatcagaacttcgatcctgagggttcggaatttgaagactggaggccaagtgattggaagcataaccctggatttcttgctaaaatcaaggatccgttgttgcacaaatgggcatcagcattgaacgatttatggctcgatctcgggaggaagatgaaggaagcagtcaaagagagtccagacttatactccattatatacgtggagcatccttttattgttccaggtggtcgtttccgtgagttctactactgggactcgtactggatcatcaaaggtctgctgctctcggagatgaggaccacagcgaagggcatggtcaacaatttactcagcatagtcgatagatacggtttcataccgaatggcggcagaatttattatcttatgagatctcaacctccccttctgataccgatggtgcagctgctaatggaagacaccgatgacctggaatacctgagggagcacatccacaccctggacaaagagttcgactactggatgacgaatcacaccatcgaagttaaccacgaagggaagaaattgaaaatggcgatgtacatggataattctcagggtccgaggccggagagctacaaagaagacgtcgactgtgctagacattttgacacaaccgaaaagaaagaggaattgtacgctgaattgaaggctgccgctgaatccggctgggatttctcatcaagatggttcatactgaacggaaccaataaaggtaatctaactaatttgaaggtgaggtcgataattcccgtcgacctcaacgcgatcttgtgttggaacgcgcagctcatgatggagtaccacacccgccttcaaaatgaggagaaagcatcttactataggcggatacacgatgacttcatggaagctatcgaagagctactgtggcacgaagacgtgggagtttggttggactacagcctcgagtctagtcgcaggagagactacttttacccatccaacctgtctccgctctgggccggcagctacgataaagcgagaaaggattacttcgtgaatagagtcgtcaattatttggataaagtcaagatggatatcttcgaaggcggaatcccaacaacgttcgaacacaccggcgaacagtgggactatcccaacgcgtggccgccccttcagtacatcgtcataatgggcctagccaacaccgggcacccggaggcgatgagatacgccaccgaactcgccactaagtgggtgcgaagtaacttcgaagtctggaagcagaaggccgccatgctggagaagtacgacgccacgattctgggcgggctgggtggcggcggagaatacgtcgtccaaaccggcttcggatggagcaatggcgttgtgatgtcgctcctaaacagatatggagacgtaatctcggcagccgacaacttcggaacggcggcggaatcgggcgctgtctacggcgccggggtgggcgccggtggcgtagtcacggcgctcctagtggtcctagcttctttggctgctggaactttaggattaatggtgtacaagagacgtaaagattacgccggcttctgtaacggcgaagtcgacaaactcatctcgaaaaaaccctacactgaactcaagagtttgaacggcgcgtcgaaccagaaacagcggtga

SEQ ID NO: 146651 - protein, 642 aa, Bombyx mori
MFIVWLWVGFAMAASVVADRSKLPPACDSMIYCHGPLLNTVQMAGLYNDSKTFVDMKIKMSPNITLEHFYDMMSRTDSNPTKADIQEFVNQNFDPEGSEFEDWRPSDWKHNPGFLAKIKDPLLHKWASALNDLWLDLGRKMKEAVKESPDLYSIIYVEHPFIVPGGRFREFYYWDSYWIIKGLLLSEMRTTAKGMVNNLLSIVDRYGFIPNGGRIYYLMRSQPPLLIPMVQLLMEDTDDLEYLREHIHTLDKEFDYWMTNHTIEVNHEGKKLKMAMYMDNSQGPRPESYKEDVDCARHFDTTEKKEELYAELKAAAESGWDFSSRWFILNGTNKGNLTNLKVRSIIPVDLNAILCWNAQLMMEYHTRLQNEEKASYYRRIHDDFMEAIEELLWHEDVGVWLDYSLESSRRRDYFYPSNLSPLWAGSYDKARKDYFVNRVVNYLDKVKMDIFEGGIPTTFEHTGEQWDYPNAWPPLQYIVIMGLANTGHPEAMRYATELATKWVRSNFEVWKQKAAMLEKYDATILGGLGGGGEYVVQTGFGWSNGVVMSLLNRYGDVISAADNFGTAAESGAVYGAGVGAGGVVTALLVVLASLAAGTLGLMVYKRRKDYAGFCNGEVDKLISKKPYTELKSLNGASNQKQR

SEQ ID NO: 146652 - DNA, 1692 bp, Oryza sativa (japonica cultivar-group)
  CDS (1)..(1692)
atggcgcccaccgccgcggttgccgggggtggcgtggaggcggaggcgctgctggggctgctgcagcgggtgcagtcggaggcgctgcgggcgttcgggccgaacgacttcgaccccaagctctacgtcgacctgccgctcgccgccgacgccagcgcggcggccgcgctggcgtcgctgccgcgggcggcgccgtcgaggggcgagatggaggcctacatctcgaggtacttcgcgctggccgggtccgacctcgtcgccgccgccgacccgccggacttcgagcgcgacccccccgggttcctgcccagggtggagcgcgccgaggcgcgggcctgggcgctggaggtgcacgcgctgtggaaggacctgacgcggcgggtggcgccggccgtcgcggcgcgccccgaccggcacacgctgctgccgctccccggcagggtggtcgtgccgggctccaggttccgggaggtctactactgggactcctactgggtcgtcagaggtttactggtgagcaaaatgtatgagacggcaaaggatatcgtgcttaatcttgtgtatcttgttgagaaatatggttttgttctgaacggggcaagatcgtactacactaaccgaagccagccaccacttttaagctccatggttttagacatatacatggcaactggtgatatggcttttgtgaggagggtatttccctcactgctgaaagagcatagtttctggatgtcagaggttcacaatgtggcagtaatggacaatcatggacgggtacataatttgagtcgctaccaggctatgtggaacaaacctaggccagaaagtgcaacaattgatgaggaatttgcttcaaaactttctacggctgctaaagaaaaattctaccaccaagttgcttctacagctgaaacaggatgggattttagctctcgatggatgagggattctactgacatgacaactctgacaacatcttgcataatacctgtggacttgaacacattcatattgaagatggaacaggacatagctttctttgctaaactcattggagagagcacaacatcagaaatattttcagaggcttcaaaagcacgccataatgcaattgattctgttctgtggaacgctgacatggagcaatggcttgactactggcttcctactgatggaaactgccagggagtctaccaatggaaatctatctcacagaaccgcgccatctttgcttctaattttgtacctttgtggttaaatgctcaacattcaggcttggagcaatttgtcgatgaggcaaaatcagtgagagtcatgagaagcctccagaaatcaggattactgcaacctgcaggaatcgcaacttccttatcaaacacagggcaacaatgggattttccaaacggatgggccccgttgcagcatctgatagtcgagggattgttgaggtctggttcaggagaggcaagggaacttgctgaggacattgccacgaggtgggtgagaacaaactatgatgcctataaggctaccggcgcgatgcatgagaagtacgatgtggtgacctgtggaaaatctggaggtgggggtgaatacaaaccccagactggttttggttggtccaacggtgtgatattatcattcttggatgaatttggatggcctcaggacaagaagatagactgctag

SEQ ID NO: 146653 - protein, 563 aa, Oryza sativa (japonica cultivar-group)
MAPTAAVAGGGVEAEALLGLLQRVQSEALRAFGPNDFDPKLYVDLPLAADASAAAALASLPRAAPSRGEMEAYISRYFALAGSDLVAAADPPDFERDPPGFLPRVERAEARAWALEVHALWKDLTRRVAPAVAARPDRHTLLPLPGRVVVPGSRFREVYYWDSYWVVRGLLVSKMYETAKDIVLNLVYLVEKYGFVLNGARSYYTNRSQPPLLSSMVLDIYMATGDMAFVRRVFPSLLKEHSFWMSEVHNVAVMDNHGRVHNLSRYQAMWNKPRPESATIDEEFASKLSTAAKEKFYHQVASTAETGWDFSSRWMRDSTDMTTLTTSCIIPVDLNTFILKMEQDIAFFAKLIGESTTSEIFSEASKARHNAIDSVLWNADMEQWLDYWLPTDGNCQGVYQWKSISQNRAIFASNFVPLWLNAQHSGLEQFVDEAKSVRVMRSLQKSGLLQPAGIATSLSNTGQQWDFPNGWAPLQHLIVEGLLRSGSGEARELAEDIATRWVRTNYDAYKATGAMHEKYDVVTCGKSGGGGEYKPQTGFGWSNGVILSFLDEFGWPQDKKIDC

SEQ ID NO: 146654 - DNA, 1881 bp, Arabidopsis thaliana
  CDS (1)..(1881)
atgaaatcatacaaacttaataaccctaatttactcatctccacgcacacacataataaactcttcttatcctcttctccattcaatctcttattctcttttccttccttcatataccttaaacagcaacgttctctgttcttcttcttctttttcttcctctgtttttctttcacaacttccatgttggactcggacacagacacggactcaggtcctgtggttgcaacaaccaaactcgtcactttcctccagcgtgtgcagcacacggcacttcgatcataccctaaaaaacaaacgcctgatcccaaatcctacattgatctatctctcaaacgtccctacagtctctccaccatcgaatcagccttcgatgatctcacgagcgagtcacatgaccagccagtgccagtggagacgcttgaaaagttcgtcaaggaatattttgacggtgcaggggaggatctgctgcaccacgaaccagtagatttcgtctcagatccctccggcttcctctccaacgtggagaacgaagaagtcagagaatgggcgcgtgaggtacacggtctttggagaaatctgagctgcagagtctctgactcagtaagagagtctgccgaccggcacacgcttctaccgttgccggaaccggttatcattcccggttcgagattcagagaagtctattactgggattcttattgggtcatcaaaggacttatgacgagtcaaatgttcactaccgccaaaggtttagtgacgaatctgatgtcacttgtggagacttatggttacgctttgaacggtgctagagcttattatactaacagaagccaaccacctttgttgagctccatggtctatgaaatttataatgtgacaaaagatgaagaacttgtgaggaaagcaatccctctgcttctcaaagagtacgagttttggaactcaggaaaacataaagtggttattcgagacgctaatggttatgatcacgttttgagccgttattatgctatgtggaacaagccaaggcctgaatcctctgttttcgatgaagaatctgcttcagggttctcgactatgttagagaaacaacggttccatcgagatatagccacggctgctgaatcaggatgcgatttcagcacgcgatggatgagggatcctcctaatttcacaacgatggctacaacatcagtggttcctgttgatctaaatgtttttcttctcaagatggaactcgatatagcgttcatgatgaaggtttctggagatcaaaatggttcagaccgttttgtgaaagcgtcaaaagcgagagagaaagcgtttcaaaccgtgttttggaacgagaaagcagggcaatggctggattactggctttcctccagtggtgaggaatctgagacatggaaggctgagaaccaaaacaccaacgtctttgcgtctaactttgcaccaatctggattaattccatcaattcagatgaaaatcttgtcaagaaagttgtgacagctcttaagaactcagggctcattgctcccgctggaatcctaacttctttgacaaactcaggacaacaatgggattctccgaatggatgggcaccgcaacaagagatgatcgtcacagggctcggaagatcgagtgtaaaagaagctaaagagatggcagaggatattgcaaggagatggatcaaaagcaactatcttgtctacaagaaaagtgggactatacatgagaagctcaaagttacagagcttggtgaatatggtggtggaggagaatatatgccacagaccggattcggatggtcaaatggagttatcttagcattcttggaggaatatggatggccctctcatcttagcattgaagcctag

SEQ ID NO: 146655 - protein, 626 aa, Arabidopsis thaliana
MKSYKLNNPNLLISTHTHNKLFLSSSPFNLLFSFPSFIYLKQQRSLFFFFFFFLCFSFTTSMLDSDTDTDSGPVVATTKLVTFLQRVQHTALRSYPKKQTPDPKSYIDLSLKRPYSLSTIESAFDDLTSESHDQPVPVETLEKFVKEYFDGAGEDLLHHEPVDFVSDPSGFLSNVENEEVREWAREVHGLWRNLSCRVSDSVRESADRHTLLPLPEPVIIPGSRFREVYYWDSYWVIKGLMTSQMFTTAKGLVTNLMSLVETYGYALNGARAYYTNRSQPPLLSSMVYEIYNVTKDEELVRKAIPLLLKEYEFWNSGKHKVVIRDANGYDHVLSRYYAMWNKPRPESSVFDEESASGFSTMLEKQRFHRDIATAAESGCDFSTRWMRDPPNFTTMATTSVVPVDLNVFLLKMELDIAFMMKVSGDQNGSDRFVKASKAREKAFQTVFWNEKAGQWLDYWLSSSGEESETWKAENQNTNVFASNFAPIWINSINSDENLVKKVVTALKNSGLIAPAGILTSLTNSGQQWDSPNGWAPQQEMIVTGLGRSSVKEAKEMAEDIARRWIKSNYLVYKKSGTIHEKLKVTELGEYGGGGEYMPQTGFGWSNGVILAFLEEYGWPSHLSIEA

SEQ ID NO: 146656 - DNA, 1458 bp, Escherichia coli O157:H7 EDL933
  CDS (1)..(1458): transl_table=11
atgcagcaaaaccagagcggatttgatctgcgccatttcgttaacgtcaatttcaccctgccgaaagagggcgagaaatatgttccgccagagggacagtcactgcgcgaacatattgacggactttggccggtattaacgcgttctaccgaaaacaccgaaaaatgggattctctgttaccgctgccggaaccttatgtcgtgccaggcggacgttttcgcgaggtatattactgggacagttacttcaccatgttaggacttgccgaaagcggtcactgggataaagtcgcggatatggtggccaattttgctcatgaaatagacacttacggtcatattcccaacggcaaccgcagttactatttaagccgctcgcagccgcccttctttgccctgatggtagagttactggcgcagcatgaaggcgatgccgcattgaagcaatacctgccgcaaatgcaaaaagaatatgcttactggatggacggtgttgaaaacctgcaagccggacaacaggaaaaacgcgttgtaaaacttcaggatggtacccttctcaaccgctactgggacgatcgcgatacgccacgaccagagtcatgggtggaagatattgccaccgctaaaagcaatccgaatcgacctgccactgaaatttaccgcgacctgcgctctgctgctgcgtctggctgggatttcagctcgcgctggatggacaatccgcagcaactaaataccttacgcaccaccagcatcgtaccggtcgatctgaacagcctgatgttcaaaatggaaaaaatccttgcccgcgccagcaaagctgccggagataacgcgatggcaaaccagtacgaaacactggcaaatgcccgtcaaaaagggatcgaaaaatacctgtggaacgatcaacaaggctggtatgccgattacgacctgaaaagtcataaagtgcgcaatcagttaaccgcggccgccctgttcccactgtacgtcaatgcggcagcgaaagatcgcgccaacaaaatggcgacggcgacgaaaactcatctgctgcaacccggcggcctgaacaccacgtcggtgaaaagtgggcaacaatgggatgcgccaaatggctgggcaccgttacagtgggtcgcgacagaaggattacaaaactacgggcaaaaagaggtggcgatggacattagctggcacttcctgaccaatgttcagcacacctatgaccgggagaaaaagctggtggaaaaatatgatgtcagcaccaccggaacggggggcggcggtggcgaatatccattacaggatggctttggctggaccaatggcgtgacgctgaaaatgctggatttgatctgcccgaaagagcaaccgtgtgacaatgttccggcgacgcgtccactcagtgaatcaacaacacagccggtaaaacaaaaagaggcggaacctacgccttaa

SEQ ID NO: 146657 - protein, 485 aa, Escherichia coli O157:H7 EDL933
MQQNQSGFDLRHFVNVNFTLPKEGEKYVPPEGQSLREHIDGLWPVLTRSTENTEKWDSLLPLPEPYVVPGGRFREVYYWDSYFTMLGLAESGHWDKVADMVANFAHEIDTYGHIPNGNRSYYLSRSQPPFFALMVELLAQHEGDAALKQYLPQMQKEYAYWMDGVENLQAGQQEKRVVKLQDGTLLNRYWDDRDTPRPESWVEDIATAKSNPNRPATEIYRDLRSAAASGWDFSSRWMDNPQQLNTLRTTSIVPVDLNSLMFKMEKILARASKAAGDNAMANQYETLANARQKGIEKYLWNDQQGWYADYDLKSHKVRNQLTAAALFPLYVNAAAKDRANKMATATKTHLLQPGGLNTTSVKSGQQWDAPNGWAPLQWVATEGLQNYGQKEVAMDISWHFLTNVQHTYDREKKLVEKYDVSTTGTGGGGGEYPLQDGFGWTNGVTLKMLDLICPKEQPCDNVPATRPLSESTTQPVKQKEAEPTP

SEQ ID NO: 146658 - DNA, 1674 bp, Xanthomonas axonopodis pv. citri str. 306
  CDS (1)..(1674): transl_table=11
atgagttctgccgcgcccccgtgctgcacgtcgctgcttggcctgtcgctgagcatgtttgttgcgccgggcacgctgaccgccgcgccgctggacgctccggtcgtcaatgcgccggcgcccacgccgcccacgcccgacctggcctacccggaactgtttcaggccgtgcagcgcggtgagttgttcgatgaccagaagcactttgtcgacttcctgccgctgcgcgacccggcgctgatcaacgccgactatctggcccagcacgatcaccccggcttcgatctgcgcaagttcgtggacgccaatttcgaagaatcgccgccggtgcagaccgatgcgatccgccaggacaccgcgctgcgcgagcacatcgacctgctgtggcccaagctggtgcgcagccagaaccacgtgccgccgcacagcagcctgctggcgctgccgcatccgtatgtggtgccgggcggacgcttccgcgaggtgtattactgggattcctacttcaccatgctgggcctggtgaagagcggcgaaaccacgctcagccgccagatgctggacaactttgcctacctgatcgacacctacgggcatattcccaacggcaaccgcacctactacctcagccgctcgcagccgccgttcttctcctacatggtggagctgcaggccggcgtggaaggcgaggcggtatatcagcgctacctgccgcagctgcaaaaggaatatgcctactggatgcagggcagcgatgacctgcagcccggccaggccgcgcgccacgtggtgcgtctggccgatggcagcgtgctcaaccgctattgggacgagcgcgacaccccgcgcccggaagcctggctgcacgacacccgcaccgccgcagaagtgaccgaccgcccggccgccgaggtctaccgcgacctgcgtgccggcgccgaaagtggctgggactacaccagccgctggctggccgacggccagaacctgcgcaccatccgtaccactgccatcctcccgatcgacctcaacagcctgctctaccacctggagcgcacgctggcgctggcctgcgcgcaacctggcgcggagtgcacccgcgattacgccgcacttgcacagcagcgcaagcaggccatcgacgcgcatctgtggaataccgccggctactacgccgactacgactggcagacgcgtacgctgagcaaccaggtcaccgccgctgcgctatacccgctgtttgccggcctggcctcggacgatcacgccaagcgcaccgccagcaccgtgcgtaaaacgctactgcgtccgggcggactggccaccaccgcagtgaagaccggtcagcagtgggatgagcccaacggctgggcgccgctgcaatgggtggctgtggatggcctgcggcgctacggcgaagacgcgctggcacgcaccattggcgaacgttttctggctcaagtgcaggcgctgttcgcacgcgagcacaagctggtcgaaaagtacggcctggaaaccgatgcggccggcggcggcggtggcgagtacgcgctgcaggacggcttcggctggaccaacggcgtcaccttgatgctgctgaacctgtatccgggcaaggacaccaaagccgcacccgccaagcgggtgcgcaagcccgaggcggccgcgcgctga

SEQ ID NO: 146659 - protein, 557 aa, Xanthomonas axonopodis pv. citri str. 306
MSSAAPPCCTSLLGLSLSMFVAPGTLTAAPLDAPVVNAPAPTPPTPDLAYPELFQAVQRGELFDDQKHFVDFLPLRDPALINADYLAQHDHPGFDLRKFVDANFEESPPVQTDAIRQDTALREHIDLLWPKLVRSQNHVPPHSSLLALPHPYVVPGGRFREVYYWDSYFTMLGLVKSGETTLSRQMLDNFAYLIDTYGHIPNGNRTYYLSRSQPPFFSYMVELQAGVEGEAVYQRYLPQLQKEYAYWMQGSDDLQPGQAARHVVRLADGSVLNRYWDERDTPRPEAWLHDTRTAAEVTDRPAAEVYRDLRAGAESGWDYTSRWLADGQNLRTIRTTAILPIDLNSLLYHLERTLALACAQPGAECTRDYAALAQQRKQAIDAHLWNTAGYYADYDWQTRTLSNQVTAAALYPLFAGLASDDHAKRTASTVRKTLLRPGGLATTAVKTGQQWDEPNGWAPLQWVAVDGLRRYGEDALARTIGERFLAQVQALFAREHKLVEKYGLETDAAGGGGGEYALQDGFGWTNGVTLMLLNLYPGKDTKAAPAKRVRKPEAAAR

SEQ ID NO: 146660 - DNA, 1683 bp, Drosophila melanogaster
  CDS (1)..(1683)
atggcctctccagcgaatccatcgagcaatcacaaaatgaacggaaatggtaaaatctactgcgagggcaatctgctgcacaccatccaaacggcagtgcccaaactatttgcggattcgaaaacgtttgtggacatgaagctgaacaattcgcccgacaagaccctcgaggactttaatgccatgatggaggccaagaatcagacgccaagcagtgaggatctcaagcagtttgtcgataagtacttcagtgcaccgggcaccgagcttgagaaatggacgcccaccgactggaaggagaatcccagtttcctcgacctgatctccgacccagatctgaagcaatggggcgtcgagctgaatagcatttggaaggacttgggacgcaaaatgaaggacgaggtgtcaaagaatcccgaatactactcaatcattcccgtgccaaatccagtgatcgtgcccggcggtcgtttcattgagttctactactgggactcctactggatcatccgtggacttctctacagccagatgtttgacaccgcgcgcggcatgattgagaacttcttttccattgtcaatcggttcggttttattccaaacggcggtcgagtctactaccacggtcgctcccagccgccacttctaaccggtatggtcaagtcgtacgtggacttcaccaacgatgacaagttcgccatcgatgccctggacacgctggagcacgagttcgagttctttgtgaacaaccacaatgtcacggtgaagaatcacagcctgtgtgtgtaccgcgattcgtcgtccggaccgcgaccagaatcctaccgagaggatgtggagaccggcgaggagttccccacggatgaggccaaggaactgcattacagtgaactcaaggcaggcgccgaatcgggcatggactttagctcgcgctggttcatctcaccgactggaaccaatgatggcaaccggagcgctctgagcaccacctccattgtgcccgtcgacctgaatgcctatctctactggaacgccaagttgattgccgagttccattccaaagcgggcaacaccaaaaaggtcaccgaatacgagaccaaggccgagaaactccttctgggtatccaagaagttttgtggaacgaggaggccggtgtctggttggactacgatatgattaaccagaagcctcgcgattactacacgcccaccaatctatctccactgtgggtgaaggccttcaacatttcggagtccgaaaagatatcggcttcggttatggcctacattgagaggaacaagctggacagcttccctggcggagttcccaacacgctgagctacaccggagaacagtgggatgcccccaatgtgtgggcaccgatgcagtacatcctggtcgagggcctaaacaacctgaacactcccgaggccaagaatatgtcactgaagtgggccaccaggtgggtgaagacaaactttgcggcgtttagcaaggacaggcacatgtacgagaagtacaacgccgatgagttcggagttggaggcggcggtggcgagtacgaggtacagactggattcggttggtccaacggtgtgatcatcgagtggctgagcaagcacgggcgcgacatttccattggatccggttgtggctgcctagcaggtgaaaagcggcagtag

SEQ ID NO: 146661 - protein, 560 aa, Drosophila melanogaster
MASPANPSSNHKMNGNGKIYCEGNLLHTIQTAVPKLFADSKTFVDMKLNNSPDKTLEDFNAMMEAKNQTPSSEDLKQFVDKYFSAPGTELEKWTPTDWKENPSFLDLISDPDLKQWGVELNSIWKDLGRKMKDEVSKNPEYYSIIPVPNPVIVPGGRFIEFYYWDSYWIIRGLLYSQMFDTARGMIENFFSIVNRFGFIPNGGRVYYHGRSQPPLLTGMVKSYVDFTNDDKFAIDALDTLEHEFEFFVNNHNVTVKNHSLCVYRDSSSGPRPESYREDVETGEEFPTDEAKELHYSELKAGAESGMDFSSRWFISPTGTNDGNRSALSTTSIVPVDLNAYLYWNAKLIAEFHSKAGNTKKVTEYETKAEKLLLGIQEVLWNEEAGVWLDYDMINQKPRDYYTPTNLSPLWVKAFNISESEKISASVMAYIERNKLDSFPGGVPNTLSYTGEQWDAPNVWAPMQYILVEGLNNLNTPEAKNMSLKWATRWVKTNFAAFSKDRHMYEKYNADEFGVGGGGGEYEVQTGFGWSNGVIIEWLSKHGRDISIGSGCGCLAGEKRQ

SEQ ID NO: 146662 - DNA, 1548 bp, Drosophila melanogaster
  CDS (1)..(1548)
atgaagctgaacaattcgcccgacaagaccctcgaggactttaatgccatgatggaggccaagaatcagacgccaagcagtgaggatctcaagcagtttgtcgataagtacttcagtgcaccgggcaccgagcttgagaaatggacgcccaccgactggaaggagaatcccagtttcctcgacctgatctccgacccagatctgaagcaatggggcgtcgagctgaatagcatttggaaggacttgggacgcaaaatgaaggacgaggtgtcaaagaatcccgaatactactcaatcattcccgtgccaaatccagtgatcgtgcccggcggtcgtttcattgagttctactactgggactcctactggatcatccgtggacttctctacagccagatgtttgacaccgcgcgcggcatgattgagaacttcttttccattgtcaatcggttcggttttattccaaacggcggtcgagtctactaccacggtcgctcccagccgccacttctaaccggtatggtcaagtcgtacgtggacttcaccaacgatgacaagttcgccatcgatgccctggacacgctggagcacgagttcgagttctttgtgaacaaccacaatgtcacggtgaagaatcacagcctgtgtgtgtaccgcgattcgtcgtccggaccgcgaccagaatcctaccgagaggatgtggagaccggcgaggagttccccacggatgaggccaaggaactgcattacagtgaactcaaggcaggcgccgaatcgggcatggactttagctcgcgctggttcatctcaccgactggaaccaatgatggcaaccggagcgctctgagcaccacctccattgtgcccgtcgacctgaatgcctatctctactggaacgccaagttgattgccgagttccattccaaagcgggcaacaccaaaaaggtcaccgaatacgagaccaaggccgagaaactccttctgggtatccaagaagttttgtggaacgaggaggccggtgtctggttggactacgatatgattaaccagaagcctcgcgattactacacgcccaccaatctatctccactgtgggtgaaggccttcaacatttcggagtccgaaaagatatcggcttcggttatggcctacattgagaggaacaagctggacagcttccctggcggagttcccaacacgctgagctacaccggagaacagtgggatgcccccaatgtgtgggcaccgatgcagtacatcctggtcgagggcctaaacaacctgaacactcccgaggccaagaatatgtcactgaagtgggccaccaggtgggtgaagacaaactttgcggcgtttagcaaggacaggcacatgtacgagaagtacaacgccgatgagttcggagttggaggcggcggtggcgagtacgaggtacagactggattcggttggtccaacggtgtgatcatcgagtggctgagcaagcacgggcgcgacatttccattggatccggttgtggctgcctagcaggtgaaaagcggcagtag

SEQ ID NO: 146663 - protein, 515 aa, Drosophila melanogaster
MKLNNSPDKTLEDFNAMMEAKNQTPSSEDLKQFVDKYFSAPGTELEKWTPTDWKENPSFLDLISDPDLKQWGVELNSIWKDLGRKMKDEVSKNPEYYSIIPVPNPVIVPGGRFIEFYYWDSYWIIRGLLYSQMFDTARGMIENFFSIVNRFGFIPNGGRVYYHGRSQPPLLTGMVKSYVDFTNDDKFAIDALDTLEHEFEFFVNNHNVTVKNHSLCVYRDSSSGPRPESYREDVETGEEFPTDEAKELHYSELKAGAESGMDFSSRWFISPTGTNDGNRSALSTTSIVPVDLNAYLYWNAKLIAEFHSKAGNTKKVTEYETKAEKLLLGIQEVLWNEEAGVWLDYDMINQKPRDYYTPTNLSPLWVKAFNISESEKISASVMAYIERNKLDSFPGGVPNTLSYTGEQWDAPNVWAPMQYILVEGLNNLNTPEAKNMSLKWATRWVKTNFAAFSKDRHMYEKYNADEFGVGGGGGEYEVQTGFGWSNGVIIEWLSKHGRDISIGSGCGCLAGEKRQ

SEQ ID NO: 146664 - DNA, 1632 bp, Coxiella burnetii RSA 493
  CDS (1)..(1632): transl_table=11
atgccctaccctttaccgtttcctaaaaccagggaatcaaggcctccaggacgacctccggtaaaacgataccctcaaattgaagggccgctgtttatcgtctcgcaatctcagcaagttttctctgattctaaaacctgggttgactgtattccgcgaatttcaccggctgaaattttatgccgttttcaacaagagagaacagcaccacactttaatttaattcattttatttcacagcattttgaagtgcccaacccggtggaacgtttacttgcttttgatccctctcatacaatggaaacttatattcagtcgctttggcctctgttaacctataacgccgacagtgctcagccggattattcttcgctaattccgttaccccacccctacgtcatccccggtgggcgttttcgagaaatttattattgggatagttatttcactgctgaaggacttgcctgttctgatcagctcgacctcgtgatcaatatggcaaaaaatttagcccatttaatagaaactattggtcatatccctaacggcaataggatttattatcgtagccgctcgcagccttctttctttggttgcctcattgagattatcgcgcaacatcaaggagtcgatgctataaaacccttcgtgagagcactggaaaaagaataccggttttggatggcgggagaagatcgactaacaccacaaagtcccgctcatcgacgcgtggtgctgctagacgatcagtgtgttttaaatcgctattgggataatttatcgctgccgcgtccggaatcttatcgagaagacgtgttgctttataagcaagctgcgcctttagagaaacggcatttgtatcgaaatattcgcgccgcatgcgaatcgggatgggatttctcatcgcgatggatgagagataaagagagattaacatcgatttataccaccgagcttgttccggtagatcttaatgccatactttatcacatggaaataaaactggccgattatttcgagcattttagtaatcgacgcaaagccgaattttttcaacgccgagctgaacggcgaaaacaagccattgtgcaatactgttgggacaccgataaacaattttattttgattattgttggacagaaaaagaaaaaacggcttcgttcactttagcagccgctttcccgttattttttaaattagcttcttcatttcaagcagcggcggttactgataaattaataaaagattttttttatcccggcggtttagtcactactttagatgaaagcgcccaacaatgggataaacccaatggctgggcgccgctgcattggattgctattaaagggcttcttaattacggttatgaaaccgaagccaaaataattaccgaacgttggcttgcccttaatcgtcaggtgtttcagcgcacaggaaaaatgatggaaaaatacaatgtgtgtgaccctcaccttaaagccggtggcggcgaatatccactccaagacggtttcgggtggacaaacggaatcgctgtcgccttaaatgcccttttttcccaacgttggggagagcatttgtttacgggctttgaaatacatcaggaaaggcgggagactcatcactattaa

SEQ ID NO: 146665 - protein, 543 aa, Coxiella burnetii RSA 493
MPYPLPFPKTRESRPPGRPPVKRYPQIEGPLFIVSQSQQVFSDSKTWVDCIPRISPAEILCRFQQERTAPHFNLIHFISQHFEVPNPVERLLAFDPSHTMETYIQSLWPLLTYNADSAQPDYSSLIPLPHPYVIPGGRFREIYYWDSYFTAEGLACSDQLDLVINMAKNLAHLIETIGHIPNGNRIYYRSRSQPSFFGCLIEIIAQHQGVDAIKPFVRALEKEYRFWMAGEDRLTPQSPAHRRVVLLDDQCVLNRYWDNLSLPRPESYREDVLLYKQAAPLEKRHLYRNIRAACESGWDFSSRWMRDKERLTSIYTTELVPVDLNAILYHMEIKLADYFEHFSNRRKAEFFQRRAERRKQAIVQYCWDTDKQFYFDYCWTEKEKTASFTLAAAFPLFFKLASSFQAAAVTDKLIKDFFYPGGLVTTLDESAQQWDKPNGWAPLHWIAIKGLLNYGYETEAKIITERWLALNRQVFQRTGKMMEKYNVCDPHLKAGGGEYPLQDGFGWTNGIAVALNALFSQRWGEHLFTGFEIHQERRETHHY

SEQ ID NO: 146666 - DNA, 1698 bp, Shigella flexneri 2a str. 2457T
  CDS (1)..(1698): transl_table=11
atgaaatcccccgcaccttctcgcccgcaaaaaatggcgttaattccagcctgtatctttttgtgtttcgctgcgctatcggtgcaggcagaagaaacaccggtaacaccacagccgcctgatattttattagggccgctgtttaatgatgtgcaaaacgtcaaactttttccggaccaaaaaacctttgccgatgccgtgcctaacagcgatccgctgatgatccttgctgattatcggatgcagcaaaaccagagcggatttgatctgcgccatttcgttaacgtcaatttcaccctgccgaaagaaggcgagaaatatgttccgccagaggggcagtcactgcgcgaacatattgacggactttggccggtattaacgcgttctaccgaaaacaccgaaaaatgggattctctgttaccgctgccggaaccttatgtcgtgccgggcggacgttttcgcgaggtatattactgggacaattacttcaccatgttaggacttgccgaaagtggtcactgggataaaatcgcggatatggtggccaattttgctcatgaaataaacacttacggtcatattcccaacggcaaccgcagttactatttaagccgctcgcaaccgcccttctttgccctgatggtagagttactggcgcagcatgaaggcgatgccgcgttgaagcaatacctgccgcaaatgcaaaaagaatatgcttactggatggacggtgttgaaaacctgcaagccggacaacaggaaaaacgcgttgtaaaacttcaggatagtacccttctcaaccgctactgggacgatcgcgatacgccacgaccagagtcatgggtggaagatattgccaccgccaaaagcaatccgaatcgacctgccactgaaatttaccgcgacctgcgctctgccgctgcgtctggctgggatttcagctcgcgctggatggacaacccgcagcagttaaataccttacgcaccaccagcatcgtaccggtcgatctgaacagcctgatgtttaaaatggaaaaaatcctcgcccgcgccagcaaagctgcaggagataacgcgatggcaaaccagtacgaaacgctggcgaatgcccgtcaaaaagggatcgaaaaatacctgtggaacgatcaacaaggctggtatgccgattacgacctgaaaagtcataaagtgcgcaatcagttaaccgcggccgccctgttcccgctgtacgtcaatgcggcagcgaaagatcgcgccaacaaaatggcgacggcgacgaaaacacatctgctgcaacccggcggcctgaacaccacgtcggtgaaaagtgggcaacaatgggatgcgccaaatggctgggcaccgttacagtgggtcgcgacagaaggattacaaaactacgggcaaaaagaggtggcgatggacattagctggcacttcctgaccaatgttcagcacacctatgaccgggagaaaaagctggtggaaaaatatgatgtcagcaccaccggaacggggggcggcggtggcgaatatccattacaggatggctttggctggaccaatggcgtgacgctgaaaatgctggatttgatctgcccgaaagagcaaccgtgtgacaatgttccggcgacgcatccgaccgttaagtcagcaacgacgcaaccctcaaccaaagaggcacaacccacaccttaa

SEQ ID NO: 146667 - protein, 565 aa, Shigella flexneri 2a str. 2457T
MKSPAPSRPQKMALIPACIFLCFAALSVQAEETPVTPQPPDILLGPLFNDVQNVKLFPDQKTFADAVPNSDPLMILADYRMQQNQSGFDLRHFVNVNFTLPKEGEKYVPPEGQSLREHIDGLWPVLTRSTENTEKWDSLLPLPEPYVVPGGRFREVYYWDNYFTMLGLAESGHWDKIADMVANFAHEINTYGHIPNGNRSYYLSRSQPPFFALMVELLAQHEGDAALKQYLPQMQKEYAYWMDGVENLQAGQQEKRVVKLQDSTLLNRYWDDRDTPRPESWVEDIATAKSNPNRPATEIYRDLRSAAASGWDFSSRWMDNPQQLNTLRTTSIVPVDLNSLMFKMEKILARASKAAGDNAMANQYETLANARQKGIEKYLWNDQQGWYADYDLKSHKVRNQLTAAALFPLYVNAAAKDRANKMATATKTHLLQPGGLNTTSVKSGQQWDAPNGWAPLQWVATEGLQNYGQKEVAMDISWHFLTNVQHTYDREKKLVEKYDVSTTGTGGGGGEYPLQDGFGWTNGVTLKMLDLICPKEQPCDNVPATHPTVKSATTQPSTKEAQPTP

SEQ ID NO: 146668 - DNA, 1620 bp, Strongylocentrotus purpuratus
  CDS (1)..(1620)
atgacgtatgcagtcacgtggtctgcggccgatctgaaggatgaggcgccatgcgctagttccatcttctgcaatggcctacttttgaaagctgctcaaaatgcgatgatctacaatgactccaagaccttcgtggatctacatctaaagcaatctgaggacgttatcttgcaagctttcggtgaacttgttgatcggacggatgcgaatgttatgagagaatttgtggcggagtattttgatggacctaacattgagttcgaggattgggagccgtcagattggaaagaaaatccaggtttcattgatggtataaatgatgacgaactgaaggaatgggcgagagatttgaatgaactgtggaaagaactgggaagacagatcaaacaagacgtcctcacgaatgcagaccgctattcattgattcacgtcgagaatcccttcatcgtaccgggaggccgatttagagagttctactattgtattggtcacgtgcctaacggtaaccgggtctactatgagaagcgaagtcaaccaccgtttctcatcccctccgtctacctctatcttcaagccaccgacgacatcgaaaccattcgcactttcctgcccgacctcgagatcgagtaccagttctggatgaccgacagggccatagacatcaccaaagatgcgaatgtttacacgttgaatagatacaacgtcaacatgggcatgcccaggcccgaatcataccgtgaagatatcgaaacagcagatggtaaaaatgaagaggaagccgcggaggtatattccaacctcgcctcagcagcagagagtggatgggacttctcgacgcgttggttccgtgatggggcaactcttggatccatccgcactaaagaaatagttccagtagacctgaacagcgtgttgtgtctaagtgaatgggccctctacgagatgtataatacgacaggtaatgaatccaaagctgctacatacctccaggccttcaacgaccgcaaacgggccatcagtgaggtactttggagcgaggacgaaggcgcctggttcgactacgatatcgtcgacgaagacattgtcgatcagttctacccatcgaatatcatgcccatgtgggcgtcgtgttacgacgatacgaatgacatacaacagcaggtccttgactaccttaaaaaagaaggtgttttggagtttcctggcggaatcccgacatcattgacgaaatcgggacagcagtgggactacccgaatgcctggccacctctccaggacatcgtcatcgagacgctacgcaaaagcgacgtcgaggaggcgaatgactatgctctaaaactagcccagaactggactctgacgaactggagagcttacaaagagaccgacctcatgtttgaaaagtacgatgtggaaaaacaaggcgtgcctgggcatggtggggaatacgccgttcaggctggttttggatggaccaatggcgtcattatgtcccttctagatcactatggcgaccagctggaggtcggagaaactggttcatccggtcacgccactgtttttattcttctcaacgttgtctgtctcttcgctgcacttatcctcgctcgtgatgagtag

SEQ ID NO: 146669 - protein, 539 aa, Strongylocentrotus purpuratus
MTYAVTWSAADLKDEAPCASSIFCNGLLLKAAQNAMIYNDSKTFVDLHLKQSEDVILQAFGELVDRTDANVMREFVAEYFDGPNIEFEDWEPSDWKENPGFIDGINDDELKEWARDLNELWKELGRQIKQDVLTNADRYSLIHVENPFIVPGGRFREFYYCIGHVPNGNRVYYEKRSQPPFLIPSVYLYLQATDDIETIRTFLPDLEIEYQFWMTDRAIDITKDANVYTLNRYNVNMGMPRPESYREDIETADGKNEEEAAEVYSNLASAAESGWDFSTRWFRDGATLGSIRTKEIVPVDLNSVLCLSEWALYEMYNTTGNESKAATYLQAFNDRKRAISEVLWSEDEGAWFDYDIVDEDIVDQFYPSNIMPMWASCYDDTNDIQQQVLDYLKKEGVLEFPGGIPTSLTKSGQQWDYPNAWPPLQDIVIETLRKSDVEEANDYALKLAQNWTLTNWRAYKETDLMFEKYDVEKQGVPGHGGEYAVQAGFGWTNGVIMSLLDHYGDQLEVGETGSSGHATVFILLNVVCLFAALILARDE

SEQ ID NO: 146670 - DNA, 2016 bp, Nasonia vitripennis
  CDS (1)..(2016)
atgccgccgccgaggatgatgctgctgctgctgccgctgacgctctcgctgacgctgagcggccgaggcctcgtcgccggccaggagcagacgaccggagccagccagaagaagccgcatccatgcccgagcgaggtctactgccacggcgagctgctgcacacgatccagatggcctcgatctacacggactcgaagacgttcgtcgacatgaagatgcgccagccgacggaggcgacgctcgggctgttccgcgagttcatgaaccggacggccggggcgccgacgcgctcgcagatcgaaaagttcgtgaacgagaccttcgagccggccggctccgagttcacggacttcgacccgaaggactgggtggcccagcccaagttcctccgcaaggtcctcgacccggagctccggaagttcggccaggacctgaaccacatctggaagctgctcgggcgcaagatgaaggacgacgtgcggctcaacagcgagctctactcgatcatctacgtggagaacccggtgatagtgccgggcggccggttccgcgagttctactactgggactcctactggatcgtgaagggcctgctgcactcggagatgcacgccacggtgcgcggcatgctcagcaacttcgtctcgatcgtcgaccggtacggcttcatcccgaacggcggccggatctactacaccatgcgctcgcagccgcccatgctgctgcccatggtgcacgagtacctgaagcacagcaacgactaccagtggctcgaggagaacctctggctcctcgagaaggagtttgacttctggatgaccaagcgcacggtcgaggtcgagcgggacggcgtcagctacaccctggcccgctactacgaggagtcctccggcccgcggcccgagtcctacagggaggactacctgaccagccagagcttccgcacgagcgaggagaaggagaactactgggccgagctcaagaccgccgccgagacgggctgggacttctccagccgctggttcatcctcgacggcacgaacaagggcaacctgaccaacctcaagacgcgctccatcatcccggtcgacctgaacgccctgatctaccggaacgcggtcctgctggcccagtacaaccggcacttcggcaacgtcagcaacgccgagcgctacgagcgccgggcccgcgagtggcagcgggccgtcaccgcggtcctctggcacgacgaggtcggcgcctggctcgactacgacatcctcaacgacctcaagcgcgactacttctacccgaccaacatcctgccgctctggaccggctgctacgaggccgcgcgccgcgaggagcacgtctccaaggccctcaagtacctcgagaagagccagatcatgatgaacctcggcggcatacccacgaccctcgagcactcgggcgagcagtgggactacccgaacgcctggccgcccctccagtactttgtcatcatgtcgctcgacagcaccaacgacccctgggcccagaggctcgcctacgagatgagccagcgctgggtgcgcagcaactacaaggccttcaacgagaccaacagcatgtttgagaagtacgacgccacggtgtcgggaggctacggaggcggcggcgagtacgaggtgcagctgggcttcggctggtcgaacggcctcatcctcgacttgctggacaagtacgccgaccgactgaccgtcgagaaccactttgtgccgtccgacgtcacgacgcgaaacgtggccgggccgcagctcgccggcgtctcgacggccggccagctcatgaccggcgtcctcgccctcatcatttccctggccgcgggattcatcgggatggtcatgtacaagcggcgccactactacggagtctcgggcccgtcgacggcgccgagcagccgcaagtccgccggaggcgtcggcccggcctcggccctctaccgcaagcgcttcgcctacaccgagctcaaggacatgaacaacgacgactga

SEQ ID NO: 146671 - protein, 671 aa, Nasonia vitripennis
MPPPRMMLLLLPLTLSLTLSGRGLVAGQEQTTGASQKKPHPCPSEVYCHGELLHTIQMASIYTDSKTFVDMKMRQPTEATLGLFREFMNRTAGAPTRSQIEKFVNETFEPAGSEFTDFDPKDWVAQPKFLRKVLDPELRKFGQDLNHIWKLLGRKMKDDVRLNSELYSIIYVENPVIVPGGRFREFYYWDSYWIVKGLLHSEMHATVRGMLSNFVSIVDRYGFIPNGGRIYYTMRSQPPMLLPMVHEYLKHSNDYQWLEENLWLLEKEFDFWMTKRTVEVERDGVSYTLARYYEESSGPRPESYREDYLTSQSFRTSEEKENYWAELKTAAETGWDFSSRWFILDGTNKGNLTNLKTRSIIPVDLNALIYRNAVLLAQYNRHFGNVSNAERYERRAREWQRAVTAVLWHDEVGAWLDYDILNDLKRDYFYPTNILPLWTGCYEAARREEHVSKALKYLEKSQIMMNLGGIPTTLEHSGEQWDYPNAWPPLQYFVIMSLDSTNDPWAQRLAYEMSQRWVRSNYKAFNETNSMFEKYDATVSGGYGGGGEYEVQLGFGWSNGLILDLLDKYADRLTVENHFVPSDVTTRNVAGPQLAGVSTAGQLMTGVLALIISLAAGFIGMVMYKRRHYYGVSGPSTAPSSRKSAGGVGPASALYRKRFAYTELKDMNNDD

SEQ ID NO: 146672 - DNA, 1734 bp, Apis mellifera
  CDS (1)..(1734)
atgccaggacttttcgcgtttctcggcgtcgctctgatcgcctccttgaccgatgccgcctccatcagacgtgccaaccgcaaggccatggactgctatagcgagatctattgcacgggagagctgctgaagacgatacagctggctgaaatcttcccagacagcaagacgttcgtcgatcttcatcagatgaacgaccccgaaataactctctccaacttctacagtttgatgaatgaaacggggaacaaaccgagtaaaagtcagctggcgagatatgttaatgaaaatttcgcctcgtcgaacgagctcgtgaactggacgctgccagattggacggagagcccttcgatcttgaaacggatcaacgaggccaagtatcgcgagtgggcgaaacatctgaacgaaatttggaaggaattggcgaggaagatcaatccagaggtggccgagtatcctgagaggcatagtttgatatacgtggacaatggattcatcgttcctggcggtcggttcaaagaattttattactgggacagttactgggtgattgaaggtctgctgttatccgacatgtatcaaactgccaggggaatgatagacaatttcttatacatggtgaagaaatatggtttcatacccaatggtggcagaatttattaccttatgagaagccagccacctctattacatctgatggtctcaagatatttggacttcactggggattacgattatttacgttcgattatatccactctggaaactgaattttctttctggcagcgagagaagatgatcgacgttgagaaggatggaaaaatatataaaatggcgcattacgtggttaatagtaccagtcctcgaccagaaagttacagagaggattatctgatggcgcagcggattcccgaaaaatcacgggatttcttttacaataatataaaggcgggcgccgaaagtggctgggatttttccaacaggtggttcatacgaaacaacaatagcagtacgctcagtttatacaatatctccacgcaatacataatacctgtcgaccttaatgcgattctgcaacaaaatgcccggctcctcggcgaatttcacactctgctcgggaacaatgcgaaatctcagtattatcagaagatagcatcacaacttcaaacggccatagacaatattctgtggaacgaagctgatggaatatggctggattacgatctgaagaaccagaggcctaggcatatgttctacccttcgaatcttgctccactttacaccaaaagttataatcgtggtcaacgtgaatattatggcgcagctactctgagatatctaaaatcgcagaatatcgacaacttctttggaggtacacccacgtcgctaaatcatacgggggaacaatgggattttccaaacgcgtggccaccgttacaatcgtttatcgtaatgggcctccactggactggggttagggaagcaatggatttcgcccatgaacttgcgtttagatggcttgctgctaattacgctggttataaggaaaccgggcaaatgtttgagaagtacgattcgatcgtgcccggccaaggcggtggcggaggggaatacaacgtgcagacagggttcggatggactaacggggtggtcttagagttcctcaacaccttctcgagcatcaaggtgagggaggttggatacgaggacgacttaaccgaggttgaacaataa

SEQ ID NO: 146673 - protein, 577 aa, Apis mellifera
MPGLFAFLGVALIASLTDAASIRRANRKAMDCYSEIYCTGELLKTIQLAEIFPDSKTFVDLHQMNDPEITLSNFYSLMNETGNKPSKSQLARYVNENFASSNELVNWTLPDWTESPSILKRINEAKYREWAKHLNEIWKELARKINPEVAEYPERHSLIYVDNGFIVPGGRFKEFYYWDSYWVIEGLLLSDMYQTARGMIDNFLYMVKKYGFIPNGGRIYYLMRSQPPLLHLMVSRYLDFTGDYDYLRSIISTLETEFSFWQREKMIDVEKDGKIYKMAHYVVNSTSPRPESYREDYLMAQRIPEKSRDFFYNNIKAGAESGWDFSNRWFIRNNNSSTLSLYNISTQYIIPVDLNAILQQNARLLGEFHTLLGNNAKSQYYQKIASQLQTAIDNILWNEADGIWLDYDLKNQRPRHMFYPSNLAPLYTKSYNRGQREYYGAATLRYLKSQNIDNFFGGTPTSLNHTGEQWDFPNAWPPLQSFIVMGLHWTGVREAMDFAHELAFRWLAANYAGYKETGQMFEKYDSIVPGQGGGGGEYNVQTGFGWTNGVVLEFLNTFSSIKVREVGYEDDLTEVEQ

SEQ ID NO: 146674 - DNA, 1887 bp, Apis mellifera
  CDS (1)..(1887)
atggcctcgagctgttccatccggtgtggttcgagaaatatcctggtgaatgctgccgctacgttcctcgcgctcctcgtcgttcttcgatgtttcgccaacgccgagaaaccatctccgtgccagagagtgtgtgcgtgtacgtgtgcgtgttgggcttgcagcgacgtttactgccgaggcgagttgctgcacacgatacagatggcctcgatctacaaggactcgaaaacgttcgtcgacatgaagatgaaacgtccgcctgacgagacgttgaagtcgtttcgagagttcatggagcggcacgaacagatgccaaccaggtaccagatcgagcgattcgtcaacgacacgttcgacccggaaggatccgagttcgaggattgggatccggacgattggacgttcaggcccaagtttctctccagaattctcgacgacgatcttcgtaacttcgcctcagagttgaacggtatatggaaaatgctcgggcgaaagatgaaggacgatgtccgcgtgaacgaggagctctactcgatcatttacgtgccgcatccggtcatcgtccccggaggcagatttcgcgaattttattactgggactcgtattggatcgtgaaaggattgctcctctcggagatgtacacaaccgtgaagggaatgttgaccaatttcgtctccctcgtggacaagatcggtttcataccgaacggaggcaggatatactacacgatgagatcccaaccgcccatgttgattcccatggtggacgagtatctgaagatcactcacgattacgagtggctcgagaacaatctttacctcctcgagaaggagttcgacttttggatgaccaatcggacggtcgagatcgaggtggacggtgtcaattacgtgttggccagatacaacgagcagtcgtccggccctcggccggaatcctacaaagaggattaccttaccagccaaagttttcgcaccaacgaagagaaggacaattattattccgagttgaaaacggctgccgaatccggttgggatttttccagccgttggttcatactggacggcacgaacaaaggtaatctgaccaatttgaaaacgaggtacattatcccggtcgacttgaactcgataatatatcggaacgcggtgctgctggcacagtacaatcaaaggatgggaaacgaatcgaaagtggcgtattaccagaaaagggcggccgagtggaagagggcgattcaggctgtgctgtggcacgacgaggtcggcgcgtggctcgactacgacatattgaacgacataaagagggattacttctatccgaccaacatcctccccctgtggaccgattgctacgacatcgcgaagagggaggagtacgtgtcgaaggtgctcaagtatctggagaagaacaagataatgttgaatcttggcggtataccgaccacgctcgagcactcgggcgagcaatgggattatcccaacgcttggccgcccctgcaatatttcgtgatcatggcgttgaacaagacggaggacccgtgggcccagaggctcgcctatgagataagcgagcgatgggtacgaagcaattacaaggcgtacaacgagacgcacagcatgttcgagaagtacgacgcgaccgtctcgggcgggcacgggggcggtggcgagtacgaggtccagctaggtttcggttggagcaacggggtcatcatggatctgctgaacaggtacggggacaaattgacggccgaggatcgtttcgtggctaccttccattccaactcgacccctcaaccggtcgtcgtctcgaccgccggccaagtgatgaccggtattctcgctctcgtcatatccttggccgcaggatttatcgggtga

SEQ ID NO: 146675 - protein, 628 aa, Apis mellifera
MASSCSIRCGSRNILVNAAATFLALLVVLRCFANAEKPSPCQRVCACTCACWACSDVYCRGELLHTIQMASIYKDSKTFVDMKMKRPPDETLKSFREFMERHEQMPTRYQIERFVNDTFDPEGSEFEDWDPDDWTFRPKFLSRILDDDLRNFASELNGIWKMLGRKMKDDVRVNEELYSIIYVPHPVIVPGGRFREFYYWDSYWIVKGLLLSEMYTTVKGMLTNFVSLVDKIGFIPNGGRIYYTMRSQPPMLIPMVDEYLKITHDYEWLENNLYLLEKEFDFWMTNRTVEIEVDGVNYVLARYNEQSSGPRPESYKEDYLTSQSFRTNEEKDNYYSELKTAAESGWDFSSRWFILDGTNKGNLTNLKTRYIIPVDLNSIIYRNAVLLAQYNQRMGNESKVAYYQKRAAEWKRAIQAVLWHDEVGAWLDYDILNDIKRDYFYPTNILPLWTDCYDIAKREEYVSKVLKYLEKNKIMLNLGGIPTTLEHSGEQWDYPNAWPPLQYFVIMALNKTEDPWAQRLAYEISERWVRSNYKAYNETHSMFEKYDATVSGGHGGGGEYEVQLGFGWSNGVIMDLLNRYGDKLTAEDRFVATFHSNSTPQPVVVSTAGQVMTGILALVISLAAGFIG

SEQ ID NO: 146676 - DNA, 1812 bp, Tribolium castaneum
  CDS (1)..(1812)
atgaacaaattagtgtgttgtgcgtttgtgctcagcctggcccttagttgcatctgtgatgatactctatccccaccttgcaacagcgatatctactgctacggccctttacttcacacaattcaaatggaacgcatctacgaggactccaaaaccttcgtcgacatgaagatgcgcttcgaaccaaacatcactctgatcaaattcaatgagttcatggtgataaacaacaataagccgtccaaaaacgcgacgcgagctttcgtcaacgagaacttcgagccggcgggacaagagttcgaagagtgggatcccgaagattgggtcaaacatccgaaatacattgacgggattcaagacgacgagttcaagcaatgggcgctttcgctgaatctggtctggaaggacttgggccggaaaatgaagaaggaagtcgaactgaaccaatcactctacagtattatttgggtcccgcaccccgtgatagtacccggagggcgcttccgcgagttctactactgggactcctactggatcgtgcaaggactcctcttgtcggaaatgtacgggacggtcaaaggaatgctcgaaaatttcctctacatcgtcgacaaatacggacatatccccaacgggggacgcatctactacatgcaaagatctcagcctccgctaatggtgccaatgatcaagctgtatgttgacttcacgaacgacactcacttcgttagggacaacatcgcaacaatggagaaagagttcgagtactggatcaccaaacacaacaaaactgtgaccctcgacggcaagaactacaccctcgcgacgtacggcgaccgctcgaaagggcctcgccccgagtcctactccgaagacgtcgaaggcgctgccattttcgacgacaacgacaagaaggagagtttttacgccgaattgaaagcagcggccgaatccggttgggatttttcaagccgttggtttattaaaaacgcgactaataaaggtaatttgaccaataccaaaatccggtctatagtcccagttgacttgaacgcaatgatctactggaacgcggttctcttatctgaatttaataccctcctcggcaatttggccaaagtccagtattacaacaacattgcgaaagagtggatggaggccgtgactgctgttttatggcacgaagaagtcggtgcctggctagactatgacttgtcaaattcagtgaaacgcgattatttttacccgactaatattgcgccactgtggaccgggtgttacaaccaaacggacaaagggaaaatcgtgcgtctggtcttgaagtatttgcaaaataaaaacattctctaccctggtggtatccccaccacggtggaacacaccggcgaacaatgggactaccccaatgcctggcctcccttgcaacacatcatgattgtgggcctgaacaacacgggagatgttgttgcacaaagactagcctttgaaatcgccgaaaagtgggtgcgctccaactacaaagcgttcaaagagaccgacgccatgtttgaaaagtacgacgcgacggtgcctgggggccacggcgggggcggcgagtacgagacgcagctagggttcggttggacgaacgggatcatcatggatttgttgtaccgatactcggggaacctgactgtggaggacccgccaccaccgtcaccaaaaccggtctttgaggcgtcgcaagacgtgcaatctgcgtcgagttttagccaaatttcggccgtcttgatagcgttaatgatatcgctaacggcaggattcatagggtga

SEQ ID NO: 146677 - protein, 603 aa, Tribolium castaneum
MNKLVCCAFVLSLALSCICDDTLSPPCNSDIYCYGPLLHTIQMERIYEDSKTFVDMKMRFEPNITLIKFNEFMVINNNKPSKNATRAFVNENFEPAGQEFEEWDPEDWVKHPKYIDGIQDDEFKQWALSLNLVWKDLGRKMKKEVELNQSLYSIIWVPHPVIVPGGRFREFYYWDSYWIVQGLLLSEMYGTVKGMLENFLYIVDKYGHIPNGGRIYYMQRSQPPLMVPMIKLYVDFTNDTHFVRDNIATMEKEFEYWITKHNKTVTLDGKNYTLATYGDRSKGPRPESYSEDVEGAAIFDDNDKKESFYAELKAAAESGWDFSSRWFIKNATNKGNLTNTKIRSIVPVDLNAMIYWNAVLLSEFNTLLGNLAKVQYYNNIAKEWMEAVTAVLWHEEVGAWLDYDLSNSVKRDYFYPTNIAPLWTGCYNQTDKGKIVRLVLKYLQNKNILYPGGIPTTVEHTGEQWDYPNAWPPLQHIMIVGLNNTGDVVAQRLAFEIAEKWVRSNYKAFKETDAMFEKYDATVPGGHGGGGEYETQLGFGWTNGIIMDLLYRYSGNLTVEDPPPPSPKPVFEASQDVQSASSFSQISAVLIALMISLTAGFIG

SEQ ID NO: 146678 - DNA, 1626 bp, Tribolium castaneum
  CDS (1)..(1626)
atgaaccacttgtcccttgtcacacttttttgcctatttggggccattttcgcccaagatttaccgtcatgtgagagcaaaatttactgccaaggcaaattgctcgacacgatccaaatggcccgacttttcgacgattccaaaactttcgtcgacatggccttgaaaaaccccgcagaaacggtactcgaaaatttcgataagttgctccaggacactgacaataacccgagcaaggacgacttggaacagttccttgaggaaaatttcgaaaatcgggaggaactcgaagagtggagtccggaggactacacggaaagtccaaaatttttggaaaaaatccaagacgagagtttgaaacaattcgcccaggagttggtcaagctttggccgaaattcggccggaagatgagcccagaagttgggcaaaacccaaccaaacactcactcattccggtcaccaacggatttattgttccaggagggcgttttaacgaattttactactgggacacttattggattattaagggacttttgatgtgcgaaatgaaggatacggtcaagggaattttggaaaacttctaccaaattgtaaaaaaatatggttttgtgccaaacggtgccagggtttactacttgaaccggtcccaacccccactcctcgcactgatgacagctgcttattttaaggaatcaaacgactcgcaatggctgggtgaacaaatccctgttctggaaaccgagctgaatttttggctccaaaaccgttcgattgaagtcaatttgggcgaaaacagctacactctattccactacgcctccgaaagtggaagtccgagaccagagtcctactacgaggacgtccaaagtgctaacaaaatcgaaaatgaagcccaaaaagtccagttatgggccgatttgaaaagcgcggctgaaagtggctgggacttctcctcccgctggatgtccgaccccaacggcgacctcaccgacgcccaaaccaggaacataatccccgtagacttaaactccttcctctgccaagctttcagcatcatgtcctcctttcaccaaactttgggcaacgaccaggaagcctctctctgggccaccaaaacccaaactttaaaatcggccataaaagaggtttttttcgacgaaaccgacggagtttggtacgattacgacctgaaattagcccagaagcggaaaaacttctaccccagtaatttgacccctttgtgggcgcgcgcgagccacgaaatcgacgcggggaaaatcgtgcagtatctggggcaggttttggggtacgggggcggcgtgcctgcgtccttgaccaagtcggggcagcagtgggacttcccgggggcttggccccctttgcaggaacttgtcataaattcgctctaccgtacgaaggattccaaagcgattgaggtggctaaggagttgtcgcaaaaatggctcaagtctaatgtccaggcgttcgataaatatggggccatgtttgagaagtatgacgctgaaagagtgggggagcccgggggtgggggcgagtacgaggtccaggaggggtttgggtggaccaatggggtggccttgatgctaatcaagtgggcttga

SEQ ID NO: 146679 - protein, 541 aa, Tribolium castaneum
MNHLSLVTLFCLFGAIFAQDLPSCESKIYCQGKLLDTIQMARLFDDSKTFVDMALKNPAETVLENFDKLLQDTDNNPSKDDLEQFLEENFENREELEEWSPEDYTESPKFLEKIQDESLKQFAQELVKLWPKFGRKMSPEVGQNPTKHSLIPVTNGFIVPGGRFNEFYYWDTYWIIKGLLMCEMKDTVKGILENFYQIVKKYGFVPNGARVYYLNRSQPPLLALMTAAYFKESNDSQWLGEQIPVLETELNFWLQNRSIEVNLGENSYTLFHYASESGSPRPESYYEDVQSANKIENEAQKVQLWADLKSAAESGWDFSSRWMSDPNGDLTDAQTRNIIPVDLNSFLCQAFSIMSSFHQTLGNDQEASLWATKTQTLKSAIKEVFFDETDGVWYDYDLKLAQKRKNFYPSNLTPLWARASHEIDAGKIVQYLGQVLGYGGGVPASLTKSGQQWDFPGAWPPLQELVINSLYRTKDSKAIEVAKELSQKWLKSNVQAFDKYGAMFEKYDAERVGEPGGGGEYEVQEGFGWTNGVALMLIKWA

SEQ ID NO: 146680 - DNA, 1662 bp, Tribolium castaneum
  CDS (1)..(1662)
atgaagtctctcctcgtttcggcccttttaatcgtaacagcatcaggccaagacctgccgtcatgcgccagcaaggtgtattgccaaggcaacctcctccacacggtgcaaatggcgcgcatcttcgacgactccaaaaccttcgtcgacatgaaaatgcgcaacgacgagaaaacaactttggcgaactttgacaagttctggaacgacactaaccagaaccccaacaaagaccaagtcaggaaatttgtcagtgacaattttgagacctacaacgagttcgacgactgggtcccgaccgacttcaccgacaacccggagattttgtcaagaatcgacgacctggagattcgacagttcgcccaagacttggtcaacatttggccaaagctggcccggaaaatgaagaaggaagtgattgacaatccggggctcttcacccttctaccagtcgacaatggtttcgtcatcccaggtgggaggttcaaggagttctactactgggactcctactggatcatcaaagggctgttggtcagcgaaatgaaccagacggttaaaggcatgcttgacaatttcttgtcaattgttgacaagtacggttttctgccgaacggtgcccgcatctactacctaaaccgctcccaaccgccgctcctcaacctcatggtcgccgcctacatcgacgcaaccaacgacaccaaatggttgaaggacaacatcaagatcctggacaaggaactgaggtactggctggacaataagctggtggaagtgaccaagaacgggaccacctacaccatggcccactacgactccgagagcggttccccacgtccggaatcctactacgaggacgtcaccacggccagcaccctcccagaacaggcgaaaaagcagctatacgccgacttgaagagcggcgctgagagcggctgggacttctccaccaggtggatcgtcgacgcgagcggcggcaccaaagccaacctcaccggcctccaggtccggagactcatccccgtggacttgaacgccttcctgtgccaagccttccggaaactggccgaattctacgtgattttgcacgattacgagaacgcgattttctggtacgagaaatccttcctctggcagaaaaccatcgaggaagtgctttataacgaagaggacggtgtttggtacgattgggacaatgagttggggcagcaccgcaagtacttcttcccttctaatttggcccccttgtgggcggaggcgtacgacttgtccaaggccgatgttctgggccagcgggcggctgagtacgtcgtgaggcaaaaactgctggactaccaagggggcattccagcctccttgaccaggagcggggagcagtgggactaccccaacgcctggcccccgctgcagagcctcgtggtcatgggtctggacaggagcggcaactgcaaggccaaggagctggcccgggagtttgcccaacgatgggtcactgccaatttgattgggttcaaccagaccagcgaaatgttcgagaagtacgacgcggaggtgccgggacagtatggagggggcggggagtacgtcatccagagcgggttcgggtggacaaatggagtcgcacttgaatttatcgagcgattttacgcggtttcggattga

SEQ ID NO: 146681 - protein, 553 aa, Tribolium castaneum
MKSLLVSALLIVTASGQDLPSCASKVYCQGNLLHTVQMARIFDDSKTFVDMKMRNDEKTTLANFDKFWNDTNQNPNKDQVRKFVSDNFETYNEFDDWVPTDFTDNPEILSRIDDLEIRQFAQDLVNIWPKLARKMKKEVIDNPGLFTLLPVDNGFVIPGGRFKEFYYWDSYWIIKGLLVSEMNQTVKGMLDNFLSIVDKYGFLPNGARIYYLNRSQPPLLNLMVAAYIDATNDTKWLKDNIKILDKELRYWLDNKLVEVTKNGTTYTMAHYDSESGSPRPESYYEDVTTASTLPEQAKKQLYADLKSGAESGWDFSTRWIVDASGGTKANLTGLQVRRLIPVDLNAFLCQAFRKLAEFYVILHDYENAIFWYEKSFLWQKTIEEVLYNEEDGVWYDWDNELGQHRKYFFPSNLAPLWAEAYDLSKADVLGQRAAEYVVRQKLLDYQGGIPASLTRSGEQWDYPNAWPPLQSLVVMGLDRSGNCKAKELAREFAQRWVTANLIGFNQTSEMFEKYDAEVPGQYGGGGEYVIQSGFGWTNGVALEFIERFYAVSD

SEQ ID NO: 146682 - DNA, 1647 bp, Tribolium castaneum
  CDS (1)..(1647)
atgcctttcctcctacttctcaccctctcattcgtcacaagcgagccctgcaccagcctcatctactgccaaggccccttgctccacatggtccaaacggcgcgaattttccccgactcgaaaatcttcgtcgacatgaaaatgcaacacgacgaaaaaaccaccctcgaaaacttccaccgtttcataaaaaccacaaacaaaccaaaccgcaaagaaatcaaacgcttcgttaacgaaaacttcaaacacttccaagagttcgacgactggaccccgcccgacttccggccaaacccggattttttaaaccggattcgcgacccggaaatccgggattttgcccacgaagtggtccaaatctggccgaaactctcccggaagatcaaaagggaggtgctggagtcggcggagttgttctcgcttctgccggtaccgaacgggtttgtggtacccggagggcggttccgggagttctactactgggactcgtactggattctgaaggggctgctcttgtgccagatgcaccagactgtgagggggattttggacaatttcgccttcattatccagaaatatgggtttttgccaaacggcgcccgggtctattacttgaaccgctcccagcccccgcttctgagcctcatggttggggagtacttacgtgcaacaaatgacacggagtggttgcggaagaacatagtttggctggaccgggagttgcaatttttcctcgaaaataaactaacaactttggtaaaaaacggagttaagtaccaactagcccattatgttgccaaaagtgatacaccgcgtccagagtcgtactttgaagacatcaaaagtgcgaaatttttgcacagtccggaagccagggctgagttatggaccgatctgaaaagtgcggctgaaagtggctgggatttttcctcccgctggatggttgaccacgatggtggtaccaagaccaacttgagccacatccagaccagacgaatagtcccagtggacttgaacgccttcctctgccaggctttcgggacattgtcaggtttttacaccactttgggtgaccacaaaagggcgcttttctggctccaaaagtcacacttgtggcgccaaaacctggaattggtgttttatgaccacgaggatggggtttggtacgactgggaccgtgggttaaaccaaccacggaagggttactacgccagtaatttaaccccactgtggacacaatgctacgaccccaacctttcggatcatttgggccagaaagcagtccagtacttgtcaaaaaccgggattctggactttgatggtggcatccctgcctcccttgtgaacagtggggagcaatgggacttccccaacgcctggccgcccctccagtcaatcgtcattctgggcttggaccacacaggccacccccaagcccagaaaaccgcccaagatttggccgagaagtggattaggtcaaatttggacagtttcaaggccacgggccaaatttccgagaagtacgacgttcagttcagcggccacagcggccgtggcggggagtacagcgtccagcacggcttcggctggaccaacggtgtacttttagagcttatagaccggtactacggccgggaaaaataa

SEQ ID NO: 146683 - protein, 548 aa, Tribolium castaneum
MPFLLLLTLSFVTSEPCTSLIYCQGPLLHMVQTARIFPDSKIFVDMKMQHDEKTTLENFHRFIKTTNKPNRKEIKRFVNENFKHFQEFDDWTPPDFRPNPDFLNRIRDPEIRDFAHEVVQIWPKLSRKIKREVLESAELFSLLPVPNGFVVPGGRFREFYYWDSYWILKGLLLCQMHQTVRGILDNFAFIIQKYGFLPNGARVYYLNRSQPPLLSLMVGEYLRATNDTEWLRKNIVWLDRELQFFLENKLTTLVKNGVKYQLAHYVAKSDTPRPESYFEDIKSAKFLHSPEARAELWTDLKSAAESGWDFSSRWMVDHDGGTKTNLSHIQTRRIVPVDLNAFLCQAFGTLSGFYTTLGDHKRALFWLQKSHLWRQNLELVFYDHEDGVWYDWDRGLNQPRKGYYASNLTPLWTQCYDPNLSDHLGQKAVQYLSKTGILDFDGGIPASLVNSGEQWDFPNAWPPLQSIVILGLDHTGHPQAQKTAQDLAEKWIRSNLDSFKATGQISEKYDVQFSGHSGRGGEYSVQHGFGWTNGVLLELIDRYYGREK

SEQ ID NO: 146684 - DNA, 1692 bp, Tribolium castaneum
  CDS (1)..(1692)
atgaacgcgtttcatgtcgttgtgattttcctaatggtccgagcgctaagtagtcagaccgtgacgtgcaaaagtccgatcttctgccagggggatttgctgcgcgtggtccaaatggccgggatcttcaaggactcgaaaacgttcgttgatatgagtctggtcaggacgatggaaaagacgctcaaaaatttcgagattatgatgaccagaaccgggggaagtccgaacaagaacgatgttgttgagttcatccagaagaacttccaagcgtcgcataatgagctggacaactggtacccgaccgactaccaggtgaacccgccctttttgcgcaaaatcaaggatgtgaggattagggcgatcgcgaagaaattgctggacatttggccgaatctgggtcggaagatcaagcccgaagtgatgcagaaccccttcaagtactccatcatcccggtgcccaatgggtttatcgtgcctggggggcggttccgggaaatctactactgggactcgtactggatcatgaaggggttgctgatttgcgatatgaaacacaccgtgaaggggatgattgataatttcttccggattattgacatgtatgggtttatcccgaacggggggagaatctactacttggaccggtcgcaaccgccacttttaacactcatggtggccgactttttggaagtttcgaaggaagtgttgtggttgaggaacaatatgaaatacttggagaaggaactaatgtattggttgactatgaagacggtccaggtggaaaaacacgggcagaagtatcggttggctcggtaccgctccagtgataatacgccacgtcctgagtcctacatcgaggacatacacacagcctccaggtaccgcaccgaagacgagaagcgtcaatgctaccagaacatccgaacgggggccgagaccggctgggacttctccggccgttggttcttcgaccaccagggcggcaaccgcgccgacttgagcacaatcaaccccactcgcgtcatccccgtggacttgaacgcgtttctgtgccgctgcttcaaaatcatgcacgaattctacaagaaattccgcaaccacgaacgggctgccttctggctgcagaagtacaacgagtggctgaaagccatcagagacgtgctgtacaacgtggaggacggcatctggtacgattacgatatcgagctcagagtccaaagaaaacatttctatcccagcaactttgcgccgctctggactgagtgttacgacaccagcatcaggcaaagttacgggaaaaacgccaccaattatctggtccagaaggggattctcaactacgaaggggggattcccacgtccctgtttgagacaggggaacagtgggacatgccaaatgcgtgggcccccacacaggcaattgtgatttttgggctggataagagccaggatcctggagcgaagaaggtggcccaggacttggcgtttcgctggattgattcgttggttaaagtggcagaagacacccatgagatgttcgagaagtacaacgccatgttcaaggggatgtatgggggtgggggcgagtatgaggtccagacggggtttgggtggactaatggggtcatgttggagcttattgagcactattatattaagaacaaaggggcgaacaccacagagacgtaa

SEQ ID NO: 146685 - protein, 563 aa, Tribolium castaneum
MNAFHVVVIFLMVRALSSQTVTCKSPIFCQGDLLRVVQMAGIFKDSKTFVDMSLVRTMEKTLKNFEIMMTRTGGSPNKNDVVEFIQKNFQASHNELDNWYPTDYQVNPPFLRKIKDVRIRAIAKKLLDIWPNLGRKIKPEVMQNPFKYSIIPVPNGFIVPGGRFREIYYWDSYWIMKGLLICDMKHTVKGMIDNFFRIIDMYGFIPNGGRIYYLDRSQPPLLTLMVADFLEVSKEVLWLRNNMKYLEKELMYWLTMKTVQVEKHGQKYRLARYRSSDNTPRPESYIEDIHTASRYRTEDEKRQCYQNIRTGAETGWDFSGRWFFDHQGGNRADLSTINPTRVIPVDLNAFLCRCFKIMHEFYKKFRNHERAAFWLQKYNEWLKAIRDVLYNVEDGIWYDYDIELRVQRKHFYPSNFAPLWTECYDTSIRQSYGKNATNYLVQKGILNYEGGIPTSLFETGEQWDMPNAWAPTQAIVIFGLDKSQDPGAKKVAQDLAFRWIDSLVKVAEDTHEMFEKYNAMFKGMYGGGGEYEVQTGFGWTNGVMLELIEHYYIKNKGANTTET

SEQ ID NO: 146686 - DNA, 1695 bp, Burkholderia mallei ATCC 23344
  CDS (1)..(1695): transl_table=11
atggtcacgccgcggcatcgcccgcttcatgttgaaaatccgttctatcgtcgcctgctgaacgcgcccgcgtgggtcgcgctcgtcgccgcggccggcatcggctgcacgagcgcgacgctcgcccgcgccgattcgtcgccggcgcacgcgtccacggccgcggccgtggcgagcgccgcatccgcgccgggcgccgcgtcgattccgccgccgccgagccagctctacggcgatctctttgttgcggtgcaaaccgcgcagatcttcgcggatcagaagaccttcgtcgattcgacgccgaacgccgatcccgcgacgatcgtccagctgtaccagcagcagaagggccagccgggcttctcgctgaaggcgttcgtcgcgcaatacttcacgccgccgtcggacgaatcggtgacgccgccgccgaaccagacgctgcgcgagcacatcgactggctatggccgaagctcacgcgcaccaccacgacggcgccgccgtacagctcgctgattgcgctgcccaaaccgtacgtggtgccgggcgggcgcttccgcgaaggctactactgggacacgtacttcacgatgctcggcttgcaggaggcgggccgggaagatctcgtcgacaacatgctcgacaacttcgcgtacctgatcgacaccgtcggccacgtgccgaacggcaaccgcagctattacgtgagccgctcgcagccgccgttcttcgcgtacatggtgacgctcgcggcgaaggccgagggcaatcgcgtctatcagaagtacctgcccgcgctgcgcaaggagtacgcgtactggatgcagggcgagcgcaccacgccgcgcggccaggcgacgcgcaacgtcgtcgcgatgccggacggctcggtgctgaaccgctactgggacgcgagcgacacgccgcgcgacgagtcgtatctcgaagacgtgaagaccgcgcagcaggcgagcggccggccggcggcggaagtctggcgcgatctgcgcgcggcggcggagagcggctgggatttcagctcgcgctggttcggcgacaaccgcacgctcgcgacgatccgcacgaccgcgatcgtgcccgtcgacttgaacagcctgatgttcaacctcgagacgacgatcgtgaagggctgcgcggtgacgcgcgatttcgcgtgcgtcgccgagttcgccggccgcgcgggcaagcgcgcggttgcgatcaaccgctatctgtggaaccgcaacggctattacggcgactacgactggaaactcggcaagccgcgcgacaacctgtcggcggcggcgttgtatccgctgttcgcgggcgtcgcgtggccggagcgcgcgaagcagaccgcgaagaacgtgcagaaagcgctgctcaagccgggcgggctcgcgacgacgacttacgacaccgcgcagcagtgggacgcacctaacggctgggcgccgctgcactggatcgcgctcgtcgggctgcggcactatggcgagaagtcgctcgcggacgatatcggcacgcgttttcttgccgacgtgaagggcgtgtacgcggcgcagggcaagctcgtcgagaagtacatcgtcgaaggcacgggcggcggcggcggcggcgagtatccgctgcaggacggcttcggctggaccaacggcgtgacgctcaagctgctcgatctgtacggcggctga

SEQ ID NO: 146687 - protein, 564 aa, Burkholderia mallei ATCC 23344
MVTPRHRPLHVENPFYRRLLNAPAWVALVAAAGIGCTSATLARADSSPAHASTAAAVASAASAPGAASIPPPPSQLYGDLFVAVQTAQIFADQKTFVDSTPNADPATIVQLYQQQKGQPGFSLKAFVAQYFTPPSDESVTPPPNQTLREHIDWLWPKLTRTTTTAPPYSSLIALPKPYVVPGGRFREGYYWDTYFTMLGLQEAGREDLVDNMLDNFAYLIDTVGHVPNGNRSYYVSRSQPPFFAYMVTLAAKAEGNRVYQKYLPALRKEYAYWMQGERTTPRGQATRNVVAMPDGSVLNRYWDASDTPRDESYLEDVKTAQQASGRPAAEVWRDLRAAAESGWDFSSRWFGDNRTLATIRTTAIVPVDLNSLMFNLETTIVKGCAVTRDFACVAEFAGRAGKRAVAINRYLWNRNGYYGDYDWKLGKPRDNLSAAALYPLFAGVAWPERAKQTAKNVQKALLKPGGLATTTYDTAQQWDAPNGWAPLHWIALVGLRHYGEKSLADDIGTRFLADVKGVYAAQGKLVEKYIVEGTGGGGGGEYPLQDGFGWTNGVTLKLLDLYGG

SEQ ID NO: 146688 - DNA, 1698 bp, Burkholderia pseudomallei K96243
  CDS (1)..(1698): transl_table=11
atggtcacgccgcggcatcgcccgcttcatgttgaaaatccgttctatcgtcgcctgctgaacgcgcccgcgtgggtcgcgctcgtcgccgcggccggcatcggctgcacgagcgcgacgctcgcccgcgccgattcgtcgccggcgcacgcgtccacggccgcggccgtggcgagcgccgcatccgcgccgggcgccgcgtcgattccaccgccgccgagccagctctacggcgatctctttgttgcggtgcaaaccgcgcagatcttcgcggatcagaagaccttcgtcgattcgacgccgaacgccgatcccgcgacgatcgtccagctgtaccagcagcagaagggccagccgggcttctcgctgaaggcgttcgtcgcgcaatacttcacgccgccgtcggacgaatcggtgacgccgccgccgaaccagatgctgcgcgagcacatcgactggctatggccgaagctcacgcgcaccaccacgacggcgccgccgtacagctcgctgattgcgctgcccaaaccgtacgtggtgccgggcgggcgcttccgcgaaggctactactgggacacgtacttcacgatgctcggcttgcaggaggcgggccgggaagatctcgtcgacaacatgctcgacaacttcgcgtacctgatcgacaccgtcggccacgtgccgaacggcaaccgcagctattacgtgagccgctcgcagccgccgttcttcgcgtacatggtgacgctcgcggcgaaggccgagggcaatcgcgtctatcagaagtacctgcccgcgctgcgcaaggagtacgcgtactggatgcagggcgagcgcaccacgccgcgcggccaggcgacgcgcaacgtcgtcgcgatgccggacggctcggtgctgaaccgctactgggacgcgagcgacacgccgcgcgacgagtcgtatctcgaagacgtgaagaccgcgcagcaggcgagcggccggccggcggcggaagtctggcgcgatctgcgcgcggcggcggagagcggctgggatttcagctcgcgctggttcggcgacaaccgcacgctcgcgacgatccgcacgaccgcgatcgtgcccgtcgacttgaacagcctgatgttcaacctcgagacgacgatcgtgaagggctgcgcggtgacgcgcgatttcgcgtgcgtcgccgagttcgccggccgcgcgggcaagcgcgcggttgcgatcaaccgctatctgtggaaccgcaacggctattacggcgactacgactggaaactcggcaagccgcgcgacaacctgtcggcggcggcgttgtatccgctgttcgcgggcgtcgcgtggccggagcgcgcgaagcagaccgcgaagaacgtgcagaaagcgctgctcaagccgggcgggctcgcgacgacgacttacgacaccgcgcagcagtgggacgcacctaacggctgggcgccgctgcactggatcgcgctcgtcgggctgcggcactatggcgagaagtcgctcgcggacgatatcggcacgcgttttcttgccgacgtgaagggcgtgtacgcggcgcagggcaagctcgtcgagaagtacatcgtcgaaggcgtgggcacgggcggcggcggcggcgagtatccgctgcaggacggcttcggctggaccaacggcgtgacgctcaagctgctcgatctgtacggcggctga

SEQ ID NO: 146689 - protein, 565 aa, Burkholderia pseudomallei K96243
MVTPRHRPLHVENPFYRRLLNAPAWVALVAAAGIGCTSATLARADSSPAHASTAAAVASAASAPGAASIPPPPSQLYGDLFVAVQTAQIFADQKTFVDSTPNADPATIVQLYQQQKGQPGFSLKAFVAQYFTPPSDESVTPPPNQMLREHIDWLWPKLTRTTTTAPPYSSLIALPKPYVVPGGRFREGYYWDTYFTMLGLQEAGREDLVDNMLDNFAYLIDTVGHVPNGNRSYYVSRSQPPFFAYMVTLAAKAEGNRVYQKYLPALRKEYAYWMQGERTTPRGQATRNVVAMPDGSVLNRYWDASDTPRDESYLEDVKTAQQASGRPAAEVWRDLRAAAESGWDFSSRWFGDNRTLATIRTTAIVPVDLNSLMFNLETTIVKGCAVTRDFACVAEFAGRAGKRAVAINRYLWNRNGYYGDYDWKLGKPRDNLSAAALYPLFAGVAWPERAKQTAKNVQKALLKPGGLATTTYDTAQQWDAPNGWAPLHWIALVGLRHYGEKSLADDIGTRFLADVKGVYAAQGKLVEKYIVEGVGTGGGGGEYPLQDGFGWTNGVTLKLLDLYGG

SEQ ID NO: 146690 - DNA, 1512 bp, Pseudoalteromonas tunicata D2
  CDS (1)..(1512): transl_table=11
atgaactttgttaatagccaattatttttagacgtacaattagccggtctatttgctgacagtaaaacctttgctgatgctgaggccaaacacagttggcaacatgcctgtgcgctttatctagcaaaggcgcctttgcaaggggctgatttagctcagtttgtggcagaggaatttacatttaagtgcgctgagctgccaaaccaacagcttaatacaactagcgtcaaagactatattgaatcgctttggccgcatttacatcgccctgcagataacgccaaaagtagctcgttactgccattacaacacagctatattgtgcctggaggacgctttcaagaaatttactattgggatagttattttacctccttaggccttgaagacatgggcgatattgacagcattgaagatatgctgatgaactttattgatttacaaaatcgtaatggctgtattcccaatgggaaccgtagttattacagttcgcgctctcagccaccgattttagcgcttatggttgatttagtatggcaagcaaaatatcgcaacaaggctgactttgactggttagcacaatgtgccaatgcacttgagcaagaacatcgtttttggatgcaaggacatgacgagttaaacccagacaatacaagccaccgacgtattgttcgtatggcaaatggagctttattaaaccgctattgggatgatgaagcgacagcacgaccagaatcattacgtgaagatttacacgacagcgcgttattagcgcaagcgcaacgagagcaatattttagaaatatcagagctgcatgtgagtcaggctgggactttagtagccgatggttagccgatggcactaccctgcttagcattcaaacaactgatatcatccctattgatttaaattgtttgttgtatcaacttgaataccaactagccgaatattttgccgtattaaaacgtccagaaaaacaaagctattttaatcaactggctgcaagtcgtaacaaggcaattaatcactatttatggcataacgagcttaacttttttgtagactataatcataagcttggacttcaatctgaagtactttctttggcaggcgtagtaccattatttgtacaattggccacccatcaacaagcgttacatgttaaccgtaaaattatggccgaatttttaaaaccgggagggcttgtcaccactttgaataaaacagcgcaacaatgggacagccccaatggctgggcaccattgcagtggtttgcggtgcaaggatttaactattacggatttaacgctgacgcccaaacaattatcgctcgctggttaaccatgatagaggccaactttgccaccgatcattgcttacttgaaaaatacaatgtttgcgatcctgctcaccgagccggaggcggagaatataaggtgcagcaaggttttggttggaccaatggcgtaacggctcgcttttacaaattaacagagcaaataaacgcataa

SEQ ID NO: 146691 - protein, 503 aa, Pseudoalteromonas tunicata D2
MNFVNSQLFLDVQLAGLFADSKTFADAEAKHSWQHACALYLAKAPLQGADLAQFVAEEFTFKCAELPNQQLNTTSVKDYIESLWPHLHRPADNAKSSSLLPLQHSYIVPGGRFQEIYYWDSYFTSLGLEDMGDIDSIEDMLMNFIDLQNRNGCIPNGNRSYYSSRSQPPILALMVDLVWQAKYRNKADFDWLAQCANALEQEHRFWMQGHDELNPDNTSHRRIVRMANGALLNRYWDDEATARPESLREDLHDSALLAQAQREQYFRNIRAACESGWDFSSRWLADGTTLLSIQTTDIIPIDLNCLLYQLEYQLAEYFAVLKRPEKQSYFNQLAASRNKAINHYLWHNELNFFVDYNHKLGLQSEVLSLAGVVPLFVQLATHQQALHVNRKIMAEFLKPGGLVTTLNKTAQQWDSPNGWAPLQWFAVQGFNYYGFNADAQTIIARWLTMIEANFATDHCLLEKYNVCDPAHRAGGGEYKVQQGFGWTNGVTARFYKLTEQINA

SEQ ID NO: 146692 - DNA, 1674 bp, Arabidopsis thaliana
  CDS (1)..(1674)
atgttggactcggacacagacacggactcaggtcctgtggttgcaacaaccaaactcgtcactttcctccagcgtgtgcagcacacggcacttcgatcataccctaaaaaacaaacgcctgatcccaaatcctacattgatctatctctcaaacgtccctacagtctctccaccatcgaatcagccttcgatgatctcacgagcgagtcacatgaccagccagtgccagtggagacgcttgaaaagttcgtcaaggaatattttgacggtgcaggggaggatctgctgcaccacgaaccagtagatttcgtctcagatccctccggcttcctctccaacgtggagaacgaagaagtcagagaatgggcgcgtgaggtacacggtctttggagaaatctgagctgcagagtctctgactcagtaagagagtctgccgaccggcacacgcttctaccgttgccggaaccggttatcattcccggttcgagattcagagaagtctattactgggattcttattgggtcatcaaaggacttatgacgagtcaaatgttcactaccgccaaaggtttagtgacgaatctgatgtcacttgtggagacttatggttacgctttgaacggtgctagagcttattatactaacagaagccaaccacctttgttgagctccatggtctatgaaatttataatgtgacaaaagatgaagaacttgtgaggaaagcaatccctctgcttctcaaagagtacgagttttggaactcaggaaaacataaagtggttattcgagacgctaatggttatgatcacgttttgagccgttattatgctatgtggaacaagccaaggcctgaatcctctgttttcgatgaagaatctgcttcagggttctcgactatgttagagaaacaacggttccatcgagatatagccacggctgctgaatcaggatgcgatttcagcacgcgatggatgagggatcctcctaatttcacaacgatggctacaacatcagtggttcctgttgatctaaatgtttttcttctcaagatggaactcgatatagcgttcatgatgaaggtttctggagatcaaaatggttcagaccgttttgtgaaagcgtcaaaagcgagagagaaagcgtttcaaaccgtgttttggaacgagaaagcagggcaatggctggattactggctttcctccagtggtgagaaccaaaacaccaacgtctttgcgtctaactttgcaccaatctggattaattccatcaattcagatgaaaatcttgtcaagaaagttgtgacagctcttaagaactcagggctcattgctcccgctggaatcctaacttctttgacaaactcaggacaacaatgggattctccgaatggatgggcaccgcaacaagagatgatcgtcacagggctcggaagatcgagtgtaaaagaagctaaagagatggcagaggatattgcaaggagatggatcaaaagcaactatcttgtctacaagaaaagtgggactatacatgagaagctcaaagttacagagcttggtgaatatggtggtggaggagaatatatgccacagaccggattcggatggtcaaatggagttatcttagcattcttggaggaatatggatggccctctcatcttagcattgaagcctag

SEQ ID NO: 146693 - protein, 557 aa, Arabidopsis thaliana
MLDSDTDTDSGPVVATTKLVTFLQRVQHTALRSYPKKQTPDPKSYIDLSLKRPYSLSTIESAFDDLTSESHDQPVPVETLEKFVKEYFDGAGEDLLHHEPVDFVSDPSGFLSNVENEEVREWAREVHGLWRNLSCRVSDSVRESADRHTLLPLPEPVIIPGSRFREVYYWDSYWVIKGLMTSQMFTTAKGLVTNLMSLVETYGYALNGARAYYTNRSQPPLLSSMVYEIYNVTKDEELVRKAIPLLLKEYEFWNSGKHKVVIRDANGYDHVLSRYYAMWNKPRPESSVFDEESASGFSTMLEKQRFHRDIATAAESGCDFSTRWMRDPPNFTTMATTSVVPVDLNVFLLKMELDIAFMMKVSGDQNGSDRFVKASKAREKAFQTVFWNEKAGQWLDYWLSSSGENQNTNVFASNFAPIWINSINSDENLVKKVVTALKNSGLIAPAGILTSLTNSGQQWDSPNGWAPQQEMIVTGLGRSSVKEAKEMAEDIARRWIKSNYLVYKKSGTIHEKLKVTELGEYGGGGEYMPQTGFGWSNGVILAFLEEYGWPSHLSIEA

SEQ ID NO: 146694 - DNA, 1764 bp, Spodoptera frugiperda
  CDS (1)..(1764)
atggtgtccttttgtaagatgcgggaattcctgattctcctggtggcggtggtggcgctggccggtgctgccgctctgcgccccacttgcagtaagcccgtctactgcgagagcgaactcctccatcgagtccaaatggccagactcttcaacgactctaaaaccttcgtcgacctccaaatgaattacgatcaaaaccaaacattacgtgattttgaaacattactaaatgatacgaaccaagacccgtcaagagaacaattgagagaatttgttgacaaatacttctcagatgaaggtgaactcgaagagtggactccaccggatttcagtaatgatcctaaattcatatatactataaaagataaagccttaagagagttcgctaaaaacatcaacgatatttggccactccttgcccgaaaagtcaaagatgaggtgattcaaaaccctgatcgttatagtttggtccctattacccacggattcatcattcctggaggacggtttacggagatctattactgggatactttctggattatcgaaggtctcctgataagtggaatgcaagaaaccgctaaaggaattattgaaaatctgatagagcttttgaatttgtttggtcacattcccaatggtagcagatggtattatcaagaacgtagtcaaccgccaatgctgacagctatggttgctacctactaccaatacactaacgacacggagttcctgaaaaacaatatcgcatatttagaaaaggaaatggacttctggttggatgaaagatcagtgtctgtcgaaaaagaaggtagtagccacaaactgctcagatactttgctctcagctcaggtccaagacctgaatcgtattatgaagattacgaaaacgcagtagatttcgatgaagaacgtcgcacagacttctatgtcgatattaagagtgcagctgagagtggttgggacttctcgacgcgatggttcgtcagcaatgatggcagcaacaacggaactttaagagacattcacaccagatacgtcgtccctgctgatttgaacgccatatttgccggtgctctccagaacgttgcaaacttccatgccattttgatgaaccctcgtaaagccgccacgtatggccaattagcccaacagtggagagatgccattcaggccattttgtggaatgaggaagatggaatgtggtatgattatgatatcagagacaagttacatcgcaaatatttctactcgtctaacgtctccccactgtggcaacatgctgttgatcccaatatagtgaaagcaaatggggacagaattctgaacagtcttaagcaatctggcggtttagacttccctggcggagtgcccacatccctcatcaggagtggagagcagtgggacttccctaacgtatggccaccagaagtgagtattgtagttaacgccattgaaaacattggaacgcctgaggcgagtgtgctggcttttgaaactgcacaaacgtttgttaggtcttgccactggggcttccaagaatacaaacagatgtttgagaaatatgatgcagagaatcctggcaagttcggaggaggtggcgaatacaccgtgcagtttggtttcggatggagcaacggtgcagggctagagtttatgaagaaatatggagaaggtttgactgcagacgactctaatgacttaggtaccactactactgtatctccctccgacaacggcgatccttcgaacaataccgcatga

SEQ ID NO: 146695 - protein, 587 aa, Spodoptera frugiperda
MVSFCKMREFLILLVAVVALAGAAALRPTCSKPVYCESELLHRVQMARLFNDSKTFVDLQMNYDQNQTLRDFETLLNDTNQDPSREQLREFVDKYFSDEGELEEWTPPDFSNDPKFIYTIKDKALREFAKNINDIWPLLARKVKDEVIQNPDRYSLVPITHGFIIPGGRFTEIYYWDTFWIIEGLLISGMQETAKGIIENLIELLNLFGHIPNGSRWYYQERSQPPMLTAMVATYYQYTNDTEFLKNNIAYLEKEMDFWLDERSVSVEKEGSSHKLLRYFALSSGPRPESYYEDYENAVDFDEERRTDFYVDIKSAAESGWDFSTRWFVSNDGSNNGTLRDIHTRYVVPADLNAIFAGALQNVANFHAILMNPRKAATYGQLAQQWRDAIQAILWNEEDGMWYDYDIRDKLHRKYFYSSNVSPLWQHAVDPNIVKANGDRILNSLKQSGGLDFPGGVPTSLIRSGEQWDFPNVWPPEVSIVVNAIENIGTPEASVLAFETAQTFVRSCHWGFQEYKQMFEKYDAENPGKFGGGGEYTVQFGFGWSNGAGLEFMKKYGEGLTADDSNDLGTTTTVSPSDNGDPSNNTA

SEQ ID NO: 146696 - DNA, 2112 bp, Artemia sanfranciscana
  CDS (1)..(2112)
atgtgcgcatttttgagttttttcgtcgtttttggatttgctacaacagttagttgtagaggcgatctggttctcagtgaaagagcaaaacaactaccgcctgtttgtgctagcgaaatttactgccatggaacattcctgcatacaatacagatggcagggctgtttcgagactcgaaaacctttgtagataaaaagctaaagataaatccagaagaagttttagctagctttgaagttttgatgaactcaaccgatcaaaatcccagccgggaccaattggctgcttttataaatctacacttcgagccagaagggtcagaatttgaagaatgggatccaatagattggcattctaacccaagttttttggatggtattagagacacaaacttgaaaatatggggaaattctctccacgaagcctggacatggttaggtcgaaaaatccgtgacgacgtgagaataaatccccaattatattcgatgatgtatctccccaaccctttcatcattcctggtggtcgtttccgtgaaacttactactgggattcctattggattatcaaagggcttcttatctcgggaatgcatgagacggtgaagggtatgttgttgaactttttgctgatggtggataccattggccttgtacccaatggtggaaggatatattatgagaaacgatctcagcctccacttcttactccaatggtggaactttacgttaatgcttcgggagacattgaatttttaaagcaaaacattcacctgttggaaaaagagatggatttttggcttcaggagcgaacggtcaacgttgatgggcaccggcttatccgttacgatgttaaagttggtggtccccgacctgaatcttacaaggaagatatagaagcgattcatcataaccctgatttagaagcacaattggatttctatatgaacatagcagctggtgctgaaacaggatgggatttctcaagccgatggtattggaacggggatatacaaactaatttgtcacatgttcgaacccgtgacatactacctgtagacctgaattcttttattgcttgggactttgatattatgtcccgctttgaaaagcagttaggtcgagacaacgcatcagttgtctattctgatttatacagtgaatggaaaacgtcgattaatgccattttgtgggatgatgaagctggtagctggtttgattacgattctgcgcatcggagatggaacacgaacttttatgtttctaatttgactcccttattcgtaggatgttacgatccgaaaacagttcatcatgaagacgttgccaccagagtactcgattaccttgaaaaaagtaacgccttgaagtttcctggtggtgtaccaacatcattgatgcagacaagccaacaatgggactttcctaatggctggcctcctctccagcacatgctggttatgggacttgacaagaccggtgatccaagggccaaagaactggcttttgaccttgcgcagagatgggttttcaataattatgaagcgttcacgcaaagcttacctaatgccatgtttgaaaagtatgacgtaacggtcgttggcctccccggtggtgggggagagtacgacgttcaactaggttttggctggacaaatggtgtagtaatggactttttagttaaatacggtgagagattgacttcagtccgtgacgcaaaacaactaatttggagtccatcatcagtttcagttggagttggtgctggtgcaacgttcctcggtgcttggattggtcttgcaagtactcgattctatcgccaacttttcaagtccgaccacaaaatgggaggcatccatggtgtggctgaggcaattcaaggacttattgcctgtgttggttctctgctcgtggctactgcagcactttttagtgaaaaggatacgacgaaacgacctacctctggacagacccctcagtccagcccaataaggagaacaaaatctttacccggcttcttattgttccaacgaggaagtaaaggcgacgaagagcatctcttaaggaaccgcgcaattagtgaagaatgttcgtattcttctatagaagaatga

SEQ ID NO: 146697 - protein, 703 aa, Artemia sanfranciscana
MCAFLSFFVVFGFATTVSCRGDLVLSERAKQLPPVCASEIYCHGTFLHTIQMAGLFRDSKTFVDKKLKINPEEVLASFEVLMNSTDQNPSRDQLAAFINLHFEPEGSEFEEWDPIDWHSNPSFLDGIRDTNLKIWGNSLHEAWTWLGRKIRDDVRINPQLYSMMYLPNPFIIPGGRFRETYYWDSYWIIKGLLISGMHETVKGMLLNFLLMVDTIGLVPNGGRIYYEKRSQPPLLTPMVELYVNASGDIEFLKQNIHLLEKEMDFWLQERTVNVDGHRLIRYDVKVGGPRPESYKEDIEAIHHNPDLEAQLDFYMNIAAGAETGWDFSSRWYWNGDIQTNLSHVRTRDILPVDLNSFIAWDFDIMSRFEKQLGRDNASVVYSDLYSEWKTSINAILWDDEAGSWFDYDSAHRRWNTNFYVSNLTPLFVGCYDPKTVHHEDVATRVLDYLEKSNALKFPGGVPTSLMQTSQQWDFPNGWPPLQHMLVMGLDKTGDPRAKELAFDLAQRWVFNNYEAFTQSLPNAMFEKYDVTVVGLPGGGGEYDVQLGFGWTNGVVMDFLVKYGERLTSVRDAKQLIWSPSSVSVGVGAGATFLGAWIGLASTRFYRQLFKSDHKMGGIHGVAEAIQGLIACVGSLLVATAALFSEKDTTKRPTSGQTPQSSPIRRTKSLPGFLLFQRGSKGDEEHLLRNRAISEECSYSSIEE

SEQ ID NO: 146698 - DNA, 2112 bp, Artemia sanfranciscana
  CDS (1)..(2112)
atgtgcgcatttttgagttttttcgtcgtttttggatttgctacaacagttagttgtagaggcgatctggttctcagtgaaagagcaaaacaactaccgcctgtttgtgctagcgaaatttactgccatggaacattcctgcatacaatacagatggcagggctgtttcgagactcgaaaacctttgtagataaaaagctaaagataaatccagaagaagttttagctagctttgaagttttgatgaactcaaccgatcaaaatcccagccgggaccaattggctgcttttataaatctacacttcgagccagaagggtcagaatttgaagaatgggatccaatagattggcattctaacccaagttttttggatggtattagagacacgaacttgaaaatatggggaaattctctccacgaagcctggacatggttaggtcgaaaaatccgtgacgacgtgagaataaatccccaattatattcgatgatgtatctccccaaccctttcatcattcctggtggtcgtttccgtgaaacttactactgggattcctattggattatcaaagggcttcttatctcgggaatgcatgagacggtgaagggtatgttgttgaactttttgctgatggtggataccattggccttgtacccaatggtggaaggatatattatgagaaacgatctcagcctccacttcttactccaatggtggaactttacgttaatgctacgggagacattgaatttttaaagcaaaacattcacctgttggaaaaagagatggatttttggcttcaggagcgaacggtcaacgttgatgggcaccggcttatccgttacgatgttaaagttggcggtccccgacctgaatcttacaaggaagatatagaagcaattcatcataaccctgatttagaagcacaattggatttctatatgaacatagcagctggtgctgaaacaggatgggatttctcaagccgatggtattggaacggggatatacaaactaatttgtcacatgttcgaacccgtgacatactacctgtagacctgaattcttttattgcttgggactttgatattatgtcccgctttgaaaagcagttaggtcgagacaacgcatcagttgtctattctgatttatacagtgaatggaaaacgtcgattaatgccattttgtgggatgatgaagctggtagctggtttgattacgattctgcgcatcggagatggaacacgaacttttatgtttctaatttgactcccttattcgtaggatgttacgatccgaaaacagttcatcatgaagacgttgccaccagagtactcgattaccttgaaaaaagtaacgccttgaagtttcctggtggtgtaccaacatcattgatgcagacaagccaacaatgggactttcctaatggctggcctcctctccagcacatgctggttatgggacttgacaagaccggtgatccaagggccaaagaactggcttttgacgttgcgcagagatgggttttcaataattatgaagcgttcacgcaaagcttacctaatgccatgtttgaaaagtatgacgtaacggtcgttggcctccccggtggtgggggagagtacgacgttcaactaggttttggctggacaaatggtgtagtaatggactttttagttaaatacggtgagagattgacttcagtccgtgacgcaaaacaactaatttggagtccatcatcagtttcagttggagttggtgctggtgcaacgttcctcggtgcttggattggtcttgcaagtactcgattctatcgccaacttttcaagtccgaccacaaaatgggaggcatccatggtgtggctgaggcaattcaaggacttattgcctgtgttggttctctgctcgtggctactgcagcactttttagtgaaaaggatacgacgaaacgacctacctctggacagacccctcagtccagcccaataaggagaacaaaatcgttacccggcttcttattgttccaacgaggaagtaaaggcgacgaagagcatctcttaaggaaccgcgcaattagtgaagaatgttcgtattcttctatagaagaatga

SEQ ID NO: 146699 - protein, 703 aa, Artemia sanfranciscana
MCAFLSFFVVFGFATTVSCRGDLVLSERAKQLPPVCASEIYCHGTFLHTIQMAGLFRDSKTFVDKKLKINPEEVLASFEVLMNSTDQNPSRDQLAAFINLHFEPEGSEFEEWDPIDWHSNPSFLDGIRDTNLKIWGNSLHEAWTWLGRKIRDDVRINPQLYSMMYLPNPFIIPGGRFRETYYWDSYWIIKGLLISGMHETVKGMLLNFLLMVDTIGLVPNGGRIYYEKRSQPPLLTPMVELYVNATGDIEFLKQNIHLLEKEMDFWLQERTVNVDGHRLIRYDVKVGGPRPESYKEDIEAIHHNPDLEAQLDFYMNIAAGAETGWDFSSRWYWNGDIQTNLSHVRTRDILPVDLNSFIAWDFDIMSRFEKQLGRDNASVVYSDLYSEWKTSINAILWDDEAGSWFDYDSAHRRWNTNFYVSNLTPLFVGCYDPKTVHHEDVATRVLDYLEKSNALKFPGGVPTSLMQTSQQWDFPNGWPPLQHMLVMGLDKTGDPRAKELAFDVAQRWVFNNYEAFTQSLPNAMFEKYDVTVVGLPGGGGEYDVQLGFGWTNGVVMDFLVKYGERLTSVRDAKQLIWSPSSVSVGVGAGATFLGAWIGLASTRFYRQLFKSDHKMGGIHGVAEAIQGLIACVGSLLVATAALFSEKDTTKRPTSGQTPQSSPIRRTKSLPGFLLFQRGSKGDEEHLLRNRAISEECSYSSIEE

SEQ ID NO: 146700 - DNA, 2123 bp, Glycine max
  CDS (134)..(1807)
  misc_feature (2095)..(2095): n is a, g, c or t
aaagaaatgatatttgtattgaagcaataataaaccaatgacaacagagttggggtagaactagaaagcatccctagcaaaagtcaaggttggccccttgcgtcaatcgccggcttcgaaatcgctgtcaattatggcatcacactgtgtaatggccgtgacgccctcaacccctcttctctccttcctcgaacgcctccaagaaacagccttcgaaaccttcgcccattccaacttcgatcccaaaacctacgtggacatgcctctcaagtccgccctcacgattaccgaggacgcgttccagaagcttccgaggaacgccaacgggtccgtgccggttgaggatttgaagcgtttcatagaagcctactttgaaggtgcaggggatgatctggtgtaccgggacccacaggatttcgttcccgagccggagggtttcttgcccaaggtgaaccaccctcaggttagggcctgggccttgcaggtccattcactttggaaaaacttgagccggaaaatatccggtgcggtgaaggcacagccagacttacatacgctgctccctctccctggttcggttgtcattcccgggtcgcgttttcgcgaggtttattactgggattcctattgggttattaggggcctgctggccagtcaaatgcatgacacagctaaggctattgtcaccaatctcatttccttgatagataaatatggctttgttcttaatggggctagagcttactacactaacaggagccagcctccccttttaagcgccatgatttatgagatatacaatagcacgggtgacgtggaattagttaaaagatctctacctgccttactgaaagaatatgaattttggaattcagatatacataaactgaccattttggatgctcaaggttgcactcataccttaaatcgttattatgcaaagtgggacaaacccaggccggaatcgtccataatggacaaggcatctgcttccaacttctccagtgtttcagaaaaacagcagttttaccgtgaactggcatcagctgctgaatcaggatgggatttcagcaccagatggatgagaaatccacctaatttcacaacattggctacaacatctgtaatacctgttgatttgaacgcatttctactcgggatggaacttaatattgccttatttgcaaaagttactggagataatagcactgctgaacggttcctggaaaattctgatcttagaaagaaggcaatggactctattttctggaatgcaaacaagaaacagtggcttgattactggctcagcagtacatgtgaggaggttcatgtttggaaaaacgagcatcagaatcaaaatgtatttgcttccaattttgttcctttgtggatgaagccattttactcagatacttcgcttgtgagtagtgttgttgaaagtctcaaaacatctggcctgctccgtgatgctggagttgcaacttctttgactgattcagggcaacagtgggactttccaaatgggtgggcgccgcttcaacacatgctagtggaaggactgctaaaatcaggattgaaagaagcaaggttattggctgaggaaattgccatcagatgggtcacaaccaattatattgtttataagaaaacaggtgtaatgcatgaaaagtttgacgtggagcattgtggagaatttggaggtgggggcgaatatgtaccccagactggttttggctggtcaaatggagttgtgttggcattcttggaggagtttggatggcctgaagatcggaacatagaatgttgatgtgcccagagatagaaaggtggaaaaaatttggtacgctgcaagaatttattcatgaaagctatttgcatgaggggttgaagaaaagtagttaataaatgcgtcaaaagccacttgttaaagcctataatgaaagttgagatgatttgagtttattactttatttgccatttgatgttttacttggaagtatgttcagaaaattcaacaaaagtgatggatgtcatcacatatcaatgctttggcacaaattgatgcataattggaccatttgatgtgagttgcttnatatactggcgtctgacgggattaaaga

SEQ ID NO: 146701 - protein, 557 aa, Glycine max
MASHCVMAVTPSTPLLSFLERLQETAFETFAHSNFDPKTYVDMPLKSALTITEDAFQKLPRNANGSVPVEDLKRFIEAYFEGAGDDLVYRDPQDFVPEPEGFLPKVNHPQVRAWALQVHSLWKNLSRKISGAVKAQPDLHTLLPLPGSVVIPGSRFREVYYWDSYWVIRGLLASQMHDTAKAIVTNLISLIDKYGFVLNGARAYYTNRSQPPLLSAMIYEIYNSTGDVELVKRSLPALLKEYEFWNSDIHKLTILDAQGCTHTLNRYYAKWDKPRPESSIMDKASASNFSSVSEKQQFYRELASAAESGWDFSTRWMRNPPNFTTLATTSVIPVDLNAFLLGMELNIALFAKVTGDNSTAERFLENSDLRKKAMDSIFWNANKKQWLDYWLSSTCEEVHVWKNEHQNQNVFASNFVPLWMKPFYSDTSLVSSVVESLKTSGLLRDAGVATSLTDSGQQWDFPNGWAPLQHMLVEGLLKSGLKEARLLAEEIAIRWVTTNYIVYKKTGVMHEKFDVEHCGEFGGGGEYVPQTGFGWSNGVVLAFLEEFGWPEDRNIEC

SEQ ID NO: 146702 - DNA, 1740 bp, Bombyx mori
  CDS (1)..(1740)
atgaggttgtttctactactggtgggattgacgacggtaatcgcggatgacctaccgccgacttgcatcagaccagtttactgcaatagtacgctgctccattacgttcaaatggccagactctaccccgattctaaaactttcgtcgattttcaaatgcgtaaagacgagaacgcaacactgtccgccttccaagagctattggaccgcacgaatcataatccaacgaaagaagacctgcaggaatttgtcgttgacttttttgatgaaaccagcgaacttgaagaatggaaaccggatgaccataaagaaaacccgcctttcctcgccaaaattcgtgatcaaggtttccgggaattcgctaaagctttaaatgatatttggccaactttagccaggcgcgttaagccctcggtccttgaaaaacccgaacaatctagtctcgtgcctatgacacatggcttcatcgttcctggaggtcgatttaaagaaatctactattgggacgcatattggattatcgaaggtcttctaatcactgacatgaccgaaactgcaaaaggaatgatcgaaaacctaatcgagcttctgtataaatttggccacattcccaatggaagcagatggtattaccaagaacgtagccagcctcctttattggcggccatgataaagctttattacgaaaagactaaggacatcgaattcatcagaaagtatattagtgctttagaaaaggaattagaatattggctggacactcatcttatcgctttcaacaaggacgacagagtttacactctcctgaggtattatattccaagcgctggtcctcgaccggagtcttattatgaagattacgaattggctcagaaattagacaagaatactgatcctaatgatatttacgctgatttaaaaagcgccgctgagagcgggtgggacttttctacgcgctggtttatttcagaaagcggcgacaacagtggtaatctaaccaatttaaacacaaagaacgttatccccgtagacttgaatgctattttcgccggagcgttacagattacggcgaacttccaagctatactaaagaatcctcggagagcggctcactggggctacatggccgaacaatggagaagttctatagagcaagcattatgggatgaagaagacggagtctggcacgactacgacatattgaataataagccacgtagatatttttacactagcaacctagctcccctgtggatgaacgcagtcgaaaaaccatttctagctaagcatggcgctagagtcctggagtaccttcacgaatcgcaagcgctcgagtaccccggaggtgtcccggtgtctctagtcaacagtggagaacaatgggacttccctaacgcttggcctccagaagtcagcattgtcgttacggctatccaaaacattggttccgaggagagtagtaaattggcaaaagaactcgcccaggtctgggtgagagcttgtaaatcaggatttaccgaaaagaaacagatgtttgagaagtacgatgcgttgaacgctggtaaatacggcggcggcggtgaatacacggttcaagatggattcggatggtcgaacggcgttgtcctggagttcttagataggtacggagctgtactgacttcggtggactctgtagatgctagtgcaaataacggtcagtcaaacgaagaatctgagacggattctaaggaaaaataa

SEQ ID NO: 146703 - protein, 579 aa, Bombyx mori
MRLFLLLVGLTTVIADDLPPTCIRPVYCNSTLLHYVQMARLYPDSKTFVDFQMRKDENATLSAFQELLDRTNHNPTKEDLQEFVVDFFDETSELEEWKPDDHKENPPFLAKIRDQGFREFAKALNDIWPTLARRVKPSVLEKPEQSSLVPMTHGFIVPGGRFKEIYYWDAYWIIEGLLITDMTETAKGMIENLIELLYKFGHIPNGSRWYYQERSQPPLLAAMIKLYYEKTKDIEFIRKYISALEKELEYWLDTHLIAFNKDDRVYTLLRYYIPSAGPRPESYYEDYELAQKLDKNTDPNDIYADLKSAAESGWDFSTRWFISESGDNSGNLTNLNTKNVIPVDLNAIFAGALQITANFQAILKNPRRAAHWGYMAEQWRSSIEQALWDEEDGVWHDYDILNNKPRRYFYTSNLAPLWMNAVEKPFLAKHGARVLEYLHESQALEYPGGVPVSLVNSGEQWDFPNAWPPEVSIVVTAIQNIGSEESSKLAKELAQVWVRACKSGFTEKKQMFEKYDALNAGKYGGGGEYTVQDGFGWSNGVVLEFLDRYGAVLTSVDSVDASANNGQSNEESETDSKEK

SEQ ID NO: 146704 - DNA, 2538 bp, Escherichia coli
  CDS (496)..(2193): transl_table=11
cggttgtaaaaggtatctgccttagcgccggaagtccggtatcccacagcgccctaatcgcccgtgaactggggattggctggatttgccagcagggtgagaaactgtatgcgatacaaccagaagaaacgctaacgctggacgttaaaacgcaacgtttcaaccgtcagggttaagccactgttcggatggcatcgttctgatgtcatccggcaatttactcagcactaatggtttttaactacctgttatatttttcaccaatttatgatgatttttcttcgctaatcacgaacccaacgccgctggctggctaataaacagacgttatttgatcactctatttcgccgttatttatccctttaattcccttttctaaaatgcctgacagttcgcagaatgagatttcgatcatgcagctagtgcgatcctgaactaaggttttctgatacttgaataccgttttattcggtttcgccaaaggagaatgattgatgaaatcccccgcaccttctcgcccgcaaaaaatggcgttaattccagcctgtatctttttgtgtttcgctgcgctatcggtgcaggcagaagaaacaccggtaacaccacagccgcctgatattttattagggccgctgtttaatgatgtgcaaaacgccaaactttttccggaccaaaaaacctttgccgatgccgtgccgaacagcgatccgctgatgatccttgctgattatcggatgcagcaaaaccagagcggatttgatctgcgccatttcgttaacgtcaatttcaccctgccgaaagaaggcgagaaatatgttccgccagaggggcagtcactgcgcgaacatattgacggactttggccggtattaacgcgttctaccgaaaacaccgaaaaatgggattctctgttaccgctgccggaaccttatgtcgtgccgggcggacgctttcgcgaggtatattactgggacagttacttcaccatgttaggacttgccgaaagcggtcactgggataaagtcgcggatatggtggccaattttgctcatgaaatagacacttacggtcatattcccaacggcaaccgcagttactatttaagccgctcgcaaccgcccttctttgccctgatggtagagttactggcgcagcatgaaggcgatgccgcgttgaagcaatacctgccgcaaatgcaaaaagaatatgcttactggatggacggtgttgaaaacctgcaagccggacaacaggaaaaacgcgttgtcaaacttcaggatggtacccttctcaaccgctactgggacgatcgcgatacgccacgaccagagtcatgggtggaagatattgccaccgccaaaagcaatccgaatcgacctgccactgaaatttaccgcgacctgcgctctgccgctgcgtctggctgggatttcagctcgcgctggatggacaacccgcagcagttaaataccttacgcaccaccagcatcgtaccggtcgatctgaacagcctgatgtttaaaatggaaaaaatcctcgcccgcgccagcaaagctgccggagataacgcgatggcaaaccagtacgaaacgctggcaaatgcccgtcaaaaagggatcgaaaaatacctgtggaacgatcaacaaggctggtatgccgattacgacctgaaaagtcataaagtgcgcaatcagttaaccgcggccgccctgttcccgctgtacgtcaatgcggcagcgaaagatcgcgccaacaaaatggcgacggcgacgaaaacacatctgctgcaacccggcggcctgaacaccacgtcggtgaaaagtgggcaacaatgggatgcgccaaatggctgggcaccgttacagtgggtcgcgacagaaggattacaaaactacgggcaaaaagaggtggcgatggacattagctggcacttcctgaccaatgttcagcacacctatgaccgggagaaaaagctggtggaaaaatatgatgtcagcaccaccggaacggggggcggcggtggcgaatatccattacaggatggctttggctggaccaatggcgtgacgctgaaaatgctggatttgatctgcccgaaagagcaaccgtgtgacaatgttccggcgacgcgtccgaccgttaagtcagcaacgacgcaaccctcaaccaaagaggcacaacccacaccttaaccagcgcttactccgacaacgtcattcggcttctccggatggcgttgtcggcagataacaccatagctatggttttttctacacagacggtttttcaagtcctggcgggaagtattgcgcaaatgtttgccatacgtggttgccgaagatagcgtcatttctacgggtaagtgtttcactttcatcacccggcgatttacgccgacgttggctatataaagcatcaattgctacctgaatattgttacggtgttcactcatcaacgtttttttgctttctggagttaaattaataatcacataatccagacactccagagaatttagcaaccaaaaaaagaattc

SEQ ID NO: 146705 - protein, 565 aa, Escherichia coli
MKSPAPSRPQKMALIPACIFLCFAALSVQAEETPVTPQPPDILLGPLFNDVQNAKLFPDQKTFADAVPNSDPLMILADYRMQQNQSGFDLRHFVNVNFTLPKEGEKYVPPEGQSLREHIDGLWPVLTRSTENTEKWDSLLPLPEPYVVPGGRFREVYYWDSYFTMLGLAESGHWDKVADMVANFAHEIDTYGHIPNGNRSYYLSRSQPPFFALMVELLAQHEGDAALKQYLPQMQKEYAYWMDGVENLQAGQQEKRVVKLQDGTLLNRYWDDRDTPRPESWVEDIATAKSNPNRPATEIYRDLRSAAASGWDFSSRWMDNPQQLNTLRTTSIVPVDLNSLMFKMEKILARASKAAGDNAMANQYETLANARQKGIEKYLWNDQQGWYADYDLKSHKVRNQLTAAALFPLYVNAAAKDRANKMATATKTHLLQPGGLNTTSVKSGQQWDAPNGWAPLQWVATEGLQNYGQKEVAMDISWHFLTNVQHTYDREKKLVEKYDVSTTGTGGGGGEYPLQDGFGWTNGVTLKMLDLICPKEQPCDNVPATRPTVKSATTQPSTKEAQPTP

SEQ ID NO: 146706 - DNA, 1758 bp, Pimpla hypochondriaca
  CDS (1)..(1758)
atggcgaaaacgacacccatggctaagccttcggtgggcctgttgaccctccaagtgttggttttttgcgcgttgaccggaagtctcgcgagcgctggcagcatcggccacgtcacacctcgatcggatctctgtgacagcgaggtctactgccagggcgaactactcaagaccatccagctgggcgaagttttcaaagatggaaaaacgttcgtcgatcattaccaagtgaacgatccatcagtcaccgttgccaacttccgaaaattgatggcggagaccggtggaaagccgaataaagatcagttgacgcagtacgtgaaggagaattttgcccaggagaacgaggtgatcgattggtcgccgccggattggcaagagaatccggaattccttcagcgcgtccaagatccggtattcaggaagtgggcgaaggacctgaacgacgtgtggaaaattatctcgaggaaggtggcgccgtccgtcgccgaacaccccgagaggcacagcataatatccgtcgacaatggattcatcgtgccgggcggcagattccaagaattctactactgggacagttactgggtcatggagggtcttctgctgaccggaatgaaaaacacgtccagaggaatcttggaaaatttcctgtcgatggtgacgcgcttcggtttcataccgaacggcggtcgcgtttactacctcatgaggagtcagccacctctgctcatccccatggtcgatctctatcttacgcacacgggtgacatgcaattcttgagggacaacatagggacgctggaaaaggaacttggttacttcttaagccagaaaacggtggacgtaaccaagaacggcaaaacttataaaatggcgcgttacattgtgagcagcaatgggccacgtcctgaaagttaccgtgaggactatgaactggcaaaaaatatcaacgacgaggccgaaaaacgtcgattctacgaggatttaaaagcggcggccgaaagcggttgggacttctcgtcgcgttggtacatttcggagaacgggacgagaggcagcctatccaatatcgctaccagaaacatcatacccgttgaactgaacgcgttcctgcaaagaaacgcccggatgctcgcgcagttccatactacccttggaaaccccacgaaagcaaagtactacaaggacatagcgacttcctatcagcaggcgatagacgacgtcttgtggagcgagtcggagggcgtctggctcgacttcgacctgcggaattcccagcatcgaaactacttcttccccaccaacgtggctccgctctacacgcagagtttcgactccagcaaggcgcagatctacggacagagggcagccgcttatctgacgaggaatggaatcctggactatatgggcggcacaccagcctcgctattccccaccggtgagcaatgggatctgccgaacgcgtggccacctctgcaatcgatcatcgttcaggccctcagaaattcgaacgaggagtccgccgagaaactggccaaggagctcgcgatccggtggctcagggcgaatcacaagggttacagtcagtctgggcaaatgttcgagaagtacgacgccctaaaccctggcaaattcggcggtggcggtgaatatgtagtgcaggagggcttcgggtggaccaacggtgtggtttatgaatttttgaacagctatcccaatgctacccccgacgataacgtccatatgaataacaactag

SEQ ID NO: 146707 - protein, 585 aa, Pimpla hypochondriaca
MAKTTPMAKPSVGLLTLQVLVFCALTGSLASAGSIGHVTPRSDLCDSEVYCQGELLKTIQLGEVFKDGKTFVDHYQVNDPSVTVANFRKLMAETGGKPNKDQLTQYVKENFAQENEVIDWSPPDWQENPEFLQRVQDPVFRKWAKDLNDVWKIISRKVAPSVAEHPERHSIISVDNGFIVPGGRFQEFYYWDSYWVMEGLLLTGMKNTSRGILENFLSMVTRFGFIPNGGRVYYLMRSQPPLLIPMVDLYLTHTGDMQFLRDNIGTLEKELGYFLSQKTVDVTKNGKTYKMARYIVSSNGPRPESYREDYELAKNINDEAEKRRFYEDLKAAAESGWDFSSRWYISENGTRGSLSNIATRNIIPVELNAFLQRNARMLAQFHTTLGNPTKAKYYKDIATSYQQAIDDVLWSESEGVWLDFDLRNSQHRNYFFPTNVAPLYTQSFDSSKAQIYGQRAAAYLTRNGILDYMGGTPASLFPTGEQWDLPNAWPPLQSIIVQALRNSNEESAEKLAKELAIRWLRANHKGYSQSGQMFEKYDALNPGKFGGGGEYVVQEGFGWTNGVVYEFLNSYPNATPDDNVHMNNN

SEQ ID NO: 146708 - DNA, 1638 bp, Pseudomonas aeruginosa
  CDS (1)..(1638): transl_table=11
atgcctgatcgaaccgctctaccccgcgccatgctcgcggcctgggtcctgctcctgctggcggcctgcagccagggcccggcgcctaccccgcccgcgtcctggggttggcaggacgccagcggcgaacgcgcgatcgcccccgacgaagcctatcccgagctgttccaggcggtgcaggaaaaccggctgttcagcgaccagaagcacttcgtcgatgcgctcccgctgcgcgagcctgcacggatccgcgccgactacctgcgcgagagggagcggcccggcttcgacctgcgcgccttcgtcggccgcaacttcgaggagtccggcagcgtcgagaccgccccgccggaagcgggtgccgatctcgccagccacatcagcgacctgtggccggcgttgacccgccactacgagcaggtgccggcccacagcagcctgctgccgctgccgaaaccctacgtggtccccggcggacgcttccgcgaggtgtactactgggactcctacttcaccatgctcggccttgcggagagcgggcagcaccagcgggtgcgcgacatgctcgacaacttcgcctacctgatcgatacctacgggcacattcccaacggtaaccgcagctactacctgagccgttcgcagccgccgttcttcgcctacatggtggatctccaggcaagacgcgaaggcgacgccgcctaccggcgctacctgccgcagctacagaaggaatacgcctactggatggaaggctccgccgggctgcgccccaacgaggcgcgcctgcacgtggtgaaactggccgacggaagcctgctgaaccgctactgggacaaccgtgacacaccgcgccaggagtccttcctggaggaccgggcgaccgccgcgcgcgccccgcagcgccccgcgggcgaggtctatcgcgacctgcgggccggcgcggaaagcggctgggacttctcctcccgctggctggacgacggccgcgaactggccagcatccgcaccaccgccatcgtcccggtggacctcaacgccctgctctaccatctcgaacgaatcatcgccaaggcctgcgccagcagcgcgctgaaggcctgcgagcaaggctacggcgcccgcgcggagaagcgacgacaggccatcgaagaccacctctggcacccggcgggctactacgccgactacgactggcaacgccggcggcccatcgagcggatcaacgccgccagcctcttcccgctattcaccgggctggcctccgccgaacgcgccggtcgtaccgccgacagcgtcgccgcccaactgctgcgcccgggcggactggccaccaccacccgtgccagcggccagcaatgggacgagccgaacggctgggcacccttgcagtgggtcgccgtacagggcctgcgcgcctacggccgggacgccctggcggaagacatcggccggcgattcctcgcccaggtgcagcaggtctacgaccgcgaaggaaaactggtggagaaatacgacatcagcggcaaccagggcggcggcggcggtggcgagtacccgttgcaggacggcttcggctggtccaacggcgtgaccctgcaactgctccgactctacggcccgggcgccggtcgctga

SEQ ID NO: 146709 - protein, 545 aa, Pseudomonas aeruginosa
MPDRTALPRAMLAAWVLLLLAACSQGPAPTPPASWGWQDASGERAIAPDEAYPELFQAVQENRLFSDQKHFVDALPLREPARIRADYLRERERPGFDLRAFVGRNFEESGSVETAPPEAGADLASHISDLWPALTRHYEQVPAHSSLLPLPKPYVVPGGRFREVYYWDSYFTMLGLAESGQHQRVRDMLDNFAYLIDTYGHIPNGNRSYYLSRSQPPFFAYMVDLQARREGDAAYRRYLPQLQKEYAYWMEGSAGLRPNEARLHVVKLADGSLLNRYWDNRDTPRQESFLEDRATAARAPQRPAGEVYRDLRAGAESGWDFSSRWLDDGRELASIRTTAIVPVDLNALLYHLERIIAKACASSALKACEQGYGARAEKRRQAIEDHLWHPAGYYADYDWQRRRPIERINAASLFPLFTGLASAERAGRTADSVAAQLLRPGGLATTTRASGQQWDEPNGWAPLQWVAVQGLRAYGRDALAEDIGRRFLAQVQQVYDREGKLVEKYDISGNQGGGGGGEYPLQDGFGWSNGVTLQLLRLYGPGAGR

SEQ ID NO: 146710 - DNA, 1656 bp, Ralstonia solanacearum
  CDS (1)..(1656): transl_table=11
atgctcgatccccgtggccttgcacggccatcccggttttgcccgcgcatcatctacgccggcacctcgcacattcgccgcgccaccgccgcggcgctgctggcggccagcctctgtgccctgcctgcctgtgccgatgtcggcgttggcgcggcgttgccgctttcgccggacaagctctatggcgaactgttcgtcgccgtgcagaccgcgcaggtctatcccgaccagaagaccttcgtcgatacggtgcccaaggcggacccggcggtcatcctgcaggcctatcgggcgcagaaggacgtgcccggcttttcgctgaaggcgttcgtcgaccagtacttcaccgtgccgttcgagaccgtcatcacgccgcccgccgggcagtcgctgcgcgcgcacatcaactggctgtggccggcgctcacgcgcaccacggccacggcgccggacaacagctcgctgattccgctgcccaagccctacgtggtgccgggcgggcgcttccgcgaggtctactactgggatacgtatttcacgatgctcgggctgcaggcgtccgggcgcgatgatctcgtcgacagcatgctcgacaacttcgcctaccagatcaaccggttcggccacatccccaacggcaaccggacgtactacctgagccgctcgcagccgccgttcttcgcgctgatggtggagctcgcggccacgaaggaaggggaggccgcctacacccgctacctggccccgctgcgcaaggagtacgcctactggatgcgcggcgccgccggcacggcccccgggcaagccagcggcaacgtggtggtgctgcccgacggcaccgtgctcaaccgctactgggacgatgaggccacgccgcgccccgagtcgtatctgcaggatgtcgccacggcgcagcaggcaccggaccgccccgccgccgaggtctggcgcgacctgcgtgccgccgccgagagcggctgggatttcagctcgcgctggttcggcgacagcgccacgctggccaccatccgcaccacgtccatcctcccggtcgatctcaatgcgctgatgttccaactggagaagaccatcgccaagggctgcgccgtggcgcgcgatttcgcctgcacggtcgagttcggcaaccacgcgcgcaagcgggcggttgcggtcgagcgctacctgtggcatcccgccggctactacgcggattacgactggaagctcggcaaggtgcgcgacaacctgtcggcggccgcgacgtatccgctgttcgtgcagatggcgccatgggggcgggcccggcagacgctgcgccagacgcagacggcgctgctgcaggtcggcggcttgtccaccacgacgctgcacacgcagcagcagtgggatgccccgaacggctgggcgccgctgcagtggattgcgctgcaggccagccagcactatggccaggcgctgctggcccagaccatcggcgagcgcttcctcggcagtgtcgagcgcctgtacgcggccgagcagaagctggtcgagaaatacatcgtcgacggcagcggcacgggcggcggcggtggcgagtatccgctgcaggacggcttcggctggaccaacggcgtgacgctcaggctgctcgacgcatacgggcgcgggcagtga

SEQ ID NO: 146711 - protein, 551 aa, Ralstonia solanacearum
MLDPRGLARPSRFCPRIIYAGTSHIRRATAAALLAASLCALPACADVGVGAALPLSPDKLYGELFVAVQTAQVYPDQKTFVDTVPKADPAVILQAYRAQKDVPGFSLKAFVDQYFTVPFETVITPPAGQSLRAHINWLWPALTRTTATAPDNSSLIPLPKPYVVPGGRFREVYYWDTYFTMLGLQASGRDDLVDSMLDNFAYQINRFGHIPNGNRTYYLSRSQPPFFALMVELAATKEGEAAYTRYLAPLRKEYAYWMRGAAGTAPGQASGNVVVLPDGTVLNRYWDDEATPRPESYLQDVATAQQAPDRPAAEVWRDLRAAAESGWDFSSRWFGDSATLATIRTTSILPVDLNALMFQLEKTIAKGCAVARDFACTVEFGNHARKRAVAVERYLWHPAGYYADYDWKLGKVRDNLSAAATYPLFVQMAPWGRARQTLRQTQTALLQVGGLSTTTLHTQQQWDAPNGWAPLQWIALQASQHYGQALLAQTIGERFLGSVERLYAAEQKLVEKYIVDGSGTGGGGGEYPLQDGFGWTNGVTLRLLDAYGRGQ

SEQ ID NO: 146712 - DNA, 1713 bp, Salmonella typhimurium
  CDS (1)..(1713): transl_table=11
atgatacccccagagattcgccgttctgttctactgcagaaagccataaaactggcgctggcagggacgctgctgacgtttgcatcgttttcggcgactgccgcagacccgtcttccgacactgaaactccgcagccgccggatattttgcttggcccgctctttaatgatgtccagaatgcaaaactcttccccgatcagaaaacctttgctgacgccatacctaatagcgatccgctcatgattcttgcggattatcgtatgcagcggaaccagtccggcttcgatttacgtcattttgttgatgttaacttcaccctgccgaaagcgggtgaaaaatatgtcccgcctgccgggcagtcattgcgtgaacatattgatggcctgtggccggtgctgacacgttcaactaaaaacgtcgaaaagtgggactcgctcttgccgttgcctgaatcctatgtcgtgccgggtggtcgattcagagagatttactactgggacagctactttacgatgctggggctggcggaaagcgggcactgggataaggtggcggatatggtggcgaactttggttacgaaattgacgcctgggggcatattcctaacggcaaccgtacctactacctgagtcgttcgcagccgcctttctttgcgtttatggttgagttactggcgcaacatgaaggtgacgatgcgctgaaagaatacctgccgcaactgcaaaaagagtacgcctactggatggagggcgttgagacattgcagccagggcaacaaaaccaacgcgtcgtcaaactggaagacggcagcgttctcaaccgctactgggacgatcgggatacgccccgccctgaatcctgggttgaagatatcgctaccgccaaaagcaaccccaaccgcccggcaacggagatctatcgagacctccgttctgctgccgcctccggctgggatttcagctcccgctggatggataatccgcagcagctcagtaccattcgtaccaccactattgcccctgtcgatcttaacgctctgctgtatcaactggagaaaaccctcgcccgcgccagcgctgcggcgggcgatcgggccaaagcctcgcactatgacgcgctggccaacgcgcggcaaaaagccattgaaatgcatctgtggaataacaaagagggttggtatgccgactacgatctgaagaacaataaaatccgtgaccaactcaccgctgccgcgctgttcccgctctatgtaaacgccgccgcgaaagatcgcgccgcgaaagtggcggcggcggcccaggcgcatctgctacagcctggcgggctggctaccacctcggttaaaagcggacagcaatgggatgcgccaaacggctgggcgccgttacaatgggtcgctgccgaaggattgcaaaattatgggcaggatgacgtggcaatggaagtcacctggcgctttttaaccaatgtgcagcacacctacgatcgcgagaaaaaactggtcgaaaaaaatgatgtcagcagcaccggaaccggcggtggcggcggcgaatatccacttcaggacggctttggctggaccaacggcgtgacgctgaaaatgctcgatctgatttgtccgcaggaaaaaccgtgcgatagcgtaccgtctactcgtccggcatcgttaagcgcaacgccgacaaaaacgccgtctgcagcgacgcagtaa

SEQ ID NO: 146713 - protein, 570 aa, Salmonella typhimurium
MIPPEIRRSVLLQKAIKLALAGTLLTFASFSATAADPSSDTETPQPPDILLGPLFNDVQNAKLFPDQKTFADAIPNSDPLMILADYRMQRNQSGFDLRHFVDVNFTLPKAGEKYVPPAGQSLREHIDGLWPVLTRSTKNVEKWDSLLPLPESYVVPGGRFREIYYWDSYFTMLGLAESGHWDKVADMVANFGYEIDAWGHIPNGNRTYYLSRSQPPFFAFMVELLAQHEGDDALKEYLPQLQKEYAYWMEGVETLQPGQQNQRVVKLEDGSVLNRYWDDRDTPRPESWVEDIATAKSNPNRPATEIYRDLRSAAASGWDFSSRWMDNPQQLSTIRTTTIAPVDLNALLYQLEKTLARASAAAGDRAKASHYDALANARQKAIEMHLWNNKEGWYADYDLKNNKIRDQLTAAALFPLYVNAAAKDRAAKVAAAAQAHLLQPGGLATTSVKSGQQWDAPNGWAPLQWVAAEGLQNYGQDDVAMEVTWRFLTNVQHTYDREKKLVEKNDVSSTGTGGGGGEYPLQDGFGWTNGVTLKMLDLICPQEKPCDSVPSTRPASLSATPTKTPSAATQ

SEQ ID NO: 146714 - DNA, 1698 bp, Shigella flexneri
  CDS (1)..(1698): transl_table=11
atgaaatcccccgcaccttctcgcccgcaaaaaatggcgttaattccagcctgtatctttttgtgtttcgctgcgctatcggtgcaggcagaagaaacaccggtaacaccacagccgcctgatattttattagggccgctgtttaatgatgtgcaaaacgtcaaactttttccggaccaaaaaacctttgccgatgccgtgcctaacagcgatccgctgatgatccttgctgattatcggatgcagcaaaaccagagcggatttgatctgcgccatttcgttaacgtcaatttcaccctgccgaaagaaggcgagaaatatgttccgccagaggggcagtcactgcgcgaacatattgacggactttggccggtattaacgcgttctaccgaaaacaccgaaaaatgggattctctgttaccgctgccggaaccttatgtcgtgccgggcggacgttttcgcgaggtatattactgggacaattacttcaccatgttaggacttgccgaaagtggtcactgggataaagtcgcggatatggtggccaattttgctcatgaaataaacacttacggtcatattcccaacggcaaccgcagttactatttaagccgctcgcaaccgcccttctttgccctgatggtagagttactggcgcagcatgaaggcgatgccgcgttgaagcaatacctgccgcaaatgcaaaaagaatatgcttactggatggacggtgttgaaaacctgcaagccggacaacaggaaaaacgcgttgtaaaacttcaggatagtacccttctcaaccgctactgggacgatcgcgatacgccacgaccagagtcatgggtggaagatattgccaccgccaaaagcaatccgaatcgacctgccactgaaatttaccgcgacctgcgctctgccgctgcgtctggctgggatttcagctcgcgctggatggacaacccgcagcagttaaataccttacgcaccaccagcatcgtaccggtcgatctgaacagcctgatgtttaaaatggaaaaaatcctcgcccgcgccagcaaagctgcaggagataacgcgatggcaaaccagtacgaaacgctggcgaatgcccgtcaaaaagggatcgaaaaatacctgtggaacgatcaacaaggctggtatgccgattacgacctgaaaagtcataaagtgcgcaatcagttaaccgcggccgccctgttcccgctgtacgtcaatgcggcagcgaaagatcgcgccaacaaaatggcgacggcgacgaaaacacatctgctgcaacccggcggcctgaacaccacgtcggtgaaaagtgggcaacaatgggatgcgccaaatggctgggcaccgttacagtgggtcgcgacagaaggattacaaaactacgggcaaaaagaggtggcgatggacattagctggcacttcctgaccaatgttcagcacacctatgaccgggagaaaaagctggtggaaaaatatgatgtcagcaccaccggaacggggggcggcggtggcgaatatccattacaggatggctttggctggaccaatggcgtgacgctgaaaatgctggatttgatctgcccgaaagagcaaccgtgtgacaatgttccggcgacgcatccgaccgttaagtcagcaacgacgcaaccctcaaccaaagaggcacaacccacaccttaa

SEQ ID NO: 146715 - protein, 565 aa, Shigella flexneri
MKSPAPSRPQKMALIPACIFLCFAALSVQAEETPVTPQPPDILLGPLFNDVQNVKLFPDQKTFADAVPNSDPLMILADYRMQQNQSGFDLRHFVNVNFTLPKEGEKYVPPEGQSLREHIDGLWPVLTRSTENTEKWDSLLPLPEPYVVPGGRFREVYYWDNYFTMLGLAESGHWDKVADMVANFAHEINTYGHIPNGNRSYYLSRSQPPFFALMVELLAQHEGDAALKQYLPQMQKEYAYWMDGVENLQAGQQEKRVVKLQDSTLLNRYWDDRDTPRPESWVEDIATAKSNPNRPATEIYRDLRSAAASGWDFSSRWMDNPQQLNTLRTTSIVPVDLNSLMFKMEKILARASKAAGDNAMANQYETLANARQKGIEKYLWNDQQGWYADYDLKSHKVRNQLTAAALFPLYVNAAAKDRANKMATATKTHLLQPGGLNTTSVKSGQQWDAPNGWAPLQWVATEGLQNYGQKEVAMDISWHFLTNVQHTYDREKKLVEKYDVSTTGTGGGGGEYPLQDGFGWTNGVTLKMLDLICPKEQPCDNVPATHPTVKSATTQPSTKEAQPTP

SEQ ID NO: 146716 - DNA, 1668 bp, Tenebrio molitor
  CDS (1)..(1668)
atgatccccttcctgcttatggtcgcttttgctgacaccgtccttcaagtgtcagcacagtcgcaaccatcatgtgacagtaaagtctactgtcagggtaagttgctccacgttgttgaaatgtcgcgaattttcaacgactccaagacgttcgtcgagttgaaaatgatcaacgacgaacaaaccaccctcgagaattttgacaactttctcagagacaccaaccacaagcgtacccgtgcagatctgatgaaatttgtcagcgacaacttcaagcaagagaacgagttcgaaagttggaccccgacggactttaccgacaacccgacactgttgtcgagaattgaagacaaaaccatcagacagtttgctcaagatttggtcaagatctggccgaccctcgccaggaaggtgaagaaagaagtactggattatccggagcactatagtttgttaccggtggacaatgggttcatcataccgggaggtcgcttcacggagttttactactgggactcttattggatagtggaggggctcctgttgagtgacatgcacgaaaccgtgcgagggatgttggacaacttcttgtcgatagtcgagaaatacgggttcataccgaacggtgctcgcgtcttctatctgaacaggtcccaaccaccattgctgaccttgatggtgtcgctgtatgtgtcggcaactaatgacatggagtggttggcaaagaacatccgcaccatcgatacagagttgcgtttttggctcaacaacagactagtcgacgtggtgaaagacggtattgtttacaaactcgctcaatacaactccaacagcggaagtcctcgtcctgagtcctactacgaagacgtcacaaccgctagcgtcttcagcgacgaaagagacaaagccgagctgtacatggacctgaagagcgccgccgagagcggttgggacttctcgtcgcggtggatcgtcgacgaatacggaggcaccagaggcaacctgtctgcccttcacacccggaggataattccggtggacctcaacgcgtttctctgtcaagctttccaaaagctgtccgaattctaccagaccctcggcgactaccccaacgccaccttctggtccaaactcgtcaaaatctggcaacacagtatcgagatggtccactacaacagagacgacggcatttggtacgactgggataacgagttgagtcagcacagaagaatgttcttcccttcgaatttcgcaccgctttggtccgaaactttcgactcacgcaacgctgaaatcttgggtgaaatggcggctgagtatttcataactcaaaacatgatggactaccacggaggaattcctacttcgttgagccacaccggagagcaatgggactatccgaacgcttggccgccaatgcagtccatcattgtgatgggtctggacaaaagtgggagttacagagctaaacaactagcgagagagttggctcgaagatgggtcaaagctaatctgattggttttagacagacgggtgagatgtttgagaagtacaatgttgaagttcctggacagaatggaggtgggggagagtacgtcgtccaaagcgggtttggatggacgaacggggtagttttagaatttataaaccaattttttacaacataa

SEQ ID NO: 146717 - protein, 555 aa, Tenebrio molitor
MIPFLLMVAFADTVLQVSAQSQPSCDSKVYCQGKLLHVVEMSRIFNDSKTFVELKMINDEQTTLENFDNFLRDTNHKRTRADLMKFVSDNFKQENEFESWTPTDFTDNPTLLSRIEDKTIRQFAQDLVKIWPTLARKVKKEVLDYPEHYSLLPVDNGFIIPGGRFTEFYYWDSYWIVEGLLLSDMHETVRGMLDNFLSIVEKYGFIPNGARVFYLNRSQPPLLTLMVSLYVSATNDMEWLAKNIRTIDTELRFWLNNRLVDVVKDGIVYKLAQYNSNSGSPRPESYYEDVTTASVFSDERDKAELYMDLKSAAESGWDFSSRWIVDEYGGTRGNLSALHTRRIIPVDLNAFLCQAFQKLSEFYQTLGDYPNATFWSKLVKIWQHSIEMVHYNRDDGIWYDWDNELSQHRRMFFPSNFAPLWSETFDSRNAEILGEMAAEYFITQNMMDYHGGIPTSLSHTGEQWDYPNAWPPMQSIIVMGLDKSGSYRAKQLARELARRWVKANLIGFRQTGEMFEKYNVEVPGQNGGGGEYVVQSGFGWTNGVVLEFINQFFTT

SEQ ID NO: 146718 - DNA, 1650 bp, Salmonella typhimurium
  CDS (1)..(1650): transl_table=11
atgctcaaccagaaattaaaccccacgccttctgaagatctgactattgatgtcgatctgctttatgaaacagacccgtgcgagttaaagctggatgaaatgatcgaggcggaaccggagccggagatgatcgaggggcttcccgcctctgacgccctgacccctgccgatcggtatctcgaactgttcgagcatgtacagtcaacaaaactgtttccagacagtaaaacgttcccggactgcgcgccgaagatggacccgcttgatatcctgatccgctaccgtaaggtcagacgccaccgtgattttgacttacgccgcttcgtcgagaaccatttctggctaccggaaaccttatccagcgagtatgtctctaatcccgaaaactcgctcaaagaacatattgaccagctttggccgatactgacgcgcgaaccgcaggatcatattccgtggtcttcgctgctggcgctgccgcaatcctatatcgtgccgggaggccgttttagcgaaacctattattgggactcttattttaccatgctgggtctggcggaaagcgggcgcgaagacttacttaaatgtatggcggataatttcgcctggatgattgaaaactatggccatattcccaacggcaaccggacctattatctgagccgttcgcagccgccggtttttgccctgatggttgaactgttcgaagaagatggcgtgcgcggcgcgcggcgttatctcgaccatctcaaaatggaatacgccttctggatggacggcgccgaatcgctggcgctcaaccaggcttatcgccacgttgtgcggatgccggacggttccctgctgaaccgctactgggacgatcgcgacacgccgcgcgacgagtcgtggctggaagatgtcgaaactgcaaaacactccggtcgtccgcccaatgaagtctaccgggatttgcgcgccggggcggcgtccggctgggactattcttcacgctggctacgcgatgcgggccggcttgccagcatacgtacgacccagtttatccctatcgatttgaacgcttttctgtataaactggagagcgctatcgccaatatttcagcactgaaaggcgaacgtgacaccgaggcgctatttcgccagaaagccagcgatcgacgcgccgccgtgaaccattatctgtgggatgatgaaaacggctgttatcgggactatgactggcgacgcgaagaaatggcgctcttttccgccgccagtatcgtgccgctgtatgtcggtatggcgaaccacgagcaggccgaccgtctggcaaatgtggtacgcagccgtctgttaacgcccggcgggattatggcgaccgaatacgaaaccggcgaacagtgggataaaccgaacggctgggcaccgctgcaatggatggcgattcagggcttcaaacggtatggcgacgatatgctgggcgatgaaatcgcccataactggttaaaaacagtgaaccatttttatcaggagcaccataaactgatcgagaaataccatatttccggcggtacgccccgcgaaggcggcgggggcgagtatccgctacaggacgggttcggctggaccaatggcgtggtgcgccgcctgattggcctttacggagagccttaa

SEQ ID NO: 146719 - protein, 549 aa, Salmonella typhimurium
MLNQKLNPTPSEDLTIDVDLLYETDPCELKLDEMIEAEPEPEMIEGLPASDALTPADRYLELFEHVQSTKLFPDSKTFPDCAPKMDPLDILIRYRKVRRHRDFDLRRFVENHFWLPETLSSEYVSNPENSLKEHIDQLWPILTREPQDHIPWSSLLALPQSYIVPGGRFSETYYWDSYFTMLGLAESGREDLLKCMADNFAWMIENYGHIPNGNRTYYLSRSQPPVFALMVELFEEDGVRGARRYLDHLKMEYAFWMDGAESLALNQAYRHVVRMPDGSLLNRYWDDRDTPRDESWLEDVETAKHSGRPPNEVYRDLRAGAASGWDYSSRWLRDAGRLASIRTTQFIPIDLNAFLYKLESAIANISALKGERDTEALFRQKASDRRAAVNHYLWDDENGCYRDYDWRREEMALFSAASIVPLYVGMANHEQADRLANVVRSRLLTPGGIMATEYETGEQWDKPNGWAPLQWMAIQGFKRYGDDMLGDEIAHNWLKTVNHFYQEHHKLIEKYHISGGTPREGGGGEYPLQDGFGWTNGVVRRLIGLYGEP

SEQ ID NO: 146720 - DNA, 1650 bp, Shigella flexneri
  CDS (1)..(1650): transl_table=11
atgctcaatcagaaaattcaaaaccctaatccagacgaactgatgatcgaggtcgatctctgctatgaactggacccgtatgaattaaaactggatgagatgatcgaggcagaaccggaacccgagatgattgaagggctgcccgcctctgatgcgctgacgcctgccgatcgctatctcgaactgttcgagcatgttcagtcggcgaaaattttccccgacagtaaaacctttcccgactgcgcacccaaaatggacccgctggatattttaatccgctaccgtaaagtgcgccgtcatcgtgattttgacttgcgcaagtttgttgaaaatcacttctggctgccggaggtctactccagcgagtatgtatcggacccgcaaaattccctgaaagagcatatcgaccagctgtggccggtgctaacccgcgaaccacaggatcacattccgtggtcttctctgctggcgctaccgcagtcatatattgtcccgggcggccgttttagcgaaacctactattgggattcctatttcaccatgctgggactggcggaaagtggtcgggaagatttgctgaaatgcatggccgataacttcgcctggatgatcgaaaactacggtcacatccccaacggcaaccgcacctattatttgagccgctcgcaaccaccggtttttgcgctgatggtggagttgtttgaagaagatggtgtacgcggtgcgcgccgctatctcgaccaccttaaaatggaatatgccttctggatggacggtgcagaatcgttgatccctaatcaggcctatcgccatgttgtgcggatgccggacggatcgctgctcaaccgttactgggacgatcgcgacacgccgcgtgacgaatcctggcttgaggacgttgaaaccgcgaaacattctggtcgcccgcccaacgaggtgtaccgcgatttacgcgcgggagcggcctccggttgggattactcttcccgttggctgcgtgatactggtcgtctggcgagcattcgtaccacccagttcatccccatcgatctgaatgccttcctgtttaaactggagagcgccatcgccaacatctcggcgctgaaaggcgagaaagagacagaagcgctgttccgccagaaggccagtgcccgtcgcgatgcggtaaaccgttacctctgggatgatgaaaacggcatctaccgcgattacgactggcgacgcgaacaactggcgctgttttccgctgccgccattgtgccgctctatgtcggcatggcgaaccatgaacaggccgatcgtctggcaaacgccgtacgcagccggttactgacacctggcgggattttggcaagcgagtacgaaaccggtgaacagtgggataaacccaacggctgggcaccgttacaatggatggcaattcagggatttaaaatgtatggcgatgaccttctgggtgatgaaatcgcgcgcagctggctgaaaacggtgaatcagttctatctggaacagcacaaaatgatcgagaaataccatattgccgatggtgttccccgcgaaggcggcggtggcgagtatccgttgcaggatgggtttggctggactaacggtgtggtacgccgtttaattggtttgtacggcgaaccataa

SEQ ID NO: 146721 - protein, 549 aa, Shigella flexneri
MLNQKIQNPNPDELMIEVDLCYELDPYELKLDEMIEAEPEPEMIEGLPASDALTPADRYLELFEHVQSAKIFPDSKTFPDCAPKMDPLDILIRYRKVRRHRDFDLRKFVENHFWLPEVYSSEYVSDPQNSLKEHIDQLWPVLTREPQDHIPWSSLLALPQSYIVPGGRFSETYYWDSYFTMLGLAESGREDLLKCMADNFAWMIENYGHIPNGNRTYYLSRSQPPVFALMVELFEEDGVRGARRYLDHLKMEYAFWMDGAESLIPNQAYRHVVRMPDGSLLNRYWDDRDTPRDESWLEDVETAKHSGRPPNEVYRDLRAGAASGWDYSSRWLRDTGRLASIRTTQFIPIDLNAFLFKLESAIANISALKGEKETEALFRQKASARRDAVNRYLWDDENGIYRDYDWRREQLALFSAAAIVPLYVGMANHEQADRLANAVRSRLLTPGGILASEYETGEQWDKPNGWAPLQWMAIQGFKMYGDDLLGDEIARSWLKTVNQFYLEQHKMIEKYHIADGVPREGGGGEYPLQDGFGWTNGVVRRLIGLYGEP

SEQ ID NO: 146722 - DNA, 26 bp, Artificial sequence
  primer
atgctcaatcagaaaattcaaaaccc

SEQ ID NO: 146723 - DNA, 24 bp, Artificial sequence
  primer
ttatggttcgccgtacaaaccaat

SEQ ID NO: 146724 - protein, 545 aa, Artificial sequence
  consensus sequence
  Variant (2)..(7): Xaa in position 2 to 7 is any amino acid
  Variant (8)..(9): Xaa in position 8 to 9 is any or no amino acid
  Variant (11)..(11): Xaa in position 11 is any amino acid
  Variant (13)..(13): Xaa in position 13 is any amino acid
  Variant (15)..(15): Xaa in position 15 is any amino acid
  Variant (17)..(28): Xaa in position 17 to 28 is any amino acid
  Variant (29)..(51): Xaa in position 29 to 51 is any or no amino acid
  Variant (53)..(56): Xaa in position 53 to 56 is any amino acid
  Variant (58)..(80): Xaa in position 58 to 80 is any amino acid
  Variant (81)..(99): Xaa in position 81 to 99 is any or no amino acid
  Variant (101)..(102): Xaa in position 101 to 102 is any amino acid
  Variant (104)..(104): Xaa in position 104 is any amino acid
  Variant (106)..(113): Xaa in position 106 to 113 is any amino acid
  Variant (114)..(118): Xaa in position 114 to 118 is any or no amino acid
  Variant (120)..(129): Xaa in position 120 to 129 is any amino acid
  Variant (135)..(135): Xaa in position 135 is any amino acid
  Variant (137)..(137): Xaa in position 137 is any amino acid
  Variant (142)..(142): Xaa in position 142 is any amino acid
  Variant (144)..(147): Xaa in position 144 to 147 is any amino acid
  Variant (150)..(163): Xaa in position 150 to 163 is any amino acid
  Variant (165)..(165): Xaa in position 165 is any amino acid
  Variant (166)..(172): Xaa in position 166 to 172 is any or no amino acid
  Variant (174)..(175): Xaa in position 174 to 175 is any amino acid
  Variant (179)..(179): Xaa in position 179 is any amino acid
  Variant (181)..(181): Xaa in position 181 is any amino acid
  Variant (184)..(185): Xaa in position 184 to 185 is any amino acid
  Variant (191)..(194): Xaa in position 191 to 194 is any amino acid
  Variant (197)..(213): Xaa in position 197 to 213 is any amino acid
  Variant (214)..(219): Xaa in position 214 to 219 is any or no amino acid
  Variant (221)..(222): Xaa in position 221 to 222 is any amino acid
  Variant (224)..(226): Xaa in position 224 to 226 is any amino acid
  Variant (228)..(239): Xaa in position 228 to 239 is any amino acid
  Variant (240)..(252): Xaa in position 240 to 252 is any or no amino acid
  Variant (254)..(255): Xaa in position 254 to 255 is any amino acid
  Variant (257)..(262): Xaa in position 257 to 262 is any amino acid
  Variant (268)..(269): Xaa in position 268 to 269 is any amino acid
  Variant (272)..(292): Xaa in position 272 to 292 is any amino acid
  Variant (293)..(294): Xaa in position 293 to 294 is any or no amino acid
  Variant (296)..(296): Xaa in position 296 is any amino acid
  Variant (303)..(303): Xaa in position 303 is any amino acid
  Variant (306)..(311): Xaa in position 306 to 311 is any amino acid
  Variant (312)..(316): Xaa in position 312 to 316 is any or no amino acid
  Variant (318)..(321): Xaa in position 318 to 321 is any amino acid
  Variant (323)..(326): Xaa in position 323 to 326 is any amino acid
  Variant (332)..(371): Xaa in position 332 to 371 is any amino acid
  Variant (372)..(372): Xaa in position 372 is any or no amino acid
  Variant (374)..(376): Xaa in position 374 to 376 is any amino acid
  Variant (377)..(377): Xaa in position 377 is any or no amino acid
  Variant (379)..(381): Xaa in position 379 to 381 is any amino acid
  Variant (384)..(399): Xaa in position 384 to 399 is any amino acid
  Variant (400)..(412): Xaa in position 400 to 412 is any or no amino acid
  Variant (415)..(438): Xaa in position 415 to 438 is any amino acid
  Variant (439)..(448): Xaa in position 439 to 448 is any or no amino acid
  Variant (451)..(458): Xaa in position 451 to 458 is any amino acid
  Variant (460)..(460): Xaa in position 460 is any amino acid
  Variant (464)..(464): Xaa in position 464 is any amino acid
  Variant (467)..(467): Xaa in position 467 is any amino acid
  Variant (469)..(469): Xaa in position 469 is any amino acid
  Variant (471)..(471): Xaa in position 471 is any amino acid
  Variant (473)..(478): Xaa in position 473 to 478 is any amino acid
  Variant (480)..(487): Xaa in position 480 to 487 is any amino acid
  Variant (488)..(490): Xaa in position 488 to 490 is any or no amino acid
  Variant (492)..(513): Xaa in position 492 to 513 is any amino acid
  Variant (514)..(515): Xaa in position 514 to 515 is any or no amino acid
  Variant (519)..(523): Xaa in position 519 to 523 is any amino acid
  Variant (524)..(524): Xaa in position 524 is any or no amino acid
  Variant (526)..(526): Xaa in position 526 is any amino acid
  Variant (527)..(527): Xaa in position 527 is any or no amino acid
  Variant (534)..(535): Xaa in position 534 to 535 is any amino acid
  Variant (537)..(537): Xaa in position 537 is any amino acid
  Variant (542)..(542): Xaa in position 542 is any amino acid
QXXXXXXXXDXKXFXDXXXXXXXXXXXXXXXXXXXXXXXXXXXXXXXXXXXFXXXXFXXXXXXXXXXXXXXXXXXXXXXXXXXXXXXXXXXXXXXXXXXWXXLXRXXXXXXXXXXXXXSXXXXXXXXXXPGGRFXEXYYWDXYXXXXGLXXXXXXXXXXXXXXNXXXXXXXXGXXPNGXRXYYXXRSQPPXXXXMVXXXXXXXXXXXXXXXXXXXXXXXLXXEXXXWXXXXXXXXXXXXXXXXXXXXXXXXXLXXYXXXXXXPRPESXXEDXXXXXXXXXXXXXXXXXXXXXXXAXSGWDFSXRWXXXXXXXXXXXLXXXXTXXXXPVDLNXXXXXXXXXXXXXXXXXXXXXXXXXXXXXXXXXXXXXXXXXWXXXXGXXXDYXXXXXXXXXXXXXXXXXXXXXXXXXXXXXPLXXXXXXXXXXXXXXXXXXXXXXXXXXXXXXXXXXGGXXXXXXXXGXQWDXPNXWXPXQXXXXXXLXXXXXXXXXXXAXXXXXXXXXXXXXXXXXXXXXXXXEKYXXXXXXGXXGGGGEYXXQXGFGWXNGV

SEQ ID NO: 146725 - protein, 23 aa, Artificial sequence
  protein pattern
  Variant (2)..(3): Xaa in position 2 to 3 is any or no amino acid
  Variant (6)..(6): Xaa in position 6 is Gly or Ser
  Variant (9)..(9): Xaa in position 9 is any amino acid
  Variant (11)..(11): Xaa in position 11 is any amino acid
  Variant (16)..(16): Xaa in position 16 is Asn, Ser or Thr
  Variant (18)..(18): Xaa in position 18 is Phe or Trp
  Variant (19)..(21): Xaa in position 19 to 21 is any amino acid
VXXPGXRFXEXYYWDXYXXXXGL

SEQ ID NO: 146726 - protein, 36 aa, Artificial sequence
  protein pattern
  Variant (2)..(5): Xaa in position 2 to 5 is any amino acid
  Variant (6)..(12): Xaa in position 6 to 12 is any or no amino acid
  Variant (14)..(14): Xaa in position 14 is any amino acid
  Variant (15)..(15): Xaa in position 15 is Ala, Ile, Leu or Val
  Variant (16)..(16): Xaa in position 16 is Leu or Pro
  Variant (19)..(19): Xaa in position 19 is Ala, Gly, Asn or Ser
  Variant (21)..(21): Xaa in position 21 is any amino acid
  Variant (22)..(22): Xaa in position 22 is Phe or Tyr
  Variant (24)..(25): Xaa in position 24 to 25 is any amino acid
  Variant (30)..(30): Xaa in position 30 is Pro or Ser
  Variant (31)..(31): Xaa in position 31 is Phe, Ile, Leu, Met or Val
  Variant (32)..(32): Xaa in position 32 is Phe, Leu or Met
  Variant (33)..(34): Xaa in position 33 to 34 is any amino acid
  Variant (35)..(35): Xaa in position 35 is Leu or Met
  Variant (36)..(36): Xaa in position 36 is Ile or Val
MXXXXXXXXXXXGXXXNGXRXXYXXRSQPXXXXXXX

SEQ ID NO: 146727 - protein, 40 aa, Artificial sequence
  protein pattern
  Variant (2)..(6): Xaa in position 2 to 6 is any or no amino acid
  Variant (8)..(9): Xaa in position 8 to 9 is any amino acid
  Variant (10)..(10): Xaa in position 10 is Ala, Asn or Thr
  Variant (11)..(11): Xaa in position 11 is Ser or Thr
  Variant (12)..(14): Xaa in position 12 to 14 is any amino acid
  Variant (15)..(15): Xaa in position 15 is Ser or Thr
  Variant (16)..(16): Xaa in position 16 is Ala, Gly, Gln or Ser
  Variant (17)..(17): Xaa in position 17 is Glu or Gln
  Variant (21)..(21): Xaa in position 21 is any amino acid
  Variant (24)..(24): Xaa in position 24 is Ala, Gly or Val
  Variant (26)..(26): Xaa in position 26 is Ala or Pro
  Variant (28)..(28): Xaa in position 28 is any amino acid
  Variant (30)..(30): Xaa in position 30 is any amino acid
  Variant (31)..(31): Xaa in position 31 is Phe, Ile, Leu, Met or Val
  Variant (32)..(34): Xaa in position 32 to 34 is any amino acid
  Variant (35)..(35): Xaa in position 35 is Ala, Gly, Ser or Thr
  Variant (36)..(39): Xaa in position 36 to 39 is any amino acid
  Variant (40)..(40): Xaa in position 40 is Asp, Glu, Gly, Asn, Gln or Ser
GXXXXXGXXXXXXXXXXQWDXPNXWXPXQXXXXXXXXXXX

SEQ ID NO: 146728 - protein, 23 aa, Artificial sequence
  protein pattern
  Variant (7)..(8): Xaa in position 7 to 8 is any amino acid
  Variant (10)..(10): Xaa in position 10 is any amino acid
  Variant (15)..(15): Xaa in position 15 is Ser or Thr
  Variant (19)..(19): Xaa in position 19 is any amino acid
  Variant (20)..(22): Xaa in position 20 to 22 is any or no amino acid
GGGGEYXXQXGFGWXNGVXXXXL

SEQ ID NO: 146729 - protein, 11 aa, Artificial sequence
  protein pattern
  Variant (2)..(2): Xaa in position 2 is Ala or Glu
  Variant (3)..(3): Xaa in position 3 is Ser or Thr
  Variant (7)..(7): Xaa in position 7 is Phe or Tyr
  Variant (9)..(9): Xaa in position 9 is Gly, Asn, Ser or Thr
AXXGWDXSXRW

SEQ ID NO: 146730 - protein, 19 aa, Artificial sequence
  protein pattern
  Variant (2)..(3): Xaa in position 2 to 3 is any amino acid
  Variant (5)..(8): Xaa in position 5 to 8 is any amino acid
  Variant (9)..(9): Xaa in position 9 is Ala, Asp, Gly, Asn or Ser
  Variant (10)..(10): Xaa in position 10 is any amino acid
  Variant (13)..(13): Xaa in position 13 is Asp, Pro or Gln
  Variant (16)..(18): Xaa in position 16 to 18 is any amino acid
LXXYXXXXXXPRXESXXXD

SEQ ID NO: 146731 - protein, 18 aa, Artificial sequence
  protein pattern
  Variant (2)..(2): Xaa in position 2 is any amino acid
  Variant (3)..(5): Xaa in position 3 to 5 is any or no amino acid
  Variant (7)..(8): Xaa in position 7 to 8 is any amino acid
  Variant (9)..(9): Xaa in position 9 is Phe, Ile, Leu or Val
  Variant (10)..(10): Xaa in position 10 is Ala, Ile, Leu or Val
  Variant (12)..(12): Xaa in position 12 is Ala, Ile or Val
  Variant (16)..(16): Xaa in position 16 is Ala, Cys, Ser or Thr
  Variant (17)..(17): Xaa in position 17 is any amino acid
  Variant (18)..(18): Xaa in position 18 is Phe, Ile, Leu or Met
LXXXXTXXXXPXDLNXXX

SEQ ID NO: 146732 - DNA, 1149 bp, Escherichia coli
  CDS (1)..(1149): transl_table=11
atgaaagcattacattttggcgcaggtaatatcggtcgtggctttatcggtaaactgctggcagacgcgggtatccaactgacgtttgccgatgtcaatcaggtggtacttgatgccctgaatgcccgtcatagctatcaggtacatgtggttggtgaaaccgagcaggtagataccgtttccggcgtcaatgctgtcagcagcattggtgatgatgtcgttgatctgattgctcaggttgatttagtcactaccgccgttggcccggttgtgctggaacgtattgctccggcaatcgccaaagggcaggtgaaacgtaaagaacaaggtaatgaatccccgctgaacatcatcgcctgtgaaaacatggtacgcggtaccacgcagctgaaaggccatgtgatgaacgccctgccggaagacgccaaagcgtgggtagaagaacacgttggctttgtcgattccgccgttgaccgcatcgtaccgccttcggcttcggcaactaacgatccgctggaagtgacggtagaaaccttcagcgaatggattgtcgataaaacgcagttcaaaggcgcactgccgaacatcccaggcatggagttaaccgacaacctgatggcatttgtcgaacgtaaactcttcaccctgaacacgggtcatgctataaccgcgtacctcggaaaactggccggtcatcagaccattcgtgacgcgattctcgacgagaaaatccgcgcggtggtaaaaggtgcgatggaagaaagtggtgcagtattgatcaagcgctacggctttgacgctgacaagcatgcggcgtacatccagaaaattctcggccgttttgagaacccgtatctgaaagatgatgtagagcgcgtaggccgtcagccactgcgtaaactgagtgctggcgaccgtctgatcaagccactgctcggtacgctggaatatggtctgccacataaaaacctgattgaaggtattgccgctgcaatgcacttccgcagtgaagatgatccgcaggctcaggaactggcagcactgatcgctgacaaaggtccgcaggcggcgctggcacagatttccggtcttgatgccaacagcgaggttgtatccgaggcggtaaccgcttataaagcaatgcaataa

SEQ ID NO: 146733 - protein, 382 aa, Escherichia coli
MKALHFGAGNIGRGFIGKLLADAGIQLTFADVNQVVLDALNARHSYQVHVVGETEQVDTVSGVNAVSSIGDDVVDLIAQVDLVTTAVGPVVLERIAPAIAKGQVKRKEQGNESPLNIIACENMVRGTTQLKGHVMNALPEDAKAWVEEHVGFVDSAVDRIVPPSASATNDPLEVTVETFSEWIVDKTQFKGALPNIPGMELTDNLMAFVERKLFTLNTGHAITAYLGKLAGHQTIRDAILDEKIRAVVKGAMEESGAVLIKRYGFDADKHAAYIQKILGRFENPYLKDDVERVGRQPLRKLSAGDRLIKPLLGTLEYGLPHKNLIEGIAAAMHFRSEDDPQAQELAALIADKGPQAALAQISGLDANSEVVSEAVTAYKAMQ

SEQ ID NO: 146734 - DNA, 1149 bp, Klebsiella pneumoniae subsp. pneumoniae MGH 78578
  CDS (1)..(1149): transl_table=11
atgaaagcattacattttggcgcaggtaatatcggacgtggctttatcggtaaattgctggccgacgcgggcatcgaactgacgtttgccgatgtcaatcagaccgtacttgatgccctgaatgcccgtcatagctatcaggttcacgtcgtcggtgagaatgagcaggtggacaccgtctccggcgtcaatgccgtcagcagcatcggcgatgaggttgtggacctgatcgctgaagtggatctggtcaccaccgccgtcggtcccgtcgtgctcgagcgcatcgcgccagcgatcgccaaagggctggcgcagcgcaaagcgcagggcaccgaacgccccctgaacatcatcgcctgcgaaaatatggtgcgcggcaccacgcagttaaaaggccacgtgtttaacgcgctggcggaagaacataaagcctgggtggaagcgcatatcggctttgtcgactctgccgttgaccgtattgtgccgccatcggcttccgccactcatgacccgctggaagtcaccgtggaaacctttagcgaatggattgtcgataagactcagttcaagggcgcgctgccgactatcccggggatggaattaactgataacctgatggcatttgtcgaacgcaagctcttcaccttgaacaccgggcatgctataaccgcctacctcggaaaactggcgggccatcagacgattcgcgacgcgatcctcgacgagaaaattcgtgccgtcgtgcagggcgcgatggaagagagcggcgcggtgctgatcaaacgttacgcctttgacccgcagaagcacgcggcttatatccagaaaatacttggccgtttcgagaacccgtacctgaaagacgatgttgagcgcgttggccgtcagccgctgcgcaaactgagcgctggcgaccgtttaattaagccgctgctgggtacactggaatacgggctgccgcaccgcaacctggtgaaagggattgcggcggcgatgcatttccgtagcgaagacgatccgcaggcgcaggagctggcggcactgatcgccgacaaggggccgcaggccgcgctggcgcagatttccggcctggatgccgcaagtgatgtcgtcgcggaggccgttaacgactacaacgcggaaaaatga

SEQ ID NO: 146735 - protein, 382 aa, Klebsiella pneumoniae subsp. pneumoniae MGH 78578
MKALHFGAGNIGRGFIGKLLADAGIELTFADVNQTVLDALNARHSYQVHVVGENEQVDTVSGVNAVSSIGDEVVDLIAEVDLVTTAVGPVVLERIAPAIAKGLAQRKAQGTERPLNIIACENMVRGTTQLKGHVFNALAEEHKAWVEAHIGFVDSAVDRIVPPSASATHDPLEVTVETFSEWIVDKTQFKGALPTIPGMELTDNLMAFVERKLFTLNTGHAITAYLGKLAGHQTIRDAILDEKIRAVVQGAMEESGAVLIKRYAFDPQKHAAYIQKILGRFENPYLKDDVERVGRQPLRKLSAGDRLIKPLLGTLEYGLPHRNLVKGIAAAMHFRSEDDPQAQELAALIADKGPQAALAQISGLDAASDVVAEAVNDYNAEK

SEQ ID NO: 146736 - DNA, 1269 bp, Yersinia pestis biovar Microtus str. 91001
  CDS (1)..(1269): transl_table=11
ttggctgctttgcctacctgcaacgcgaattatttagcgtataaacaagtcataactgctagggctgttggaagaaaatggcccttttacagcaaggtaacgaatatgaaagcattacattttggcgcagggaatattggccgtggcttcatcggcaaactgctcgcggatgccggtgcgcaactgaccttcgccgatgtgaatcaaccgttgttggatgaactgaataaacgtaaacgttatcaggtcaatgtggtcggtgaacaggctcgggttgaagaggtaaagaatgtcagtgcggtaaacagcggtagcccggaagtggttgcgctgattgctgaggccgatattgtcaccaccgctgttggcccacaaattttggccagaattgcggcgacagtggcacagggtctgatcactcgacatcagcaagggaatacccgcccactgaatattattgcctgcgaaaatatggtgcgtggcactagccaattaaaacaacatgtgtttgctgccttatcagaagacgaacaaatatgggtagagcagcatgtgggttttgtggattcggcagtcgatcgtattgtcccaccatcagaagcgggcagtactgatatcctggctgtcacggtagaaacctttagcgaatggatagtcgacggtacccaatttaaaggccagccacccgaaatcgtgggtatggaattgaccgataatctcatggcttttgtcgagcgtaagctcttcacgttgaacaccgggcatgctattaccgcgtatctgggccaactggcaggccatcaaacgatccgcgatgcgattctcgacccggcggtacgtcaaacagtaaaaggtgcgatggaagagagcggtgcggtactgattaagcgttatgctttcgacccacagaaacatgcggcttatatcaacaaaattctctctcgttttgaaaacccttatttgcacgatgatgtcgagcgggttggccgtcaaccactgcgtaagctgagcgccggtgatcgtttgatcaaaccgctgctaggcacgctggagtatcaattgccgcacgattctctggtaacgggtattgccgccgccatgagctatcgcagtgagcaagatccacaggcccaagagttggtgacgttattggcacaattagggccgaaagctgcgttagcgcaaatttcaggcttgcctgctgatagtgaggttgtcgaacaggcggtgagtgtgtataacgccatgcagcagaagctggcgcactga

SEQ ID NO: 146737 - protein, 422 aa, Yersinia pestis biovar Microtus str. 91001
MAALPTCNANYLAYKQVITARAVGRKWPFYSKVTNMKALHFGAGNIGRGFIGKLLADAGAQLTFADVNQPLLDELNKRKRYQVNVVGEQARVEEVKNVSAVNSGSPEVVALIAEADIVTTAVGPQILARIAATVAQGLITRHQQGNTRPLNIIACENMVRGTSQLKQHVFAALSEDEQIWVEQHVGFVDSAVDRIVPPSEAGSTDILAVTVETFSEWIVDGTQFKGQPPEIVGMELTDNLMAFVERKLFTLNTGHAITAYLGQLAGHQTIRDAILDPAVRQTVKGAMEESGAVLIKRYAFDPQKHAAYINKILSRFENPYLHDDVERVGRQPLRKLSAGDRLIKPLLGTLEYQLPHDSLVTGIAAAMSYRSEQDPQAQELVTLLAQLGPKAALAQISGLPADSEVVEQAVSVYNAMQQKLAH

SEQ ID NO: 146738 - DNA, 1203 bp, Magnaporthe grisea 70-15
  CDS (1)..(1203)
atgtcgcaaacaaacggtacccacacaaagaaagccgtccacttcggtgccggcaacatcggccgtggctttgtcgcctgctttctccacaactccggatatgaggtcgtgttcgccgatgtcactgacaggacttgcgacgcccttaacaaccaaacctcttacaaggtgattgaggttggcgccgagggcaccgaggagaagaccatcacaaactaccgcgccatcaactcaaaaacaaaagaagacgagctgctccaagagatcgctacagcagatgttgttacatgctcagtgggccccaacatcctcaagttcatcgctcctgtcattgcaaagggtctcgacatgaggtcagaggagctcaaacccgccgcagtcatcgcttgtgaaaacgctattggcgccaccgacacactcgccgagcacatcaaggagcacctcccagccactagagtggaggacctgtcaacacgcgcccgtttcgccaactcggccattgaccgtatcgtccccgcccaggaccccaactccggcctcgacgtcaagctcgagaagttctacgagtgggtagtcgacaggacaccctttgccgatcatgaggtcccatctatcgagggtatccactgggtcgacaaccttgagccatacattgagcgcaagctgtacaccgtcaacacgggtcatgcaactgccgcttaccacgggtacaataggcaaaagcgtactgtatacgatgctcttcaggaccgtgagatccagagtgaggttcgtcgcgcgctggagaacacctccaagctcatcaccgccaaacatggcatcaacccggaggagcaacaggcgtatgttcgcaagatcatgacccgcattggcaacccccatcttgaggatgccgtcgaacgtgtcggccgtgcccctctccgcaagctatctcgcaaggagcgcttcgtcggccccgctgctgagcttgccgagaagggtgaggactgcagtgcacttctcgatgctgcagagatggctttgcgtttccagaatgtcgaagaggatgccgaaagcaaggagctggccaagattatggcagagaacagtgccgagcaggttgtctcgcaggtttgtggtctgcagccttcggagaagctttaccctaaaatggtcgagatcgtccacagggttcagcaagattctatggacgacactgagtaa

SEQ ID NO: 146739 - protein, 400 aa, Magnaporthe grisea 70-15
MSQTNGTHTKKAVHFGAGNIGRGFVACFLHNSGYEVVFADVTDRTCDALNNQTSYKVIEVGAEGTEEKTITNYRAINSKTKEDELLQEIATADVVTCSVGPNILKFIAPVIAKGLDMRSEELKPAAVIACENAIGATDTLAEHIKEHLPATRVEDLSTRARFANSAIDRIVPAQDPNSGLDVKLEKFYEWVVDRTPFADHEVPSIEGIHWVDNLEPYIERKLYTVNTGHATAAYHGYNRQKRTVYDALQDREIQSEVRRALENTSKLITAKHGINPEEQQAYVRKIMTRIGNPHLEDAVERVGRAPLRKLSRKERFVGPAAELAEKGEDCSALLDAAEMALRFQNVEEDAESKELAKIMAENSAEQVVSQVCGLQPSEKLYPKMVEIVHRVQQDSMDDTE

SEQ ID NO: 146740 - DNA, 1161 bp, Aspergillus nidulans FGSC A4
  CDS (1)..(1161)
atgggcaaggctattcacttcggtggcgggaatatcggccgtggcttcgttggagagttcctccatgaggctggctacgaagtcgtcttcgtcgatgttgtcgacgacctgatcacttcaattcagaacactccctcatacgagatcaccgagatcagcgaagacggcgagaagacaaagaagattactaactaccgcgcactcaactccaagtctcatgaagccgacgtggtccaagaaatcgcgactgccgatattgtgacgtgcgctgttggaccgcgggtcctccagttcattgctcccgtcatcgccaagggtctcgaatctcgcaatgtttccaccccactcactgtcatcgcttgcgagaacgctatcaacgctaccgataccctccgcggccatattgagaagaagaccaagccagagataatcagcgagcgtgccgtttttgccaactgcgccatcgaccgtattgtccctaaccagcctccgaacaacggtctcaacgtccggatcgagaaatactgggaatgggttgttgagcaaactcccttcaaggagaagggcgtcgcgcaccccaacgtctccgccatccactgggtggataagctcgacccctacattgaacgcaagctgttcaccgtcaacaccggacacgccacgactgcctactatggccaccttgctggtaagaagactattgccgatgctctccacgacccgaagatccgtgaaaatgtccacaaggtcctagacgagactgcttccctgatcattaacaagcacggcatctctgaacaagaacagaaggagtatgtcgataagatcatcagccgtatctccaacccctacctcgaggacggcgttgagcgtgtgggtcgggccccactgcgcaagctctcccgtaacgaacgctttatcggacctgcctcccagcttgctgagcgcggcctcaaattcgatgctctcctcggcgctatcgagcaggctctccgcttccagaacgttgagggagacgaagagagcaaagaactcgctaagattctcaaggaaaagacggctgaggaagctaccagcgagttgactgagctcgagaaggatcaccctctgtattcccacgtgcttgaacgtgtgagaactgttcaacaagagtccaagtag

SEQ ID NO: 146741 - protein, 386 aa, Aspergillus nidulans FGSC A4
MGKAIHFGGGNIGRGFVGEFLHEAGYEVVFVDVVDDLITSIQNTPSYEITEISEDGEKTKKITNYRALNSKSHEADVVQEIATADIVTCAVGPRVLQFIAPVIAKGLESRNVSTPLTVIACENAINATDTLRGHIEKKTKPEIISERAVFANCAIDRIVPNQPPNNGLNVRIEKYWEWVVEQTPFKEKGVAHPNVSAIHWVDKLDPYIERKLFTVNTGHATTAYYGHLAGKKTIADALHDPKIRENVHKVLDETASLIINKHGISEQEQKEYVDKIISRISNPYLEDGVERVGRAPLRKLSRNERFIGPASQLAERGLKFDALLGAIEQALRFQNVEGDEESKELAKILKEKTAEEATSELTELEKDHPLYSHVLERVRTVQQESK

SEQ ID NO: 146742 - DNA, 1152 bp, Clostridium difficile 630
  CDS (1)..(1152): transl_table=11
atgaaaaaggcaattcagtttggagcaggaaatattggaaggggttttattggaggcttgttagttaagtcgggttatcatgtagtatttgctgatgtaaatgagtatatattaaactcaataaacaaagataaaaagtatactatacacataagagatgtagaatgtatagatgaagtaattgataatataagtgcggtttcatctataaaagaagaaataatagatgagattgtacaggctgaaataataactacagcagttggacctttagttttgactaaaatagcctctacaattgcaaaaggtataaaagctagaaaagaaaagggattaacaagtaatctaaatataatagcatgtgaaaatgcaatatacgcaagttcttctttaaaagaagaggtacttaagtatttaaataaggaagaagtagaatatttagagatgtatgttggttttccaaactgttcagttgatagaatagttcctcctggtaaaaacgaaaatcctcttgatgtaacagttgaaaatttttatgagtggaatgttgaaaaacaaggatttaaaggggaaataccaactatagttggaatgaatttagctgataatcttatggcttatatagaacgtaaattgtttacactgaatacaggtcatgctataacagcttatataggatatttaaaaggatataagactatagaagagagtataaaagataaatttatctgtgatatagtcaaaagtgcaatggtagaaagtggagaaggattgattaaaaaatacaattttgactcagaagtgcactataaatatattgataaaattttaaatagatttaaaaatccatatcttaatgatgatgtattaagagtcggaagggaaccattaagaaaactaagtgataaagatagattgattaaacctttaatgacagcaaaatcatatggattatcagttgataatttgattcttggaataggtgcagcgcttcattataataatagtgaagatactcaaagtgtagaattacaagagttgataaagtctattggggtaaaaaaagctgttgctaaaatagctaatataagcaatgacgaagaacttttaaataatatcgaaaaaagttatatatttatgaaaaatttataa

SEQ ID NO: 146743 - protein, 383 aa, Clostridium difficile 630
MKKAIQFGAGNIGRGFIGGLLVKSGYHVVFADVNEYILNSINKDKKYTIHIRDVECIDEVIDNISAVSSIKEEIIDEIVQAEIITTAVGPLVLTKIASTIAKGIKARKEKGLTSNLNIIACENAIYASSSLKEEVLKYLNKEEVEYLEMYVGFPNCSVDRIVPPGKNENPLDVTVENFYEWNVEKQGFKGEIPTIVGMNLADNLMAYIERKLFTLNTGHAITAYIGYLKGYKTIEESIKDKFICDIVKSAMVESGEGLIKKYNFDSEVHYKYIDKILNRFKNPYLNDDVLRVGREPLRKLSDKDRLIKPLMTAKSYGLSVDNLILGIGAALHYNNSEDTQSVELQELIKSIGVKKAVAKIANISNDEELLNNIEKSYIFMKNL

SEQ ID NO: 146744 - DNA, 1149 bp, Erwinia carotovora subsp. atroseptica SCRI1043
  CDS (1)..(1149): transl_table=11
atgaaagcattacattttggtgcaggtaatatcggccgtggatttattggtaaattgttggcggatgctaacgttgaactgacattcgctgacgtcaatcagccgctgttggatgcgctcaacagccgtaaaagctattcggtgcggattgtcggtgataacactcaagttgaggccgtcagcaacgtcagtgccgttcacagcggcagtcaggatgccatcgcattgatcgccgcggccgatctggtgacgaccgctgtgggaccgcagattctggaaaaaatcgccggcactatcgctcaggggctggttaaacgtcatgaagacggcaacacccggccgttgaacattattgcctgtgaaaatatggtgcgtggcaccagccagttaaaacagcatgtgctgaaactgctgccggaagcccatcaggaatgggttgtcgagcatgtaggattcgtcgattccgccgtggatcgcatcgttcccccttcggaagcgggaagcgacgatgtgttggcggtgacggtagaaaccttcagcgaatggattgtcgataaaacccagttctgcggtgagccgccagcgattcccggtatggaactgaccgacaatctgatggcgtttgtcgagcgtaagctgttcacgcttaatactggtcatgcgattacggcctacctcggccagcaggcacgtcatcaaacgatccgtgatgcgattcttgacccgaaagtcagagccgtggtcaaaggcgcaatggaagagagcggtgctgtactcatcaaacgttatggttttgatgcggataaacacgccgcctatatcaacaaaattctcagccgctttgaaaaccctcatctgcatgatgatgtggatcgcgttggccgtcagccgctgcgcaagctgagcgcaggtgaccgtctgatcaagccgctgctcggaacgctggaataccatttgccgcatgacaacctgattattggtattgcagccgcgatgcattatcgcagcgaacaggatccgcaggcgctggaactggctgaattaatccgtactctggggccgcaggcgacgctggtgcagatttctggtctggatgctgacagcgaggttgtcgcgcaagcagtgaatgtgtataacgccatgcagtaa

SEQ ID NO: 146745 - protein, 382 aa, Erwinia carotovora subsp. atroseptica SCRI1043
MKALHFGAGNIGRGFIGKLLADANVELTFADVNQPLLDALNSRKSYSVRIVGDNTQVEAVSNVSAVHSGSQDAIALIAAADLVTTAVGPQILEKIAGTIAQGLVKRHEDGNTRPLNIIACENMVRGTSQLKQHVLKLLPEAHQEWVVEHVGFVDSAVDRIVPPSEAGSDDVLAVTVETFSEWIVDKTQFCGEPPAIPGMELTDNLMAFVERKLFTLNTGHAITAYLGQQARHQTIRDAILDPKVRAVVKGAMEESGAVLIKRYGFDADKHAAYINKILSRFENPHLHDDVDRVGRQPLRKLSAGDRLIKPLLGTLEYHLPHDNLIIGIAAAMHYRSEQDPQALELAELIRTLGPQATLVQISGLDADSEVVAQAVNVYNAMQ

SEQ ID NO: 146746 - DNA, 1164 bp, Yersinia pseudotuberculosis IP 32953
  CDS (1)..(1164): transl_table=11
atgaaagcattacattttggcgcagggaatattggccgtggcttcatcggcaaactgctcgcggatgccggtgcgcaactgaccttcgccgatgtgaatcaaccgttgttggatgcactgaataaacgtaaaagttatcaggtcaatgtggtcggtgaacaggctcgggttgaagaggtaaagaatgtcagtgcggtaaacagcggtagcccggaagtggttgcgctgattgctgaggccgatattgttaccaccgctgttggcccacaaattttggccagaattgcggcgacagtggcacagggtctgatcactcgacatcagcaagggaatacccgcccactgaatattattgcctgcgaaaatatggtgcgtggcactagccaattaaaacaacatgtgtttgctgccttatcagaagacgaacaaagatgggtagagcagcatgtgggttttgtggattcggcagtcgatcgtattgtcccaccatcagaagcgggcagtactgatatcctggctgtcacggtagaaacctttagcgaatggatagtcgacggtacccaatttaaaggccagccacccgaaatcgtgggtatggaattgaccgataatctcatggcttttgtcgagcgtaagctcttcacgttgaacaccgggcatgctattaccgcgtatctgggccaactggcaggccatcaaacgatccgcgatgcgattctcgacccggcggtacgtcaaacagtaaaaggtgcgatggaagagagcggtgcggtactgattaagcgttatgctttcgacccacagaaacatgcggcttatatcaacaaaattctctctcgttttgaaaacccttatttgcacgatgatgtcgagcgggttggccgtcaaccactgcgtaagctgagcgccggtgatcgtttgatcaaaccgctgctaggcacgctggagtatcaattgccgcacgattctctggtaacgggtattgccgccgccatgagctatcgcagtgagcaagatccacaggcccaagagttggtgacgttattggcacaattagggccgaaagctgcgttagcgcaaatttcagacttgcctgctgatagtgaggttgtcgaacaggcggtgagtgtgtataacgccatgcagcagaagctggcacactga

SEQ ID NO: 146747 - protein, 387 aa, Yersinia pseudotuberculosis IP 32953
MKALHFGAGNIGRGFIGKLLADAGAQLTFADVNQPLLDALNKRKSYQVNVVGEQARVEEVKNVSAVNSGSPEVVALIAEADIVTTAVGPQILARIAATVAQGLITRHQQGNTRPLNIIACENMVRGTSQLKQHVFAALSEDEQRWVEQHVGFVDSAVDRIVPPSEAGSTDILAVTVETFSEWIVDGTQFKGQPPEIVGMELTDNLMAFVERKLFTLNTGHAITAYLGQLAGHQTIRDAILDPAVRQTVKGAMEESGAVLIKRYAFDPQKHAAYINKILSRFENPYLHDDVERVGRQPLRKLSAGDRLIKPLLGTLEYQLPHDSLVTGIAAAMSYRSEQDPQAQELVTLLAQLGPKAALAQISDLPADSEVVEQAVSVYNAMQQKLAH

SEQ ID NO: 146748 - DNA, 1149 bp, Mannheimia succiniciproducens MBEL55E
  CDS (1)..(1149): transl_table=11
atgaaagcattacatttcggtgcgggtaatatcggccgtggttttattggtaaattattagcagacagcggtatgcaggtaattttcgccgatgtaaacgacagcgttatcgatttattaaaaagccgccgaagctacggcgttaaaatcgttggcgacagtattaatacagtcgaacgggtcacccaggtcacaggtgtaaattcaaaagacgaaacggcaattattacgttatttaatgaagtggatttggtgaccaccgcggtcggcccgaacgttttaaaaattgttgcaagcacctttgccaaagccttagaagcacgtattgccggcggcaacacaaaaccgttaaacattattgcctgtgaaaacatggtacgcggtacaagttttctgaaagaacaggttttcactcacttaaaccccgactataaagataaagtcgaacaacttatcggttttgttgacagtgcggttgaccgaattgtgccgccggtaaaacccgatgcggaagatccgttattagtcacagtggaagaattcagcgagtggattgtagaccaaacccaattcaaaggcgcgattcccgatattaaaggcatggaattaacggataacctaatggcgtttgtagaacgcaaactgttcaccttaaataccggtcatgcggtcacctcttattacggtaaattcaaaggctataaattcgtcaaagaaagcattgaagacgaaagcgtaaaagcctttgtaaaatccgtgatgcaggaaagcggcgcggtattgattaaacgttacggatttgatccgcaagcccatgccgcttacatcgaaaaaatcttaaaacgtttcgccaacccgtacttagtggacgatgtggatcgtgtcggtcgtgaaccgttacgcaaattaagttacaacgatcgtttgattaaaccgttgcgcggcactattgaatacggtttaccgaatgataatttaattcgcgcaattgcaaccgcactttcatatcgtaatgagaacgacccgcaggcattggaactggccaaatcccttgctgaagcaggtgttacgcaaaccatcaaaaaatatacggaattacaggatgaaaatgtaatcgctcgtattgcgaaggcttacgaaacgctttaa

SEQ ID NO: 146749 - protein, 382 aa, Mannheimia succiniciproducens MBEL55E
MKALHFGAGNIGRGFIGKLLADSGMQVIFADVNDSVIDLLKSRRSYGVKIVGDSINTVERVTQVTGVNSKDETAIITLFNEVDLVTTAVGPNVLKIVASTFAKALEARIAGGNTKPLNIIACENMVRGTSFLKEQVFTHLNPDYKDKVEQLIGFVDSAVDRIVPPVKPDAEDPLLVTVEEFSEWIVDQTQFKGAIPDIKGMELTDNLMAFVERKLFTLNTGHAVTSYYGKFKGYKFVKESIEDESVKAFVKSVMQESGAVLIKRYGFDPQAHAAYIEKILKRFANPYLVDDVDRVGREPLRKLSYNDRLIKPLRGTIEYGLPNDNLIRAIATALSYRNENDPQALELAKSLAEAGVTQTIKKYTELQDENVIARIAKAYETL

SEQ ID NO: 146750 - DNA, 1140 bp, Bacillus licheniformis ATCC 14580
  CDS (1)..(1140): transl_table=11
atgattgcactgcatttcggtgcggggaacatcggccgcggatttatcggagccttgctctgcaaatcggggtatgatgtcgtgttcgccgatgtaaatgatgccgtgatcaatgaactgaacgataagggccgctataccgtcgaaatggccgatgccggaaggaagcaggaaacgatcggaccggtccgggcgatcaacagtgcgacccagcttgacgaattgtatgatttgatagcgaaagccgaccttgtcaccacagcggtaggcccggcggtgcttaaattgatcgcagagccgattgcagaaggtttgaagcgtcggatgaaaataaacaagcagcctttaaatattatagcttgcgagaatatgatcgggggcagcgctcatcttcgcgaggaaattttcgcccgcttaactgaaacggagcgcgccgcaatcagcgattcagtcggctttccgaactcggcagtcgacagaatcgtgccgatccagcaccatgatgatccgttgaaagtaacggtggagccttttttcgaatgggccgttgatcaaacggaattcgccggaaaagtgccggatattgaaggtgtgacatatgtagcggatcttgcgccattcatcgaaagaaagctgtttacggtcaataccggacacgccatggcggcgtatgccggctataagaaaggtttgaagacgataaaagacgccattcatcatccggaggtccgccaaacggtggcaggcgcgctagaagaaacaggccggtaccttgtccaaacatacgattttacacaggaagagcaccgggcatatatgacaaaaattatcggccgctttgagaatgaatgcctgtcagacgatgtcacccgtgtggccaggtcgccgcttcgcaagcttggcagggatgaccgtcttgtcggcccggcccggaagctttgcgatctcggctttgaacctgtccgccttgcagaaggcattgccctggcgctgcagtttgattgtgccgatgatccggaagccgttcagcttcaaagcatgatcgctgaaaaaggctatgccggcgtgcttcgcgacgtatgcggactcgaagaggatcattctttattcaaactggtaatcagccatttgaaagcatag

SEQ ID NO: 146751 - protein, 379 aa, Bacillus licheniformis ATCC 14580
MIALHFGAGNIGRGFIGALLCKSGYDVVFADVNDAVINELNDKGRYTVEMADAGRKQETIGPVRAINSATQLDELYDLIAKADLVTTAVGPAVLKLIAEPIAEGLKRRMKINKQPLNIIACENMIGGSAHLREEIFARLTETERAAISDSVGFPNSAVDRIVPIQHHDDPLKVTVEPFFEWAVDQTEFAGKVPDIEGVTYVADLAPFIERKLFTVNTGHAMAAYAGYKKGLKTIKDAIHHPEVRQTVAGALEETGRYLVQTYDFTQEEHRAYMTKIIGRFENECLSDDVTRVARSPLRKLGRDDRLVGPARKLCDLGFEPVRLAEGIALALQFDCADDPEAVQLQSMIAEKGYAGVLRDVCGLEEDHSLFKLVISHLKA

SEQ ID NO: 146752 - DNA, 1125 bp, Bacillus clausii KSM-K16
  CDS (1)..(1125): transl_table=11
atgaaggctgttcattttggcgcaggcaacattggccgtggttttattggcgcattactggtcgatgcaggttatgaagtaacgtttgttgatgtcaatgagaaaatcattgatgccctgaacgagcggaatgagtacaaagtaacggttgcgggcgaaagaaaagagactgagacggttacaaatgtgcgtggaattaacagcaaaacaaatgaaaaagaagcgattgacgcaattgccgaagcggatatcgttacaactgctgtaggaccgactgttttgccctatattgctaagacgattgcacaagggttaaaacaacggactgcaagtaagccagtcaacatgattgcctgtgaaaatgcaatccgggcgacttctcaattgaaaaaagacgttttgtcccatctttctgaagaagaaacgacagccttgttgaaggatgctggcttcgctgatgctgctgtcgatcggattgtgccgaatgtccaatcagatgatattcttcatgtcacagtagaacctttttttgagtgggtcgtcgaaaagcctgctctgaaaggagatgctgttcaactcggcaaagcagtgcttgttgaggatctagctccatacattgagcgcaagttattcacagttaacactgggcacgcggttgctgcttatgttggctatcgcaaagggaagaaaacgattaaagaggctttggcggatgattatattaaacaccgtgtccgcggtgctcttaatgaaacgaaagcgatgcttgtagaggaataccagtttgatgccgaagcccatgaagattatatcgacaaaattcttctccgttttcaaaaccctcatcttgaagacttggttgaacgagttggccgcggccctatccgtaagctgggaccagcagatcgcctcgttaaacctgcgaagtatttagctgaaaaagggcttcatcctgagtctttggcagaaacgatttttgatgcccttcacttttatgcggaaggggatccagaaagcgaggagctgcgagcccttgtcgatgaaaaagggtatgtggacgcgttctgtgaaatttctaaattagaaaaagatcatccgcttgttgaaatcgtcgctaaagagtag

SEQ ID NO: 146753 - protein, 374 aa, Bacillus clausii KSM-K16
MKAVHFGAGNIGRGFIGALLVDAGYEVTFVDVNEKIIDALNERNEYKVTVAGERKETETVTNVRGINSKTNEKEAIDAIAEADIVTTAVGPTVLPYIAKTIAQGLKQRTASKPVNMIACENAIRATSQLKKDVLSHLSEEETTALLKDAGFADAAVDRIVPNVQSDDILHVTVEPFFEWVVEKPALKGDAVQLGKAVLVEDLAPYIERKLFTVNTGHAVAAYVGYRKGKKTIKEALADDYIKHRVRGALNETKAMLVEEYQFDAEAHEDYIDKILLRFQNPHLEDLVERVGRGPIRKLGPADRLVKPAKYLAEKGLHPESLAETIFDALHFYAEGDPESEELRALVDEKGYVDAFCEISKLEKDHPLVEIVAKE

SEQ ID NO: 146754 - DNA, 1107 bp, Staphylococcus aureus subsp. aureus NCTC 8325
  CDS (1)..(1107): transl_table=11
atgaaagcagttcactttggtgctggtaacataggtcgtggtttcattggttatattcttgcagacaacaatgttaaagtaacatttgcagacgtcaatgaagaaatcattaatgctttagctcatgatcatcaatacgatgttattttagctgatgagtctaaaacaacgacgcgcgtgaataatgttgatgcaattaattcaatgcaaccttctgaagcgttgaaacaagcaattctagaagctgatattattacaacagctgttggtgttaacatactacctattattgctaaatcttttgcgcctttcttaaaagaaaaaacaaaccatgttaatattgttgcttgtgagaatgctattatggcaactgatacattgaaaaaagcagtacttgatattactggccctcttggtaacaatattcattttgctaactcagcagttgatagaattgtaccattacaaaagaatgaaaatatattagacgttatggttgagccattttacgaatgggttgttgaaaaagatgcatggtatggtccagaactaaaccatattaaatatgttgatgatttaacaccatatattgagcgtaaattattaactgtgaatacaggacatgcatatttagcgtatgctggtaaatttgcaggtaaagctacagttttagatgcagttgaagatagttcaattgaagctggcttacgccgtgttttagctgaaactagtcaatatattactaatgaatttgattttactgaagcggaacaagctggttatgttgaaaaaataatagatcgtttcaacaattcttatttatctgatgaagtaacacgtgtcggacgaggtacattacgtaaaattggccctaaagatagaattataaaaccattaacatatctttataataaagatttagaacgcactggtttattaaatacagctgcattgttattgaagtatgatgatacagcagaccaagaaactgttgagaaaaataattacattaaagaacacggtttaaaagcgtttttaagtgaatatgctaaagttgacgatggcttagccgatgaaataattgaagcgtacaattcactttcataa

SEQ ID NO: 146755 - protein, 368 aa, Staphylococcus aureus subsp. aureus NCTC 8325
MKAVHFGAGNIGRGFIGYILADNNVKVTFADVNEEIINALAHDHQYDVILADESKTTTRVNNVDAINSMQPSEALKQAILEADIITTAVGVNILPIIAKSFAPFLKEKTNHVNIVACENAIMATDTLKKAVLDITGPLGNNIHFANSAVDRIVPLQKNENILDVMVEPFYEWVVEKDAWYGPELNHIKYVDDLTPYIERKLLTVNTGHAYLAYAGKFAGKATVLDAVEDSSIEAGLRRVLAETSQYITNEFDFTEAEQAGYVEKIIDRFNNSYLSDEVTRVGRGTLRKIGPKDRIIKPLTYLYNKDLERTGLLNTAALLLKYDDTADQETVEKNNYIKEHGLKAFLSEYAKVDDGLADEIIEAYNSLS

SEQ ID NO: 146756 - DNA, 1152 bp, Haemophilus somnus 129PT
  CDS (1)..(1152): transl_table=11
atgaacgcattacatttcggagcaggtaatatcggtcgtggttttatcggcaaagtattagctgatagcggagttcaagtaacctttgccgatgtgaatgaagcggtaattgatctattgaaaagacatcaatcttacaacgtgaaaatcgttggcgacagcattaatgcgatggaaagcgtacgtcatgttacgggggtggattcaaaagacacaaatgctttgattgagctgtttaaaacggttgatttagttaccactgctgttggtcctaccgtgttaaaaattatttctggtactatcgccaaaggtattgaagctcgtttagccgcaggcaattttaagccgttaaacattatcgcttgtgaaaatatggttcgtggaacgacctttttaaaagagcaggttttcacacatcttacagaggaattgcaagcagacgctgaaaaatatgtaggtttcgttgatagtgcggtagatcgcattgtgccacctgtgcaagaagatatatcggatcctttgttggtaacagtagaggaattttgtgaatggatcgtagataacacccaattcaaaggtgatattccaaacattcaaggaatggaattaactgataatttgatggcatttgtagagcgtaaattattcaccttgaatacaggacacgccgtgaccgcttatttcggcaaacgcaaaggctatcaattcgtgaaagaaagcattgaagatcccgacatcaaagagtttgtagcggctgtcatgcaagaaagcggtgcagtgttaattcagcgttacggttttgaaccgcaagcacatgccgcttatattgaaaaaattctcaagcgttttgctaatccgtatttagtagataatgtggaacgtgtgggtcgccagcccttacgcaaattaagctacaatgatcgcttaatcaaaccattgcgtggtactattgaatacaatttagctaatcagcatctaattcgtgcaatagcttacgcactgactttccgttgtgaagatgatccgcaagcagtagaattagcacaatctttggcagaaatcggtgtaacagaaacgttgaaaaaatacacggaattgcaagatgtcgttattattgagcaaatagctcaagcctataatgaagtaaaataa

SEQ ID NO: 146757 - protein, 383 aa, Haemophilus somnus 129PT
MNALHFGAGNIGRGFIGKVLADSGVQVTFADVNEAVIDLLKRHQSYNVKIVGDSINAMESVRHVTGVDSKDTNALIELFKTVDLVTTAVGPTVLKIISGTIAKGIEARLAAGNFKPLNIIACENMVRGTTFLKEQVFTHLTEELQADAEKYVGFVDSAVDRIVPPVQEDISDPLLVTVEEFCEWIVDNTQFKGDIPNIQGMELTDNLMAFVERKLFTLNTGHAVTAYFGKRKGYQFVKESIEDPDIKEFVAAVMQESGAVLIQRYGFEPQAHAAYIEKILKRFANPYLVDNVERVGRQPLRKLSYNDRLIKPLRGTIEYNLANQHLIRAIAYALTFRCEDDPQAVELAQSLAEIGVTETLKKYTELQDVVIIEQIAQAYNEVK

SEQ ID NO: 146758 - DNA, 1146 bp, Exiguobacterium sibiricum 255-15
  CDS (1)..(1146): transl_table=11
atgaaagccgttcattttggtgcaggaaatatcggtcggggcttcatcggcttacaattggttaaatcaggttatgatgtctgtttcattgacgtgaatgccgaagtcgtcgaagcgttgaaaacgcgcggggcgtatacggtcggttatgcggcggaagaagcagcggtggaagaggtgtcgcgcgtcacagcattgaacagtcagactgaagccgagcgggtagtcgaagccatcgcgacagccgatgtcgtgacgacagctgtcggaccgacgttgcttgcgagaattgctcccttgcttgcggaaggactcaaacaacggacgacaacccaaaacgtctttgtgatcgcatgtgaaaacatgatcgaaggatccagtcatttgcagcaagaagtgatgcattatcttgagtcaacgccaggcaatgtctttttcccgaatgccgccgtcgaccggattgtcccgttgcaacaccatgaagatccgttatacgtcgaagtcgaaccgtttttcgagtgggttattgagacaaaggcgttaccggatgattatccggtgttcgaaggtgtgacatacgtggcagacatcacaccgttcatcgaacggaaattattcaccgtcaacaccggacatgcgatcgcctcttacctcggtgcattgtttggaaaagagacgattgctgaaagtctgcaggatgtccgtgtccggcgcggcgtacaaagtgccttgtatgaaaccggatggttactgcttgaaaaatatggctttgatccgaaagatcacagcgcctatattcaaaaaaacattaaacgatttgaaaatccgcggattcatgatgaaatcgtccgtgttgcccgttcaccgatccgaaagctcgggccacgcgaccggttggtcaaaccggcccgcgaattaatggaccgtggtatcgaggcgaatggattagctctggggattgctgcggctttaacctactccgatccaaattattcagaatattctgaattaaatacctttattgaacaaaacggcatccaagaaaccgtcgcgacttatctgggactggaagcagacgaacgtctcagtcaactgattgtcagtcagtatgaacagatgcacccgatgagtgattccattgcctga

SEQ ID NO: 146759 - protein, 381 aa, Exiguobacterium sibiricum 255-15
MKAVHFGAGNIGRGFIGLQLVKSGYDVCFIDVNAEVVEALKTRGAYTVGYAAEEAAVEEVSRVTALNSQTEAERVVEAIATADVVTTAVGPTLLARIAPLLAEGLKQRTTTQNVFVIACENMIEGSSHLQQEVMHYLESTPGNVFFPNAAVDRIVPLQHHEDPLYVEVEPFFEWVIETKALPDDYPVFEGVTYVADITPFIERKLFTVNTGHAIASYLGALFGKETIAESLQDVRVRRGVQSALYETGWLLLEKYGFDPKDHSAYIQKNIKRFENPRIHDEIVRVARSPIRKLGPRDRLVKPARELMDRGIEANGLALGIAAALTYSDPNYSEYSELNTFIEQNGIQETVATYLGLEADERLSQLIVSQYEQMHPMSDSIA

SEQ ID NO: 146760 - DNA, 1149 bp, Vibrio sp. Ex25
  CDS (1)..(1149): transl_table=11
atgaaaaacgcagttcattttggtgcaggtaacatcggtcgtggtttcatcggtaaactcttagcagacgcagaagtcgaggtcactttcgctgacgttgatgcgccgttggtagaccagctcagccacaaacaagaatacaaagtgaaagtcgtgggcaccgagtgccaaatcgacactgttacccacgtcacagcggtaaactcagccagtgatgacgtgattgatcgcatcgtcaaaaccgatttggttaccacagcggtcggtccaaacgtattagatatcatcgcgaaaaccatcgcgaaaggtatcgccaaacgttttgaagctggtaatgacgcgccacttaacatcatcgcctgtgaaaatatggtgcgtggtaccacacacctaaaaggcgaagtatacaaacatctggatgaatcgctgcacacaaaggcagacgagttggttggctttgttgattcagcagtcgatcgcatcgtgccaccagcagaagccgccaacgatgacccattggaagtgactgttgaaagcttcagcgaatggattgtggatgaacagcaattcaagggcgaaatccctgacatctcaggcatggaaaagaccaacaacctaatggcctttgtcgaacgtaagctgttcaccctaaacacaggtcactgcattaccgcttatttaggttgtttgaaagggcaccgtaccattcgtgaagcaattgaagacccaagcattcatgctgaagtaaaacaagcaatgcaggaaagtggcgaagtattgattcgtcgttacggcttcgaccgtgaaatgcacaatgcctacatcgaaaagattttaggtcgctttgccaacccatatttagtggatgaagtggatcgcgttggacgacaaccaattcgtaaattgggtgcaaatgatagattagtgaagccattactcggtacaatcgagtatggcactgaaaataaaacacttttgaaaggcattgccgctgccttgaagtacactaacgacaccgacccacaagcggtggaactacaaacctcattaaaagccgtgggcgtgaagaaaacgctagcaacgtacactggcctggctgaagacagtgttgaagtggctcaaatagaagcgatttaccaccagctttaa

SEQ ID NO: 146761 - protein, 382 aa, Vibrio sp. Ex25
MKNAVHFGAGNIGRGFIGKLLADAEVEVTFADVDAPLVDQLSHKQEYKVKVVGTECQIDTVTHVTAVNSASDDVIDRIVKTDLVTTAVGPNVLDIIAKTIAKGIAKRFEAGNDAPLNIIACENMVRGTTHLKGEVYKHLDESLHTKADELVGFVDSAVDRIVPPAEAANDDPLEVTVESFSEWIVDEQQFKGEIPDISGMEKTNNLMAFVERKLFTLNTGHCITAYLGCLKGHRTIREAIEDPSIHAEVKQAMQESGEVLIRRYGFDREMHNAYIEKILGRFANPYLVDEVDRVGRQPIRKLGANDRLVKPLLGTIEYGTENKTLLKGIAAALKYTNDTDPQAVELQTSLKAVGVKKTLATYTGLAEDSVEVAQIEAIYHQL

SEQ ID NO: 146762 - DNA, 1164 bp, Escherichia coli B
  CDS (1)..(1164): transl_table=11
atgaaggttaatactatgaaagcattacattttggcgcaggtaatatcggtcgtggctttatcggtaaactgctggcagacgcgggtatccaactgacgtttgccgatgtcaatcaggtggtacttgatgccctgaatgcccgtcatagctatcaggttcatgtggttggtgaaaccgagcaggtagataccgtttccggcgtcgatgctgtcagcagcattggtgatgatgtcgttgatctgattgctcaggtcgatttagtcactaccgccgttggcccggttgtgctggaacgtattgctccggctatcgccaaagggctggtgaaacgtaaagaacaaggtaatgaatccccgctgaacatcatcgcctgtgaaaacatggtacgcggtaccacgcagctgaaaggtcatgtgatgaacgccctaccagaagacgccaaagcgtgggtagaagaacacgttggctttgtcgattccgccgttgaccgcatcgtaccgccttcggcttcggcaactaacgatccgctggaagtgacggtagaaactttcagcgaatggattgtcgataaaacgcagttcaaaggcgcactgccgaacatcccaggcatggagttaaccgacaacctgatggcatttgtcgaacgtaaactcttcaccctgaacacgggtcatgctataaccgcgtacctcggaaaactggccggtcatcagaccattcgtgacgctattctcgacgagaaaatccgcgcggtggtaaaaggtgcgatggaagaaagtggtgcggtactgatcaagcgctacggctttgacgcagacaaacatgcggcgtacatccagaaaatcctcggtcgttttgagaacccgtatctgaaagatgatgtagagcgcgtaggccgtcagccgctgcgtaaactgagtgctggcgaccgtctgatcaagccactgctcggtacgctggaatacagccttccgcacaagaatctgattcaggggattgctggtgcaatgcacttccgcagtgaagatgatccgcaggctcaggaactggcagcactgatcgctgacaaaggtccgcaggcggcgctggcacagatttccggtcttgatgccaacagcgaggttgtatccgaggcggtaaccgcttataaagcaatgcaataa

SEQ ID NO: 146763 - protein, 387 aa, Escherichia coli B
MKVNTMKALHFGAGNIGRGFIGKLLADAGIQLTFADVNQVVLDALNARHSYQVHVVGETEQVDTVSGVDAVSSIGDDVVDLIAQVDLVTTAVGPVVLERIAPAIAKGLVKRKEQGNESPLNIIACENMVRGTTQLKGHVMNALPEDAKAWVEEHVGFVDSAVDRIVPPSASATNDPLEVTVETFSEWIVDKTQFKGALPNIPGMELTDNLMAFVERKLFTLNTGHAITAYLGKLAGHQTIRDAILDEKIRAVVKGAMEESGAVLIKRYGFDADKHAAYIQKILGRFENPYLKDDVERVGRQPLRKLSAGDRLIKPLLGTLEYSLPHKNLIQGIAGAMHFRSEDDPQAQELAALIADKGPQAALAQISGLDANSEVVSEAVTAYKAMQ

SEQ ID NO: 146764 - DNA, 1170 bp, Botrytis cinerea
  CDS (1)..(1170)
atgggtttaaaagcagttcatttcggtgccggcaacatcggtagaggtttcgtggctgaatttcttcacaaatccggctatgaagtcgtcttctgcgatgtcatggacagtatcatcacaaaattacaaaccaccccttcatataaagtcattcaagttggagccgagggtacaagcgaagataccatcaccaattaccgtgcgataaattcgaaaacacatgaagccgatgttattgaggagattcgtacagccgatgtagtaacatgctccgttggcccgaatattctcaagttcattgcaccagttatcgctaaaggtattgatggtcgagccaatgatgcaacccccattgcagtcattgcttgcgaaaatgccattggtgctactgataccctcgcccaacacatcaagggtgaccatactccagaacatcgtctagaggatcaccacgagcgcgcacgatatgcaaactcagccatcgatcgtattgttccagctcaagacccagatgcaggtcttgacgtcaagctcgagaaattttacgagtgggttgttgatcgctcacctttccatgatcacgaacctccagcgattgagggaatcaaatgggtggatgatttaataccatatattgagcgtaaactcttcaccgtcaacactggacacgctgctgctgcataccacgggtattaccatcagaaagctacagtctacgatgctctacaagacgctaagattcttaaggaagtccacaaggcgttggaggagacaagcagtctgatcgtcggcaagcatggcatcgaagtacaagaacaaaaggattatgtcgacaagatcattactagaataggaaacccacatctagaagatgcagtggaacgagttggtcgtgcacccctacgaaaattgagcaggaaggaaagatttattgctcctgcagccgaacttgcggaagaaggaaaagaattcggtgcattattagacgctgctgagatggctttccgtttccagaacgttgaaggtgatgaggaatccaaggaattggccaagattatgtcggaaaacccaccagcacaagttgtggagaaggtctgcgggttgcagtcggaccatccattattccctcatgtagtagccgtcgttaagaaggttcaagccgatgagtag

SEQ ID NO: 146765 - protein, 389 aa, Botrytis cinerea
MGLKAVHFGAGNIGRGFVAEFLHKSGYEVVFCDVMDSIITKLQTTPSYKVIQVGAEGTSEDTITNYRAINSKTHEADVIEEIRTADVVTCSVGPNILKFIAPVIAKGIDGRANDATPIAVIACENAIGATDTLAQHIKGDHTPEHRLEDHHERARYANSAIDRIVPAQDPDAGLDVKLEKFYEWVVDRSPFHDHEPPAIEGIKWVDDLIPYIERKLFTVNTGHAAAAYHGYYHQKATVYDALQDAKILKEVHKALEETSSLIVGKHGIEVQEQKDYVDKIITRIGNPHLEDAVERVGRAPLRKLSRKERFIAPAAELAEEGKEFGALLDAAEMAFRFQNVEGDEESKELAKIMSENPPAQVVEKVCGLQSDHPLFPHVVAVVKKVQADE

SEQ ID NO: 146766 - DNA, 1176 bp, Aspergillus oryzae
  CDS (1)..(1176)
atgggtaaaaaggctatccagtttggcggtggaaacattggccgtggctttgtggctgagtttctccacgctgccggctatgaagtcgtcttcattgatgtcatggatagcgtcatcaactctttgcaacagaccccgtcgtacgacgtcacggaggtcagcgaagagggtgaaagcaccaagaccatcaccaactatcgcgccatcaactccaagacgcatgaggccgacgtcgttcaggagatcgcatcggcagatgtggttacctgtgctgtcggtcccaacatccttaagttcatcgcgccagtcattgccaaaggtattgatgcgcgcaccgaagagagacccgtggctgtgatcgcctgtgagaacgctatcggcgctacagataccttgcacggctacatcaagcagcacaccaaccctgaccgtctggagaccctctctgagcgtgcccgttttgccaactcggctatcgaccgcatcgtccccaaccagcccccgaacagtggtctcaatgttcgcatcgagaagttctacgagtgggccgtggagaagactccatttggcgaatggggtcaccccgacatccctgccatccactgggtggaccacctcgaaccttacatcgaacgcaagctcttcaccgtcaacactggccatgctaccaccgcctactatgctcacaagcgtggcaagaagatgatcgccgaggccctcgaagacccagagatccgcgagactgtgcacaaggtgctcgaggagactgcttccctcattgtatccaagcatgagatctcggagcaggagcagaaggaatacgttgacaagattgtcagccgtatctccaacccctatctcgaggacaacgttgagcgtgtgggacgtgctcctctccgcaaactgtctcgcaaggaacggttcattggacctgcttcgcagctcgcagagcgcggccagaagttcgatgctctcctgggcgccatcgagatggctcttcgcttccagaacgtcccaggcgacgaggagagttccgagcttgctcgcattttgaaggagaactcggccgaggatgccacctcgcagctcaccggattggagaaagaccacccactctactctcatgtggttgagcgtgtgtccacggtccagcaaggctccaaatcagtgctgtga

SEQ ID NO: 146767 - protein, 391 aa, Aspergillus oryzae
MGKKAIQFGGGNIGRGFVAEFLHAAGYEVVFIDVMDSVINSLQQTPSYDVTEVSEEGESTKTITNYRAINSKTHEADVVQEIASADVVTCAVGPNILKFIAPVIAKGIDARTEERPVAVIACENAIGATDTLHGYIKQHTNPDRLETLSERARFANSAIDRIVPNQPPNSGLNVRIEKFYEWAVEKTPFGEWGHPDIPAIHWVDHLEPYIERKLFTVNTGHATTAYYAHKRGKKMIAEALEDPEIRETVHKVLEETASLIVSKHEISEQEQKEYVDKIVSRISNPYLEDNVERVGRAPLRKLSRKERFIGPASQLAERGQKFDALLGAIEMALRFQNVPGDEESSELARILKENSAEDATSQLTGLEKDHPLYSHVVERVSTVQQGSKSVL

SEQ ID NO: 146768 - DNA, 1173 bp, Phaeosphaeria nodorum
  CDS (1)..(1173)
atgccttacgacaagaaggctgttcacttcggcggtggcaacatcggccgtggcttcgttgccgagttccttcacaactctggctacgaggtcgtgttcgtcgatgtcatggacagcatcattgaggctctccagaagcagtcgtcgtacaccgtcaccgagattggcgacgatggcgagcgcgagttcaccatcgaccactaccgcgcgctcaactccaagcacgagatggacaaggtcgtccaggagatcgcttccgccgatgtcgtcacctgcgctgtcggccccaacatcctcaagttggtcgccgagcccgtcgccaaggccattgacgcccgcacactcgactaccccatcgccgtcattgcttgcgagaacgccatcaacgccacaaccacatggaggggcttcatcgagggcaagctgagcgaggactccaagagcaacctcgacaagaaggcccgtttcgccaactcggctattgaccgtattgtgcccgttcaggataaggatgccggcctcaacgtcaagatcgagaagttctacgagtggtgcgttgagcagaagccattcgagaacggtggcaagaagcctgatgtcaagggcatccactacgtcgatgacctcgagccctacattgagcgcaagctgttcaccgtcaacacctcgcacgccaccgctgcctactatggccaccaggcgaagaagcagtacatccacgaggtcctccaggacaagaagctccacgacattgtccgtgacgctgtcaaggagactgctcacctcatcgtcagcaagcacggtgtctccgtccaggagcagaacgactatgtcgactccatcatcaagcgtatctctaaccctgtcctgaaggacaacgtcaagcgcgtcggacgtgcgcccctccgcaagctttcccgcaaggagcgttttgtcggcccagctgctcagctcgctgagcgcggcgagaaggttgatgctctcctaggtgccattgagcaggcatacctcttccagaacgttgagggtgacgaggagtctgctgagttggccaagatcctcaaggagaactccgccgaggaggttgtcaccaaggtcaacggtcttgacaagtcacacccgctcttcgagaagatcctcccgatcgtcaagaaggttcagggtggcagctga

SEQ ID NO: 146769 - protein, 390 aa, Phaeosphaeria nodorum
MPYDKKAVHFGGGNIGRGFVAEFLHNSGYEVVFVDVMDSIIEALQKQSSYTVTEIGDDGEREFTIDHYRALNSKHEMDKVVQEIASADVVTCAVGPNILKLVAEPVAKAIDARTLDYPIAVIACENAINATTTWRGFIEGKLSEDSKSNLDKKARFANSAIDRIVPVQDKDAGLNVKIEKFYEWCVEQKPFENGGKKPDVKGIHYVDDLEPYIERKLFTVNTSHATAAYYGHQAKKQYIHEVLQDKKLHDIVRDAVKETAHLIVSKHGVSVQEQNDYVDSIIKRISNPVLKDNVKRVGRAPLRKLSRKERFVGPAAQLAERGEKVDALLGAIEQAYLFQNVEGDEESAELAKILKENSAEEVVTKVNGLDKSHPLFEKILPIVKKVQGGS

SEQ ID NO: 146770 - DNA, 1122 bp, Halobacterium salinarium
  CDS (1)..(1122): transl_table=11
atgaaagcattacattttggcgcaggtaatactggtcgtggctttatcggtaaactgctggcggacgcgggtatccaactgacgtttgccgatgtaaatcaggtggtacttgatgccctgaatgcccgtcatagctatcaggttcatgtggtcggcgaaaccgagcaggtggataccgtttctggcgtcgatgccgtcagcagcattggcgatgatgtcgttgatctgattgctcaggtcgatttagtcactaccgccgttggccctgtcgtgctggaacgtattgctccggtcatcgccaaagggctggtgaaacgtaaagaacaaggtaatgaatccccactgaacatcatcgcctgtgaaaacatggtccgcggcaccacgcagctgaaaggccatgtgatgaacgccctgccggaagatgccaaagcgtgggtagaagaacacgttggctttgttgattccgccgttgaccgcatcgtaccgccttcggcttcggcaactaacgatccgctggaagtgacggtagaaaccttcagcgaatggattgtcgataaaacgcagttcaaaggcacgctgccaaacatcccgtgcatggaattaaccgacaatctgatggcatttgtcgaacgtaaactcttcaccctgaatacaggtcatgctataaccgcgtacctcggaaaactggccggtcatcagaccattcgtgacgcaattctcgacgagaaaatcctcgcggtggtaaaaggggcaatggaagaaagcggcgcggtactgatcaagcgctactttgatgctgacaaacatgcggcatacatccagaaaatcctcggtcgtttcgagaacccgtacctgaaagatgatgtagaacgcgtaggccgtcagccgctgcgtaaactgagtgctggcgaccgtctgatcaagccactgctcggaaccctggaatatggtctgccacataaaaacctgattagaaggattgccgctgcaatgcacttccgcagtgaagatgacccgcaggctcaggaactggcagcgctgattgccgacaaaggcccacaagccgcgctggcacagatttccggtcttgatgccaacagcgaccttgtatccgagcggtaa

SEQ ID NO: 146771 - protein, 373 aa, Halobacterium salinarium
MKALHFGAGNTGRGFIGKLLADAGIQLTFADVNQVVLDALNARHSYQVHVVGETEQVDTVSGVDAVSSIGDDVVDLIAQVDLVTTAVGPVVLERIAPVIAKGLVKRKEQGNESPLNIIACENMVRGTTQLKGHVMNALPEDAKAWVEEHVGFVDSAVDRIVPPSASATNDPLEVTVETFSEWIVDKTQFKGTLPNIPCMELTDNLMAFVERKLFTLNTGHAITAYLGKLAGHQTIRDAILDEKILAVVKGAMEESGAVLIKRYFDADKHAAYIQKILGRFENPYLKDDVERVGRQPLRKLSAGDRLIKPLLGTLEYGLPHKNLIRRIAAAMHFRSEDDPQAQELAALIADKGPQAALAQISGLDANSDLVSER

SEQ ID NO: 146772 - DNA, 1128 bp, Escherichia coli
  CDS (1)..(1128): transl_table=11
atgaaagcattacattttggcgcaggtaatatcggtcgtggcgttatcggtaaactgctggcagacgcgggtatccaactgacgtttgccgatgtcaatcaggtggtacttgatgccctgaatgcccgtcatagctatcaggtacatgtggttggtgaaaccgagcaggtagataccgtttccggcgtcaatgctgtcagcagcattggtgatgatgtcgttgatctgattgctcaggttgatttagtcactaccgccgttggcccggttgtgctggaacgtattgctccggcaatcgccaaagggcaggtgaaacgtaaagaacaaggtaatgaatccccgctgaacatcatcgcctgtgaaaacatggtacgcgttaccacgcagctgaaaggccatgtgatgaagcccctgccggaagacgccaaagcgtgggtagaagaacacgttggctttgtcgattccgccgttgaccgcatcgtaccgccttcggcttcggcaactaacgatccgctggaagtgacggtagaaaccttcagcgaatggattgtcgataaaacgcagttcaaaggcgcactgccgaacatcccaggcatggagttaaccgacaacctgatggcatttgtcgaacgtaaactcttcaccctgaacacgggtcatgctataaccgcgtacctcggaaaactggccggtcatcagaccattcgtgacgcgattctcgacgagaaaatccgcgcggtggtaaaaggtgcgatggaagaaagtggtgcagtattgatcaagcgctacggctttgacgctgacaagcatgcggcgtacatccagaaaattctcggccgttttgagaacccgtatctgaaagatgatgtagagcgcgtaggccgtcagccactgcgtaaactgagtgctggcgaccgtctgatcaagccactgctcggtacgctggaatatggtctgccacataaaaacctgattgaaggtattgccgctgcaatgcacttccgcagtgaagatgatccgcaggctcaggaactggcagcactgatcgctgacaaaggtccgcaggcggcgctggcacatgatttcctggtcttgactgccaacagcgaccttgtatccgagcggtaa

SEQ ID NO: 146773 - protein, 375 aa, Escherichia coli
MKALHFGAGNIGRGVIGKLLADAGIQLTFADVNQVVLDALNARHSYQVHVVGETEQVDTVSGVNAVSSIGDDVVDLIAQVDLVTTAVGPVVLERIAPAIAKGQVKRKEQGNESPLNIIACENMVRVTTQLKGHVMKPLPEDAKAWVEEHVGFVDSAVDRIVPPSASATNDPLEVTVETFSEWIVDKTQFKGALPNIPGMELTDNLMAFVERKLFTLNTGHAITAYLGKLAGHQTIRDAILDEKIRAVVKGAMEESGAVLIKRYGFDADKHAAYIQKILGRFENPYLKDDVERVGRQPLRKLSAGDRLIKPLLGTLEYGLPHKNLIEGIAAAMHFRSEDDPQAQELAALIADKGPQAALAHDFLVLTANSDLVSER

SEQ ID NO: 146774 - DNA, 1173 bp, Alternaria alternata
  CDS (1)..(1173)
atgtcctacgagaagaaggcagtacactttggcggtggtaacatcggccgtggcttcgtcgccgagttccttcacaactctggctacgaggtcgtcttcgtcgacgtcatggacagcatcatcgagtccctccagaagaccaaaacatacactgtcaccgagattggtgacgacggcgagcgcaagttcaccatcgaccactaccgtgctatcaactccaagcacgagatggacaaggtcgttcaggagattgctagcgccgacgtcgtcacctgcgctgtcggccccaacatcctcaagttcgtcgctgagcccgtcgccaaggctatcgaggcccgtacgctcgactaccccatcgccgtcatcgcctgcgagaacgccatcaatgctacaaccacatggagagggttcattgagagcaagctgagcgaagagaccaagaagaacatcgacagcaaggctcgctttgccaactctgctatcgaccgcattgtcccacagcaaccccccaatggcggcctagatgttgtcatcgagaagttccacgagtggtgtgtcgagcagaagcctttcgagaacggcggcaagaagccggatgttaagggtatccactacgtcgacgacctcgagccctacatcgagcgcaagctcttcactgtcaacacctctcacgctactgccgcctactacggacaccagaacaaggtccaatacatccatgaggttcttcatgacaagaagctccacgacaccgtccgtgacgctgtcaaggagactgcccatctaatcgtcaccaagcacggcgttgagacagctgagcaagatgcatacgttgaggaaatcatcaagcgtatttccaaccctgttctcaaggacaatgtcgagcgtgtcggtcgcgctcccctccggaaactctctcgcaaggagcgcttcattggtcccgccgctcagctggctgagaggggtgagaaggttgatgccctcctcggcgccgtcgagcaggcctaccgcttccagaacgttgagggcgatgaggaatctgtcgaacttgccaagatccttaaggagaactccgctgaggaggttgtcactaaggtcaacggtattgagaagggacagcccctcttcgaccgtcttgtcgccatcgtcaagaaggtccagggaggtagctga

SEQ ID NO: 146775 - protein, 390 aa, Alternaria alternata
MSYEKKAVHFGGGNIGRGFVAEFLHNSGYEVVFVDVMDSIIESLQKTKTYTVTEIGDDGERKFTIDHYRAINSKHEMDKVVQEIASADVVTCAVGPNILKFVAEPVAKAIEARTLDYPIAVIACENAINATTTWRGFIESKLSEETKKNIDSKARFANSAIDRIVPQQPPNGGLDVVIEKFHEWCVEQKPFENGGKKPDVKGIHYVDDLEPYIERKLFTVNTSHATAAYYGHQNKVQYIHEVLHDKKLHDTVRDAVKETAHLIVTKHGVETAEQDAYVEEIIKRISNPVLKDNVERVGRAPLRKLSRKERFIGPAAQLAERGEKVDALLGAVEQAYRFQNVEGDEESVELAKILKENSAEEVVTKVNGIEKGQPLFDRLVAIVKKVQGGS

SEQ ID NO: 146776 - DNA, 1167 bp, Paracoccidioides brasiliensis
  CDS (1)..(1167)
atgggaaaaaaggcagtgcactttggaggtggcaacattggccgtggattcgttggggagttcctccatgagtctggctatgaagtcgtctttgtcgatgttatggacagcgtcatagatgctctccagaaagcctcatcatacacggtcacggaaatcagtggagaaggcgaacacaagaaagtcatcgagaattatcgggccatcaactccaaacacaatctcgacgacgtcatcaaggagatatccactgccgatgtcgtcacttgtgctgttggccctaacattctgaagttcatcgccccacccatcgccaagggtatcgatattcgaacccagcccaagccactggctgtgattgcctgcgaaaacgcaatcggtgccaccgacactctacatggcttcatcaaggacaacactgacgaatcccgtcgtgactctctccccagccgtgcccagttcgccaactccgctatcgaccgcattgtgcccacccaggaccccaattccggtcttgacgtcaaaatcgaaaagttttacgagtgggtcgtggaaaagactccctttggcgacgtcgggcacccggatatcaaggctatccactgggtggacaatctggaaccttacattgagcgcaagctgttcaccgtcaacaccggccatgcaaccgctgcctacttcggctataatgctggcaaaccgacaatccacgatgcgttgaaggacgagagaatccggagccaagtcaacgcggtcctggcagagacctcagccctgatcgtcgagaagcaccacatcccggccgaagaacaacacgattacgtccagaagatcatcacccgcatctctaacccgtatctcgaagacgtcgtgcagcgtgttggacgtgctccgctccgcaagctgtctcgcaaggaacgcttcatcggaccagctgcccagctcgctgagcgtggacaacaggtcgacgcgttgatgggagcggtcgaggaggcgttgaagttccagaacgtgcctgatgacgaggagagtttcgagctgcacaagatcctgaaggagctgtccgccgcagacgcaacgaccaaactgacagacctggagccagatcacccgctgtacccgcgcgttctcgagaaagtgaccaaggtccaaagcgaaacgaagtag

SEQ ID NO: 146777 - protein, 388 aa, Paracoccidioides brasiliensis
MGKKAVHFGGGNIGRGFVGEFLHESGYEVVFVDVMDSVIDALQKASSYTVTEISGEGEHKKVIENYRAINSKHNLDDVIKEISTADVVTCAVGPNILKFIAPPIAKGIDIRTQPKPLAVIACENAIGATDTLHGFIKDNTDESRRDSLPSRAQFANSAIDRIVPTQDPNSGLDVKIEKFYEWVVEKTPFGDVGHPDIKAIHWVDNLEPYIERKLFTVNTGHATAAYFGYNAGKPTIHDALKDERIRSQVNAVLAETSALIVEKHHIPAEEQHDYVQKIITRISNPYLEDVVQRVGRAPLRKLSRKERFIGPAAQLAERGQQVDALMGAVEEALKFQNVPDDEESFELHKILKELSAADATTKLTDLEPDHPLYPRVLEKVTKVQSETK

SEQ ID NO: 146778 - DNA, 1149 bp, Dunaliella bardawil
  CDS (1)..(1149)
atgaaagcattacattttggcgcaggtaatatcggtcgtggctttatcggtaaactgctggcagacgcgggtatccaactgacgtttgccgatgtcaatcaggtggtacttgatgccctgaatgcccgtcatagctatcaggtacatgtggttggtgaaaccgagcaggtagataccgtttccggcgtcaatgctgtcagcagcattggtgatgatgtcgttgatctgattgctcaggttgatttagtcactaccgccgttggcccggttgtgctggaacgtattgctccggcaatcgccaaagggctggtgaaacgtaaagaacaaggtaatgaatccccgctgaacatcatcgcctgtgaaaacatggtacgcggtaccacgcagctgaaaggccatgtgatgaacgccctgccggaagacgccaaagcgtgggtagaagaacacgttggctttgtcgattccgccgttgaccgcatcgtaccgccttcggcttcgacaactaacgatccgctggaagtgacggtagaaactttcagcgaatggattgtcgataaaacgcagttcaaaggcgcactgccgaacatcccaggcatggagttaaccgacaacctgatggcatttgtcgaacgtaaactcttcaccctgaacacgggtcatgctataaccgcgtacctcggaaaactggccggtcatcagaccattcgtgacgcgattctcgacgagaaaatccgcgcggtggtaaaaggtgcgatggaagaaagtggtgcagtattgatcaagcgctacggctttgacgctgacaagcatgcggcgtacatccagaaaatcctcggtcgttttgagaacccgtatctgaaagatgatgtagagcgcgtaggccgtcagccgctgcgtaaactgagtgctggcgaccgtctgatcaagccactgctcggtacgctggaatatggtctgccacataaaaacctgattgaaggtattgccgctgcaatgcacttccgcagtgaagatgatccgcaggctcaggaactggcagcactgatcgctgacaaaggtccgcaggcggcgctggcacagatttccggtcttgatgccaacagcgaggttgtatccgaggcggtaaccgcttataaagcaatgcaataa

SEQ ID NO: 146779 - protein, 382 aa, Dunaliella bardawil
MKALHFGAGNIGRGFIGKLLADAGIQLTFADVNQVVLDALNARHSYQVHVVGETEQVDTVSGVNAVSSIGDDVVDLIAQVDLVTTAVGPVVLERIAPAIAKGLVKRKEQGNESPLNIIACENMVRGTTQLKGHVMNALPEDAKAWVEEHVGFVDSAVDRIVPPSASTTNDPLEVTVETFSEWIVDKTQFKGALPNIPGMELTDNLMAFVERKLFTLNTGHAITAYLGKLAGHQTIRDAILDEKIRAVVKGAMEESGAVLIKRYGFDADKHAAYIQKILGRFENPYLKDDVERVGRQPLRKLSAGDRLIKPLLGTLEYGLPHKNLIEGIAAAMHFRSEDDPQAQELAALIADKGPQAALAQISGLDANSEVVSEAVTAYKAMQ

SEQ ID NO: 146780 - DNA, 1167 bp, Aspergillus niger
  CDS (1)..(1167)
atgggaaagaaggctatccagttcggcggtggtaacatcggccgtggcttcgtcgccgaattcctccacaaggcgggctacgaagtagtcttcgtcgatgtcatggacaagatggtcgaggctctgcagcagaacaagtcgtacaaggtgaccgaggtcagtgaggagggtgagcacacaacgactatcaccaactaccgtgccatcaactccaagacccacgagagcgacgtcattcaagagattgcgacggctgatgtcgtgacctgtgccgtgggcccccacattctcaagttcatcgcccctgtcattgccaagggtatcgatgctcgcacagagtctaagcctgtcgctgttattgcctgtgagaatgccattggcgctaccgacaccctgcacggcttcatcaagcagcacaccagccaggaccgcgttgaatccctgtatgaccgcgctcagtttgccaactctgccattgaccgcatcgtccctcagcaagcccccaacagtggcctcgacgtccgcattgagaagttctacgaatgggctgtcgagaagactccctttggctctgtcggccacccagacattcctgccattcactgggtcgacaacctggagccttacattgagcgcaaattgttcactgtcaacaccagccatgctactactgcctactttggacacttccggggcaagaagatgattgccgacgctctggaggacgaggagatccgtggacttgttcacaaggttctcgaggagactgcctcactcatcgtggctaagcacgacatctcggaggaggagcagaaagagtatgtcaagaagatcgttagccgcatctctaacccctatctggaggacaaggtcgaacgtgtgggccgtgctcccctgcgcaagctgtctcgcaaggaacggttcattggaccggcttcgcagctggccgagcgcggcatgaagtatgactccttgatggatgctgtcgagatggctctgcgcttccagaacgtgcctggtgacgacgagagtgcggagctcgccaacattctcaacgaacagcgggctgaagatgccaccatccacctcaccggcctggatgaggaacacccactgtatcctgccgtgctagagcgggtgcgcaaggtgcagcaggggacgaagtaa

SEQ ID NO: 146781 - protein, 388 aa, Aspergillus niger
MGKKAIQFGGGNIGRGFVAEFLHKAGYEVVFVDVMDKMVEALQQNKSYKVTEVSEEGEHTTTITNYRAINSKTHESDVIQEIATADVVTCAVGPHILKFIAPVIAKGIDARTESKPVAVIACENAIGATDTLHGFIKQHTSQDRVESLYDRAQFANSAIDRIVPQQAPNSGLDVRIEKFYEWAVEKTPFGSVGHPDIPAIHWVDNLEPYIERKLFTVNTSHATTAYFGHFRGKKMIADALEDEEIRGLVHKVLEETASLIVAKHDISEEEQKEYVKKIVSRISNPYLEDKVERVGRAPLRKLSRKERFIGPASQLAERGMKYDSLMDAVEMALRFQNVPGDDESAELANILNEQRAEDATIHLTGLDEEHPLYPAVLERVRKVQQGTK

SEQ ID NO: 146782 - DNA, 1149 bp, Bacillus stearothermophilus
  CDS (1)..(1149): transl_table=11
atgttagcagttcatttcggtgctggaaatatcggaagaggatttatcgggagtttgctttcacagtcgggctatgaagtagtgtttgtggatattaatgatgaattggttcgtttattaaaggaaaaacaggagtatcgtgtgatcattgccgatgaaaatagacaagaactgctgattcgcaacgtttccgctgtcaatagtcaaacggaacgtgaaaaggtcattgactatatcacaaaggctcatcttattacaacggcggtcgggccgcatattttaccggccatcgccacgattcttgctgaggggctgcaaaaaagaatcacgatcaataaaacaccgcttcatattattgcttgtgaaaatatgatcggtggaagtgatgtgttaaaaagccatgtctttgaaaagatttctgaagcagataaaccgttgttcgaaaagtattacggttttctgaattgtgcggtagaccgtatcgttccaaatcaaaaacacgacgatcctctctccgttgtggtcgagccatttttcgaatgggtgatcgaaaagagaaatattattggtgctatcccgccgattcaaggagctcattttgttgatgatttaaagccttatattgaacgcaagctttttaccgtaaataccgggcatgcgattgccagctacttaggatactataaaaaattacaaacgatacaagaagcaatgtgtgatcaagaaatacgttcggacgtggaaaaagcgctgcatgaatcaggtgcggtgttagtaaagaaatatggatggaatgaaaacgaacatcaatcctatattcaaaaaatcattcaacgctttataaatccttccatctcagatgaagtagtccgtgttgctcgttctccaattcgcaaacttggggcgaatgaccgtcttattggaccggctacgcaatattatgacttgttcggacaagtaccacatggtttagtcaaaggaattgccgcgttgttattgtttgattatgagaacgacgaggaagcagttgcattgcaaaaaaccattcaagaaacaggagtagaaggggctctataccaatattcacaattagaaaaagatcatcctcttgttatagcaataaaagatcaatggcagcatttaaagtaa

SEQ ID NO: 146783 - protein, 382 aa, Bacillus stearothermophilus
MLAVHFGAGNIGRGFIGSLLSQSGYEVVFVDINDELVRLLKEKQEYRVIIADENRQELLIRNVSAVNSQTEREKVIDYITKAHLITTAVGPHILPAIATILAEGLQKRITINKTPLHIIACENMIGGSDVLKSHVFEKISEADKPLFEKYYGFLNCAVDRIVPNQKHDDPLSVVVEPFFEWVIEKRNIIGAIPPIQGAHFVDDLKPYIERKLFTVNTGHAIASYLGYYKKLQTIQEAMCDQEIRSDVEKALHESGAVLVKKYGWNENEHQSYIQKIIQRFINPSISDEVVRVARSPIRKLGANDRLIGPATQYYDLFGQVPHGLVKGIAALLLFDYENDEEAVALQKTIQETGVEGALYQYSQLEKDHPLVIAIKDQWQHLK

SEQ ID NO: 146784 - DNA, 1101 bp, Bacillus subtilis
  CDS (1)..(1101): transl_table=11
atgatcgccttacatttcggtgcgggaaatatcgggagaggatttatcggcgcgctgcttcaccactccggctatgatgtggtgtttgcggatgtgaacgaaacgatggtcagcctcctcaatgaaaaaaaagaatacacagtggaactggcggaagagggacgttcatcggagatcattggcccggtgagcgctattaacagcggcagtcagaccgaggagctgtaccggctgatgaatgaggcggcgctcatcacaacagctgtcggcccgaatgtcctgaagctgattgccccgtctatcgcagaaggtttaagacgaagaaatactgcaaacacactgaatatcattgcctgcgaaaatatgattggcggaagcagcttcttaaagaaagaaatatacagccatttaacggaagcagagcagaaatccgtcagtgaaacgttaggttttccgaattctgccgttgaccggatcgtcccgattcagcatcatgaagacccgctgaaagtatcggttgaaccatttttcgaatgggtcattgatgaatcaggctttaaagggaaaacaccagtcataaacggcgcactgtttgttgatgatttaacgccgtacatcgaacggaagctgtttacggtcaataccggacacgcggtcacagcgtatgtcggctatcagcgcggactcaaaacggtcaaagaagcaattgatcatccggaaatccgccgtgttgttcattcggcgctgcttgaaactggtgactatctcgtcaaatcgtatggctttaagcaaactgaacacgaacaatatattaaaaatcagcggtcgcttttaaaatcctttcatttcggacgatgtgacccgcgtagcgaggtcacctctcagaaaactgggagaaaatgtagacttgtaggcccggcaaagaaaataaaagaaccgaatgcactggctgaaggaattgccgcagcactgcgcttcgatttcaccggtgaccctgaagcggttgaactgcaagcgctgatcgaagaaaaggatacagcggcgtacttcaagaggtgtgcggcattcagtcccatgaaccgttgcacgccatcattttaa

SEQ ID NO: 146785 - protein, 366 aa, Bacillus subtilis
MIALHFGAGNIGRGFIGALLHHSGYDVVFADVNETMVSLLNEKKEYTVELAEEGRSSEIIGPVSAINSGSQTEELYRLMNEAALITTAVGPNVLKLIAPSIAEGLRRRNTANTLNIIACENMIGGSSFLKKEIYSHLTEAEQKSVSETLGFPNSAVDRIVPIQHHEDPLKVSVEPFFEWVIDESGFKGKTPVINGALFVDDLTPYIERKLFTVNTGHAVTAYVGYQRGLKTVKEAIDHPEIRRVVHSALLETGDYLVKSYGFKQTEHEQYIKNQRSLLKSFHFGRCDPRSEVTSQKTGRKCRLVGPAKKIKEPNALAEGIAAALRFDFTGDPEAVELQALIEEKDTAAYFKRCAAFSPMNRCTPSF

SEQ ID NO: 146786 - DNA, 1158 bp, Buchnera aphidicola subsp
  CDS (1)..(1158): transl_table=11
atgaaagcactacaatttggagctggcaatattggtcgtggttttattggaaaaacactatcagaatcaggttttagtgttattttttctgatgttaatcaaaatatagtagatgctattaattataatagagaatattttgttaaaataataggttctaatcaaaataaaaccgtcaatatcaaaagagtcagtgctataaattcaaacgattcaaatataaaaaaaataatttcttcagttgatttaattacaactgccgtaggtcccactgcattagaaaaaattgctttgattattacgcaaggaataatattcaaaattaaaaatcaatttacaaaaccactcaatattattgcttgtgaaaacaagattaaatcaagttcttttttaaaacaagtagttctcaaaaatttacctataaaatatcatgattatttaaataaatatatcggcttcatagattgcagtattgatacaattatacctgcaattaataataaagatgatttgtttttaactgttgaggaatttaaagaatggattgtaaatattaatcaatttaaaggagcagtcccaaaaatagttgatatgaaattcagtaataatttagatgcttttatagagagaaaattatttacattgaatacaggacatgctatagcggcttatcttggtttaataaaaaactataaaactatacaggatgctatatcagacaaaaaaatacgtgttatcgtaagatctgccatggaagaaagtggatcagtgttaataaaacgttataatttcaacaaaaatgatcatttagattatattgaaaaaatttttttgcgttttgaaaacccttttttatcagataaacttgaacgtataggaagaaatccattacaaaaattaagaagagaagatcgcttaattaaaccttttttgggtgcctttgagtacaatctcccttattctaatttagcaaaaggtattgcagcagcattttattaccataataaaaatgatttggaatcaatagagctttcatcttcaataaaaaaacaaggtttagaaagtactataattaaaatttgtgatttacctgtaaatagcaaagaagtctattctattattttagaatataatttaattaaaaaaataattagatga

SEQ ID NO: 146787 - protein, 385 aa, Buchnera aphidicola subsp
MKALQFGAGNIGRGFIGKTLSESGFSVIFSDVNQNIVDAINYNREYFVKIIGSNQNKTVNIKRVSAINSNDSNIKKIISSVDLITTAVGPTALEKIALIITQGIIFKIKNQFTKPLNIIACENKIKSSSFLKQVVLKNLPIKYHDYLNKYIGFIDCSIDTIIPAINNKDDLFLTVEEFKEWIVNINQFKGAVPKIVDMKFSNNLDAFIERKLFTLNTGHAIAAYLGLIKNYKTIQDAISDKKIRVIVRSAMEESGSVLIKRYNFNKNDHLDYIEKIFLRFENPFLSDKLERIGRNPLQKLRREDRLIKPFLGAFEYNLPYSNLAKGIAAAFYYHNKNDLESIELSSSIKKQGLESTIIKICDLPVNSKEVYSIILEYNLIKKIIR

SEQ ID NO: 146788 - DNA, 1155 bp, Clostridium acetobutylicum
  CDS (1)..(1155): transl_table=11
atgaaagcacttcattttggagcaggaaacataggaagaggttttataggttatttactgtataagtctaattacgaaactaccttcgttgatatatttgataaagtagtggatgatatcaataaatataaaagatatacagtaataactttgagtacatctaagaataaggagaaagttgagaatgtacgagcagtcaatttgaaagatagtgttgctcttgaaaaagaagttttagaagctgatttaataactacatcattaggattaaataatttaaaaagtacaggagagcttttaagaggattccttaaaaagagatcagaaatcaatgacaagccacttgatataatagcatgtgaaaatgcactatttgcaagtgatgtactaaaaaaagctatacttgatggtgcagatgaagagttgaaaaaatacttggaaaaaagtgttggatttccaaattgtacagttgataggattgtgccaaatgtggacatagaaaaagaattgcctatagatgtagcagtagaagatttttatgaatgggatatagaaaaaaataaggttaaaattaataacaagataattggtgcagaatatgttgaaaaattagacccttatcttgaaagaaagttattccttttaaatggtgcacatgctacaattgcatatttaggatatcttaaaggatataaatatatacatgaagctataaaagataaggaaattaataagattatagttggttttcatagcgaagcggtacaagctcttagtgaaaagcataaaatagatatacaaatcttaaaggaatattctaataaacttctaaagagatttgaaaatgaatacttaaaggacgatgtaagtcgtgtaggtagagatccgatgagaaaattatcgtctaatgatagattgataactcctttaaaattatgttgcgatttgaaaatagattttactaatatattatttggagttgcttctggatatctatttaattataaagaggatgaaaaagctcaaggaattcaaaacataataactaaagagggaattaaaaaagctatttcaaatgtatctcaaataaaagaaggagattatttgaataatatgatagcgtacaagtatgaggagctaaaaaagcaaaattaa

SEQ ID NO: 146789 - protein, 384 aa, Clostridium acetobutylicum
MKALHFGAGNIGRGFIGYLLYKSNYETTFVDIFDKVVDDINKYKRYTVITLSTSKNKEKVENVRAVNLKDSVALEKEVLEADLITTSLGLNNLKSTGELLRGFLKKRSEINDKPLDIIACENALFASDVLKKAILDGADEELKKYLEKSVGFPNCTVDRIVPNVDIEKELPIDVAVEDFYEWDIEKNKVKINNKIIGAEYVEKLDPYLERKLFLLNGAHATIAYLGYLKGYKYIHEAIKDKEINKIIVGFHSEAVQALSEKHKIDIQILKEYSNKLLKRFENEYLKDDVSRVGRDPMRKLSSNDRLITPLKLCCDLKIDFTNILFGVASGYLFNYKEDEKAQGIQNIITKEGIKKAISNVSQIKEGDYLNNMIAYKYEELKKQN

SEQ ID NO: 146790 - DNA, 1149 bp, Escherichia coli O157
  CDS (1)..(1149): transl_table=11
atgaaagcattacattttggcgcaggtaatatcggtcgtggctttatcggtaaactgctggcagacgcgggtatccaactgacgtttgccgatgtcaatcaggtggtacttgatgccctgaatgcccgtcatagctatcaggttcatgtggtcggtgaaaccgagcaggtagataccgtttccggcgtcgatgctgtcagcagcattggtgatgatgtcgttgatctgattgctcaggtcgatttagtcactaccgccgttggcccggttgtgctggaacgtattgctccggctatcgccaaagggctggtgaaacgtaaagaacaaggtaatgaatccccgctgaacatcatcgcctgtgaaaacatggtacgcggtaccacgcagctgaaaggtcatgtgatgaacgccctaccagaagacgccaaagcgtgggtagaagaacacgttggctttgtcgattccgccgttgaccgcatcgtaccgccttcggcttcggcaactaacgatccgctggaagtgacggtagaaactttcagcgaatggattgtcgataaaacgcagttcaaaggcgcactgccgaacatcccaggcatggagttaaccgacaacctgatggcatttgtcgaacgtaaactcttcaccctgaacacgggtcatgctataaccgcgtacctcggaaaactggccggtcatcagaccattcgtgacgctattctcgacgagaaaatccgcgcggtggtaaaaggtgcgatggaagaaagtggtgcggtactgatcaagcgctacggctttgacgcagacaaacatgcggcgtacatccagaaaatcctcggtcgttttgagaacccgtatctgaaagatgatgtagagcgcgtaggccgtcagccgctgcgtaaactgagtgctggcgaccgtctgatcaagccattgctcggtacgctggaatacagccttccgcacaagaatctgattcaggggattgctggtgcaatgcacttccgcagtgaagacgatccgcaggctcaggaactggcagcactgatcgctgacaaaggtccgcaggcggcgctggcacagatttccgatcttgatgccaacagcgaggttgtatccgaggcggtaaccgcttataaagcaatgcaataa

SEQ ID NO: 146791 - protein, 382 aa, Escherichia coli O157
MKALHFGAGNIGRGFIGKLLADAGIQLTFADVNQVVLDALNARHSYQVHVVGETEQVDTVSGVDAVSSIGDDVVDLIAQVDLVTTAVGPVVLERIAPAIAKGLVKRKEQGNESPLNIIACENMVRGTTQLKGHVMNALPEDAKAWVEEHVGFVDSAVDRIVPPSASATNDPLEVTVETFSEWIVDKTQFKGALPNIPGMELTDNLMAFVERKLFTLNTGHAITAYLGKLAGHQTIRDAILDEKIRAVVKGAMEESGAVLIKRYGFDADKHAAYIQKILGRFENPYLKDDVERVGRQPLRKLSAGDRLIKPLLGTLEYSLPHKNLIQGIAGAMHFRSEDDPQAQELAALIADKGPQAALAQISDLDANSEVVSEAVTAYKAMQ

SEQ ID NO: 146792 - DNA, 1329 bp, Escherichia coli O6
  CDS (181)..(1329): transl_table=11
atgcctgatgcgacgctgacgcgtcttatcaggcctacaggtcggtgccaaacacgtaggccggataaggcgtttacgccgcatccggcaaaaagcccctctcctcacggagagggtttgggtgagggaaaagcctcaccccagccctctcgggtaaaaacattgatgaaggttaatactatgaaagcattacattttggcgcaggtaatatcggtcgtggctttatcggtaaactgctggcggacgcgggtatccaactgacgtttgccgatgtaaatcaggtggtacttgatgccctgaatgcccgtcatagctatcaggttcatgtggttggtgaaaccgagcaggtagataccgtttccggcgtcaatgccgtcagcagcattggcgatgatgtcgttgatctgattgctcaggtcgatttagtcactaccgccgttggccctgtcgtgctggaacgtattgctccggccatcgccaaagggctggtgaaacgtaaagaacaaggtaatgaatctccgctgaacatcatcgcctgtgaaaacatggtccgcggcaccacgcagctgaaaggccatgtgatgaacgccctgccggaagatgccaaagcgtgggtagaagaacacgttggctttgttgattccgccgttgaccgcatcgtaccgccttcggcttcggcaactaacgatccgctggaagtgacggtagaaacattcagcgaatggattgttgataaaacccagttcaaaggcgcgctgccgaacatcccaggcatggaattaaccgacaatctgatggcatttgtcgaacgtaaactcttcaccctgaatacaggtcatgctataaccgcgtacctcggaaaactggccggtcatcagaccattcgtgacgcaattctcgacgagaaaatccgcgcggtggtaaaaggggcaatggaagaaagcggcgcggtactgatcaagcgctacggctttgatgctgacaaacatgcggcatacatccagaaaatcctcggtcgtttcgagaacccgtacctgaaagatgatgtagaacgcgtaggccgtcagccgctgcgtaaactgagtgctggcgaccgtctgatcaagccactgctcggaaccctggaatatggtctgccacataaaaacctgattgaaggtattgccgctgcaatgcacttccgcagtgaagatgacccgcaggctcaggaactggcagcgctgattgccgacaaaggcccacaagccgcgctggcacagatttccggtcttgatgccaacagcgaggttgtatccgaggcggtaaccgcttataaagcaatgcaataa

SEQ ID NO: 146793 - protein, 382 aa, Escherichia coli O6
MKALHFGAGNIGRGFIGKLLADAGIQLTFADVNQVVLDALNARHSYQVHVVGETEQVDTVSGVNAVSSIGDDVVDLIAQVDLVTTAVGPVVLERIAPAIAKGLVKRKEQGNESPLNIIACENMVRGTTQLKGHVMNALPEDAKAWVEEHVGFVDSAVDRIVPPSASATNDPLEVTVETFSEWIVDKTQFKGALPNIPGMELTDNLMAFVERKLFTLNTGHAITAYLGKLAGHQTIRDAILDEKIRAVVKGAMEESGAVLIKRYGFDADKHAAYIQKILGRFENPYLKDDVERVGRQPLRKLSAGDRLIKPLLGTLEYGLPHKNLIEGIAAAMHFRSEDDPQAQELAALIADKGPQAALAQISGLDANSEVVSEAVTAYKAMQ

SEQ ID NO: 146794 - DNA, 1149 bp, Klebsiella pneumoniae
  CDS (1)..(1149): transl_table=11
atgaaagcattacattttggcgcaggtaatatcggacgtggctttatcggtaaattgctggccgacgcgggcatcgaactgacgtttgccgatgtcaatcagaccgtacttgatgccctgaatgcccgtcatagctatcaggttcacgtcgtcggtgagaatgagcaggtggacaccgtctccggcgtcaatgccgtcagcagcatcggcgatgaggttgtggacctgatcgctgaggtggatgtggtcaccaccgccgtcggtcccgtcgctctcgagcgcatcgcgccagcgatcgccaaagggctggcgcagcgcaaagcgcagggcaccgaacgcccgctgaacatcatcgcctgcgaaaatatggtgcgcggcaccacgcagttaaaaggccacgtgtttaacgcgctggcggaagaagataaagcgtgggtggaagcgcatatcggctttgtcgactctgccgttgaccgtattgtgccgccatcggcttccgccactcatgacccgctggaagtcaccgtggaaacctttagcgaatggattgtcgataagactcagttcaagggcgcgctgccgactatcccggggatggaattaactgataacctgatggcatttgtcgaacgcaagctcttcaccttgaacaccgggcatgctataaccgcctacctcggaaaactggcgggccatcagacgattcgcgacgcgatcctcgacaagaaaattcgtgccgtcgtgcagggcgcgatggaagagagcggcgcggtgctgatcaaacgttacgcctttgacccgcagaagcacgcggcttatatccagaaaatacttggccgtttcgagaacccgtacctgaaagacgatgttgagcgcgttggccgtcagccgctgcgcaaactgagcgctggcgaccgtttaattaagccgctgctgggtaccctggaatacgggctgccgcaccgcaacctggtgaaagggattgcggcggcgatgcatttccgtagcgaagacgatccgcaggcgcaggagctggcggcactgatcgccgacaaggggccgcaggccgcgctggcgcagatttccggcctggatgccgcaagtgatgtcgtcgcggaggccgttaacgactacaacgcggaaaaatga

SEQ ID NO: 146795 - protein, 382 aa, Klebsiella pneumoniae
MKALHFGAGNIGRGFIGKLLADAGIELTFADVNQTVLDALNARHSYQVHVVGENEQVDTVSGVNAVSSIGDEVVDLIAEVDVVTTAVGPVALERIAPAIAKGLAQRKAQGTERPLNIIACENMVRGTTQLKGHVFNALAEEDKAWVEAHIGFVDSAVDRIVPPSASATHDPLEVTVETFSEWIVDKTQFKGALPTIPGMELTDNLMAFVERKLFTLNTGHAITAYLGKLAGHQTIRDAILDKKIRAVVQGAMEESGAVLIKRYAFDPQKHAAYIQKILGRFENPYLKDDVERVGRQPLRKLSAGDRLIKPLLGTLEYGLPHRNLVKGIAAAMHFRSEDDPQAQELAALIADKGPQAALAQISGLDAASDVVAEAVNDYNAEK

SEQ ID NO: 146796 - DNA, 1158 bp, Lactobacillus plantarum
  CDS (1)..(1158): transl_table=11
atgttagacgtacattttggcgcagggaatattggtcggggcttcattggcgaaaccttggctgacaacgggtttaagattactttcgttgatgttaacgatactttgattgacgaattaaacaaacggaatggttataccattgaattggctgcagaaggtcaaaaacatattgaagttcacgatgttaagggtattaacaacggtaaggatcctaaggcggttgctgaagaaattgcccaagccgatatggttacgactgcgattggacctaagatcttgaagttcatcgcgccattaattgctgacgggttaaagttacggcaagctaacaacaatacgacaccaattgatatcattgcttgtgaaaacatgattggcgggagtcagtcattaaagaaatccgtttatgaatcattaaatgaagacgaacaagcttgggctgaccaaaatgcaggcttccccaatgccgctgttgaccggatcgtaccgcttcaaaagcatgatgatccattgttcgtttcagttgaaccattcaaggaatgggttatcgacaagtcccagatgaagaaccctaagattcaattaaagggtgttgattatgctgacgacttggaaccatacattgaacggaaactcttctccgttaatactggtcatgccaccgtagcctatactggtaacatgaaaggctacaagacgattggcgaagcggtcaaggatgacagtgtcgttgaccaagctaagcacgttttaggtgaaaccggcgacttgttgattcaaaagtggggctttgatcctgaagtacaccatgcttatcaaaagaagattttgagtcggtttgaaaacccatatatctctgatgatattgaacgggtcggccggacaccaattcggaaattaggtttcaatgaacgttttattcgcccaattcgggaattgaaggaacgtggtcgtgattacagtgccttagttgatacagttggtgaaatgttcttcttcaactatcctaatgatagtgaaagtgttaagttacaacaattattgaaggatgaaccaatcgaacaagtcattcgcgaaacaactgacttgaaagatgaagatttagttaatgaaatcaaagctgcgtacgaaaagcacttagctgcagcaaagtag

SEQ ID NO: 146797 - protein, 385 aa, Lactobacillus plantarum
MLDVHFGAGNIGRGFIGETLADNGFKITFVDVNDTLIDELNKRNGYTIELAAEGQKHIEVHDVKGINNGKDPKAVAEEIAQADMVTTAIGPKILKFIAPLIADGLKLRQANNNTTPIDIIACENMIGGSQSLKKSVYESLNEDEQAWADQNAGFPNAAVDRIVPLQKHDDPLFVSVEPFKEWVIDKSQMKNPKIQLKGVDYADDLEPYIERKLFSVNTGHATVAYTGNMKGYKTIGEAVKDDSVVDQAKHVLGETGDLLIQKWGFDPEVHHAYQKKILSRFENPYISDDIERVGRTPIRKLGFNERFIRPIRELKERGRDYSALVDTVGEMFFFNYPNDSESVKLQQLLKDEPIEQVIRETTDLKDEDLVNEIKAAYEKHLAAAK

SEQ ID NO: 146798 - DNA, 1152 bp, Leifsonia xyli subsp
  CDS (1)..(1152): transl_table=11
atgaaggccgtccatttcggcgcggggaacatcggccgcggcttcgtggggctgctgctccacgaagccgggtacgaggtcgtcttcgccgacgtcaacgccgagctgatcgaggcgctggccgcagcggactcgtacgatgtgcgtctcgtcggcgacgagacggtcacgaagaccgtcaccgggttccgcgccctcaacagcgcgaccgcggaggatgagctggtcggcgagatcgcgaccgccgacgtggtcaccaccgcggtcgggccgcgcatcctgcgtttcgtcgccccggtcatcgcccgcggcctcggggcccgggcgtccggcgccccgcgcctggtcgtcatggcctgcgagaacgcgatcggcgcgaccgacctcctggccgccgagctgatggacggcctgcaggacggcgacacccgcgacgagctggccgcccgcgccgtgttcgcgaacaccgccgtcgaccggatcgtgcccgcccaggaccccgcctccggggtggatgtcaccgtcgaggcgttcttcgagtgggtcgtggaccgcagcccgttcgcgggtgcggagccgcccatcccgggtgcgcacttcgtggactcgctgggcccgtacatcgagcgcaagctgttcaccgtgaacactggccacgcgaccacggcgtacaccggctttctggagggtgcggccacgatcagcgaagccatcgccaagccgtcggtgctggcgacggtggaggcggtgctggaggagacctccgctgcgctgaccgcgaagcacggcctcgacccggaggagctcgccgagtaccgcgcgaagatcctgaaccggttccgcaatccgcacctggtggacgaggtgacccgcgtcggccgcgagccgctgcgaaagctcgggcgcaacgaccgcttcatcggcccggcctccgactacgcccggtacgtcggcggcgccccctccgcccttctcgccgcggtcggggcggcgctccgcttcgacctgcccggggacagccagagcgccgagctgcagcagctgctgcgaaagacggagcctggcggcatcgtgaccgaggtcatgggcgtcgagccgggcgacgcgctgtacgagccgctggtcgcggtcgtgcgcaccgcccagggctga

SEQ ID NO: 146799 - protein, 383 aa, Leifsonia xyli subsp
MKAVHFGAGNIGRGFVGLLLHEAGYEVVFADVNAELIEALAAADSYDVRLVGDETVTKTVTGFRALNSATAEDELVGEIATADVVTTAVGPRILRFVAPVIARGLGARASGAPRLVVMACENAIGATDLLAAELMDGLQDGDTRDELAARAVFANTAVDRIVPAQDPASGVDVTVEAFFEWVVDRSPFAGAEPPIPGAHFVDSLGPYIERKLFTVNTGHATTAYTGFLEGAATISEAIAKPSVLATVEAVLEETSAALTAKHGLDPEELAEYRAKILNRFRNPHLVDEVTRVGREPLRKLGRNDRFIGPASDYARYVGGAPSALLAAVGAALRFDLPGDSQSAELQQLLRKTEPGGIVTEVMGVEPGDALYEPLVAVVRTAQG

SEQ ID NO: 146800 - DNA, 1083 bp, Mycoplasma pulmonis
  CDS (1)..(1083): transl_table=4
atgaaaaaatataaagcacttcattttggagctggcaatattggtagaggtttaatatctgatatttacatgaaaaataacatggattttgctttggttgatattgataaagatttaatagaaaaattgaataagcaaaagtcttattccataattgattttcaaacaaacaaagtttttcaaataagtaattttaaggctttttcaattgaccaagaagatgaaataaaaaaatgaattgagcaagcagattttatttcaacttcaataggttgatctaatttagctagtttaaaaaagttttttgaaaatgttaaattaaaagaaaaagctcaaattatttgttttgaaaatggatataaaataagctcgttttttcaaagtattttaaacattgattcaaatcattttgttaatgctagtgtggacaaaatcatacctaattttaaaagtgattctttagatgtttatgttgaaagttattatgaaattattttagagcaaaaaaatgaaagtcaaaaaaagcttaactttgttaactatagcactgatctagaagcttatataaataaaaaactttttctagttaatgcaattcactctacaattggttatttaggatatttaaaaaaatatacttacataaatgaagcccttaatgatcagcaaattctttttaaaataaaaagactagcaaagattattaatgaaattttatctaaagaatatctattatttaaagttgattatttgaatgattatttagaaaaaaatctgaagagattttcaataaaagaaaatcaagatttaatttcaagagtagcaagaaatcctattcaaaaactaagcaaaaatgaaagatattttttgatttataacttggttaaaaaacataatttagaaatagatattttgttagaaatatacaaatcaattttttattatgataataaaatggataaagaatctagtaaaattcaaagcacaattgagaataaatcactagcatatgcattaaaaaaattttcaaatttagaccaagaagatcaagaaaaaattttaaaaagtttggctaaaaaatag

SEQ ID NO: 146801 - protein, 360 aa, Mycoplasma pulmonis
MKKYKALHFGAGNIGRGLISDIYMKNNMDFALVDIDKDLIEKLNKQKSYSIIDFQTNKVFQISNFKAFSIDQEDEIKKWIEQADFISTSIGWSNLASLKKFFENVKLKEKAQIICFENGYKISSFFQSILNIDSNHFVNASVDKIIPNFKSDSLDVYVESYYEIILEQKNESQKKLNFVNYSTDLEAYINKKLFLVNAIHSTIGYLGYLKKYTYINEALNDQQILFKIKRLAKIINEILSKEYLLFKVDYLNDYLEKNLKRFSIKENQDLISRVARNPIQKLSKNERYFLIYNLVKKHNLEIDILLEIYKSIFYYDNKMDKESSKIQSTIENKSLAYALKKFSNLDQEDQEKILKSLAKK

SEQ ID NO: 146802 - DNA, 1161 bp, Oceanobacillus iheyensis
  CDS (1)..(1161): transl_table=11
atgaaaacagcagtccattttggagcaggtaatattggccgaggatttatcggacttttactttatcaatccggttatcaaaccatttttatcgatgtaaataatcaagttattgatgaaattaataaacaaaaatcatatcatgtttacctagctggaaaggaaaaacaagaattaacagtaaatcatattactgggatcaatagtataaaagagccagatgctgttacagaagccattgtgaaggctgatgtcgttactactgcagttggacctacaattctaccagttattgctaaggcgatttctaagggattacaagaaagaacaaagcaaaataatagccctctcaatattattgcttgtgaaaatatggttggtggaagttcattactcaaagagcatgtttttgagtcgcttgaggctcataaaataggggagtttgatagattgtatggctttcccgatgctgcagtagatcgtatcgttcctaatcaaacgaataagaatctattagatgtgatggtggaaccttattatgagtgggtagttgagaaaaaaaagattgtcggtgaagtacctccaatttttggcattacgtatgtagatgatcttgctccttatattgaacgtaaattgtttacggtaaatacgggacatgctattccggcttacttaggaacacacttgggttatgatactatcgtagaagctatgaaagatttacgtattgatgataccatatacggtgctttagctgaatcaggagaagcattaattcatgcatatggttttaatcgcgaaatgcatcaagagtatgtgagtaaaattattcaacgttttcaaaatccatatatttcagatgatgtaaagagagttgcgcgtggtcctattcgaaaattaggagcaaaggatcgcttagtcaaaccagctttaatgtatattgaatatacaggaaaaatcccagtatatttagcgaagacaattgcagcagcgttattatttaataatgatgaagacagagaagcgatagaattacagaagaaaatttcagctactggttaccaacaagcttttgttgaagtaagtggatgtgatagtgattctatacttacgaagaaagtcatcgagcaactacgcttattacaaaataagaagtaa

SEQ ID NO: 146803 - protein, 386 aa, Oceanobacillus iheyensis
MKTAVHFGAGNIGRGFIGLLLYQSGYQTIFIDVNNQVIDEINKQKSYHVYLAGKEKQELTVNHITGINSIKEPDAVTEAIVKADVVTTAVGPTILPVIAKAISKGLQERTKQNNSPLNIIACENMVGGSSLLKEHVFESLEAHKIGEFDRLYGFPDAAVDRIVPNQTNKNLLDVMVEPYYEWVVEKKKIVGEVPPIFGITYVDDLAPYIERKLFTVNTGHAIPAYLGTHLGYDTIVEAMKDLRIDDTIYGALAESGEALIHAYGFNREMHQEYVSKIIQRFQNPYISDDVKRVARGPIRKLGAKDRLVKPALMYIEYTGKIPVYLAKTIAAALLFNNDEDREAIELQKKISATGYQQAFVEVSGCDSDSILTKKVIEQLRLLQNKK

SEQ ID NO: 146804 - DNA, 1158 bp, Pasteurella multocida
  CDS (1)..(1158): transl_table=11
atgaaagcattacattttggtgcgggtaatattggacgtggatttatcggaaaattattagctgatagtggtattcaagtcatctttgccgatgtcaatgatcatgttattgagcaactcaaaacacaacgggcttatccagtcaaaattgttggcgatcgcctgaatgtgattgaaaccgtgtcaaacgtcacaggagtcaattctaaaaatgaggcggatattattgcatgctttactgaagttgatttagtgaccaccgcggtgggacctaatgtattaaaaatcatttcaagcactattgcaaaaggcttaagcgcacgttttcgtgcaggaaatacccgcccattaaatattattgcatgtgaaaatatggtgcgaggtaccagctttttaaaagacaatgtattctcttatctcacccctgaagaacagcaacaagcggaagcacagattggctttgttgattctgccgttgatcgcatcgtgccaccagtacagtttgatcccgccaacccgttattagtgacggttgaagagttcagtgaatggattgtagataaaacccaatttaaaggtacaattccagctattactggtatggagcaaacggataatttaatggcatttgttgagcgcaaactgtttacattaaatactggacacgccacgaccgcctatttaggcaaattaaaaggtcaccaatttgtcaaagacagcattgatgatccagatatcagggaagccgttaaagccacgatgcaagaaagtggtgccgtattaattaaacgttatggttttgatcctcatgcccacgcggcttacattgaaaaaatcctgaagcgttttgccaatccgtatttacaagatgatgttgatcgtgtgggcagagaacctttacgaaaactcagctataacgatcgtttaatcaaaccattacgtggcaccttagaatatggattaccgaatcaacatttaattcaaaccattgctagtgccttagcctatcgcaatgagagtgatccacaagcagttgaattagctcaacttttacagcaagatacgctcgaaagtgcggtgaaaaaaatcactgaactgacagaatcaaacattgtgcaacaaatcgtaactgcttataatgccttgcaaaaaaactaa

SEQ ID NO: 146805 - protein, 385 aa, Pasteurella multocida
MKALHFGAGNIGRGFIGKLLADSGIQVIFADVNDHVIEQLKTQRAYPVKIVGDRLNVIETVSNVTGVNSKNEADIIACFTEVDLVTTAVGPNVLKIISSTIAKGLSARFRAGNTRPLNIIACENMVRGTSFLKDNVFSYLTPEEQQQAEAQIGFVDSAVDRIVPPVQFDPANPLLVTVEEFSEWIVDKTQFKGTIPAITGMEQTDNLMAFVERKLFTLNTGHATTAYLGKLKGHQFVKDSIDDPDIREAVKATMQESGAVLIKRYGFDPHAHAAYIEKILKRFANPYLQDDVDRVGREPLRKLSYNDRLIKPLRGTLEYGLPNQHLIQTIASALAYRNESDPQAVELAQLLQQDTLESAVKKITELTESNIVQQIVTAYNALQKN

SEQ ID NO: 146806 - DNA, 1149 bp, Salmonella typhimurium
  CDS (1)..(1149): transl_table=11
atgaaagcattacattttggcgcaggtaatatcggtcgtggctttatcggcaaattgctggctgacgcggggatacaactgacgtttgcggatgtaaaccaggtcgtactcgatgccctgaatgcccgtcatagctatcaggttcatgttgtgggtgaaaatgagcaggtggataccgtttccggcgtcaacgctgtcagcagcatcggcgatgatgttgtcgacctgattgcccacgttgatttaatcaccactgccgtgggcccggtggtgcttgagcgtatcgctccggctatcgctaaagggctggtaaaacgtaaggcgcagggcgtggatgccccgctgaatatcatcgcctgtgaaaatatggtgcgcggcaccacgcagctgaaaggccacgtaatgaacgcgctggcggatggcgataaagcctgggttgaacagcacgtcggttttgtcgattccgccgttgaccgtattgtgccgccatctgcttctgcgaccaacgatccgctggaagtgacggtagaaacgttcagcgagtggattgtcgataaaacccagtttaaaggcgcgttgccaaacattccggggatggagttaacggataacctgatggcatttgtcgaacgtaaactcttcacgctgaacacaggtcatgctataaccgcgtacctcggcaaattagccggtcatcaaaccattcgcgacgctattctcgatgagagtattcgcgcggtggtgaaaggcgcgatggaagaaagcggcgcggtgctgatcaaacgctacggttttgatgccgacaaacatgcggcatacattcagaaaatcctcggtcgttttgaaaacccgtatctgaaagatgacgtcgaacgcgtaggtcgtcagccgctacgcaaactcagcgcgggcgaccgtctgatcaaaccgctgcttggcaccctggaatatggtctgccgcatgtaaatctggtcaaagggatcgcggcggcgatgcatttccgtagtgatgaagatccgcaggcgcaggagttggcggctctgattaccgaaaaaggcccgcaggccgcgctggcgcaaatttccgggctggatgccaatagcgatgtggtggcggaggcggttaacgcatataacgcgaccaaatga

SEQ ID NO: 146807 - protein, 382 aa, Salmonella typhimurium
MKALHFGAGNIGRGFIGKLLADAGIQLTFADVNQVVLDALNARHSYQVHVVGENEQVDTVSGVNAVSSIGDDVVDLIAHVDLITTAVGPVVLERIAPAIAKGLVKRKAQGVDAPLNIIACENMVRGTTQLKGHVMNALADGDKAWVEQHVGFVDSAVDRIVPPSASATNDPLEVTVETFSEWIVDKTQFKGALPNIPGMELTDNLMAFVERKLFTLNTGHAITAYLGKLAGHQTIRDAILDESIRAVVKGAMEESGAVLIKRYGFDADKHAAYIQKILGRFENPYLKDDVERVGRQPLRKLSAGDRLIKPLLGTLEYGLPHVNLVKGIAAAMHFRSDEDPQAQELAALITEKGPQAALAQISGLDANSDVVAEAVNAYNATK

SEQ ID NO: 146808 - DNA, 1149 bp, Shigella flexneri
  CDS (1)..(1149): transl_table=11
atgaaagcattacattttggcgcaggtaatatcggtcgtggctttatcggtaaactgctggcagacgcgggtatccaactgacgtttgccgatgtcaatcaggtggtacttgatgccctgaatgcccgtcatagctatcaggttcatgtggtcggtgaaaccgagcaggtagataccgtttccggcgtcaatgctgtcagcagcattggtgatgatgtcgttgatctgattgctcaggtcgatttagtcactaccgccgttggcccggttgtgctggaacgtattgctccggctatcgccaaagggctggtgaaacgcaaagaacaaggtaatgaatccccgctgaacatcatcgcctgtgaaaacatggtacgcggcaccacgcagctgaaaggtcatgtgatgaacgccctgccggaagacgccaaagcgtgggtagaagagcacgttggctttgtcgattccgccgttgaccgcatcgtaccgccttcggcttcggcaactaacgatccgctggaagtgacggtagaaactttcagcgaatggattgtcgataaaacgcagttcaaaggcgcactgccgaacatcccaggcatggagttaaccgacaacctgatggcatttgtcgaacgtaaactcttcaccctgaacacgggtcatgctataaccgcgtacctcggaaaactggccggtcatcagaccattcgtgacgctattctcgacgagaaaatccgcgcggtggtaaaaggtgcgatggaagaaagtggtgcggtactgatcaagcgctacggctttgacgcagacaaacatgcggcgtacatccagaaaatcctcggtcgttttgagaacccgtatctgaaagatgatgtagagcgcgtaggccgtcagccgctgcgtaaactgagtgctggcgaccgtctgatcaagccactgctcggtacgctggaatacagccttccgcacaagaatctgattcaggggattgctggtgcaatgcacttccgcagtgaagatgatccgcaggctcaggaactggcagcactgatcgctgacaaaggtccgcaggcggcgctggcacagatttccggtcttgatgccaacagcgaggttgtatccgaggcggtaaccgcttataaagcaatgcaataa

SEQ ID NO: 146809 - protein, 382 aa, Shigella flexneri
MKALHFGAGNIGRGFIGKLLADAGIQLTFADVNQVVLDALNARHSYQVHVVGETEQVDTVSGVNAVSSIGDDVVDLIAQVDLVTTAVGPVVLERIAPAIAKGLVKRKEQGNESPLNIIACENMVRGTTQLKGHVMNALPEDAKAWVEEHVGFVDSAVDRIVPPSASATNDPLEVTVETFSEWIVDKTQFKGALPNIPGMELTDNLMAFVERKLFTLNTGHAITAYLGKLAGHQTIRDAILDEKIRAVVKGAMEESGAVLIKRYGFDADKHAAYIQKILGRFENPYLKDDVERVGRQPLRKLSAGDRLIKPLLGTLEYSLPHKNLIQGIAGAMHFRSEDDPQAQELAALIADKGPQAALAQISGLDANSEVVSEAVTAYKAMQ

SEQ ID NO: 146810 - DNA, 1149 bp, Streptococcus mutans
  CDS (1)..(1149): transl_table=11
atgaaaaaagcagtacattttggagcaggcaatattggccgtggttttattggacaaattttatttgaaaatggctttgctattgattttgtcgatgttaacgataaaattattaatgctcttaatgaacgtcattcttatgatattgaaattgcagaagatgggaaacgtcacattacagtttctaatgttgctggcattaataacaaggaaaatcctcaagcagtcattgatgctgtggctgaaacagagttgattacaaccgctattggccctaacattttgccttttattgcccaattaattgccaaaggtattgaaaaacgccgtgaaagtcagaatcaaacgccactggatatcattgcctgtgaaaatatgattggtggctctgcctttctctggcaggaagtgcagaaatacctcagcgctgatggtttagcttttgctaaagattatattggctttccaaatgctgctgttgaccgtattgttccagctcaggttcatgaagatcccctctttgttgtggttgagccattttcagaatgggtagtcgaaactgctgctatgaaaaatcctgatttaaaattgtcttcagttcactatgaagaaaatttggaaccattcattgaaagaaagcttttctctgttaattcaggtcatgcaacaacagcttatacaggtgcttattttggtgctaagacggtcctagaagcacttaaagaccaacaagttaaagagcaagtaaaggcagttttaggtgaaattcgccagcttttaatggctaaatggcaattcaaagagaatgatctgaaagtttatcatgatattattatcagtcgttttgaaaatccttatattgtagatgatgttactcgtgttgccagaacaccaattcgtaagttaggttatgatgaacgctttatccgtcccattcgtgagctgaaagatcgtggtttatcttatgaatatcttttgcaaacagtggcttatgttttccattacaaggattcaaatgatgaacaaagtgttcaacttaaactgcttctacaagaaaagtctttaaaagcagttgttaaagaagtaacaggattgacagatgccgctttgattgaagaaattgttaccagtgttgaatctttagattaa

SEQ ID NO: 146811 - protein, 382 aa, Streptococcus mutans
MKKAVHFGAGNIGRGFIGQILFENGFAIDFVDVNDKIINALNERHSYDIEIAEDGKRHITVSNVAGINNKENPQAVIDAVAETELITTAIGPNILPFIAQLIAKGIEKRRESQNQTPLDIIACENMIGGSAFLWQEVQKYLSADGLAFAKDYIGFPNAAVDRIVPAQVHEDPLFVVVEPFSEWVVETAAMKNPDLKLSSVHYEENLEPFIERKLFSVNSGHATTAYTGAYFGAKTVLEALKDQQVKEQVKAVLGEIRQLLMAKWQFKENDLKVYHDIIISRFENPYIVDDVTRVARTPIRKLGYDERFIRPIRELKDRGLSYEYLLQTVAYVFHYKDSNDEQSVQLKLLLQEKSLKAVVKEVTGLTDAALIEEIVTSVESLD

SEQ ID NO: 146812 - DNA, 1161 bp, Thermoanaerobacter tengcongensis
  CDS (1)..(1161): transl_table=11
atgctgaaggcgcttcactttggagcaggcaatatagggagaggatttattggatatttacttaataaatccggatatgaagttacctttgtagatatttcgaaagaaattgtggataatattaataagtacaaaaagtacaatgtcattattttaaaagagcctgtggaaaaagaggaagtaaaagaggtcaaggctttgcatctagaggaagaggataaagtgcttgatgcttttttagaggcggatatggttacaacttctgtaggtgtttcaaacctttcttccattggtggaagattaaagaaatacttaaaggcaagaaaagaaaaaaatgaaaaacctcttgacataatggcttgcgaaaatgcgctttttgctactgacgttttaagagaaagggtagtaaaagaagaggacgatgattttattacttacctcaatttaaaagttggttttcccaatacagcagttgataggattgttccagcagttaaaattgataaaaaacttcctgtggatgtggcagtagaagagttttttgagtgggatattgagaaaaataaaattaaagggaacctccaaatagaaggggtagaattagtagatgatttaaaaccttatatagagaggaaattatttttgctaaatggagcccacgctacaacagcctatttgggctatttaagaggttatacgtatattcatcaagcgataaaagatgacaatataagggctatagtgaaaggaatgcaggaagaaatatctactgctctttctaaaaaatatgatgtagataaagaatctcttatggcctatgcagaaaaagtgattaagaggtttgaaaatccatatttacaagatgaggttacaagagttggaagggaacctttgagaaagctttcatcagaagatagattaattgcacctttaaagctttgcagtgaagttggaattacgccaaactttatcctctatggaattgctgctgggcttttatttgactacaaagaagatgcacaggccgttaaaatgagagaatatgtagaacaatttggcataaaaaaggctgtaaatgttattacaggacttgaagaggaaagtgatttagtagaagagatagagaaaaggtactttgagctaaaaggaaaattaatataa

SEQ ID NO: 146813 - protein, 386 aa, Thermoanaerobacter tengcongensis
MLKALHFGAGNIGRGFIGYLLNKSGYEVTFVDISKEIVDNINKYKKYNVIILKEPVEKEEVKEVKALHLEEEDKVLDAFLEADMVTTSVGVSNLSSIGGRLKKYLKARKEKNEKPLDIMACENALFATDVLRERVVKEEDDDFITYLNLKVGFPNTAVDRIVPAVKIDKKLPVDVAVEEFFEWDIEKNKIKGNLQIEGVELVDDLKPYIERKLFLLNGAHATTAYLGYLRGYTYIHQAIKDDNIRAIVKGMQEEISTALSKKYDVDKESLMAYAEKVIKRFENPYLQDEVTRVGREPLRKLSSEDRLIAPLKLCSEVGITPNFILYGIAAGLLFDYKEDAQAVKMREYVEQFGIKKAVNVITGLEEESDLVEEIEKRYFELKGKLI

SEQ ID NO: 146814 - DNA, 1155 bp, Vibrio cholerae
  CDS (1)..(1155): transl_table=11
atgaaaaagaatgcagttcattttggtgctggcaacattggccgtggctttattggcaaacttctggcggatgccgacattgccgtcaccttcgccgatgtcaacgaaccccttgtggatcaactgagtcatcaacaagaatacaaagtcaaagtggtcggtagcgaatgcaaaatggaaaccgttagccacgtcaccgccgtcaacagtgctagtgaagccttgatcgagcggattatcaaaaccgatttagtcaccacggcggttgggccaacagtgctggatatcattgccaaaaccatcgccaagggtttgagcgctcgctttgccgcaggtaatacgcaaccactcaacatcatcgcctgtgagaatatggtgcgcggtacgactcaccttaagcagcaggtgtatcaattcctcactaccgaggaacaacaacaagctgatgctttagtgggctttgtggattccgcagtcgatcgcattgtgccaccgttgcaagcagctaacgacgatccgttggaagtgaccgtagaaagcttcagcgaatggattgtggatgagcagcagtttaaaggcgagatcccacagattgagggaatggagaaaaccgataacctgatggcgtttgtcgaacgcaaactgtttaccctcaacacgggtcactgtgtgacggcttatctgggctgtttaaaaggtcaccgtaccatccgtgaagcgattgaagatccgtgcattcatgcacaggtgaaacaagcgatgcaagagagcggcgaagtgctgatccgccgctatggttttgatcgcgccctgcacagcgcctacatcgagaaaatcctaagccgctttgccaatccttatctggtggatgaagtggatcgcgttggtcgtcagccgctgagaaaacttagcgcaaatgatagattaatcaaacctttactcggtacaattgagtacggcttaccaaacggcatgttattgaaagggattgccgcagcgctgaaatatcgcaatagcagtgatccccaagccgtcgaattacaacaaagtattgaaaaagaaggtgttcgctctacacttgcccgctataccgggttagccgccgaaagtgtggaagcacaacaaattgaagctctctaccaacagatggattga

SEQ ID NO: 146815 - protein, 384 aa, Vibrio cholerae
MKKNAVHFGAGNIGRGFIGKLLADADIAVTFADVNEPLVDQLSHQQEYKVKVVGSECKMETVSHVTAVNSASEALIERIIKTDLVTTAVGPTVLDIIAKTIAKGLSARFAAGNTQPLNIIACENMVRGTTHLKQQVYQFLTTEEQQQADALVGFVDSAVDRIVPPLQAANDDPLEVTVESFSEWIVDEQQFKGEIPQIEGMEKTDNLMAFVERKLFTLNTGHCVTAYLGCLKGHRTIREAIEDPCIHAQVKQAMQESGEVLIRRYGFDRALHSAYIEKILSRFANPYLVDEVDRVGRQPLRKLSANDRLIKPLLGTIEYGLPNGMLLKGIAAALKYRNSSDPQAVELQQSIEKEGVRSTLARYTGLAAESVEAQQIEALYQQMD

SEQ ID NO: 146816 - DNA, 1149 bp, Vibrio parahaemolyticus
  CDS (1)..(1149): transl_table=11
atgaaaaacgcagttcattttggtgcaggtaacatcggtcgtggtttcatcggtaaactcttagcagacgcagaagtcgaggtcactttcgctgacgttgatgttccgttggtagaccagctcagccacaaacaagaatacaaagtgaaagtggtcggtactgagtgcaaaatcgacaccgttacccatgtcacagcggtaaactcagccagtgaagacgtgattgatcgcatcgtcaaaaccgatttagtcaccacagcagtgggtccaaacgtattagacatcatcgcgaaaaccatcgcgaaagggatcgccaaacgttttgaagctggcaatgacgcgccacttaacatcatcgcctgtgaaaatatggtgcgtggcacaacgcacttaaaaggtgaagtgtacaaacacttagataaatcattgcatgcaaaagcagacgagttggttggctttgttgattccgctgtcgatcgcatcgttccaccagcagaagccgccaacgatgacccattggaagtgacggttgaaagcttcagcgaatggattgtcgatgagcaacagttcaagggcgacatcccaaacattgctggcatggaaaagactaacaacctaatggcctttgtcgaacgtaagctgttcaccctaaacacaggtcactgcattaccgcttatttaggctgtttgaaaggccatcgcaccattcgtgaagcgattgaagacccaaatattcatgccgaagtaaaacaagcgatgcaggaaagtggcgaagtgttgattcgtcgttacggcttcgaccacgacatgcacaatgcctacatcgaaaagattttaggtcgcttcgccaacccatatttagtggatgaagtggatcgcgttggacgacaaccaattcgtaaattgggtgcaaatgatagattagtgaagccattactcggtacaatcgagtatggcactgaaaatcaaacacttttgaaagggatcgcggcggcgttgaaatacaccaacgacaccgatccgcaagcggttgagctacagacctcattaaaagaggttggcgtgacaaaaacgctagcgaaatacacaggtctggctgaagacagtgatgaagtggctcaaatcgagacactttacaaccagctttga

SEQ ID NO: 146817 - protein, 382 aa, Vibrio parahaemolyticus
MKNAVHFGAGNIGRGFIGKLLADAEVEVTFADVDVPLVDQLSHKQEYKVKVVGTECKIDTVTHVTAVNSASEDVIDRIVKTDLVTTAVGPNVLDIIAKTIAKGIAKRFEAGNDAPLNIIACENMVRGTTHLKGEVYKHLDKSLHAKADELVGFVDSAVDRIVPPAEAANDDPLEVTVESFSEWIVDEQQFKGDIPNIAGMEKTNNLMAFVERKLFTLNTGHCITAYLGCLKGHRTIREAIEDPNIHAEVKQAMQESGEVLIRRYGFDHDMHNAYIEKILGRFANPYLVDEVDRVGRQPIRKLGANDRLVKPLLGTIEYGTENQTLLKGIAAALKYTNDTDPQAVELQTSLKEVGVTKTLAKYTGLAEDSDEVAQIETLYNQL

SEQ ID NO: 146818 - DNA, 1149 bp, Vibrio vulnificus
  CDS (1)..(1149): transl_table=11
atgaaaaacgcagtacattttggtgccggtaacattggtcgcggctttattggtaaattgttggctgatgccaatgttgcagtgacgttcgctgatgtcgatgctcctttggttgatcagttgagccacaagcaagagtacaaagtcaaagtggtcggcagtgaatgccaaattgataccgttacccatgtcaccgctgttaattcggccagtgaagaggtgattgatcgcatcgtccagacggatttagtcaccaccgcagtgggaccgaatgtgttggatatcatagccaaaaccattgcccaagggattgcaaaacgctttgccgctggcaatctggcaccacttaatattattgcttgcgagaatatggttcgtggcacaactcacttaaaaggggaagtgtacaaacatctcgatgcatccttacacgcccaagctgacgagcttgttggctttgttgactccgcagtggatcgcattgtgcccccagcagaagccgctaacgatgatcctctggaagtcaccgttgaaagcttcagtgaatggattgtcgatgagcagcaatttaaaggcgaagtgccatccattgccgggatggaaaagacccataacctcatggcttttgttgaacgcaaactgtttaccttaaatactggccattgcattactgcgtacttaggttgcttacaaggccaccgaactattcgagaagcgattgaaaatccagccattcgtgaccaagtcaaacaggcaatgatggaaagtggtgaagtgctgattcgtcgctacggttttgatcgtgagatgcaccaagcctacatcgagaagatcttggcgcgttttgccaatccattcttagtggatgaagtggaccgcgttggtcgccaacctattcgcaaacttggtatgaatgatagattaatcaaaccattactgggtacaattgagttcggcacggcaaatcagcatctcttaaaaggcatcgctgccgcgttaaaatatcaaaatgacagtgatccacaggccgtggaattacagcgctcactgcagcaagttggcgtgaaaaaaacgttggcaaaatacacaagccttgcagaggacagtgttgaggttgcaaagattgaaactctttacaaccaactttaa

SEQ ID NO: 146819 - protein, 382 aa, Vibrio vulnificus
MKNAVHFGAGNIGRGFIGKLLADANVAVTFADVDAPLVDQLSHKQEYKVKVVGSECQIDTVTHVTAVNSASEEVIDRIVQTDLVTTAVGPNVLDIIAKTIAQGIAKRFAAGNLAPLNIIACENMVRGTTHLKGEVYKHLDASLHAQADELVGFVDSAVDRIVPPAEAANDDPLEVTVESFSEWIVDEQQFKGEVPSIAGMEKTHNLMAFVERKLFTLNTGHCITAYLGCLQGHRTIREAIENPAIRDQVKQAMMESGEVLIRRYGFDREMHQAYIEKILARFANPFLVDEVDRVGRQPIRKLGMNDRLIKPLLGTIEFGTANQHLLKGIAAALKYQNDSDPQAVELQRSLQQVGVKKTLAKYTSLAEDSVEVAKIETLYNQL

SEQ ID NO: 146820 - DNA, 1149 bp, Vibrio vulnificus
  CDS (1)..(1149): transl_table=11
atgaaaaacgcagtacattttggtgccggtaacattggtcgcggctttattggtaaattgttggctgatgccaatgtttcagtgacgttcgctgatgtcgatgctcctttggttgatcagttgagccacaggcaagagtacaaagtcaaagtggtcggcagtgaatgccaaattgataccgttacccatgtcaccgctgttaattcggccagtgaagaggtgattgatcgcatcgtccagacggatttagtcaccaccgcagtgggaccgaatgtgttggatatcatagccaaaaccattgcccaagggattgcaaaacgctttgccgctggcaatctggcaccacttaatattattgcttgcgagaatatggttcgtggcacaactcacttaaaaggggaagtgtacaaacatctcgatgcatccttacacgcccaagttgacgagcttgttggctttgttgactcagcagtggatcgcattgtgcccccagcagaagccgctaacgatgatcctctggaagtcaccgttgaaagcttcagtgaatggattgtcgatgagcagcaatttaaaggcgaagtgccatccattgccgggatggaaaagacccataacctcatggcttttgttgaacgcaaactgtttaccttaaatactggccattgcattactgcgtacttaggttgcttacaaggccaccgaactattcgagaagcgattgaaaacccagccatttgtgaccaagtcaaacaggcgatgatggaaagtggtgaagtgctgattcgtcgctacggttttgatcgtgagatgcaccaagcctacatcgagaagatcttggcgcgttttgccaatccattcttagtggatgaagtggaccgcgttggtcgccaacctattcgcaaacttggtatgaatgatagattaatcaaaccattactgggtacaattgagttcggcacggcaaatcagcatctcttaaaaggcatcgctgccgcgttaaaatatcaaaatgacagtgatccacaggccgtggaattacagcgctcactgcagcaagttggtgtgaaaaaaacgttggcaaaatacacaagccttgcagaggacagtgttgaggttgcaaagattgaaactctttacaaccaactttaa

SEQ ID NO: 146821 - protein, 382 aa, Vibrio vulnificus
MKNAVHFGAGNIGRGFIGKLLADANVSVTFADVDAPLVDQLSHRQEYKVKVVGSECQIDTVTHVTAVNSASEEVIDRIVQTDLVTTAVGPNVLDIIAKTIAQGIAKRFAAGNLAPLNIIACENMVRGTTHLKGEVYKHLDASLHAQVDELVGFVDSAVDRIVPPAEAANDDPLEVTVESFSEWIVDEQQFKGEVPSIAGMEKTHNLMAFVERKLFTLNTGHCITAYLGCLQGHRTIREAIENPAICDQVKQAMMESGEVLIRRYGFDREMHQAYIEKILARFANPFLVDEVDRVGRQPIRKLGMNDRLIKPLLGTIEFGTANQHLLKGIAAALKYQNDSDPQAVELQRSLQQVGVKKTLAKYTSLAEDSVEVAKIETLYNQL

SEQ ID NO: 146822 - DNA, 1164 bp, Yersinia pestis
  CDS (1)..(1164): transl_table=11
atgaaagcattacattttggcgcagggaatattggccgtggcttcatcggcaaactgctcgcggatgccggtgcgcaactgaccttcgccgatgtgaatcaaccgttgttggatgaactgaataaacgtaaacgttatcaggtcaatgtggtcggtgaacaggctcgggttgaagaggtaaagaatgtcagtgcggtaaacagcggtagcccggaagtggttgcgctgattgctgaggccgatattgtcaccaccgctgttggcccacaaattttggccagaattgcggcgacagtggcacagggtctgatcactcgacatcagcaagggaatacccgcccactgaatattattgcctgcgaaaatatggtgcgtggcactagccaattaaaacaacatgtgtttgctgccttatcagaagacgaacaaatatgggtagagcagcatgtgggttttgtggattcggcagtcgatcgtattgtcccaccatcagaagcgggcagtactgatatcctggctgtcacggtagaaacctttagcgaatggatagtcgacggtacccaatttaaaggccagccacccgaaatcgtgggtatggaattgaccgataatctcatggcttttgtcgagcgtaagctcttcacgttgaacaccgggcatgctattaccgcgtatctgggccaactggcaggccatcaaacgatccgcgatgcgattctcgacccggcggtacgtcaaacagtaaaaggtgcgatggaagagagcggtgcggtactgattaagcgttatgctttcgacccacagaaacatgcggcttatatcaacaaaattctctctcgttttgaaaacccttatttgcacgatgatgtcgagcgggttggccgtcaaccactgcgtaagctgagcgccggtgatcgtttgatcaaaccgctgctaggcacgctggagtatcaattgccgcacgattctctggtaacgggtattgccgccgccatgagctatcgcagtgagcaagatccacaggcccaagagttggtgacgttattggcacaattagggccgaaagctgcgttagcgcaaatttcaggcttgcctgctgatagtgaggttgtcgaacaggcggtgagtgtgtataacgccatgcagcagaagctggcgcactga

SEQ ID NO: 146823 - protein, 387 aa, Yersinia pestis
MKALHFGAGNIGRGFIGKLLADAGAQLTFADVNQPLLDELNKRKRYQVNVVGEQARVEEVKNVSAVNSGSPEVVALIAEADIVTTAVGPQILARIAATVAQGLITRHQQGNTRPLNIIACENMVRGTSQLKQHVFAALSEDEQIWVEQHVGFVDSAVDRIVPPSEAGSTDILAVTVETFSEWIVDGTQFKGQPPEIVGMELTDNLMAFVERKLFTLNTGHAITAYLGQLAGHQTIRDAILDPAVRQTVKGAMEESGAVLIKRYAFDPQKHAAYINKILSRFENPYLHDDVERVGRQPLRKLSAGDRLIKPLLGTLEYQLPHDSLVTGIAAAMSYRSEQDPQAQELVTLLAQLGPKAALAQISGLPADSEVVEQAVSVYNAMQQKLAH

SEQ ID NO: 146824 - DNA, 25 bp, Artificial sequence
  primer
atgaaagcattacattttggcgcag

SEQ ID NO: 146825 - DNA, 26 bp, Artificial sequence
  primer
ttattgcattgctttataagcggtta

SEQ ID NO: 146826 - protein, 373 aa, Artificial sequence
  consensus sequence
  Variant (2)..(2): Xaa in position 2 is any amino acid
  Variant (16)..(17): Xaa in position 16 to 17 is any amino acid
  Variant (19)..(21): Xaa in position 19 to 21 is any amino acid
  Variant (23)..(26): Xaa in position 23 to 26 is any amino acid
  Variant (28)..(28): Xaa in position 28 is any amino acid
  Variant (31)..(37): Xaa in position 31 to 37 is any amino acid
  Variant (39)..(43): Xaa in position 39 to 43 is any amino acid
  Variant (45)..(45): Xaa in position 45 is any amino acid
  Variant (47)..(61): Xaa in position 47 to 61 is any amino acid
  Variant (62)..(63): Xaa in position 62 to 63 is any or no amino acid
  Variant (65)..(66): Xaa in position 65 to 66 is any amino acid
  Variant (68)..(75): Xaa in position 68 to 75 is any amino acid
  Variant (76)..(77): Xaa in position 76 to 77 is any or no amino acid
  Variant (79)..(81): Xaa in position 79 to 81 is any amino acid
  Variant (83)..(83): Xaa in position 83 is any amino acid
  Variant (91)..(92): Xaa in position 91 to 92 is any amino acid
  Variant (94)..(95): Xaa in position 94 to 95 is any amino acid
  Variant (98)..(100): Xaa in position 98 to 100 is any amino acid
  Variant (102)..(102): Xaa in position 102 is any amino acid
  Variant (104)..(105): Xaa in position 104 to 105 is any amino acid
  Variant (106)..(106): Xaa in position 106 is any or no amino acid
  Variant (108)..(110): Xaa in position 108 to 110 is any amino acid
  Variant (111)..(114): Xaa in position 111 to 114 is any or no amino acid
  Variant (116)..(116): Xaa in position 116 is any amino acid
  Variant (117)..(118): Xaa in position 117 to 118 is any or no amino acid
  Variant (124)..(130): Xaa in position 124 to 130 is any amino acid
  Variant (132)..(141): Xaa in position 132 to 141 is any amino acid
  Variant (142)..(153): Xaa in position 142 to 153 is any or no amino acid
  Variant (155)..(157): Xaa in position 155 to 157 is any amino acid
  Variant (165)..(170): Xaa in position 165 to 170 is any amino acid
  Variant (171)..(173): Xaa in position 171 to 173 is any or no amino acid
  Variant (175)..(175): Xaa in position 175 is any amino acid
  Variant (177)..(177): Xaa in position 177 is any amino acid
  Variant (180)..(180): Xaa in position 180 is any amino acid
  Variant (182)..(182): Xaa in position 182 is any amino acid
  Variant (185)..(185): Xaa in position 185 is any amino acid
  Variant (187)..(193): Xaa in position 187 to 193 is any amino acid
  Variant (194)..(198): Xaa in position 194 to 198 is any or no amino acid
  Variant (200)..(200): Xaa in position 200 is any amino acid
  Variant (202)..(209): Xaa in position 202 to 209 is any amino acid
  Variant (211)..(214): Xaa in position 211 to 214 is any amino acid
  Variant (221)..(221): Xaa in position 221 is any amino acid
  Variant (227)..(228): Xaa in position 227 to 228 is any amino acid
  Variant (231)..(231): Xaa in position 231 is any amino acid
  Variant (233)..(235): Xaa in position 233 to 235 is any amino acid
  Variant (237)..(239): Xaa in position 237 to 239 is any amino acid
  Variant (241)..(242): Xaa in position 241 to 242 is any amino acid
  Variant (244)..(245): Xaa in position 244 to 245 is any amino acid
  Variant (247)..(252): Xaa in position 247 to 252 is any amino acid
  Variant (254)..(258): Xaa in position 254 to 258 is any amino acid
  Variant (260)..(263): Xaa in position 260 to 263 is any amino acid
  Variant (265)..(276): Xaa in position 265 to 276 is any amino acid
  Variant (277)..(278): Xaa in position 277 to 278 is any or no amino acid
  Variant (280)..(281): Xaa in position 280 to 281 is any amino acid
  Variant (284)..(285): Xaa in position 284 to 285 is any amino acid
  Variant (288)..(288): Xaa in position 288 is any amino acid
  Variant (291)..(291): Xaa in position 291 is any amino acid
  Variant (293)..(293): Xaa in position 293 is any amino acid
  Variant (295)..(295): Xaa in position 295 is any amino acid
  Variant (297)..(297): Xaa in position 297 is any amino acid
  Variant (302)..(302): Xaa in position 302 is any amino acid
  Variant (304)..(304): Xaa in position 304 is any amino acid
  Variant (308)..(311): Xaa in position 308 to 311 is any amino acid
  Variant (313)..(315): Xaa in position 313 to 315 is any amino acid
  Variant (317)..(325): Xaa in position 317 to 325 is any amino acid
  Variant (326)..(330): Xaa in position 326 to 330 is any or no amino acid
  Variant (332)..(337): Xaa in position 332 to 337 is any amino acid
  Variant (339)..(345): Xaa in position 339 to 345 is any amino acid
  Variant (346)..(346): Xaa in position 346 is any or no amino acid
  Variant (348)..(351): Xaa in position 348 to 351 is any amino acid
  Variant (354)..(371): Xaa in position 354 to 371 is any amino acid
  Variant (372)..(372): Xaa in position 372 is any or no amino acid
AXHFGAGNIGRGFIGXXLXXXGXXXXFXDVXXXXXXXLXXXXXYXVXXXXXXXXXXXXXXXXXAXXSXXXXXXXXXXIXXXDXVTTAVGPXXLXXIAXXXAXGXXXRXXXXXXXPXXXIACENXXXXXXXLXXXXXXXXXXXXXXXXXXXXXXFXXXAVDRIVPXXXXXXXXXLXVXVEXFXEWXVXXXXXXXXXXXXPXIXXXXXXXXLXXXXERKLFTXNTGHAXXAYXGXXXGXXXIXXAXXDXXXXXXVXXXXXEXXXXLXXXXXXXXXXXXXXYXXKIXXRFXNPXLXDXVXRVGRXPXRKLXXXXRXXXPXXXXXXXXXXXXXXLXXXXXXAXXXXXXXXDXXXXELXXXXXXXXXXXXXXXXXXXL

SEQ ID NO: 146827 - protein, 41 aa, Artificial sequence
  protein pattern
  Variant (2)..(3): Xaa in position 2 to 3 is any amino acid
  Variant (4)..(12): Xaa in position 4 to 12 is any or no amino acid
  Variant (18)..(18): Xaa in position 18 is Ser or Thr
  Variant (19)..(19): Xaa in position 19 is Leu or Val
  Variant (22)..(22): Xaa in position 22 is Gly or Ser
  Variant (24)..(24): Xaa in position 24 is Ala or Cys
  Variant (25)..(25): Xaa in position 25 is any amino acid
  Variant (26)..(26): Xaa in position 26 is Ala, Pro, Thr or Val
  Variant (27)..(27): Xaa in position 27 is Ala or Ser
  Variant (29)..(29): Xaa in position 29 is any amino acid
  Variant (30)..(30): Xaa in position 30 is Ala or Gly
  Variant (31)..(37): Xaa in position 31 to 37 is any amino acid
  Variant (38)..(38): Xaa in position 38 is Ile or Val
  Variant (39)..(39): Xaa in position 39 is any amino acid
  Variant (40)..(40): Xaa in position 40 is Asp or Glu
  Variant (41)..(41): Xaa in position 41 is Ala or Ser
AXXXXXXXXXXXERKLFXXNTXHXXXXYXXXXXXXXXXXXX

SEQ ID NO: 146828 - protein, 36 aa, Artificial sequence
  protein pattern
  Variant (2)..(2): Xaa in position 2 is any or no amino acid
  Variant (4)..(4): Xaa in position 4 is Ile, Leu, Met or Val
  Variant (5)..(5): Xaa in position 5 is any amino acid
  Variant (7)..(7): Xaa in position 7 is Phe or Ile
  Variant (8)..(8): Xaa in position 8 is any amino acid
  Variant (10)..(10): Xaa in position 10 is Glu, Pro or Ser
  Variant (11)..(11): Xaa in position 11 is any amino acid
  Variant (12)..(12): Xaa in position 12 is Ile or Leu
  Variant (13)..(13): Xaa in position 13 is any amino acid
  Variant (15)..(15): Xaa in position 15 is any amino acid
  Variant (16)..(16): Xaa in position 16 is Ile or Val
  Variant (17)..(17): Xaa in position 17 is any amino acid
  Variant (20)..(20): Xaa in position 20 is Ala or Gly
  Variant (22)..(22): Xaa in position 22 is Ala, Glu, Gly, Gln, Ser or Thr
  Variant (23)..(23): Xaa in position 23 is Pro or Thr
  Variant (24)..(24): Xaa in position 24 is Ile or Leu
  Variant (27)..(27): Xaa in position 27 is Ile or Leu
  Variant (28)..(28): Xaa in position 28 is Gly or Ser
  Variant (29)..(30): Xaa in position 29 to 30 is any amino acid
  Variant (31)..(31): Xaa in position 31 is Asp or Glu
  Variant (33)..(33): Xaa in position 33 is Phe, Ile or Leu
  Variant (34)..(34): Xaa in position 34 is Ile or Val
  Variant (35)..(35): Xaa in position 35 is any amino acid
KXIXXRXXNXXXXDXXXRVXRXXXRKXXXXXRXXXP

SEQ ID NO: 146829 - protein, 48 aa, Artificial sequence
  protein pattern
  Variant (2)..(2): Xaa in position 2 is any or no amino acid
  Variant (4)..(5): Xaa in position 4 to 5 is any amino acid
  Variant (6)..(6): Xaa in position 6 is any or no amino acid
  Variant (8)..(8): Xaa in position 8 is Ala, Gly or Ile
  Variant (16)..(16): Xaa in position 16 is Ile or Val
  Variant (17)..(17): Xaa in position 17 is Ala or Gly
  Variant (18)..(19): Xaa in position 18 to 19 is any amino acid
  Variant (21)..(22): Xaa in position 21 to 22 is any amino acid
  Variant (23)..(23): Xaa in position 23 is Ala, Asn or Ser
  Variant (24)..(24): Xaa in position 24 is Glu, Gly or Asn
  Variant (25)..(28): Xaa in position 25 to 28 is any amino acid
  Variant (30)..(30): Xaa in position 30 is any amino acid
  Variant (32)..(32): Xaa in position 32 is Ile or Val
  Variant (33)..(37): Xaa in position 33 to 37 is any amino acid
  Variant (38)..(38): Xaa in position 38 is Asp, Glu, Asn or Thr
  Variant (39)..(39): Xaa in position 39 is any amino acid
  Variant (40)..(40): Xaa in position 40 is Ile or Leu
  Variant (41)..(45): Xaa in position 41 to 45 is any amino acid
  Variant (47)..(47): Xaa in position 47 is any amino acid
  Variant (48)..(48): Xaa in position 48 is Ile or Val
KXAXXXGXGNIGRGFXXXXLXXXXXXXXFXDXXXXXXXXXXXXXXYXX

SEQ ID NO: 146830 - protein, 21 aa, Artificial sequence
  protein pattern
  Variant (2)..(2): Xaa in position 2 is Ala, Ile, Leu or Val
  Variant (3)..(3): Xaa in position 3 is any amino acid
  Variant (4)..(4): Xaa in position 4 is Ile, Met or Val
  Variant (10)..(10): Xaa in position 10 is any amino acid
  Variant (11)..(11): Xaa in position 11 is Ile, Leu or Val
  Variant (12)..(12): Xaa in position 12 is any amino acid
  Variant (13)..(13): Xaa in position 13 is Ala, Gly, Ser or Val
  Variant (14)..(14): Xaa in position 14 is Ser or Thr
  Variant (15)..(15): Xaa in position 15 is Ala, Asp, Gln, Ser or Thr
  Variant (16)..(16): Xaa in position 16 is any amino acid
  Variant (18)..(20): Xaa in position 18 to 20 is any amino acid
  Variant (21)..(21): Xaa in position 21 is Ile or Val
PXXXIACENXXXXXXXLXXXX

SEQ ID NO: 146831 - protein, 13 aa, Artificial sequence
  protein pattern
  Variant (2)..(2): Xaa in position 2 is any amino acid
  Variant (4)..(4): Xaa in position 4 is any amino acid
  Variant (5)..(5): Xaa in position 5 is Ile or Val
  Variant (7)..(7): Xaa in position 7 is any amino acid
  Variant (9)..(9): Xaa in position 9 is any amino acid
  Variant (12)..(12): Xaa in position 12 is any or no amino acid
LXVXXEXFXEWXV

SEQ ID NO: 146832 - protein, 41 aa, Artificial sequence
  protein pattern
  Variant (2)..(9): Xaa in position 2 to 9 is any amino acid
  Variant (10)..(11): Xaa in position 10 to 11 is any or no amino acid
  Variant (13)..(14): Xaa in position 13 to 14 is any amino acid
  Variant (15)..(15): Xaa in position 15 is Ala, Thr or Val
  Variant (16)..(16): Xaa in position 16 is Asp, Glu or His
  Variant (17)..(17): Xaa in position 17 is Ile, Leu or Val
  Variant (18)..(18): Xaa in position 18 is Ile or Val
  Variant (20)..(20): Xaa in position 20 is Cys or Thr
  Variant (21)..(21): Xaa in position 21 is Ala or Ser
  Variant (24)..(24): Xaa in position 24 is Pro or Val
  Variant (25)..(25): Xaa in position 25 is any amino acid
  Variant (26)..(26): Xaa in position 26 is Ala, Ile, Leu or Val
  Variant (28)..(29): Xaa in position 28 to 29 is any amino acid
  Variant (30)..(30): Xaa in position 30 is Ile or Val
  Variant (32)..(33): Xaa in position 32 to 33 is any amino acid
  Variant (34)..(34): Xaa in position 34 is Phe, Ile, Leu or Val
  Variant (35)..(35): Xaa in position 35 is Ala, Ser or Thr
  Variant (36)..(40): Xaa in position 36 to 40 is any amino acid
  Variant (41)..(41): Xaa in position 41 is Lys or Arg
SXXXXXXXXXXIXXXXXXTXXVGXXXLXXXAXXXXXXXXXX

SEQ ID NO: 146833 - protein, 11 aa, Artificial sequence
  protein pattern
  Variant (2)..(2): Xaa in position 2 is Ala, Pro or Val
  Variant (3)..(3): Xaa in position 3 is Asp or Asn
  Variant (4)..(4): Xaa in position 4 is Ala or Ser
  Variant (6)..(6): Xaa in position 6 is Ile or Val
FXXXAXDRIVP

SEQ ID NO: 146834 - DNA, 417 bp, Escherichia coli
  CDS (1)..(417): transl_table=11
atgctgaccggagactcatacaaggatgtaaaatttatgttacgtatatttatcccaacatctaacggtaagatttccagacgtcgttatatattttcatttattttaataaatttcatttttgcctttcttattatcttttttaacgatggagaagcaggctttcttgttatagtctctaccatcgtactccattatctcgtcatcaacatgaattgccagcgactccgtgatagtggtttcatctatataaaaacttatgtttttggtacattagcagtatatatcatctctatcatcacaatgatagccgaagattttgcctgttcaggcaatggttcgatgatttttttgatttgttatttttccactttcagtatgctaatgcttgcacctactgattcatcaaaacaataa

SEQ ID NO: 146835 - protein, 138 aa, Escherichia coli
MLTGDSYKDVKFMLRIFIPTSNGKISRRRYIFSFILINFIFAFLIIFFNDGEAGFLVIVSTIVLHYLVINMNCQRLRDSGFIYIKTYVFGTLAVYIISIITMIAEDFACSGNGSMIFLICYFSTFSMLMLAPTDSSKQ

SEQ ID NO: 146836 - DNA, 459 bp, Salmonella typhimurium LT2
  CDS (1)..(459): transl_table=11
atgcctccccttgtaaggggggtagcatattgtcatgctaacgacgtaacccaacatatggatgtgaaattaatgttaagtgtttttattccttcatctgagagatgtgtttccagatgtcgttatttattatcattcgcgctaataaatataatattttccattttggttggggttttattatatttaagctttgtgatactggcaattttattcacaattttactacattatctcgtcattaatttaaactgtcagcgattcagagacagtggctttgaatatataaaattctatgtatggggtacgcttgtaatctatattgcctccttcgtgataatggttgctgaagatttcgcttgcgatggctttggtatgcctctttttctaatctggtattttgcaaccttttctctgctacttctggcccccccggattcgaattcactcaacaagtaa

SEQ ID NO: 146837 - protein, 152 aa, Salmonella typhimurium LT2
MPPLVRGVAYCHANDVTQHMDVKLMLSVFIPSSERCVSRCRYLLSFALINIIFSILVGVLLYLSFVILAILFTILLHYLVINLNCQRFRDSGFEYIKFYVWGTLVIYIASFVIMVAEDFACDGFGMPLFLIWYFATFSLLLLAPPDSNSLNK

SEQ ID NO: 146838 - DNA, 417 bp, Shigella flexneri 2a str. 301
  CDS (1)..(417): transl_table=11
atgctgacaggagactcacacaaggatgtaaaatttatgttacgtatgtttatcccaacatctaacggtaagatttccagacaccgatatatatttttatttattttaataaatttcatttttgcctttcttattatcttttttaacgatggggaagcaggttttcttgttatagtctctaccatcgcactccattatctcgtcatcaacatgaattgccaacgactccgtgatagtggtttcatatatataaaaatttatgtttttggtacattagcagtatatatcatctctatcatcacaatgatagccgaagattttgcctgttcaggcaatggttcgatgatttttttgatttgttatttttccactttcagtatgctaatgcttgcacctactgattcatcaaaacaatag

SEQ ID NO: 146839 - protein, 138 aa, Shigella flexneri 2a str. 301
MLTGDSHKDVKFMLRMFIPTSNGKISRHRYIFLFILINFIFAFLIIFFNDGEAGFLVIVSTIALHYLVINMNCQRLRDSGFIYIKIYVFGTLAVYIISIITMIAEDFACSGNGSMIFLICYFSTFSMLMLAPTDSSKQ

SEQ ID NO: 146840 - DNA, 381 bp, Escherichia coli
  CDS (1)..(381): transl_table=11
atgttacgtatatttatcccaacatctaacggtaagatttccagacgtcgttatatattttcatttattttaataaatttcatttttgcctttcttattatcttttttaacgatggagaagcaggctttcttgttatagtctctaccatcgtactccattatctcgtcatcaacatgaattgccagcgactccgtgatagtggtttcatctatataaaaacttatgtttttggtacattagcagtatatatcatctctatcatcacaatgatagccgaagattttgcctgttcaggcaatggttcgatgatttttttgatttgttatttttccactttcagtatgctaatgcttgcacctactgattcatcaaaacaatag

SEQ ID NO: 146841 - protein, 126 aa, Escherichia coli
MLRIFIPTSNGKISRRRYIFSFILINFIFAFLIIFFNDGEAGFLVIVSTIVLHYLVINMNCQRLRDSGFIYIKTYVFGTLAVYIISIITMIAEDFACSGNGSMIFLICYFSTFSMLMLAPTDSSKQ

SEQ ID NO: 146842 - DNA, 20 bp, Artificial sequence
  primer
atgctgaccggagactcata

SEQ ID NO: 146843 - DNA, 27 bp, Artificial sequence
  primer
ttattgttttgatgaatcagtaggtgc

SEQ ID NO: 146844 - protein, 123 aa, Artificial sequence
  consensus sequence
  Variant (3)..(4): Xaa in position 3 to 4 is any amino acid
  Variant (8)..(8): Xaa in position 8 is any amino acid
  Variant (10)..(13): Xaa in position 10 to 13 is any amino acid
  Variant (16)..(16): Xaa in position 16 is any amino acid
  Variant (19)..(21): Xaa in position 19 to 21 is any amino acid
  Variant (23)..(23): Xaa in position 23 is any amino acid
  Variant (27)..(27): Xaa in position 27 is any amino acid
  Variant (30)..(31): Xaa in position 30 to 31 is any amino acid
  Variant (33)..(43): Xaa in position 33 to 43 is any amino acid
  Variant (45)..(45): Xaa in position 45 is any amino acid
  Variant (47)..(48): Xaa in position 47 to 48 is any amino acid
  Variant (51)..(51): Xaa in position 51 is any amino acid
  Variant (59)..(59): Xaa in position 59 is any amino acid
  Variant (64)..(64): Xaa in position 64 is any amino acid
  Variant (70)..(70): Xaa in position 70 is any amino acid
  Variant (74)..(74): Xaa in position 74 is any amino acid
  Variant (77)..(77): Xaa in position 77 is any amino acid
  Variant (81)..(82): Xaa in position 81 to 82 is any amino acid
  Variant (85)..(85): Xaa in position 85 is any amino acid
  Variant (87)..(89): Xaa in position 87 to 89 is any amino acid
  Variant (91)..(91): Xaa in position 91 is any amino acid
  Variant (98)..(98): Xaa in position 98 is any amino acid
  Variant (100)..(100): Xaa in position 100 is any amino acid
  Variant (102)..(104): Xaa in position 102 to 104 is any amino acid
  Variant (108)..(108): Xaa in position 108 is any amino acid
  Variant (111)..(111): Xaa in position 111 is any amino acid
  Variant (115)..(115): Xaa in position 115 is any amino acid
  Variant (117)..(117): Xaa in position 117 is any amino acid
  Variant (121)..(121): Xaa in position 121 is any amino acid
MLXXFIPXSXXXXSRXRYXXXFXLINXIFXXLXXXXXXXXXXXLXIXXTIXLHYLVINXNCQRXRDSGFXYIKXYVXGTLXXYIXSXXXMXAEDFACXGXGXXXFLIXYFXTFSXLXLAPXDS

SEQ ID NO: 146845 - protein, 56 aa, Artificial sequence
  protein pattern
  Variant (3)..(3): Xaa in position 3 is Leu or Met
  Variant (8)..(8): Xaa in position 8 is Phe or Leu
  Variant (14)..(14): Xaa in position 14 is any amino acid
  Variant (18)..(18): Xaa in position 18 is any amino acid
  Variant (21)..(21): Xaa in position 21 is Phe or Trp
  Variant (25)..(25): Xaa in position 25 is Ala or Val
  Variant (26)..(26): Xaa in position 26 is Ile or Val
  Variant (29)..(29): Xaa in position 29 is Ala or Ile
  Variant (31)..(31): Xaa in position 31 is Phe or Ile
  Variant (32)..(32): Xaa in position 32 is Ile or Val
  Variant (33)..(33): Xaa in position 33 is any amino acid
  Variant (35)..(35): Xaa in position 35 is Ile or Val
  Variant (42)..(42): Xaa in position 42 is Asp or Ser
  Variant (44)..(44): Xaa in position 44 is any amino acid
  Variant (46)..(47): Xaa in position 46 to 47 is any amino acid
  Variant (48)..(48): Xaa in position 48 is Ile or Leu
  Variant (52)..(52): Xaa in position 52 is any amino acid
  Variant (55)..(55): Xaa in position 55 is Ala or Ser
INXNCQRXRDSGFXYIKXYVXGTLXXYIXSXXXMXAEDFACXGXGXXXFLIXYFXT

SEQ ID NO: 146846 - protein, 33 aa, Artificial sequence
  protein pattern
  Variant (3)..(3): Xaa in position 3 is Arg or Ser
  Variant (4)..(4): Xaa in position 4 is Ile, Met or Val
  Variant (8)..(8): Xaa in position 8 is Ser or Thr
  Variant (10)..(10): Xaa in position 10 is Glu or Asn
  Variant (11)..(12): Xaa in position 11 to 12 is any amino acid
  Variant (13)..(13): Xaa in position 13 is Ile or Val
  Variant (16)..(16): Xaa in position 16 is any or no amino acid
  Variant (18)..(18): Xaa in position 18 is any or no amino acid
  Variant (20)..(20): Xaa in position 20 is Ile or Leu
  Variant (21)..(21): Xaa in position 21 is Phe or Leu
  Variant (22)..(22): Xaa in position 22 is any amino acid
  Variant (24)..(24): Xaa in position 24 is Ala or Ile
  Variant (28)..(28): Xaa in position 28 is Phe or Ile
  Variant (31)..(31): Xaa in position 31 is Ala or Ser
  Variant (32)..(32): Xaa in position 32 is Phe or Ile
MLXXFIPXSXXXXSRXRXYXXXFXLINXIFXXL

SEQ ID NO: 146847 - protein, 10 aa, Artificial sequence
  protein pattern
  Variant (2)..(2): Xaa in position 2 is Leu or Met
  Variant (6)..(6): Xaa in position 6 is Pro or Thr
  Variant (9)..(9): Xaa in position 9 is any or no amino acid
LXLAPXDSXS

SEQ ID NO: 146848 - DNA, 609 bp, Escherichia coli
  CDS (1)..(609): transl_table=11
atgcgattgttgcgtttttgttgcgtattagatcacttaatttgctttacatctcccgtaaacacttttctgcgatacaatgcctttacgttatgtaacggagagttcggcatgtcacaccccgcgttaacgcaactgcgtgcgctgcgctattgtaaagagatccctgccctggatccgcaactgctcgactggctgttgctggaggattccatgacaaaacgttttgaacagcagggaaaaacggtaagcgtgacgatgatccgcgaagggtttgtcgagcagaatgaaatccccgaagaactgccgctgctgccgaaagagtctcgttactggttacgtgaaattttgttatgtgccgatggtgaaccgtggcttgccggtcgtaccgtcgttcctgtgtcaacgttaagcgggccggagctggcgttacaaaaattgggtaaaacgccgttaggacgctatctgttcacatcatcgacattaacccgggactttattgagataggccgtgatgccgggctgtgggggcgacgttcccgcctgcgattaagcggtaaaccgctgttgctaacagaactgtttttaccggcgtcaccgttgtactaa

SEQ ID NO: 146849 - protein, 202 aa, Escherichia coli
MRLLRFCCVLDHLICFTSPVNTFLRYNAFTLCNGEFGMSHPALTQLRALRYCKEIPALDPQLLDWLLLEDSMTKRFEQQGKTVSVTMIREGFVEQNEIPEELPLLPKESRYWLREILLCADGEPWLAGRTVVPVSTLSGPELALQKLGKTPLGRYLFTSSTLTRDFIEIGRDAGLWGRRSRLRLSGKPLLLTELFLPASPLY

SEQ ID NO: 146850 - DNA, 567 bp, Yersinia pestis KIM
  CDS (1)..(567): transl_table=11
ttgcgggggtggctgttttatcctcggcagggagcgtttcgcatgtttatcggcgatgcatcaattttaaaacctatccaatggtgtgctaccgagcaccctgaacttcctgcagacatcgcagactggctgatggagctgggttcgatgactcgacgctttgagcagcattgccagcgtgttcatgtcgaaccgcaacgtgaatgctttattacgcgtgatgcgctaggggaagaggctgaacatttgcccgttagtcaacgctattggttacgggaaattgtcttgtttggtgacaatgtgccttggttactggggcgcacggttatcccggaggagacactgtctggtccggatagggcgctggtggatttaggtacattaccgctagggcgttacttattcagtggtgatgccctaacccgggactatattcacgtcgggcggcaggataatctatgggccaggcggtctttgctacgcctttcaggcaatccactgttattgactgaggtttttttaccggcatcgccgctttatacccattgtgactctatacccaagtga

SEQ ID NO: 146851 - protein, 188 aa, Yersinia pestis KIM
MRGWLFYPRQGAFRMFIGDASILKPIQWCATEHPELPADIADWLMELGSMTRRFEQHCQRVHVEPQRECFITRDALGEEAEHLPVSQRYWLREIVLFGDNVPWLLGRTVIPEETLSGPDRALVDLGTLPLGRYLFSGDALTRDYIHVGRQDNLWARRSLLRLSGNPLLLTEVFLPASPLYTHCDSIPK

SEQ ID NO: 146852 - DNA, 552 bp, Vibrio vulnificus YJ016
  CDS (1)..(552): transl_table=11
ttgaatactagtatgaatcagccaaactcgctctatcttgctttgttaatagaagcaaaatggcaaaatcctgaagattttcacttttctagtgactttgctaagcactggttactggagcaaggctccttgtctcgccgtttggcgcgtcattgccaacatctgaccgttgagttgatgcgcaatgaaaaaagtggtgtgggccaattaacaatgcaagagactcaggggttatcccctgagatttgcttgatccgagaggtggtgctatccggtgatcaaacaccgtgggtgctgggaagaacgttgatccctgaaaccaccttagctgatcagccctacgacttagccacgctgggtgatattcctctgggtctcaccgtgtttagtgcagagcaagttgagcgtgacgcattgcaagtggcttggattgaaacaccgcaagggcgtttactcgccagacgttctcgtttatggatgaaccacaaaccgatgttagtggcagaactgtttttacctgatgcaccgatttactccagggagagtgtgtaa

SEQ ID NO: 146853 - protein, 183 aa, Vibrio vulnificus YJ016
MNTSMNQPNSLYLALLIEAKWQNPEDFHFSSDFAKHWLLEQGSLSRRLARHCQHLTVELMRNEKSGVGQLTMQETQGLSPEICLIREVVLSGDQTPWVLGRTLIPETTLADQPYDLATLGDIPLGLTVFSAEQVERDALQVAWIETPQGRLLARRSRLWMNHKPMLVAELFLPDAPIYSRESV

SEQ ID NO: 146854 - DNA, 597 bp, Burkholderia vietnamiensis G4
  CDS (1)..(597): transl_table=11
atgcgattcgacggcgcacgctcgggctggcgcgcaacgccccggcccggctgcacgctcgagcagcgcgattggctcacgcgcggcggttcgctgaccgcgcatctcgcgcggctcggcagcgtgagcgtgcgcgtgacgcgcgaggccgtcgattgcccgtggttcgacgagcctgccgcggtcggacgcgcgccgcgcgcgccgatgtgggtgcgcgaggtgatcctgtcggtggacggcgtgccgtacgtcgccgcgcacagcatcgcgccgctcgcggccagcaagggcgtatggcaggcgatgcggcggctgcgcacgcgcccgctcgccgaattgctgtacagcgacccgcaggtcgcgcgctcggcgctcgtgagccggcgcgtgatcgccggccatccgctgtatgcgctcgcgagccatgcgctgcagcgcgagcgcgcaccgcatgcattcgccgcgcggcgctcggtattccagcggcacggcgagccgctgatggtcacggaatgcatgctgccggcgttgtggcgccatctcgccgcgcacggcgacggcccgcgctcgctcgggccgcgggcagacgcgtga

SEQ ID NO: 146855 - protein, 198 aa, Burkholderia vietnamiensis G4
MRFDGARSGWRATPRPGCTLEQRDWLTRGGSLTAHLARLGSVSVRVTREAVDCPWFDEPAAVGRAPRAPMWVREVILSVDGVPYVAAHSIAPLAASKGVWQAMRRLRTRPLAELLYSDPQVARSALVSRRVIAGHPLYALASHALQRERAPHAFAARRSVFQRHGEPLMVTECMLPALWRHLAAHGDGPRSLGPRADA

SEQ ID NO: 146856 - DNA, 504 bp, Haemophilus somnus 129PT
  CDS (1)..(504): transl_table=11
ttgaatatttctttatttcgacaaattctctcctctacaaaatggcagaatgatatttttactttatccccgcaaaaacaagattggctattacatcaaggttcattaacccgaaaattacagcaatattgtcagcaactgaaagttgaaattgtggcggaaaaatgggtttctgacatgtcttttggatttaccggacatcatgagccaatttggttgcgtgaagtgatattaaaaggtgatgagcaagcttggatttttgcacaaactcgtttgccgcaatctacgattgagaatgttgcacctgacattatcaatgtaggttcaacgcctattggcttatggcttttccctcaacaaccaaaaagaaaaacacttgaatggatatatgataccgcaacaggattatatgctcgtcgttcagtattgcttttaaatcaatatccaatcgaaattaaagaattgtttttgcaagattttaaattttttcaatcaaaggtctaa

SEQ ID NO: 146857 - protein, 167 aa, Haemophilus somnus 129PT
MNISLFRQILSSTKWQNDIFTLSPQKQDWLLHQGSLTRKLQQYCQQLKVEIVAEKWVSDMSFGFTGHHEPIWLREVILKGDEQAWIFAQTRLPQSTIENVAPDIINVGSTPIGLWLFPQQPKRKTLEWIYDTATGLYARRSVLLLNQYPIEIKELFLQDFKFFQSKV

SEQ ID NO: 146858 - DNA, 570 bp, Shewanella sp. MR-7
  CDS (1)..(570): transl_table=11
atgagtgtgaccagcttaagctttccctatggcgaatctattcaatggttttgtgccgataacgccaaaaatcttccctcttctcccctcaaagaatggttactggcgccgggaagcctgactcaaaagctcaagggctgttgtgataagttcgaagtcaaaatcctcggtgaaggccaatgcgtcccgctcgaaggggaatatcccaagcaaaacgccgtttgggtacgcgaagtcttactctgcctcgactctgtgccttgggtatttgctagaaccttgatccctcagtctttattatcgacccgccaagctgattttttaggcctaggaacacgtccactcggtgaattattgtttagccaagatagttttgtgcctggtcgcattgaaatcgcccgctttaccaccgacagtcgcctcgcccagctcgctcagagtttagcgcaaaatgtcgaacacgagctctggggccgacgtcgatattttcaccatgacgaggaggaaatgtttgtcagcgaaatgttcctcccggccgcagtacaagctatggctaggctacaaccctaa

SEQ ID NO: 146859 - protein, 189 aa, Shewanella sp. MR-7
MSVTSLSFPYGESIQWFCADNAKNLPSSPLKEWLLAPGSLTQKLKGCCDKFEVKILGEGQCVPLEGEYPKQNAVWVREVLLCLDSVPWVFARTLIPQSLLSTRQADFLGLGTRPLGELLFSQDSFVPGRIEIARFTTDSRLAQLAQSLAQNVEHELWGRRRYFHHDEEEMFVSEMFLPAAVQAMARLQP

SEQ ID NO: 146860 - DNA, 549 bp, Alkalilimnicola ehrlichei MLHE-1
  CDS (1)..(549): transl_table=11
ttgtaccggaacaaagaggcaagctggtggccgcgccgccacccctcgcgacgcagggtgccgcgcgggctggaggcgtggctggacgaacccggctcgctcaccgcgcggctgcgacgcagcgtgcccggcgggctcgaggtcaccgtgctggtggagcgctggggccggcccagtatcgatgaggcccgggcggtggagctgtcggacgggcgccacgcccgcatccgcgaggtgctgctcggcagccgcgaccaggcctggatctacgcccgcaccatcatgccgccggaggcgctggccggcgatggccggcgcctggcgcggctgggtcgcacgcccctgggcggggcgctgttccgcggccgcaccgttgcccgcgggcccctcagcatcgcccggcttggcccccgcgacccgctggcggcccgggtccccggcggcggtgccgggtgctgggcccgccgctcgcgcctgtggtatggcaatgccggcctgctggtgaccgaagtctttctgccgcccctgctgcagagcctggaggattga

SEQ ID NO: 146861 - protein, 182 aa, Alkalilimnicola ehrlichei MLHE-1
MYRNKEASWWPRRHPSRRRVPRGLEAWLDEPGSLTARLRRSVPGGLEVTVLVERWGRPSIDEARAVELSDGRHARIREVLLGSRDQAWIYARTIMPPEALAGDGRRLARLGRTPLGGALFRGRTVARGPLSIARLGPRDPLAARVPGGGAGCWARRSRLWYGNAGLLVTEVFLPPLLQSLED

SEQ ID NO: 146862 - DNA, 537 bp, Pseudomonas aeruginosa UCBPP-PA14
  CDS (1)..(537): transl_table=11
atgcccagcaatgcgctctggcttcgcgccgaccaactgtccagcgtctcccccaccgtcctcgactggctgttcgacgaagggtcgctgacccggcgcctgaccgccctggccgacggcgcgttccgcgtcgaacccctgctggaaggctggcagaccctgcgcgacgacgaatgccaggggctcgacgtccctcccggcagtagcggctgggtccgcgaggtctacctgcatggccacgaccgtccctgggtgttcgcccgcagcgtggcggcgcgcagcgccctggaaggctcgggcttcgacctggcgctgctcggcacccgctcgctgggcgagttgctgttcagcgacagcgccttcgagcgcgggcccatcgaagtctgccgctatccggcggccggtctgcccgccgaggtccgcgccgagggtctctggggccgtcgctcacggttttcccgcggcgcgctcggggtgctggtggcggaggtgttcctaccgagcctgtgggaccaggcgggaatcgccgacgtataa

SEQ ID NO: 146863 - protein, 178 aa, Pseudomonas aeruginosa UCBPP-PA14
MPSNALWLRADQLSSVSPTVLDWLFDEGSLTRRLTALADGAFRVEPLLEGWQTLRDDECQGLDVPPGSSGWVREVYLHGHDRPWVFARSVAARSALEGSGFDLALLGTRSLGELLFSDSAFERGPIEVCRYPAAGLPAEVRAEGLWGRRSRFSRGALGVLVAEVFLPSLWDQAGIADV

SEQ ID NO: 146864 - DNA, 564 bp, Shewanella sp. ANA-3
  CDS (1)..(564): transl_table=11
atgaatgtgaccagcttaagcttcccctatggcgaatctattcaatggttttgtgccgataatgccaaaaatcttccctcttctccccttaaggaatggttgctagcaccgggaagcctgacacaaaagctcaagggctgttgtgataagttcgaagtcaaaatcctcggtgaaggccaatgtgccccgctcgaaggggaatatcccaagcaaaatgccgtttgggtgcgagaagtgttactctgcctcgattccgtgccttgggtctttgctagaactttgatcccgcaatctttattatcgacccgccaagccgattttttaggcctaggtacacgcccactgggtgaattattgtttagccaagacagttttgtgcccggtcgcatcgaaatagcccgctttaccaccgacagtcgcctcgctcagctcgctcagagtttagcgcaaaacgtcgaacacgagctctggggccgacgccggtattttcaccatgacgaggaggaaatgtttgtcagcgaaatgttcctcccggccgcagtgcaagcgatggctaggctatag

SEQ ID NO: 146865 - protein, 187 aa, Shewanella sp. ANA-3
MNVTSLSFPYGESIQWFCADNAKNLPSSPLKEWLLAPGSLTQKLKGCCDKFEVKILGEGQCAPLEGEYPKQNAVWVREVLLCLDSVPWVFARTLIPQSLLSTRQADFLGLGTRPLGELLFSQDSFVPGRIEIARFTTDSRLAQLAQSLAQNVEHELWGRRRYFHHDEEEMFVSEMFLPAAVQAMARL

SEQ ID NO: 146866 - DNA, 570 bp, Azoarcus sp. BH72
  CDS (1)..(570): transl_table=11
atgcagcaccccgcttccggcgagtcctggctcgcccgcccgccgcgcaccgccgagcgccggctgcgcccctggctgaccgatcccgcctcgctcaccgcccgtatccgcatgcgctgcggcatgttcggggtgcgggtgctgcgccaatcggccggcgctctgaccccggacgaacgccgtctgctcggcctgcgcgccggcgagcgcgcactgctgcgcgaggtgctgctgatcgccgacggtcgcccggtggtgtttgcgcgcagcgtgctggcgcagcgcgaacagcgcggcggctggctgcggttgtggcgcggcatcggcagccggccgctgggcgcggcgctgttttccgatccgcgcatccgccgccaaccgctggcctgcgcccgcatcggggccgccgacgcgcgttatcatctcgcccgacgcgcgctcgccggcgccgcgacgctgccgccggcactgtgggcgcggcgctcggtgttccgcctgcatggccgctcactgctggtgagcgagttcttcctgcccgcgatactcggattgcccgatgaccctctctga

SEQ ID NO: 146867 - protein, 189 aa, Azoarcus sp. BH72
MQHPASGESWLARPPRTAERRLRPWLTDPASLTARIRMRCGMFGVRVLRQSAGALTPDERRLLGLRAGERALLREVLLIADGRPVVFARSVLAQREQRGGWLRLWRGIGSRPLGAALFSDPRIRRQPLACARIGAADARYHLARRALAGAATLPPALWARRSVFRLHGRSLLVSEFFLPAILGLPDDPL

SEQ ID NO: 146868 - DNA, 483 bp, Actinobacillus pleuropneumoniae serovar 1 str. 4074
  CDS (1)..(483): transl_table=11
atgtttatgttacgacaatatcgccgaatcttagcgcaaaatcattggtgttcggaacaagaaccgcttagtaaagctcaacaagaatggcttctacatcaaggatcgctaacgcaaaaattattacaagttagccggcaattcaacgttgaaattacccaacaaaaatgggttacaaaggcatctgaaaactattctaagtattggttacgggaagtattattaaaagaagaagatcagccttggatttttgcccaaactttagtaccgcaagcaacgatagataatgtagcgcaggatctaccgatacttggcgatcaagctatcggcttatggcttttccctcagacaccgaaacggatttcgcttgaatggcaatgtgatgtgcatagcggaatgtatatgcgcagagcctgttatttattaaaaggctatccgttagaaatctccgaattgttcttggcggattttccttatttataa

SEQ ID NO: 146869 - protein, 160 aa, Actinobacillus pleuropneumoniae serovar 1 str. 4074
MFMLRQYRRILAQNHWCSEQEPLSKAQQEWLLHQGSLTQKLLQVSRQFNVEITQQKWVTKASENYSKYWLREVLLKEEDQPWIFAQTLVPQATIDNVAQDLPILGDQAIGLWLFPQTPKRISLEWQCDVHSGMYMRRACYLLKGYPLEISELFLADFPYL

SEQ ID NO: 146870 - DNA, 543 bp, Photobacterium sp. SKA34
  CDS (1)..(543): transl_table=11
atgtcggaattcaagcagttatatagtccgttactcgaaggagctgtatggtatccagcctctgaatgggcattagaaggacgttccgttagttcttggttactcgagcctgattctttatcgcgccgtttagctgcgcattgtcgtgttttttcagtcacagtattagcgcaaaacgtaataaaaaatagtgagctgtcactatcagagcgtgcgttgttaggacgcagtgattgccttgaacgtatcgttatgctcaatggtgatcaacagccttgggtctatgctcgaacactaatgccgaccactatattatgtggggacgaaagtgatttagccgaattaggcgctaaccctttagggtatcgtatttttaatggcaacaattcccgtcgtgatgctctggaagttgcaaaaatcggcatgccggaacaatcgatttgggctcggcgctcaagattatggattaatgaaaaacctatgctggtggcagagttgtttttacctcgctcaccggtgtatgcaaggaataacaaatgttag

SEQ ID NO: 146871 - protein, 180 aa, Photobacterium sp. SKA34
MSEFKQLYSPLLEGAVWYPASEWALEGRSVSSWLLEPDSLSRRLAAHCRVFSVTVLAQNVIKNSELSLSERALLGRSDCLERIVMLNGDQQPWVYARTLMPTTILCGDESDLAELGANPLGYRIFNGNNSRRDALEVAKIGMPEQSIWARRSRLWINEKPMLVAELFLPRSPVYARNNKC

SEQ ID NO: 146872 - DNA, 633 bp, gamma proteobacterium HTCC2207
  CDS (1)..(633): transl_table=11
atgccaaagacccataaagctttccatcatactccccacaaaactggcgattacgcggctttggcgcatttctctgatcgggctacttggcgccagtctactgttgctcgtacgcattctgtgccagccttttggcgcgattggttactgcatccaggatccttaactcagcgtctgctcgacgccagtgatggtcagtttaaggttggggtgctgagtcagtcactgctgcgccccagtctttccgagcgtcgagcactgtcattgccagatcatcgtttggcgctagtgcgggaggtaatattgattggccgtggagtgccctgggtatttgcccgcagtgttattcccctgcagaccctgactggtcgtttgcgcaaattacggcgtctcgatagcagaccgctgggcgcactattatttagcgactcaaccatgacccgtgaaccattagagtgggcctgtatagagcccaatggtcagcccttggcggcagagcttgaggctatggataagccagtctgggggcgtcgctcggtgtttaaactctcagccaagccaatgctcgtctgcgaggtttttttacctagcttttcattacaagatgttgccaacaatctcactaggagttga

SEQ ID NO: 146873 - protein, 210 aa, gamma proteobacterium HTCC2207
MPKTHKAFHHTPHKTGDYAALAHFSDRATWRQSTVARTHSVPAFWRDWLLHPGSLTQRLLDASDGQFKVGVLSQSLLRPSLSERRALSLPDHRLALVREVILIGRGVPWVFARSVIPLQTLTGRLRKLRRLDSRPLGALLFSDSTMTREPLEWACIEPNGQPLAAELEAMDKPVWGRRSVFKLSAKPMLVCEVFLPSFSLQDVANNLTRS

SEQ ID NO: 146874 - DNA, 525 bp, Oceanobacter sp. RED65
  CDS (1)..(525): transl_table=11
atgtcttttcatttttgcactcgcatacgaaaccagtcttgggttaatttaaatcccgtccctcgcaacgtgaattcagttgagttacgtcattggttgcttgacgaaggttcgctcactaagcgtctcaaaagcttggggcgctttagcgttgagattatcaatactggctatggccgcccttttttgagcgaggctcgagttttaggcatttcgactcgacaacaggtttatatccgagaagtgcgcttgtgcgtgaacggagaggccttagtgaaggctagaagcattatcccaagaagtaccttaactggccccgagcggcaattactaaaacttaatagtaaacctctgggcgaatatctattcaaccacaggtgcatgcatttaggcccgatagaagtaaaacaaggccaagtcgatagcagctctctgtggggccgtcgacgggttttttctattaatcggaagcctgttttggtgagtgagttctttttgcctgcaattcaaaaccattgcgaatag

SEQ ID NO: 146875 - protein, 174 aa, Oceanobacter sp. RED65
MSFHFCTRIRNQSWVNLNPVPRNVNSVELRHWLLDEGSLTKRLKSLGRFSVEIINTGYGRPFLSEARVLGISTRQQVYIREVRLCVNGEALVKARSIIPRSTLTGPERQLLKLNSKPLGEYLFNHRCMHLGPIEVKQGQVDSSSLWGRRRVFSINRKPVLVSEFFLPAIQNHCE

SEQ ID NO: 146876 - DNA, 558 bp, Pseudomonas putida GB-1
  CDS (1)..(558): transl_table=11
gtgtcgtacgaatccccgctagcagccgctgtcgcgtggctgccgtattcacagctggcgaccgacatcgaccagcctactcttgactggctgttcgacgagggctcgctgactcgccgcctgacccgcctgtccttcgatcacttctccgtcaccccgctgttcgagggctggcagccgctgcgcgatgacgaatgccaggcgctgggtatcgccgccggcgccgaaggctgggtgcgcgaggtgtacttgcgcggccatggccaaccttgggtgttcgcccgcagcgtggccagtcgcagcgccctggagcgtggtggcctggacctggaaaccctgggcagccgctcgctgggcgagttgctgttctgcgaccaggcattcatccgccacccgctcgaagtgtgcagttatccacaggcctggctgccgcccgaagccgcccatgcggcgctttggggccgccgctcgcgcttcgagcgtgacggcctggacctgctggtggcagaagtgttcctgccggcattgtggcaagcggccaaggaggaaaaccgctga

SEQ ID NO: 146877 - protein, 185 aa, Pseudomonas putida GB-1
MSYESPLAAAVAWLPYSQLATDIDQPTLDWLFDEGSLTRRLTRLSFDHFSVTPLFEGWQPLRDDECQALGIAAGAEGWVREVYLRGHGQPWVFARSVASRSALERGGLDLETLGSRSLGELLFCDQAFIRHPLEVCSYPQAWLPPEAAHAALWGRRSRFERDGLDLLVAEVFLPALWQAAKEENR

SEQ ID NO: 146878 - DNA, 549 bp, Pseudomonas sp
  CDS (1)..(549): transl_table=11
atggaggtggcgtaccgtttttcgcaaccgcacctggagtggaattcctacggccattggcgttcgtcgatagccgcgacccagcgggaatggctgtttgaccgcagttcactgacgcgccgcctcaggacgctatccgacaatgagttcgaggtgattcccctacgtgaagcggcggggccgatgctgccggaagaatgccgggtgcttgggttgcaacccggggtcacgggctggattcgtgaagtctacctggccggtttcggtcggccgtgggtgtatgcaaggtcggtgatcagtcattgtgatgttgaaggaagtgattcagcgttacttcaactaggcaatattccattgggaagtctgttatttggcgagaacccttataagcgcagcgaaatagaagtgtgtcgatatccggatgcctgtaacgccagcagtcgaccggcttatccgttatgggccagacgttcggtgttcagtcgtcggcaaagtcgcgtcctggttcatgaaatgttcttgccagcactgtgggaggagttgagttaa

SEQ ID NO: 146879 - protein, 182 aa, Pseudomonas sp
MEVAYRFSQPHLEWNSYGHWRSSIAATQREWLFDRSSLTRRLRTLSDNEFEVIPLREAAGPMLPEECRVLGLQPGVTGWIREVYLAGFGRPWVYARSVISHCDVEGSDSALLQLGNIPLGSLLFGENPYKRSEIEVCRYPDACNASSRPAYPLWARRSVFSRRQSRVLVHEMFLPALWEELS

SEQ ID NO: 146880 - DNA, 552 bp, Pseudomonas fluorescens
  CDS (1)..(552): transl_table=11
gtgcaacacacaaacgctccgctgtggcgcccgcaaagcgaactgacacccctgcccgacacatccacgctcgactggctgttcgacgaaggctccctgacccgccggctgacgcacctgtccgatgacggcttcagcgtgacgccgctgttcgaaggctggcagaccctgcgcgacgacgaatgcgccgcgctggacctggccgaaggcagcgagggctgggtgcgcgaggtgtatctgcgtgggcatggccaggcctgggtgttcgcccgcagcgtggcgtcgcgcagtgccttgcagggcgacggcttgcacatggatgagttgggcagccgctcgctgggcgaactgctgttctgcgatcacgcgtttcagcgccgcgccattgaagtctgccattacccggaacactggttgcccgaaggttcccgggctgccggcctgtggggacggcgttcgcgtttcgaccgtggcgcattgagcgtactggtggcggagattttcctgcctacgctgtgggaagccgtccgcgcccgtccggagaactgctga

SEQ ID NO: 146881 - protein, 183 aa, Pseudomonas fluorescens
MQHTNAPLWRPQSELTPLPDTSTLDWLFDEGSLTRRLTHLSDDGFSVTPLFEGWQTLRDDECAALDLAEGSEGWVREVYLRGHGQAWVFARSVASRSALQGDGLHMDELGSRSLGELLFCDHAFQRRAIEVCHYPEHWLPEGSRAAGLWGRRSRFDRGALSVLVAEIFLPTLWEAVRARPENC

SEQ ID NO: 146882 - DNA, 558 bp, Azoarcus sp
  CDS (1)..(558): transl_table=11
atgcgcatccgacctcactccgaaacctggctcaaacgcccgccgcgcccccgggtgcccgcgcggctgcgcccctggctcaccgatccgggttcgctgacggcgcgcatccgcagtcgctgcagcctgttttcggtcaacgtgctcgcgcagcgcctcgccgtcccgcaccctgacgaagccgcgctgctcgggctgcgccgcggcgaactcgcgtggctgcgcgaagtgctgctcgtcgccgacggcgtcccggtggtgttcgcgcgcagcatcctgccgcggcacgacgtgcgtggagcatggatcctgttccagggactcggctcccgtccgctcggcgccgcgttgttcgccgacccgcgcatcggccgcaagccgttggcctgcgcctgtctcgaccgccgggacgcgcgctatcatcgcgcttcggctgccgccgcgccgcgtcgcctgccgctcgcgctgtgggcgcgccggtcgctgttcggcctgcgcggccgcacgctgctggtcagcgaagtgtttctgcccacgattctggagttgccgacatga

SEQ ID NO: 146883 - protein, 185 aa, Azoarcus sp
MRIRPHSETWLKRPPRPRVPARLRPWLTDPGSLTARIRSRCSLFSVNVLAQRLAVPHPDEAALLGLRRGELAWLREVLLVADGVPVVFARSILPRHDVRGAWILFQGLGSRPLGAALFADPRIGRKPLACACLDRRDARYHRASAAAAPRRLPLALWARRSLFGLRGRTLLVSEVFLPTILELPT

SEQ ID NO: 146884 - DNA, 516 bp, Bartonella henselae
  CDS (1)..(516): transl_table=11
atgtctgatcctaaagattctatcttgccacctctgaaatggctatcagatcaagatcctccagtaccaactcacatcaaagattggctcatggaattaggatctatgacacgtcgatttgaaaaccactgcacttacatacatatcaaaccacaacgtgaatgttttattacgcgtgataaacttaaagaagaagctgcgcatctgcccaagagcacacgttattggttacgcgaagtcatactaatgggagacaaccaaccttggctccttgggcgcacagtgataccgcaagaaaccctattcgaacacaatgaagcactgataaacttaggggatgtaccactgggacgctatttattcagtattgataaattgacccgcgattacatccatatcggaagaaaagatacgctgtgggcacgccgctcccgtttacgattaacaggcaagccattattattaaccgaattgtttttagcagcttcacctctttacacaacaaatcccatataa

SEQ ID NO: 146885 - protein, 171 aa, Bartonella henselae
MSDPKDSILPPLKWLSDQDPPVPTHIKDWLMELGSMTRRFENHCTYIHIKPQRECFITRDKLKEEAAHLPKSTRYWLREVILMGDNQPWLLGRTVIPQETLFEHNEALINLGDVPLGRYLFSIDKLTRDYIHIGRKDTLWARRSRLRLTGKPLLLTELFLAASPLYTTNPI

SEQ ID NO: 146886 - DNA, 519 bp, Bartonella quintana
  CDS (1)..(519): transl_table=11
atgatatctgatcttaggagttctatcttgccacctttgaaatggctatccgatcaagatcctccagtaccagctggcgttagcgattggctaatggagttgggatccatgacacgtcgatttgaaaatcactgcacttgcatacgtattgaaccacaacgtgaatgtttcattacacgtgataacctgaaagaagaagctgcgcatttgcccaatagcacatgttactggctacgcgaagtcatactgatgggagacaaccaaccttggcttcttggacgcacagtgataccgcaagaaaccctatttgaacataatgaagcactgataaacttagggactgtaccactgggacggtatttatttagcagtggcaacctaactcgcgattacatttatattggccggcaaggtgcgctgtgggcacgccgctcccgtttgcgactagcgggcaaaccattgttattaaccgaactgtttttagcagcttcaccgctgtacacaacaaattccatataa

SEQ ID NO: 146887 - protein, 172 aa, Bartonella quintana
MISDLRSSILPPLKWLSDQDPPVPAGVSDWLMELGSMTRRFENHCTCIRIEPQRECFITRDNLKEEAAHLPNSTCYWLREVILMGDNQPWLLGRTVIPQETLFEHNEALINLGTVPLGRYLFSSGNLTRDYIYIGRQGALWARRSRLRLAGKPLLLTELFLAASPLYTTNSI

SEQ ID NO: 146888 - DNA, 684 bp, Burkholderia xenovorans
  CDS (1)..(684): transl_table=11
atgtctatccgtttcgttgccgccgacgcccactggcgcgtcgcgcccttgcccggcctgagcgccgcgcagaaagactggctgacccgtggtggttcactgaccgcgcatctgcgcgcgctcggcgcggtcgcggttcgcgtgacgcgcgaaggcgtcgcgctgccgtggcccgacgagcatgccgcgctcggcctcgcgccgcgtgcgccggtctgggtgcgcgaagtcgtcctcgcggtcgaaggcgtgccgttcgtcgcggcgcatagcgtcgcgccgctcgccgcgagtgccggcgtgtggcaggccatgcggcgcttgcgcacgcggccgctggctgaactgctgtatagcgacagcagcgtggcgcgttcgtcgctggtgagccgcaggctgaccgctcggcatccgctctatcgcctcgcggcgtgcgcgatcgagagcctgccgccgcatgcgctggtcgcgcgccgctcggtgttcgagcgccacggcgcgcccttgatggtgaccgaatgcatgttgccggcgctatgggcgcatctggccacggtgtccggggctggcggatcaggcgactggtccgcgcatccgcgcgtgcgcgaacacggccgtccgctcgaacacaccgcctcgcgcgcgcatcccgccacgcgtgcgtccgacgagcagcgccgctga

SEQ ID NO: 146889 - protein, 227 aa, Burkholderia xenovorans
MSIRFVAADAHWRVAPLPGLSAAQKDWLTRGGSLTAHLRALGAVAVRVTREGVALPWPDEHAALGLAPRAPVWVREVVLAVEGVPFVAAHSVAPLAASAGVWQAMRRLRTRPLAELLYSDSSVARSSLVSRRLTARHPLYRLAACAIESLPPHALVARRSVFERHGAPLMVTECMLPALWAHLATVSGAGGSGDWSAHPRVREHGRPLEHTASRAHPATRASDEQRR

SEQ ID NO: 146890 - DNA, 621 bp, Colwellia psychrerythraea
  CDS (1)..(621): transl_table=11
atgaagcagcaaatagtgaactttcctattacctttccaataaccttgtcgggccaatggcagtcacctagtgcagtgagtttctcatcattatctacgccacttaaagattggttgcttgatgaaggctcacttacggctcgcttaaaaaagcattgtgataactttcaagttaaagtcattggagagcaacaacagccctgctcagctgcggagtcttgtgatctgattaaagttggtgaacccgttttggtgcgtgaagtcattttatattgtgatgatgtacctcaagtctttgccagaagcttattacccatagctagcttaacgggtgaagaacaaattcttgctaatttaggggagcaaccacttgggcaggtattgtttaataacccgtcattgcaacgtttacggttagagttatctccttttgtaaatgattctagtgttgtagcgttagctgctaaattaacggctcaacacgcaagtaatagcccactcgtaaaagcatcagtaatacccaaacaagaactttggggccgtcgctctatattcatgttggagaataaacccttgatggtggctgaggtttttttacctgatgcctttgcctatcaataa

SEQ ID NO: 146891 - protein, 206 aa, Colwellia psychrerythraea
MKQQIVNFPITFPITLSGQWQSPSAVSFSSLSTPLKDWLLDEGSLTARLKKHCDNFQVKVIGEQQQPCSAAESCDLIKVGEPVLVREVILYCDDVPQVFARSLLPIASLTGEEQILANLGEQPLGQVLFNNPSLQRLRLELSPFVNDSSVVALAAKLTAQHASNSPLVKASVIPKQELWGRRSIFMLENKPLMVAEVFLPDAFAYQ

SEQ ID NO: 146892 - DNA, 531 bp, Dechloromonas aromatica
  CDS (1)..(531): transl_table=11
atgaaacgcagcaaatggcggactcgcttcgccggcgcttattgcgaccccattctccgctcctggctgactgagccggattcactgacggctcgttgtcagcgggcgagttcggcttttcgcgtgcgcctgttgcgctacggcaagggtcaggcactggccgatgaagcggttgagggcaaggccggccggcattcggcctgggtgcgcgaggtggtgctcgaatgcgatggcgtgccggtgatctttgctcacacgactttgtcgacggcccggagaggccggatgacccgctggatggccggtctgggcagtcgttcgctgggttccctgctttttgcctatccagggttcaagcgagggggtatcgagtttctccggcttgatcggtgtcacccgctgtatcggcgtgccgcggccttgggggcagggcgcaagtccctgtgggcgcgccgctcactgcaccggctcggcgggcagcaggtgctggtgacggaagtctttctgccggccatcacgctgctgaagtga

SEQ ID NO: 146893 - protein, 176 aa, Dechloromonas aromatica
MKRSKWRTRFAGAYCDPILRSWLTEPDSLTARCQRASSAFRVRLLRYGKGQALADEAVEGKAGRHSAWVREVVLECDGVPVIFAHTTLSTARRGRMTRWMAGLGSRSLGSLLFAYPGFKRGGIEFLRLDRCHPLYRRAAALGAGRKSLWARRSLHRLGGQQVLVTEVFLPAITLLK

SEQ ID NO: 146894 - DNA, 582 bp, Idiomarina loihiensis
  CDS (1)..(582): transl_table=11
atgacaacagagttttatgccaccccggcttttccagttagcaaagcgctacaatggacaccgcctgaacaacttgaattaaccccaacacaagccgactggctgctatacgagggttcacttacagaacgcctgaagcagataggtcagcagttctccgttaagttactcggtcagcagttacttgcccctaacacggaagaaaagcaaaggttaaaaggtaaagaccaagccgttatccgtgaagttctactatactgtaatgaaaagccttgggtttttgcgcgcagtctattttctcccagcgccgaaaacgccaatacactgaatttacaacaactggggaatcagtcattgggcgagtctttatttgcccgtagcgatttatactgcggagacatagaagtggcaaaagttgctctggaacacccggttgctcggcttaatcagcagtggtttgggataaaccagaggctgctcagcagacgccgaatattttcaacgggcggtgagcaactgttagtcagtgaagtatttctgcagccctcgccactgtactcttcgccgaataacaggagttag

SEQ ID NO: 146895 - protein, 193 aa, Idiomarina loihiensis
MTTEFYATPAFPVSKALQWTPPEQLELTPTQADWLLYEGSLTERLKQIGQQFSVKLLGQQLLAPNTEEKQRLKGKDQAVIREVLLYCNEKPWVFARSLFSPSAENANTLNLQQLGNQSLGESLFARSDLYCGDIEVAKVALEHPVARLNQQWFGINQRLLSRRRIFSTGGEQLLVSEVFLQPSPLYSSPNNRS

SEQ ID NO: 146896 - DNA, 489 bp, Methylococcus capsulatus
  CDS (1)..(489): transl_table=11
atggaatcctgggtgttcgaaaggggctcgctgacccggcgtctgaaagccgcttgcggcgccgacttcaatgtccgggtgatccgccagggtttcgcccatcccttcccggacgaggccttgctgctgaaactcagatccggccgtcgcgcgctggtgcgcgaagtcgaactccgatcccgcgaacggcgtttggtccttgcccgcagcgtccttccggcgcaaaccctgaagggtgcgggacgccggctggcgcacctgggcaatcgcccgctgggcgaaatcctgttcgcgtcacggcgtccgcggcgtcatgggttcgaggcggccctggccgaggaccgccattggcggccggcggttcgcgccggatcaggttcggccgggcccgtctggggtcgtcgctcgctctattcgatcgctggcaggcccttgctggtcgccgagttcttccttcccgccgtgctttccgtcccggagtccgcatga

SEQ ID NO: 146897 - protein, 162 aa, Methylococcus capsulatus
MESWVFERGSLTRRLKAACGADFNVRVIRQGFAHPFPDEALLLKLRSGRRALVREVELRSRERRLVLARSVLPAQTLKGAGRRLAHLGNRPLGEILFASRRPRRHGFEAALAEDRHWRPAVRAGSGSAGPVWGRRSLYSIAGRPLLVAEFFLPAVLSVPESA

SEQ ID NO: 146898 - DNA, 543 bp, Photobacterium profundum
  CDS (1)..(543): transl_table=11
atgtcgaaattcaagcagttgtataaaccattattggataatgcgcagtgggaaacacccctttcactcgcgatagaaggcacagcgtttgggcattggttgcttgaacctaattcattgtcacgccgacttcagcgtcattgcgatgaatttaccgtgtcgctaattgagcagaagaaaatcgatagtacgatgttatcggctgatgaacgtgagttgatcggtgatgttgattgtctattgcgtaaagttgttttgatgggagacggacaaccgtgggtatttgctcgtactttaattccgctatccacccttactgggcaagagagtgatcttgaacaattgggtgagatgccattaggctttcgggtatttaccgatcgtagtgcgcgtcgtgatgcattggaagttgcgaatacaggaacacaagcacagccactatgggctcgccgttcacgtttatggataaataacaaaccgctgctggtggctgaattatttttggcacaagccccggtgtattcaaaggagaaacaatgttag

SEQ ID NO: 146899 - protein, 180 aa, Photobacterium profundum
MSKFKQLYKPLLDNAQWETPLSLAIEGTAFGHWLLEPNSLSRRLQRHCDEFTVSLIEQKKIDSTMLSADERELIGDVDCLLRKVVLMGDGQPWVFARTLIPLSTLTGQESDLEQLGEMPLGFRVFTDRSARRDALEVANTGTQAQPLWARRSRLWINNKPLLVAELFLAQAPVYSKEKQC

SEQ ID NO: 146900 - DNA, 561 bp, Pseudomonas syringae pv
  CDS (1)..(561): transl_table=11
gtgacccagcaatcccccgcattcattagcccgatctggctcaagcgcgagcaattgatcgatgtgcccgaaccaataatgctcgactggttgttcaatcaggactccctcacacgccggctggaccgtttgtctgacggtggcttcagcgtatttccgcaattcgaaggctggcaggctttgcgccgtgatgagtgtctggcgctgggcctgccacttgccagcgaaggctgggtgcgcgaggtgtacttgtgcggtaatgacagcaactgggtattcgctcgcagtgtagccgcccgcagcgctttgcaggacggtggcctgaatatggatgagctgggcactcgctcgctgggtgagttgctgttcagcgaccctgcgttcgcgcgcggcacccttgaagtgtgtcattaccctgaagcctggctgcctgacgctgttgcagctcgcggactatgggcacgccgctcgcgattcagtcgtggtgcgttgagcgtgctggtcgccgaagtgttcctgcccgctctgtgcaatacgatccatgacaaggaccctgtctga

SEQ ID NO: 146901 - protein, 186 aa, Pseudomonas syringae pv
MTQQSPAFISPIWLKREQLIDVPEPIMLDWLFNQDSLTRRLDRLSDGGFSVFPQFEGWQALRRDECLALGLPLASEGWVREVYLCGNDSNWVFARSVAARSALQDGGLNMDELGTRSLGELLFSDPAFARGTLEVCHYPEAWLPDAVAARGLWARRSRFSRGALSVLVAEVFLPALCNTIHDKDPV

SEQ ID NO: 146902 - DNA, 537 bp, Pseudomonas aeruginosa
  CDS (1)..(537): transl_table=11
atgcccagcaatgcgctctggcttcgcgccgaccaactgtccagcgtctcccccgccgtcctcgactggctgttcgacgaggggtcgctgacccggcgcctgaccgccctggccgacggcgcgttccgcgtcgaacccctgctggaaggctggcagaccctgcgcgacgacgaatgccaggggctcgacgtccctaccggcagtagcggctgggtccgcgaggtctacctgcatggccacgaccgtccctgggtgttcgcccgcagcgtggcggcgcgcagcgccctggaaggctcgggcttcgacctggcgctgctcggcacccgctcgctgggcgagttgctgttcagcgacagcgccttcgagcgcgggcccatcgaagtctgccgctatccggcggccggtctgcccgccgaggtccgcgccgagggtctctggggccgtcgctcacggttttcccgcggcgcgctcggggtgctggtggcggaggtgtacctaccgcgcctgtgggaccaggcgggaatcgccgacgtataa

SEQ ID NO: 146903 - protein, 178 aa, Pseudomonas aeruginosa
MPSNALWLRADQLSSVSPAVLDWLFDEGSLTRRLTALADGAFRVEPLLEGWQTLRDDECQGLDVPTGSSGWVREVYLHGHDRPWVFARSVAARSALEGSGFDLALLGTRSLGELLFSDSAFERGPIEVCRYPAAGLPAEVRAEGLWGRRSRFSRGALGVLVAEVYLPRLWDQAGIADV

SEQ ID NO: 146904 - DNA, 564 bp, Pseudomonas fluorescens
  CDS (1)..(564): transl_table=11
gtgccgcactcaatgccccccgccccggcccccatctggctggtgcaaagccgtttgtcccccttccccggcacagccgttgccaactggctgttcgatgaagggtcgctgacccggcgcctgacccggctgtcccacaacgccttcagcgtcaccccgctggtgcaagagtggcaaaccctgcgcaacgacgaatgcgccgccctgggcctgcccgaacagagcgaaggctgggtgcgcgaggtgtacttgcgcgggcacggccaggcctgggtgttcgcccgtagcgtcgccgcccgcagcgccctgctcgaaggcggcctgaatatcgacgaactgggcagccgctccctgggcgagttgctgttctgcgaccaggcctttacccgccagcccatcgaagtctgccgctacccccggcactggctgcccgctgccgttgccgacaacggcctgtggggccgtcgctcacgctttgaccgcggccccctgagcctgctggtggcggaaatcttcctgcccagcctgtggaccgccatagacgcccgaccggaggcctgctga

SEQ ID NO: 146905 - protein, 187 aa, Pseudomonas fluorescens
MPHSMPPAPAPIWLVQSRLSPFPGTAVANWLFDEGSLTRRLTRLSHNAFSVTPLVQEWQTLRNDECAALGLPEQSEGWVREVYLRGHGQAWVFARSVAARSALLEGGLNIDELGSRSLGELLFCDQAFTRQPIEVCRYPRHWLPAAVADNGLWGRRSRFDRGPLSLLVAEIFLPSLWTAIDARPEAC

SEQ ID NO: 146906 - DNA, 558 bp, Pseudomonas putida
  CDS (1)..(558): transl_table=11
gtgtcgtacgaatccccgcaagcagccgctgtcgcgtggctgccgtattcacagctggcgaccgacatcgaccagcccacccttgactggctgttcgacgagggctcgctgacccgccgcctgacccgtctgtccattgatcacttttccgtcaccccgttgttcgagggctggcagccgctgcgcgatgacgaatgccaggcgctgggcatcgctgccggcgccgaaggctgggtgcgcgaagtgtatctgcgcggccatggccaaccttgggtattcgcccgcagcgtggccagccgcagcgccctggaacgtggtggcctggacctggaaaccttgggcagccgctcgctgggcgagctgctgttctgcgaccaggcgttcatccgtcatccactcgaagtgtgcacttatccacaggcctggctgccgtccgaagctgcacatgcggcgctttggggccgccgctcgcgcttcgagcgcaacggcctggacctgctggtggcagaagtgttcctgccggcattgtggcaagcggccaaggaggaaaaccgctga

SEQ ID NO: 146907 - protein, 185 aa, Pseudomonas putida
MSYESPQAAAVAWLPYSQLATDIDQPTLDWLFDEGSLTRRLTRLSIDHFSVTPLFEGWQPLRDDECQALGIAAGAEGWVREVYLRGHGQPWVFARSVASRSALERGGLDLETLGSRSLGELLFCDQAFIRHPLEVCTYPQAWLPSEAAHAALWGRRSRFERNGLDLLVAEVFLPALWQAAKEENR

SEQ ID NO: 146908 - DNA, 561 bp, Pseudomonas syringae pv
  CDS (1)..(561): transl_table=11
gtgacccagcaatcccccgcattcattggccctgcctggcttgagcgcgagcaattgatcgacgcaccggacccggtaatgctcgactggttgttcaatcaggactccctcactcgtcggttggaccgtttgtctgacggtcgtttcagcgtatttccgcagtttgaaggctggcagcccttgcgccctgacgagtgcctggcgctgggcctgccagaggctggcgaaggctgggtgcgcgaggtgtacctgcgtggtaacggcaacaactgggtgttcgcgcgcagtgtcgccgcccgcagcgccctgcaggatggtggcctggatatggacgagctgggcactcgctcgctgggtgagttgctgttcagcgacccggcgttcgtgcgcggcacgcttgaagtgtgtcattaccccgaggcctggctgccggctgccgatgcagcgcgcggactgtgggcacggcgctcgcgctttgatcgcgatgccttgagcgtgctggtcgccgaagttttcctgcctgccctgtgcactgcgattcatgacaaggaccacgtctga

SEQ ID NO: 146909 - protein, 186 aa, Pseudomonas syringae pv
MTQQSPAFIGPAWLEREQLIDAPDPVMLDWLFNQDSLTRRLDRLSDGRFSVFPQFEGWQPLRPDECLALGLPEAGEGWVREVYLRGNGNNWVFARSVAARSALQDGGLDMDELGTRSLGELLFSDPAFVRGTLEVCHYPEAWLPAADAARGLWARRSRFDRDALSVLVAEVFLPALCTAIHDKDHV

SEQ ID NO: 146910 - DNA, 498 bp, Salmonella paratyphi
  CDS (1)..(498): transl_table=11
atgtcacaccctgcgttaacgcaactgcgtgcgctgcgctattttgatgcgattcctgcgcttgaaccccatttgctggattggctgttgctggaagattctatgactaaacgttttgagcagcagggaaagcgggtaagcgtgacgctgattcgggaagcgtttgtcggccaaagtgaggtcgaggaagcatcaggtttactgccatccgagtcccgctactggttacgtgagatactgctttgcgctgacggcgagccctggcttgccggacgtaccgtggtaccggaatccacgctgtgcggacctgaacaggtcttacaacatctgggtaaaaccccgcttggacgttatctatttacatcatcgacactgacccgcgattttattgaaattggacgcgatgcaacgctgtgggggcgccgctctcgactgcggttgagcggaaaaccgctgttgcttaccgagctttttttacctgcatcgccgctgtactga

SEQ ID NO: 146911 - protein, 165 aa, Salmonella paratyphi
MSHPALTQLRALRYFDAIPALEPHLLDWLLLEDSMTKRFEQQGKRVSVTLIREAFVGQSEVEEASGLLPSESRYWLREILLCADGEPWLAGRTVVPESTLCGPEQVLQHLGKTPLGRYLFTSSTLTRDFIEIGRDATLWGRRSRLRLSGKPLLLTELFLPASPLY

SEQ ID NO: 146912 - DNA, 570 bp, Shewanella oneidensis
  CDS (1)..(570): transl_table=11
atgaatgtgaccagcttaagctttccctatggcgaatcaattcaatggttttgtgccgacaacaccaaaaatcttcccgcttctccccttaaggaatggttactcgcccctggtagtctgacacaaaagctcaaaggctgctgtaatgagtttgaagtcagaatccttggtgaaggtcaatgcccgccgctcgacggcgaatatcccaatcaaagtgccgtttgggtgcgcgaagtcttactctgcctcgacgatgtgccttgggtatttgccagaaccttgatccctcagtctttgttatcgacacgccaagctgattttttaggcctaggaacacgaccactgggcgaattattatttagccaagatagttttgtgccgggacgcattgaaattgcccgctttgccaccaatagccgccttgcccacctagcgcaaagtttagcgcagaatgtagagcatgagctttgggggcgacgtcgatatttccaccacaacgaggaggaaatgtttgtcagtgaaatgttcctccctgccgccgaacaggcaatcgctaggctctgcccctaa

SEQ ID NO: 146913 - protein, 189 aa, Shewanella oneidensis
MNVTSLSFPYGESIQWFCADNTKNLPASPLKEWLLAPGSLTQKLKGCCNEFEVRILGEGQCPPLDGEYPNQSAVWVREVLLCLDDVPWVFARTLIPQSLLSTRQADFLGLGTRPLGELLFSQDSFVPGRIEIARFATNSRLAHLAQSLAQNVEHELWGRRRYFHHNEEEMFVSEMFLPAAEQAIARLCP

SEQ ID NO: 146914 - DNA, 552 bp, Vibrio cholerae
  CDS (13)..(552): transl_table=11
ttgaataatagtatgaatcaattaacttcgctctatttagccgcactgaatcgcgtcacttggcaacagcctgatgacattgaatttccagcccctttagctcagcaatggctactcgaacaaggctctctttcgcgccgaatggcgacgcagtgtgagcatctgaccgtagatttattaagtaaccaaatcatgctggcggacaccctgagctatgatgaaactcaactgctcgcctctgaagagtatcttctacgccaagtgattatttatggcgaccaacaaccttgggtatttggccatactttgatccctcgctcatccatgcacaatcagccgtttgatttcacccaacaagggaaaattccactaggtctcaccgtatttagtgcggataatgttaagcgagatgcactgcaagttggctgggtagagacagaactcggacgactattagcccgtcgctctcgcttatggatgaacaacaaacccatgttagtgacggagctgtttctcgccacatccccgatttactctaaggagagagtgtaa

SEQ ID NO: 146915 - protein, 179 aa, Vibrio cholerae
MNQLTSLYLAALNRVTWQQPDDIEFPAPLAQQWLLEQGSLSRRMATQCEHLTVDLLSNQIMLADTLSYDETQLLASEEYLLRQVIIYGDQQPWVFGHTLIPRSSMHNQPFDFTQQGKIPLGLTVFSADNVKRDALQVGWVETELGRLLARRSRLWMNNKPMLVTELFLATSPIYSKERV

SEQ ID NO: 146916 - DNA, 23 bp, Artificial sequence
  primer
atgcgattgttgcgtttttgttg

SEQ ID NO: 146917 - DNA, 22 bp, Artificial sequence
  primer
ttagtacaacggtgacgccggt

SEQ ID NO: 146918 - protein, 165 aa, Artificial sequence
  consensus sequence
  Variant (3)..(6): Xaa in position 3 to 6 is any amino acid
  Variant (10)..(19): Xaa in position 10 to 19 is any amino acid
  Variant (20)..(21): Xaa in position 20 to 21 is any or no amino acid
  Variant (23)..(42): Xaa in position 23 to 42 is any amino acid
  Variant (43)..(50): Xaa in position 43 to 50 is any or no amino acid
  Variant (54)..(54): Xaa in position 54 is any amino acid
  Variant (56)..(65): Xaa in position 56 to 65 is any amino acid
  Variant (67)..(83): Xaa in position 67 to 83 is any amino acid
  Variant (84)..(84): Xaa in position 84 is any or no amino acid
  Variant (87)..(89): Xaa in position 87 to 89 is any amino acid
  Variant (92)..(93): Xaa in position 92 to 93 is any amino acid
  Variant (96)..(112): Xaa in position 96 to 112 is any amino acid
  Variant (113)..(143): Xaa in position 113 to 143 is any or no amino acid
  Variant (145)..(146): Xaa in position 145 to 146 is any amino acid
  Variant (150)..(161): Xaa in position 150 to 161 is any amino acid
  Variant (163)..(163): Xaa in position 163 is any amino acid
WLXXXXSLTXXXXXXXXXXXXVXXXXXXXXXXXXXXXXXXXXXXXXXXXXREVXLXXXXXXXXXXRXXXXXXXXXXXXXXXXXXLGXXXLGXXLFXXXXXXXXXXXXXXXXXXXXXXXXXXXXXXXXXXXXXXXXXXXXXXXXLXXRRSXXXXXXXXXXXXEXFL

SEQ ID NO: 146919 - protein, 20 aa, Artificial sequence
  protein pattern
  Variant (2)..(2): Xaa in position 2 is any amino acid
  Variant (3)..(3): Xaa in position 3 is Ile or Val
  Variant (4)..(4): Xaa in position 4 is any amino acid
  Variant (6)..(8): Xaa in position 6 to 8 is any amino acid
  Variant (9)..(9): Xaa in position 9 is Asp, Glu, Gly, Asn, Gln or Ser
  Variant (10)..(12): Xaa in position 10 to 12 is any amino acid
  Variant (13)..(13): Xaa in position 13 is Ile, Leu or Val
  Variant (14)..(14): Xaa in position 14 is any amino acid
  Variant (15)..(15): Xaa in position 15 is Ala or Gly
  Variant (17)..(17): Xaa in position 17 is Ser or Thr
  Variant (18)..(18): Xaa in position 18 is Ile, Leu or Val
  Variant (19)..(19): Xaa in position 19 is any amino acid
  Variant (20)..(20): Xaa in position 20 is Ala, Pro or Ser
RXXXLXXXXXXXXXXRXXXX

SEQ ID NO: 146920 - protein, 23 aa, Artificial sequence
  protein pattern
  Variant (3)..(3): Xaa in position 3 is Arg or Ser
  Variant (4)..(11): Xaa in position 4 to 11 is any amino acid
  Variant (12)..(12): Xaa in position 12 is Leu, Met or Val
  Variant (13)..(13): Xaa in position 13 is Phe or Leu
  Variant (14)..(14): Xaa in position 14 is Leu or Val
  Variant (15)..(15): Xaa in position 15 is any amino acid
  Variant (17)..(17): Xaa in position 17 is Phe, Ile, Leu, Met or Val
  Variant (20)..(22): Xaa in position 20 to 22 is any or no amino acid
RRXXXXXXXXXXXXXEXFLXXXP

SEQ ID NO: 146921 - DNA, 429 bp, Escherichia coli
  CDS (1)..(429): transl_table=11
atgtgggttacgctttcgtcacgttttcattcgaaaatcgcgtaccaggtaacaattcgggaacattcccccaaagttaaattaataaggcactacactatggttagcaggaaacgtaatagcgttatttaccggtttgccagtttattattggtgttgatgttaagtgcctgtagcgcactgcaaggtacgccacagccagcaccgccagtaacggaccatccgcaagagattcgccgcgaccagacgcaagggttacagcgaataggtagcgtaagcacgatggttcggggttctccggatgacgcattagcagaaatcaaagcgaaagctgtcgctgcaaaagctgattattacgttgtcgtcatggtggacgaaaccatcgtgacaggacagtggtattcacaagccattttgtaccgtaaataa

SEQ ID NO: 146922 - protein, 142 aa, Escherichia coli
MWVTLSSRFHSKIAYQVTIREHSPKVKLIRHYTMVSRKRNSVIYRFASLLLVLMLSACSALQGTPQPAPPVTDHPQEIRRDQTQGLQRIGSVSTMVRGSPDDALAEIKAKAVAAKADYYVVVMVDETIVTGQWYSQAILYRK

SEQ ID NO: 146923 - DNA, 447 bp, Enterobacter cloacae
  CDS (1)..(447): transl_table=11
atgattcataatgttgagagctggattacggtttcacgatattttcattcgaaatctacgtcccagataacacttcgggaacattcccccaaaactaaattcgcagacaactacactatgactatcaggaaaagagacaggtttatgcgcaggcttaccgctttattgctggtctcgctgctcagcggatgttccgtattgcagggtacgccagaaccggcgccgccggttaccgatcatcctcaggaaattcgtcgtaatcagacggaaggattacaacgcctgggtaccgtatccgcgatggttcgtggttccccggatgatgcagaagacgcaattgaagcgcaggccgttgccgcaaaagcagattattacgtcatcacgatgattgatgaaaccattattacgggacagtggtacgcccagggcattttgtaccgtaagtaa

SEQ ID NO: 146924 - protein, 148 aa, Enterobacter cloacae
MIHNVESWITVSRYFHSKSTSQITLREHSPKTKFADNYTMTIRKRDRFMRRLTALLLVSLLSGCSVLQGTPEPAPPVTDHPQEIRRNQTEGLQRLGTVSAMVRGSPDDAEDAIEAQAVAAKADYYVITMIDETIITGQWYAQGILYRK

SEQ ID NO: 146925 - DNA, 330 bp, Salmonella typhimurium LT2
  CDS (1)..(330): transl_table=11
atgattatcaggaaacgagatagagttatgcgtcggtttgcttcattgatagcagcgctgttattaagcgcgtgtagcgtgctgcagggtacgccgcaacctgcgccgcctgtcgccgatcacccgcaggaaatccgtcgcgatcaaacgcaaggactacagcggatggggaccgtaagcgcgctggttcggggctccccggatgatgcaatagatgaaatcagagcgaaagccgtcgctgcgaaagccgattattacgttatcttaatggttgatgaaacggttgtaaccggccagtggtattcacaagccattttgtatcgtcaataa

SEQ ID NO: 146926 - protein, 109 aa, Salmonella typhimurium LT2
MIIRKRDRVMRRFASLIAALLLSACSVLQGTPQPAPPVADHPQEIRRDQTQGLQRMGTVSALVRGSPDDAIDEIRAKAVAAKADYYVILMVDETVVTGQWYSQAILYRQ

SEQ ID NO: 146927 - DNA, 330 bp, Salmonella enterica subsp. enterica serovar Typhi Ty2
  CDS (1)..(330): transl_table=11
atgattatcaggaaacgagatagagttatgcgtcggtttgctccattgatagcagcgctgttattaagcgcgtgtagcatgctgcagggtacgccgcaacctgcgccgcctgtcgccgatcacccgcaggaaatccgtcgcgatcaaacgcaaggactacagcggatggggaccgtaagcgcgctggttcggggttccccggatgatgcaatagatgaaatcagagcgaaagccgccgctgcgaaagccgattattacgttatcttaatggttgatgaaacggttgtaaccggacagtggtattcacaagccattttatatcgtcaataa

SEQ ID NO: 146928 - protein, 109 aa, Salmonella enterica subsp. enterica serovar Typhi Ty2
MIIRKRDRVMRRFAPLIAALLLSACSMLQGTPQPAPPVADHPQEIRRDQTQGLQRMGTVSALVRGSPDDAIDEIRAKAAAAKADYYVILMVDETVVTGQWYSQAILYRQ

SEQ ID NO: 146929 - DNA, 309 bp, Erwinia carotovora subsp. atroseptica SCRI1043
  CDS (1)..(309): transl_table=11
atgaacatcgtacggatacttttcttacccttaatattggcgctgtctggctgtcagctcatacaagggaagcctgtcgcggcacctccacctgcggggcacgcactcgaaattcgttacgcgcaaaccagcctgttagaaaaggtgggtacgatctctgttaccgtacgcgggaatggagacgacgccgagcgagccattcagcaaaaagccgatgcctctggtgcgcactattatgtgattgtactgaaatccgaggctgcaacgctccccggtttgtggtccgcacgtgccgtgctgtatcgttga

SEQ ID NO: 146930 - protein, 102 aa, Erwinia carotovora subsp. atroseptica SCRI1043
MNIVRILFLPLILALSGCQLIQGKPVAAPPPAGHALEIRYAQTSLLEKVGTISVTVRGNGDDAERAIQQKADASGAHYYVIVLKSEAATLPGLWSARAVLYR

SEQ ID NO: 146931 - DNA, 312 bp, Yersinia pseudotuberculosis IP 32953
  CDS (1)..(312): transl_table=11
atgataaatataaaacgcacgatagctttcttgctgctcactctcgggctgtccggttgtaacgctttcaacatcacaccggttccaccaccggccattcagccttacgcacaagaaatcacccgcgcccagagcctcaggttacagaaagtgggtacggtttcagcgcaggtatacggtagcccaggagacgttgaaactgaaattcagcgcagggccaatgccagcggggcaccttactacttgattgtgatgatatcagacagtgtctaccccggtatttggtatgccaatgctctgctgtatcgttaa

SEQ ID NO: 146932 - protein, 103 aa, Yersinia pseudotuberculosis IP 32953
MINIKRTIAFLLLTLGLSGCNAFNITPVPPPAIQPYAQEITRAQSLRLQKVGTVSAQVYGSPGDVETEIQRRANASGAPYYLIVMISDSVYPGIWYANALLYR

SEQ ID NO: 146933 - DNA, 23 bp, Artificial sequence
  primer
atgtgggttacgctttcgtcacg

SEQ ID NO: 146934 - DNA, 26 bp, Artificial sequence
  primer
ttatttacggtacaaaatggcttgtg

SEQ ID NO: 146935 - protein, 109 aa, Artificial sequence
  consensus sequence
  Variant (2)..(5): Xaa in position 2 to 5 is any amino acid
  Variant (6)..(10): Xaa in position 6 to 10 is any or no amino acid
  Variant (12)..(14): Xaa in position 12 to 14 is any amino acid
  Variant (15)..(15): Xaa in position 15 is any or no amino acid
  Variant (17)..(19): Xaa in position 17 to 19 is any amino acid
  Variant (21)..(21): Xaa in position 21 is any amino acid
  Variant (24)..(24): Xaa in position 24 is any amino acid
  Variant (26)..(28): Xaa in position 26 to 28 is any amino acid
  Variant (33)..(33): Xaa in position 33 is any amino acid
  Variant (38)..(40): Xaa in position 38 to 40 is any amino acid
  Variant (42)..(42): Xaa in position 42 is any amino acid
  Variant (48)..(48): Xaa in position 48 is any amino acid
  Variant (51)..(52): Xaa in position 51 to 52 is any amino acid
  Variant (55)..(56): Xaa in position 55 to 56 is any amino acid
  Variant (61)..(62): Xaa in position 61 to 62 is any amino acid
  Variant (71)..(73): Xaa in position 71 to 73 is any amino acid
  Variant (75)..(77): Xaa in position 75 to 77 is any amino acid
  Variant (79)..(79): Xaa in position 79 is any amino acid
  Variant (81)..(82): Xaa in position 81 to 82 is any amino acid
  Variant (84)..(84): Xaa in position 84 is any amino acid
  Variant (89)..(89): Xaa in position 89 is any amino acid
  Variant (91)..(92): Xaa in position 91 to 92 is any amino acid
  Variant (94)..(97): Xaa in position 94 to 97 is any amino acid
  Variant (98)..(98): Xaa in position 98 is any or no amino acid
  Variant (100)..(100): Xaa in position 100 is any amino acid
  Variant (103)..(104): Xaa in position 103 to 104 is any amino acid
  Variant (106)..(106): Xaa in position 106 is any amino acid
MXXXXXXXXXRXXXXLXXXLXLSXCXXXQGTPXPAPPXXXHXQEIRRXQTXXLQXXGTVSXXVRGSPDDAXXXIXXXAXAXXAXYYVIXMXXEXXXXXGXWYXXAXLYR

SEQ ID NO: 146936 - protein, 60 aa, Artificial sequence
  protein pattern
  Variant (2)..(3): Xaa in position 2 to 3 is any amino acid
  Variant (5)..(5): Xaa in position 5 is any amino acid
  Variant (6)..(6): Xaa in position 6 is Ala or Pro
  Variant (10)..(10): Xaa in position 10 is Pro or Val
  Variant (11)..(11): Xaa in position 11 is Ala or Thr
  Variant (12)..(12): Xaa in position 12 is Asp or Gly
  Variant (14)..(14): Xaa in position 14 is Ala or Pro
  Variant (15)..(15): Xaa in position 15 is any amino acid
  Variant (19)..(19): Xaa in position 19 is any amino acid
  Variant (20)..(20): Xaa in position 20 is Ala, Asp or Asn
  Variant (23)..(23): Xaa in position 23 is Glu, Gln or Ser
  Variant (24)..(24): Xaa in position 24 is Gly or Leu
  Variant (26)..(26): Xaa in position 26 is Glu or Gln
  Variant (27)..(27): Xaa in position 27 is Lys or Arg
  Variant (28)..(28): Xaa in position 28 is Ile, Leu, Met or Val
  Variant (30)..(30): Xaa in position 30 is Ser or Thr
  Variant (31)..(31): Xaa in position 31 is Ile or Val
  Variant (33)..(33): Xaa in position 33 is Ala, Thr or Val
  Variant (34)..(34): Xaa in position 34 is any amino acid
  Variant (38)..(38): Xaa in position 38 is Asn or Ser
  Variant (39)..(39): Xaa in position 39 is Gly or Pro
  Variant (43)..(44): Xaa in position 43 to 44 is any amino acid
  Variant (45)..(45): Xaa in position 45 is Ala or Glu
  Variant (47)..(47): Xaa in position 47 is any amino acid
  Variant (48)..(48): Xaa in position 48 is Ala or Gln
  Variant (49)..(49): Xaa in position 49 is any amino acid
  Variant (51)..(51): Xaa in position 51 is Ala, Asp or Val
  Variant (53)..(53): Xaa in position 53 is Ala or Ser
  Variant (54)..(54): Xaa in position 54 is any amino acid
  Variant (56)..(56): Xaa in position 56 is Asp or His
  Variant (60)..(60): Xaa in position 60 is Ile or Val
QXXPXXAPPXXXHXXEIRXXQTXXLXXXGXXSXXVRGXXDDAXXXIXXXAXAXXAXYYVX

SEQ ID NO: 146937 - protein, 13 aa, Artificial sequence
  protein pattern
  Variant (2)..(2): Xaa in position 2 is any amino acid
  Variant (5)..(6): Xaa in position 5 to 6 is any or no amino acid
  Variant (8)..(8): Xaa in position 8 is any amino acid
  Variant (9)..(10): Xaa in position 9 to 10 is any or no amino acid
GXWYXXAXXXLYR

SEQ ID NO: 146938 - protein, 13 aa, Artificial sequence
  protein pattern
  Variant (2)..(2): Xaa in position 2 is any amino acid
  Variant (4)..(4): Xaa in position 4 is Ile or Leu
  Variant (5)..(5): Xaa in position 5 is Ala, Leu or Val
  Variant (6)..(6): Xaa in position 6 is Ala, Ser, Thr or Val
  Variant (8)..(8): Xaa in position 8 is any or no amino acid
  Variant (11)..(11): Xaa in position 11 is Ala or Gly
  Variant (13)..(13): Xaa in position 13 is Asn or Ser
AXLXXXLXLSXCX

SEQ ID NO: 146939 - DNA, 981 bp, Synechocystis sp.
  CDS (1)..(981): transl_table=11
atgggtctttcccgtttaccggtgattgggttatttattaccctggtcaccatagcttttttgctggttgccaactttgaccaaaatccagtcccggttaatctggccaaggatgcccccacccaaagctcctctcctgggttggttattgtggcggcgggagatattgcctgtgcccccgaagatcccggctttaataacagtttaggtacagcagaccgttgccagatggccgccacagctaatttggttgctagcgctaatcctgatctagttttaccgctaggggataaccagtacgaacggggagaattggctaattaccaagcttcctatcaacccacctggggaaaattcgatgccatcagccgccctgtgccaggtaaccatgaatattacggccccggcaaagatgcggcggactactttgattattttggccaactagccggcgatcgccaaaagggctattacagctacgaccagggggactggcattttattgccctcaattccaactgccaatacattggcggttgcgaaatgggatcggcccaacaggaatggctcaggcaagatttagccgaaaacaacaaagtctgtaccctagcctattggcaccaccccctttattcctctggtgtgcacggtaaccaaaagcaaatggcggacctatggcagaccctctacgatggcggtgcggaattggtgctatcggggcacgaccacctgtacgaaagatttgccccccaaaatgcccagggtgaattggatagggaaaaggggctgaggcaatttgtcattggcaccggcggcaaaagtctttatcctttcaaaaccgtgcgccccaacagtgaagttcaggcaatgggagtttatggagtgctgaaaatggaactccaatccaacagctaccgctggcaattcctaaccgccaacaccgacgaattcaatgaacaggggaaggatttatgtcattaa

SEQ ID NO: 146940 - protein, 326 aa, Synechocystis sp.
MGLSRLPVIGLFITLVTIAFLLVANFDQNPVPVNLAKDAPTQSSSPGLVIVAAGDIACAPEDPGFNNSLGTADRCQMAATANLVASANPDLVLPLGDNQYERGELANYQASYQPTWGKFDAISRPVPGNHEYYGPGKDAADYFDYFGQLAGDRQKGYYSYDQGDWHFIALNSNCQYIGGCEMGSAQQEWLRQDLAENNKVCTLAYWHHPLYSSGVHGNQKQMADLWQTLYDGGAELVLSGHDHLYERFAPQNAQGELDREKGLRQFVIGTGGKSLYPFKTVRPNSEVQAMGVYGVLKMELQSNSYRWQFLTANTDEFNEQGKDLCH

SEQ ID NO: 146941 - DNA, 900 bp, Rubrobacter xylanophilus DSM 9941
  CDS (1)..(900): transl_table=11
ttgaacgatgtccttggtttgaggttgctcaagtatgcggcatgtctcctcttggcctgttgcggggcgctggtcgtggcggtcccggtcctcggccagacgtccgcggtcacgatggtcggggccggcgacatagccgactgcaagggcaccggcgagcggcagacggcgcggctggtcgcccgcatctccggcaccgtcttcacggtcggggacaacgtccaggggcgggggaggtggtccgagttcaccgactgctacgccccgacgtggggacgcttcaagaaccggaccaggcccgcggccggaaaccacgagtactacacctccggggcccggccgtactacaggtacttcggcagccgcgccggcagacccggcctcggctactacagctacgaccgggggagctggcacgtggtcgtcctcaacagcaactgcgggcacgtgcgctgcggggcgggctcgcgccagctcgagtggctcaagcgggacctcgcggccaaccggtcccgctgcaccatggccatcttccaccacccgctcttcacctcctcgcgcagcgccgacaccaaggaggtgcggcccttctggaaggtgctctacaacaaccgggcggagctcatcctcaacgggcacgcgcacagctacgagcgcttcgcgccgcagacccccttcggcaggcgggcgccggagcgcgggatccggcagttcgtcgtcgggacgggcggcacgccgccgctcaaccccttcggggcgcggccggccaacagccaggtccgcaacgacaagaccttcggtgtgctgcggctgaccctcaggcccggcggctactcgtggaggttcgtcccggtggcgggcaagaccttcaccgactcgggacggggcgtctgccgctag

SEQ ID NO: 146942 - protein, 299 aa, Rubrobacter xylanophilus DSM 9941
MNDVLGLRLLKYAACLLLACCGALVVAVPVLGQTSAVTMVGAGDIADCKGTGERQTARLVARISGTVFTVGDNVQGRGRWSEFTDCYAPTWGRFKNRTRPAAGNHEYYTSGARPYYRYFGSRAGRPGLGYYSYDRGSWHVVVLNSNCGHVRCGAGSRQLEWLKRDLAANRSRCTMAIFHHPLFTSSRSADTKEVRPFWKVLYNNRAELILNGHAHSYERFAPQTPFGRRAPERGIRQFVVGTGGTPPLNPFGARPANSQVRNDKTFGVLRLTLRPGGYSWRFVPVAGKTFTDSGRGVCR

SEQ ID NO: 146943 - DNA, 20 bp, Artificial sequence
  primer
atgggtctttcccgtttacc

SEQ ID NO: 146944 - DNA, 20 bp, Artificial sequence
  primer
ttaatgacataaatccttcc

SEQ ID NO: 146945 - DNA, 621 bp, Synechocystis sp.
  CDS (1)..(621): transl_table=11
atggctcaaactcccctccgcattggcattgctggccctgtgggctctggcaaaacggcccttttggaagccctctgcaaagccttgaggcaaaaatatcaattggctgtggtcactaacgatatttacactcaggaagatgcccaatttttagtccgagcggaagccctcacccccgatcgcatccttggggtagaaactggagggtgtccccacacggccattcgagaagatgctagtctcaacctagcggcgatcgccgatttagaggcccgttttatgcccctggatatggtgtttttggagagtgggggagataatttagcagccacctttagcccggaattggtggatttaaccctctatgtcattgacgtagcggcgggggacaaaattccccgtaagggcggcccaggcattaccaaatcagatttattggtgattaataagattgatttagcaccgatggtgggggcagatttgggaatcatggatcgggatgcaaaaaaaatgcggggggaaaaaccctttgtctttactaacttgaaaacagccactggattaagtaccgtggtagattttgttgaacattatttaccaactaaggttttggcaagttaa

SEQ ID NO: 146946 - protein, 206 aa, Synechocystis sp.
MAQTPLRIGIAGPVGSGKTALLEALCKALRQKYQLAVVTNDIYTQEDAQFLVRAEALTPDRILGVETGGCPHTAIREDASLNLAAIADLEARFMPLDMVFLESGGDNLAATFSPELVDLTLYVIDVAAGDKIPRKGGPGITKSDLLVINKIDLAPMVGADLGIMDRDAKKMRGEKPFVFTNLKTATGLSTVVDFVEHYLPTKVLAS

SEQ ID NO: 146947 - DNA, 1145 bp, Glycine max
  CDS (126)..(983)
agtggagtggaagtagtagcaagtacgtcgtatatgtggttgatcttttgctggttgtttgttttgttccttccaattgtcagatctgaatcaccggactcactcttcacactcactcacactgaatggcttctgaaggcgaccatcaccaccaccaccaccaccatcaagatcacgatcatcatcatcatgatcatgatcaccatcatcatcacgatggagagggagagaccaactcatgggtaggtaaggatgggaaggtgtaccatagccacgatggtctggcgccgcattctcacgaacccatttactcccccggctacttcaccagaagagctccaccgcttctcaacagaaacttcaacgaaagagccttcaccgtcggaatcggtggacccgtcggtactggcaaaacagctctcatgttggccctttgtgaactcttgcgcgaaaactacagtctcgcagctgtgacaaatgatatattcactaaagaggatggtgagttcttggtgaagcacaaagcacttcctgaggaaaggatacgcgctgtagaaactgggggttgcccacatgctgctattcgggaggacatcagtattaatcttggaccgctggaggagctttctaacctcttcaaagcagatatacttctttgtgaatctgggggagataacctggctgccaatttcagcagggaattggctgactatattatttacataatagacgtgtctggcggtgataaaattcctcggaaaggtggtcctggaatcacgcaagctgatctccttgtgataaacaagactgaccttgctcctgcaattggggctgatttggcagtcatgcagcgggatgctctgcggatgagagatggagggccatttgtctttgcacaggtgaagcataagattggagtagaagaaattgggaatcttgtcttgcaggcatgggaagcagccacagggaataagcgtcattaacatttctttgaaaaacggtttcctttgtgttgtatattttcttagcatgtttagtaataactccagaaacatgatgttcacgacgtggattcgagttcttatgttgtgtctgttcctgcatgttacagtatcaagttcataaacatgttactacttggacat

SEQ ID NO: 146948 - protein, 285 aa, Glycine max
MASEGDHHHHHHHHQDHDHHHHDHDHHHHHDGEGETNSWVGKDGKVYHSHDGLAPHSHEPIYSPGYFTRRAPPLLNRNFNERAFTVGIGGPVGTGKTALMLALCELLRENYSLAAVTNDIFTKEDGEFLVKHKALPEERIRAVETGGCPHAAIREDISINLGPLEELSNLFKADILLCESGGDNLAANFSRELADYIIYIIDVSGGDKIPRKGGPGITQADLLVINKTDLAPAIGADLAVMQRDALRMRDGGPFVFAQVKHKIGVEEIGNLVLQAWEAATGNKRH

SEQ ID NO: 146949 - DNA, 600 bp, Helicobacter pylori
  CDS (1)..(600): transl_table=11
atggtaaaaattggagtttgtggtcctgtaggaagcggtaaaaccgccttgattgaagctttaacgcgccacatgtcaaaagattatgacatggcggtcatcactaatgatatttacacgaaagaagacgcagagtttatgtgtaaaaattcggtgatgccacgagagaggatcattggcgtagaaacaggaggctgtccgcacacggctattagagaagacgcttctatgaatttagaagccgtagaagaaatgcatggccgtttccctaatttggaattgcttttgattgaaagcggaggcgataacctttcagcgacattcaacccagagctagcggactttacgatctttgtgattgatgtggctgagggcgataaaatcccccgaaaaggcgggccaggaatcacgcgctcagacttgcttgtcatcaataagattgatttagccccctatgtgggagcggacttgaaagtcatggaaagggattctaaaaaaatgcgcggcgaaaagccctttatttttacgaatatccgtgctaaagaaggcttagacgatgtgatcgcttggatcaagcgcaacgctttattggaagattga

SEQ ID NO: 146950 - protein, 199 aa, Helicobacter pylori
MVKIGVCGPVGSGKTALIEALTRHMSKDYDMAVITNDIYTKEDAEFMCKNSVMPRERIIGVETGGCPHTAIREDASMNLEAVEEMHGRFPNLELLLIESGGDNLSATFNPELADFTIFVIDVAEGDKIPRKGGPGITRSDLLVINKIDLAPYVGADLKVMERDSKKMRGEKPFIFTNIRAKEGLDDVIAWIKRNALLED

SEQ ID NO: 146951 - DNA, 855 bp, Oryza sativa (japonica cultivar-group)
  CDS (1)..(855)
atggcgtctcacgaccacgaccacgaccaccaccaccaccacagccacgacgacggcgaccaccaccattcccaccaccaggacggcagccatggcggcggcggcggctcgtgggtcggggaggacgggcgcgtgtggcactcgcacgacggcctcgcgccgcactcccacgagcccatctactcccccggcgacttctccaagcgcgcgccgccgctcatctcgcggcgcttcgcggaacgcgccttcaccgtcggcatcggtggccccgtcggcactgggaaaactgccctgatgctagcactttgcaggtccctgcgtgaaaaatatagtctcgcagcggttacaaatgatatattcacaaaagaggatggagaattcttgatcaaacatggagcactgcctgaagagcgcatccgtgcagtcgaaactggaggctgccctcacgctgcaatacgtgaggacatcagcataaatctaggtcctctggaagaactatcaaacttgtgcaaagctgatttactcctctgtgaatctggaggagataacttggctgccaacttcagcagggaactggcagactacataatctacatcatcgatgtttctggtggggacaaaataccaagaaaaggtggccctgggataacccaagcagatcttttgataataaacaagacagaccttgcaccagcagttggagctgacctggctgtaatggaacgagatgcgcttcgcatgcgggaaggagggccttttgtctttgcacaggtgaaacatggagtcggcgtggaggaaattgtgaaccacatcctgcaagcttgggagatcgccaccggcaacaagcgtcgatag

SEQ ID NO: 146952 - protein, 284 aa, Oryza sativa (japonica cultivar-group)
MASHDHDHDHHHHHSHDDGDHHHSHHQDGSHGGGGGSWVGEDGRVWHSHDGLAPHSHEPIYSPGDFSKRAPPLISRRFAERAFTVGIGGPVGTGKTALMLALCRSLREKYSLAAVTNDIFTKEDGEFLIKHGALPEERIRAVETGGCPHAAIREDISINLGPLEELSNLCKADLLLCESGGDNLAANFSRELADYIIYIIDVSGGDKIPRKGGPGITQADLLIINKTDLAPAVGADLAVMERDALRMREGGPFVFAQVKHGVGVEEIVNHILQAWEIATGNKRR

SEQ ID NO: 146953 - DNA, 642 bp, Mesorhizobium loti MAFF303099
  CDS (1)..(642): transl_table=11
atgacccaagccaacggtccccttcgcatcggtattggcggccctgtcggctccggcaagacgacgctcaccgaaaaactctgcaaggcgctgcgcgacgaattctccatcgccgttgtcaccaacgacatctacacaagggaagacgccatgatgctggcccggttgcaggcgctgccggaggaccgcatcgtcggcgtcgagaccggcggctgcccgcacaccgccattcgcgaggacgcctcgatcaatctgcaggcgattgccgagctcaaccggaaattccccgatctcgacatcatcttcatcgaatccggcggcgacaatcttgccgctaccttctcgccggacctcgcggatctgacgctctatgtcatctcggtctgccagggcgaggaaatcccgcgcaagggcgggccggcgatcacccgctcggatttcctgatcatcaacaaaagcgatctggcgccctatgtgaacgtcaacctcgacgtgatggagagcgacgccgcccgcatgcgcggcaagcggcctttcggcttcaccgatctgtcgcgcggcaagggcttgcgggaggtcatcgatttcatcgtcgagcatggcgggctgagggttggcaccgccaccagcacggcggcctga

SEQ ID NO: 146954 - protein, 213 aa, Mesorhizobium loti MAFF303099
MTQANGPLRIGIGGPVGSGKTTLTEKLCKALRDEFSIAVVTNDIYTREDAMMLARLQALPEDRIVGVETGGCPHTAIREDASINLQAIAELNRKFPDLDIIFIESGGDNLAATFSPDLADLTLYVISVCQGEEIPRKGGPAITRSDFLIINKSDLAPYVNVNLDVMESDAARMRGKRPFGFTDLSRGKGLREVIDFIVEHGGLRVGTATSTAA

SEQ ID NO: 146955 - DNA, 828 bp, Arabidopsis thaliana
  CDS (1)..(828)
atggcatcacacgaccaccatcatcatcatcacgatcatgagcatgaccacgagaaatcagacggcggagaagggaaggcgtcgtgggtggggaaggacgggaaggtgtaccatagccacgatggactcgcacctcactcacacgaacccatctactctcctggctacttcagtcgccgagctcctccgcttcacgaccgtaacttctctgagagagcttttaccgtcggtattggcggtcccgttggcactgggaaaacggcattgatgcttgctctttgtagattcttgagggacaaatatagtcttgctgctgtgacaaatgatatattcacgaaagaggatggtgagtttctggtgaagaatggggctcttcctgaggaaaggattagagctgttgaaacaggtggatgtccacacgctgctatccgtgaagatatcagtatcaatttgggtcctcttgaggagttatctaacttattcaaggctgatttgcttctttgtgaatccggtggagataatttagctgctaatttcagtagagaactagctgactatatcatctacatcatcgatgtatcggctggtgataaaataccccgtaaaggcggccctggaatcactcaagctgatcttctggtgataaacaagactgaccttgcagcagctgttggggctgacttatcggtcatggaaagggattcactacgcatgcgtgatggagggccatttgtctttgctcaggtgaagcatgggcttggagtcgaggaaatcgtgaaccatgtcatgcactcatgggaacatgcgaccgggaagaagcgccagtga

SEQ ID NO: 146956 - protein, 275 aa, Arabidopsis thaliana
MASHDHHHHHHDHEHDHEKSDGGEGKASWVGKDGKVYHSHDGLAPHSHEPIYSPGYFSRRAPPLHDRNFSERAFTVGIGGPVGTGKTALMLALCRFLRDKYSLAAVTNDIFTKEDGEFLVKNGALPEERIRAVETGGCPHAAIREDISINLGPLEELSNLFKADLLLCESGGDNLAANFSRELADYIIYIIDVSAGDKIPRKGGPGITQADLLVINKTDLAAAVGADLSVMERDSLRMRDGGPFVFAQVKHGLGVEEIVNHVMHSWEHATGKKRQ

SEQ ID NO: 146957 - DNA, 627 bp, Bacillus halodurans C-125
  CDS (1)..(627): transl_table=11
atgaagcccattcggattggaatcggcgggcctgtcggctcagggaaaacccatctggtcgagcaattaacgcgagcgatgcatgaaagctatgagcttgctgtcattacaaacgatatatatacgaaggaagatgctcagttcttagtgaagcatggtattttaccggaagatcgtatcatcggtgtggaaacaggagggtgtccccatacggcgattagggaagatgcctcaatgaattttgaagcgatccatgaattgaagcagcggtttaccaaccttgatattatttttgttgagagcggaggcgataatttatcagctaccttcagccccgaacttgtggacggctttatttatgtcatcgatgtggcggaagggcaagacatcccgcgcaaaggaggccctggggttacacgctcggatttgcttgtgatcaataaaatagacctagctccgtatgttgaagtcgatctagatatcatggaagaggatgcaaagcaggctcgaggagaaagaccgttcgtgtttaccgaccagaagcgaggaaaaggcatcgagaccattatcgactggattaaacgagaactgttgttagaagacatggtaaaggagccttccgtgtga

SEQ ID NO: 146958 - protein, 208 aa, Bacillus halodurans C-125
MKPIRIGIGGPVGSGKTHLVEQLTRAMHESYELAVITNDIYTKEDAQFLVKHGILPEDRIIGVETGGCPHTAIREDASMNFEAIHELKQRFTNLDIIFVESGGDNLSATFSPELVDGFIYVIDVAEGQDIPRKGGPGVTRSDLLVINKIDLAPYVEVDLDIMEEDAKQARGERPFVFTDQKRGKGIETIIDWIKRELLLEDMVKEPSV

SEQ ID NO: 146959 - DNA, 642 bp, Deinococcus radiodurans R1
  CDS (1)..(642): transl_table=11
atgactcccctcaaaatcggcgtcggcggcccggtcggcagcggcaagaccgcgctgcttgaagtgctgtgccgcgagctgcgcgaccgttacgacctcgccgtcatcaccaacgacatctacaccttcgaggaccagcgcatcctgacccgcgccgccgcgctggcccctgaacgcatccgcggcgtgcagaccggcggctgcccccacaccgccatccgggaagacagttcgctcaatcaggaaaccgtcgaggcgctgcaaggcgagtttcccggcctcgaactgctgttcattgagtcggggggcgacaacctcgcgtcctccttttcgcccgagctggtggacgcctggctgttcgtcctcgacgtggcgggcggcgaaaaagtgccgcgcaagggcggccccggcatccggcactccgacctgctcgtcatcaacaagaccgacctcgctccgctggtgggcgccgacctgcgcgtgatggatgccgacgcgcgggcgcagcgcagggctggagatgaagtacgcccctacgtcttcaccaacctcaaaagcggggcgggcgtggacgaaatcatcgcctggatcgagcacgacctgctgtttcgggacgtgacgccgccacgggtcggtctttga

SEQ ID NO: 146960 - protein, 213 aa, Deinococcus radiodurans R1
MTPLKIGVGGPVGSGKTALLEVLCRELRDRYDLAVITNDIYTFEDQRILTRAAALAPERIRGVQTGGCPHTAIREDSSLNQETVEALQGEFPGLELLFIESGGDNLASSFSPELVDAWLFVLDVAGGEKVPRKGGPGIRHSDLLVINKTDLAPLVGADLRVMDADARAQRRAGDEVRPYVFTNLKSGAGVDEIIAWIEHDLLFRDVTPPRVGL

SEQ ID NO: 146961 - DNA, 618 bp, Escherichia coli O157:H7 EDL933
  CDS (1)..(618): transl_table=11
atgaacataatcaagcaaccgctgcgtgtcggcgtcggcggtccggtcggctcaggtaaaaccgcgcttctggaagccctctgcaaatccatgcgtgacacctggcaattagccgtagtcaccaacgacatctacaccagagaagatcaacgcattctcactgaggccggagcactggaagcggaacgcattgtcggtgtcgaaacggggggctgccctcatacagccattcgtgaagacgcatcaatgaatctggcagccgtggaagcactgagtgagaaatttggtaatctcgagctgatctttgtggaaagcggcggcgacaacctgagtgcgaccttcagccccgaactggcggaccttaccatatatgtcatagatgtggcagaaggagaaaagatcccgcgtaaaggcggtccggggatcaccaaatccgacttcctcgtgatcaataaaactgaccttgcaccatacgtgggcgcctccctcgaggtaatggagcgtgatactttacgtatgcgcggagaacgcccatgggggttcactaacctgaaaagtggtgaaggtctgcaaaacatcatcgcctttatcgaagagcagggcatgctgggtaagtaa

SEQ ID NO: 146962 - protein, 205 aa, Escherichia coli O157:H7 EDL933
MNIIKQPLRVGVGGPVGSGKTALLEALCKSMRDTWQLAVVTNDIYTREDQRILTEAGALEAERIVGVETGGCPHTAIREDASMNLAAVEALSEKFGNLELIFVESGGDNLSATFSPELADLTIYVIDVAEGEKIPRKGGPGITKSDFLVINKTDLAPYVGASLEVMERDTLRMRGERPWGFTNLKSGEGLQNIIAFIEEQGMLGK

SEQ ID NO: 146963 - DNA, 615 bp, Agrobacterium tumefaciens str. C58
  CDS (1)..(615): transl_table=11
gtgatgaaatcgggtaatggtccgctgcgcgtcggcattggcgggccggtaggttccggcaagacggcgttgacggaaaagctctgcaaggcgatgagcggcgattattccgtcgccgtcgtcaccaatgatatctataccaaggaagatgccgaggcgttggtgcgcatgcaggcgttgccatccgagcgtatcgtcggtgtggagacaggcggttgcccgcataccgccatccgcgaggatgcgacgatcaatctgcaggcgattgccgggcttaatgcgcagtttcccgatctcgatgttgtcttcatcgaatccggcggtgacaatctcgccgcgaccttttcgcccgatcttgccgatatcaccatctatgtgatctccgtctgccagggcgaggagattccgcgcaagggcgggccgggcatcacccgctcggacctgctggtcatcaacaagaaggaccttgcgccttatgtcggtgccgatctgactgtgatggacagcgatgcgacgcggatgcgcaacgccatgccgttcgtttttaccgatatgaaacggggcgatggcgtcgatcgtatcgtcggtttcctgaaagagcagggtggtctgtga

SEQ ID NO: 146964 - protein, 204 aa, Agrobacterium tumefaciens str. C58
MMKSGNGPLRVGIGGPVGSGKTALTEKLCKAMSGDYSVAVVTNDIYTKEDAEALVRMQALPSERIVGVETGGCPHTAIREDATINLQAIAGLNAQFPDLDVVFIESGGDNLAATFSPDLADITIYVISVCQGEEIPRKGGPGITRSDLLVINKKDLAPYVGADLTVMDSDATRMRNAMPFVFTDMKRGDGVDRIVGFLKEQGGL

SEQ ID NO: 146965 - DNA, 630 bp, Sulfolobus tokodaii str. 7
  CDS (1)..(630): transl_table=11
atgattagaattggagttttaggtccagttggtagtggtaagacgacgttaatagagttcttaacagaatacttagtaaagaaggaaggactttcagtgggaataataactaacgatgttatatcttctcatgacgctctaagaatttatcagaatttagtgttaaaggaaaagttgttaccaaaagaaaatgtaataggaattgtaactggtggctgtcctcatacagcaataagagaagacccctcagtaaatttaagagcattagaaactttaatgaaaagaacaagtttagatgttatatttatagaaagtggtggagataatgttatgtctacatttagcccaatattggctgactatacaatctttgtattagatacagcagctggtgataaatatccaggaaaaggaggattaggaattcaggaaagcgatttacttgttgtgaacaaaatagatttagcaccttttgtaggagctgatttagagaaaatgagaagagatgcagagaagataaggaaggataaacctacagtctttattagtttaaaaacaggagatggaatagacgatttaattaaaattataagaagtgagttagagcttgaggggcttattagaagttaa

SEQ ID NO: 146966 - protein, 209 aa, Sulfolobus tokodaii str. 7
MIRIGVLGPVGSGKTTLIEFLTEYLVKKEGLSVGIITNDVISSHDALRIYQNLVLKEKLLPKENVIGIVTGGCPHTAIREDPSVNLRALETLMKRTSLDVIFIESGGDNVMSTFSPILADYTIFVLDTAAGDKYPGKGGLGIQESDLLVVNKIDLAPFVGADLEKMRRDAEKIRKDKPTVFISLKTGDGIDDLIKIIRSELELEGLIRS

SEQ ID NO: 146967 - DNA, 612 bp, Sinorhizobium meliloti 1021
  CDS (1)..(612): transl_table=11
atgccatcgaaaaacggtcctctgcgcatcggtatcggcggtccggtcggatccggaaagacggcgctgaccgacaagctctgcaaggccatgcgggagaaatattccgtcgcggtggttacgaacgacatctacaccaaggaagatgccgaggcgctggtgcgcatgcaggccttgccttcggagcggatcgtcggagtcgagacgggcggatgcccccacacggcgatccgcgaggatgcatcgatcaatcttcaggcgatcgccgatctcaaccgccgcattcccgatctcgatgtcgtcttcatcgagtcgggaggggacaatctggcagcgaccttctcgcccgatctcgcggatcttacgatttatgtgatctcggtctgccagggcgaggaaattccgcgcaagggcggaccgggcatcaccaggtccgatctgctggtgatcaacaagaaggatctcgccccttacgtcggtgccgacctcggggtcatggaacgcgacgcggcccggatgcgagccgaaaagccgttcgtgttctcggatatgaaacgcggcgacggggtggagcggatcgtcgagttcctgacggtgcacggggggctctag

SEQ ID NO: 146968 - protein, 203 aa, Sinorhizobium meliloti 1021
MPSKNGPLRIGIGGPVGSGKTALTDKLCKAMREKYSVAVVTNDIYTKEDAEALVRMQALPSERIVGVETGGCPHTAIREDASINLQAIADLNRRIPDLDVVFIESGGDNLAATFSPDLADLTIYVISVCQGEEIPRKGGPGITRSDLLVINKKDLAPYVGADLGVMERDAARMRAEKPFVFSDMKRGDGVERIVEFLTVHGGL

SEQ ID NO: 146969 - DNA, 603 bp, Nostoc sp. PCC 7120
  CDS (1)..(603): transl_table=11
atgaatgcttttcgtgttggggtagcaggcccagtgggttcggggaagacggctttagttgatgctttgtgtaaagcattgcgcgatcgctataagctggcagtggtgacaaatgatatatatactcaagaagatgcccaatttttggtacgttctcaagctttgacaagcgatcgcattttaggcgtagagacaggcggttgtccacacacagcgattcgggaagatgcttccatgaatttggcagcaattgaacagctagaacagcgtttcaccgatttagatttagtctttttagaaagcggtggagataatttagctgctacctttagtcctgaattagtagatttaacaatttacgtaattgatgtagctgccggtgacaaaatcccccgcaaaggtgggccaggaattaccaaatctgacttattagtaattaataaaactgacctagccccatacgttggcgcagatttaagcgttatggaaagagacgcaaaaaaaatgcgcggcgataaaccctttatttttactaatttaaaaactcaacaaggactcaacgatgtaattgaatttgtttgtaatcatatctgtcctgtgtag

SEQ ID NO: 146970 - protein, 200 aa, Nostoc sp. PCC 7120
MNAFRVGVAGPVGSGKTALVDALCKALRDRYKLAVVTNDIYTQEDAQFLVRSQALTSDRILGVETGGCPHTAIREDASMNLAAIEQLEQRFTDLDLVFLESGGDNLAATFSPELVDLTIYVIDVAAGDKIPRKGGPGITKSDLLVINKTDLAPYVGADLSVMERDAKKMRGDKPFIFTNLKTQQGLNDVIEFVCNHICPV

SEQ ID NO: 146971 - DNA, 633 bp, Ralstonia solanacearum GMI1000
  CDS (1)..(633): transl_table=11
atgcgtaccaagaaactgcccgccctgcgcgtcggcgtgggcggccccgtcggttccggcaagaccacgctgctggagatgctgtgcaaggccatgcgcgagcgctatgacctcgtcgccatcaccaatgacatctacaccaaggaagaccagcgcctgctgaccctctccggcgcgctgccggccgagcgcatcatgggcgtggagacgggcggctgcccgcacaccgccatccgcgaagatgcctcgatcaacctcgaagccgtcgaccgcatgctcgcgcggtttccggatgccgacgtcgtcttcatcgaatccggcggcgacaacctggcggccaccttcagccccgagctgtcggacctgacgatctacgtgatcgacgtggcgggcggcgagaagattccgcgcaagggcggtccgggcatcaccaagtcggacctgctgatcatcaacaagaccgacctcgcgccgtatgtcggtgcctcgctggacgtgatggccagcgacgcgcgcaagatgcgcggcgaccgcccgttcgtgatgtgcaacctgaaggagcaggccgggctggacgcggtcgtgcgcttcatcgagcagcagggcatgctggcggcgcccgccgcgggctga

SEQ ID NO: 146972 - protein, 210 aa, Ralstonia solanacearum GMI1000
MRTKKLPALRVGVGGPVGSGKTTLLEMLCKAMRERYDLVAITNDIYTKEDQRLLTLSGALPAERIMGVETGGCPHTAIREDASINLEAVDRMLARFPDADVVFIESGGDNLAATFSPELSDLTIYVIDVAGGEKIPRKGGPGITKSDLLIINKTDLAPYVGASLDVMASDARKMRGDRPFVMCNLKEQAGLDAVVRFIEQQGMLAAPAAG

SEQ ID NO: 146973 - DNA, 612 bp, Agrobacterium tumefaciens str. C58
  CDS (1)..(612): transl_table=11
atgaaatcgggtaatggtccgctgcgcgtcggcattggcgggccggtaggttccggcaagacggcgttgacggaaaagctctgcaaggcgatgagcggcgattattccgtcgccgtcgtcaccaatgatatctataccaaggaagatgccgaggcgttggtgcgcatgcaggcgttgccatccgagcgtatcgtcggtgtggagacaggcggttgcccgcataccgccatccgcgaggatgcgacgatcaatctgcaggcgattgccgggcttaatgcgcagtttcccgatctcgatgttgtcttcatcgaatccggcggtgacaatctcgccgcgaccttttcgcccgatcttgccgatatcaccatctatgtgatctccgtctgccagggcgaggagattccgcgcaagggcgggccgggcatcacccgctcggacctgctggtcatcaacaagaaggaccttgcgccttatgtcggtgccgatctgactgtgatggacagcgatgcgacgcggatgcgcaacgccatgccgttcgtttttaccgatatgaaacggggcgatggcgtcgatcgtatcgtcggtttcctgaaagagcagggtggtctgtga

SEQ ID NO: 146974 - protein, 203 aa, Agrobacterium tumefaciens str. C58
MKSGNGPLRVGIGGPVGSGKTALTEKLCKAMSGDYSVAVVTNDIYTKEDAEALVRMQALPSERIVGVETGGCPHTAIREDATINLQAIAGLNAQFPDLDVVFIESGGDNLAATFSPDLADITIYVISVCQGEEIPRKGGPGITRSDLLVINKKDLAPYVGADLTVMDSDATRMRNAMPFVFTDMKRGDGVDRIVGFLKEQGGL

SEQ ID NO: 146975 - DNA, 639 bp, Brucella melitensis 16M
  CDS (1)..(639): transl_table=11
atgaaaaaaattccgcgcatcggcgtcggcgggccggttggctccggcaagacggccatcatcgaagccgtcgtgccaatccttatcaagcttggctatcgcattctcgtcatcaccaatgacatcgtgaccaccgaggatgccaagcatgtgcagcgcacgctcaagggcgtgctgatcgaagaccgcatcgtcggggttgaaaccggcggctgtccgcacactgcggttcgcgaagacccaagcatgaaccttgccgctgtcgaggaaatggaggcgaagtttcccgacaccgatctcgttttgctggaaagcggcggcgataacctgacgctcactttcagccccgcgctcatcgatttcttcatctatgtgatcgacgttgccgcgggcgacaagattccgcgcaagaacggccccggcatcagccagtcggatattctggtcatcaacaagaccgatcttgcgccctatgtcggtgcaagcttgcaggtgatggacgatgattcccgcatgatgcgcggcaagaagcctttcgtcttcaccaattgcaagacgaacgaaggcattgacgatcttgtgcacctgatccgtgaaaacgtccttttcgacaccgaggtcagcaaggagagtgcataa

SEQ ID NO: 146976 - protein, 212 aa, Brucella melitensis 16M
MKKIPRIGVGGPVGSGKTAIIEAVVPILIKLGYRILVITNDIVTTEDAKHVQRTLKGVLIEDRIVGVETGGCPHTAVREDPSMNLAAVEEMEAKFPDTDLVLLESGGDNLTLTFSPALIDFFIYVIDVAAGDKIPRKNGPGISQSDILVINKTDLAPYVGASLQVMDDDSRMMRGKKPFVFTNCKTNEGIDDLVHLIRENVLFDTEVSKESA

SEQ ID NO: 146977 - DNA, 861 bp, Schizosaccharomyces pombe 972h-
  CDS (1)..(861)
atggcgattccttttcttcacaagggaggttctgatgactcgactcatcaccatacacacgattacgaccatcataaccatgatcatcatggtcacgatcatcacagccatgattcatcttccaactcttccagcgaagctgccagattgcagttcatccaagagcatggccattctcacgatgctatggaaacgcctggcagctacttgaagcgtgaacttcctcagttcaatcatagagacttctctcgtcgtgcctttaccattggcgtcggaggaccggtcggttctggtaaaactgcacttttgcttcagctttgcaggctcttgggtgaaaaatatagcatcggagttgttaccaacgacatatttactcgtgaagatcaagaatttttaattcgtaacaaggcacttcccgaagagagaattcgcgcaatcgaaacaggcggttgtccacacgctgctattcgtgaagacgtctccggtaatttggtcgcattggaggagttgcaatccgagttcaacacagaattactactcgtggagtcaggaggtgataacttagctgcaaattactctcgtgatctcgctgatttcattatctatgtaattgatgtatctggaggcgacaagattccacgtaagggtggacctggtatcacggagtcagatctgttgattatcaacaaaacagatctagctaagttggtcggtgctgatttgtcggtcatggatcgtgatgcaaaaaagattcgtgagaatggacccattgtttttgcacaagtcaaaaatcaagttgggatggatgagatcaccgaacttattctaggcgccgctaagagtgctggtgctctcaagtaa

SEQ ID NO: 146978 - protein, 286 aa, Schizosaccharomyces pombe 972h-
MAIPFLHKGGSDDSTHHHTHDYDHHNHDHHGHDHHSHDSSSNSSSEAARLQFIQEHGHSHDAMETPGSYLKRELPQFNHRDFSRRAFTIGVGGPVGSGKTALLLQLCRLLGEKYSIGVVTNDIFTREDQEFLIRNKALPEERIRAIETGGCPHAAIREDVSGNLVALEELQSEFNTELLLVESGGDNLAANYSRDLADFIIYVIDVSGGDKIPRKGGPGITESDLLIINKTDLAKLVGADLSVMDRDAKKIRENGPIVFAQVKNQVGMDEITELILGAAKSAGALK

SEQ ID NO: 146979 - DNA, 678 bp, Streptomyces coelicolor A3(2)
  CDS (1)..(678): transl_table=11
atgcatctcgaccatcaccacgaatccgccgccgccgtctccgccgacgcgcgtcggcccgacgggtcgcggcgggcgctgcggatcgggctcggtgggcccgtcggatccgggaagaccgccaccgtcgccgccctgtgccgcgcgctgcgggcggagttgtccctcgccgtggtgaccaacgacatctacacccgggaggacgccgagttcctgctccgcgaggcggtgctgccgcccgagcggatcaccgccgtggagaccggcgcctgcccgcacaccgcgatccgggacgacatctccgccaacctggaggccgtcgaggacctggaggacgaggtcggcccgctcgatctggtcctggtggagtccggtggggacaatctcaccgccaccttctccaggggcctcgtcgacgcgcaggtgttcgtgatcgacgtggcgggcggcgacgacatcccgcgcaagggcgggcccggagtcgccaccgccgacctgctcatcgtcaacaagaccgatctcgcgccgtacgtgggctccgacctcgcgcgcatggccgccgacgccaaggcggcgcgcggtgaactgcccgtcgtcctgcagtcgctgcgcggcgaggacggggtgcgggaggtcgccgattgggtgcgggagcggatcgccgcgtggaccgcgtga

SEQ ID NO: 146980 - protein, 225 aa, Streptomyces coelicolor A3(2)
MHLDHHHESAAAVSADARRPDGSRRALRIGLGGPVGSGKTATVAALCRALRAELSLAVVTNDIYTREDAEFLLREAVLPPERITAVETGACPHTAIRDDISANLEAVEDLEDEVGPLDLVLVESGGDNLTATFSRGLVDAQVFVIDVAGGDDIPRKGGPGVATADLLIVNKTDLAPYVGSDLARMAADAKAARGELPVVLQSLRGEDGVREVADWVRERIAAWTA

SEQ ID NO: 146981 - DNA, 615 bp, Staphylococcus aureus subsp. aureus MW2
  CDS (1)..(615): transl_table=11
gtggcaaatccgattaaaattggtattggtggtcctgtaggtgcaggtaaaacacaattaattgaaaaagttgtaaaacgtctttcaaaagaaatgagtatcggcgttattacaaatgatatatatacaaaagaagacgaaaagatattagtaaattcaggagttctacctgaaagtcgtatcattggtgttgaaactggtggatgtcctcatactgcgattcgtgaagatgcatctatgaactttgcagcaatagacgaattattagaacgtcatgacgatatagaactaattttcatagaatctggtggcgataacttagcagcaacatttagcccagaacttgttgacttttcaatatatattatcgatgttgctcaaggtgaaaagattccacgtaaaggtggtcaaggtatgattaagtcagatttctttataattaacaaaactgatttagctccctatgtaggtgcatcattagaacaaatggctgaagatactaaagtatttcgtggtaaacgtccatttacttttactaacttaaaaactgacgaaggtttggatgaagttatcgattggattgaacgcgacactttactcaaaggattatcataa

SEQ ID NO: 146982 - protein, 204 aa, Staphylococcus aureus subsp. aureus MW2
MANPIKIGIGGPVGAGKTQLIEKVVKRLSKEMSIGVITNDIYTKEDEKILVNSGVLPESRIIGVETGGCPHTAIREDASMNFAAIDELLERHDDIELIFIESGGDNLAATFSPELVDFSIYIIDVAQGEKIPRKGGQGMIKSDFFIINKTDLAPYVGASLEQMAEDTKVFRGKRPFTFTNLKTDEGLDEVIDWIERDTLLKGLS

SEQ ID NO: 146983 - DNA, 603 bp, Thermosynechococcus elongatus BP-1
  CDS (1)..(603): transl_table=11
atggagacagtattgcgagtcggtgtggcagggcccgtgggttcaggtaaaaccgcgcttgtggatgcgctttgtaaagccttgcgcgatcgctatcgcctagcggttgtgacgaatgatatttacacccaagaggatgctcagtttttggtgcgctcccaagcccttcccccagagcgaattctgggcgttgagaccggcggatgtccccacaccgccattcgggaagatgcctccctcaatctggcggccattcagcaattggaaacggcttttcggcctttggatttgatttttgtcgagagtggtggcgataatttggctgcgacctttagcccagaactggtggatttgacaatttacgtgattgatgtggctgccggcgataaaattcctcggaaaggcgggcctggcattaccaagtcggatttattggtgattaataaaattgaccttgccccctatgtgggcgctgatttagaggtcatgaaacgggacaccctaaaaatgcgcggcgatcgcccctatgtgatgacgaacttgaaaactggccttgggctagatcaggtgattgcttttctcacagtccacttagccgcctaa

SEQ ID NO: 146984 - protein, 200 aa, Thermosynechococcus elongatus BP-1
METVLRVGVAGPVGSGKTALVDALCKALRDRYRLAVVTNDIYTQEDAQFLVRSQALPPERILGVETGGCPHTAIREDASLNLAAIQQLETAFRPLDLIFVESGGDNLAATFSPELVDLTIYVIDVAAGDKIPRKGGPGITKSDLLVINKIDLAPYVGADLEVMKRDTLKMRGDRPYVMTNLKTGLGLDQVIAFLTVHLAA

SEQ ID NO: 146985 - DNA, 627 bp, Brucella suis 1330
  CDS (1)..(627): transl_table=11
atgacacagaaaaatggaccgctccgcgtcggcatcggtgggcctgtcggctccggcaagaccacactgaccgaaaagctttgcaaggcgatgcgcgataaatattcggtcgccgtcatcaccaacgatatttatacgcaggaagacgcgcttattctggcgcgccgtcaagccttgtcggaagaccgtatcatcggggtggaaacgggtggttgcccgcacacggccattcgtgaggatgcttcgatcaatcttcaggccgttgttgaaatgacccgccggtttccggacctcgatgtggtgttcatcgaatccggcggtgacaatctggccgcgaccttctcgcccgaccttgccgacctgaccctctatgtcatctcggtctgccagggtgaggaaattccccgcaagggcggccccggtatcacgcggtcagattttctggtcatcaacaagagcgacctggcgccttatgtccatgtcgatctggaggtgatggaggctgatgcaatgcggatgcgcgcaaagcgccccttcggctttaccgacctgcatcggggcaagggcgtgcaggaaatcattgatttcatcgtcgaaaatggtgggctggaaccacgttcaaactga

SEQ ID NO: 146986 - protein, 208 aa, Brucella suis 1330
MTQKNGPLRVGIGGPVGSGKTTLTEKLCKAMRDKYSVAVITNDIYTQEDALILARRQALSEDRIIGVETGGCPHTAIREDASINLQAVVEMTRRFPDLDVVFIESGGDNLAATFSPDLADLTLYVISVCQGEEIPRKGGPGITRSDFLVINKSDLAPYVHVDLEVMEADAMRMRAKRPFGFTDLHRGKGVQEIIDFIVENGGLEPRSN

SEQ ID NO: 146987 - DNA, 639 bp, Brucella suis 1330
  CDS (1)..(639): transl_table=11
atgaaaaaaattccgcgcatcggcgtcggcgggccggttggctccggcaagatggccatcatcgaagccgtcgtgccaatccttatcaagcttggctatcgcattctcgtcatcaccaatgacatcgtgaccaccgaggatgccaagcatgtgcagcgcacgctcaagggcgtgctgatcgaagaccgcatcgtcggggttgaaaccggcggctgtccgcacactgcggttcgcgaagacccaagcatgaaccttgccgctgtcgaggaaatggaggcgaagtttcccgacaccgatctcgttttgctggaaagcggcggcgataacctgacgctcactttcagccccgcgctcatcgatttcttcatctatgtgatcgacgttgccgcgggcgacaagattccgtgcaagaacggccccggcatcagccagtcggatattctggtcatcaacaagaccgatcttgcgccctatgtcggtgcaagcttgcaggtgatggacgatgattcccgcatgatgcgcggcaagaagcctttcgtcttcaccaattgcaagacgaacgaaggcattgacgatcttgtgcacctgatccgtgaaaacgtccttttcgacaccgaggtcagcaaggagagtgcataa

SEQ ID NO: 146988 - protein, 212 aa, Brucella suis 1330
MKKIPRIGVGGPVGSGKMAIIEAVVPILIKLGYRILVITNDIVTTEDAKHVQRTLKGVLIEDRIVGVETGGCPHTAVREDPSMNLAAVEEMEAKFPDTDLVLLESGGDNLTLTFSPALIDFFIYVIDVAAGDKIPCKNGPGISQSDILVINKTDLAPYVGASLQVMDDDSRMMRGKKPFVFTNCKTNEGIDDLVHLIRENVLFDTEVSKESA

SEQ ID NO: 146989 - DNA, 624 bp, Pseudomonas putida KT2440
  CDS (1)..(624): transl_table=11
atgcaaagctatcaacaacccctgcgcgtcggtgtcggcggcccggtcggctctggcaagaccgcactgctggaagcgctgtgcaaggccatgcgcgatcactaccagatcgccgtggttaccaacgacatctacaccaaggaagaccagcgcatcctcactgaggccggcgcccttgagccggagcgcatcgttggcgttgaaaccggcggctgcccgcacacggccatccgtgaagacgcctcgatgaacctggcggcggtcgaagcgctggcgcgcaagttcggtaatcttgaagtcattttcgtggaaagcggcggtgacaacctcagcgccacgttcagcccggagctggctgacttgaccatttacgtgatcgacgtggccgagggcgaaaagatcccgcgcaagggcggcccaggcattaccaagtctgatttcctggtgatcaacaagaccgacctggcgccttatgtaggggcgtcactggaggtgatggagcgcgacacccagcgcatgcggccgcagcggccctggaccttcagcaacctgaagaagggcgaggggttgcaggccgtgatcgattttatcgtcgagcgcgggatgctgggggtgcgaggctga

SEQ ID NO: 146990 - protein, 207 aa, Pseudomonas putida KT2440
MQSYQQPLRVGVGGPVGSGKTALLEALCKAMRDHYQIAVVTNDIYTKEDQRILTEAGALEPERIVGVETGGCPHTAIREDASMNLAAVEALARKFGNLEVIFVESGGDNLSATFSPELADLTIYVIDVAEGEKIPRKGGPGITKSDFLVINKTDLAPYVGASLEVMERDTQRMRPQRPWTFSNLKKGEGLQAVIDFIVERGMLGVRG

SEQ ID NO: 146991 - DNA, 615 bp, Staphylococcus epidermidis ATCC 12228
  CDS (1)..(615): transl_table=11
atgtcaaacccaattaaaattggtatcgggggtcctgttggtgcaggtaaaacccaattgatagaaaaagtggttaaacgccttgcgaaagaaatgagtattggcgttattactaatgatatctatactaaagaagatgaaaaaatactagttaatactggtgttttaccagaagatagaattatcggtgtggaaactggaggttgtcctcatacagctattcgtgaagacgcttcaatgaacttcgcagctatagatgaattattagaacgtaacgatgatattgaacttatttttattgaatcaggtggcgataacttagcggctacttttagtccagaactcgtcgacttttcaatttatatcattgatgttgcacaaggcgaaaagattccacgtaaaggtggacaaggtatgattaaatctgatttcttcattattaataaaactgaccttgcaccatatgtgggtgcttcattagatcaaatggctaaagacactgaagtatttcgtggaaatcgcccattcgcttttacaaatttaaaaactgatgaaggtttagaaaaagttattgagtggattgagcacgacgtcttactgaaagggttaacttaa

SEQ ID NO: 146992 - protein, 204 aa, Staphylococcus epidermidis ATCC 12228
MSNPIKIGIGGPVGAGKTQLIEKVVKRLAKEMSIGVITNDIYTKEDEKILVNTGVLPEDRIIGVETGGCPHTAIREDASMNFAAIDELLERNDDIELIFIESGGDNLAATFSPELVDFSIYIIDVAQGEKIPRKGGQGMIKSDFFIINKTDLAPYVGASLDQMAKDTEVFRGNRPFAFTNLKTDEGLEKVIEWIEHDVLLKGLT

SEQ ID NO: 146993 - DNA, 624 bp, Bradyrhizobium japonicum USDA 110
  CDS (1)..(624): transl_table=11
atggctacgtctcacggccccctgcgtgtcggcgtcggcggtccggtcggatcgggcaagaccgcgctgatggatctgctctgcaagaccatgcgcgagcgctacgacatcgcggcgatcaccaacgacatctacaccaaatgggatgccgaattcctggtgcgctcgggctcgctgacgccggatcgcattgccggtgtcgagaccggcggctgcccgcataccgcgatccgcgaagatgcctcgatgaacctcgcggcggtcgcggacatgcgcgcgaaattccccggcctcgacctcgtgctgatcgagtccggcggcgacaatctcgctgccactttttccccggagcttgccgacctcaccatctacgtcatcgacgtggcggcgggcgacaagatcccgtccaagggcggccccggcatcacccgctccgacctcctggtcatcaacaagatcgatcttgcgccccatgtcggcgcctccctggagaagatggagacggacgccaggcgcatgcgcggcgcgcgcccctttgtcatgaccaacctgaagaagagcgaggggctcgaccgcatcgtcggcttcatcgaggccaaaggcggcctgaaacgggccggctga

SEQ ID NO: 146994 - protein, 207 aa, Bradyrhizobium japonicum USDA 110
MATSHGPLRVGVGGPVGSGKTALMDLLCKTMRERYDIAAITNDIYTKWDAEFLVRSGSLTPDRIAGVETGGCPHTAIREDASMNLAAVADMRAKFPGLDLVLIESGGDNLAATFSPELADLTIYVIDVAAGDKIPSKGGPGITRSDLLVINKIDLAPHVGASLEKMETDARRMRGARPFVMTNLKKSEGLDRIVGFIEAKGGLKRAG

SEQ ID NO: 146995 - DNA, 684 bp, Streptomyces avermitilis MA-4680
  CDS (1)..(684): transl_table=11
atgcatctcgaccacgcccacacccatgacggcccctccgccgtgagcgcggacgcccaccggcccgacggcacccggcgtgccctgcggatcggcctcggcggaccggtcgggtccgggaagaccgcgaccgttgccgcgctgtgccgtgccctgcgcgacgcgttctccctcgccgtcgtcaccaacgacatctacacccgcgaggacgccgagttcctgctgcgggaggccgtgctgccgcccgagcggatcaccgccgtggagaccggcgcctgcccgcacaccgccatccgcgacgacatctccgccaacctggaagccgtggaggacctggaggacgaagtcgggccgctcgatctcgtcctcgtcgagtccgggggcgacaacctcaccgccaccttctccaaggggctcgtcgacgcgcagatctttgtcatcgacgtggccggcggggacgacattccgcgcaagggcggccccggggtcaccaccgccgacctgctcgtcgtcaacaagaccgacctcgcgccgtacgtcggctccgatctggggcggatggccgccgacgccaaggcgcagcgcgccgaactgcccgtcgtcttccagtcgctccgcaccgagcccggggtcgcccccgtggccgactgggtgcgggcgcggctcgccgcgtgggcggcatga

SEQ ID NO: 146996 - protein, 227 aa, Streptomyces avermitilis MA-4680
MHLDHAHTHDGPSAVSADAHRPDGTRRALRIGLGGPVGSGKTATVAALCRALRDAFSLAVVTNDIYTREDAEFLLREAVLPPERITAVETGACPHTAIRDDISANLEAVEDLEDEVGPLDLVLVESGGDNLTATFSKGLVDAQIFVIDVAGGDDIPRKGGPGVTTADLLVVNKTDLAPYVGSDLGRMAADAKAQRAELPVVFQSLRTEPGVAPVADWVRARLAAWAA

SEQ ID NO: 146997 - DNA, 603 bp, Helicobacter hepaticus ATCC 51449
  CDS (1)..(603): transl_table=11
atggtaaaaataggtatatgcggaccagtaggaagtggcaaaactgcccttatagaatctcttacacgcaagatgaatgagcaatactctcttgctgtcatcactaatgatatttatacacaagaagatgcggagtttatgagtaaaaattccgtgctaccaagtgagcgaatcataggagtggaaacgggtggttgccctcatacagcaatcagagaagatgcttctatgaatcttgaagcagtggaagaaatgcaagagagatttccagatattgagattctctttatagaaagcggtggtgataatctctctgccacatttagcccagaattagcagattttacaatttttgttattgatgtggcacaaggggataaaatcccacgaaaaggcggaccgggcattatgcgttcagatttgctcattatcaataaaattgatttagctccttatgtgggtgcaaatttaagcataatggaaagagatgccaaaaaaatgcgtgaagataagccatttttatttacaaatattcgtgctaaagagggaattgatgccgtggtggaatggataaaaaaatatgcacttttggaagatatatga

SEQ ID NO: 146998 - protein, 200 aa, Helicobacter hepaticus ATCC 51449
MVKIGICGPVGSGKTALIESLTRKMNEQYSLAVITNDIYTQEDAEFMSKNSVLPSERIIGVETGGCPHTAIREDASMNLEAVEEMQERFPDIEILFIESGGDNLSATFSPELADFTIFVIDVAQGDKIPRKGGPGIMRSDLLIINKIDLAPYVGANLSIMERDAKKMREDKPFLFTNIRAKEGIDAVVEWIKKYALLEDI

SEQ ID NO: 146999 - DNA, 630 bp, Candidatus Blochmannia floridanus
  CDS (1)..(630): transl_table=11
atgagtaatgataaagcgaaacaccctatgaaagtaggaattggagggcctgtaggatcagggaagactgcgttgattgaggttttgtgtaaaaagatgaaaactgattatcagttggcagtagttactaatgatatttatactaaagaagatcaacaaatattgattaatgcacatgctttagaatcggatcgaattattggggtagagacaggtggatgtcctcatactgctattcgtgaggatgtttctatgaatttattggctattgaggaattaatagataaatttaataatttagatattatttttattgaaagtggaggagataatttaagtgctacttttagtccagagttatcagactggaatttgtatgttattgatgttgcagcaggagataaaatacctcgtaagggtggtccgggtattactaaatctgattttttaatcatcaataagattgatttagctcaatatgttggagcatctttggatgtaatgaagtttgatacgcatactatgcgtaataatcggccttggacttttactaatttgaaaacaggttatggtatagaaagtgttattaattttttacgtgagaaaaaattaataaataataaaatgtga

SEQ ID NO: 147000 - protein, 209 aa, Candidatus Blochmannia floridanus
MSNDKAKHPMKVGIGGPVGSGKTALIEVLCKKMKTDYQLAVVTNDIYTKEDQQILINAHALESDRIIGVETGGCPHTAIREDVSMNLLAIEELIDKFNNLDIIFIESGGDNLSATFSPELSDWNLYVIDVAAGDKIPRKGGPGITKSDFLIINKIDLAQYVGASLDVMKFDTHTMRNNRPWTFTNLKTGYGIESVINFLREKKLINNKM

SEQ ID NO: 147001 - DNA, 645 bp, Bordetella pertussis Tohama I
  CDS (1)..(645): transl_table=11
atgcatgacatctcttcattgaccacccgtaccaaggccctgccacccctgcgcgtcggcgtgggcggcccggtggggtccggcaaaaccaccttgctcgaaatggtgtgcaaggcgatgtacccgcagttcgacctgatcgcgatcaccaacgacatctacaccaaggaagaccagcgcctgctgacgctgtcgggggccttgccgcccgagcgcatcctgggggtggagaccggcggctgtccgcacacggcgatccgcgaggacgcatccatcaacctgatcgccatcgaccagatgctggagcagtttcccgatgccgatatcgtgttcgtcgagtccggcggcgacaacctggccgcgaccttcagccccgaactctcggacctgacgctttacatcatcgacgtcgccagcggagagaagattccgcgcaagggcgggcctggcatcaccaagtccgacctgttcatcatcaacaagacggacctggcgccgtacgtgggcgcggacctcgcggtgatggaggccgatacccgccgcatgcgcggcgacaagccctttgtgatgtgcaacctgaagaccggcgatggattggaccaggtgattgccttcctgaagacggaaggcttgttccgcggctga

SEQ ID NO: 147002 - protein, 214 aa, Bordetella pertussis Tohama I
MHDISSLTTRTKALPPLRVGVGGPVGSGKTTLLEMVCKAMYPQFDLIAITNDIYTKEDQRLLTLSGALPPERILGVETGGCPHTAIREDASINLIAIDQMLEQFPDADIVFVESGGDNLAATFSPELSDLTLYIIDVASGEKIPRKGGPGITKSDLFIINKTDLAPYVGADLAVMEADTRRMRGDKPFVMCNLKTGDGLDQVIAFLKTEGLFRG

SEQ ID NO: 147003 - DNA, 606 bp, Prochlorococcus marinus subsp. pastoris str. CCMP1986
  CDS (1)..(606): transl_table=11
atgagcagcaaattaagagtaggagttgcgggcccagtaggctcagggaaaacagcattagttgaaactttatgcatagctcttaaaaagagatataaaatagctgttgttactaatgacatttatacaaaagaggatgctaattttctcataaagaaaaagattttagaggaagggaggattgttggagtagaaactggtggttgtcctcatactgcaataagagaagattgttcacttaataaaaatgcagtaatggatcttgaaaacaaatatgatccattggattttatttttgttgaaagtggaggagataatcttgcggcaagttttagtccagaacttgtagatttatctatttacgtgattgatgtatcggctggggataaaattccgaggaaaggaggtccaggcattacaagatctgatttgttattaatcaacaaaattgatttagctgatatggttggtgcaaatttaaatattatgcaaaacgatacaaatatgatgagagatggtaaaccatggtttttcacaaatcttagttccggcagtggtgttgataacgttattaagtatctagtcgctcaaataccaaacatttaa

SEQ ID NO: 147004 - protein, 201 aa, Prochlorococcus marinus subsp. pastoris str. CCMP1986
MSSKLRVGVAGPVGSGKTALVETLCIALKKRYKIAVVTNDIYTKEDANFLIKKKILEEGRIVGVETGGCPHTAIREDCSLNKNAVMDLENKYDPLDFIFVESGGDNLAASFSPELVDLSIYVIDVSAGDKIPRKGGPGITRSDLLLINKIDLADMVGANLNIMQNDTNMMRDGKPWFFTNLSSGSGVDNVIKYLVAQIPNI

SEQ ID NO: 147005 - DNA, 609 bp, Prochlorococcus marinus str. MIT 9313
  CDS (1)..(609): transl_table=11
atgagtagcaaactgcgtttaggtgtggctggcccggtgggttccggtaagacagcactagtggaggcaatgtgtcgccgtctacgagatcagttgcaattggcagttgtcaccaacgacatctatacccaggaagatgcagagttcttgacgcgtgttggagctcttgagccagagcgtattcgcggagtagaaacaggcggttgtcctcatactgctattcgtgaggattgttcgattaatcgcgcggccgtagaagatctggagcgaaattttccagatcttgatgttgtgcttgttgagagtggtggcgataatcttgccgccagcttcagtccagaattggtggacctttgcatctatgtgattgatgtggcggctggcgacaagatccctcgcaagggtggccctgggattacacgctcggatttattggtgatcaacaagattgatctcgctgtccatgtcggggccgatttggaagtgatgaagcgcgatacgacgcggatgcggggagagcgcccttggtgtttcaccaacttgcggagcggcgatggcttggagagcgtgctgcactttttgttgcaacagctaccaaatcgcccttag

SEQ ID NO: 147006 - protein, 202 aa, Prochlorococcus marinus str. MIT 9313
MSSKLRLGVAGPVGSGKTALVEAMCRRLRDQLQLAVVTNDIYTQEDAEFLTRVGALEPERIRGVETGGCPHTAIREDCSINRAAVEDLERNFPDLDVVLVESGGDNLAASFSPELVDLCIYVIDVAAGDKIPRKGGPGITRSDLLVINKIDLAVHVGADLEVMKRDTTRMRGERPWCFTNLRSGDGLESVLHFLLQQLPNRP

SEQ ID NO: 147007 - DNA, 606 bp, Synechococcus sp. WH 8102
  CDS (1)..(606): transl_table=11
atgagcagcaagttgcgtcttggggtggccggtccggtgggatccggcaagactgctttggtggaggcgctttgcctgaggctgcgcgatcagctgcagcttgctgttgtcaccaatgacatctacacccaggaggacgcgcaatttttgacgcgtgctggagcgttggagccggaacggatccgcggcgtggaaaccggcggctgtccgcacacggcgatccgtgaggactgctccatcaaccgggcggcggtggccgatctggaggggcagtttccggatctcgatctggtgatggtggaaagcgggggcgacaacctggctgccagcttcagtccggagttggtggacctctgcatctatgtgattgatgtcgccgctggagacaagattccccgcaagggcgggcccggcatcacccgatccgacttgctggtgatcaacaagatcgacctggcacctctcgtgggtgcggacctctctgtgatggaggcggacacccggcggatgcggggcgaacgcccgtggtgtttcaccaatctccaaaacggcgatggcctcgttcaggtggtggagtttgtgttgcaacagctaccgaatgcttga

SEQ ID NO: 147008 - protein, 201 aa, Synechococcus sp. WH 8102
MSSKLRLGVAGPVGSGKTALVEALCLRLRDQLQLAVVTNDIYTQEDAQFLTRAGALEPERIRGVETGGCPHTAIREDCSINRAAVADLEGQFPDLDLVMVESGGDNLAASFSPELVDLCIYVIDVAAGDKIPRKGGPGITRSDLLVINKIDLAPLVGADLSVMEADTRRMRGERPWCFTNLQNGDGLVQVVEFVLQQLPNA

SEQ ID NO: 147009 - DNA, 636 bp, Photorhabdus luminescens subsp. laumondii TTO1
  CDS (1)..(636): transl_table=11
gtgaaaaaaattacccgaattggtattggcggtccggtgggttcaggcaagactgccgttattgaagtgatcacccctatcttaattcagcgcggaataaaacctctgattatcaccaatgatattgttaccactgaggatgctaaacaggttaaacgtaccttgaaaggcattttggatgaagaaaagatacttggtgtggaaaccggtgcgtgtcctcataccgcggtgcgtgaagatcccagtatgaatattgctgcggtagaggagatggaagcgcgttttcctgacagcgacgttgtgttgattgaaagtggtggtgataatctgacactcacttttagtccggcgttggcagatttttatatttatgtgattgatgtcgctgaaggggagaaaattccgcgtaagaacggtccgggtttggtacaggccgatattttggtgatcaacaaaattgatttagcgccttatgttggtgccagtctggcggtgatggagcatgacactcaagttgtacgtggtcagcgtccttatatccttaccaattgcaaaaccggtgagggtgttgaaacgttggtaaatatgatcatgcgtgatttcctgtttacccattcattacaggcgacacaatga

SEQ ID NO: 147010 - protein, 211 aa, Photorhabdus luminescens subsp. laumondii TTO1
MKKITRIGIGGPVGSGKTAVIEVITPILIQRGIKPLIITNDIVTTEDAKQVKRTLKGILDEEKILGVETGACPHTAVREDPSMNIAAVEEMEARFPDSDVVLIESGGDNLTLTFSPALADFYIYVIDVAEGEKIPRKNGPGLVQADILVINKIDLAPYVGASLAVMEHDTQVVRGQRPYILTNCKTGEGVETLVNMIMRDFLFTHSLQATQ

SEQ ID NO: 147011 - DNA, 630 bp, Rhodopseudomonas palustris CGA009
  CDS (1)..(630): transl_table=11
atgtcggatcatcacggccctctccgcgtcggcatcggcggtcccgtcggctcgggcaagactgcgctgatggacctgctctgcaagtcgatgcgcgaacgctacgacatcgcggcgatcaccaacgacatctataccaagtgggacgccgaattcctggtgcgctccggctcgctgacgccggaccggatcgccggggtggagaccggtggctgcccgcacacagccatccgcgaggatgcgtcgatgaatctcgccgctgtggccgagatgcgaagcaagtttccggggctcgatctcgtgctgatcgagtccggcggggacaacctggccgcgacattctcgcccgaactcgccgacatcaccatttatgtgatcgacgtcgctgcaggggacaagatcccctcgaaaggcggcccaggtatcacccggtctgacctcctggttatcaataagatcgatctggcgccctatgtcggcgcctcgttggagaagatggataccgatgccaagcggatgcgcggcgcgcggccgttcgtcatgaccaatctgaaaaagagcgaaggcctcgatcgcattatcggctttatcgaagaaaagggcggcctgacgccgcggcggtcggcctga

SEQ ID NO: 147012 - protein, 209 aa, Rhodopseudomonas palustris CGA009
MSDHHGPLRVGIGGPVGSGKTALMDLLCKSMRERYDIAAITNDIYTKWDAEFLVRSGSLTPDRIAGVETGGCPHTAIREDASMNLAAVAEMRSKFPGLDLVLIESGGDNLAATFSPELADITIYVIDVAAGDKIPSKGGPGITRSDLLVINKIDLAPYVGASLEKMDTDAKRMRGARPFVMTNLKKSEGLDRIIGFIEEKGGLTPRRSA

SEQ ID NO: 147013 - DNA, 618 bp, Bacillus cereus ATCC 10987
  CDS (1)..(618): transl_table=11
atgataaagcctattaaaattggtatcggtggcccggtaggtgctgggaaaacaatgttagttgaaaagttaacaaaacatctaaatacagattatgaaattgcagcaattacaaacgatatttatacgaaagaagatgcaaagattttattgaaaacaggtgttttaccagaagatagaattattggtgtagagacaggagggtgtccacatacagcaattcgagaggacgcttctatgaattttgaagcaattgaagaactcatgattagacataataatttagatattatttttattgaaagtgggggtgataatttagctgccacatttagtccggagctagtggatttttcaatttatattattgatgtggcgcagggagaaaagattccacggaaaggtgggcaaggaatgattaaatctgatgtatttgtaattaataaaacggatttggcaccttatgtaggggcagatcttggagttatggagcaggatacaaaacattaccgacataataaaccatacttttttacaaatttgaaggatgaggaaggtttacaagaattaataaattggatgcgacaaaacattatgttagaaggattgaaaaaatga

SEQ ID NO: 147014 - protein, 205 aa, Bacillus cereus ATCC 10987
MIKPIKIGIGGPVGAGKTMLVEKLTKHLNTDYEIAAITNDIYTKEDAKILLKTGVLPEDRIIGVETGGCPHTAIREDASMNFEAIEELMIRHNNLDIIFIESGGDNLAATFSPELVDFSIYIIDVAQGEKIPRKGGQGMIKSDVFVINKTDLAPYVGADLGVMEQDTKHYRHNKPYFFTNLKDEEGLQELINWMRQNIMLEGLKK

SEQ ID NO: 147015 - DNA, 834 bp, Magnaporthe grisea 70-15
  CDS (1)..(834)
atggcacactcccactcccacgacggctctgcgcctcactcccactcccatgatggcagcactttcaacgctcaggagcacggccacagccatgaaatcctcacgggtcctggcagctatctcggccgcgagatgcccatcgtcgaaggccgtgacttttccgagcgtgcctttaccattggcattggcggccccgtcggctcgggcaagacagccctgatgctcgccctctgcctggcgctgcgcgacacgcactccctcgcggccgtgacaaacgacatcttcacgcgcgaggacgccgagttcctgacgcgcaacaaggccctgcccccgtctcgcatccgcgccatagagacgggcggctgcccgcacgccgccgtgcgcgaggacatatccgccaacctggcctgccttgaggacctgcaccgaaccttcaacggtgtcgacctgctgctgatcgagagcggcggtgacaacctggccgccaactacagccgcgagcttgcggattttattatttacgtcatcgacgtctcgggcggcgacaagatcccccgcaagggtgggcccggcatcacgcagagtgatttgctcgtggtcaacaagacggacctggccgagattgtcggcgcggatctgggcgtcatggagagggatgcgaggaagatgagagagggtggcccgactgtgtttgcgcaggtcaagaagtcggtcggcgtcgagcacattgtcaacttgatcctgagcgcctggaaggcaagcggtgcggaggagatcgccaaggcgaatggcggccccaggcctaccgaggggttggaggagttgaatgcttag

SEQ ID NO: 147016 - protein, 277 aa, Magnaporthe grisea 70-15
MAHSHSHDGSAPHSHSHDGSTFNAQEHGHSHEILTGPGSYLGREMPIVEGRDFSERAFTIGIGGPVGSGKTALMLALCLALRDTHSLAAVTNDIFTREDAEFLTRNKALPPSRIRAIETGGCPHAAVREDISANLACLEDLHRTFNGVDLLLIESGGDNLAANYSRELADFIIYVIDVSGGDKIPRKGGPGITQSDLLVVNKTDLAEIVGADLGVMERDARKMREGGPTVFAQVKKSVGVEHIVNLILSAWKASGAEEIAKANGGPRPTEGLEELNA

SEQ ID NO: 147017 - DNA, 801 bp, Aspergillus nidulans FGSC A4
  CDS (1)..(801)
atggcacactcccactctcactcgcactctcatgacaatatagccgaccatggccactcccacgagatcctcgatggcccgggctcctacctcaaccgcgaacaaccgctgattgaggaccgcgactggagtgaccgggcctttaccattggcattggaggacccgtcggatcaggcaaaacagctctcatgctcgcactctgccgagcccttcgagatgagtacaacatcgcagccgtcactaacgacatcttcactcgcgaagacgccgaattcctcacgcgcaataaagctctctcaccggaccggatccgcgccatcgaaacaggcggatgcccgcacgccgccgttcgtgaagacatcagtgccaacctcctcgccctccagaacttgcaccgccaattccagacagaccttctccttattgagtccggcggcgataacctggccgccaactactcgcgcgaactcgccgacttcatcatctacgtgattgacgttgccggcggcgacaaagtcccgcgcaaaggcggaccgggcattacagggtcagatttgctggtggttaacaagattgatcttgcggaggcggtcggcgccgatatctcggtaatggagcgggatgcagcaaagatgcgggagggcggtccgacggtgtttgcagttgtcaagaaggatcagggggtggatcatattgtgaatctgattctgagtgcctggaaggcgagtggagcatacgaacttagtttgcagaggtggaagaacggggcgccgagggggtctgggagtgttgagccttag

SEQ ID NO: 147018 - protein, 266 aa, Aspergillus nidulans FGSC A4
MAHSHSHSHSHDNIADHGHSHEILDGPGSYLNREQPLIEDRDWSDRAFTIGIGGPVGSGKTALMLALCRALRDEYNIAAVTNDIFTREDAEFLTRNKALSPDRIRAIETGGCPHAAVREDISANLLALQNLHRQFQTDLLLIESGGDNLAANYSRELADFIIYVIDVAGGDKVPRKGGPGITGSDLLVVNKIDLAEAVGADISVMERDAAKMREGGPTVFAVVKKDQGVDHIVNLILSAWKASGAYELSLQRWKNGAPRGSGSVEP

SEQ ID NO: 147019 - DNA, 612 bp, Prochlorococcus marinus str. AS9601
  CDS (1)..(612): transl_table=11
atgagcagcaaattgagagtaggggttgctgggcctgtaggttcaggaaaaactgcattagtagaaactctatgcttaagcatgaataaaaattatgagatagcagttgttaccaatgatatctacaccaaagaagatgctaactttctaataaataagaaggttttagaggaaggaaggattattggtgtagaaacaggagggtgtcctcataccgcgataagagaggattgttcattaaataaaaatgcagttttagatttagaaaataaatataatccattagattttgtttttgtagaaagtggaggtgataatttagcatctagttttagtccagaacttgtagatttatcaatatatgtaattgatgtatctgccggagacaaaatccctagaaaagggggcccagggataacaaggtcggatctattattgataaacaaaattgacttagcagacaaagttggtgcagatttaaatattatgaaaagtgatactgaatttatgagaaaagggaaaccatggttttttaccaacctaagtagcggcatgggagttgaagaaataattcaatttttagaatcacatatacccaacaatcgaaactag

SEQ ID NO: 147020 - protein, 203 aa, Prochlorococcus marinus str. AS9601
MSSKLRVGVAGPVGSGKTALVETLCLSMNKNYEIAVVTNDIYTKEDANFLINKKVLEEGRIIGVETGGCPHTAIREDCSLNKNAVLDLENKYNPLDFVFVESGGDNLASSFSPELVDLSIYVIDVSAGDKIPRKGGPGITRSDLLLINKIDLADKVGADLNIMKSDTEFMRKGKPWFFTNLSSGMGVEEIIQFLESHIPNNRN

SEQ ID NO: 147021 - DNA, 618 bp, Prochlorococcus marinus str. NATL1A
  CDS (1)..(618): transl_table=11
atggaaagtaaattaagagttggtatagccggtccagtaggatctggtaaaacggctattattcagagactatgtgaaaaccttaaagatcgattagagattgcagtagtaacaaatgatatctatacgcaagaagatgcaaaattcttaacgaattcaaaggctttagcacctgaacgtattaaaggagttgaaactggaggttgcccacatacagcgataagggaagattgctcaattaatcgtattgcggttgaagagctggagcatgaatttacaactttagatttagtatttgttgaaagtggtggcgataatctggctgctagttttagccctgagttagtagatgtatgtatatacataattgatgtcgcagcgggagataagatccctaggaaaggagggccaggaataacacgttctgatttattagtgatcaataagattgaccttgctgaaatggtaggagcaagcctgaaaataatggagagagatactctgcttatgaggaaaaatcttccctggtgctttactaataccaaaacaggggaggggataaaaataattgcagaatttttgtgtaatcagataccttttgcgcgcaagatggtataa

SEQ ID NO: 147022 - protein, 205 aa, Prochlorococcus marinus str. NATL1A
MESKLRVGIAGPVGSGKTAIIQRLCENLKDRLEIAVVTNDIYTQEDAKFLTNSKALAPERIKGVETGGCPHTAIREDCSINRIAVEELEHEFTTLDLVFVESGGDNLAASFSPELVDVCIYIIDVAAGDKIPRKGGPGITRSDLLVINKIDLAEMVGASLKIMERDTLLMRKNLPWCFTNTKTGEGIKIIAEFLCNQIPFARKMV

SEQ ID NO: 147023 - DNA, 612 bp, Prochlorococcus marinus str. MIT 9303
  CDS (1)..(612): transl_table=11
atgagtagcaaactgcgcttaggtgtggctggcccggtgggttcgggtaagacagcactagtggaggcaatttgtcgccgtctacgagatcagttgcaattggcagttgtcaccaatgacatctatacccaggaagatgcagagttcttgacgcgtgtgggagctctcgagccagagcgtattcgcggcgtggaaacaggtggttgtcctcatactgctattcgtgaggattgttcgattaatcgcgcggccgtagaagatctggagaggaattttccagatcttgatgttgttcttgttgagagtggtggcgataatcttgccgccagcttcagtccagaattggtggacctttgcatctatgtgattgatgtggcggctggcgacaagatccctcgtaagggtggtccggggatcacacgctcggatttattggtgatcaacaagattgatctcgcggatcatgtcggggctgatttggaagtgatgaagcgcgatgcgacgcgcatgcggggagagcgtccttggtgtttcaccaacttgcacagcggcgacggccttgagagtgtgctgcaatttttgttgcaacagctaccaaatcgccctgagtaa

SEQ ID NO: 147024 - protein, 203 aa, Prochlorococcus marinus str. MIT 9303
MSSKLRLGVAGPVGSGKTALVEAICRRLRDQLQLAVVTNDIYTQEDAEFLTRVGALEPERIRGVETGGCPHTAIREDCSINRAAVEDLERNFPDLDVVLVESGGDNLAASFSPELVDLCIYVIDVAAGDKIPRKGGPGITRSDLLVINKIDLADHVGADLEVMKRDATRMRGERPWCFTNLHSGDGLESVLQFLLQQLPNRPE

SEQ ID NO: 147025 - DNA, 609 bp, Clostridium thermocellum ATCC 27405
  CDS (1)..(609): transl_table=11
atgaattatgtgaaaatcggcgtgggaggtccggtaggatcgggcaagaccgcccttatagaaaaattgacaagaatattggctgattcttacagcatcggggtggttaccaacgatatatacacaaaagaggacgcggaatttttaataaagaacagtgtacttcccaaagagaggataattggagtggaaaccggcggctgccctcatacggctattcgcgaggatgcttccatgaaccttgaagctgtggaggaactggtacagcggttccctgatattcaaattgtgtttattgaaagcgggggagacaatctttccgcaactttcagtccggaactggccgatgccaccatatatgtcatcgatgtggccgaaggtgacaaaattccccgaaaaggcggcccgggaataacccggtcggatttactggtcataaataaaattgatctggctccatacgtgggagcaagccttgaggtaatggaaagggattcaaagaagatgaggggtgagaaaccttttatattcaccaatttgaatacaaatgaaggtgtggataagattatcgattggattaagaaaagcgtccttttggaaggtgtgtaa

SEQ ID NO: 147026 - protein, 202 aa, Clostridium thermocellum ATCC 27405
MNYVKIGVGGPVGSGKTALIEKLTRILADSYSIGVVTNDIYTKEDAEFLIKNSVLPKERIIGVETGGCPHTAIREDASMNLEAVEELVQRFPDIQIVFIESGGDNLSATFSPELADATIYVIDVAEGDKIPRKGGPGITRSDLLVINKIDLAPYVGASLEVMERDSKKMRGEKPFIFTNLNTNEGVDKIIDWIKKSVLLEGV

SEQ ID NO: 147027 - DNA, 612 bp, Prochlorococcus marinus str. MIT 9301
  CDS (1)..(612): transl_table=11
atgagcagcaaattgagagtaggggttgctgggcctgtaggttcaggaaaaactgcattagtagagactctatgcttaagcctgaaaaaaaattatgagatagcaattgtcacaaatgatatcttcacgaaagaagatgctaactttcttataaataaaaaggttttagaggaaggaaggattattggagtggaaacaggaggttgtcctcataccgcgataagagaagattgttcattaaataaaaatgcagttttagatttagaaaataaatataatcctttagattttgtttttgtagaaagtggaggtgataatctagcatctagttttagtccagaacttgtagatttatcaatatatgtaattgatgtatctgccggagacaaaattcctagaaaagggggaccagggataacaagatcggatttattattaataaacaaaattgacctagcagataaagttggtgcagatttaaatattatgaaaagtgatactgaatttatgcgaaaagggaaaccttggttttttaccaacctaagtatcggcataggagttgaagaaataactcaatttttagaatcacatatacccaacaatagaaactag

SEQ ID NO: 147028 - protein, 203 aa, Prochlorococcus marinus str. MIT 9301
MSSKLRVGVAGPVGSGKTALVETLCLSLKKNYEIAIVTNDIFTKEDANFLINKKVLEEGRIIGVETGGCPHTAIREDCSLNKNAVLDLENKYNPLDFVFVESGGDNLASSFSPELVDLSIYVIDVSAGDKIPRKGGPGITRSDLLLINKIDLADKVGADLNIMKSDTEFMRKGKPWFFTNLSIGIGVEEITQFLESHIPNNRN

SEQ ID NO: 147029 - DNA, 624 bp, Bradyrhizobium sp. ORS278
  CDS (1)..(624): transl_table=11
atggcatcgtctcacggtcccctccgcgtcggggtcggcggacccgtcggctcgggaaaaaccgcgctgatggatctgctctgcaagtcgatgcgagagcgctacgacatcgctgcgatcaccaacgacatctacacgaaatgggatgcggaatttctcgtccgctccggctcgttgacgcccgaccgcatcgcgggcgtcgaaaccggcggctgtccgcacacggcgatccgcgaggacgcctctatgaacctggccgcggtctcagacatgcgcgccaagtttcccgggctggatctcgtgctgatcgaatccggcggcgacaatctggcagcgaccttctccccggagctagccgatatcacgatctacgtgatcgatgtggccgccggcgacaagatcccgtccaaaggcggaccgggcatcacccgctccgacctgctggtgatcaacaagatcgacctcgccccgcatgtcggcgcctctctggagaagatggagaccgatgcgaagcggatgcgcggcgagcgccccttcgtcatgaccaacatgaagaagagccaaggtctcgaccggatcatcggcttcatcgaggccaagggtggcctcaagcccaaagcctga

SEQ ID NO: 147030 - protein, 207 aa, Bradyrhizobium sp. ORS278
MASSHGPLRVGVGGPVGSGKTALMDLLCKSMRERYDIAAITNDIYTKWDAEFLVRSGSLTPDRIAGVETGGCPHTAIREDASMNLAAVSDMRAKFPGLDLVLIESGGDNLAATFSPELADITIYVIDVAAGDKIPSKGGPGITRSDLLVINKIDLAPHVGASLEKMETDAKRMRGERPFVMTNMKKSQGLDRIIGFIEAKGGLKPKA

SEQ ID NO: 147031 - DNA, 609 bp, Bradyrhizobium sp. ORS278
  CDS (1)..(609): transl_table=11
atgaccgccgcgcgcgtcggcatcggcggccctgtcggctccggcaagaccgcgctcgtcgagcagctgatcccggcgctgcaggcgcgcggcatcgacatcgcggtcatcaccaacgatctcgtcaccgccgaggatgccgagcgcgtgcgccgctccggcctgatcgatcctgagcgcgtgtcggcggtcgaggcgggcgcctgtccgcacaccgtcatccgcgaagacccgacgctgaacatcgaggccgccgacgagctggagcgccgctttcccggcgtcgagctgatcttgctggagagcggcggcgacaatctcgcctcgaccttctcgcgcgacctcaccgatttctggatgttcgtgatcgacgtcgctggcggcgacgacatcccgcgcaagcgcggccccggcgtgatccgcgccgatctgctggtgatcaacaaggtcgacctcgcgcctcacgtcggcgtcgatctcgcccgcatgcagcgcgaggccaccgacgtgcgcggcggccggccggtgttgctgaccaactgccggcgcggcgaggggatcgacgcgatcgtcgatctgctcgaacgcgaggtgctgttccggacgtga

SEQ ID NO: 147032 - protein, 202 aa, Bradyrhizobium sp. ORS278
MTAARVGIGGPVGSGKTALVEQLIPALQARGIDIAVITNDLVTAEDAERVRRSGLIDPERVSAVEAGACPHTVIREDPTLNIEAADELERRFPGVELILLESGGDNLASTFSRDLTDFWMFVIDVAGGDDIPRKRGPGVIRADLLVINKVDLAPHVGVDLARMQREATDVRGGRPVLLTNCRRGEGIDAIVDLLEREVLFRT

SEQ ID NO: 147033 - DNA, 615 bp, Acinetobacter sp. ADP1
  CDS (1)..(615): transl_table=11
atgacagaacgtagtccattacgcgtaggtattggtggtccagttggatcaggtaaaacagcgctgactttaaatctttgtcgtgcactgcgtaataaatataacatggccgtcgtcaccaatgatatttataccaaagaagattccaattttttgacacgcaatgaagcgatgacaccagaccgtatcgtgggggtggaaacaggaggatgtccacataccgccattcgtgaagatgcatcgattaatctggcagcgattgatgatctttgtgaaaagtttgatggccttgagctgattattattgaaagtggtggagataatctagcagcgacgtttagtcctgaactttccgatttaacgctttatgtgattgatgtagcgggaggagagaagattccacgtaaaggtgggcctggtattaccaagtctgatttactcatcattaacaaaactgatcttgcgccaatggtaggtgccaacttggatgtgatggaacaggatgctaaacgcatgcgcggcgaaaaaccgtttttgttttcgaatatgaaaacagaagatggtttaactcaaatcatcgaattcattgaaaaacaaggtctatttaaggcttaa

SEQ ID NO: 147034 - protein, 204 aa, Acinetobacter sp. ADP1
MTERSPLRVGIGGPVGSGKTALTLNLCRALRNKYNMAVVTNDIYTKEDSNFLTRNEAMTPDRIVGVETGGCPHTAIREDASINLAAIDDLCEKFDGLELIIIESGGDNLAATFSPELSDLTLYVIDVAGGEKIPRKGGPGITKSDLLIINKTDLAPMVGANLDVMEQDAKRMRGEKPFLFSNMKTEDGLTQIIEFIEKQGLFKA

SEQ ID NO: 147035 - DNA, 648 bp, Silicibacter pomeroyi DSS-3
  CDS (1)..(648): transl_table=11
atgagcaaaatgaacggcccgcttcgagttggcatcggtggcccggtgggcgccggcaagacaacgctcactgccgctctcagcgaagcgctgcgcgacagccattcgatcggcgtgatcaccaacgacatctacaccagggaagacgccgaggcgctgatgcgcctgcaaattctgccgcaggaccgtatcattggtgttgaaaccggcggctgcccccacacggcgatacgcgaagatgcctcgatcaaccttgccgcggtggccgagatggaacgccgccatcccggtatcgagatcattctgatcgaaagcggaggggataacctgtcggccacgttcagtcctgaacttgccgatgttacactttacgtgatcgacgtcgccgcaggcgaagagatcccccgcaagggaggaccggcgatcacgaaatccgatatcctgatcatcaacaagaccgaccttgccccgcatgtcggcgcgtcgcttgaggtgatggagcgagacgccggaagaatgcgctgtgggcgccccttcgtcttttcgtcgctacgcaatcgcgacggtgtcgccgagatcgtcaaactgcttgcagaaattgcagggctggagatccggtctgacttgcaggtcgccaaccttgcctag

SEQ ID NO: 147036 - protein, 215 aa, Silicibacter pomeroyi DSS-3
MSKMNGPLRVGIGGPVGAGKTTLTAALSEALRDSHSIGVITNDIYTREDAEALMRLQILPQDRIIGVETGGCPHTAIREDASINLAAVAEMERRHPGIEIILIESGGDNLSATFSPELADVTLYVIDVAAGEEIPRKGGPAITKSDILIINKTDLAPHVGASLEVMERDAGRMRCGRPFVFSSLRNRDGVAEIVKLLAEIAGLEIRSDLQVANLA

SEQ ID NO: 147037 - DNA, 615 bp, Staphylococcus epidermidis RP62A
  CDS (1)..(615): transl_table=11
atgtcaaacccaattaaaattggtatcggggggcctgttggtgcaggtaaaacccaattaatagaaaaagtggttaaacgccttgcgaaaaaaatgagtattggcgttattactaatgatatctatactaaagaagatgaaaaaatactagttaatacaggtgttttaccagaagatagaattatcggtgtggaaactggaggttgtcctcatacagctattcgtgaagacgcctcaatgaacttcgcagccatagatgaattattagaacgtaatgatgatattgaacttatttttattgaatcaggtggcgataacttagcggctacttttagtccagaactcgttgacttttcaatttatatcattgatgttgctcagggcgaaaagattccacgtaaaggtggacaaggtatgattaaatctgatttcttcattattaataaaactgaccttgcaccatatgtgggtgcttcattagatcaaatggctaaagatactgaagtatttcgtggaaatcatccattcgcttttacaaatttaaaaactgatgaaggtttagaaaaagttattgagtggattgagcacgacgtcttactgaaagggttaacttaa

SEQ ID NO: 147038 - protein, 204 aa, Staphylococcus epidermidis RP62A
MSNPIKIGIGGPVGAGKTQLIEKVVKRLAKKMSIGVITNDIYTKEDEKILVNTGVLPEDRIIGVETGGCPHTAIREDASMNFAAIDELLERNDDIELIFIESGGDNLAATFSPELVDFSIYIIDVAQGEKIPRKGGQGMIKSDFFIINKTDLAPYVGASLDQMAKDTEVFRGNHPFAFTNLKTDEGLEKVIEWIEHDVLLKGLT

SEQ ID NO: 147039 - DNA, 663 bp, Pseudomonas syringae pv. syringae B728a
  CDS (1)..(663): transl_table=11
atgagcctgcccttgaacgcatctgccccgcacaccgatgcccaaccccatcccggcgctgctcgcgtgggcatcggcggcccggtgggctcgggcaagacccgcctgctggaacaattgattctgcgcttcatcgcgcgtggtaccgagctggcgatcatcaccaatgaccttgcgacccgtgaagatgccgagcgtgtgcagcgcagcgggctgatcgacccgcagcgggttcgtgcggtggaaaccggtgcctgcccgcacaccgccattcgtgaagacccgaccctcaacctgcaaatggccgatgagctggaagcgcgcttcggtaatcttgatctggtgctgatcgaatcgggcggcgacaacctggcctcgaccttttcgctggatctggtggactactggattttcgtcatcgatgtcgcaggcggcgacgatatcccgcgcaaacgcggccccggcgttttgagctgcgacctgctggtggtcaataaatacgacctggcaccctatgtgggcgtcgacctgccgcgcatgcggcgcgagtcagcgcaagcgcgcaacggccagccggtgctgtttaccaactgcaacaccggcgaaggcgtcgacgcggtggtggacgcgataagccgtgccgtgttgttcgaccgcacatga

SEQ ID NO: 147040 - protein, 220 aa, Pseudomonas syringae pv. syringae B728a
MSLPLNASAPHTDAQPHPGAARVGIGGPVGSGKTRLLEQLILRFIARGTELAIITNDLATREDAERVQRSGLIDPQRVRAVETGACPHTAIREDPTLNLQMADELEARFGNLDLVLIESGGDNLASTFSLDLVDYWIFVIDVAGGDDIPRKRGPGVLSCDLLVVNKYDLAPYVGVDLPRMRRESAQARNGQPVLFTNCNTGEGVDAVVDAISRAVLFDRT

SEQ ID NO: 147041 - DNA, 618 bp, Pseudomonas syringae pv. syringae B728a
  CDS (1)..(618): transl_table=11
atgaacagccaacctctgcgtgtcggaatcggtggcccggtcggatccggcaagacggcgctgaccctggcgctgtgcctggcattgcgcgaccgctataacctggccgtcgtgaccaacgatatctatacccgtgaagacgccgattttctggtgcgtaacgaggcactggcaccagagcgcatcatcggcgttgaaaccggcggctgcccgcataccgccattcgtgaggatgcttcgatcaacctggaagcggtcgaccaactcaatcgccgcttcgaaggcctggacctgatcatcgtcgagtccggtggcgacaacctttccgcgaccttcagcccggagctttccgacctgaccatctacgtaatcgacgtgtcggccggcgacaagctgccgcgcaagggcggtccgggcatctgcaagtccgacctgctggtgatcaacaagatcgacctcgcccctttggtgggcgcgtcactggagatgatggacagcgacacgcgcaggatgcgtggcgaaaagccgttcgtgttcagcaatcagaaaaccggtcagggtctggaacagatcattgccttcattgagcgccagggcctgctgactgcggccgcctga

SEQ ID NO: 147042 - protein, 205 aa, Pseudomonas syringae pv. syringae B728a
MNSQPLRVGIGGPVGSGKTALTLALCLALRDRYNLAVVTNDIYTREDADFLVRNEALAPERIIGVETGGCPHTAIREDASINLEAVDQLNRRFEGLDLIIVESGGDNLSATFSPELSDLTIYVIDVSAGDKLPRKGGPGICKSDLLVINKIDLAPLVGASLEMMDSDTRRMRGEKPFVFSNQKTGQGLEQIIAFIERQGLLTAAA

SEQ ID NO: 147043 - DNA, 678 bp, Haemophilus influenzae 86-028NP
  CDS (1)..(678): transl_table=11
atgagcaacacagttgctacgatgataaacaaaaggaacattatgcgtaactacattaaaattggcgtagcaggtcctgttggcgcaggcaaaaccgcgttaattgaaaaactcactcgtgaaatagcgtcaaaatatagcgtagcagtcattactaacgatatttacacccaagaagatgcggaatttttaacgaaaaatagtttgcttccaccagagcgaattatgggcgtggaaacgggcggttgcccgcacacagcaattcgtgaagatgcctcgatgaatttagaagccgtggacgaaatggtgactcgtttccctgatgtggaaatcgtgttcattgaatcaggtggcgataacctttcagcgacttttagccctgatttggcagacgtgacaattttcgtgattgacgtggctcaaggggaaaaaatccctcgtaaaggtgggccgggtatcactcgttcagatttacttgtgatcaacaaaactgatcttgctccattcgttggtgttgacttaagcgtcatggaacgtgatgctcgtcgtatgcgtaacggtcagccgtttattttcactaacctgatgaaaaaagaaaatctggatggcgtgatcggttggatcgaaaaatatgcgttgttgaagaatgtggaagaacctgcatctttggttcgttaa

SEQ ID NO: 147044 - protein, 225 aa, Haemophilus influenzae 86-028NP
MSNTVATMINKRNIMRNYIKIGVAGPVGAGKTALIEKLTREIASKYSVAVITNDIYTQEDAEFLTKNSLLPPERIMGVETGGCPHTAIREDASMNLEAVDEMVTRFPDVEIVFIESGGDNLSATFSPDLADVTIFVIDVAQGEKIPRKGGPGITRSDLLVINKTDLAPFVGVDLSVMERDARRMRNGQPFIFTNLMKKENLDGVIGWIEKYALLKNVEEPASLVR

SEQ ID NO: 147045 - DNA, 615 bp, Pseudomonas fluorescens Pf-5
  CDS (1)..(615): transl_table=11
atgaacgcacaacctctgcgcgtcggcatcggcggcccggtgggctccggtaaaaccgccctgaccctggccctgtgcctggccctgcgcgagcgctacaacctggcggtggtgaccaacgatatctacacccgcgaagacgccgacttcctggtacgcaatgaggccctggcgccggaacggatcatcggcgtggaaaccggcggctgcccgcacaccgcgatccgcgaagacgcctcgatcaatctggaagcggtggaccagttgaatcggcgctttcccgggctcgacctgatcctggtggagtccggcggcgacaacctctcggccaccttcagccccgaactctccgatctgaccatctatgtgatcgacgtttccgccggtgacaagctgccgcgcaagggcggtccgggcatctgcaaatccgacctgctggtgatcaacaagatcgacctggcgccgctggtgggggcctccctggagatgatgaacagcgatacccagcgcatgcgcggcggcaagccgttcgtcttcagcaaccagaaaaccggccagggcctggcggacatcatcgccttcatcgaacgccagggcctgctcaccgcggcctga

SEQ ID NO: 147046 - protein, 204 aa, Pseudomonas fluorescens Pf-5
MNAQPLRVGIGGPVGSGKTALTLALCLALRERYNLAVVTNDIYTREDADFLVRNEALAPERIIGVETGGCPHTAIREDASINLEAVDQLNRRFPGLDLILVESGGDNLSATFSPELSDLTIYVIDVSAGDKLPRKGGPGICKSDLLVINKIDLAPLVGASLEMMNSDTQRMRGGKPFVFSNQKTGQGLADIIAFIERQGLLTAA

SEQ ID NO: 147047 - DNA, 606 bp, Dechloromonas aromatica RCB
  CDS (1)..(606): transl_table=11
atgagcaaacaagcactccgcgtcggtatcggcggcccggtcgggtccggcaagactgccctcaccctcgccctctgccaagccctgcgcgagcaaatcgacatggctgtcgtcaccaacgatatctacaccgccgaggatgccaagtttctggtcaatcactcggcgctcgcgccggagcgcatcatcggcgttgaaaccggcggctgcccgcacacggccatccgcgaggatgcctcgatcaatcttgaggccatcgaccgcctgcaacgcgctttccccgctgtcgaactgatcctcgtcgaatccggcggcgacaatctggccgccactttctcgcccgagctgtcagacctgaccatctatgtgatcgacgtcgccgctggcgagaagatcccgcgcaagggcgggccaggcatcaccaagtccgacctgctggtcatcaacaagatcgatctggcaccaatggttggcgcctcactggaagtcatggcgcacgacgccaaggttcagcgtggcgagcggccttttgtctttaccaatctgaagactggccacggcctggagaccatcatcgaattcatccgcgagaaagggatgctctag

SEQ ID NO: 147048 - protein, 201 aa, Dechloromonas aromatica RCB
MSKQALRVGIGGPVGSGKTALTLALCQALREQIDMAVVTNDIYTAEDAKFLVNHSALAPERIIGVETGGCPHTAIREDASINLEAIDRLQRAFPAVELILVESGGDNLAATFSPELSDLTIYVIDVAAGEKIPRKGGPGITKSDLLVINKIDLAPMVGASLEVMAHDAKVQRGERPFVFTNLKTGHGLETIIEFIREKGML

SEQ ID NO: 147049 - DNA, 618 bp, Prochlorococcus marinus str. NATL2A
  CDS (1)..(618): transl_table=11
atggaaagtaaattaagagttggcatagctggtccagtaggatctggcaaaacggctattattcagagactatgtgaaaatcttaaagatcgattagagattgcagtagtaacaaatgatatttatacgcaagaagatgcaaaatttttaacgaattcaaaggctttagcacctgaacgtatcaaaggagttgaaactggaggttgcccacatacagcgataagggaagattgctcaattaatcgtattgcggttgaagagctggagcataaatttacaactttagatttagtatttgttgaaagtggtggcgataatctagctgcgagttttagccctgagttagtagatgtatgtatatacataattgatgtcgcagcgggagacaagatccctaggaaaggagggccaggaataacacgttctgatttattagtgatcaataagattgaccttgctgaaatggttggagcaagcctgaaaataatggagagagatactctgcttatgaggaaaaatcttccctggtgttttaccaataccaaaacaggggaggggataaaaataattgaagggtttttgtgtaatcagataccctctgtgcataagatggtataa

SEQ ID NO: 147050 - protein, 205 aa, Prochlorococcus marinus str. NATL2A
MESKLRVGIAGPVGSGKTAIIQRLCENLKDRLEIAVVTNDIYTQEDAKFLTNSKALAPERIKGVETGGCPHTAIREDCSINRIAVEELEHKFTTLDLVFVESGGDNLAASFSPELVDVCIYIIDVAAGDKIPRKGGPGITRSDLLVINKIDLAEMVGASLKIMERDTLLMRKNLPWCFTNTKTGEGIKIIEGFLCNQIPSVHKMV

SEQ ID NO: 147051 - DNA, 630 bp, Ralstonia eutropha JMP134
  CDS (1)..(630): transl_table=11
atgacccaggctcgtaccaaaaagaatcctccgctgcgcgtcggcgtcggcggacctgtcggctccggcaagaccactctgctggaaatgctgtgcaaggcgatgcgggaccgctatgacctggtcgccatcaccaacgatatctacacgaaggaagaccagcgcctgctgacaatctccggcgcgctgcctgccgagcgcatcatgggtgtcgagacgggcggttgcccacatacggcgattcgcgaagatgcgtcgatcaacctcgaggctgtcgagcgcatgctggcgaagtttccggatgcggacgtggtcttcatcgaatccggcggtgacaatctcgccgcgacgttcagcccggaattgtccgacttgacgatctacgtgatcgacgtggccggcggcgagaagatcccgcgcaagggcggcccgggtattaccaagtcggacctgctggtgatcaacaagaccgacctggcgccgtatgttggcgcttcactcgaagtgatggagagcgatgcgcgcaagatgcgcggggggcgcccgttcgtgatgggcagcgtcaagtcggggcaaggcctggatgaggtgatccgcttcatcgagcagcagggcatgctgggcgtctga

SEQ ID NO: 147052 - protein, 209 aa, Ralstonia eutropha JMP134
MTQARTKKNPPLRVGVGGPVGSGKTTLLEMLCKAMRDRYDLVAITNDIYTKEDQRLLTISGALPAERIMGVETGGCPHTAIREDASINLEAVERMLAKFPDADVVFIESGGDNLAATFSPELSDLTIYVIDVAGGEKIPRKGGPGITKSDLLVINKTDLAPYVGASLEVMESDARKMRGGRPFVMGSVKSGQGLDEVIRFIEQQGMLGV

SEQ ID NO: 147053 - DNA, 603 bp, Anabaena variabilis ATCC 29413
  CDS (1)..(603): transl_table=11
atgaatgcttttcgtgttggggtagcaggcccggtgggttcggggaagacggctttagttgatgctttgtgtaaagcattgcgcgatcgctataagctggcagtggtaacaaatgatatatatactcaagaagatgcccaatttttagtccgttcgcaagccttgacaagcgatcgcattttaggcgtagagacaggcggttgtccacacacagcaattcgagaagatgcttccatgaatttggcagcaattgaacagctagaacagcgtttcaccgatttagatttagtctttttagaaagcggtggagataatttagctgctacctttagtcctgagttagtagatttaacaatttacgtcatcgatgtagccgccggtgataaaatcccccgcaaaggcgggccgggaattaccaaatctgacttattagtaattaataaaactgacctagccccctacgtcggcgcagatttaagtgttatggaaagagacgcaaaaaaaatgcgtggcgataaaccctttatttttactaatttaaaaactcaacaaggactcaacgatgtaattgaatttgtttgtcatcatatctgtcctgtgtag

SEQ ID NO: 147054 - protein, 200 aa, Anabaena variabilis ATCC 29413
MNAFRVGVAGPVGSGKTALVDALCKALRDRYKLAVVTNDIYTQEDAQFLVRSQALTSDRILGVETGGCPHTAIREDASMNLAAIEQLEQRFTDLDLVFLESGGDNLAATFSPELVDLTIYVIDVAAGDKIPRKGGPGITKSDLLVINKTDLAPYVGADLSVMERDAKKMRGDKPFIFTNLKTQQGLNDVIEFVCHHICPV

SEQ ID NO: 147055 - DNA, 624 bp, Rhodobacter sphaeroides 2.4.1
  CDS (1)..(624): transl_table=11
atgagccatggacccctgcgcgtggggatcggcggcccggtgggcgccggcaagacgaccctgaccgaaaagctctgcgcggcgctcgcgcatcgctgctcgatggcggtcatcaccaacgacatctacacccgcgaggatgccgaggcgctgatgcgcgcgcaggtgctgcccgcagagcggatccgcggcgtcgagacggggggctgcccccacacggccatccgcgaggatgcctcgatcaacctcgccgccgtggccgacctgcgccgcaccttcccggacctcgacctgatcctgatcgaatcgggcggcgacaatctggccgcgaccttcagccccgagctcgcggaccttaccatctatgtgatcgacacggccgccggacaggacattccgcgaaaacgcggcccgggccttgcgcgctcggatctgctggtcgtgaacaagatcgatctcgcgccccatgtcggcgtggatctggcccggctcgaggccgacacacaggccgcccgcggccaaaggccctatgtcatggcgcgaatgcgggcgggggtcggcgtcgaggcgatcgtagccttcctcgaacgcgaaggcgggctgcagctcctgccgcaggattga

SEQ ID NO: 147056 - protein, 207 aa, Rhodobacter sphaeroides 2.4.1
MSHGPLRVGIGGPVGAGKTTLTEKLCAALAHRCSMAVITNDIYTREDAEALMRAQVLPAERIRGVETGGCPHTAIREDASINLAAVADLRRTFPDLDLILIESGGDNLAATFSPELADLTIYVIDTAAGQDIPRKRGPGLARSDLLVVNKIDLAPHVGVDLARLEADTQAARGQRPYVMARMRAGVGVEAIVAFLEREGGLQLLPQD

SEQ ID NO: 147057 - DNA, 648 bp, Burkholderia sp. 383
  CDS (1)..(648): transl_table=11
atgaacgcacctgctccctcctctgcccgccgcacgaagaaactgccgccgctgcgcgtcggcatcggcggccccgtcggctccggcaagaccacgctgctcgaaatgctgtgcaaggcgatgcgcgaccggtacgacctcgtcgcgatcaccaacgacatctatacgaaggaagaccagcggctgctgacggtcgcgggcgcactgcccgaggagcgcatcatgggcgtcgagacgggcggctgcccgcacacggcgatccgcgaggatgcgtcgatcaacctcgaggccgtcgaccggatgctgtcgcgcttccccgacgccgacatcgtgttcatcgaatcgggcggagacaatctcgcggcgaccttcagccccgagctgtcggacctgacgatctacgtgatcgacgtcgcgggcggcgagaagattccgcgcaagggcggcccaggcatcacgaaatccgacctgctcgtgatcaacaagacggatctcgcgccgctggtcggtgcgaacctcgacgtgatggcgtccgacacgaagaagatgcgtggcgagcggccttacgtgatgacgaacctgaaggcgctcgaaggcgtcgcggacgtgatcgcgttcatcgagaagaaggggttgctgacggtctga

SEQ ID NO: 147058 - protein, 215 aa, Burkholderia sp. 383
MNAPAPSSARRTKKLPPLRVGIGGPVGSGKTTLLEMLCKAMRDRYDLVAITNDIYTKEDQRLLTVAGALPEERIMGVETGGCPHTAIREDASINLEAVDRMLSRFPDADIVFIESGGDNLAATFSPELSDLTIYVIDVAGGEKIPRKGGPGITKSDLLVINKTDLAPLVGANLDVMASDTKKMRGERPYVMTNLKALEGVADVIAFIEKKGLLTV

SEQ ID NO: 147059 - DNA, 606 bp, Synechococcus sp. CC9605
  CDS (1)..(606): transl_table=11
atgagcagcaaactgcgccttggggtggcgggtcctgtgggatccggcaaaaccgcattggtggaggcgctctgtcgccgcttgcgcgacgacctccagcttgcggtagttaccaacgacatctacacccaggaggatgcccagtttctcacccgtgctggtgccctggatccagagcggattcgtggcgtagagaccggtggttgccctcacacggcgatccgcgaagactgctcgatcaacagagccgccgtggcggagctggaggcgcaattccctgaacttgatcttgttttggttgaaagcggtggcgacaacctggcggcgagcttcagcccggaactggtggatctctgcatctacgtgattgatgtggcggctggcgacaagatcccccgcaagggagggcctggcatcacccgctctgatctgctggtgatcaacaagattgatcttgctccacaggtcggtgctgaccttgcgctgatggaacaggacacccggcggatgcgtggcgaccgaccgtggtgtttcaccaaccttcacagcggtgaagggctggagcaggtgttggcgttcttgtcgcaacaactaccaaattcgtag

SEQ ID NO: 147060 - protein, 201 aa, Synechococcus sp. CC9605
MSSKLRLGVAGPVGSGKTALVEALCRRLRDDLQLAVVTNDIYTQEDAQFLTRAGALDPERIRGVETGGCPHTAIREDCSINRAAVAELEAQFPELDLVLVESGGDNLAASFSPELVDLCIYVIDVAAGDKIPRKGGPGITRSDLLVINKIDLAPQVGADLALMEQDTRRMRGDRPWCFTNLHSGEGLEQVLAFLSQQLPNS

SEQ ID NO: 147061 - DNA, 612 bp, Prochlorococcus marinus str. MIT 9312
  CDS (1)..(612): transl_table=11
atgagcagtaaattgagggtaggagttgctgggcctgtaggttcaggaaaaactgcattattagagactctatgcttaagcctgaaaaacaattatgagatagcagttgtcaccaatgatatttacaccaaagaagatgcaaactttcttataaataaaaaagttttagaagaaggaaggattattggtgtagaaacaggagggtgtcctcatacagcgataagagaggattgttccttaaataaaaatgcagttttagatttagaaaatagatataaacctttagattttgtttttgtagaaagtggaggtgataatttagcatctagtttcagtccagaacttgtagatttgtcaatttatgtaattgatgtatctgcaggagacaaaattcctagaaaaggtggaccaggaataacaaggtcagatttattattaataaacaaaattgacttagcagatatggttggtgcaaatttaaatattatgaaaagcgatacggaatttatgagaaaaggaaaaccttggttttttaccaacctaagtaccggcataggagttgaagaaataactcgatttctagaatcgcaaatacccaacaatcaaaactag

SEQ ID NO: 147062 - protein, 203 aa, Prochlorococcus marinus str. MIT 9312
MSSKLRVGVAGPVGSGKTALLETLCLSLKNNYEIAVVTNDIYTKEDANFLINKKVLEEGRIIGVETGGCPHTAIREDCSLNKNAVLDLENRYKPLDFVFVESGGDNLASSFSPELVDLSIYVIDVSAGDKIPRKGGPGITRSDLLLINKIDLADMVGANLNIMKSDTEFMRKGKPWFFTNLSTGIGVEEITRFLESQIPNNQN

SEQ ID NO: 147063 - DNA, 651 bp, Burkholderia thailandensis E264
  CDS (1)..(651): transl_table=11
atgcacgcacctcacaccgcgacggcgctccgccgcacgaagaagctcccgccgctgcgcgtcggcatcggcggccctgtcggctccggcaagacgacgctcctcgaaatgctctgcaagggcatgcgcgagcgctacgacctcgtcgcgatcacgaacgacatctatacgaaggaagaccagcgcctcttgacgatcgcgggcgcgctgcccgaagagcggatcatgggcgtcgagacgggcggctgcccgcacaccgcgattcgcgaggacgcgtcgatcaatctcgaggcggtcgagcggatgctcgcgcgctttccggatgcggacatcgtgttcatcgaatcgggcggcgacaacctcgcggcgacgttcagccccgagctgtcggacctgacgatctacgtgatcgacgtcgcgggcggcgagaagattccgcgcaagggcggcccgggcatcacgaaatcggacctgctcgtgatcaacaagacggatctcgctccgcttgtcggcgccaacctcgacgtgatggcatccgacacgaagaagatgcgcggcgagcgtccgtacgtgatgtgcaacctgaaggcgctcgacggcgtggccgacgtgatcgcgttcatcgagaagaaaggattgctgacggtctga

SEQ ID NO: 147064 - protein, 216 aa, Burkholderia thailandensis E264
MHAPHTATALRRTKKLPPLRVGIGGPVGSGKTTLLEMLCKGMRERYDLVAITNDIYTKEDQRLLTIAGALPEERIMGVETGGCPHTAIREDASINLEAVERMLARFPDADIVFIESGGDNLAATFSPELSDLTIYVIDVAGGEKIPRKGGPGITKSDLLVINKTDLAPLVGANLDVMASDTKKMRGERPYVMCNLKALDGVADVIAFIEKKGLLTV

SEQ ID NO: 147065 - DNA, 750 bp, Frankia sp. CcI3
  CDS (1)..(750): transl_table=11
atgcacctcggacatgaggagttccagagaactgacgggcgggccagcacggggccagctgacgcggggccagccggcgccgggcgggcgccgcggatcggggtcggcggcccggtgggcagcggtaagacggccctggtcgccgcgctgtgccgggccctgtcgtcgagcctgcgcatcggggtggtgacgaacgacatctacaccaccgaggacgccgacttcctgcgccgggccggcgtgctcgatcccgagcggatccgcgcggtcgagaccggctgctgcccgcacaccgcgattcgcgacgacatcaccgcgaaccttgacatggtcgaggacctggaggccgacaccggccccctggacctggtcctcgtcgagtccggtggcgacaatctcaccgcgacgttcagctacgggctaatcgaccggcagatcttcgtcgtcgacgtcgccgggggcgacaaggtgccccgcaagggcggaccgggggtgaccggcagcgacctgctggtcatcaacaagaccgatctggcccccctggtgggcgccgacctcgacgtcatggcccgggacgcgaccgcggcccgcggtgcccgtccggtggtgttcacctcgctcaccgccgaccccacggccgcggacgtgaccgcctgggtacgggcccagctcgccgaactgtccccgcgcggcggttcctacgatgcgtccgatgcgtctaatgcgtcgcaacctttaaataggatgtga

SEQ ID NO: 147066 - protein, 249 aa, Frankia sp. CcI3
MHLGHEEFQRTDGRASTGPADAGPAGAGRAPRIGVGGPVGSGKTALVAALCRALSSSLRIGVVTNDIYTTEDADFLRRAGVLDPERIRAVETGCCPHTAIRDDITANLDMVEDLEADTGPLDLVLVESGGDNLTATFSYGLIDRQIFVVDVAGGDKVPRKGGPGVTGSDLLVINKTDLAPLVGADLDVMARDATAARGARPVVFTSLTADPTAADVTAWVRAQLAELSPRGGSYDASDASNASQPLNRM

SEQ ID NO: 147067 - DNA, 624 bp, Saccharophagus degradans 2-40
  CDS (1)..(624): transl_table=11
atgacaacaacaaaaccagcattgcgtttaggtattggtggccctgtgggctccggcaaaacagctttggtaaaagtgctgtgcgcaattcttaaagaaaaatataacattgctgttattactaacgatatttacacgcgcgaagacgccgagtttttattgcgtcacgaagtgttagaagccgatagaattctaggtgtagaaaccggcggttgcccgcacacggcaattcgtgaagacgcatctatgaacttatctgcggtggcagaattgcaagatcgcttcgccaatttagatgtaattttaatagaaagcggtggcgataatttagcagctacatttagcccggaattatcggatttaaccctttatgttattgatgtgtctgccggcgataaaattccccgtaaaggtgggccaggcattactaaatcagacctgcttattatcaataaaatcgacttggctgaattagtcggcgccgacttgggcgtgatggatcgcgatgcgaaaaaaatgcgtggcaacaaaccttttgtattctccaacttaaaaaatggtacaggtgtagaagatattgttagctttatagaaaagcagggcatgttgacaccgtctaagtga

SEQ ID NO: 147068 - protein, 207 aa, Saccharophagus degradans 2-40
MTTTKPALRLGIGGPVGSGKTALVKVLCAILKEKYNIAVITNDIYTREDAEFLLRHEVLEADRILGVETGGCPHTAIREDASMNLSAVAELQDRFANLDVILIESGGDNLAATFSPELSDLTLYVIDVSAGDKIPRKGGPGITKSDLLIINKIDLAELVGADLGVMDRDAKKMRGNKPFVFSNLKNGTGVEDIVSFIEKQGMLTPSK

SEQ ID NO: 147069 - DNA, 612 bp, Methylobacillus flagellatus KT
  CDS (1)..(612): transl_table=11
atgcagattaaggaacctttacgcgtcggcatcggcggcccggtcgggtcgggcaagaccgcattgacgctggcgttgtgccagcgcttgcgcaatgtgtacaacattgcggtggtgaccaatgacatttatacgcgggaagatgcagagtttctcacacgcaacgaagcattggcaccagagcgcatcatcggggtggagacgggcggctgtccgcacacggcgatccgcgaggatgcctcgatgaacctcgaagcggtagcgcagttgagcgaacgcttcaacccgctggacatcgtatttgtcgaaagcggcggcgataaccttgctgccacgttcagcccagagctttccgacctgaccatttacgtgatcgatgttgcggcgggtgagaaaattccgcgcaagggcgggccaggcattaccaagtcggatttgctggtgatcaacaagatcgacctcgctcccatggtgggggcctcgctggaggtgatggagaaggatgcgcgcaggatgcgcggcgagcggcccttcatctttaccaacctcaagcgcgggcaggggctggaagacattgtcgggtttatcgaaaaacaggggctgatgctttga

SEQ ID NO: 147070 - protein, 203 aa, Methylobacillus flagellatus KT
MQIKEPLRVGIGGPVGSGKTALTLALCQRLRNVYNIAVVTNDIYTREDAEFLTRNEALAPERIIGVETGGCPHTAIREDASMNLEAVAQLSERFNPLDIVFVESGGDNLAATFSPELSDLTIYVIDVAAGEKIPRKGGPGITKSDLLVINKIDLAPMVGASLEVMEKDARRMRGERPFIFTNLKRGQGLEDIVGFIEKQGLML

SEQ ID NO: 147071 - DNA, 654 bp, Burkholderia xenovorans LB400
  CDS (1)..(654): transl_table=11
atgaacgcacctcatcatcccgcccactcgaccgtccgcacgaaaaagctgccgccgctgcgcgtgggcgtcggcggcccggtcggctcgggcaagaccacgctgctcgaaatgctgtgcaaggcgatgcgcgaacagtacgacctcgtcgccatcaccaacgacatctatacgaaagaagaccagcggctgctgacggtggcgggcgcgttgccggccgaacggatcatgggcgtcgaaacgggcggctgtccgcacacggcgatccgcgaggacgcgtcgatcaatctcgaagccgtcgaccgtatgctcacgcgttttccggacgcggatatcgtgttcatcgaatcgggcggcgacaacctcgcggcgacattcagtccggaactgtcggacctgacgatctacgtgatcgacgtggccggtggcgagaagattccgcgcaagggcggccccggcattacgaagtccgatctgctcgtgatcaacaagacggacctggcgccgatggtcggcgcgaatctcgaagtgatggccgcggacgcgaagaaaatgcgcggcgagcggcccttcgtgatgtgcaatctgaaggcgctcgacgggctggacgtggtggtgaagtttatcgagaagaaggggttgttgaaggtttga

SEQ ID NO: 147072 - protein, 217 aa, Burkholderia xenovorans LB400
MNAPHHPAHSTVRTKKLPPLRVGVGGPVGSGKTTLLEMLCKAMREQYDLVAITNDIYTKEDQRLLTVAGALPAERIMGVETGGCPHTAIREDASINLEAVDRMLTRFPDADIVFIESGGDNLAATFSPELSDLTIYVIDVAGGEKIPRKGGPGITKSDLLVINKTDLAPMVGANLEVMAADAKKMRGERPFVMCNLKALDGLDVVVKFIEKKGLLKV

SEQ ID NO: 147073 - DNA, 624 bp, Ralstonia metallidurans CH34
  CDS (1)..(624): transl_table=11
atgactcgtaccaagaaaaaccctccgttgcgcgttggcgtgggcggccccgtcggctccggcaagaccacgctgctcgagatgctgtgcaaggccatgcgcgaccgctatgacctggtggcgatcaccaacgatatctatacgaaggaagaccagcgcctgctgacgatctcgggcgcgctgccggccgagcggatcatgggtgtggaaacgggcgggtgtcctcacaccgcgatccgcgaggacgcctcgatcaacctcgaggccgtcgatcggatgctggcgaagtttcccgatgccgatgtggtgttcatcgaatcgggtggagacaatctggctgcgacgtttagcccggagctttccgacctgacgatctatgtgatcgacgtggcgggcggcgagaaaatcccgcgcaagggcgggccgggcatcacgaagtccgatctgctggttatcaacaagaccgatcttgcgccctatgttggtgcatcactggagatcatggagagcgacgcccgcaagatgcgcggcgagcggccctttgtgatgggcagtgtgaagtcggggcagggacttgaccaggtgattgcgttcatcgagcggcagggcatgctcgacgtgtag

SEQ ID NO: 147074 - protein, 207 aa, Ralstonia metallidurans CH34
MTRTKKNPPLRVGVGGPVGSGKTTLLEMLCKAMRDRYDLVAITNDIYTKEDQRLLTISGALPAERIMGVETGGCPHTAIREDASINLEAVDRMLAKFPDADVVFIESGGDNLAATFSPELSDLTIYVIDVAGGEKIPRKGGPGITKSDLLVINKTDLAPYVGASLEIMESDARKMRGERPFVMGSVKSGQGLDQVIAFIERQGMLDV

SEQ ID NO: 147075 - DNA, 642 bp, Silicibacter sp. TM1040
  CDS (1)..(642): transl_table=11
atgacatcgcagacaactgcgccccatggaccgctccgcgtcggcatcggcggccccgtgggagcaggcaagaccacgctcatggcagagcttgcccgcgcgctgaaggatcatcactccatcggcgtcatcacgaacgacatctacacacaggaagatgccgaggccttgatgcgccagcaaatcctgccacaggaccgggtgatcggcgtggagaccggcggctgcccgcacacggcaatccgcgaggatgcctcgatcaatctcgcggcggtggccgagatgcaaaaccgccaccccgaggtggaaatcgtgctgatcgaaagcggtggtgacaatctctcggccacgttctcgccggaactggcggatgtgacgctctatgtcatcgacgtggccgcaggcgaagagatcccgcgcaagggtggcccggccatcacccgctcagaccttctgattatcaacaagaccgaccttgcccctcatgtgggggcttcgcttgaggtgatggaacgcgatgcgaagcgcatgcgcaatgggctgccatttgcctttactgcattgcgtcatggcgaaggagtcgacaccgtgctccgccatctctttgacatcggcggcatcgactcgggcgcggtgacataa

SEQ ID NO: 147076 - protein, 213 aa, Silicibacter sp. TM1040
MTSQTTAPHGPLRVGIGGPVGAGKTTLMAELARALKDHHSIGVITNDIYTQEDAEALMRQQILPQDRVIGVETGGCPHTAIREDASINLAAVAEMQNRHPEVEIVLIESGGDNLSATFSPELADVTLYVIDVAAGEEIPRKGGPAITRSDLLIINKTDLAPHVGASLEVMERDAKRMRNGLPFAFTALRHGEGVDTVLRHLFDIGGIDSGAVT

SEQ ID NO: 147077 - DNA, 624 bp, Mesorhizobium sp. BNC1
  CDS (1)..(624): transl_table=11
atgaaatcgtcgaatggacccttgaggattggcatcggcggcccggtcggttccggcaagacgacgctatgcgaagtcctgctcaaatccatgcgcgaccgctattccatggccgtcgtcacaaacgacatttacaccaaggaggacgcgctgatcctcgctcgactgcaggcgatctccgaggaccgcattgtcggcgttgagaccggcggctgcccgcacaccgcgattcgagaggacgcctcgctcaaccttgcagccatcgcccatctcaatcgccgtttcccagacctcgacatcatcctgattgaaagtggcggcgataatctggcggccaccttttcgcccgatcttgccgacctgacgctctatgtgatctccgtcgcccagggtgagaaaattccgcgcaagggtgggccagcgatcacccggtcggatcttctcatcatcaacaagaccgatctcgcgccctatgtaggcgcgaacctcgacgtgatgaggagcgatacggagaaagtgcgtgagggccggccctatgtcatgaccgatctgtcccgccgtcaaggtgcggaagaggtcgtcgcgttcatcgaaaagatgggtgggcttgcgcttgctgcttga

SEQ ID NO: 147078 - protein, 207 aa, Mesorhizobium sp. BNC1
MKSSNGPLRIGIGGPVGSGKTTLCEVLLKSMRDRYSMAVVTNDIYTKEDALILARLQAISEDRIVGVETGGCPHTAIREDASLNLAAIAHLNRRFPDLDIILIESGGDNLAATFSPDLADLTLYVISVAQGEKIPRKGGPAITRSDLLIINKTDLAPYVGANLDVMRSDTEKVREGRPYVMTDLSRRQGAEEVVAFIEKMGGLALAA

SEQ ID NO: 147079 - DNA, 735 bp, Cytophaga hutchinsonii ATCC 33406
  CDS (1)..(735): transl_table=11
atgacccttttaaaaatgtaccgccatttagatcatttcgattctccaggccattttcatcaccgggaattgattcatgaaaaaagaaattttaagaaacgtgcttttaccgttggtatcggtggaccagtagggaccgggaagacagcctggctaatgcagatctgtaaagcattgcgcgataaaatgaatatagctgttgttaccaatgatatctttaccagcgaagatgccgaatttctgatccgtaacgaagcactttcaaaagaccgtatcattggcgttgaaacaggaggctgtccgcatgcagccatacgagaagatgtttcacaaaacatgtatgcattggaagaattaatgaaacgctttcccgatgtagaattattgtttgtagaaagcggaggagataatttagccgcacactttagtaaagagctggttgattattcagtgtatgtgattgatgtttcaggtggagacaagattccccgtaaaggaggcccgggtattacgcaggctgatttattggtaatcaacaaaattgacctggcacatttagtaaatgcagacctatcggtcatggaacgcgattctaaaaaaatgcgcggcgatggaccttttttatttgcccgtgcaaaagactgcttcggcattgatgagattatcaatcatatattaactgcgagagaaaaagcactggaagcaaagcctgtgtattcgttacggaaagagtag

SEQ ID NO: 147080 - protein, 244 aa, Cytophaga hutchinsonii ATCC 33406
MTLLKMYRHLDHFDSPGHFHHRELIHEKRNFKKRAFTVGIGGPVGTGKTAWLMQICKALRDKMNIAVVTNDIFTSEDAEFLIRNEALSKDRIIGVETGGCPHAAIREDVSQNMYALEELMKRFPDVELLFVESGGDNLAAHFSKELVDYSVYVIDVSGGDKIPRKGGPGITQADLLVINKIDLAHLVNADLSVMERDSKKMRGDGPFLFARAKDCFGIDEIINHILTAREKALEAKPVYSLRKE

SEQ ID NO: 147081 - DNA, 690 bp, Rhodococcus sp. RHA1
  CDS (1)..(690): transl_table=11
atgccaccgcatttcatcgatggtgaaccccacgaccaccagcacgaccgtccccggcgggtccgggtggcgggggagccggtccggatcgggatcggtgggcccgtcggatcgggcaagacggcgctcgtcgccgcgctgtgcaggcaactgcgcgaggagttgtcgctggccgtgctcaccaatgacatctacaccaccgaggacgcggacttcctgcgacgccacgccgtgctgccggacgagcggatcgccgccgtgcagaccggtgggtgcccccacacggcgatccgcgacgacatcaccgccaacctcgacgccatcgacgacctgatcgcggccaaccccccgctcgatctgatcctggtggagtccggtggcgacaacctcaccgcgacgttctcctcgggcctgatcgacgtgcagatcttcgtcgtcgacgtcgcgggtggtgacaaggttccccgcaagggtggccccggtgtgacgttctcggatctcctcgtcatcaacaagaccgacctcgcacccatggtcggagccgatctcggggtgatgcgccgtgacgccgagcgggtccgcgagggacggcccacggcgttgatctcgttgacggaggacccgtcgtccggaccggctctggagtgggtgcgcgagcaggtgcgcaccctcgccgacgtgcaccagtag

SEQ ID NO: 147082 - protein, 229 aa, Rhodococcus sp. RHA1
MPPHFIDGEPHDHQHDRPRRVRVAGEPVRIGIGGPVGSGKTALVAALCRQLREELSLAVLTNDIYTTEDADFLRRHAVLPDERIAAVQTGGCPHTAIRDDITANLDAIDDLIAANPPLDLILVESGGDNLTATFSSGLIDVQIFVVDVAGGDKVPRKGGPGVTFSDLLVINKTDLAPMVGADLGVMRRDAERVREGRPTALISLTEDPSSGPALEWVREQVRTLADVHQ

SEQ ID NO: 147083 - DNA, 639 bp, Trichodesmium erythraeum IMS101
  CDS (1)..(639): transl_table=11
atgacaacagcagctaggttaggaattggtggtcctgtaggtagtggcaaaactgccttgctagaatgcattgttccccttttaaccaaccaaggtattgaagtagccatagtaactaacgacctacttactactgaagacgcagagcgactcaaaagtggaggcatcttacctcgggatcgaattattggagtggaaacaggtagttgtcctcatacagctatcagagaagacccaaccatgaatattttagcagtacaagacttggaacaattatttcctaatctgaatctgataatgatagaaagtgggggagataatcttgcttctacctttagttacgacttagtagatgcctatatttttgtgatagatgtaggggcaggagatgatattcctcgtaaaaaaggacctggttttatgcaagctgacttagtagtaattaacaaaattgatctagctccttatgtcaatgctaatttaaatttaattcgtaaagaagcatcagtatatcgtcaaagtaaaccgattgcttataccaattgtaaaaccggagttggattgaatgaggtagttaattttattctagagagagttttatttcgcactgctttgtcagtaaagaatttggaaaagtga

SEQ ID NO: 147084 - protein, 212 aa, Trichodesmium erythraeum IMS101
MTTAARLGIGGPVGSGKTALLECIVPLLTNQGIEVAIVTNDLLTTEDAERLKSGGILPRDRIIGVETGSCPHTAIREDPTMNILAVQDLEQLFPNLNLIMIESGGDNLASTFSYDLVDAYIFVIDVGAGDDIPRKKGPGFMQADLVVINKIDLAPYVNANLNLIRKEASVYRQSKPIAYTNCKTGVGLNEVVNFILERVLFRTALSVKNLEK

SEQ ID NO: 147085 - DNA, 603 bp, Synechococcus sp. CC9311
  CDS (1)..(603): transl_table=11
atgagcagcaaactcaggcttggtgtcgccggtccggtgggctcaggcaagacagcgctcgtgcaagcgctttgcaggagattgcgcgatcgcctgcaattagcagttgtgaccaatgacatctacacgcaagaggatgctcaattcctcacgcgctcaggtgcattggagcctgagcgtatccgtggggttgaaaccggggggtgcccccatacggcgatacgagaagactgctccatcaatcgagctgctgtgagtgaactggagcatcaattccctggacttgatctggtgatggttgaaagcggtggagacaatcttgcggccagttttagtcctgaacttgtcgatctttgtatctacgtgattgatgtagcggctggagacaagattcctcgtaaaggtggacctggaattacacggtctgatttattagtcattaacaagatcgatctggcctctttcgttggtgctgacctcggagtcatggaacaggacacattaaggatgcggaggaatcgaccctggtgctttaccaatcttcgtactgaagaaggacttgatcgggtggaagaatttgtgttgcaacagataccaaattga

SEQ ID NO: 147086 - protein, 200 aa, Synechococcus sp. CC9311
MSSKLRLGVAGPVGSGKTALVQALCRRLRDRLQLAVVTNDIYTQEDAQFLTRSGALEPERIRGVETGGCPHTAIREDCSINRAAVSELEHQFPGLDLVMVESGGDNLAASFSPELVDLCIYVIDVAAGDKIPRKGGPGITRSDLLVINKIDLASFVGADLGVMEQDTLRMRRNRPWCFTNLRTEEGLDRVEEFVLQQIPN

SEQ ID NO: 147087 - DNA, 636 bp, Alkalilimnicola ehrlichei MLHE-1
  CDS (1)..(636): transl_table=11
atgaaagacaaacccgccctcagagtcggcatcggtggcccggtgggctccggcaagaccgccctggtcgaggccctgtgcaaggccctgcgcgaccactacgagatcgccgtggtcaccaacgacatctacacccgcgaagacgccgaattcctgacccgaaatggtgcactccccgccgaccgcatcatcggcgtcgagaccggcggctgcccccacaccgccatccgcgaggacgcctccatgaacctcgccgccgtgggcgacctcaaccagcgcttccccgagctggaagtcgtcttcatcgagagcggcggcgacaacctctccgccaccttcagccccgaactctccgaccttactctctacgtcatcgacgtctgcgccggggacaagatcccccgcaagggcggtcccggcatcacccgctccgacctgctggtcatcaacaaaatcgacctggccgcaggcgtcggcgcctccctcgaggtcatggaccgggacagccgccgcatgcgcggcgatcggcccttcatcttcaccaacctccacgccggtgaggggctggaatccgtgatcgatttcatcatccgggagggcatgctcgaccggaagccgggtcttgcaccagcgtga

SEQ ID NO: 147088 - protein, 211 aa, Alkalilimnicola ehrlichei MLHE-1
MKDKPALRVGIGGPVGSGKTALVEALCKALRDHYEIAVVTNDIYTREDAEFLTRNGALPADRIIGVETGGCPHTAIREDASMNLAAVGDLNQRFPELEVVFIESGGDNLSATFSPELSDLTLYVIDVCAGDKIPRKGGPGITRSDLLVINKIDLAAGVGASLEVMDRDSRRMRGDRPFIFTNLHAGEGLESVIDFIIREGMLDRKPGLAPA

SEQ ID NO: 147089 - DNA, 612 bp, Rhizobium leguminosarum bv. viciae 3841
  CDS (1)..(612): transl_table=11
atgaaatcaagaaacggacctttgcgtgtcggcatcggcgggccggtcggctcgggcaagacggcgttgaccgaaaagctctgcaaggcgatgcgcgacgactattccgtcgccgttgtcaccaacgatatctacacgacagaggatgccgaggcgctggtgcggatgcaggcattgacttcggaccgcatcgtcggcgttgagacgggtggctgcccgcatacagccatccgcgaggatgcgacgatcaatttgcaggcgatcgccggcctcaaccggcggatccccgatctagacgttgtcttcatcgaatccggtggcgacaatctggcggcgaccttttcgcccgatcttgccgatatcaccatctatgtcatctcggtttgccagggcgaggaaatcccgcgcaagggaggccccggcatcacccgatcggacctgcttgtcatcaacaagaaggatctggcgccctatgtcggcgctgatctcgaggtcatggaccgggatgcgacgcgcatgcgtgcgagccgccccttcgtcttctccgacatgaagcgcggcgatggcgtcagctccatcgtcagcttcctcagggagcagggcgggctctga

SEQ ID NO: 147090 - protein, 203 aa, Rhizobium leguminosarum bv. viciae 3841
MKSRNGPLRVGIGGPVGSGKTALTEKLCKAMRDDYSVAVVTNDIYTTEDAEALVRMQALTSDRIVGVETGGCPHTAIREDATINLQAIAGLNRRIPDLDVVFIESGGDNLAATFSPDLADITIYVISVCQGEEIPRKGGPGITRSDLLVINKKDLAPYVGADLEVMDRDATRMRASRPFVFSDMKRGDGVSSIVSFLREQGGL

SEQ ID NO: 147091 - DNA, 609 bp, Magnetococcus sp. MC-1
  CDS (1)..(609): transl_table=11
atgagcaatcccttgcgggtaggggtgggcggaccggtgggttcgggcaaaacggcgctgttggagtggctctgtcgcgagatgcagcagcactattcggtggcagccatcaccaacgacatctacaccaaggaggatcaacgcatccttaccgccagtggggcgttgccggcggagcgcattatgggggtggagacgggggggtgtccccataccgcgattcgtgaggatgcctctatgaatctggcagcggtggaggatatgcagctacgctttgccgatttggagctgatttttattgagtcggggggggataatctggcggccaccttttcgccagagttggctgatcttacactctatgtgattgatgtagccgccggagagaagataccccgcaagggtggcccaggcattacccgctccgatctgctggtgattaataaaaccgatctggccccgctggtgggggccgatttggcggtgatggagcaagacaccctgcgtatgcgtgggtcgcgcccttttgtgtttaccaaccttaaacagggcgatggggtggcggccattatccagtttttggtggaaaagggcgggctcggggtgtga

SEQ ID NO: 147092 - protein, 202 aa, Magnetococcus sp. MC-1
MSNPLRVGVGGPVGSGKTALLEWLCREMQQHYSVAAITNDIYTKEDQRILTASGALPAERIMGVETGGCPHTAIREDASMNLAAVEDMQLRFADLELIFIESGGDNLAATFSPELADLTLYVIDVAAGEKIPRKGGPGITRSDLLVINKTDLAPLVGADLAVMEQDTLRMRGSRPFVFTNLKQGDGVAAIIQFLVEKGGLGV

SEQ ID NO: 147093 - DNA, 618 bp, Mycobacterium smegmatis str. MC2 155
  CDS (1)..(618): transl_table=11
atgaccaccgcactcaaggcagcacgcatcggtatcggcggtccggtgggctcgggcaagaccgcgctggtcgaggcgctgctcgccggtttcgcgcggcggggtcgcagcgtgtcggtgatcaccaacgacctcgtcaccaccgaggacgccgaacgggtccgtcgttcgggactgatcgatccgcggcgcgtacgtgcggtcgaggccgggggatgcccgcacaccgtgatccgtgaggatccgtcgctcaacatggccgcggccgacgcgctcgaagccgaattccccgacaccgagatgatcctgctggaatccggcggcgacaacctggcgtcgacgttctcgcgggacctggtggactactggctcttcgtgatcgacgtcgcaggcggagacgacatcccacgcaaacgcggacccggcgtgctgcgctgcgacctgctggtgatcaacaaggtcgacctcgcaccgcacgtcggcgtcgatctcgacctgatgcgccgcgaggccgacgaagtccgcagcggcagaacggttgttgcgatcagcgcccgcaacgggcacggcatcgacgagttgatggacgtgctcgagcgcgaagtgctgttcgtgtga

SEQ ID NO: 147094 - protein, 205 aa, Mycobacterium smegmatis str. MC2 155
MTTALKAARIGIGGPVGSGKTALVEALLAGFARRGRSVSVITNDLVTTEDAERVRRSGLIDPRRVRAVEAGGCPHTVIREDPSLNMAAADALEAEFPDTEMILLESGGDNLASTFSRDLVDYWLFVIDVAGGDDIPRKRGPGVLRCDLLVINKVDLAPHVGVDLDLMRREADEVRSGRTVVAISARNGHGIDELMDVLEREVLFV

SEQ ID NO: 147095 - DNA, 687 bp, Mycobacterium smegmatis str. MC2 155
  CDS (1)..(687): transl_table=11
atgccaccgcatttcctcgacggtgaaccccacacccacaccgaccggcccaaacgggtgcgcaaacccggtgaaccgctgcgcatcggggtgggcggcccggtcggctcgggcaagaccgcactcgtggcggcgctgtgccgtcagctgcgcgacgaactgtcactggcggtgctcaccaacgacatctacaccaccgaggacgcggacttcctgcgccgcaacgcggtgctgcccgacgagcggatcgcggccgtgcagaccggcgggtgcccacacaccgcgatccgggacgacatcaccgccaatctcgacgcgatcgacgatctgatcgagatgaacccggcgctcgacctcatcctcgtcgagtcgggcggcgacaacctcaccgccacgttctcctcgggactcgtggacgtgcagatcttcgtcgtcgacgtggccggcggcgacaaggtgccacgcaagggcggtccgggcgtcacgttctcggatctgttggtggtcaacaagaccgacctcgcgccgctggtgggtgcggatctggacgtgatgcgccgcgatgcggccaaggtgcgcgcggagcggcccaccgcgctgatctcactgaccgaggatccgacggccggtccggtgctggactgggtgcgtgaacagttgcgggtcgccgcggcgcagacggtgtga

SEQ ID NO: 147096 - protein, 228 aa, Mycobacterium smegmatis str. MC2 155
MPPHFLDGEPHTHTDRPKRVRKPGEPLRIGVGGPVGSGKTALVAALCRQLRDELSLAVLTNDIYTTEDADFLRRNAVLPDERIAAVQTGGCPHTAIRDDITANLDAIDDLIEMNPALDLILVESGGDNLTATFSSGLVDVQIFVVDVAGGDKVPRKGGPGVTFSDLLVVNKTDLAPLVGADLDVMRRDAAKVRAERPTALISLTEDPTAGPVLDWVREQLRVAAAQTV

SEQ ID NO: 147097 - DNA, 624 bp, Azoarcus sp. BH72
  CDS (1)..(624): transl_table=11
gtgacccaatcccaagccctgcgtgtcggcatcggcggccccgtcggatccggcaagaccgcgctcaccctcgcgctctgccgcgccctgcgcgacaagtacaacatcgccgtcgtcaccaacgacatctacaccgccgaagacgcccagttcctcgtccgcaacgaagcgctcgcccccgaccgcatcatcggcgtcgaaaccggcggctgcccgcacaccgccatccgcgaagacgcctcgatcaacctcgaagccgtcgaccgcctcaaccagcgctttcccgggctcgaaatcatcttcgtcgaatccggcggcgacaacctcgccgccaccttctcgcccgaactctccgacctcacgctgtacgtcatcgacgtttccgccggcgacaagatcccgcgcaagggcggccccggcatcaccaagagcgacttgctcgtcatcaacaagatcgaccttgcccccatggtcggcgcctcgctcgaagtcatggaccgcgacgcccggaagatgcgcggcgaacgccccttcatcttctccaacctcaagaccggacaagggctcgccgagatcatcgccttcatcgaaacccagggcctgctccggccccacgccggctga

SEQ ID NO: 147098 - protein, 207 aa, Azoarcus sp. BH72
MTQSQALRVGIGGPVGSGKTALTLALCRALRDKYNIAVVTNDIYTAEDAQFLVRNEALAPDRIIGVETGGCPHTAIREDASINLEAVDRLNQRFPGLEIIFVESGGDNLAATFSPELSDLTLYVIDVSAGDKIPRKGGPGITKSDLLVINKIDLAPMVGASLEVMDRDARKMRGERPFIFSNLKTGQGLAEIIAFIETQGLLRPHAG

SEQ ID NO: 147099 - DNA, 693 bp, Mycobacterium sp. KMS
  CDS (1)..(693): transl_table=11
atgccaccgcatttcctctccgctgattccacgggccaaccccaccggcacgccgaccgccccaagcgggtgcgaaccccgggggagccgttgcggatcggcgtcggcggccccgtcgggtcgggtaagacggcgctggtggccgcgctgtgccggcaactgcgcgacgaactgtcgctggcggtgctgaccaacgacatctacacgaccgaggacgccgacttcctgcgccgtcatgcggtattgcccgacgaccggatcgcggccgtgcagaccggcggctgcccgcacaccgccatccgcgacgacatcaccgcgaacctcgacgccatcgacgacctcgtcgccgggcatgaccacctcgacctgatcctcgtcgaatccggcggcgacaacctcaccgccacgttctcatccggactcgtcgacgtgcagatcttcgtcgtcgacgtggccggcggcgacaaggtgccccgcaagggcggacccggggtgacgttctcggatctgttggtgatcaacaagaccgatctggcgccgatggtcggcgccgatctcgacgtcatgcgacgcgattcgaccaaggtgcgcggagagcggcccttcgtactcatctcgctgaccgccgatccgacggccgggccggtgctggactgggtgcgggcgcaactgcgggtgccggtgcagggctag

SEQ ID NO: 147100 - protein, 230 aa, Mycobacterium sp. KMS
MPPHFLSADSTGQPHRHADRPKRVRTPGEPLRIGVGGPVGSGKTALVAALCRQLRDELSLAVLTNDIYTTEDADFLRRHAVLPDDRIAAVQTGGCPHTAIRDDITANLDAIDDLVAGHDHLDLILVESGGDNLTATFSSGLVDVQIFVVDVAGGDKVPRKGGPGVTFSDLLVINKTDLAPMVGADLDVMRRDSTKVRGERPFVLISLTADPTAGPVLDWVRAQLRVPVQG

SEQ ID NO: 147101 - DNA, 639 bp, Nostoc punctiforme PCC 73102
  CDS (1)..(639): transl_table=11
atgtaccaaggacaaatgacaaatgacaaaggacaaataaaaatgaatgcatttcgagtgggggttgctgggccagtgggttcgggaaaaacggctttggtagatgctttgtgtaaggggttgcgtgagcagtatcagattgcggtggtgacgaatgatatttatactcaggaggatgctcagtttttagtgcgttctcaggcattggcaagcgatcgcattttgggtgtagagactggtggttgtccccatactgccattcgcgaagatgcttcgatgaatttggcggcaattgaacagttagaagaacgttttatcgatttagatttggtatttttggaaagtggtggtgataatttagctgctacctttagtcccgaattggtggatttaacaatttatgtcattgatgttgcagctggggataaaattcctcgcaagggtggaccgggcattaccaagtctgatttgttggtgattaataaaactgatttagcaccttatgttggtgcagatttaagtgtgatggaacgagatgctaaaaaaatgcgcggcgataaaccttttatttttactaatttaaaaactcagtctggacttgcagatgtaattaaatttgtttgcactaatatctgttga

SEQ ID NO: 147102 - protein, 212 aa, Nostoc punctiforme PCC 73102
MYQGQMTNDKGQIKMNAFRVGVAGPVGSGKTALVDALCKGLREQYQIAVVTNDIYTQEDAQFLVRSQALASDRILGVETGGCPHTAIREDASMNLAAIEQLEERFIDLDLVFLESGGDNLAATFSPELVDLTIYVIDVAAGDKIPRKGGPGITKSDLLVINKTDLAPYVGADLSVMERDAKKMRGDKPFIFTNLKTQSGLADVIKFVCTNIC

SEQ ID NO: 147103 - DNA, 636 bp, Haemophilus influenzae R2846
  CDS (1)..(636): transl_table=11
atgcgtaactacattaaaattggcgtggctggccctgttggtgcgggtaaaacggcgttaattgaaaaactcactcgtgaaatagcgtcaaaatatagcgtagcagtcattactaacgatatttacacccaagaagatgcggaatttttaacgaaaaatagtttgcttccaccagagcgcattatgggcgtggaaacgggcggttgcccgcacacagcaattcgtgaagatgcctcgatgaatttagaagcggttgatgaaatggtggctcgtttccctgatgtggaaattgtatttattgaatctggcggtgataacttatcggcaacttttagccccgatttagcggacgtgacaattttcgtgattgacgtggctcaaggggaaaaaatccctcgtaaaggtgggccaggtatcactcgttcagatttacttgtgatcaacaaaactgatcttgctccattcgttggtgctgacttaagcgtcatggaacgtgatgcttgtcgtatgcgtaacggtcagccgtttattttcactaacctgatgaaaaaagaaaatctggatggcgtgatcggttggatcgaaaaatatgcgttgttgaagaatgtggaagaacctgcatctttgattcgttaa

SEQ ID NO: 147104 - protein, 211 aa, Haemophilus influenzae R2846
MRNYIKIGVAGPVGAGKTALIEKLTREIASKYSVAVITNDIYTQEDAEFLTKNSLLPPERIMGVETGGCPHTAIREDASMNLEAVDEMVARFPDVEIVFIESGGDNLSATFSPDLADVTIFVIDVAQGEKIPRKGGPGITRSDLLVINKTDLAPFVGADLSVMERDACRMRNGQPFIFTNLMKKENLDGVIGWIEKYALLKNVEEPASLIR

SEQ ID NO: 147105 - DNA, 615 bp, Magnetospirillum magnetotacticum MS-1
  CDS (1)..(615): transl_table=11
atggcatccgtgaacggccccctgcgcgttggcatcggcggccctgtcggctccggcaagacggcgctgatggagcagctctgccgccgcttccgcgagacctacgaaatctgcgcgatcacaaacgacatctacaccaaggaggatgcgcgcatcctcaccgtggccggcgccctgccggaggagcgcatcctcggtgtcgagaccggcggctgcccgcacacggcgatccgcgaggatgcctcgatcaatctcgcggcggtggccgagatgcgccgccgttttccccggctcgatctggtgctgatcgaatccggcggcgacaatctcgcggcgaccttctcaccggagctggccgacatcaccctctacgtcatcgacgtggcgggcggcgagaagatcccgcgcaagggcggccccggcatcacccgttcggacctgctgatcgtcaacaagaccgatctcgcgcccctcgtcggcgccgacctctcggtgatggaagccgacacccggcggatgcgcgggacccggccctacgtcttcgcctcgctccgtgaggggcacggggccgacacggtggcccgcttcatcgtcgaggccgggggcttggcctga

SEQ ID NO: 147106 - protein, 204 aa, Magnetospirillum magnetotacticum MS-1
MASVNGPLRVGIGGPVGSGKTALMEQLCRRFRETYEICAITNDIYTKEDARILTVAGALPEERILGVETGGCPHTAIREDASINLAAVAEMRRRFPRLDLVLIESGGDNLAATFSPELADITLYVIDVAGGEKIPRKGGPGITRSDLLIVNKTDLAPLVGADLSVMEADTRRMRGTRPYVFASLREGHGADTVARFIVEAGGLA

SEQ ID NO: 147107 - DNA, 630 bp, Sulfitobacter sp. EE-36
  CDS (1)..(630): transl_table=11
atgacctccccccatggaccgcttcgtattggcattggtggccccgttggcgcgggcaagacgacaacgaccgccgccctgtgccgtgccatgcgcgaccgctggtcgatcggcgtgatcaccaatgatatctacacccaagaggacgccgaagcgctcatgcggcttcaggtcttgccgcaggaccggatcatcggggtcgaaaccggcggctgcccccataccgccatccgcgaggatgcctcgatcaatcttgccgccgtcgcccggatgcgcgaccgtcatcccgatctggactgcgtgctcatcgaatccggtggcgataacctgtcggcgaccttcagccccgaactggcggatgtgacgctttatgtcatcgacgtggctgcgggcgaagagatcccgcgcaagggcgggccggcgatcaccaagtcggatatcctgatcatcaacaaaaccgacctcgccccgcatgtgggtgcgtcgctagaggtgatggaccgtgacgccaaacggatgcgcggcgatctgccctatctctttgccgagatgaaacacgataagggtgtggcagagctgctggacctgattgtcaaaatcggcggcctccgcccggttcccgaaaattaa

SEQ ID NO: 147108 - protein, 209 aa, Sulfitobacter sp. EE-36
MTSPHGPLRIGIGGPVGAGKTTTTAALCRAMRDRWSIGVITNDIYTQEDAEALMRLQVLPQDRIIGVETGGCPHTAIREDASINLAAVARMRDRHPDLDCVLIESGGDNLSATFSPELADVTLYVIDVAAGEEIPRKGGPAITKSDILIINKTDLAPHVGASLEVMDRDAKRMRGDLPYLFAEMKHDKGVAELLDLIVKIGGLRPVPEN

SEQ ID NO: 147109 - DNA, 639 bp, Oceanicola batsensis HTCC2597
  CDS (1)..(639): transl_table=11
atgccttccccccacggtccccttcgcgtcggtctcggcggcccggtcggcgccggcaagacgaccctgaccgccgccatttgccgggcgctgcgcgaccggctgtcgctcgccgtcgtcaccaacgacatctacacgcaggaagacgccgaggcgctggtccgcatgcaggcgctgccctcggaccggattcgcggcgtggaaaccgggggttgcccgcataccgccatccgcgaggatgcctcgatcaacctcgccgccatcgcggatctcaaccgggccttccccgatctcgatctgatcctcgtcgaatcgggcggcgacaacctttccgcgaccttctcgcccgaactcgtggacatgacgatctacgtgatcgacgtcgccgcgggcgaggagatcccccgcaagggcgggcccgcgatcacccggtcggacgttctggtgatcaacaagatcgatctcgcgccccatgtcggcgccgatctcgcggtgatggagcgcgacgccgccgcgcagcgcggcccgcgtcccttcgtctttaccgacctcaagagggggcaggggctcgacagggtgctcgacctgctcgccgggatcggcggcctcgggataggcgccgtcgcagaaaccacctga

SEQ ID NO: 147110 - protein, 212 aa, Oceanicola batsensis HTCC2597
MPSPHGPLRVGLGGPVGAGKTTLTAAICRALRDRLSLAVVTNDIYTQEDAEALVRMQALPSDRIRGVETGGCPHTAIREDASINLAAIADLNRAFPDLDLILVESGGDNLSATFSPELVDMTIYVIDVAAGEEIPRKGGPAITRSDVLVINKIDLAPHVGADLAVMERDAAAQRGPRPFVFTDLKRGQGLDRVLDLLAGIGGLGIGAVAETT

SEQ ID NO: 147111 - DNA, 660 bp, Oceanicola batsensis HTCC2597
  CDS (1)..(660): transl_table=11
atgaacgcccgctttccatcccaagacgtctctcgcaacggtccggcccggatcggcatcggcggtcccgtcggctcggggaaaactgcgctgatcgaggctctcatacccgtgttcgaggcgcgcggcatcgagaccgccgtcgtcaccaacgacctcgtcaccaaggaggatgcgcgcaggcttcaggccggcgggctgatcgaccccgagcgggtcctggcggtcgaggccggtgcctgcccgcatacggtgatccgagaggatcccacgctgaacatcgcggcggccgacgaccttgaggccgcctttcccggtctcgacctgatcctgatcgaaagcggcggcgacaaccttgcctcgaccttctcgctcgacctggtggactggtggatgttcgtgatcgatgtggcgcagggcgacgacattccgcggaagcgcggcccgggcatcctgcaatgcgatctgctggtcatcaacaaactggacctggcgccgcacgtcttcgtcgatgccgaggcgatcctcgccgaggcgatgcgcattcgtggagacagaccggtggagggctgtcggtgcaagggcgcttcggtcgaaggtatcgaccgcatcgccgacaccatcgcccgcgacctgctgttccgcgaggttccggcgtga

SEQ ID NO: 147112 - protein, 219 aa, Oceanicola batsensis HTCC2597
MNARFPSQDVSRNGPARIGIGGPVGSGKTALIEALIPVFEARGIETAVVTNDLVTKEDARRLQAGGLIDPERVLAVEAGACPHTVIREDPTLNIAAADDLEAAFPGLDLILIESGGDNLASTFSLDLVDWWMFVIDVAQGDDIPRKRGPGILQCDLLVINKLDLAPHVFVDAEAILAEAMRIRGDRPVEGCRCKGASVEGIDRIADTIARDLLFREVPA

SEQ ID NO: 147113 - DNA, 606 bp, Synechococcus sp. RS9917
  CDS (1)..(606): transl_table=11
atggccggcagcaaattgaggttgggtgttgccgggccggtgggctcaggaaaaacggccctggtggaagcgctctgccgccgcctgcgtgatcgcctccagctggcggtggtcaccaacgacatttacacccaggaggacgcccagttcctcacccgggtcggtgccctggagccggagcggatccggggggtggaaaccggtggttgcccccacaccgcgatccgggaggactgttcgatcaaccgggcggctgtggcggagctggaggcggcgttccccgatctggatctcgtgatggtggaaagcggtggcgacaatctggcggccagtttcagcccggagctggtggatttctgcctctatgtgatcgatgtggcggccggcgacaagattccccgcaagggggggccgggaatcacccgttccgatctgctggtgatcaacaagatcgatctggcgccgctggtcggggcggatttgcaggtgatggaacgggacactttgcggatgcgaggtgagcgtccttggtgcttcaccaacctcaacagcggcgaaggcctggatcaggtggaggcgtttgtgtggcaacagctaccgaattga

SEQ ID NO: 147114 - protein, 201 aa, Synechococcus sp. RS9917
MAGSKLRLGVAGPVGSGKTALVEALCRRLRDRLQLAVVTNDIYTQEDAQFLTRVGALEPERIRGVETGGCPHTAIREDCSINRAAVAELEAAFPDLDLVMVESGGDNLAASFSPELVDFCLYVIDVAAGDKIPRKGGPGITRSDLLVINKIDLAPLVGADLQVMERDTLRMRGERPWCFTNLNSGEGLDQVEAFVWQQLPN

SEQ ID NO: 147115 - DNA, 609 bp, Synechococcus sp. WH 5701
  CDS (1)..(609): transl_table=11
atgagcaaactgcgcgttggagtggcgggacccgtgggctccggcaagacggccctcgttgaagccctctgccggcggctgcgccaggagctggagctggcggtggtcaccaatgacatctacacccaggaagacgcccagttcctgacgcgcgccggcgctctggagcccgagcgcatccgcggggtggaaacgggaggttgcccccacaccgctatccgggaagactgctcgatcaaccgcgccgcggtggaggaactggagatccagttccccgatctcgatttggtgctggtggagagcggcggtgacaatctcgcggccagcttcagtccggagctggtggatctgtgcatctatgtgatcgacgtggccgccggggacaagatccccaggaagggggggccgggcatcacccgctccgacctgctggtgatcaacaagatcgatctggcagcgatggtgggcgccgatctgagcgtgatgcaacgagacaccgaactgatgcgaccgggccgcccctggtgcttcaccaaccttcgcagcggagaaggcctggagcgtgtcgaatcctttctgcgtgaacagttacccagcccaagggcctga

SEQ ID NO: 147116 - protein, 202 aa, Synechococcus sp. WH 5701
MSKLRVGVAGPVGSGKTALVEALCRRLRQELELAVVTNDIYTQEDAQFLTRAGALEPERIRGVETGGCPHTAIREDCSINRAAVEELEIQFPDLDLVLVESGGDNLAASFSPELVDLCIYVIDVAAGDKIPRKGGPGITRSDLLVINKIDLAAMVGADLSVMQRDTELMRPGRPWCFTNLRSGEGLERVESFLREQLPSPRA

SEQ ID NO: 147117 - DNA, 648 bp, Oceanospirillum sp. MED92
  CDS (1)..(648): transl_table=11
atgagtaaaccaaaacaaacattacgtgtcggtgtcggtggcccagtcggttccggtaagacagcacttttaagatcactttgtgcggctatgcgtcatcactatgatattgccgttgtgactaatgatatctatacccaggaagatgcgaagtttctaacacgtcatgaagcactggataccgatcgtatcattggtgtggaaaccgggggctgcccacataccgcaatccgtgaggatgcatcgatgaacctggcagctattgaccaattgatcgatcgtcacggtgccctggacgtagtttttgttgaaagtggcggtgataacctgagcgcaacgtttagcccggagctatcagacctgactatctatgtgattgatgtttcagcgggcgataagatccctcgtaaaggcggcccgggtatcacgaaatcggatcttctgattatcaataagatcgatcttgcacctttggttggggcttcattggatgttatggatcaggatgcgacgaagatgcgcggtgatcgtccatttgtattctcaaaccttaaacaagctaaaggcttagacgatattatccagttcatcattactgaaggtatgttagaagctaaagaactaccgccagctaaagcggttgtctaa

SEQ ID NO: 147118 - protein, 215 aa, Oceanospirillum sp. MED92
MSKPKQTLRVGVGGPVGSGKTALLRSLCAAMRHHYDIAVVTNDIYTQEDAKFLTRHEALDTDRIIGVETGGCPHTAIREDASMNLAAIDQLIDRHGALDVVFVESGGDNLSATFSPELSDLTIYVIDVSAGDKIPRKGGPGITKSDLLIINKIDLAPLVGASLDVMDQDATKMRGDRPFVFSNLKQAKGLDDIIQFIITEGMLEAKELPPAKAVV

SEQ ID NO: 147119 - DNA, 636 bp, Xanthobacter autotrophicus Py2
  CDS (1)..(636): transl_table=11
atgagttccggaaacaccaccaaaggcgccccgctgcgcgtgggcatcggcggcccggtcggttcgggcaagacggcgctgatggaagcgctctgcaagaccttccgacagcgctacgacatctgcgcgatcaccaacgacatctacaccaaggaggatgcgcgcctgctcacggtcgctggcgcgctggagcccgagcggatcctgggggtggagaccggcggctgcccgcacacggccatccgcgaggatgcgtccatcaacctgcgcgcggtagcggacatgaacgcccgcttcccgaaccttgatctggtgctgatcgaatccggcggcgacaaccttgccgcgaccttctcgccggagctggcggacatcaccatctacgtcatcgacgtggcgggcggggagaagatcccgcgcaagggcgggccgggcatcacccgctccgacctgctggtggtgaacaagaccgatctggcccccatggtcggcgccgacctctccatcatggaggcggacaccatccgcatgcgggccggtcggccttatgtcttcgcctcgatccgcaacggcgtgggggtggaggtggtggcccgcttcatcgagcaggccggagggctggtggcggcggcctga

SEQ ID NO: 147120 - protein, 211 aa, Xanthobacter autotrophicus Py2
MSSGNTTKGAPLRVGIGGPVGSGKTALMEALCKTFRQRYDICAITNDIYTKEDARLLTVAGALEPERILGVETGGCPHTAIREDASINLRAVADMNARFPNLDLVLIESGGDNLAATFSPELADITIYVIDVAGGEKIPRKGGPGITRSDLLVVNKTDLAPMVGADLSIMEADTIRMRAGRPYVFASIRNGVGVEVVARFIEQAGGLVAAA

SEQ ID NO: 147121 - DNA, 633 bp, marine gamma proteobacterium HTCC2207
  CDS (1)..(633): transl_table=11
atgactgacttatctaaaatttcctcgacagctcccctgcgtattggcgtcggcggccccgtaggttcaggcaaaaccgcgctgcttgaagcgctgtgtaaaaccatgcgtgatacttacaatctggcagtggtaaccaatgatatctacacccaggaagatgcaattattttgactcgagccgaagccttggctgcggaccggattattggcgttgagaccggcggctgccctcacacggctattcgtgaagatgcgtccatgaaccttgcggcggtggaagagatgagccagcgtcatgcaggtttggatttaatctttattgaaagtggcggcgataatttgagcgccacctttagtcctgagttggcagatctaaccatctatgtgatcgatgttgccgcgggcgaaaaaattcctcgcaaaggcggccccggaattaccaaagcggatttgctggtgattaataaaattgatctggcgccctatgtgggagccaatctggagattatggatagcgataccaagcgtatgcgtccaaccagcccctatgtctttaccaacttgcacaagcataccggtcttgatgtgattatcgactttattgtcgatcgcggcatgttagcggcttag

SEQ ID NO: 147122 - protein, 210 aa, marine gamma proteobacterium HTCC2207
MTDLSKISSTAPLRIGVGGPVGSGKTALLEALCKTMRDTYNLAVVTNDIYTQEDAIILTRAEALAADRIIGVETGGCPHTAIREDASMNLAAVEEMSQRHAGLDLIFIESGGDNLSATFSPELADLTIYVIDVAAGEKIPRKGGPGITKADLLVINKIDLAPYVGANLEIMDSDTKRMRPTSPYVFTNLHKHTGLDVIIDFIVDRGMLAA

SEQ ID NO: 147123 - DNA, 702 bp, Oceanobacter sp. RED65
  CDS (1)..(702): transl_table=11
atgaagcaagtattacgagtcggcataggcggccccgtcggttccggcaaaaccgcccttcttgagcagctctgccaaaccatgcgtgaccactacaatattgctgtagtcaccaatgatatttacaccaaggaagatgcccagtttttaatgcgcaaaaatgccttggaagaagatcgtattatgggcgtggaaaccggtggttgtcctcatacggctattcgagaagatgcctccatgaatctagcggcagtaaaagatttacaagatcgccacgatggtttggaaatggttttagttgaaagtggcggtgataacttgtcggctactttcagcccagaactgtctgattttactatttatgttattgatgtgtgtgcgggcgataagattccacgtaaaggtggtccaggcattaccaagtctgacttactgattattaataaagtggatattgccgatcacgtgggtgcgtctttggcggtgatggatcgtgatacacgtaagatgcgtggggatcgcccttttgttttggccaatgtggaaacccaaaaaggtattgccgaaattgtaagaatcataattgaagaaggcatgttaccccagcgtcctgaaattgaagaaaaactcagtactatgcctaaagcacatgacgtcagcgcagaagctgctcgtccatctacccgttcgactattgattaa

SEQ ID NO: 147124 - protein, 233 aa, Oceanobacter sp. RED65
MKQVLRVGIGGPVGSGKTALLEQLCQTMRDHYNIAVVTNDIYTKEDAQFLMRKNALEEDRIMGVETGGCPHTAIREDASMNLAAVKDLQDRHDGLEMVLVESGGDNLSATFSPELSDFTIYVIDVCAGDKIPRKGGPGITKSDLLIINKVDIADHVGASLAVMDRDTRKMRGDRPFVLANVETQKGIAEIVRIIIEEGMLPQRPEIEEKLSTMPKAHDVSAEAARPSTRSTID

SEQ ID NO: 147125 - DNA, 606 bp, Synechococcus sp. RS9916
  CDS (1)..(606): transl_table=11
atgggcagcaagctgcgcctgggggtcgccggtccggtgggctctggcaaaaccgcgctggtggaggcgctctgccggcggctgcgtgatcagctgcagctggcggtggtcaccaacgacatctatacgcaggaggatgcccagttcctcatccgtgctggggcgttggagccggcgcgcatccgcggggtcgagaccggtgggtgtcctcacacggcgattcgtgaggactgttcgatcaatcgtgctgctgttgctgagttggaggaccagttcccgggcctggatctggtgctggtggaaagcggtggcgacaacctggctgccagcttcagccctgagttggtggacctctgcatctatgtgattgacgtagcggctggggacaagattccgcgtaaaggcgggcctggcattacccgatctgatctgctcgtgatcaacaagattgatctcgctccgttggttggagccgatctcgcggtgatggagcacgacacgttggccatgcgtggggagcgtccctggtgctttaccaatcttcaaagtggtgagggcctcgagcgagtagctgactttgtgtatcggcacttaccaaactgctga

SEQ ID NO: 147126 - protein, 201 aa, Synechococcus sp. RS9916
MGSKLRLGVAGPVGSGKTALVEALCRRLRDQLQLAVVTNDIYTQEDAQFLIRAGALEPARIRGVETGGCPHTAIREDCSINRAAVAELEDQFPGLDLVLVESGGDNLAASFSPELVDLCIYVIDVAAGDKIPRKGGPGITRSDLLVINKIDLAPLVGADLAVMEHDTLAMRGERPWCFTNLQSGEGLERVADFVYRHLPNC

SEQ ID NO: 147127 - DNA, 639 bp, Marinobacter sp. ELB17
  CDS (1)..(639): transl_table=11
atgacacattgcttgagaataggcgtaggcggcccggtaggctccggcaaaaccgcattgctgcgccagctgtgcaacgccctgaaagaccactacgacatcgccgtggtcaccaacgacatctacacaagagaagacgccgacttcctgttgaagcacgacgccctgccggcagaccgcatactgggtgttgaaaccggcggctgcccccacacagccatacgcgaagacgcctctatgaacctggcggccatcgacgacctgcaaaaccgacacccgaacctggaactggtgctggtggaatccggcggcgataacctttcggccaccttcagcccggaactgtctgacctgaccctgtacgtgattgacgtatccgccggcgacaaaatcccccgcaaaggcggccccggcatcaccaaatccgacctgttgatcatcaacaaaatcgacatcgccgaatacgtgcacgcctcgctggacatcatggagcgtgattccaaaatgatgcgcggcgaacggccctttgtgtttgcgaatctgtatgacggggtagggctagagacgattatcagctttattttggagcggggcatgctgccggagcgcaggccggtaaaactggctgaaactgcttga

SEQ ID NO: 147128 - protein, 212 aa, Marinobacter sp. ELB17
MTHCLRIGVGGPVGSGKTALLRQLCNALKDHYDIAVVTNDIYTREDADFLLKHDALPADRILGVETGGCPHTAIREDASMNLAAIDDLQNRHPNLELVLVESGGDNLSATFSPELSDLTLYVIDVSAGDKIPRKGGPGITKSDLLIINKIDIAEYVHASLDIMERDSKMMRGERPFVFANLYDGVGLETIISFILERGMLPERRPVKLAETA

SEQ ID NO: 147129 - DNA, 825 bp, Medicago truncatula
  CDS (1)..(825)
atggcttccggaggcgatcacacccatgtacatgatcatgatcatcatcaccacgaccatgaccacaagcatggtgattcattcataggcgctgatggaaaagtgtaccatagccacgacggtcttgcaccacactcccacgaaccaatctactctcccggattcttcagcagaagagctcaacctcttatcaacagagacttcaacgaaagagctttcactgttggcattggtggacctgttggtactggcaaaaccgctttgatgttagcactttgtcagaatctaagagatcgttacagtctggctgctgtgactaatgatatatttaccaaagaagatggtgagtttttggtgaaacataaagcgcttccagaagaaagaatacgtgctgttgaaactggtgggtgtcctcatgctgctattcgcgaggatattagtattaatcttggtccacttgaagagctttccaatctttataaagctgatttgcttctttgtgaatccggtggagataacttggctgccaatttcagcagggaactggctgactatattatttacataatagatgtatctggtggtgataaaattcctaggaaaggtggtcctggaatcacacaagctgatctccttgtgataaacaagactgaccttgcacaagcaattggagctgacttgggtgtcatggagcgggatgctcttaggatgagagatggggggccatttgtatttgctcaggtgaagcacaatgttggagtagaggaaattgtgaatcatgttttacaggcatgggaagcagccacagggaagaaacgccattga

SEQ ID NO: 147130 - protein, 274 aa, Medicago truncatula
MASGGDHTHVHDHDHHHHDHDHKHGDSFIGADGKVYHSHDGLAPHSHEPIYSPGFFSRRAQPLINRDFNERAFTVGIGGPVGTGKTALMLALCQNLRDRYSLAAVTNDIFTKEDGEFLVKHKALPEERIRAVETGGCPHAAIREDISINLGPLEELSNLYKADLLLCESGGDNLAANFSRELADYIIYIIDVSGGDKIPRKGGPGITQADLLVINKTDLAQAIGADLGVMERDALRMRDGGPFVFAQVKHNVGVEEIVNHVLQAWEAATGKKRH

SEQ ID NO: 147131 - DNA, 777 bp, Aspergillus oryzae
  CDS (1)..(777)
atgtcgcattctcactcccatgatcaaggcattagccactcccacgatgacttcggtggtcacggtcactcgcatgagatcctcgacggacccggttcctatgtgaaccgtgaaatgccattgatcgagggccgcgactggagagatcgcgccttcaccatcggtatcggcggacccgtcggatccggaaaaacagctctaatgctcgcattatgccaagctctccgagacgacgaagacgccgaattcctcaaccgccacaaagccctcgcgtccaagcgcattcgcgccatcgaaacgggtggctgcccgcatgccgccgtgcgtgaggacatcagcgccaacctccttgcgctgcaatccctccacaagcagttccagacggatctcctcctaatcgagtctgggggtgataacttggccgccaattactcgcgcgagctggctgatttcatcatctatgttattgatgtcgccggtggtgataaggtgccccggaagggtgggccgggaattacgggatcggatctgttggtggtgaataagtgtgatttggcgcatattgttggggctgatttggatgttatggatagggatgcgaggaagatgagggaagggggtccgactgtgtttgccgaggtgaagaatgggaagaatgtgcagaatattattgacttgataattagtgcctggaagggaagcggtgcttatgagctgagcttggagaggtggaatgctggggctactaggggttctgggagtgtggatgagcagtag

SEQ ID NO: 147132 - protein, 258 aa, Aspergillus oryzae
MSHSHSHDQGISHSHDDFGGHGHSHEILDGPGSYVNREMPLIEGRDWRDRAFTIGIGGPVGSGKTALMLALCQALRDDEDAEFLNRHKALASKRIRAIETGGCPHAAVREDISANLLALQSLHKQFQTDLLLIESGGDNLAANYSRELADFIIYVIDVAGGDKVPRKGGPGITGSDLLVVNKCDLAHIVGADLDVMDRDARKMREGGPTVFAEVKNGKNVQNIIDLIISAWKGSGAYELSLERWNAGATRGSGSVDEQ

SEQ ID NO: 147133 - DNA, 600 bp, Campylobacter lari
  CDS (1)..(600): transl_table=11
atggttaaaataggcataggtggtcctgtaggtagtggtaaaacagctttagtattaaatttatgtcaagctttaaaagatgagctttctttggctgtaattacgaatgatatttatacaaatgaagatgcaaattttttaatcaaacaaggcgttcttgaaaaagaaagaatcattggagtgcaaactggaggttgtcctcatacagccattagagaagatgcttcttgtaatcttgaagctgttgaacttttacaagagcgttttagtgatttagatcttatttttatagaaagtggtggagataatttatcaatgactttttcacctgaacttgtggatttttttatctttgttatagatgttgctcaaggagaaaaaattccacgcaaaggtggtcctgctatttgtagatctgatttaatgattatcaataaaatagacttagctccttatgtgaatgcttctttaaaaatcatgcaagaagatactttaaaaatgcgtggagatagaccttttatcatgagtaatcttcaaactaaagaaggtttagatgaaatcattacttggattaaaaaatacacacttttaaaggattga

SEQ ID NO: 147134 - protein, 199 aa, Campylobacter lari
MVKIGIGGPVGSGKTALVLNLCQALKDELSLAVITNDIYTNEDANFLIKQGVLEKERIIGVQTGGCPHTAIREDASCNLEAVELLQERFSDLDLIFIESGGDNLSMTFSPELVDFFIFVIDVAQGEKIPRKGGPAICRSDLMIINKIDLAPYVNASLKIMQEDTLKMRGDRPFIMSNLQTKEGLDEIITWIKKYTLLKD

SEQ ID NO: 147135 - DNA, 630 bp, Edwardsiella ictaluri
  CDS (1)..(630): transl_table=11
atgaaaaaaattattcgtgtcggcattggtggcccagtcggttcaggaaagacagcaattattgaagttattacaccacgactgatgcagcgtgggattaaaccactcatcattactaatgatattgtcaccactgaagatgctaagcaggttaaacgtacgctaaaaggaattttggatgaggaaaaaattgttggtgttgagaccggggcttgtccacatacggccgtgcgtgaagatcccagcatgaatatcgctgcggttgaagagttggaggcgcgctttcctgacagtgatgtcatcatgatcgaaagcggcggtgataacttgacgctgacttttagcccagccctggccgatttttatatctatgttatcgatgtggctgagggggagaagattccacggaagaatggtcctggcttagttcaagctgatattttagttatcaataaaactgatctggctccctatgttggcgctgatctatcggtaatggagagtgacaccaaggtagtgcgtggcgatcgtccatacgttatgaccaattgcaaaacgggtgagggggtagaggagttagtcgatatgattatgcgtgacttcttatttacacacagcgaaataaagtga

SEQ ID NO: 147136 - protein, 209 aa, Edwardsiella ictaluri
MKKIIRVGIGGPVGSGKTAIIEVITPRLMQRGIKPLIITNDIVTTEDAKQVKRTLKGILDEEKIVGVETGACPHTAVREDPSMNIAAVEELEARFPDSDVIMIESGGDNLTLTFSPALADFYIYVIDVAEGEKIPRKNGPGLVQADILVINKTDLAPYVGADLSVMESDTKVVRGDRPYVMTNCKTGEGVEELVDMIMRDFLFTHSEIK

SEQ ID NO: 147137 - DNA, 666 bp, Yersinia rohdei
  CDS (1)..(666): transl_table=11
gtgactagccattcaaccgacaaacgtaaaaagataacccgaattggtattggtggcccggtaggttcaggtaaaaccgccattatcgaagttattactccaatcctgattaaacgcggcatcaagccactgattattaccaatgacatcgtcaccaccgaagatgccaagcaggtgaagcgcaccctgaaaggcattttggatgaagaaaaaattcttggagtggaaaccggtgcttgcccgcacactgcggtgcgcgaagacccaagtatgaatattgccgccgtggaagaaatggaagagcgcttccctgaaagcgaccttatcatgattgaaagtggcggtgacaacctgacactgactttcagcccggcactggctgacttctatatctatgttatagatgtggctgaaggtgaaaaaatcccacgcaaaaatggccccggcctggttcaggcagatattctggtcatcaataaaatcgacctcgcgccttatgttggtgccagtctggcggtgatggaaagtgataccaaagtggtgcgaggcgagcgcccttatatcctgaccaactgcaaaaccggacaaggcattgaagagctggtggatatgattatgcgcgacttcctgtttactcacgtacaaacgcaaggagagcacgcatga

SEQ ID NO: 147138 - protein, 221 aa, Yersinia rohdei
MTSHSTDKRKKITRIGIGGPVGSGKTAIIEVITPILIKRGIKPLIITNDIVTTEDAKQVKRTLKGILDEEKILGVETGACPHTAVREDPSMNIAAVEEMEERFPESDLIMIESGGDNLTLTFSPALADFYIYVIDVAEGEKIPRKNGPGLVQADILVINKIDLAPYVGASLAVMESDTKVVRGERPYILTNCKTGQGIEELVDMIMRDFLFTHVQTQGEHA

SEQ ID NO: 147139 - DNA, 615 bp, Streptococcus thermophilus
  CDS (1)..(615): transl_table=11
atgacaaaacgtactgtaattattggagttggtggacctgttggttcaggtaaaacccttttgcttgagcgtcttacacgacgtatgtctgacttaaatttagcagttattactaacgatatctatacaaaagaagatgcccttttcttggctaaaaattcaagcttagacgaagaccgtatcattggtgtagaaactggtggatgtcctcatactgcgattcgtgaggatgcctctatgaactttgaagcgattgaaactcttcaagagcgctttaaccatgatttggatgttattttccttgaaagtggtggagacaacttggctgcgaccttcagccctgatttggttgattttaccatttatattattgacgttgctcagggtgaaaaaatcccacgtaaggctggtcaagggatgattaagagtgatttgttcttgatcaataagactgaccttgcaccttatgttggagccaacctagatcgtatgcgtgaagatacccttcatttccgtaacgaagattctttcattttcacaaatttgaataatgatgacaatgttaaggaagtagaagaatggattcgtaagaatttcctactagaggtcttgtaa

SEQ ID NO: 147140 - protein, 204 aa, Streptococcus thermophilus
MTKRTVIIGVGGPVGSGKTLLLERLTRRMSDLNLAVITNDIYTKEDALFLAKNSSLDEDRIIGVETGGCPHTAIREDASMNFEAIETLQERFNHDLDVIFLESGGDNLAATFSPDLVDFTIYIIDVAQGEKIPRKAGQGMIKSDLFLINKTDLAPYVGANLDRMREDTLHFRNEDSFIFTNLNNDDNVKEVEEWIRKNFLLEVL

SEQ ID NO: 147141 - DNA, 600 bp, Helicobacter bizzozeronii
  CDS (1)..(600): transl_table=11
atggttaaaatcggtgtttgtggtcctgtgggcagtggcaaaacggctttgatcgaggccctgacaagggcgatgagccaacaatacagcataggtgtcatcactaatgatatttatactaaggaagatgcggagtttttgtgtagaaactctgtgatgcctagagagaggatcattggggtagagacggggggttgcccgcacaccgccattagggaggacgcgtccatgaatttggaagcggtggaagaattgcatgccaaattccccgatattgaattgatgtttattgagagtgggggggataatctctccaccacctttaatcccgagctagccgattttacgatctttgtgatcgatgtagcagagggggataaaatcccacgcaaggggggtccgggcatcacccgctccgatctgctcatcatcaataaaattgatcttgccccctatgtgggcgcagatttgggcgtgatggatcgcgattctaagaaaatgcgcggggataaaccctttttattcaccaatatccgctccaaagagggcttagatcatgtgattggctggatcaaaaaatacgccttgctcgaggattaa

SEQ ID NO: 147142 - protein, 199 aa, Helicobacter bizzozeronii
MVKIGVCGPVGSGKTALIEALTRAMSQQYSIGVITNDIYTKEDAEFLCRNSVMPRERIIGVETGGCPHTAIREDASMNLEAVEELHAKFPDIELMFIESGGDNLSTTFNPELADFTIFVIDVAEGDKIPRKGGPGITRSDLLIINKIDLAPYVGADLGVMDRDSKKMRGDKPFLFTNIRSKEGLDHVIGWIKKYALLED

SEQ ID NO: 147143 - DNA, 612 bp, Rhizobium leguminosarum bv
  CDS (1)..(612): transl_table=11
atgaaatcaagaaacggacctttgcgtgtcggcatcggcgggccggtcggctcgggcaagacggcgctgaccgaaaagctctgcaaggcgatgcgcgacgactattctgtcgccgtcgtcaccaacgatatctacacgacagaggatgccgaggcgctggtgcggatgcaggcattgccttcggaccgcatcgtcggtgtcgaaacgggcggctgcccgcatacagccattcgcgaggatgcgacgatcaatttgcaggcgatcgccggcctgaaccagcggattcccgatctcgacgtcgtcttcatcgaatccggcggcgacaatctggcggcgaccttttcgcccgatcttgccgatatcaccatctatgtcatttccgtttgccagggcgaggaaatcccgcgcaagggcgggcctggtatcacccggtcggacctgctcgtcatcaacaagaaggatctggcgccttatgtcggcgccgatctcgaggtgaaggaccgggatgcgacgcgcatgcgcgcttcgcgccccttcgtcttctccgacatgaagcgcggcgacggtgtcagctcgatcgtcagcttcctcagggagcagggcggtctctag

SEQ ID NO: 147144 - protein, 203 aa, Rhizobium leguminosarum bv
MKSRNGPLRVGIGGPVGSGKTALTEKLCKAMRDDYSVAVVTNDIYTTEDAEALVRMQALPSDRIVGVETGGCPHTAIREDATINLQAIAGLNQRIPDLDVVFIESGGDNLAATFSPDLADITIYVISVCQGEEIPRKGGPGITRSDLLVINKKDLAPYVGADLEVKDRDATRMRASRPFVFSDMKRGDGVSSIVSFLREQGGL

SEQ ID NO: 147145 - DNA, 627 bp, Rhodobacter capsulatus
  CDS (1)..(627): transl_table=11
atgacgaatggacctttgcgcgtcggcatcggcggcccggtcggcgcgggcaagacgacgctgaccgaacagctgtgccgggcgctggcggggcggctttcgatggcggtggtgacgaatgacatctacacccgcgaggatgccgaggcgctgatgcgtgcgcaggtgctgcccgccgatcgcatccgcggcgtcgagaccggcggctgtccgcatacggcaatccgcgaagatgcctcgatcaacctcgccgccattgccgatctgacgcgggcccacccggatcttgagctgatcctgatcgaatcgggcggcgacaatctggccgccaccttcagcccggaactggccgatctgacgatctatgtgatcgacaccgccgccgggcaggacatcccgcgcaagcgcggccccggcgtcacgcgttcggacctgctggtggtgaacaagaccgatctggcgccgcatgtgggggtggatccggtgctgctggaagcggatacgcaacgcgcccgcggcccgcgcccctatgtgatggcgcagctgcgccatggcgtcggcatcgacgagatcgtcgctttcctgatccgggaaggcggtcttgaacaagcctccgccccggcctga

SEQ ID NO: 147146 - protein, 208 aa, Rhodobacter capsulatus
MTNGPLRVGIGGPVGAGKTTLTEQLCRALAGRLSMAVVTNDIYTREDAEALMRAQVLPADRIRGVETGGCPHTAIREDASINLAAIADLTRAHPDLELILIESGGDNLAATFSPELADLTIYVIDTAAGQDIPRKRGPGVTRSDLLVVNKTDLAPHVGVDPVLLEADTQRARGPRPYVMAQLRHGVGIDEIVAFLIREGGLEQASAPA

SEQ ID NO: 147147 - DNA, 982 bp, Solanum tuberosum
  CDS (1)..(855)
atggcttctccagatcaccatatgcatgaccatgaccatgaccatgaccatgaccatgatcaccaccatcataatcatgaccatacccatgaggacacaaaagcaacatcatgggtaggagcagatgggaaagtataccatagtcatgatgggttggctcctcactctcatgaacctatttattcacctggctactttagcagaagggcacctccacttattgacaggaatttcagtgaaagagcctttactattggaattggcggccctgttggcactgggaaaacagctctaatgctggcattatgtaaagtcttgagggaaaaatacagtcttgcagcagtaacaaatgatatattcacgaaagaagatggagagttcttaataaaacatggtgcattgccggaggaaaggattcgagctgtggagacaggaggatgcccacatgctgctattagggaagatataagcattaaccttggacctcttgaggagctttctaatttgtacaaagcagatatactactctgtgaatctggtggagacaacctagctgccaacttcagtagggaacttgctgactacataatctacataatagatgtatcagctggtgacaaaattcctcgaaaaggaggtcccggaattacacaagcagatctccttgtgataaataagaccgacttggcagcagctgtgggagcagatttgtccgtcatggagcgtgatgcacttcggatgcgggatggtggcccttttgtttttgctcaggtgaagcatggggttggtgtagaggacatagtgaaccatatcttacaagcttgggaagttgcaacaggcaataagaagcggtgaaatgttaatcgaaaactttacttgaacattatggatcttttggcttctccaatgctatataacattcaatttccctgtttctggactaatataatctgtctacttaataatgcttgttatgtacaag

SEQ ID NO: 147148 - protein, 284 aa, Solanum tuberosum
MASPDHHMHDHDHDHDHDHDHHHHNHDHTHEDTKATSWVGADGKVYHSHDGLAPHSHEPIYSPGYFSRRAPPLIDRNFSERAFTIGIGGPVGTGKTALMLALCKVLREKYSLAAVTNDIFTKEDGEFLIKHGALPEERIRAVETGGCPHAAIREDISINLGPLEELSNLYKADILLCESGGDNLAANFSRELADYIIYIIDVSAGDKIPRKGGPGITQADLLVINKTDLAAAVGADLSVMERDALRMRDGGPFVFAQVKHGVGVEDIVNHILQAWEVATGNKKR

SEQ ID NO: 147149 - DNA, 837 bp, Solanum tuberosum
  CDS (1)..(837)
atggcttctccagatcaccatatgcatgaccatgaccatggtcaccaccatcataatcatgaccatacccatgaggacacaaaagcaacatcatggataggagcagatgggaaagtataccatagtcatgatgggttggctcctcactctcatgaacctatttattcacctggctactttagcagaagggcacctccacttattgagaggaatttcagtgaaagagcctttactattggaattggcggccctgttggtactgggaaaacagctctaatgctggcattatgtaaagtcttaagggaaaaatacagtcttgcagcagtaacaaatgatatattcacgaaagaagatggagagttcttaataaaacatggtgcattgccagaggaaaggattcgagctgtggagacaggaggatgcccacatgctgctattagggaagatataagcattaaccttggacctcttgaggagctttctaatttgtacaaagcagatatactactctgtgaatctggtggagacaacctagctgccaacttcagtagggaacttgctgactacataatctacataatagatgtatctgcgggtgacaaaattcctcgaaaaggaggtcccggaattacgcaagcagatctccttgtgataaataagaccgacttggcagcagctgtgggagcagatttgtccgtcatggagcgtgatgcacttcggatgcgggatggtggcccttttgtttttgctcaggtgaagcatggggttggcgtagaggacatagtgaaccatatcttacaagcttgggaagtttcaacaggcaataagaagcgctga

SEQ ID NO: 147150 - protein, 278 aa, Solanum tuberosum
MASPDHHMHDHDHGHHHHNHDHTHEDTKATSWIGADGKVYHSHDGLAPHSHEPIYSPGYFSRRAPPLIERNFSERAFTIGIGGPVGTGKTALMLALCKVLREKYSLAAVTNDIFTKEDGEFLIKHGALPEERIRAVETGGCPHAAIREDISINLGPLEELSNLYKADILLCESGGDNLAANFSRELADYIIYIIDVSAGDKIPRKGGPGITQADLLVINKTDLAAAVGADLSVMERDALRMRDGGPFVFAQVKHGVGVEDIVNHILQAWEVSTGNKKR

SEQ ID NO: 147151 - DNA, 841 bp, Solanum tuberosum
  CDS (1)..(837)
atggcttctccagatcaccatatgcatgaccatgaccatggtcaccaccatcataatcatgaccatacccatgaggacacaaaagcaacatcatgggtaggagcagatgggaaagtataccatagtcatgatgggttggctcctcactctcatgaacctatttattcacctggctactttagcagaagggcacctccacttattgacaggaatttcagtgaaagagcctttactattggaattggcggccctgttggtactgggaaaacagctctaatgctggcattatgtaaagtcttgagggacaaatacagtcttgcagcagtaacaaatgatatattcacgaaagaagatggagagttcttaataaaacatggtgcattgccggaggaaaggattcgagctgtggagacaggaggatgcccacatgctgctattagggaagatataagcattaaccttggacctcttgaggagctttctaatttgtacaaagcagatatactactctgtgaatctggtggagacaacctagctgccaacttcagtagggaacttgctgactacataatctacataatagatgtatcagcgggtgacaaaattcctcgaaaaggaggccccggaattacgcaagcagatctccttgtgataaataagaccgacttggcaccagctgtgggagcagatttgtccgtcatggagcgtgatgcacttcggatgagggatggtggcccttttgtttttgctcaggtgaagcatggggttggcgttgaggacatagtgaaccatatcttacaagcttgggaagtttcaacaggcaataagaagcgctgaaatg

SEQ ID NO: 147152 - protein, 278 aa, Solanum tuberosum
MASPDHHMHDHDHGHHHHNHDHTHEDTKATSWVGADGKVYHSHDGLAPHSHEPIYSPGYFSRRAPPLIDRNFSERAFTIGIGGPVGTGKTALMLALCKVLRDKYSLAAVTNDIFTKEDGEFLIKHGALPEERIRAVETGGCPHAAIREDISINLGPLEELSNLYKADILLCESGGDNLAANFSRELADYIIYIIDVSAGDKIPRKGGPGITQADLLVINKTDLAPAVGADLSVMERDALRMRDGGPFVFAQVKHGVGVEDIVNHILQAWEVSTGNKKR

SEQ ID NO: 147153 - DNA, 1025 bp, Solanum tuberosum
  CDS (23)..(841)
ctccactctcccaacacctcaaatggcttctccagatgaccatgatcaccaccatcataatcatgaccatacccatgaggacacaaaagcaacatcatgggtaggagcagatgggaaagtataccatagtcatgatgggttggctcctcactctcatgaacctatttattcacctggctactttagcagaagggcacctccacttattgacaggaatttcagtgaaagagcctttactattggaattggcggccctgttggtactgggaaaacagctctaatgctggcattatgtaaagtcttaagggaaaaatacagtcttgcagcagtaacaaatgatatattcacgaaagaagatggagagttcttaataaaacatggtgcattgccggaggaaaggattcgagctgtggagacaggaggatgcccacatgctgctattagggaagatataagcattaaccttggacctcttgaggagctttctaatttgtacaaagcagatatactactttgtgaatctggtggagacaacctagctgccaacttcagtagggaacttgctgactacataatctacataatagatgtatctgcgggtgacaaaattcctcgaaaaggaggccccggaattacgcaagcagatctccttgtgataaataagactgacttggcatcagctgtgggagcagatttgtccgtcatggagcgtgatgcacttcggatgcgggatggtggccctcttgtttttgctcaggtgaagcatggggttggcgtagaggacatagtgaaccatatcttacaagcttgggaagtttcaacaggcaataagaagcgctgaaatgttaatcgaaaactttacttgaacattatggatcttttggcttctccaatgctatataacattcaatttccctgtttctggactaatataatctgtctactgaataatgcttgttatgtacaagcactaagtatttgtaagtttctatatttaatttggtttgtttgatcatcattaaaaa

SEQ ID NO: 147154 - protein, 272 aa, Solanum tuberosum
MASPDDHDHHHHNHDHTHEDTKATSWVGADGKVYHSHDGLAPHSHEPIYSPGYFSRRAPPLIDRNFSERAFTIGIGGPVGTGKTALMLALCKVLREKYSLAAVTNDIFTKEDGEFLIKHGALPEERIRAVETGGCPHAAIREDISINLGPLEELSNLYKADILLCESGGDNLAANFSRELADYIIYIIDVSAGDKIPRKGGPGITQADLLVINKTDLASAVGADLSVMERDALRMRDGGPLVFAQVKHGVGVEDIVNHILQAWEVSTGNKKR

SEQ ID NO: 147155 - DNA, 639 bp, Vibrio parahaemolyticus
  CDS (1)..(639): transl_table=11
atgcaagaatataataatcaagattacaaacaaccgctgagaattggtgtcggaggtccagtggggtcaggtaaaacagccctgcttgaaatcctatgtaaaacaatacgtgacaaatatcaaattgcggtcgttacgaatgacatctatacgcaagaagatgcaaaaattttaacacgcgcacaagcactagatgctgatcgcataattggtgttgaaacgggaggctgtcctcataccgcaatccgtgaggacgcttctatgaatttagcggcggtcgaagaattagcaaaacgtcacaaaaatttagatttggtttttgtcgaaagtggtggcgacaatttgagcgcaacatttagcccagagttggcagatttaaccatttatgtcattgacgttgctgaaggcgaaaagataccacgtaaaggtggccctggcatcacccgctctgatttgttggtgatcaataagatagacctagcgccgtatgttggtgcatcactggatgttatggaggcggatactgctcgtatgcgcccagaaaaaccttacgtctttaccaacctgaaggagggtattggtcttcaaaaaattattgatttcattgtagacaaaggtatgctgccaaaagtggattaa

SEQ ID NO: 147156 - protein, 212 aa, Vibrio parahaemolyticus
MQEYNNQDYKQPLRIGVGGPVGSGKTALLEILCKTIRDKYQIAVVTNDIYTQEDAKILTRAQALDADRIIGVETGGCPHTAIREDASMNLAAVEELAKRHKNLDLVFVESGGDNLSATFSPELADLTIYVIDVAEGEKIPRKGGPGITRSDLLVINKIDLAPYVGASLDVMEADTARMRPEKPYVFTNLKEGIGLQKIIDFIVDKGMLPKVD

SEQ ID NO: 147157 - DNA, 618 bp, Rhodobacter sphaeroides
  CDS (1)..(618): transl_table=11
atggacccctgcgcgtggggatcggcggcccggtgggcgccggcaagacgaccctcgaccgaaaagctctgcgcggcgctcgcgcatcgctgctcgatggcggtcatcaccaacgacatctacacccgcgaggatgccgaggcgctgatgcgcgcgcaggtgctgcccgcagagcggatccgcggcgtcgagacgggggctgccccctacacggccatccgcgaggatgcctcgatcaacctcgccgccgtggccgacttgcgccgcaccttcccggacctcgacctgatcctgatcgaatcgggcggcgacaatctggccgcgaccttcagccccgagctcgcggaccttaccatctatgtgatcgacacggccgccggacaggacattccgcgaaaacgcggcccgggccttgcgcgctcggatctgctggtcgtgaacaagatcgatctcgcgccccatgtcggcgtggatctggcccggctcgaggccgacacacaggccgcccgcggccaaaggccctatgtcatggcgcgaatgcgggcgggggtcggcgtcgaggcgatcgtagccttcctcgaacgcgaaggcgggctgcagctcctgccgcaggattga

SEQ ID NO: 147158 - protein, 205 aa, Rhodobacter sphaeroides
MDPCAWGSAARWAPARRPSTEKLCAALAHRCSMAVITNDIYTREDAEALMRAQVLPAERIRGVETGAAPYTAIREDASINLAAVADLRRTFPDLDLILIESGGDNLAATFSPELADLTIYVIDTAAGQDIPRKRGPGLARSDLLVVNKIDLAPHVGVDLARLEADTQAARGQRPYVMARMRAGVGVEAIVAFLEREGGLQLLPQD

SEQ ID NO: 147159 - DNA, 618 bp, Corynebacterium glutamicum
  CDS (1)..(618): transl_table=11
atgggtccaatcagaatcggcgtaggcgggccggtcggcgccggcaaaacgcagctggtagagcggattacgcgagcgcttatcgacgaagtcagcatggctgcaatcactaacgatatctacaccattgaagacgccaagattcttgccgccaatggagtgctgccagaagaacgcattgttggcattgaaactggaggatgcccacacactgcgattcgtgaagacacctccatgaatgatgcagcgatcaaagaccttgtggaacgcttcccagatctggaactcatctttgtggaatctggtggagataatctctctgcaacgttctcgccagagctcgtggatttttccatctacatcatcgatgttgcccaaggtgagaagatcccgaggaaagctggccaaggcatgattaagtcggatttgtttatcattaataaaactgaccttgccccatatgttggtgccaacctagatgtcatggtggaagatgccaaagcattccgcaagaacaaaccattctgcctgactaatctgcgcaccgatgatggtttggataaggtcttggaatggatccgccatgaggtgataatgcaggacttgcaggaagcctaa

SEQ ID NO: 147160 - protein, 205 aa, Corynebacterium glutamicum
MGPIRIGVGGPVGAGKTQLVERITRALIDEVSMAAITNDIYTIEDAKILAANGVLPEERIVGIETGGCPHTAIREDTSMNDAAIKDLVERFPDLELIFVESGGDNLSATFSPELVDFSIYIIDVAQGEKIPRKAGQGMIKSDLFIINKTDLAPYVGANLDVMVEDAKAFRKNKPFCLTNLRTDDGLDKVLEWIRHEVIMQDLQEA

SEQ ID NO: 147161 - DNA, 636 bp, Bacillus pasteurii
  CDS (1)..(636): transl_table=11
atgaaaacaatacaccttggcattggcggacctgttggttccggtaaaactacgcttgttaaaacactttcagaagcacttaaagaagaatatagcattgcagttattacaaacgatatttacacgcgtgaagatgcgaactttctgattaatgagaacattcttgaaaaagaccgtattatcggtgttgaaacaggaggttgtcctcacacagcaattcgtgaagatgcgtcaatgaactttgaagcgattgaagaactaaaaaatcgttttgatgatcttgaaatcattcttctagagagcggtggcgacaatttatcggcaacatttagtcctgaattggtcgatgcatttatttatgtaattgatgtttccgaaggcggcgacattcctagaaaaggtggtccaggcgttactcgctctgatttcctgatggtaaataaaactgaacttgctccatacgtcggcgtagacctagatacaatgaagaatgatacaatcaaagcaagaaacggaagaccgtttacatttgctaatattaaaacgaaaaaaggtctagatgagatcattgcatggatcaaatctgatttgttattagaagggaaaaccaatgagtctgcaagcgagtctaaataa

SEQ ID NO: 147162 - protein, 211 aa, Bacillus pasteurii
MKTIHLGIGGPVGSGKTTLVKTLSEALKEEYSIAVITNDIYTREDANFLINENILEKDRIIGVETGGCPHTAIREDASMNFEAIEELKNRFDDLEIILLESGGDNLSATFSPELVDAFIYVIDVSEGGDIPRKGGPGVTRSDFLMVNKTELAPYVGVDLDTMKNDTIKARNGRPFTFANIKTKKGLDEIIAWIKSDLLLEGKTNESASESK

SEQ ID NO: 147163 - DNA, 600 bp, Helicobacter pylori
  CDS (1)..(600): transl_table=11
atggtaaaaattggagtttgtggtcctgtaggaagcggtaaaaccgccttgattgaagctttgacgcgccacatgtcaaaagattatgacatggcggtcatcactaatgatatttacactaaagaaggcgcagaatttatgtgtaaaaattcggtgatgccacgagagaggatcattggtgtagaaacaggaggctgtccgcacacagctattagagaagacgcttctatgaatttagaagcggtagaagaaatgcatggccgtttccctaatttggaattgcttttgattgaaagcggaggcgataacctttcggcgacttttaacccagagctagcggactttacgatttttgtgattgatgtggctgagggcgataaaatccccagaaaaggcggaccaggaatcacgcgctcagacttgcttgtcatcaataagattgatttagccccctatgtgggagcggacttgaaagtcatggaaagggattctaaaaaaatgcgcggcgaaaagccctttatttttacgaatatccgcgctaaagaaggtttagatgatgtgatcgcttggatcaagtgcaacgctttattggaagattga

SEQ ID NO: 147164 - protein, 199 aa, Helicobacter pylori
MVKIGVCGPVGSGKTALIEALTRHMSKDYDMAVITNDIYTKEGAEFMCKNSVMPRERIIGVETGGCPHTAIREDASMNLEAVEEMHGRFPNLELLLIESGGDNLSATFNPELADFTIFVIDVAEGDKIPRKGGPGITRSDLLVINKIDLAPYVGADLKVMERDSKKMRGEKPFIFTNIRAKEGLDDVIAWIKCNALLED

SEQ ID NO: 147165 - DNA, 1050 bp, Arabidopsis thaliana
  CDS (38)..(865)
agtgtgagtaatttaggaagattcgagtctctcggaaatggcatcacacgaccaccctcatcatcatcacgatcatgagcatgaccacgagaaatcagacggcggagaagggaaggcgtcgtgggtggggaaggacgggaaggtgtaccatagccacgatggactcgcacctcactcacacgaacccatctactctcctggctacttcagtcgccgagctcctccgcttcacgaccgtaacttctctgagagagcttttaccgtcggtattggcggtcccgttggcactgggaaaacggcattgatgcttgctctttgtagattcttgagggacaaatatagtcttgctgctgtgacaaatgatatattcacgaaagaggatggtgagtttctggtgaagaatggggctcctcctgaggaaaggattagagctgttgaaacaggtggatgtccacacgctgctatccgtgaagatatcagtatcaatttgggtcctcttgaggagttatctaacttattcaaggctgatttgcttctttgtgaatccggtggagataatttagctgctaatttcagtagagaactagctgactatatcatctacatcatcgatgtatcggctggtgataaaataccccgtaaaggcggccctggaatcactcaagctgatcttctggtgataaacaagactgaccttgcagcagctgttggggctgacttatcggtcatggaaagggattcactacgcatgcgtgatggagggccatttgtctttgctcaggtgaagcatgggcttggagtcgaggaaatcgtgaaccatgtcatgcactcatgggaacatgcgaccgggaagaagcgccagtgatgatggggttcttaagacccaaaatggataagatatgaaactgaatggaactctttcaatacttatcttgaactcaatttatgcgcaaaagtctatgtaatctgtttgttgtactcaagacataagagaaataaaaggtttgagcatgagactcattacattctaaaaaaaaaaaaaaaaaaaaa

SEQ ID NO: 147166 - protein, 275 aa, Arabidopsis thaliana
MASHDHPHHHHDHEHDHEKSDGGEGKASWVGKDGKVYHSHDGLAPHSHEPIYSPGYFSRRAPPLHDRNFSERAFTVGIGGPVGTGKTALMLALCRFLRDKYSLAAVTNDIFTKEDGEFLVKNGAPPEERIRAVETGGCPHAAIREDISINLGPLEELSNLFKADLLLCESGGDNLAANFSRELADYIIYIIDVSAGDKIPRKGGPGITQADLLVINKTDLAAAVGADLSVMERDSLRMRDGGPFVFAQVKHGLGVEEIVNHVMHSWEHATGKKRQ

SEQ ID NO: 147167 - DNA, 825 bp, Glycine max
  CDS (1)..(825)
atggcttctgaaggcgaccatcaccaccaccaccaccaccatcaagatcacgatcatcatcatcatgatcatgatcaccatcatcatcacgatggagagggagagaccaactcatgggtaggtaaggatgggaaggtgtaccatagccacgatggtctggcgccgcattctcacgaacccatttactcccccggctacttcaccagaagagctccaccgcttctcaacagaaacttcaacgaaagagccttcaccgtcggaatcggtggacccgtcggtactggcaaaacagctctcatgttggccctttgtgaactcttgcgcgaaaactacagtctcgcagctgtgacaaatgatatattcactaaagaggatggtgagttcttggtgaagcacaaagcacttcctgaggaaaggatacgcgctgtagaaactgggggttgcccacatgctgctattcgggaggacatcagtattaatcttggaccgctggaggagctttctaacctcttcaaagcagatatacttctttgtgaatctgggggagataacctggctgccaatttcagcagggaattggctgactatattatttacataatagacgtgtctggcggtgataaaattcctcggaaaggtggtcctggaatcacgcaagctgatctccttgtgataaacaagactgaccttgctcctgcaattggggctgatttggcagtcatgcagcgggatgctctgcggatgagagatggagggccatttgtctttgcacaggtgaagcataagattggagtagaagaaattgggaatcttgttctctcttaa

SEQ ID NO: 147168 - protein, 274 aa, Glycine max
MASEGDHHHHHHHHQDHDHHHHDHDHHHHHDGEGETNSWVGKDGKVYHSHDGLAPHSHEPIYSPGYFTRRAPPLLNRNFNERAFTVGIGGPVGTGKTALMLALCELLRENYSLAAVTNDIFTKEDGEFLVKHKALPEERIRAVETGGCPHAAIREDISINLGPLEELSNLFKADILLCESGGDNLAANFSRELADYIIYIIDVSGGDKIPRKGGPGITQADLLVINKTDLAPAIGADLAVMQRDALRMRDGGPFVFAQVKHKIGVEEIGNLVLS

SEQ ID NO: 147169 - DNA, 681 bp, Actinomyces naeslundii
  CDS (1)..(681): transl_table=11
atgtcagcagcaaccagccaggagcacgcggacgcgcccgggcagccggagccccattcccagcactacggtccggtccgtatcggagtgggtggcccggtgggggcgggcaagacccagctcatcgagcgcatcacccgggccatgagccaggaggtctccatggccgccgtcaccaacgacatctacacgatcgaggacgccaagatcctcgccgctcagggagttctgccggtggaccgcatcgtcgggctggagaccgggggctgcccgcacacggccatccgcgaggacacctccatgaacgaggcggcgatcgccgagctggtggagcgccacccggacctcgaggtggtgttcgtggagtcgggaggcgacaacctctcagccaccttctcccccgagctcgtcgacttctccatctacgtcatcgacgtcgcccagggcgagaagatcccccgcaaggccggtcaggggatgatcaagtccgatctgttcgtcatcaacaagacggacctggcccctcacgtcggcgccgacctggcggtcatggaggccgattccaaggtgttccggggagacaggcccttctgcttcaccaatctcaaaaccgatgagggcctggagcaggtcatcgagtggatccaccacgacgtgctcatgacggacctggagtcgtga

SEQ ID NO: 147170 - protein, 226 aa, Actinomyces naeslundii
MSAATSQEHADAPGQPEPHSQHYGPVRIGVGGPVGAGKTQLIERITRAMSQEVSMAAVTNDIYTIEDAKILAAQGVLPVDRIVGLETGGCPHTAIREDTSMNEAAIAELVERHPDLEVVFVESGGDNLSATFSPELVDFSIYVIDVAQGEKIPRKAGQGMIKSDLFVINKTDLAPHVGADLAVMEADSKVFRGDRPFCFTNLKTDEGLEQVIEWIHHDVLMTDLES

SEQ ID NO: 147171 - DNA, 636 bp, Actinobacillus pleuropneumoniae
  CDS (1)..(636): transl_table=11
atgcgtaaatatatcaaaatcggggtggcaggccctgtgggagcggggaaaaccgcgttaatcgaacgtttaactcgtgaaatcgcaagcaaatacagtgttgcggttattactaacgacatttacacccaagaagatgcggagtttttaactaaaaacagtttgcttccgcctgaacgcattatgggtgtagaaaccggcggttgtccgcatacggcaattcgtgaagacgcttcgatgaaccttgaagcggtggacgaaatggtggctcgtttccctgaagttgagttaatttttattgaatcgggcggcgataacctttcggcaacttttagcccggatttagcggatgtaacgattttcgtgattgacgtggcacaaggcgagaaaattccacgtaaaggcggaccgggtatctctcgttcggatttattagtgattaataaaactgacttagcaccttttgtgggagcggatttaagcgtgatggagcgagatgctcgccgtatgcgtaacggtcagccgtttattttcactaacttgatgaagaacgaaaaccttgatggcgtgatcggttggatcgaaaaatacgcattgttaaaaaatattgaagatccggcgtctttagttcgttaa

SEQ ID NO: 147172 - protein, 211 aa, Actinobacillus pleuropneumoniae
MRKYIKIGVAGPVGAGKTALIERLTREIASKYSVAVITNDIYTQEDAEFLTKNSLLPPERIMGVETGGCPHTAIREDASMNLEAVDEMVARFPEVELIFIESGGDNLSATFSPDLADVTIFVIDVAQGEKIPRKGGPGISRSDLLVINKTDLAPFVGADLSVMERDARRMRNGQPFIFTNLMKNENLDGVIGWIEKYALLKNIEDPASLVR

SEQ ID NO: 147173 - DNA, 615 bp, Bacillus sp
  CDS (1)..(615): transl_table=11
gtggaaccaatacgtattggaatcggagggcctgttggagcgggaaaaacgatgcttgtggaaaaattgacgagagccatgcataaagaattgagcatcgccgttgtgacaaatgatatctatacgaaagaagatgctcaatttcttctgaagcatggtgtgctgccggcagatcgcgtcattggtgtggaaacaggagggtgtccgcatacagctattcgtgaagatgcatccatgaattttcccgccattgatgaactaaaagaaaggcatcccgatcttgagttgatatttatcgaaagcggcggggataatctagccgctacatttagtccggaactagtcgatttctctatttacattattgatgtagcgcaaggggaaaaaattccgcgtaaaggtggacaagggatgattaaatctgtactttttatcatcaataaaattgatctcgctccgtacgttggagccagtttagaggttatggagcgcgatactctggcagcgagaggggataagccatatatttttaccaatttaaaagatgaaatcggtcttgcagaagtattggaatggatcaaaaccaatgcactattgtacggattggaatcatga

SEQ ID NO: 147174 - protein, 204 aa, Bacillus sp
MEPIRIGIGGPVGAGKTMLVEKLTRAMHKELSIAVVTNDIYTKEDAQFLLKHGVLPADRVIGVETGGCPHTAIREDASMNFPAIDELKERHPDLELIFIESGGDNLAATFSPELVDFSIYIIDVAQGEKIPRKGGQGMIKSVLFIINKIDLAPYVGASLEVMERDTLAARGDKPYIFTNLKDEIGLAEVLEWIKTNALLYGLES

SEQ ID NO: 147175 - DNA, 645 bp, Bordetella bronchiseptica
  CDS (1)..(645): transl_table=11
atgcacgatatctcttcattgaccacccgtaccaagaccctgccccccttgcgcgtcggcgtgggcggcccggtggggtccggcaaaaccaccttgctcgaaatggtgtgcaaggcgatgtacccgcagttcgacctgatcgcgatcaccaacgacatctacaccaaggaagaccagcgcctgctgacgctgtcgggggccttgccgcccgagcgcatcctgggggtggagaccggcggctgtccgcacacggcgatccgcgaggacgcatccatcaacctgatcgccatcgaccagatgctggagcagtttcccgatgccgatatcgtgttcgtcgagtccggcggcgacaacctggccgcgaccttcagccccgaactctcggacctgacgctttacatcatcgacgtcgccagcggagagaagattccgcgcaagggcgggcctggcatcaccaagtccgacctgttcatcatcaacaagacggacctggcgccgtacgtgggcgcggacctcgcggtgatggaggccgatacccgccgcatgcgcggcgacaagccctttgtgatgtgcaacctgaagaccggcgatggattggaccaggtgattgccttcctgaagacggaaggcttgttccgcggctga

SEQ ID NO: 147176 - protein, 214 aa, Bordetella bronchiseptica
MHDISSLTTRTKTLPPLRVGVGGPVGSGKTTLLEMVCKAMYPQFDLIAITNDIYTKEDQRLLTLSGALPPERILGVETGGCPHTAIREDASINLIAIDQMLEQFPDADIVFVESGGDNLAATFSPELSDLTLYIIDVASGEKIPRKGGPGITKSDLFIINKTDLAPYVGADLAVMEADTRRMRGDKPFVMCNLKTGDGLDQVIAFLKTEGLFRG

SEQ ID NO: 147177 - DNA, 1066 bp, Escherichia coli
  CDS (193)..(810): transl_table=11
aagcttatccctttagggcaaagcgcggggcaaaatattttatttacccttgctgagcgcatacccgaagtggttgcgcaatcggcaatctggccattagacgatattggtagttttacacctgcacaaattattgccagtagtcggcatgaaacccaatacacacgactttttcgttcatgagaaaatgctatgcaagaatataatcaacccttaagaattggtgtcggtgggccggtcggctcaggaaaaaccgcattattagaagtgttatgtaaagccatgcgcgacacttaccaaattgccgttgtcaccaatgatatttacacccaagaagatgccaaaattttaacccgtgccgaagcactagatgcagaccgcattattggtgttgaaactggcggctgccctcataccgctattcgtgaagatgcatcaatgaacttagcggccgttgaagagttagctatccgccataaaaaccttgatatcgtgtttgtggaaagcggcggcgataacctcagtgcgacgtttagcccagagctggcagacttaaccatttatgtgattgatgttgctgaaggcgaaaaaattccacgtaaaggtgggccagggatcacccattccgatttactggtgattaacaaaattgaccttgctccgtatgtcggcgcttcattagaagtgatggaagccgataccgcaagaatgcgaccagtaaagccctatgtgtttactaacttaaagaaaaaagtcggcttagagaccattatcgagtttatcatcgataaaggcatgttaggacgttaataaatttgacgccctataggtttatttatagggcgttttcaattaacaaatacggggtaaaggctcgctgtgaggcaaatctaataaccttgatgtgccgaagatcccaactaatttgacttgtttttgctcagtcacacagccaatcgtggctgcatctttccctaatgggtgttggtgtagtgtagcaagcactgcattttccgcttcaggtttcaccacaatcactagagtcgacctgcaggcatgcaagctt

SEQ ID NO: 147178 - protein, 205 aa, Escherichia coli
MQEYNQPLRIGVGGPVGSGKTALLEVLCKAMRDTYQIAVVTNDIYTQEDAKILTRAEALDADRIIGVETGGCPHTAIREDASMNLAAVEELAIRHKNLDIVFVESGGDNLSATFSPELADLTIYVIDVAEGEKIPRKGGPGITHSDLLVINKIDLAPYVGASLEVMEADTARMRPVKPYVFTNLKKKVGLETIIEFIIDKGMLGR

SEQ ID NO: 147179 - DNA, 678 bp, Haemophilus influenzae
  CDS (1)..(678): transl_table=11
atgagcaacacagttgctacgatgataaacaaaaggaacattatgcgtaactacattaaaattggcgtggctggccctgttggggcgggtaaaacggcgttaattgaaaaactcactcgtgaaatagcgtcaaaatatagcgtagcagtcattactaacgatatttacacccaagaagatgcggaatttttaacgaaaaatagtttgcttccaccagagcgaattatgggcgtggaaacgggcggttgcccgcacacagcaattcgtgaagatgcctcgatgaatttagaagccgtggacgaaatggtgactcgtttccctgatgtggaaatcgtgttcattgaatcaggtggcgataacctttcagcgacttttagccctgatttggcagacgtgacgatttttgtgatcgatgtggctcaaggggaaaaaatccctcgtaaaggtgggccaggtatcactcgttcagatttacttgtgatcaacaaaactgatcttgctccattcgttggtgctgacttaagcgtcatggaacgtgatgctcgtcgtatgcgtaacggtcagccgtttattttcaccaacctgatgaaaaaagaaaatctggatggcgtgatcggttggatcgaaaaatatgcgttgttgaagaatgtggaagaacctgcatctttggttcgttaa

SEQ ID NO: 147180 - protein, 225 aa, Haemophilus influenzae
MSNTVATMINKRNIMRNYIKIGVAGPVGAGKTALIEKLTREIASKYSVAVITNDIYTQEDAEFLTKNSLLPPERIMGVETGGCPHTAIREDASMNLEAVDEMVTRFPDVEIVFIESGGDNLSATFSPDLADVTIFVIDVAQGEKIPRKGGPGITRSDLLVINKTDLAPFVGADLSVMERDARRMRNGQPFIFTNLMKKENLDGVIGWIEKYALLKNVEEPASLVR

SEQ ID NO: 147181 - DNA, 600 bp, Helicobacter pylori J99
  CDS (1)..(600): transl_table=11
atggtaaaaattggagtttgtggtcctgtaggaagcggtaaaaccgccttgattgaagctttaacgcgccacatgtcaaaagattatgacatggcggtcatcactaatgatatttacacgaaagaagacgcagagtttatgtgcaaaaattcggtgatgccacgagataggatcattggcgtagaaacaggaggctgtccgcacacggctattagagaagacgcttctatgaatttagaagcggtagaagaaatgcatggccgtttccctaatttggaattgcttttgattgaaagcggaggcgataacctttcagcgacttttaacccggagttggcggattttacgatttttgtgattgatgtggctgagggcgataaaatccccagaaaaggcgggccaggaatcacgcgctcagacttgcttgtcatcaataagattgatttagccccctatgtgggagcggacttgaaagtcatggaaagggattctaaaaaaatgcgcggcgaaaagccctttatttttacgaatatccgcgctaaagaaggtttagacgatgtgatcgcttggatcaagcgcaacgctttattggaagattga

SEQ ID NO: 147182 - protein, 199 aa, Helicobacter pylori J99
MVKIGVCGPVGSGKTALIEALTRHMSKDYDMAVITNDIYTKEDAEFMCKNSVMPRDRIIGVETGGCPHTAIREDASMNLEAVEEMHGRFPNLELLLIESGGDNLSATFNPELADFTIFVIDVAEGDKIPRKGGPGITRSDLLVINKIDLAPYVGADLKVMERDSKKMRGEKPFIFTNIRAKEGLDDVIAWIKRNALLED

SEQ ID NO: 147183 - DNA, 618 bp, Klebsiella aerogenes
  CDS (1)..(618): transl_table=11
atgaactcttataaacacccgctgcgcgtcggcgtcggcggcccggtcggctccggtaaaaccgctctgctggaagcgctgtgtaaagcgatgcgcgatacctggcagctggcggtggtcactaacgacatctataccaaagaagatcagcgcatcctcaccgaagcgggcgcgctggcgcctgaacgcatcgtcggtgtggaaaccggcggctgcccgcatacggcgatccgcgaagatgcctcaatgaacctcgccgccgtggaagcgctgagtgaaaagttcggtaacctcgaccttatcttcgtggaaagcggcggcgataacctgagcgccaccttcagcccggagctggcggatctgaccatctacgtcatcgatgtggccgaaggggagaagatcccgcgcaaaggcggaccggggatcaccaaatccgatttcctggtgatcaataaaaccgaccttgccccctatgtgggcgcgtcgctggaggtgatggcgagcgatacccagcgtatgcgcggcgatcgcccatggaccttcaccaatctgaagcagggcgacggcctgagcaccattatcgccttcctcgaagacaaaggcatgcttggcaaatag

SEQ ID NO: 147184 - protein, 205 aa, Klebsiella aerogenes
MNSYKHPLRVGVGGPVGSGKTALLEALCKAMRDTWQLAVVTNDIYTKEDQRILTEAGALAPERIVGVETGGCPHTAIREDASMNLAAVEALSEKFGNLDLIFVESGGDNLSATFSPELADLTIYVIDVAEGEKIPRKGGPGITKSDFLVINKTDLAPYVGASLEVMASDTQRMRGDRPWTFTNLKQGDGLSTIIAFLEDKGMLGK

SEQ ID NO: 147185 - DNA, 745 bp, Proteus mirabilis
  CDS (61)..(678): transl_table=11
atcgccagtagtcgccatgaaactcaatatactcgactttttcgttcatgagataaagagatgcaagaatataatcaaccactgcgtattggtgttggtggccctgttggttcaggaaaaacagcactattagaagttctttgtaaagctatgcgcgatagttaccaaatcgccgttgttaccaatgatatatatacacaagaagatgcaaaaattttaactcgtgcgcaggctcttgatgcggatcggatcattggtgttgaaacaggaggatgtcctcatacggctattcgtgaagatgcttcaatgaatttggctgctgtagaagagttggcgatgcgccataaaaacttagatattgtttttgtcgaaagtggcggagataacttaagtgcgacctttagccctgaattggctgatcttctatttatgttaattgatgttgcagaaggtgagaagatccctcgcaagggggggccggggatcacacatcctgatatgatggtgatcaacaagatcgatcttgcgccttatgtgggagcgtcattagaagtgatggaagcggatacagccaaaatgcgtcctgtgaaaccttatgtttttactaacttaaaagagaaagtaggtttagagacgattatcgattttattattgataaaggtatgttgagacgttaatcactatgagtaccagtatcggttatcgctgttacatgaccgatactggtaaaataatacgctatca

SEQ ID NO: 147186 - protein, 205 aa, Proteus mirabilis
MQEYNQPLRIGVGGPVGSGKTALLEVLCKAMRDSYQIAVVTNDIYTQEDAKILTRAQALDADRIIGVETGGCPHTAIREDASMNLAAVEELAMRHKNLDIVFVESGGDNLSATFSPELADLLFMLIDVAEGEKIPRKGGPGITHPDMMVINKIDLAPYVGASLEVMEADTAKMRPVKPYVFTNLKEKVGLETIIDFIIDKGMLRR

SEQ ID NO: 147187 - DNA, 615 bp, Pseudomonas aeruginosa
  CDS (1)..(615): transl_table=11
atgacatcccaacccctgcgtgtcggcatcggcggtccggtgggctccggcaagaccgccctgaccctggccctgtgtcgcgaactgcgcgagcgctacaacctcgcggtggtcaccaacgacatctatacccaggaagacgcggagttcctggtgcgcaacgaggccctcgcccccgagcggatcatcggcgtggaaaccggcggctgcccgcacacggcgatccgcgaggacgcctcgatcaacctggaggcggtggaccagctcaaccggcgcttccccggcctcgaactgatcctggtggaatccggcggcgacaacctgtcggccaccttcagccccgagctgtccgacctgaccctctacgtgatcgacgtttccgccggcgacaagatcccgcgcaagggcggccccggcatctgcaagtcggacctgctggtgatcaacaagatcgacctggcgccgctggtcggcgcctccctcgatgtgatggaccgggacgcccggcgcatgcgcggcgacaagccgttcgtgttcagcaaccagaagaccggccaggggctggacgaaatcatcgccttcatcgagcgccagggcctgctgaccgccgcctga

SEQ ID NO: 147188 - protein, 204 aa, Pseudomonas aeruginosa
MTSQPLRVGIGGPVGSGKTALTLALCRELRERYNLAVVTNDIYTQEDAEFLVRNEALAPERIIGVETGGCPHTAIREDASINLEAVDQLNRRFPGLELILVESGGDNLSATFSPELSDLTLYVIDVSAGDKIPRKGGPGICKSDLLVINKIDLAPLVGASLDVMDRDARRMRGDKPFVFSNQKTGQGLDEIIAFIERQGLLTAA

SEQ ID NO: 147189 - DNA, 615 bp, Staphylococcus xylosus
  CDS (1)..(615): transl_table=11
atgacagacacaattaaaataggtgttggtggacctgttggtgcaggaaaacacgaacttattgaaaaaattgtaaaacgcttagcaaaagacatgagcattggtgtcatcacgaatgacatttatacaaaagaggacgaaaaaatattagttaattctggcgtattacctgaagacagaattatcggtgtagaaacgggtggttgccctcatacagctatacgtgaagatgcctcaatgaattttgctgcaattgatgaactaaaagaacgaaacgatgatatcgaacttattttcatcgaatcaggtggcgacaatttagctgctactttcagtccagaattagtagatttctctatctatattatcgatgttgctcaaggggaaaaaattcctcgaaaaggtggacaaggtatgattaaatccgatttctttgttataaacaagactgacttagcaccttatgttggtgcgtcattagaacgcatggccgaagatacaaaagtattccgtggcaatcgtcctttcacttttactaatcttaaaacagatgaaggtttagatgaagttattgagtggatagaacaatacgtatttcttaaagggttagcttaa

SEQ ID NO: 147190 - protein, 204 aa, Staphylococcus xylosus
MTDTIKIGVGGPVGAGKHELIEKIVKRLAKDMSIGVITNDIYTKEDEKILVNSGVLPEDRIIGVETGGCPHTAIREDASMNFAAIDELKERNDDIELIFIESGGDNLAATFSPELVDFSIYIIDVAQGEKIPRKGGQGMIKSDFFVINKTDLAPYVGASLERMAEDTKVFRGNRPFTFTNLKTDEGLDEVIEWIEQYVFLKGLA

SEQ ID NO: 147191 - DNA, 621 bp, Ureaplasma parvum
  CDS (1)..(621): transl_table=4
atgaaaagaccattaattattggtgtaggtggacctgtaggagcaggtaaaacaatgctaatcgaaagattaacaagatacctttcaacaaaaggttatagtatggcagcaattactaatgatatttacactaaagaagatgctagaatcttattaaatacttctgttttaccagctgatcgtattgctggtgttgaaacaggaggatgtccacatacagcgattcgtgaagatgcttcaatgaactttgctgcaattgaagaaatgtgtgataaacaccctgatttacaattattatttttagaatctggtggtgataatttatctgcaacatttagtccagatttagttgatttttcaatttatatcattgatgttgcacaaggagaaaaaattcctcgtaagggtggtcaagggatgattaaatcagatttatttattattaataaagttgatttagctccttatgttggtgctaatgtagaagtaatgaaagccgatacattaaaatcacgtggtaataaagatttctttgtaacgaatttaaaaacagatgaaggtttaaaatctgttgctgattgaattgaaaagcgtttgcaattagctttacttgaagaataa

SEQ ID NO: 147192 - protein, 206 aa, Ureaplasma parvum
MKRPLIIGVGGPVGAGKTMLIERLTRYLSTKGYSMAAITNDIYTKEDARILLNTSVLPADRIAGVETGGCPHTAIREDASMNFAAIEEMCDKHPDLQLLFLESGGDNLSATFSPDLVDFSIYIIDVAQGEKIPRKGGQGMIKSDLFIINKVDLAPYVGANVEVMKADTLKSRGNKDFFVTNLKTDEGLKSVADWIEKRLQLALLEE

SEQ ID NO: 147193 - DNA, 663 bp, Yersinia pestis
  CDS (1)..(663): transl_table=11
gtgaccgataaaagcacagcacgtaaaaaaataacccgtattggtattggtggtccggtaggttcggggaaaacggccattatcgaagtcataaccccgatcctgattaaacgaggcattaagccactgattatcaccaatgacatcgtgacgaccgaggatgccaaacaggtaaaacggacgctgaaaggtattctggacgaagagaagatccttggggtagaaactggcgcttgcccgcataccgcagtgcgcgaagacccgagcatgaacattgctgcggtagaagagatggaagagcgcttccctgaaagcgacctgattatgattgaaagcggcggggataacctgacactgacattcagtcctgcactggcagacttctacatctatgttattgatgtggctgaaggtgaaaaaattcctcgtaaaaatggccccggcttggttcaggcagacattttagtgatcaataaaattgacctggcaccttatgtcggtgccagcctggatgtcatggagagtgataccaaagtcgtgcgcggcaatcgcccttatattctgaccaattgcaaaactggccagggcattgaagaactggtcgatatgattatgcgagatttcctgtttacccatgtacagccggaaggagaacaggcatga

SEQ ID NO: 147194 - protein, 220 aa, Yersinia pestis
MTDKSTARKKITRIGIGGPVGSGKTAIIEVITPILIKRGIKPLIITNDIVTTEDAKQVKRTLKGILDEEKILGVETGACPHTAVREDPSMNIAAVEEMEERFPESDLIMIESGGDNLTLTFSPALADFYIYVIDVAEGEKIPRKNGPGLVQADILVINKIDLAPYVGASLDVMESDTKVVRGNRPYILTNCKTGQGIEELVDMIMRDFLFTHVQPEGEQA

SEQ ID NO: 147195 - DNA, 828 bp, Brassica napus
  CDS (1)..(828)
atggcgtcacacgaccatgatcatcaccatcacgaccacgagcaaggccacaagaaaccagaaggcggcggtggtgacacgtcatgggtaggaccggacgggagggtgtaccatagccacgatggactcgcaccgcactcacacgaacccatctactctcctggatacttcagccgccgagctcctcctcttaacgaccgtaacttctccgagagagctttcaccgtcggtattggcggtcctgttggcacagggaaaacagcattgatgcttgctctttgtagagtcttgagggacaagtacagtcttgccgctgtgacaaatgatatattcaccaaagaggacggtgagtttctggtgaagcatggggctcttccagaggaaaggatcagagccgttgaaaccggtggatgtccacacgctgccatccgtgaagacatcagtatcaacctaggtcctcttgaggagttatcaaacttgttcaaaactgatttgcttctttgcgaatctggtggagataacttagctgctaacttcagcagagagctagctgactatatcatctatatcatcgatgtgtctgctggtgataaaataccacgtaaaggcggtcctggcatcactcaagctgatcttctggtgataaacaagacagatctcgcagcagctgttggagctgacttatctgtcatggaaagggatgctctacgcatgcgtgatggaggtccattcgtctttgctcaggtgaagcatgggcttggggttatagaaatagtcaaccacgtcatgaactcatgggagcaagcaaccgggaacaagcgccattaa

SEQ ID NO: 147196 - protein, 275 aa, Brassica napus
MASHDHDHHHHDHEQGHKKPEGGGGDTSWVGPDGRVYHSHDGLAPHSHEPIYSPGYFSRRAPPLNDRNFSERAFTVGIGGPVGTGKTALMLALCRVLRDKYSLAAVTNDIFTKEDGEFLVKHGALPEERIRAVETGGCPHAAIREDISINLGPLEELSNLFKTDLLLCESGGDNLAANFSRELADYIIYIIDVSAGDKIPRKGGPGITQADLLVINKTDLAAAVGADLSVMERDALRMRDGGPFVFAQVKHGLGVIEIVNHVMNSWEQATGNKRH

SEQ ID NO: 147197 - DNA, 837 bp, Zea mays
  CDS (1)..(837)
atggcgtctcatgatcatcaccactcccactcccacgacgaccaccaccaccattcccacggggacggcggtggccatgcggctgggggatcgtgggtaggggaggacggacgcgtgtggcactcccacgacggcctcgcgccccactcccacgagcccatctactcccccggcgacttcaccaagcgcgcgccgccgctcgcctcgcgcgacttcgctgaccgcgccttcaccgtcggcattggcggccccgtaggcaccgggaaaactgccctcatgctagcattgtgcagatttctacgcgacaagtatagtcttgcagctgtcacaaatgatatattcacaaaagaagatggagaattcttaattaaacatggagcgctccctgaagaacgtatacgtgcagtggaaactggaggctgccctcatgcggctattcgcgaagacatcagcataaatcttggtcctctggaggagctatcgaacttgtacaaagctgatttgctactctgtgaatctggaggagataacttggcagctaacttcagcagagaattagcagactacataatctacattatcgatgtctctggtggggacaagataccaagaaaaggtggccctgggataacccaggccgatctgttggtaataaacaagacagacctagcacctgctgttggagctgatctgtctgtaatggagcgagacgcacttcgcatgcgcgaaggagggccctttgtgtttgcacaggtgaaacatggagtgggcgtggaggggatcgtgaaccatattctgcaggcgtgggagatcgcgactggtaataagcggcgataa

SEQ ID NO: 147198 - protein, 278 aa, Zea mays
MASHDHHHSHSHDDHHHHSHGDGGGHAAGGSWVGEDGRVWHSHDGLAPHSHEPIYSPGDFTKRAPPLASRDFADRAFTVGIGGPVGTGKTALMLALCRFLRDKYSLAAVTNDIFTKEDGEFLIKHGALPEERIRAVETGGCPHAAIREDISINLGPLEELSNLYKADLLLCESGGDNLAANFSRELADYIIYIIDVSGGDKIPRKGGPGITQADLLVINKTDLAPAVGADLSVMERDALRMREGGPFVFAQVKHGVGVEGIVNHILQAWEIATGNKRR

SEQ ID NO: 147199 - DNA, 615 bp, Zea mays
  CDS (1)..(615)
atgaacacacaacctttgcgtgtcggcatcggcggcccagtgggctccggcaagaccgccctgaccctggcgctgtgcctggcgctgcgcgaccgctacaacctggcggtggtcaccaacgatatctacacccgcgaagatgcggatttcctggtgcgcaaccaggcactggcgcccgagcgcatcatcggcgtggaaaccggcggctgcccgcacacggcgattcgtgaagatgcctcgatcaacctcgaagcggtggaccaactcaaccgccgcttccccggcctggacctgatcctggtggagtctggcggcgacaacttgtcggccacgttcagcccggaactgtcagacctgaccatctacgtgatcgacgtgtctgccggtgacaagctgccgcgcaagggcgggcccggtatttgcaaatccgacttgctggtcatcaacaagatcgacctggcgcccctggtcggcgcctcgctggaactgatgaacagcgacaccacacgcatgcgcaacggtaagccctttgtgttcagcaaccagaaaaccggcatcggcctggatgaaatcgtcgcctttatcgaacgtcagggtttgctgactgcagcctga

SEQ ID NO: 147200 - protein, 204 aa, Zea mays
MNTQPLRVGIGGPVGSGKTALTLALCLALRDRYNLAVVTNDIYTREDADFLVRNQALAPERIIGVETGGCPHTAIREDASINLEAVDQLNRRFPGLDLILVESGGDNLSATFSPELSDLTIYVIDVSAGDKLPRKGGPGICKSDLLVINKIDLAPLVGASLELMNSDTTRMRNGKPFVFSNQKTGIGLDEIVAFIERQGLLTAA

SEQ ID NO: 147201 - DNA, 20 bp, Artificial sequence
  primer
atggctcaaactcccctccg

SEQ ID NO: 147202 - DNA, 20 bp, Artificial sequence
  primer
ttaacttgccaaaaccttag

SEQ ID NO: 147203 - protein, 193 aa, Artificial sequence
  consensus sequence
  Variant (2)..(3): Xaa in position 2 to 3 is any amino acid
  Variant (8)..(8): Xaa in position 8 is any amino acid
  Variant (12)..(12): Xaa in position 12 is any amino acid
  Variant (14)..(16): Xaa in position 14 to 16 is any amino acid
  Variant (18)..(24): Xaa in position 18 to 24 is any amino acid
  Variant (25)..(32): Xaa in position 25 to 32 is any or no amino acid
  Variant (37)..(37): Xaa in position 37 is any amino acid
  Variant (39)..(39): Xaa in position 39 is any amino acid
  Variant (42)..(44): Xaa in position 42 to 44 is any amino acid
  Variant (45)..(49): Xaa in position 45 to 49 is any or no amino acid
  Variant (51)..(53): Xaa in position 51 to 53 is any amino acid
  Variant (54)..(55): Xaa in position 54 to 55 is any or no amino acid
  Variant (57)..(59): Xaa in position 57 to 59 is any amino acid
  Variant (62)..(63): Xaa in position 62 to 63 is any amino acid
  Variant (78)..(78): Xaa in position 78 is any amino acid
  Variant (80)..(80): Xaa in position 80 is any amino acid
  Variant (82)..(83): Xaa in position 82 to 83 is any amino acid
  Variant (85)..(99): Xaa in position 85 to 99 is any amino acid
  Variant (100)..(101): Xaa in position 100 to 101 is any or no amino acid
  Variant (109)..(109): Xaa in position 109 is any amino acid
  Variant (111)..(111): Xaa in position 111 is any amino acid
  Variant (114)..(115): Xaa in position 114 to 115 is any amino acid
  Variant (117)..(117): Xaa in position 117 is any amino acid
  Variant (119)..(121): Xaa in position 119 to 121 is any amino acid
  Variant (123)..(123): Xaa in position 123 is any amino acid
  Variant (127)..(128): Xaa in position 127 to 128 is any amino acid
  Variant (130)..(130): Xaa in position 130 is any amino acid
  Variant (140)..(143): Xaa in position 140 to 143 is any amino acid
  Variant (147)..(147): Xaa in position 147 is any amino acid
  Variant (151)..(151): Xaa in position 151 is any amino acid
  Variant (155)..(156): Xaa in position 155 to 156 is any amino acid
  Variant (160)..(160): Xaa in position 160 is any amino acid
  Variant (162)..(163): Xaa in position 162 to 163 is any amino acid
  Variant (165)..(166): Xaa in position 165 to 166 is any amino acid
  Variant (168)..(171): Xaa in position 168 to 171 is any amino acid
  Variant (173)..(175): Xaa in position 173 to 175 is any amino acid
  Variant (176)..(179): Xaa in position 176 to 179 is any or no amino acid
  Variant (181)..(190): Xaa in position 181 to 190 is any amino acid
  Variant (191)..(192): Xaa in position 191 to 192 is any or no amino acid
GXXGPVGXGKTXLXXXLXXXXXXXXXXXXXXXTNDIXTXEDXXXXXXXXLXXXXXLXXXRIXXVETGGCPHTAIREDXSXNXXAXXXXXXXXXXXXXXXXXESGGDNLXAXFSXXLXDXXXYXIDVXXGXKIPRKGGPGXXXXDLLXINKXDLAXXVGAXLXXMXXDXXXXRXXXXXXXPXXXXXXXXXXXXG

SEQ ID NO: 147204 - protein, 59 aa, Artificial sequence
  protein pattern
  Variant (7)..(7): Xaa in position 7 is Ala, Ser or Thr
  Variant (9)..(9): Xaa in position 9 is any amino acid
  Variant (12)..(12): Xaa in position 12 is any amino acid
  Variant (13)..(13): Xaa in position 13 is Asp, Glu or Gly
  Variant (15)..(15): Xaa in position 15 is any amino acid
  Variant (17)..(18): Xaa in position 17 to 18 is any amino acid
  Variant (19)..(19): Xaa in position 19 is Phe, Ile, Leu or Val
  Variant (20)..(20): Xaa in position 20 is any amino acid
  Variant (21)..(21): Xaa in position 21 is Ile, Leu or Val
  Variant (22)..(22): Xaa in position 22 is Ile or Val
  Variant (23)..(23): Xaa in position 23 is Asp or Ser
  Variant (24)..(24): Xaa in position 24 is Thr or Val
  Variant (25)..(25): Xaa in position 25 is Ala, Cys or Ser
  Variant (26)..(26): Xaa in position 26 is Ala, Glu, Gly, Gln or Ser
  Variant (28)..(28): Xaa in position 28 is Asp, Glu, Gly or Gln
  Variant (29)..(29): Xaa in position 29 is Asp, Glu or Lys
  Variant (30)..(30): Xaa in position 30 is Ile, Leu or Val
  Variant (32)..(32): Xaa in position 32 is Arg or Ser
  Variant (34)..(34): Xaa in position 34 is any amino acid
  Variant (36)..(36): Xaa in position 36 is Pro or Gln
  Variant (37)..(37): Xaa in position 37 is Ala or Gly
  Variant (38)..(38): Xaa in position 38 is Ile, Leu, Met or Val
  Variant (39)..(40): Xaa in position 39 to 40 is any amino acid
  Variant (41)..(41): Xaa in position 41 is Ala, Pro or Ser
  Variant (42)..(42): Xaa in position 42 is Asp or Val
  Variant (43)..(43): Xaa in position 43 is Phe, Ile, Leu, Met or Val
  Variant (44)..(44): Xaa in position 44 is Phe, Leu or Met
  Variant (45)..(45): Xaa in position 45 is Ile, Leu, Met or Val
  Variant (46)..(46): Xaa in position 46 is Ile or Val
  Variant (49)..(49): Xaa in position 49 is any amino acid
  Variant (50)..(50): Xaa in position 50 is Asp or Glu
  Variant (51)..(51): Xaa in position 51 is Ile or Leu
  Variant (53)..(54): Xaa in position 53 to 54 is any amino acid
  Variant (55)..(55): Xaa in position 55 is Ile or Val
  Variant (56)..(56): Xaa in position 56 is any amino acid
  Variant (57)..(57): Xaa in position 57 is Ala, Ser or Val
  Variant (58)..(58): Xaa in position 58 is Asp, Asn or Ser
  Variant (59)..(59): Xaa in position 59 is Leu, Pro or Val
SGGDNLXAXFSXXLXDXXXXXXXXXXGXXXPXKXGXXXXXXXXXXXNKXXXAXXXXXXX

SEQ ID NO: 147205 - protein, 25 aa, Artificial sequence
  protein pattern
  Variant (2)..(2): Xaa in position 2 is Ile or Val
  Variant (3)..(3): Xaa in position 3 is any amino acid
  Variant (4)..(4): Xaa in position 4 is Ala or Gly
  Variant (13)..(13): Xaa in position 13 is Ala or Thr
  Variant (15)..(15): Xaa in position 15 is Ile or Val
  Variant (19)..(19): Xaa in position 19 is any amino acid
  Variant (20)..(20): Xaa in position 20 is Ser or Thr
  Variant (21)..(21): Xaa in position 21 is any amino acid
  Variant (23)..(24): Xaa in position 23 to 24 is any amino acid
  Variant (25)..(25): Xaa in position 25 is Ala or Pro
RXXXVETGGCPHXAXREDXXXNXXX

SEQ ID NO: 147206 - protein, 17 aa, Artificial sequence
  protein pattern
  Variant (2)..(2): Xaa in position 2 is Ile or Val
  Variant (3)..(3): Xaa in position 3 is Ala, Cys or Gly
  Variant (8)..(8): Xaa in position 8 is Ala, Ser or Thr
  Variant (12)..(12): Xaa in position 12 is any amino acid
  Variant (14)..(16): Xaa in position 14 to 16 is any or no amino acid
GXXGPVGXGKTXLXXXL

SEQ ID NO: 147207 - protein, 13 aa, Artificial sequence
  protein pattern
  Variant (5)..(5): Xaa in position 5 is Phe or Tyr
  Variant (7)..(7): Xaa in position 7 is any amino acid
  Variant (10)..(10): Xaa in position 10 is Ala, Gly or Gln
  Variant (11)..(12): Xaa in position 11 to 12 is any amino acid
TNDIXTXEDXXXL

SEQ ID NO: 147208 - DNA, 747 bp, SYNECHOCYSTIS SP.
  CDS (1)..(747): transl_table=11
atgcccatggccatcgatattagcaacaaaacagttctggttactggtgccaatcgggggataggcaaagtactggtggagtcttttttggagcatggggccgcaaaagtgtacgccgccgtcagaaagttggaaagcgccgctttcttagtggacaaatatggcaataaaatagtccctattttgatcgatctagcagacccagaatccattgccgccgctgcccaaaccgccacagatgtggaaattgtggtcaataatgccggggtgcaaaaagttgcaaatcccctggccgaagaggcgatcgcctgcttgaaatttgaaatggagaccaatgtgtatgggttgatctccatggcccaagcctttgctccagtgctcaaagccaatggagggggagcttttgtgcaactcaactcagtagtttccctcaagtcattctgcaatgttgctacttattctgcttccaaagccgcagcctattccattacccaggcattgcgggaagttctggctggacaaggcactctggttcagagcgtccatcctggccccatcgccaccgaaatgacccatgcttctggccgggctgatattgccgaatcccccaccctagtggcggaagctattattgctgcactacaatctggcgagtttcacgtttttcccaacgacaccatggcgaaaggaatgggcgatgcctatcaaagctttggcaaaaatgtgattgaggtcagctttgattaa

SEQ ID NO: 147209 - protein, 248 aa, SYNECHOCYSTIS SP.
MPMAIDISNKTVLVTGANRGIGKVLVESFLEHGAAKVYAAVRKLESAAFLVDKYGNKIVPILIDLADPESIAAAAQTATDVEIVVNNAGVQKVANPLAEEAIACLKFEMETNVYGLISMAQAFAPVLKANGGGAFVQLNSVVSLKSFCNVATYSASKAAAYSITQALREVLAGQGTLVQSVHPGPIATEMTHASGRADIAESPTLVAEAIIAALQSGEFHVFPNDTMAKGMGDAYQSFGKNVIEVSFD

SEQ ID NO: 147210 - DNA, 780 bp, Caulobacter crescentus
  CDS (22)..(780): transl_table=11
atgagggaggagacggcgcccatggacatcaaggacagcatcgtcctggtcaccggcggcaatcgcggaattggcgaggcctttgtgcgcgccttcctcgcggccggcgcgacgaaggtctatgtcggcgcccgcgacccggccagcgccgcgcacctcgtcgccgaggccccggaccgggtgacggccctgcggcttgacgtcagcgacgcggagacaatttcagcggcggccgcgcagtgcccggacgtgacgatcctcgtcaataacgcgggcgctttcaccatgcagaccctgatgggcgcacaggacatgagcgccgcccgccaggagatggaggtcaactattttggcccgctggcgatgagccgagccttcgcgcctatcctggccagggcgccgcggagcgcgatcgtcaacgtgctgtcggccggcggtcttgtcgccgtgcccagcatgggcggctacagtccttcgaaattcgccgcgcgcgccatgaccacctgcctgcgcgccgaactggcgccccagaacacccacgtgctggcgctgaatgtcggctcggtcgacacccgtatggccagccatgtcgagggcttcaaggaggcgccggccacgatcgcccaggccggcctgaaggcgctgaagcgcgaggcggacgaggtcgacacagacttcatggccatcgacgtccgcgcccatctggcccgcgaccccaagggcctggaactggccatgcgacgcgcgctgaccagcgaccgcgtcagcaccggccgttag

SEQ ID NO: 147211 - protein, 252 aa, Caulobacter crescentus
MDIKDSIVLVTGGNRGIGEAFVRAFLAAGATKVYVGARDPASAAHLVAEAPDRVTALRLDVSDAETISAAAAQCPDVTILVNNAGAFTMQTLMGAQDMSAARQEMEVNYFGPLAMSRAFAPILARAPRSAIVNVLSAGGLVAVPSMGGYSPSKFAARAMTTCLRAELAPQNTHVLALNVGSVDTRMASHVEGFKEAPATIAQAGLKALKREADEVDTDFMAIDVRAHLARDPKGLELAMRRALTSDRVSTGR

SEQ ID NO: 147212 - DNA, 750 bp, Rhodopirellula baltica SH 1
  CDS (1)..(750): transl_table=11
atggcatttgaaatcaaagacaaagtggttctggtaacgggagccaaccgaggcattggcaaagcgatattggaagaggcgctccatcgaggcgcgtcgaaagtttacgcggcggtgcggaacatcgattccgcggaggaactcgtcaagaagcacggtgatcgagtcgtcccggtgcgagtcgatttggaagaccctgcgtctatctctgctgcggctgatgtcgcaaaggacgttgatgtggtggtcaacaacgcaggcgtgctgaaggtgaagaacgctctcgaaagtgatgcggttgatacactgaagtttgaaatggacgtcaacgtttacggactgatgcgaatcgcccaagcattcgcgcccgtattgaagtcgaatggaggtggcgcgttggttcaactcaacagtgtcgcctcggtgaagactttttctgagtttgcaacctactgcgcctcaaaatcggcgagctattcgatcactcaaggattgcgagactcgctgaaggaacaaggaacgctcgttgtcagtgtccatccaggaccgattgatactgacatgggacacaatgccgggtttgaagagggcgccgcgtcaccgactctggtggcaaccgccatctttgacgcgattgcgaacgatcattttcacgcttggcctgatccgatggccaaacagatcggcgaagcctatcagagcttcgctaaaaatgtcgtggaagccgacatgcaggaaagcgtgtcctaa

SEQ ID NO: 147213 - protein, 249 aa, Rhodopirellula baltica SH 1
MAFEIKDKVVLVTGANRGIGKAILEEALHRGASKVYAAVRNIDSAEELVKKHGDRVVPVRVDLEDPASISAAADVAKDVDVVVNNAGVLKVKNALESDAVDTLKFEMDVNVYGLMRIAQAFAPVLKSNGGGALVQLNSVASVKTFSEFATYCASKSASYSITQGLRDSLKEQGTLVVSVHPGPIDTDMGHNAGFEEGAASPTLVATAIFDAIANDHFHAWPDPMAKQIGEAYQSFAKNVVEADMQESVS

SEQ ID NO: 147214 - DNA, 738 bp, Bdellovibrio bacteriovorus HD100
  CDS (1)..(738): transl_table=11
atggatttcaaaggaaagaatgtttttatcaccggagccaaccgcgggatcggtgccgctttagtaggggcctgcctcaatcggggagtcgccaaggtttacgctgccgccagagataaaaacaaattaccgaaaaacgatgacccgcgtgtcgttcccgttcaactggatatcaccaaccgggagcaaataaacgaagccgtgtctgccgccgccgacgtgcagatcctgatcaacaatgccggcactcttcatgccggaagttttttggaagggaatagggacggcttcctccgtgacatgcaggtaaactatttctcgacgatggatgtgatgacggccttcgttcctgtgcttaagcgcaactgcgacggtcgtatcgtgaatatcgtgtcgatagccaagttcgtgaactttccctttatcgcgggatattcggcttccaaagcggcactttattcgatgactcaggcggctcgaatcgaacttagtccgtactgtattgccgttcatgctgtgaatccgggtgccatcgatacggacatgaataaaggtgccgagatggacatgacctctccggtcgaggttgcagacagtatcttggcccacgtcgaaaaagagattttggatattgttccggacaagataggtcaggcgatgttcaaagtgtggcaggagtctccagtggggttggagaacctggctaaagatatgtattttaaaaagccggtcccctga

SEQ ID NO: 147215 - protein, 245 aa, Bdellovibrio bacteriovorus HD100
MDFKGKNVFITGANRGIGAALVGACLNRGVAKVYAAARDKNKLPKNDDPRVVPVQLDITNREQINEAVSAAADVQILINNAGTLHAGSFLEGNRDGFLRDMQVNYFSTMDVMTAFVPVLKRNCDGRIVNIVSIAKFVNFPFIAGYSASKAALYSMTQAARIELSPYCIAVHAVNPGAIDTDMNKGAEMDMTSPVEVADSILAHVEKEILDIVPDKIGQAMFKVWQESPVGLENLAKDMYFKKPVP

SEQ ID NO: 147216 - DNA, 762 bp, Ostreococcus lucimarinus CCE9901
  CDS (1)..(762)
atgtcgtcctcgacgtcgtacgtcccgcggggcccgatcgagcgcgcgcgcgtcgccgtcacgggcgccaatcgcgggatcgggctcgagctctgtaaagcgctgctcgcgcgcgaaaacgtcgtcgaggcggggtgtcgacgcgcgagcgacgcactgcgcgcgctcgagcgctcgagcgatggacggttgatcgtcagcgagggcgtggacgtcggcgacgacgcggcgatcgacgcgtgggcgagggcgatgacgacgcggggacgacgactggacgtcgtcgtcaacaacgcgggcgtcgtcggaacgaacgggtacgacgcgtgggatttagagacgacgacggcggaggagatgatgtacgtgtttaaaattaattgcgtcgggcccacgctcgtggttcgagcgctgctgagacacggattgatcggcgcggacgcgaacgcgccgtcgctcgtgggcaacgtgacgtccaaagtcggaagcgtcgaggacaacggatcgggtcgaggatacagctatcgcgcgtcgaaatcggcgttgaacatcgtcacgaaatctatgtccatcgatttagcgagccgaggcgtgcatttcgcgcttttacaccccggctgggtgaaaacggacatgacggagagcagaggcctcatcgacgccgaagagtcggcgcgcggtctcatccgcgttttgcagggcgaattcggcgattgcgagcggttttggttcgattacaagggcgacaagattccttggtag

SEQ ID NO: 147217 - protein, 253 aa, Ostreococcus lucimarinus CCE9901
MSSSTSYVPRGPIERARVAVTGANRGIGLELCKALLARENVVEAGCRRASDALRALERSSDGRLIVSEGVDVGDDAAIDAWARAMTTRGRRLDVVVNNAGVVGTNGYDAWDLETTTAEEMMYVFKINCVGPTLVVRALLRHGLIGADANAPSLVGNVTSKVGSVEDNGSGRGYSYRASKSALNIVTKSMSIDLASRGVHFALLHPGWVKTDMTESRGLIDAEESARGLIRVLQGEFGDCERFWFDYKGDKIPW

SEQ ID NO: 147218 - DNA, 744 bp, Drosophila willistoni
  CDS (1)..(744)
atgaactcaattctgataaccggctgcaatagaggcttgggcctgggcctagttaaggctttgaacgctttgccacagccaccgcagcatttatttaccacatgtcgcaatcgggagcaggcaacggagctgcaagatctggcgaaaaaatattccaacatacatattctcgaaatagatctcaggaactttgatgcctatgacaaactgattgccgacattgaagcgattaccaaggacaaaggattaaatgtgctctttaataatgctggcgtgtcaccgaaatcggtacgcattggcgccaccaagcatcaggatttgttggataccctgcagacaaacactgtggtgcctattatgatggccaaagcctgtttgcccctgttgaagaaggcctcgacggccaacgaggatcagccaatgggcgtgggacgggcagccattatcaatatgagctccattctgggttccatacaatcgaacgtccagggtgccatgtatggctatcgtacttcgaaagcggcattgaatgctgcaaccaaatcgttaagcatcgatctgcaggcccagaaaataatgtgcattagcctgcatcctggctgggtgcgcaccgacatgggtggcagcagtgccccattggatgtgaccaccagcaccgagcagatggtgcagaccctcatccaaatgggcgagaagcacaatggtggattctatcaatatgatggcgaacaattgccgtggtga

SEQ ID NO: 147219 - protein, 247 aa, Drosophila willistoni
MNSILITGCNRGLGLGLVKALNALPQPPQHLFTTCRNREQATELQDLAKKYSNIHILEIDLRNFDAYDKLIADIEAITKDKGLNVLFNNAGVSPKSVRIGATKHQDLLDTLQTNTVVPIMMAKACLPLLKKASTANEDQPMGVGRAAIINMSSILGSIQSNVQGAMYGYRTSKAALNAATKSLSIDLQAQKIMCISLHPGWVRTDMGGSSAPLDVTTSTEQMVQTLIQMGEKHNGGFYQYDGEQLPW

SEQ ID NO: 147220 - DNA, 771 bp, Aspergillus fumigatus Af293
  CDS (1)..(771)
atgagccttcgaggaaaaattgccatcgtcaccggcgcctcgcgcggaatcggcgccgggattgccctcgatctcgcaaaacagggtgcaaacctcaccctgatctatacttccgcgagcagcgatcaagcaatcaaccagctctgcgaccaaatccactctctaaacaacggctccacagcgatcaaagttcaagccgacctccgacattcagacgccccggcccaaatcctcgctgccacgttcgacgcattccccaatgccaataacaagatcgacatcctagtcaacaacgctggcgtatccctatgcaagaacctcgctgacacaactgaccacgacatctcctccgtcttcgacatcaacgtctacggcttgataagcatgaccagagcggtgatcccgcatctccgcgccccaggccgaatcatcaacctcagctctgtagcggctcggcgcggatcgcccggtttctcggtgtactccgcctccaaggcagcggtggaggggttcacgaggtcgctggcgtgtgaattaggccctgtggggtgtacggttaatgcggttcagcctggggcggtggagtccgatatgttgcgccgggaggtgcctgagcagttaatcgcctatattcaggagaatacgccgttaggccatcggattgccctcccggaagacacagcgagggttgtgacgttcctagcgggggagggggcggggtgggtaacggggcagagtatttgcgttagtggggggttgcatatgaattag

SEQ ID NO: 147221 - protein, 256 aa, Aspergillus fumigatus Af293
MSLRGKIAIVTGASRGIGAGIALDLAKQGANLTLIYTSASSDQAINQLCDQIHSLNNGSTAIKVQADLRHSDAPAQILAATFDAFPNANNKIDILVNNAGVSLCKNLADTTDHDISSVFDINVYGLISMTRAVIPHLRAPGRIINLSSVAARRGSPGFSVYSASKAAVEGFTRSLACELGPVGCTVNAVQPGAVESDMLRREVPEQLIAYIQENTPLGHRIALPEDTARVVTFLAGEGAGWVTGQSICVSGGLHMN

SEQ ID NO: 147222 - DNA, 723 bp, Saccharopolyspora erythraea NRRL 2338
  CDS (1)..(723): transl_table=11
atggacatccagaactcgatcgcactggtcacaggagccaaccgcggcatcggacgcagcttcgtcaccgagttgcgacgcaggggagccgagaagatctacgcggcggcccgccgaccggacgagctcgacatccccggcgtagttccgctgcggttggacatcacagatgacgcttcggttgccgcggcggcagcctcggccgcggatgtgaccctgctcatcaacaacgctggtgtgtcgaccttcgcgcctctcgtcgagggagcgatgcccgatatccggctggagatggagacgaactacttcggaactctgcgcatggtgcgtgcgttcgcgccgaccctggccgccgccgggggcggggccgttctgaacgtgctgtccgtgatggcttggatggcttaccagcactccaacagctactcggcgtccaaggccgcggcgtgggcgctgaccaacgggatccggctcgaactcgccggccagggaacgcaggttaccgggctggcgatggccggcgtcgacaccgacatgatggccggcatcgaggccgacaagaccgacccggctgtgatcgcgcgagcagcgctggacggcgtccaggccggggcgctcgaagtcctggccgacgagcagacggctcggtggagggcacggctcggtgaggatccggcactgctctacccccagctggccgaacaccgccccgcccacacctag

SEQ ID NO: 147223 - protein, 240 aa, Saccharopolyspora erythraea NRRL 2338
MDIQNSIALVTGANRGIGRSFVTELRRRGAEKIYAAARRPDELDIPGVVPLRLDITDDASVAAAAASAADVTLLINNAGVSTFAPLVEGAMPDIRLEMETNYFGTLRMVRAFAPTLAAAGGGAVLNVLSVMAWMAYQHSNSYSASKAAAWALTNGIRLELAGQGTQVTGLAMAGVDTDMMAGIEADKTDPAVIARAALDGVQAGALEVLADEQTARWRARLGEDPALLYPQLAEHRPAHT

SEQ ID NO: 147224 - DNA, 714 bp, Clavibacter michiganensis subsp. michiganensis NCPPB 382
  CDS (1)..(714): transl_table=11
atggacatccaggatcaggtcgccctcgtcaccggcgccaaccgcggcatcggccgcaccttcgtcgaggagctgctcgcgcgcggcgcccgcaaggtctacgcgaccgcgcgccggcccgaggcgatcgacgtccccggcgtcgaggtgctgcgcctcgacctcgccgacccggcatccgtggacgccgccgccgcggccgcgcaggacgtgacgctcgtcgtcaacaacgcgggcatctcgacgggtgccgcgctcatcacgggcgacatggcggagatccgccgcgagatggacacccacttctacgggacgctcggcgtgatccgcgcgttcgcgcccgtgctcgccgccaacggcgggggcgggatcgtcaacatcctgtccgcgctgtcgtggttctcgacctcgggcgcgggcggctacgcggcggcgaaggcagccgagtggaacatgaccaacgcggtgcggctggagctcgccgagcaggggacgctcgtgcagggcgtgcacctcggggctgccgacaccgacatcatggccggctacgacgggccgatgatcgccccgcgcgacgtggcccgggcgtcgctcgacggcgtggccgcgggatccgtcgaggtcgtggtcgacgactggagccgcatggtgaaggactcgctgagcggcgacccggccccgttctacgagaagctgcgcgcgatcctcagatga

SEQ ID NO: 147225 - protein, 237 aa, Clavibacter michiganensis subsp. michiganensis NCPPB 382
MDIQDQVALVTGANRGIGRTFVEELLARGARKVYATARRPEAIDVPGVEVLRLDLADPASVDAAAAAAQDVTLVVNNAGISTGAALITGDMAEIRREMDTHFYGTLGVIRAFAPVLAANGGGGIVNILSALSWFSTSGAGGYAAAKAAEWNMTNAVRLELAEQGTLVQGVHLGAADTDIMAGYDGPMIAPRDVARASLDGVAAGSVEVVVDDWSRMVKDSLSGDPAPFYEKLRAILR

SEQ ID NO: 147226 - DNA, 720 bp, Janthinobacterium sp. Marseille
  CDS (1)..(720): transl_table=11
atgaatatgcaaggaaagtccgtcctggttacgggtgcaaatcgcggcataggtgccgcattggtgcgtgccttactcaagcaagatgtcagcaaggtgtatgcggcggcgcggaatccatctgcgctgcctgattttggcgatgccagggtggtgccgctacaaatcgatgtcaccaatccggatgaggtcaaagcggctgccggcaaaatcagttcgctggatgtcttgattaacaatgccggcatcatgactttcgcgcatgtcctctcggccacaccggaggagctggcggcggatatggatgtgaattactacggtaccctgcgcgtcacgcaagcattccttccgttgattgaaaagcagggtggcggagccatcgtgaatctcgtgagtattgccgggttggcttcggttgccgcgatttccggatattcagcttccaaggcggcgctgttttccgcgacgcaagcgatgcgcattgcattgaaagcaaagaacattgaagtcatcggcgtgttcccgggcccgattgataccgacctggcaaaagatttgccgctcgataaagcctctgccgacgaaacggtcgacaatattgttaatgcgattattgccggcagcgaagatatctatccggatccgacttctttccctttatccgatttgtggaaaaccgatcccaaagggctggagaaatttttcgccaatatggcgtga

SEQ ID NO: 147227 - protein, 239 aa, Janthinobacterium sp. Marseille
MNMQGKSVLVTGANRGIGAALVRALLKQDVSKVYAAARNPSALPDFGDARVVPLQIDVTNPDEVKAAAGKISSLDVLINNAGIMTFAHVLSATPEELAADMDVNYYGTLRVTQAFLPLIEKQGGGAIVNLVSIAGLASVAAISGYSASKAALFSATQAMRIALKAKNIEVIGVFPGPIDTDLAKDLPLDKASADETVDNIVNAIIAGSEDIYPDPTSFPLSDLWKTDPKGLEKFFANMA

SEQ ID NO: 147228 - DNA, 702 bp, Kineococcus radiotolerans SRS30216
  CDS (1)..(702): transl_table=11
atggacatcagccacgccaccgcgctcgtcacgggcgccaaccgcggcatcggccgcgccctcgccgtcgagctgctcgcccgcggcgcgaaggtctacgccgccgcccgccgccccgagaccgtcgacctgcccggggtcgaggtcctcgccctcgacgtcaccgaccccgccgccgtcgccgacgccgcccgcgcggccgccgacgtggacctcctcgtcaacaacgccgggatcaccaccggcgcgaccctcctcggcgacctcgacggggtgcgcgcggagctggacgtcaacttctgggggaccctctcgatggtccgggccttcgccccggtcctcgccgcgaacggcgggggcgccgtggtgaacatcgcctcggccctgtcctggttcgccttccccggcgccggcgcctacgccgtctccaaggcggcgaactggaacatgagcaacgcgctgcgcctggaactggccgggcagggcacgctcgtcacctccgtccacctcggcgcggccgacaccgacatgatgaaggactacgacggcccgaagatcgatccggccgaggtcgcccgccgcaccctcgacggggtggccgccggggacctcgaggtcgtcgccgacgagtggagcgccatgatcaaggcgagcctggcgaaggacccgcgggaattctacgggcagttcctcgggaactga

SEQ ID NO: 147229 - protein, 233 aa, Kineococcus radiotolerans SRS30216
MDISHATALVTGANRGIGRALAVELLARGAKVYAAARRPETVDLPGVEVLALDVTDPAAVADAARAAADVDLLVNNAGITTGATLLGDLDGVRAELDVNFWGTLSMVRAFAPVLAANGGGAVVNIASALSWFAFPGAGAYAVSKAANWNMSNALRLELAGQGTLVTSVHLGAADTDMMKDYDGPKIDPAEVARRTLDGVAAGDLEVVADEWSAMIKASLAKDPREFYGQFLGN

SEQ ID NO: 147230 - DNA, 729 bp, Kineococcus radiotolerans SRS30216
  CDS (1)..(729): transl_table=11
atgtcaggttttagcgtagtcgacgtgaacatcgacagcaccaccaccgcgctcgtcaccggcgccaaccgtggcatcggagcgcacttcgtcagtcagctcctggagcgcggtgcgacggtctacgccgctacccgccgccctgactccatcgacgtccccggggtccgcgtcctcgcgctggacatcaccgaccccgaggctgtcgcgtcggccgcgcggggtgccggggacgtgaacctcctgatcaacaacgcggggtcctcgacgtgggcggacctcctcggggacctggacgccgttcgcgccgagatggacgtgaacttctgggggaccctctcgatggtgcgtgcgttcgcgccgatcctcgccgcgaacggcggcggtgcggtggtcaacatcgcctcggcgctctcctggtccgtctaccccggcaacggcgcgtacgccgtgtccaaggcggcgaactggaacatgagcaacgccctccgcctggaactggcgagccaggggaccctcgtcacctcggtgcacctgggggccaccgacaccgacatgatcaagggctacgacctgccgaagaacgaccccgccgacgtcgcccgcacggtgctcgacggcgtcgcggcgtcgaagatcgaggtcgtcgccgacgaatcgaccgcgatggtcaaggccgcgctggccagggacccggcggagttctaccgccagttcctcacagcctga

SEQ ID NO: 147231 - protein, 242 aa, Kineococcus radiotolerans SRS30216
MSGFSVVDVNIDSTTTALVTGANRGIGAHFVSQLLERGATVYAATRRPDSIDVPGVRVLALDITDPEAVASAARGAGDVNLLINNAGSSTWADLLGDLDAVRAEMDVNFWGTLSMVRAFAPILAANGGGAVVNIASALSWSVYPGNGAYAVSKAANWNMSNALRLELASQGTLVTSVHLGATDTDMIKGYDLPKNDPADVARTVLDGVAASKIEVVADESTAMVKAALARDPAEFYRQFLTA

SEQ ID NO: 147232 - DNA, 726 bp, Kineococcus radiotolerans SRS30216
  CDS (1)..(726): transl_table=11
atgaaccaccccctcaccggccgcaccgtcctcgtcaccggcgccaacggcggactcggcgagcagttcgtgcaccaggccctgcagcgcggcgcggcgaaggtctacgccgctgcccgcaccccccggacctgggacgactcccgcatcaccccactgaggctcgacctgaccgaccccgaggccgccacccgcgccgcggcaggcgcccgcgacgtcgacgtgctcatcaacaacgccggcatcgcccccgccggcgactccatcagcggtcccgaggacgacctccgccagatcttcgagaccaacttcttcggcaccctgcgcgtggccaacgccttcgcccccgtcctcgccatccacggcgggggcagcctgctcaacgtcctctccgccgcggcctggatcaacatccccaccggctacgccgcctccaaggccgcgatgtggtccgcgaccaacgccctgcgagtgcagctgcgcgctcagggcacccaggtcatcggcctgctcgtcggcatggtcgacacccccatggccgcgagctgggacgtgcccaaggtcagccccgccagcgtcgtcgcccaggcctacgacgccatcgccgacggctccttcgaggtcctggccgacgacaccacgcgccacctgaagtcgcgactgaacacgccggctgaggagctctacccttggctcgaccagcagctcgcctccttcgttccctga

SEQ ID NO: 147233 - protein, 241 aa, Kineococcus radiotolerans SRS30216
MNHPLTGRTVLVTGANGGLGEQFVHQALQRGAAKVYAAARTPRTWDDSRITPLRLDLTDPEAATRAAAGARDVDVLINNAGIAPAGDSISGPEDDLRQIFETNFFGTLRVANAFAPVLAIHGGGSLLNVLSAAAWINIPTGYAASKAAMWSATNALRVQLRAQGTQVIGLLVGMVDTPMAASWDVPKVSPASVVAQAYDAIADGSFEVLADDTTRHLKSRLNTPAEELYPWLDQQLASFVP

SEQ ID NO: 147234 - DNA, 777 bp, Frankia sp. EAN1pec
  CDS (1)..(777): transl_table=11
atggtgaggcagacggatatcagaatgagcatctcaggcatccacgcgctcatggccgcgccctacggttcatccatgaacctctctggaagcatcgccctcgtcaccggcgcgaaccgcggcatcggccgccacttcgtcgaacagctccacgaccggggggcgtcgaaggtctacgccacggcgcgcaacccccggtcggccgacctccccggtgtcgagacgctgccgctcgacatcaccgacccggactcggtcgccgcggccgccgccgcggcatccgacgtcacgctgctggtcaacaacgccggcgtgtccaccgcgcagaatctcgtcaccggcgatctgacgaagatccgtcttgagatggacacccacttctacggaaccctcgcgatggtgcgcgcgttcgccccggtgctcgccggcaacggcggcggcgcggtcctcaacgtcctttccaggctgtcctggctgtcctatctcggggccaacgcctacagcgcggccaaggccgcggagtggagcctgaccaacggaatccgcctggagctgcgcgagcagggcaccctcgtcacgggtctggtcctgagcagcacagacaccgacatgatggccggctgggacatcccgaagaacgatccggccgatgtcgtacgtgcggcgttggacggcctggaggccgggcggttcgagatcctcgccgaccgggacagtgccgaggccaaggcggcgctcagcaccgacccgggtgtcctgtacgcccagaccggatga

SEQ ID NO: 147235 - protein, 258 aa, Frankia sp. EAN1pec
MVRQTDIRMSISGIHALMAAPYGSSMNLSGSIALVTGANRGIGRHFVEQLHDRGASKVYATARNPRSADLPGVETLPLDITDPDSVAAAAAAASDVTLLVNNAGVSTAQNLVTGDLTKIRLEMDTHFYGTLAMVRAFAPVLAGNGGGAVLNVLSRLSWLSYLGANAYSAAKAAEWSLTNGIRLELREQGTLVTGLVLSSTDTDMMAGWDIPKNDPADVVRAALDGLEAGRFEILADRDSAEAKAALSTDPGVLYAQTG

SEQ ID NO: 147236 - DNA, 831 bp, Frankia sp. EAN1pec
  CDS (1)..(831): transl_table=11
atggcgaggatcaagggatcagtcgtcctggtgaccggggcgaaccgggggctggggcgggcgtttgtcgaggagctgctggcccggggtgccgcgaaggtctacgcggccgcgcgcgacccgcagtcggtccagaccccgggcgccgtaccgatccggctggatgtcaacgacccggcccaggtggccgcggcggccgaggcgaccggcgacgtcgacatcctgatcaacaacgccggcagctcgaccggcgcgtcggtgctcaccggggacgtcgacgacatccgcctggagctggagacccacttcttcgggccgctgcgcacggtccgcgctttcgccccgcagctcgcgcggcaccgcgccggcgccggcgcggcgggtgagggcaacgcgaacgggaacggcgccggcggtgcgggagccacggggcgcgcgggcgcgtccggtggggcggtgctcaacgtcctgtcggccctgtcgtggttggcggcgccgacgagcggaggctactgcgcggcgaagagcgccgcctggtcgctgacgaactcccagcggctggagctggccgaccagggcgtcgccgtgacggcgctgcacgtcggctacatggacaccgacatgacccgcgccatccaggcgccgaagtcggacccggccaccatcgcggcgctcgcgctggacggcgtcgaggccggagccgccgaggtcctcgcggacgacacgagcattcacatccgggcggcgctgtcgggtgggctcaccgacctctatccggcgctcgccgagctctactcctcgcgcgagcccgtggccacgctgacgggctga

SEQ ID NO: 147237 - protein, 276 aa, Frankia sp. EAN1pec
MARIKGSVVLVTGANRGLGRAFVEELLARGAAKVYAAARDPQSVQTPGAVPIRLDVNDPAQVAAAAEATGDVDILINNAGSSTGASVLTGDVDDIRLELETHFFGPLRTVRAFAPQLARHRAGAGAAGEGNANGNGAGGAGATGRAGASGGAVLNVLSALSWLAAPTSGGYCAAKSAAWSLTNSQRLELADQGVAVTALHVGYMDTDMTRAIQAPKSDPATIAALALDGVEAGAAEVLADDTSIHIRAALSGGLTDLYPALAELYSSREPVATLTG

SEQ ID NO: 147238 - DNA, 744 bp, Acaryochloris marina MBIC11017
  CDS (1)..(744): transl_table=11
atgacgttcgatattgctaacaaaaccattttggttacaggtgctaatcgcggcattggcaaaaccttagtgacctctttgatagaacagggtgcagccaaagtctatgccgccgttcgcaatctggatagcgccactgccctggtggaaacctatggcgacaaaattgtcccaattcaaattaatttaggcgacgttgattccattactgccgctgctcaaattgcatccgatgtgcagatggtggtgaacaatgccggggctttccaaggcaccacacctttggctgaagatgcgatcgcatctttgcaactggaaatggatatcaacgtgtatggcctcattcgaatggcccaagcttttgccccgactctcaaagccaacggtggaggagcctttgtccaactcaattccgttgtctccattaagacctttgccaactttgccacctattctgcgtccaaagcagcttcatatgcgatgactcaagcgttgcgtgagctactcagcgagcaaggcacgagggtactcagcattcatccaggtccaattgcaacggatatgagcagtgcggctggcctgggagacattgccgaatctcccactatagtggccgatggcatcattgcagcgctcaaaaccggggaatttcatgtctttccagacacgatggctcaacaaattggtggcgcttatcaaagctttgcgacaaacgttgtcgaagtcacgatgaccgaagaataa

SEQ ID NO: 147239 - protein, 247 aa, Acaryochloris marina MBIC11017
MTFDIANKTILVTGANRGIGKTLVTSLIEQGAAKVYAAVRNLDSATALVETYGDKIVPIQINLGDVDSITAAAQIASDVQMVVNNAGAFQGTTPLAEDAIASLQLEMDINVYGLIRMAQAFAPTLKANGGGAFVQLNSVVSIKTFANFATYSASKAASYAMTQALRELLSEQGTRVLSIHPGPIATDMSSAAGLGDIAESPTIVADGIIAALKTGEFHVFPDTMAQQIGGAYQSFATNVVEVTMTEE

SEQ ID NO: 147240 - DNA, 705 bp, Delftia acidovorans SPH-1
  CDS (1)..(705): transl_table=11
atgaaaattgaaaacgctgttgttctcgtcaccggtgccaatcgcggcatcggcctggccttcgcacgcgagctgcttgcccgtggcgcccgcaaggtctacgccggcgcgcgcgaccccgccactgtcacccagcccggcgtgcatgccctgcagctggacgtgaaccgcccgcaggacgtggccgccgccgcggcgctggcgtcggacgtcacgctggtgatcaacaacgccggcattgcccagcccggcggcttcatggcgcccgacagcgaagaggtcgccaggcgcatcttcgagaccaacttcttcgccgtgctgcgcatgagccaggccttcgcgccggttctcaaggccaacggcggcggggccttgctcaatgtgctgtcggtggcctcctgggtgaacggcggcgagctggccgcctattcggccagcaagtcggccgcctggtcgctcaccaacgccctgcgcagcgagcttgcagggcagaagacacaggtgctgggcctgcacatggcctatgtcgacaccgacctcacgcgtgggcttgacgcgccgaagtccagccccgaggacatcgtcaggcgcgcgctggacggactggaggccgggctcgatgaagtgctggccgacgagctcacccagcaggtcaagcgcggcatgacggcggcccggccaagctatctgccgcagggcgcctga

SEQ ID NO: 147241 - protein, 234 aa, Delftia acidovorans SPH-1
MKIENAVVLVTGANRGIGLAFARELLARGARKVYAGARDPATVTQPGVHALQLDVNRPQDVAAAAALASDVTLVINNAGIAQPGGFMAPDSEEVARRIFETNFFAVLRMSQAFAPVLKANGGGALLNVLSVASWVNGGELAAYSASKSAAWSLTNALRSELAGQKTQVLGLHMAYVDTDLTRGLDAPKSSPEDIVRRALDGLEAGLDEVLADELTQQVKRGMTAARPSYLPQGA

SEQ ID NO: 147242 - DNA, 696 bp, Mycobacterium abscessus
  CDS (1)..(696): transl_table=11
atgatcaaagacacggtcgtactggttaccggcggccgccgcggattgggggccgccatcgtcgacgaggtgctcaaccgtggcgcgcgcaaggtgtacagcaccgcccgcgcaccattcgaggacccgcgcgcgcaggtagtgaccaaacaactcgaagtcacctcagcagaatcggtggacgccctggctcgcgacctgaccgacgtcgagatcgtggtcaacaacgccggggtgttgcatcccgatccgctgctcaccggcgacttcgaccgcatcgacgcgacgttccagaccaacgtctttggcccgttgcggatagcacgggcattcgctccgatcctcaaggccaacggcggcggcgcgatcgtgaacatccactcagtgctctcgtggctgggcggtgccggggcctacggcgcgtccaaggccgccatctggtcggtgtccaacacgctgcgcctagagctggaggcacagcacacccacgtgctgggcgtgcacgccgcattcatcgacaccgacatggtgtcggcattgcccgtccccaagacaccaccctctgcgatcgcggcgcgcatcatcgacgcgctggacaagggtgacaacgaggtgctcaccgatgacctcaccgtccagatcaagtcccagctggccggccctgtcgaaaagctcgcctaccgccccggccactga

SEQ ID NO: 147243 - protein, 231 aa, Mycobacterium abscessus
MIKDTVVLVTGGRRGLGAAIVDEVLNRGARKVYSTARAPFEDPRAQVVTKQLEVTSAESVDALARDLTDVEIVVNNAGVLHPDPLLTGDFDRIDATFQTNVFGPLRIARAFAPILKANGGGAIVNIHSVLSWLGGAGAYGASKAAIWSVSNTLRLELEAQHTHVLGVHAAFIDTDMVSALPVPKTPPSAIAARIIDALDKGDNEVLTDDLTVQIKSQLAGPVEKLAYRPGH

SEQ ID NO: 147244 - DNA, 714 bp, Clavibacter michiganensis subsp. sepedonicus
  CDS (1)..(714): transl_table=11
atggacatccaggatcaggtcgccctcgtcaccggcgccaaccgtggcatcggccgcacctttgtcgaggagctgctcgagcgcggcgcccgcaaggtctacgcgaccgcgcgccggcccgagaccatcgacatccccggcgtcgaggtgctgcgcctcgacctcaccgacccggcgtccgtcagcgccgccgcggaggccgcgcaggacgtgaccctgctcgtcaacaacgcgggcatctccacgggcgccacgctcatcacgggcgacatggccgagatccgccgtgagatggacacccacttctacggcacgctcggcgtgattcgcgccttcgcgcccgtgctcgccgcgaacggcggcggcgggatcgtcaacatcctgtcggcgctgtcgtggttctcgacccgcgcgaacggcggctacgcggcggcgaaggcggccgagtggaacatgacgaacgccgtgcggctggagctcgccgcgcagggcaccctcgtccagggcgtgcacctgggcgcggcggacaccgacatcatggccggctacgacgggccgatgatcgccccgcgcgacgtggcccgggcgtcgctcgacggtgtggtcgcgggatccgtcgaggtggtcgtcgacgactggagccgcatggtgaaggactcgctggtcggcgacccggcaccgttctacgagaagatgcgcgcgatcctcggctga

SEQ ID NO: 147245 - protein, 237 aa, Clavibacter michiganensis subsp. sepedonicus
MDIQDQVALVTGANRGIGRTFVEELLERGARKVYATARRPETIDIPGVEVLRLDLTDPASVSAAAEAAQDVTLLVNNAGISTGATLITGDMAEIRREMDTHFYGTLGVIRAFAPVLAANGGGGIVNILSALSWFSTRANGGYAAAKAAEWNMTNAVRLELAAQGTLVQGVHLGAADTDIMAGYDGPMIAPRDVARASLDGVVAGSVEVVVDDWSRMVKDSLVGDPAPFYEKMRAILG

SEQ ID NO: 147246 - DNA, 738 bp, Nostoc punctiforme PCC 73102
  CDS (1)..(738): transl_table=11
atgaactacgacatcaaagacaaaaccattttggttacgggcgcaaatcgcggcatcggcaaggcgatagttgagtcatttattgaacacggagccaccaaagtctatgcggctgttcgtcagctcaacagtgtctcctcattggttgagcaatacggcttacgggtagtaccaattccggttgatttaggcgatccccaatctattgttgctgctgctcaaactgccccagatgtgcaaatagttatcaataatgcaggagtctttcaagctggaactcccttagctgagaatgcgatcgccgctctcgaatttcagatgaagatcaatgtatatggattgctctacatggctcaggcgttttccccgatactcaaagccaatggaggtggtgtctttgtccaaatcaattctgttgcttcgctcaagggtttccctgactctgccacttactgtgcctcaaaagctgctgcctattcaatcacccaggcattacgagaactattgagtgagcaggacacgcttgtgctaagtgttcaccctggcccgattgccacggatatgggcgatgcggcaggaatgagccaggttgcacagccacctgcacttgtggcagacgggataataaaagctctcaaagctggggattttcacgtctttcctgactcgatagcgaaacaaatgggcgatgtttataaaagctttgcccaaaatgtcattgaggtgtcatcaagttag

SEQ ID NO: 147247 - protein, 245 aa, Nostoc punctiforme PCC 73102
MNYDIKDKTILVTGANRGIGKAIVESFIEHGATKVYAAVRQLNSVSSLVEQYGLRVVPIPVDLGDPQSIVAAAQTAPDVQIVINNAGVFQAGTPLAENAIAALEFQMKINVYGLLYMAQAFSPILKANGGGVFVQINSVASLKGFPDSATYCASKAAAYSITQALRELLSEQDTLVLSVHPGPIATDMGDAAGMSQVAQPPALVADGIIKALKAGDFHVFPDSIAKQMGDVYKSFAQNVIEVSSS

SEQ ID NO: 147248 - DNA, 732 bp, Geobacter bemidjiensis Bem
  CDS (1)..(732): transl_table=11
atggaaatcgcaggaaaaacagttttggtgaccggcgcgaacggcgggatcggtcgtgctctggtcgagggactgctcaaaaaaggggccgccaaggtttacgcagcggcaaggaccatcgaagccgtggcggaactttccaaaatcgacaagcgagtggcggcggtaaggcttgaggtcacccatgccaccagcgtggctgcagcagcggagcactgcccggaggtcgacctcgtcatcaacaacgcagggatcaaccgctgcgcgggttttatggctgaaaacgccatggagaacgcgcgccaggaaatcaaggtcaactacctggggacgctggccatgtgccgcgccttcgccccggccctcatcgagcgcaaaggatgcatcgtcaacgtttgttccgtcatcgggctggtcaacctcccggttaacggcacctacagcgcctcgaaggctgcgggacactctctgttgcaggggatccgggccgaattggcgccgcacggcgtgaaggtgctggggatctatcccggcccggtcgacaccaggatgacctcaggccaggagatgcccaaggcgactaccgaggaagtggtgcaagcgatactggaagggatcgaaaaagagcaggaggagatttatcccgacgcgatgtcgaaagaggtttccgcagcgcttctgcaggcgcccaaagaggtcgagcggcagttctccgccatgatccccgcctag

SEQ ID NO: 147249 - protein, 243 aa, Geobacter bemidjiensis Bem
MEIAGKTVLVTGANGGIGRALVEGLLKKGAAKVYAAARTIEAVAELSKIDKRVAAVRLEVTHATSVAAAAEHCPEVDLVINNAGINRCAGFMAENAMENARQEIKVNYLGTLAMCRAFAPALIERKGCIVNVCSVIGLVNLPVNGTYSASKAAGHSLLQGIRAELAPHGVKVLGIYPGPVDTRMTSGQEMPKATTEEVVQAILEGIEKEQEEIYPDAMSKEVSAALLQAPKEVERQFSAMIPA

SEQ ID NO: 147250 - DNA, 687 bp, Streptomyces pristinaespiralis ATCC 25486
  CDS (1)..(687): transl_table=11
atggaactcaagaacacggtcgccgtggtcaccggagcgaaccgggggctgggacggcacctggccacccagctcctggagcgcggagtcaaggtctacgcggcggcgcgccgccccgagagcgtggacctggccggcgtcaccccgcttcgcctggatgtgaccgacgaggagtcggtccgggccgcagcgcgcatcgcctccgacgcgacgctcctggtgaacaacgcggggatctccacgggcacccggttgctcgccggcgacctggacgccgtgcgcctggagatggagaccaacttcttcggaccgctcgccgtgacccggaccttcgccccggtcatcgagggcaacggcggcggcgccgtactcaacgtcctgtccgtgctgtcctggctgcaccccgccggcctcggggcctacgcggcggccaaggccgccgcctgggcgctgaccgacgccgcccgcgaggaactggccccccgcggcatcgccgtctccgcgctgcacgtcggatacatggacaccgacatggcccgtgtcgttccggccgatcagaaggccgaccccgcagaggtcgccgcccaggcccttgacggcatcgagcagggcctgcccgagatcctcgccgacgacgtcacccggctcgtcaagcagggcctggccctggcgcagagtgcggcgtga

SEQ ID NO: 147251 - protein, 228 aa, Streptomyces pristinaespiralis ATCC 25486
MELKNTVAVVTGANRGLGRHLATQLLERGVKVYAAARRPESVDLAGVTPLRLDVTDEESVRAAARIASDATLLVNNAGISTGTRLLAGDLDAVRLEMETNFFGPLAVTRTFAPVIEGNGGGAVLNVLSVLSWLHPAGLGAYAAAKAAAWALTDAAREELAPRGIAVSALHVGYMDTDMARVVPADQKADPAEVAAQALDGIEQGLPEILADDVTRLVKQGLALAQSAA

SEQ ID NO: 147252 - DNA, 705 bp, Ralstonia solanacearum MolK2
  CDS (1)..(705): transl_table=11
atggacatccgaggcaagaccatcctggtgaccggtgccaaccgcggcctgggccggcagttcacgcaggcgttgctggcggccggcgcggccaaggtgtacgcgggcgcccgcgacccgggcaccgtcacccagccgggcgtgcaccccgtgcgcctggatgtgaccgaccccaagagcatcgaggcggcggccgcgcaactgaacgacgtcgatgtgctgatcaacaacgccggcatctcgcagccggcctccctgctcaagccggccgataccggtgcggtgcaggccatcttcgatgtcaacgtgtgggggctgctcgccgtcacgcaggcgtttgcgcccgtgctcggacgcaacggcggcggtgccgtggtgaacgtgctgtcggtgctgagctggatggcgctgccgaccagcggcgcctacagcgcatccaagtcggccgcctgggcgctgaccaacggcctgcggcacgaactgcgcggccagggcacgcgggtggtcggcgtgcatccggccttcatcgataccgacatgacggccggcatcgacgcgcccaagtcatcgcccgagcaagtggtgaacgaagtgctgcgcgcgctggcggaggatcgggaggaagtgctggtggacgagatggggcgtggcgtcaagcgctcgctgtcgagcgatgcgccggtttatctggcggcgcgggtttga

SEQ ID NO: 147253 - protein, 234 aa, Ralstonia solanacearum MolK2
MDIRGKTILVTGANRGLGRQFTQALLAAGAAKVYAGARDPGTVTQPGVHPVRLDVTDPKSIEAAAAQLNDVDVLINNAGISQPASLLKPADTGAVQAIFDVNVWGLLAVTQAFAPVLGRNGGGAVVNVLSVLSWMALPTSGAYSASKSAAWALTNGLRHELRGQGTRVVGVHPAFIDTDMTAGIDAPKSSPEQVVNEVLRALAEDREEVLVDEMGRGVKRSLSSDAPVYLAARV

SEQ ID NO: 147254 - DNA, 705 bp, Ralstonia solanacearum IPO1609
  CDS (1)..(705): transl_table=11
atggacatccgaggcaagaccatcctggtgaccggcgccaaccgtggcctgggccggcagttcacgcaggcgttgttggcggcgggcgcggccaaggtgtacgcgggcgcccgcgacccgggcaccgtcacccagccgggcgtgcaccccgtgcgcctggatgtgaccgaccccaagagcatcgaggcggcggccgcgcaactgcacgacgtcgatgtgctgatcaacaacgccggcatctcgcagccggcctccctgctcgagccggccgataccggtgcggtgcaggccatcttcgatgtcaacgtgtgggggctgctcgccgtcacgcaggcgtttgcgcccgtgctcggacgcaacggcggcggtgccgtggtgaacgtgctgtcggtgctgagctggatggcgctgccgaccagcggcgcctacagcgcatccaagtcggccgcctgggcgctgaccaacggcctgcggcacgaactgcgcggccagggcacgcgggtggtcggcgtgcatccggccttcatcgataccgacatgacggccggcatcgacgcgcccaagtcatcgcccgagcatgtagtgaacgaagtgctgcgcgcgctggcggaggatcgggaggaagtgctggtggacgagatggggcgtggcgtcaagcgctcgctgtcgagcgatgcgccggcttatctggcggcgcgggtttga

SEQ ID NO: 147255 - protein, 234 aa, Ralstonia solanacearum IPO1609
MDIRGKTILVTGANRGLGRQFTQALLAAGAAKVYAGARDPGTVTQPGVHPVRLDVTDPKSIEAAAAQLHDVDVLINNAGISQPASLLEPADTGAVQAIFDVNVWGLLAVTQAFAPVLGRNGGGAVVNVLSVLSWMALPTSGAYSASKSAAWALTNGLRHELRGQGTRVVGVHPAFIDTDMTAGIDAPKSSPEHVVNEVLRALAEDREEVLVDEMGRGVKRSLSSDAPAYLAARV

SEQ ID NO: 147256 - DNA, 714 bp, Desulfovibrio desulfuricans subsp. desulfuricans str. ATCC 27774
  CDS (1)..(714): transl_table=11
atgaatatcaatgcacagaccattcttgtcacaggcgccaacggcggcattggcaaggcgctgatcaacgcctttctggcagccggagccaaaaagatttatgcctgcgcccgcgatacggcatcactggagcacttgcggaataacgaaaaaatcctacctgtccagctcgatatctccaagcccgccgccattgaaaatgtcgttgccgcatgcggcgacactactatcctggtgaacaatgcgggcatgggcggcagcggcctgctcggcgccccccaggcggcgcgggccgaaatggaggtcaactacttcggtacactggccatgtgctctgctttcgcgccggttctgggcaacaatggcggcggttgcatagtaaacatcatttctgtcatcggcctggtaaatatgccctccatcggcacctactgcgcctcaaaggcagccctgcattcacttacccaggggctgcgcggtgtactggccggacaaaaaacgactgtcatcggcgtatacccaggtcctgtcgatacacgcatgactgacggtcttgaaatgcccaaggcccgccctgaagctgtcgcgctggaaattctcgaaggcatgaaaaacggcaccgaggacatctaccctgatgcgtttgccaggagcattcagaaaggcctcgccgctgatcccaaaaaagtggagcgagaactgtcggaatactag

SEQ ID NO: 147257 - protein, 237 aa, Desulfovibrio desulfuricans subsp. desulfuricans str. ATCC 27774
MNINAQTILVTGANGGIGKALINAFLAAGAKKIYACARDTASLEHLRNNEKILPVQLDISKPAAIENVVAACGDTTILVNNAGMGGSGLLGAPQAARAEMEVNYFGTLAMCSAFAPVLGNNGGGCIVNIISVIGLVNMPSIGTYCASKAALHSLTQGLRGVLAGQKTTVIGVYPGPVDTRMTDGLEMPKARPEAVALEILEGMKNGTEDIYPDAFARSIQKGLAADPKKVERELSEY

SEQ ID NO: 147258 - DNA, 738 bp, Geobacter sp. FRC-32
  CDS (1)..(738): transl_table=11
atgaatatcaaaggtagtgtggtaatggtaaccggcgccaatggcggcatcggtcaggcgttggtcagagcattcctggagcgggatgcggggaaagtgtatgctgcggcacgggacgacacggccctcgcccccctggtgcagttgggcgaaggccgagtcgtgccggtccaactggaccttttggacggagccgggatcgcacgggttgcaggagagtgcgcagacgtgcagattctggtcaacaatgccggcatcaaccggggcttgtggttcctggcgccggcaggtgcggacgcggcacgggaagaaatggaggtgaatttcttcggcaccctcgccatgtgccgggcctttgcccccatgatggcccatgtcggctcaggcgtcatcgccaatgtttgttccatcttgggcctggtcaatatgcctgccaacggcacctactgcgcgtccaaggccgccggtcattcgctgctgcaggggctgcgcggcgaattggcgccgaaaaacatacgcgtcgtcggcatctatcccggcccagtggataccaggctgacggcagggttggaaatccccaaggcttcaccggaaggggtggcgcaagcaatcgtcgaaggtcttgccgccggtgtcgaagacattttccccgaagagatgtccaggcaggcccatgccatgatgctgcaggacccaaagctggccgaaagggaattcgggaagatgatccccgcctga

SEQ ID NO: 147259 - protein, 245 aa, Geobacter sp. FRC-32
MNIKGSVVMVTGANGGIGQALVRAFLERDAGKVYAAARDDTALAPLVQLGEGRVVPVQLDLLDGAGIARVAGECADVQILVNNAGINRGLWFLAPAGADAAREEMEVNFFGTLAMCRAFAPMMAHVGSGVIANVCSILGLVNMPANGTYCASKAAGHSLLQGLRGELAPKNIRVVGIYPGPVDTRLTAGLEIPKASPEGVAQAIVEGLAAGVEDIFPEEMSRQAHAMMLQDPKLAEREFGKMIPA

SEQ ID NO: 147260 - DNA, 708 bp, Nocardia farcinica IFM 10152
  CDS (1)..(708): transl_table=11
atggagatgaacgcaatcgaagggtccgtcgcgctggtgacgggtgggcagcgcggtctgggccgcgccttcgtcgaggaactgctggcccggggcgcggggaaggtctacgcgaccgcgcgggaaccgaaaccgagcgacgatccgcgggtcgtcccgctgccgctggaggtcaccgacccggattcggtggcggagctcgcggcgcgggccggtgatgcgcggatcgtggtgaacaacgccgggatcctgcggcccgcgccgctgctcaccgccgacatggccgatgtccatgccacgttcgacgccaacgtgttcgggccgctgcgggtcgcgcaggcgttcgcgccgatcctgaccgccaacggcggtggtgcgctgatcgacatccactcggtgctgtcgtggagtgcgggcgccgcggcgtacggcgcctcgaaggcggcgctgtggtcgctgaccaattcgctgcggctggagctggccgggcgcggcgtgcgggtggtcggggtgcacctcgggttcgccgacaccgagatggtggccggcttccccgggccgaagatcagcccggccgacgtggccgcggcggtgttcgacggactcgaacgcggcgaggacgaggtgctcgtcgacgacgtcacccgtcaggtgaaggccgcgctgtccggtccggtcgcgggcctgtcgctgccgctcgcccgctga

SEQ ID NO: 147261 - protein, 235 aa, Nocardia farcinica IFM 10152
MEMNAIEGSVALVTGGQRGLGRAFVEELLARGAGKVYATAREPKPSDDPRVVPLPLEVTDPDSVAELAARAGDARIVVNNAGILRPAPLLTADMADVHATFDANVFGPLRVAQAFAPILTANGGGALIDIHSVLSWSAGAAAYGASKAALWSLTNSLRLELAGRGVRVVGVHLGFADTEMVAGFPGPKISPADVAAAVFDGLERGEDEVLVDDVTRQVKAALSGPVAGLSLPLAR

SEQ ID NO: 147262 - DNA, 798 bp, Pelobacter carbinolicus DSM 2380
  CDS (1)..(798): transl_table=11
atggccggcttgcctaatcacactcgaccggataccaaccaaggagaaaatgcagtgggttacgatattaacaacaagacggtcttcatcaccggagccaatcggggtatcggcaaagccatcgccgaggaattcataaaacagggagttgccaaggtctatgctgccgtgcgcaacgtggagagtgttgctccactggttgctttatacggagacaaggtcgctcctatcaaggttgatgtggcggatgaagagacgatcatcgaggcggctaatgccgcgcaagacgtggatgtcgtgatcaacaatgccggtgttttaagcatgtcctcggttttcgatgagggtgccatggaggcattggctttcgagttggatatcaacctttttggcctgatgcgcgtcgcgcgggcttttgccccggtactgaaagccaacggcggtggcgcgtttgtacaactcaattcggtggggtctttgaaaacagtgccgaatatcgctacctactgtacctccaaggccgcttgctatgcgattacccaagcattgagagaggccctcgtcgcgcagggaacccatgtggtcagcgttcatgcgggaccgatcaatacggagatgctcaatgataccggttacggagagatcgcggagccgccgtcgcttgttgccaatggcatcatcgaggcattaaagaaaggtgaatttcatgttttccccgattcattggccaggcaggtcggttccgtttatgaaggttttgcggagaatgtaataatggcttcggtgactgaagactga

SEQ ID NO: 147263 - protein, 265 aa, Pelobacter carbinolicus DSM 2380
MAGLPNHTRPDTNQGENAVGYDINNKTVFITGANRGIGKAIAEEFIKQGVAKVYAAVRNVESVAPLVALYGDKVAPIKVDVADEETIIEAANAAQDVDVVINNAGVLSMSSVFDEGAMEALAFELDINLFGLMRVARAFAPVLKANGGGAFVQLNSVGSLKTVPNIATYCTSKAACYAITQALREALVAQGTHVVSVHAGPINTEMLNDTGYGEIAEPPSLVANGIIEALKKGEFHVFPDSLARQVGSVYEGFAENVIMASVTED

SEQ ID NO: 147264 - DNA, 735 bp, Geobacter metallireducens GS-15
  CDS (1)..(735): transl_table=11
atggatctcaaaggtaaaaccgttttggttaccggtgccaacggcggcatcggcggcgccctggtcaggacattgctggacaagggagttgccaaggtctacgccgctgcccggagtatcgacgccgtggctgatttggcccacggtggtgacgacagggtcgtcgcgctccgccttgacgtgacccaagccgccagcgtggctggcacggcggagcagtgccgggacgtggacctgatcatcaacaacgccggcgtcaaccgctgcacggggttcatgagccccaccacccttgaggacgcccggctggagatggaggtcaactacttcggcaccttggccatgtgccgggccttcgcgccggtgctggcttctcgcggcggcggggccatcgtgaacgtctgttccatcatcggcttggtcaacctccccgtcaacgggacctattgcgcatccaaggccgcggggcactccctgttgcaggggctccgtgccgaactggcacccggggcaatccgggtgatcggcgtctatcccggcccggtggacacgaagatgacggcggggcaggagatgcccaaagcgacaacggagcaggttgccgccgccattctggcaggggtggagaagggggacgagtacatcttccccgatcccatgtcgcagcatgtccatgccatgcttgaaaaggacccccgtcaggtggagagggatttcggggccatggccggctga

SEQ ID NO: 147265 - protein, 244 aa, Geobacter metallireducens GS-15
MDLKGKTVLVTGANGGIGGALVRTLLDKGVAKVYAAARSIDAVADLAHGGDDRVVALRLDVTQAASVAGTAEQCRDVDLIINNAGVNRCTGFMSPTTLEDARLEMEVNYFGTLAMCRAFAPVLASRGGGAIVNVCSIIGLVNLPVNGTYCASKAAGHSLLQGLRAELAPGAIRVIGVYPGPVDTKMTAGQEMPKATTEQVAAAILAGVEKGDEYIFPDPMSQHVHAMLEKDPRQVERDFGAMAG

SEQ ID NO: 147266 - DNA, 765 bp, Nitrosospira multiformis ATCC 25196
  CDS (1)..(765): transl_table=11
atgaaaatgacatacgatatcagcggaaagaccgctcttgtgacaggagcaaatcgtggaataggcaaggcgattgtcgatgcgctactgcatcatggcgcgatgaaagtctacgctgcggtgcgccaccctgattctgctaatccgctggtagagcgctttggcgatagactgattccagtccacctggatttggccgtgccggaaagcattgcagcattggctgacagagccccggatgttcaggtggtggtcaacaacgcggcggttttcaagacctccaccccgctggatgccggcgcgatagatgcgcttgagatggcaatgaagatcaatgtgtatggactcattcgcatggctcaaaccttcgctcccgttctcgcaaaaaacggaggaggcgcattcatccagctcaattcagttgcatccttgaagtgcgcttcaaattttgcgacgcattcggcatccaaggctgctgcctactccattacccaggcattgcgcgagctgctggcccggcagagtacggcggtactgagcgtacatcccggtctgatcgcaaccgacatgagcagcactgccggattggcaggtactgctgcgcctccctctgtggttgcagaaggtataatcgctgcgctgcgatcaggggattttcacctttttcccgatcctatggctcaacgtatcggaaatgcataccggagtttttctgaaaatgtcattgaagcggacatcgaagaatacagggcggaaaagcaataa

SEQ ID NO: 147267 - protein, 254 aa, Nitrosospira multiformis ATCC 25196
MKMTYDISGKTALVTGANRGIGKAIVDALLHHGAMKVYAAVRHPDSANPLVERFGDRLIPVHLDLAVPESIAALADRAPDVQVVVNNAAVFKTSTPLDAGAIDALEMAMKINVYGLIRMAQTFAPVLAKNGGGAFIQLNSVASLKCASNFATHSASKAAAYSITQALRELLARQSTAVLSVHPGLIATDMSSTAGLAGTAAPPSVVAEGIIAALRSGDFHLFPDPMAQRIGNAYRSFSENVIEADIEEYRAEKQ

SEQ ID NO: 147268 - DNA, 705 bp, Rhodoferax ferrireducens T118
  CDS (1)..(705): transl_table=11
atgaaaatcgaaaatgctgtcgtcctcgtcaccggtgccaaccgtggaatcggtttggcctttgcgcgtgaattgctcgcccgtggcgcccgcaaagtctacgccacagcccgagatcctgcaacggtgaccttggccggtgtgcaggctttgcagctggatgtgaccaatgcctggcaggttgccgccgctgcacaccaggcggcggacgtaacgctggtgatcaacaacgccggcattgcccaacccggagggtttctcgcgcaggacagcgaagcggttgcgcgtcgcatcttcgagaccaacttctttggcatgctgaacatgagcaaggccttcgcgccggtgctcaaggccaatggcggcggcgcgctgctcaatgtgttgtcggtcgcgtcgtgggtgaacggtggcgagttggcagcctattcggccagcaagtcagccgcgtggtcgctgaccaacgctctgcgccacgagctggcgggtcagaagacccaggtactgggattgcacatggcctatgtggacactgacctcacacgcggcttcgaagtaccgaagagcagcgctgaagaaatcgtccaacgcgcactcgacgggctggagacaggcgcagaagaagtgctggccgatgcactgacacaacaggtccggcaagggctaacggcgccgcgcccgggctacctgccccaggcgaactga

SEQ ID NO: 147269 - protein, 234 aa, Rhodoferax ferrireducens T118
MKIENAVVLVTGANRGIGLAFARELLARGARKVYATARDPATVTLAGVQALQLDVTNAWQVAAAAHQAADVTLVINNAGIAQPGGFLAQDSEAVARRIFETNFFGMLNMSKAFAPVLKANGGGALLNVLSVASWVNGGELAAYSASKSAAWSLTNALRHELAGQKTQVLGLHMAYVDTDLTRGFEVPKSSAEEIVQRALDGLETGAEEVLADALTQQVRQGLTAPRPGYLPQAN

SEQ ID NO: 147270 - DNA, 732 bp, Saccharophagus degradans 2-40
  CDS (1)..(732): transl_table=11
atgagtattgatattaacggcaaaattgcacttgttaccggcgctaaccgaggcattggtaaagccattgtcgattcactaatagagcatggcgccagcaaggtttatttggccgtgcgcaaccccgagtctaccgttgaactggcaaaacaatacggcgataaagtggtaacactgcaggcaaacgttggcgacgacgcatcgattagcgcattggctcaagcggcgaaagatgtaaatattgtgataaacaacgccggcgtagtgcagccagccgacttacttagcgcagacgcctttgcggcacttaagcacgagctaaacgttaacacctacggtttattgcgcgttgcgcaggcttttgcaccggtattacaacaaaacgggggcggcgcatttgtgcagcttaattcggttgcctctattaaaaacttcacgccctttaccacctacagcgcctctaaagccgcaacttactccattacacaaggccttaaagatgtaatggctccactgggcattgctgtactaagcgtacaccctggccccattgctaccgacatgggtgatcaagtgggcatgacagaagttgcagaacctgcgaatgtggtggcagaaggtatagttagcgcgcttaaagctggcgactttcatttgtttccagacaccatggccaaacaatttggcgatgcctatgatagttatgcgcaggcaattattaacggccagtaa

SEQ ID NO: 147271 - protein, 243 aa, Saccharophagus degradans 2-40
MSIDINGKIALVTGANRGIGKAIVDSLIEHGASKVYLAVRNPESTVELAKQYGDKVVTLQANVGDDASISALAQAAKDVNIVINNAGVVQPADLLSADAFAALKHELNVNTYGLLRVAQAFAPVLQQNGGGAFVQLNSVASIKNFTPFTTYSASKAATYSITQGLKDVMAPLGIAVLSVHPGPIATDMGDQVGMTEVAEPANVVAEGIVSALKAGDFHLFPDTMAKQFGDAYDSYAQAIINGQ

SEQ ID NO: 147272 - DNA, 705 bp, Polaromonas sp. JS666
  CDS (1)..(705): transl_table=11
atgaaaatcgagaattctgttgtcctcgtcaccggtgccaatcgcggcatcggccaggcgttctctcgcgagttgctcgcccgcggtgcccgcaaggtctacgctggcgcgcgcgatcctgcgaccgtcacccaatccggtgttcaggccctgcgactcgacgtcaccaagccggcagacgtggccgccgccgcagcgctggcgtcggatgtcacgctgatcatcaacaacgccggcattgcccagcctggaggctttctcgcagcggacagcgaagacgtcgcacggcgcatcttcgagaccaactttttcgccatgttgcgcatgagcaaggcctttgcgcccattctcaaggccaacggcggtggcgcgttgctcaatgtgttgtcggtcgcttcatgggtgaacggcggcgagctggccgcctattcggccagcaagtccgcagcttggtctctcaccaatgccctgcgcaacgaactggcgacgcagaagacgcaggtgctggcactgcacatggcctacgtcgataccgatctcacgcacgggttcgatgtcccgaagtccagccctgaggagatcgtcaagcgcgcgctcgacggactcgaatcgggccttgatgaagtgctggccgatgagctcaccctgcaagtcaagcgcgggatgacggtggccaggcccagctacctaccgcaggcctcctga

SEQ ID NO: 147273 - protein, 234 aa, Polaromonas sp. JS666
MKIENSVVLVTGANRGIGQAFSRELLARGARKVYAGARDPATVTQSGVQALRLDVTKPADVAAAAALASDVTLIINNAGIAQPGGFLAADSEDVARRIFETNFFAMLRMSKAFAPILKANGGGALLNVLSVASWVNGGELAAYSASKSAAWSLTNALRNELATQKTQVLALHMAYVDTDLTHGFDVPKSSPEEIVKRALDGLESGLDEVLADELTLQVKRGMTVARPSYLPQAS

SEQ ID NO: 147274 - DNA, 771 bp, Burkholderia xenovorans LB400
  CDS (1)..(771): transl_table=11
atgcgtcccgactgtttcacaaatggaaaccctatgaacatcaaaggttgtacggcactcgtcacaggtgccaatcgaggcttggggaaggttatcgtcgaccagctggcgcaggccggtgctgccagaatctacgccggtatgcgtaatccagctgtgatcgggcacgacgtcgttacgccagtcgcgctcgatgtcacggacgcggattccgtggcgcgcacggcagagaagtgcagcgatgtcgacctggtcatcaacaacgcaggcatcatgctcgcaacgccaatgcttgctgacgattcggaacaggcgctgcgccgcgaactggatgtgaatgcgtttggcccattgcgcatcgccaaggcgtttgctccgatcctggcgcgcaacggcggtggtgcgattgtcaacatgctgtcggtggtgagctggtatgtctatccgttcaacgccacctattgcgcttcgaagttcacggcactggcgatgaccgacgccatgcgcgtggaactgaaggcgcagggaacgcacgtgatgggcgtctatgccggctttatcgacacggatatggccgctcgcgtgacgggcgaaaagacctcaccggttcaggttgccgagcgaatgctggcgggcctccgggcaggaaaggatcacgtgcttgcagacgccgcggccgaggagctttggcgtgcggtcaggttcgagccggagcgtgttgccgcctgggctcaatcgctttgggacgcgggtcgagcgtgggccgtctag

SEQ ID NO: 147275 - protein, 256 aa, Burkholderia xenovorans LB400
MRPDCFTNGNPMNIKGCTALVTGANRGLGKVIVDQLAQAGAARIYAGMRNPAVIGHDVVTPVALDVTDADSVARTAEKCSDVDLVINNAGIMLATPMLADDSEQALRRELDVNAFGPLRIAKAFAPILARNGGGAIVNMLSVVSWYVYPFNATYCASKFTALAMTDAMRVELKAQGTHVMGVYAGFIDTDMAARVTGEKTSPVQVAERMLAGLRAGKDHVLADAAAEELWRAVRFEPERVAAWAQSLWDAGRAWAV

SEQ ID NO: 147276 - DNA, 735 bp, Pseudoalteromonas atlantica T6c
  CDS (1)..(735): transl_table=11
atgactgattcaattcaaggtaaagtagcactcgtcacaggcgcaaatcgcggaattggtaaagcaatcgtcgattcacttatcgaaaatggggcaactaaggtttatttagcggtacgcaacccagaatcaaccaaagacatcgaagcgcaatacgctgataaagttgtcacattgactgccgatgtagccgataccgcatcaattcagcgtttggctactcaagccagcgacgttgaaattttggttaataacgccggtattatgcacgtgacttcacctctggctgaaaatgcagaagagtcattgatggagcaaattaacgtgaacgtgtttggtttgatgcgcgttgccaatgcattcgctgaaacactagagcgcaataaaggcgtattggttcagttgaattctatcgcatcaatcaaaacctttggagacattgccacttattgtgcatctaaagcagctgcgtattcgatcacccaaggcttaaaagacaagtgggctgataaaggtattcgtgtattaagcgtacacccagggccaattggtacagaaatgggggattcagcaggcttcgaaggtgcgcctgatgcaactgtagtagcacaagccattgttgctgcacttgaaagcggtgacttccactcgttccctgacccagtggcgaagcagcttgaagcagcctaccaaagttattccgatgcgattatcaccagtgacttatctttataa

SEQ ID NO: 147277 - protein, 244 aa, Pseudoalteromonas atlantica T6c
MTDSIQGKVALVTGANRGIGKAIVDSLIENGATKVYLAVRNPESTKDIEAQYADKVVTLTADVADTASIQRLATQASDVEILVNNAGIMHVTSPLAENAEESLMEQINVNVFGLMRVANAFAETLERNKGVLVQLNSIASIKTFGDIATYCASKAAAYSITQGLKDKWADKGIRVLSVHPGPIGTEMGDSAGFEGAPDATVVAQAIVAALESGDFHSFPDPVAKQLEAAYQSYSDAIITSDLSL

SEQ ID NO: 147278 - DNA, 735 bp, Gramella forsetii KT0803
  CDS (1)..(735): transl_table=11
atgagtatttcaatagagaataaagtcgcattagtaaccggtgcaaatagaggaattggtaaggcaatcgtgaaatcttttataaaacacggtgcaaaaaaggtatatcttgccgttcgggatacaggttctacaaaagatctggaagaagaatttggaagtaaagtagaaacccttgaggcagatctatctaataaaacctccatccaggaactggcgaataagtcaaaagatgtagaaattgtggttaacaatgcaggagttggaaaaccgcatactaccattgctgatggggtagaagaagatcttcaaaagcattttgatgtcaatgtctttggtttgctaagggttgcaaatgcttttgctgaaaccctgataaagaataagggggcgttggtacagatgaattcggtagcttctatcaagaacttcccgcatctttctacttattctgcttcaaaagcagcttcctattcactaacacaaggaataagagcagatcttggggagaaaggtgtgagtgtattaagtgtgcatcccggaccgattgatactgaaatggctgccgaagcaggttttgatgatccggcttccacagaaaccgtttcagaaggtattgtgaaagcacttaaagcgagtgattttcatttattccccgatgaaatggcgaagcaggtagaacaggcttacaaggagttttcagaaaatgtggtcctggcagacttttcagaatag

SEQ ID NO: 147279 - protein, 244 aa, Gramella forsetii KT0803
MSISIENKVALVTGANRGIGKAIVKSFIKHGAKKVYLAVRDTGSTKDLEEEFGSKVETLEADLSNKTSIQELANKSKDVEIVVNNAGVGKPHTTIADGVEEDLQKHFDVNVFGLLRVANAFAETLIKNKGALVQMNSVASIKNFPHLSTYSASKAASYSLTQGIRADLGEKGVSVLSVHPGPIDTEMAAEAGFDDPASTETVSEGIVKALKASDFHLFPDEMAKQVEQAYKEFSENVVLADFSE

SEQ ID NO: 147280 - DNA, 732 bp, Mycobacterium smegmatis str. MC2 155
  CDS (1)..(732): transl_table=11
atgactcaacggctcgacggcagaaaagtactcatcaccggcgcgaacggcggtctcggcgaggaattcgtccgacaggcgctcgcgcgcggtgcggcgcgggtctacgcgaccgcccggcggccccacccgtgggaagacgcgcgcgtggtgccgctcccgctcgacctcaccgatccgcagtcgatcaccacggccgcggccgccgcgcgcgatgtcgacctggtgatcaacaacgccgccatcgcaccgagcgacgacacgtcggtgctcacccaggacgacgagatcacccgccgcgtcttcgagaccaacttcttcggcacgctccgtgtcgcgcgcgcgttcgcgcccgtcctcgccgacaacggcggcggcgccttcctcaacgtgttgtcggcagcgatctggattccggtgccgacggcatatgcggcgtcgaaagccgccgcatggtcggccaccaacgccatgcgcgccgagctcacggcgcaaggcaccacggtgacggctgtggtggtcggcatggtcgacacagccatgtcagcccggtgggacatgcccaaggtctctgccgaaagcgttgtcgaacagtctctcgacggcgtgctctccggcgcgttcgaggtgctcgccgacgacgactcgcgcctggccaagtccctgctgtccgaaccgtacgaggaactccacgccgtcgcggtccaagcgctgagcgacttcaagccgtga

SEQ ID NO: 147281 - protein, 243 aa, Mycobacterium smegmatis str. MC2 155
MTQRLDGRKVLITGANGGLGEEFVRQALARGAARVYATARRPHPWEDARVVPLPLDLTDPQSITTAAAAARDVDLVINNAAIAPSDDTSVLTQDDEITRRVFETNFFGTLRVARAFAPVLADNGGGAFLNVLSAAIWIPVPTAYAASKAAAWSATNAMRAELTAQGTTVTAVVVGMVDTAMSARWDMPKVSAESVVEQSLDGVLSGAFEVLADDDSRLAKSLLSEPYEELHAVAVQALSDFKP

SEQ ID NO: 147282 - DNA, 711 bp, Mycobacterium smegmatis str. MC2 155
  CDS (1)..(711): transl_table=11
atggaactgcgaaacgcgaccgttctggtgactggtgccaaccgagggctgggtgcggagtttgtccgccaagtgatcggccgtggcgccgccaaggtctacgctgcaacgcggcgcccggaaaccatcacgggaggggactcgcgcatcgtgccgatctacctcgacatcaccgacgacgcgaccgtacagggcgccgccggcactgccggtgacgtcgacgtggtgatcaacaacgccggcgtcatggccatgcagaacctcgtcacgggtgatctcgatgccatccgcctcgaattcgccacccatttctggggcacactgtcgatgactcgcgcctttgcaccgattctggcgcgcaacggcggtggcgccatcctcaacgtcttgtccgtcggatccttccaggtgttccccggcaacggcgcttatgccgcggccaaggccgccgagtggcagctggccaacagcacccgcctcgagttggcggctcaaggcacccatgttctcggactgcacctcgcagccaccgacaccgacatgctggacggcattgacatgcccaagaacaaccccgccgacgtggtccgcctggcactcgacggcctggagtccggcttggacgaagtactggccgatgacgaaaccaggacagcgaaggcgctgctggcccagccgccaagcgccatgtatgccggggttgagcagtag

SEQ ID NO: 147283 - protein, 236 aa, Mycobacterium smegmatis str. MC2 155
MELRNATVLVTGANRGLGAEFVRQVIGRGAAKVYAATRRPETITGGDSRIVPIYLDITDDATVQGAAGTAGDVDVVINNAGVMAMQNLVTGDLDAIRLEFATHFWGTLSMTRAFAPILARNGGGAILNVLSVGSFQVFPGNGAYAAAKAAEWQLANSTRLELAAQGTHVLGLHLAATDTDMLDGIDMPKNNPADVVRLALDGLESGLDEVLADDETRTAKALLAQPPSAMYAGVEQ

SEQ ID NO: 147284 - DNA, 684 bp, Mycobacterium vanbaalenii PYR-1
  CDS (1)..(684): transl_table=11
atgaccgacaccgaacacaccaccgccctggtcaccggggccaaccgcggcctgggccgacgtttcgccgaggcgctggtggcccgcggcgccaaggtctacgcggccgcacggcggcccgagaccatcgacattcccggcgtcgtgccgatccaactcgacatcaccgatcccgaatcggtgcgccgggccgccgaacaggccaccgacgtcaccgtcgtcatcaacaacgccggcgtctcgacgcgggcggggctgctcgacggcaccctcgaggacatccggctcgagatggacacgcactacttcggcactctcgccgtcacccgtgcgttcgtgcccgtcatcgaacgcaacgggggcggcgccatcctcaacgtgctgtcggtcctgtcgtggttgcatccaccgaccagcggcgcgtactcggcggccaaggccgccggctgggcgatgaccgatgcgttgcgtgcggaactagcgccccgcgggattcacgtggcggcgctgcatgtcggcttcatggacaccgacatggtcagctacatcccggccgaccagaagaccgaccccgcggtggtggccgaactcgcgctcgacggtctcttcgccgggcagcccgagattctcgccgacgaactgacccgcaacgtcaaggcgcagctgtcggcggcgcccgcctga

SEQ ID NO: 147285 - protein, 227 aa, Mycobacterium vanbaalenii PYR-1
MTDTEHTTALVTGANRGLGRRFAEALVARGAKVYAAARRPETIDIPGVVPIQLDITDPESVRRAAEQATDVTVVINNAGVSTRAGLLDGTLEDIRLEMDTHYFGTLAVTRAFVPVIERNGGGAILNVLSVLSWLHPPTSGAYSAAKAAGWAMTDALRAELAPRGIHVAALHVGFMDTDMVSYIPADQKTDPAVVAELALDGLFAGQPEILADELTRNVKAQLSAAPA

SEQ ID NO: 147286 - DNA, 1008 bp, Ralstonia solanacearum UW551
  CDS (1)..(1008): transl_table=11
atggctggtgatggaccggaccacgctggtgcgcgcgctcaagcccatgcagcgcgatgggctggtcgccgcgaagaccccgccgtccagccgcgccgccgaactgcacctgacgccgcgcggcctggcgctgctgaaagccggccaggcgcactggcaggcggcccaggcggagatcgatgccaagttcggtgtggaacgcgcgaaggcggttcgccaggcgttgttcgaattgaccgcatgagcccgtcgcgggcccctttttttgacacaaactgtgcatgtgcacatatggagatcgacatggacatccgaggcaagaccatcctggtgaccggcgccaaccgtggcctgggccggcagttcacgcaggcgttgttggcggcgggcgcggccaaggtgtacgcgggcgcccgcgacccgggcaccgtcacccagccgggcgtgcaccccgtgcgcctggatgtgaccgaccccaagagcatcgaggcggcggccgcgcaactgcacgacgtcgatgtgctgatcaacaacgccggcatctcgcagccggcctccctgctcgagccggccgataccggtgcggtgcaggccatcttcgatgtcaacgtgtgggggctgctcgccgtcacgcaggcgtttgcgcccgtgctcggacgcaacggcggcggtgccgtggtgaacgtgctgtcggtgctgagctggatggcgctgccgaccagcggcgcctacagcgcatccaagtcggccgcctgggcgctgaccaacggcctgcggcacgaactgcgcggccagggcacgcgggtggtcggcgtgcatccggccttcatcgataccgacatgacggccggcatcgacgcgcccaagtcatcgcccgagcatgtagtgaacgaagtgctgcgcgcgctggcggaggatcgggaggaagtgctggtggacgagatggggcgtggcgtcaagcgctcgctgtcgagcgatgcgccggcttatctggcggcgcgggtttga

SEQ ID NO: 147287 - protein, 335 aa, Ralstonia solanacearum UW551
MAGDGPDHAGARAQAHAARWAGRREDPAVQPRRRTAPDAARPGAAESRPGALAGGPGGDRCQVRCGTREGGSPGVVRIDRMSPSRAPFFDTNCACAHMEIDMDIRGKTILVTGANRGLGRQFTQALLAAGAAKVYAGARDPGTVTQPGVHPVRLDVTDPKSIEAAAAQLHDVDVLINNAGISQPASLLEPADTGAVQAIFDVNVWGLLAVTQAFAPVLGRNGGGAVVNVLSVLSWMALPTSGAYSASKSAAWALTNGLRHELRGQGTRVVGVHPAFIDTDMTAGIDAPKSSPEHVVNEVLRALAEDREEVLVDEMGRGVKRSLSSDAPAYLAARV

SEQ ID NO: 147288 - DNA, 738 bp, Marinomonas sp. MED121
  CDS (1)..(738): transl_table=11
atgagcatattagtagaaaataaggtggcattagtcactggcgcaaaccgtggcataggcaaagccatcactgaaagtttgttaaagcatggtgctaaaaaagtttatttggccgtaagagacctgagtagcacttataaccttgtcgaaaaatatggtgataaagttgtcacccttaagcttgatatggccaatcctgaggaaattaaagcacttgcagctgctgcaaaggatgttgaagtcgttattaacaatgcaggtattctagaaattgctgatctattcgaagaggagttcgatcaagcactagaacaacaattggatattaatttatttggtttagttcgaattgcaagggcattaacgcctgtaatcgaagcaaatggaggaggtgcatttgtacaattaaattccatagtttctatccgcaacttctctggcgttgatgcttactcagcctcaaaagcggcatcttattccattactcaaggtttaagagagcaacttttagataaaaacattcaagttttaagtgtacaccctgggcctatcgatactgatatggctgcaaaagcaggcatgacagagggcgaatcagcaaatacggttgccgaaggtgttatttcagccttagcagaaggtcaattccatctatttcctgatccaatggcaaaacagtttgaaacagcttatcaagactttgctaaatcgatagtactagccgatctcggtagctaa

SEQ ID NO: 147289 - protein, 245 aa, Marinomonas sp. MED121
MSILVENKVALVTGANRGIGKAITESLLKHGAKKVYLAVRDLSSTYNLVEKYGDKVVTLKLDMANPEEIKALAAAAKDVEVVINNAGILEIADLFEEEFDQALEQQLDINLFGLVRIARALTPVIEANGGGAFVQLNSIVSIRNFSGVDAYSASKAASYSITQGLREQLLDKNIQVLSVHPGPIDTDMAAKAGMTEGESANTVAEGVISALAEGQFHLFPDPMAKQFETAYQDFAKSIVLADLGS

SEQ ID NO: 147290 - DNA, 744 bp, Blastopirellula marina DSM 3645
  CDS (1)..(744): transl_table=11
atgagtttcgacgtaaacggcaaagtcgccttagtgaccggcgccaaccgtggaattggcaaaacgattgtggagtcgctcctctcgcacggcgccaaaaaggtttacgccgccgttcgcgatctgaagtcggccgatccgctggtcgctgagtacggtgatcgcgttgtcccggtcgaagtcgatctgcagaagccggcgaccattaccgcggcggcgcaaactgctagcgatgtggaactggtgatcaacaacgccggcgtctataaaggacagactcccctttctcccgaggccgcggactccctgaaatttgagttcgacgtcaacgtctatggactactgcgagtcgctcaagccttcgccccggtgctgaagcaaaacggaggcggcgccttcgtccaactcaactcgatcgcgtcgctcaagaacttccttagcgcggcgacctactccgcatcgaaggccgcttcctactcgatcacccaggccctgcgcgaagaactgggcgctcaaggaaccgccgtcgtcagcgtccatcctggccccatcgcaaccgacatggcagatcacgccggaatgagcgaaggcgccgaaccgccgacggtggtcagcgaagcgatcatccacgcgctcaagaacggcgagttccacgtcttccccgactcgatggccaagcaatttggcgaagggtacgagagtttcgccaagaactttatcgaagccaacctggccgaagcgtaa

SEQ ID NO: 147291 - protein, 247 aa, Blastopirellula marina DSM 3645
MSFDVNGKVALVTGANRGIGKTIVESLLSHGAKKVYAAVRDLKSADPLVAEYGDRVVPVEVDLQKPATITAAAQTASDVELVINNAGVYKGQTPLSPEAADSLKFEFDVNVYGLLRVAQAFAPVLKQNGGGAFVQLNSIASLKNFLSAATYSASKAASYSITQALREELGAQGTAVVSVHPGPIATDMADHAGMSEGAEPPTVVSEAIIHALKNGEFHVFPDSMAKQFGEGYESFAKNFIEANLAEA

SEQ ID NO: 147292 - DNA, 744 bp, Planctomyces maris DSM 8797
  CDS (1)..(744): transl_table=11
atgggctatgagattcaggggcaggtggcgttggtcacgggagccaaccgcgggattgggaaagtgattctggaaggcttgctgaaagcgggggcaaccaaagtgtatgcggctgtccgtgatacgtcttcggtggctggattgatcgacgaatatggggacaaggtggtgcctgtagaatttgatctgacgaagccggccttgatcaaaaatgctgcggaagtggccagtgatgtctcgctggtggtgaataatgcaggggttctcaagccggcaactgctttatctgaagacgctgttgaatcgctggaattcgagatgactgcgaacgtgtatggcctgattcgagtggcgcaggccttcgctcccgtgctcaaagccaatggtggcggggcgctggtgcagttgaattcggtggcttcgctgaaaacgtttcccgatttcactacctactgtgcttccaaagcggcctcatatgctgtgacacaggccttgaaggagcagcttaagggacagggtaccctggtggtcagcgtgcatcccggcccgattgcgacggatatgggtcacgacgcaggctttgatgagatcgcagagtcgccagagttagtcgctgagggaatcgtggctgccttgaaagcgggcgaattccatgtcttccccgattcgatggcgaaggatgtgggagccgcttatcacagcttcgctgaaaatgtgatcgaagcggagatggcggaaggttga

SEQ ID NO: 147293 - protein, 247 aa, Planctomyces maris DSM 8797
MGYEIQGQVALVTGANRGIGKVILEGLLKAGATKVYAAVRDTSSVAGLIDEYGDKVVPVEFDLTKPALIKNAAEVASDVSLVVNNAGVLKPATALSEDAVESLEFEMTANVYGLIRVAQAFAPVLKANGGGALVQLNSVASLKTFPDFTTYCASKAASYAVTQALKEQLKGQGTLVVSVHPGPIATDMGHDAGFDEIAESPELVAEGIVAALKAGEFHVFPDSMAKDVGAAYHSFAENVIEAEMAEG

SEQ ID NO: 147294 - DNA, 738 bp, Geobacter sp. M21
  CDS (1)..(738): transl_table=11
atggacatcgcaggaaaaacagttttggtgacgggcgcaaacggcgggatcggtcgtgctctggtcgagggattgctaaaaaaaggcgccgccaaggtttacgcggcggcaaggaccatcgaagccgtggcggaactttcgaaaatcgacgcgcgggtgacggccgtaaggctcgaggtcacccatgccacgagcgtggccgcggcagcggaccattgcccggacgtggacctcgtcgtcaacaacgcagggatcaaccgctgcgcggggtttatggctgaaaacgccatggagaacgcgcaccaggagatgaaggtcaactacctggggacgcttgccatgtgccgcgccttcgccccggccctcatcgagcgcaaagggtgcatcgtcaacgtttgttccgtcatcgggctggtcaacctcccggtcaacggcacctacagcgcctctaaggcggcggggcactctctgctgcaggggatccgggccgaattggcgccgcgcggcgtcaaggtgctaggtgtttatcccggcccggtcgacaccaggatgacctcagggcaggagatgcccaaggcgactaccgaggaagtggtgcaagcgatactggaaggaatcgaaagggagcaggaggagatttatcccgacgcgatgtcgaaagaggtttccgcggctctcaagcaggcgcccaaagaggtcgagcggcagttcgccgccatgatcccggcccaagggtag

SEQ ID NO: 147295 - protein, 245 aa, Geobacter sp. M21
MDIAGKTVLVTGANGGIGRALVEGLLKKGAAKVYAAARTIEAVAELSKIDARVTAVRLEVTHATSVAAAADHCPDVDLVVNNAGINRCAGFMAENAMENAHQEMKVNYLGTLAMCRAFAPALIERKGCIVNVCSVIGLVNLPVNGTYSASKAAGHSLLQGIRAELAPRGVKVLGVYPGPVDTRMTSGQEMPKATTEEVVQAILEGIEREQEEIYPDAMSKEVSAALKQAPKEVERQFAAMIPAQG

SEQ ID NO: 147296 - DNA, 738 bp, Cyanothece sp. PCC 7425
  CDS (1)..(738): transl_table=11
atgcaagttcaaggttcaatcgcattagtgacaggcgcaaacggtggtattgggcaatactacatccagggtttacagacggctggagccagtcgcatttatgcaggggtgcgcaatccagatagcctgaaggacattgttgcaacagatccagatcgcattattcccattcccctcgatattactgatgaagcttcggtccaagcagcggctgagacgtattcagatgtgaatctgctaattaacaatgctggcgtgggatttaatcaacgattggtcgcagatctcaattttgacaaggtgcgatcggaaattgaggtcaattacctcggtacgttgcggatgtgtctggcgttcgctccagttctcaaagccaatggaggaggggcaatcgtcaatatgcttaccatgttggcaaaagtcaattttccgctaaatgcgtcttactgtgcgtctaaggcggcggctctactagcaactcagggaattcgggctgagcttgcctcacaaaaaacgctggtggttggggtgatgcctggaacagtagacacgaagatgagcaaggatttcccaccgcccaaagttgcccctgaagaggttgtgcgggcagcacttcaagccgttattgacggggttgaggatgtctatcctggtgaacaagcacaggagatgcaggctcagctccttcaagaccccaaagcggttgaaaagtggatggcaggaattttagcaagttaa

SEQ ID NO: 147297 - protein, 245 aa, Cyanothece sp. PCC 7425
MQVQGSIALVTGANGGIGQYYIQGLQTAGASRIYAGVRNPDSLKDIVATDPDRIIPIPLDITDEASVQAAAETYSDVNLLINNAGVGFNQRLVADLNFDKVRSEIEVNYLGTLRMCLAFAPVLKANGGGAIVNMLTMLAKVNFPLNASYCASKAAALLATQGIRAELASQKTLVVGVMPGTVDTKMSKDFPPPKVAPEEVVRAALQAVIDGVEDVYPGEQAQEMQAQLLQDPKAVEKWMAGILAS

SEQ ID NO: 147298 - DNA, 771 bp, Aspergillus fumigatus (strain CEA10 / CBS 144.89 / FGSC A1163)
  CDS (1)..(771)
atgagccttcgaggaaaaattgccatcgtcaccggcgcctcgcgcggaatcggcgccgggattgccctcgatctcgcaaaacagggtgcaaacctcaccctgatctatacttccgcgagcagcgatcaagcaatcaaccagctctgcgaccaaatccactctctaaacaacggctccacagcgatcaaagttcaagccgacctccgacagtcagacgccccggcccaaatcctcgctgccacgttcgacgcattccccaatgccaataacaagatcgacatcctagtcaacaacgctggcgtatccctatgcaagaacctcgctgacacaactgaccacgacatctcctccgtcttcgacatcaacgtctacggcttgataagcatgaccagagcggtgatcccgcatctccgcgccccaggccgaatcatcaacctcagctctgtagcggctcggcgcggatcgcccggtttctcggtgtactccgcctccaaggcagcggtggaggggttcacgaggtcgctggcgtgtgaattaggccctgtggggtgtacggttaatgcggttcagcctggggcggtggagtccgatatgttgcgccgggaggtgcctgagcagttaatcgcctatattcaggagaatacgccgttaggccatcggattgccctcccggaagacacagcgagggttgtgacgttcctagcgggggagggggcggggtgggtaacggggcagagtatttgcgttagtggggggttgcatatgaattag

SEQ ID NO: 147299 - protein, 256 aa, Aspergillus fumigatus (strain CEA10 / CBS 144.89 / FGSC A1163)
MSLRGKIAIVTGASRGIGAGIALDLAKQGANLTLIYTSASSDQAINQLCDQIHSLNNGSTAIKVQADLRQSDAPAQILAATFDAFPNANNKIDILVNNAGVSLCKNLADTTDHDISSVFDINVYGLISMTRAVIPHLRAPGRIINLSSVAARRGSPGFSVYSASKAAVEGFTRSLACELGPVGCTVNAVQPGAVESDMLRREVPEQLIAYIQENTPLGHRIALPEDTARVVTFLAGEGAGWVTGQSICVSGGLHMN

SEQ ID NO: 147300 - DNA, 858 bp, Brassica napus
  CDS (1)..(858)
atgggaagcagcgaggagatgccagtggtgctcatcacaggatgctcacacggaggaatcggcaacgcgctggctcgtgagttctcgtcgaagggttgtcgtgttgtggcgacgagtcgatcgcagaacacgatggccgatttgacgaaagatcccaagtttttagtacaagagctcgatgttcagtcagaacataacgtgaataaagtcttttcggaagttatcgacaagttcggtcagattgatgttctggtcaataacgccggagttcaatgcgtcggtccactcgctgagattccaattcagaccatggagcacacctttaacaccaatgtgttcggttccatgaggatgactcaagctgttgtacctcacatggcgtcaaagaagaaaggaaagattgtgaacataggaagtatcagcacaatggcaccaggaccatgggcaggggtttacactgcatcaaaagctgctcttcatgctcttacagacacattaaggttggagcttaggccatttgggattgatgtgatcaacatcgtcccaggaggtattcaatcaaacatatccgactcagggatatcgagcttcgataagttacctgagctgaaactatataagcctttccaagaagctatccgtgaaagggcgtttttgtcgcaaaacgttaagccaatacctgcagagacgtttgcgaaggaggtggtatcagtggtcctgaaggaacacccaccggcttggtattctacagggaggttgtccaccgtcgcggcgatcatgcaccatttgcccatttccgtcaaagattttctcctgactaagagcttcatgaaaaaagggccaaaagaaactgtttga

SEQ ID NO: 147301 - protein, 285 aa, Brassica napus
MGSSEEMPVVLITGCSHGGIGNALAREFSSKGCRVVATSRSQNTMADLTKDPKFLVQELDVQSEHNVNKVFSEVIDKFGQIDVLVNNAGVQCVGPLAEIPIQTMEHTFNTNVFGSMRMTQAVVPHMASKKKGKIVNIGSISTMAPGPWAGVYTASKAALHALTDTLRLELRPFGIDVINIVPGGIQSNISDSGISSFDKLPELKLYKPFQEAIRERAFLSQNVKPIPAETFAKEVVSVVLKEHPPAWYSTGRLSTVAAIMHHLPISVKDFLLTKSFMKKGPKETV

SEQ ID NO: 147302 - DNA, 837 bp, Brassica napus
  CDS (1)..(837)
atgccagttgttctcatcacgggatgctctaaaggaggaatcggacacgcgctggctcgtgagttctcagcgaatggttgtcgagtggtggcgacgagtcgatcgcagagcacgatggttgatttggagaaagataccaagttctttgtacaagagctcgatgttcagtcggaacagagcgtgagtaaagttgtgtcggaagttatcgacaagtatggtcagatcgatgttctggtcaataacgccggagttcaatgtatcggaccacttgcagagattccaattcaggcgatggaaaacaccttcaacacaaatgtgttcggttcaataaggatgactcaagctgttgtacctcacatggcgtctaaaagaaagggaaagattgtgaacataggaagtatcagcatcctggcaccaggaccatggtcaggggtttatactgcatctaaagctgctcttcatgctcttaccgatacatttaggttggagcttaggccatttgggattgatgtaatcaacattgtcccaggaggtattcaatcaaacatagccgactcagcgataacgagcttcaacaacttacctgagctgaaactatacaaacccttccaggaatctatccgtcaaagggcgtttttatcgcaaaacataaaaccaacacctgcggagacatttgctaaagagactgtatcggtggtgctgaagaaaaccccaccggcttggttctctacaggacggttgtccaccgtcatggcgatcatgcaccatatgcccattttcgtcaaagattttctcctgacgaggagctttatgaaaatgggagcaaagactgagtag

SEQ ID NO: 147303 - protein, 278 aa, Brassica napus
MPVVLITGCSKGGIGHALAREFSANGCRVVATSRSQSTMVDLEKDTKFFVQELDVQSEQSVSKVVSEVIDKYGQIDVLVNNAGVQCIGPLAEIPIQAMENTFNTNVFGSIRMTQAVVPHMASKRKGKIVNIGSISILAPGPWSGVYTASKAALHALTDTFRLELRPFGIDVINIVPGGIQSNIADSAITSFNNLPELKLYKPFQESIRQRAFLSQNIKPTPAETFAKETVSVVLKKTPPAWFSTGRLSTVMAIMHHMPIFVKDFLLTRSFMKMGAKTE

SEQ ID NO: 147304 - DNA, 795 bp, Glycine max; identical to SEQ ID NO: 59730
  CDS (1)..(795)

SEQ ID NO: 147305 - protein, 264 aa, Glycine max; identical to SEQ ID NO: 59731

SEQ ID NO: 147306 - DNA, 819 bp, Triticum aestivum
  CDS (1)..(819)
atggctgcggcggggacgtcgggatcgagccagccgggtgctccaggaaggtggtctcttcacggcaagacggctctcgtcaccggcggcacccgcgggatcgggcgtgcggtggtggaggaacttgcggcgctgggggcggccgtgcacacctgctcccggaaggaggcggagctgggcgagcgcctcaaggagtgggaggccaggggcttccgcgtcacaacctccgtctgcgacctctccgtccgggagcagcgggagcgcctgattggcgacgtcgccgaacgcttcggcggcaagctcaacatcctcgtaaacaatgtggggacaaacataaggaaaccaactactgaatattccgctgaagattactcttttttgatggccactaatcttgaatctgcatatcatctttgccaacttgcacatcctcttctaaaagcatctggcttgggcagcattgttttcatatcatctgtctgtggattagtagccgtatttagcggtactctatatgccatgactaaaggtgccatcaaccagttaaccaagaacctagcatgtgaatgggcaaaagatggcataagaacaaactctgttgctccatggtacataacgacttcgcttacagaaggacttttggctaacaaggaatttgaggcctccgttgtgagtcgaactccactgaggcgtgtcggagaaccaggagaggtatcatcgctggttgcttttctttgcatgcctggttccacttacataacaggccagacgatctcagtggatggaggtatgagtgtcaatgggctctatccagcttga

SEQ ID NO: 147307 - protein, 272 aa, Triticum aestivum
MAAAGTSGSSQPGAPGRWSLHGKTALVTGGTRGIGRAVVEELAALGAAVHTCSRKEAELGERLKEWEARGFRVTTSVCDLSVREQRERLIGDVAERFGGKLNILVNNVGTNIRKPTTEYSAEDYSFLMATNLESAYHLCQLAHPLLKASGLGSIVFISSVCGLVAVFSGTLYAMTKGAINQLTKNLACEWAKDGIRTNSVAPWYITTSLTEGLLANKEFEASVVSRTPLRRVGEPGEVSSLVAFLCMPGSTYITGQTISVDGGMSVNGLYPA

SEQ ID NO: 147308 - DNA, 855 bp, Zea mays; identical to SEQ ID NO: 119121
  CDS (1)..(855)

SEQ ID NO: 147309 - protein, 284 aa, Zea mays; identical to SEQ ID NO: 119122

SEQ ID NO: 147310 - DNA, 852 bp, Zea mays
  CDS (1)..(852)
atggccgccgcgggctcctcgccgtccttctcctcctcgagtaagcggctggaagggaaggtggccctcgtcaccggtggcgccaccggcatcggcgaggccatcgttcgcctcttcatggagcacggcgccaaggtctgcatcgcggacatccaggatgaggccgggcagcagctgcgcgacgccctgggaggtgacgcgcagggcgccatgttcgtccactgcgacgtgacgtcggaggaggacgtgagccgcgccgtggacgctgcggcggagcggttcggcgcgctggacgtgatggtgaataacgccggcgtgacgggcaccaaggtgacggacatccgcaccgtggacttcgcggaggcgcgcagggtgctcgacgtcaacgtgcacggcgtgttcctggggatgaagcacgcggcgcgcgctatgatcccgcggaagcggggctccatcgtgtcgctggccagcgtggccagcgccatcggcgggacgggcccgcacgtctacacggcgtccaagcacgccgtggtcgggctcaccaagagcgtcgccgcggagctcggccgtcatggggtgcgcgtcaactgcgtgtccccctatgccgtgcccacggcgctgtcgatgccgcacctgccccagggcgcgcgcgcagatgacgcgctcaaggacttcctggcctttgtcggcggcgagaccaacctcaagggcgtcgacgccatgcccgaggacgtcgcccaggcggtgctctacctggccagcgacgaggcgaggtacgtcagcgcggtcaacctcatggtggacggaggcttcacagccgtaaacaataacctcagggcgtttgaggattag

SEQ ID NO: 147311 - protein, 283 aa, Zea mays
MAAAGSSPSFSSSSKRLEGKVALVTGGATGIGEAIVRLFMEHGAKVCIADIQDEAGQQLRDALGGDAQGAMFVHCDVTSEEDVSRAVDAAAERFGALDVMVNNAGVTGTKVTDIRTVDFAEARRVLDVNVHGVFLGMKHAARAMIPRKRGSIVSLASVASAIGGTGPHVYTASKHAVVGLTKSVAAELGRHGVRVNCVSPYAVPTALSMPHLPQGARADDALKDFLAFVGGETNLKGVDAMPEDVAQAVLYLASDEARYVSAVNLMVDGGFTAVNNNLRAFED

SEQ ID NO: 147312 - DNA, 819 bp, Hordeum vulgare; identical to SEQ ID NO: 59758
  CDS (1)..(819)

SEQ ID NO: 147313 - protein, 272 aa, Hordeum vulgare; identical to SEQ ID NO: 59759

SEQ ID NO: 147314 - DNA, 789 bp, Hordeum vulgare; identical to SEQ ID NO: 40605
  CDS (1)..(789)

SEQ ID NO: 147315 - protein, 262 aa, Hordeum vulgare; identical to SEQ ID NO: 40606

SEQ ID NO: 147316 - DNA, 840 bp, Helianthus annuus
  CDS (1)..(840)
atggaaacttttcacaaacaggtggtgctcgtcacagggtgctcttctggcggcatcggtaacgctctctcccgcgcttttgcggccaaaaactgtctcgtagtcgccacggctcgctcagtttcatctatggctgaattcagcgataatcctgatctctactttcttcaggagcttgatgtgttatcggatcagagcgttcgagaggttgtctcgaatgttatcgataagtttggacggattgatgttgttgttaataatgctggtgttcagtgtattggtcctcttgcagaagttccgttttcttcgattgagaatactttcaacacgaatgtttacggttccatgaggctgatccaagcagttgtccctcacatggtatcaagaaagaaaggaaagattgtgaacattggaagtgtgactgccctggcacctggaccatggtcaggtgtctacgctgcatctaaagctgctttacacgcgctaactgacacactaagggtggaactgaagccgtttggtatcgatgtaattaacattgtgcctggatccgtaaaaacgaacttaggaaatacagctgtagccagctacaacaagatgccagaatggaaaatgtacaagaaatacgaaggcgcaatcaaagagcgcgcgtatttttcacaaggttcaaaagcaatttcgccagacgagtttgcaaacaagacagtggctgcaatcctgaaagaagaccccccttcttggttctctttggggcagttttccactatagcggctattatgtaccatatgcctatatttgttaaggatttcctttacaaaatggccatgatgaaatgttag

SEQ ID NO: 147317 - protein, 279 aa, Helianthus annuus
METFHKQVVLVTGCSSGGIGNALSRAFAAKNCLVVATARSVSSMAEFSDNPDLYFLQELDVLSDQSVREVVSNVIDKFGRIDVVVNNAGVQCIGPLAEVPFSSIENTFNTNVYGSMRLIQAVVPHMVSRKKGKIVNIGSVTALAPGPWSGVYAASKAALHALTDTLRVELKPFGIDVINIVPGSVKTNLGNTAVASYNKMPEWKMYKKYEGAIKERAYFSQGSKAISPDEFANKTVAAILKEDPPSWFSLGQFSTIAAIMYHMPIFVKDFLYKMAMMKC

SEQ ID NO: 147318 - DNA, 813 bp, Zea mays; identical to SEQ ID NO: 119119
  CDS (1)..(813)

SEQ ID NO: 147319 - protein, 270 aa, Zea mays; identical to SEQ ID NO: 119120

SEQ ID NO: 147320 - DNA, 792 bp, Brassica napus; identical to SEQ ID NO: 59766
  CDS (1)..(792)

SEQ ID NO: 147321 - protein, 263 aa, Brassica napus; identical to SEQ ID NO: 59767

SEQ ID NO: 147322 - DNA, 987 bp, Brassica napus
  CDS (1)..(987)
atgctgactctactcttctcctctctcggactcctccttctccttggccttctcctcaaattcgcattcgccgatggggatttaaccctgatttcgaagaagcatgcgaaacgtgaagccatagaaggcaaggtggtttggatcacagggtctagccgtggaattggagaagttcttgctaaacagtttgcaagtttaggtgccaagcttattctctctgctaggaacgaagctgagttggttcgtgttaagagtgagctcaaaggtaagtatgcaccagaagatgtcaaggttttgcctttagatctagctagcggcgaagaggggctcaaaggtgttgtagagcaagcattgtcgcttttccctggggctggtgttgattatttggttcacaacgctgcctatgagcgtccgaaatcaaatgcagtggatgcgagtgaggaaaatcttaagactacattcgaggttaatgtatttgggacaatatctctcacaaagttggtaactcctcatatgctgaaacaaggaggcggtcattttgttgtgattagcagtgccgcagggaaggtaccatcacctggacaggctatatatgctgcttcaaaacatgctctgcagggctacttccacaccttacgttctgagttctttcagaagggaatcaaggttactgtggtttgtccgggtccaatagagacctcaaatggtacaggaacatcaacttccgaagacaagaagtctcctgagaagcgtgtgtcatctgaacgatgtgcagaactgaccataatcgctgcatctcataacttaaaagaagcttggatttcatatcagccagtactgctggtgatgtatctagtgcagtacatgcctttccttggcttctggctcatggacaaggttggagggaaacgtgtggaggttgctgagaagaaaggcaacacatactcatggaacctgctcttccagaagaagactaaaacaaactga

SEQ ID NO: 147323 - protein, 328 aa, Brassica napus
MLTLLFSSLGLLLLLGLLLKFAFADGDLTLISKKHAKREAIEGKVVWITGSSRGIGEVLAKQFASLGAKLILSARNEAELVRVKSELKGKYAPEDVKVLPLDLASGEEGLKGVVEQALSLFPGAGVDYLVHNAAYERPKSNAVDASEENLKTTFEVNVFGTISLTKLVTPHMLKQGGGHFVVISSAAGKVPSPGQAIYAASKHALQGYFHTLRSEFFQKGIKVTVVCPGPIETSNGTGTSTSEDKKSPEKRVSSERCAELTIIAASHNLKEAWISYQPVLLVMYLVQYMPFLGFWLMDKVGGKRVEVAEKKGNTYSWNLLFQKKTKTN

SEQ ID NO: 147324 - DNA, 729 bp, Brassica napus; identical to SEQ ID NO: 119021
  CDS (1)..(729)

SEQ ID NO: 147325 - protein, 242 aa, Brassica napus; identical to SEQ ID NO: 119022

SEQ ID NO: 147326 - DNA, 798 bp, Glycine max; identical to SEQ ID NO: 59780
  CDS (1)..(798)

SEQ ID NO: 147327 - protein, 265 aa, Glycine max; identical to SEQ ID NO: 59781

SEQ ID NO: 147328 - DNA, 861 bp, Glycine max
  CDS (1)..(861)
atgtgtatggagaagcacggccatgatgaggaggagcaacccaaacctgtggttctaatcacaggatgttccacgggagggataggccacgcgcttgcacgatccttcgcagcgaacaggtgcagggtggtggccaccagcaggtcgcggtggagcatggcggatctggaacacgaccacaggttcttcttgcaagaattggatgttcagtccgatgagagcgtgcgtaaggtggtcgatgctgttgtcaacaagttcggtcgcatcgacgtgcttgttaacaacgctggtgttcagtgtgtgggcccccttgccgaggttcctctctctgccattcaaaacactttcgataccaatgtcttcggttcgttgagaatgattcaggccgttgttcctcatatggctgttaggaaacaggggaagatagtcaacgttggtagcgttgctgccttggcctctggaccttggtcaggcacttacaatgcttccaaagctgctcttcatgctttcactgatacattaagattggaacttggacactttggaatcgacgttgtgaatgtagttcctggagccatcacttccaatattgcaaataatgcccttgccaattacaatcgaatgcctgaatggaagttattcaagccttttgaagcagcaatccgagacagagcttctttgtctcaggggtccaagtcgaccccttcggaggagtttgctaaaaacacagtagcagctgttcttaagaagaatccacctgcatggttctcctatggccattactctaccttcatggctatcatgtatcatttaccactctttcttagagacttttttttgaagaaattgatgaaatgctga

SEQ ID NO: 147329 - protein, 286 aa, Glycine max
MCMEKHGHDEEEQPKPVVLITGCSTGGIGHALARSFAANRCRVVATSRSRWSMADLEHDHRFFLQELDVQSDESVRKVVDAVVNKFGRIDVLVNNAGVQCVGPLAEVPLSAIQNTFDTNVFGSLRMIQAVVPHMAVRKQGKIVNVGSVAALASGPWSGTYNASKAALHAFTDTLRLELGHFGIDVVNVVPGAITSNIANNALANYNRMPEWKLFKPFEAAIRDRASLSQGSKSTPSEEFAKNTVAAVLKKNPPAWFSYGHYSTFMAIMYHLPLFLRDFFLKKLMKC

SEQ ID NO: 147330 - DNA, 855 bp, Glycine max
  CDS (1)..(855)
atggacacgcgcggccacgatgaggaggagccaccgaaacctgtggttctgatcacaggatgttccacgggagggataggccacgcgcttgcacgcgccttcgctgagaagaagtgcagggtggtggccaccagcaggtcgcggtcgagcatggcggagctggaacacgaccaaaggttctttttggaagagttggatgttcagtccgatgagagcgtgcgtaaggtggttgatgctgttgtcgacaagtacggtcgcatcgacgtgctcgttaacaacgccggtgttcagtgtgtgggcccactcgccgaggctcctctctctgccatccaaaacactttcgacaccaatgtcttcggttccttgagaatggttcaggcggttgttcctcatatggcaactaagaaaaaggggaagattgtcaatattggtagtgttgctgccttggcctctggaccttggtcaggagcttatacagcttctaaagctgctcttcatgctttgacagatacattaagactggaacttggacattttggaattgatgttgtcaatattgtccccggagctatcaaatcaaacattggagattctgccatagccagctacaaccgcatgccagaatggaaattattcaagccttttgaagcagcaatccgagatagagcttatttttcgcagaagtccaaaacaacccctacagatgagtttgctataagcactgtagctgctgtccttaaggagaaaccacctgcatggttcacctatgggcattactctactgtcatggctatcatgtatcatttaccgatctctgttagagattttgttttgaagaaagcaatgaaaggctga

SEQ ID NO: 147331 - protein, 284 aa, Glycine max
MDTRGHDEEEPPKPVVLITGCSTGGIGHALARAFAEKKCRVVATSRSRSSMAELEHDQRFFLEELDVQSDESVRKVVDAVVDKYGRIDVLVNNAGVQCVGPLAEAPLSAIQNTFDTNVFGSLRMVQAVVPHMATKKKGKIVNIGSVAALASGPWSGAYTASKAALHALTDTLRLELGHFGIDVVNIVPGAIKSNIGDSAIASYNRMPEWKLFKPFEAAIRDRAYFSQKSKTTPTDEFAISTVAAVLKEKPPAWFTYGHYSTVMAIMYHLPISVRDFVLKKAMKG

SEQ ID NO: 147332 - DNA, 795 bp, Glycine max; identical to SEQ ID NO: 59802
  CDS (1)..(795)

SEQ ID NO: 147333 - protein, 264 aa, Glycine max; identical to SEQ ID NO: 59803

SEQ ID NO: 147334 - DNA, 855 bp, Hordeum vulgare
  CDS (1)..(855)
atggcggttcccggagggaagggagaggggcgggggcggccggtggtgctggtgacaggttgctcggaggggggcatcggccacgcgatggcgcgcgcgttcgcggcggaggggtgcgcggtcgtggccacggcgcggtcgcgcgcgtccatgcgcggtcttgagggtgacccgaggtacctgcttctggagcttgacgtgcgctccgacgagagcgcgcgccgcgccgttgaggacgccctccgggagctaggccgcgtcgacgtgctcgtcaacaacgcgggggtccaccttgtcgcgccggtcgccgaggtgcccatggagtccttccatcaggttttcgacaccaatgtatatggaacaatgaggatgattcaagcagttattccccatatgatggaaagaaaagaaggtacaattgtgaatgttggaagcattacagccttggctccaggaccatgggctggtgcctattcggcatcaaaagctgctcttcatgcactgagcgatacattaagggtggaactaagaaattttggcataaatgtcatgatagttgccccaggaggtacaaagtcaaatataggaagcaattctgcagacaagtatgatcaaataaatgactggaagtactacaaaaaatacgagaaatcccttcgagccaggacggatatatctcagggtgccgggtgtgttgcagcagaagaccttgcaaagagagtcgtcaaattggttcttaagaagaatcctcccgcttggttcgcttacggccagttcagtgctattctgacgatcctgtattatgccccattgtggttcagagattacttctacaggctggtcatgaaaatgtaa

SEQ ID NO: 147335 - protein, 284 aa, Hordeum vulgare
MAVPGGKGEGRGRPVVLVTGCSEGGIGHAMARAFAAEGCAVVATARSRASMRGLEGDPRYLLLELDVRSDESARRAVEDALRELGRVDVLVNNAGVHLVAPVAEVPMESFHQVFDTNVYGTMRMIQAVIPHMMERKEGTIVNVGSITALAPGPWAGAYSASKAALHALSDTLRVELRNFGINVMIVAPGGTKSNIGSNSADKYDQINDWKYYKKYEKSLRARTDISQGAGCVAAEDLAKRVVKLVLKKNPPAWFAYGQFSAILTILYYAPLWFRDYFYRLVMKM

SEQ ID NO: 147336 - DNA, 795 bp, Oryza sativa; identical to SEQ ID NO: 59398
  CDS (1)..(795)

SEQ ID NO: 147337 - protein, 264 aa, Oryza sativa; identical to SEQ ID NO: 59399

SEQ ID NO: 147338 - DNA, 819 bp, Triticum aestivum
  CDS (1)..(819)
atggctgcggcggagccgtcgggatcgagccagccgggtgctccaggaaggtggtctcttcacggcaagacggctctcgtcaccggcggcacccgcgggatcgggcgtgcggtggtggaggaacttgcggcgctgggggcggccgtgcacacctgctcccggaaggaggcggagctgggcgagcgcctcaaggagtgggaggccaggggcttccgcgtcacaacctccgtctgcgacctctccgtccgggagcagcgggagcgcctgattggcgacgtcgccgaacgcttcggcggcaagctcaacatcctcgtaaacaatgtggggacaaacataaggaagccaactactgaattttccgctgaagattactcttttttgatggccactaatcttgaatctgcatatcatctttgccaacttgcacatcctcttctaaaagcatctggtttgggaagcattgttttcatatcatctgtctgtggattagtagccgtatttagcggtactctatatgccatgactaaaggtgccatcaaccagttaaccaagaacctagcatgtgaatgggcaaaagatggcataagaacaaactctgttgctccatggtacataacgacttcgcttacagaaggacttttggctaacaaggaatttgaggcctccgttgtgagtcgaactccactggggcgtgtcggagaaccaggagaggtatcatcgctggttgcttttctttgcatgcctggttccacttacataacaggccagacgatctcagtggatggaggtatgagtgtcaatgggctctatccagcttga

SEQ ID NO: 147339 - protein, 272 aa, Triticum aestivum
MAAAEPSGSSQPGAPGRWSLHGKTALVTGGTRGIGRAVVEELAALGAAVHTCSRKEAELGERLKEWEARGFRVTTSVCDLSVREQRERLIGDVAERFGGKLNILVNNVGTNIRKPTTEFSAEDYSFLMATNLESAYHLCQLAHPLLKASGLGSIVFISSVCGLVAVFSGTLYAMTKGAINQLTKNLACEWAKDGIRTNSVAPWYITTSLTEGLLANKEFEASVVSRTPLGRVGEPGEVSSLVAFLCMPGSTYITGQTISVDGGMSVNGLYPA

SEQ ID NO: 147340 - DNA, 792 bp, Triticum aestivum
  CDS (1)..(792)
atggcagccgctggagttaacagggagcagaggtggagcctcgccggcgcaaccgcgctggtcaccggaggcagcagaggaattgggcatgcaatcgtggaggagcttgtcgggctcggggcgcgggtgcacacgtgctccgagaacgcggcggagctggaggagagccgccggcggtgggaggagatgaagctgccggtcaccgtctccgtctgcgacgtctccgtgcgagcagagagggagaagctcatagagacggcgacgcagaccttcgacggcaagctcgacatactagtaaacaacgtgggacggaatctggccaaggcgtcggtggagtgcacggcggaggagtactcgcatctcatgtcgacaaacttagaggcggcgttccacctaagccagctcgcacaccccttcctccgagacgcctccatcgccggaggaggcagcatcgttaacatctcctcggttgcaagctcacttggctactcgaccctcgcagtatactgcatatctaaaggaggagttaatcagcttacaaggagccttgctgcggagtgggctcaagacaagatccgtgtcaactccgtcgctccgggtgggatcaataccgagctgcaaaagagtgtggatccggagattgtagaaaatacgttgtcaagaactccgatgcataggctcggtgagccagtggaggtggcatcaatggtgtcgttcctgtgcatgccagcagcttcctacgtcaccggccaggtcatctatgtcgatggaggccgaaccatcagcggctaa

SEQ ID NO: 147341 - protein, 263 aa, Triticum aestivum
MAAAGVNREQRWSLAGATALVTGGSRGIGHAIVEELVGLGARVHTCSENAAELEESRRRWEEMKLPVTVSVCDVSVRAEREKLIETATQTFDGKLDILVNNVGRNLAKASVECTAEEYSHLMSTNLEAAFHLSQLAHPFLRDASIAGGGSIVNISSVASSLGYSTLAVYCISKGGVNQLTRSLAAEWAQDKIRVNSVAPGGINTELQKSVDPEIVENTLSRTPMHRLGEPVEVASMVSFLCMPAASYVTGQVIYVDGGRTISG

SEQ ID NO: 147342 - DNA, 23 bp, Artificial sequence
  primer
atgcccatggccatcgatattag

SEQ ID NO: 147343 - DNA, 22 bp, Artificial sequence
  primer
ttaatcaaagctgacctcaatc

SEQ ID NO: 147344 - protein, 228 aa, Artificial sequence
  consensus sequence
  Variant (5)..(7): Xaa in position 5 to 7 is any amino acid
  Variant (8)..(9): Xaa in position 8 to 9 is any or no amino acid
  Variant (11)..(11): Xaa in position 11 is any amino acid
  Variant (13)..(22): Xaa in position 13 to 22 is any amino acid
  Variant (24)..(46): Xaa in position 24 to 46 is any amino acid
  Variant (47)..(63): Xaa in position 47 to 63 is any or no amino acid
  Variant (65)..(85): Xaa in position 65 to 85 is any amino acid
  Variant (86)..(92): Xaa in position 86 to 92 is any or no amino acid
  Variant (97)..(115): Xaa in position 97 to 115 is any amino acid
  Variant (116)..(119): Xaa in position 116 to 119 is any or no amino acid
  Variant (121)..(132): Xaa in position 121 to 132 is any amino acid
  Variant (134)..(138): Xaa in position 134 to 138 is any amino acid
  Variant (139)..(168): Xaa in position 139 to 168 is any or no amino acid
  Variant (170)..(175): Xaa in position 170 to 175 is any amino acid
  Variant (177)..(186): Xaa in position 177 to 186 is any amino acid
  Variant (187)..(191): Xaa in position 187 to 191 is any or no amino acid
  Variant (193)..(193): Xaa in position 193 is any amino acid
  Variant (197)..(197): Xaa in position 197 is any amino acid
  Variant (199)..(202): Xaa in position 199 to 202 is any amino acid
  Variant (204)..(209): Xaa in position 204 to 209 is any amino acid
  Variant (211)..(215): Xaa in position 211 to 215 is any amino acid
  Variant (216)..(217): Xaa in position 216 to 217 is any or no amino acid
  Variant (219)..(227): Xaa in position 219 to 227 is any amino acid
LVTGXXXXXGXGXXXXXXXXXXGXXXXXXXXXXXXXXXXXXXXXXXXXXXXXXXXXXXXXXXXDXXXXXXXXXXXXXXXXXXXXXXXXXXXXNNAGXXXXXXXXXXXXXXXXXXXXXXXNXXXXXXXXXXXXPXXXXXXXXXXXXXXXXXXXXXXXXXXXXXXXXXXXGXXXXXXSXXXXXXXXXXXXXXXYXASKXAXXXXTXXXXXXLXXXXXXXVXXXXXXXXXT

SEQ ID NO: 147345 - protein, 19 aa, Artificial sequence
  protein pattern
  Variant (3)..(3): Xaa in position 3 is Ala or Gly
  Variant (4)..(4): Xaa in position 4 is Ala, Asn, Gln, Ser or Thr
  Variant (5)..(5): Xaa in position 5 is any amino acid
  Variant (7)..(7): Xaa in position 7 is Ile or Leu
  Variant (9)..(18): Xaa in position 9 to 18 is any amino acid
  Variant (19)..(19): Xaa in position 19 is Asp, Glu or Gly
TGXXXGXGXXXXXXXXXXX

SEQ ID NO: 147346 - DNA, 318 bp, Synechocystis sp.
  CDS (1)..(318): transl_table=11
atgagcccctttaaaaaaacttacgttctcaaactctacgtagctggcaacacccccaactctgtgcgggccttaaaaatgctaaaaaatatccttgagcaagaattccagggagtttatgccctcaaagtaatcgacgtgttgaaaaatccccaattagccgaagaagataaaattcttgccacccccaccttggctaaaatcctaccgccccctgtcaggaaaatcatcggcgacctttccgaccgagagaaagtattgattggtttagacctgctctatgacgaaattcgggaacgggaagcagaagaccaataa

SEQ ID NO: 147347 - protein, 105 aa, Synechocystis sp. [sequence omitted]

SEQ ID NO: 147348 - DNA, 342 bp, Methanosarcina mazei Go1
  CDS (1)..(342): transl_table=11
atgggaaatgcggcacaaagcgaaaacgggcccgagcttctcgagtctgatacgacgtctgagcaggaattttatatcctgaggctatacgtagctggtcagactaaaaagagtttgacagccttcgccaacttaaagaaaatctgcgaagaacatctgggcggcaggtacaggattgaagtcatcgatcttctggagaacccgcagctggctaaaggagatcaaatattagctgttccaacactggttagaagactccctccaccaataaagaaaattataggagatctctcgaatacggagcgagtcctggtaggcctggatttgcgtcctgtggagtga

SEQ ID NO: 147349 - protein, 113 aa, Methanosarcina mazei Go1
MGNAAQSENGPELLESDTTSEQEFYILRLYVAGQTKKSLTAFANLKKICEEHLGGRYRIEVIDLLENPQLAKGDQILAVPTLVRRLPPPIKKIIGDLSNTERVLVGLDLRPVE

SEQ ID NO: 147350 - DNA, 375 bp, Methanosarcina mazei Go1
  CDS (1)..(375): transl_table=11
atgtctgataccgaagaggccagaaagtcagatgttaaggactcaacagcagcctttgaagaagcccttgccaaaggagaagataacaacatatatgttctgcgcctctatgtcgcagggatggggcccaaatcaatacaggcgataaacaatatcaagcatatatttgaagagtatgcgcccggcaagtatgagcttgaggtcattgatatctatcagcatcctgtctttgccagagatgagcagatagtggcagctcctactcttataaaagagctccctccaccattaagaaagctcataggcagcatgtcagataccgaaagggtccttatggggatggacctgaaatcaaaaaaagataaagaatgctaa

SEQ ID NO: 147351 - protein, 124 aa, Methanosarcina mazei Go1
MSDTEEARKSDVKDSTAAFEEALAKGEDNNIYVLRLYVAGMGPKSIQAINNIKHIFEEYAPGKYELEVIDIYQHPVFARDEQIVAAPTLIKELPPPLRKLIGSMSDTERVLMGMDLKSKKDKEC

SEQ ID NO: 147352 - DNA, 285 bp, Rhodopseudomonas palustris CGA009
  CDS (1)..(285): transl_table=11
atggccgatccgatcaagctggtgctgtatgtcgccggcgaaacgccgaaatcgctcgcggcgattcgcaacctcgagaagatctgtgccgagcacctcgccggcaagtacaaggtcgaagtgatcgatctgaagaagtcgccgcagctcgcccgcgagcacggcatcgtggcgatcccgacgctggtgaaggaattgccggtgccgatccgtaagatcatcggcgacctgtccgacacgccgaaagtcctggtgcatcttgcggtggaagagtcgtcctcgtga

SEQ ID NO: 147353 - protein, 94 aa, Rhodopseudomonas palustris CGA009
MADPIKLVLYVAGETPKSLAAIRNLEKICAEHLAGKYKVEVIDLKKSPQLAREHGIVAIPTLVKELPVPIRKIIGDLSDTPKVLVHLAVEESSS

SEQ ID NO: 147354 - DNA, 318 bp, Prochlorococcus marinus str. AS9601
  CDS (1)..(318): transl_table=11
atggcagcaagaaaaacatacattttaaaactctatgttgctggaaatacacctaattcaatgagagccttaaatactttaagaggaattttagaaaatgaattcaaaggtgtttacgctttgaaggttattgatgtactcaagcaaccccaacttgcagaagaagataaaattttagccaccccaaccttagctaaaattttaccgcctcctgtgagaaaaataataggtgatctctcagatagagagaaagtattaattggtttagatctcctttttgatgaattaactgaaactgaatatagtggagataaatag

SEQ ID NO: 147355 - protein, 105 aa, Prochlorococcus marinus str. AS9601
MAARKTYILKLYVAGNTPNSMRALNTLRGILENEFKGVYALKVIDVLKQPQLAEEDKILATPTLAKILPPPVRKIIGDLSDREKVLIGLDLLFDELTETEYSGDK

SEQ ID NO: 147356 - DNA, 327 bp, Prochlorococcus marinus str. MIT 9515
  CDS (1)..(327): transl_table=11
atggcggcaagaaaaacttatattctaaaactttacgtagcaggtaatactcctaattcaatgagagctctaaatactcttaaagaaattctagaaaatgaatttaaaggagtttatgctttaaaagtaatagatgtccttaaacaaccacaacttgcagaagaagataaaattttggctactccaactcttgccaagattttacctccgcctgttagaagaataattggtgatctgtcagatagagaaaaggttttaataggtttagatttactttttgatgaattatcagagagtgaattgaatgggggtaaaaaaaataaataa

SEQ ID NO: 147357 - protein, 108 aa, Prochlorococcus marinus str. MIT 9515
MAARKTYILKLYVAGNTPNSMRALNTLKEILENEFKGVYALKVIDVLKQPQLAEEDKILATPTLAKILPPPVRRIIGDLSDREKVLIGLDLLFDELSESELNGGKKNK

SEQ ID NO: 147358 - DNA, 360 bp, Prochlorococcus marinus str. MIT 9303
  CDS (1)..(360): transl_table=11
atgagcccaagaaaaacctacatcctcaagttgtacgtagcagggaatacccctaattcgatgcgggcgcttaaaactctgcgcgacatcctcgagaacgagttccgtggcgtgtatgcgctcaaggtgatcgatgttctcaagaatcctcagcttgcagaggaagacaagattctggcaacaccaaccttggccaagatcctgccgccaccggtgcgcaggatcattggtgacctctcagatcgcgaaagggttttgattggtcttgacctcctctatgacgagatctctgaggagatgctcggctcagcggagctggatacgttggcggacgatgacattgcatcgccagattcttaa

SEQ ID NO: 147359 - protein, 119 aa, Prochlorococcus marinus str. MIT 9303
MSPRKTYILKLYVAGNTPNSMRALKTLRDILENEFRGVYALKVIDVLKNPQLAEEDKILATPTLAKILPPPVRRIIGDLSDRERVLIGLDLLYDEISEEMLGSAELDTLADDDIASPDS

SEQ ID NO: 147360 - DNA, 297 bp, Bradyrhizobium sp. ORS278
  CDS (1)..(297): transl_table=11
atgacggccgcagcgatggaacaggatggctacaatctccggctctatgtcgcgggccagacgcccaaatcggtggcggctctcgccaacctcaagaagctgtgcgagacgcatctgcctggccgctacacgatcgaagtgatcgatctgatgaaggatcctgcgctcgcgcagcgcgaccagatcgtcgcgatcccgacgctgatcagacagctgccggagccgctcaagcggatcatcggcgacctctccaatgcggagaaggtgctcgtcggtctggatattgctccgagctga

SEQ ID NO: 147361 - protein, 98 aa, Bradyrhizobium sp. ORS278
MTAAAMEQDGYNLRLYVAGQTPKSVAALANLKKLCETHLPGRYTIEVIDLMKDPALAQRDQIVAIPTLIRQLPEPLKRIIGDLSNAEKVLVGLDIAPS

SEQ ID NO: 147362 - DNA, 333 bp, Bradyrhizobium sp. ORS278
  CDS (1)..(333): transl_table=11
atgacgtaccatctcggactttttgtcaccggacagaccctgcattcgctgcgcgcgatcgaaaatctacgccgcatctgcgagcaggaattcgcgggcctctgtgtcgtcgagatcatcgacgtgaccgagcgccccgacgtggccgaacgggaacggatcgtcgcgacgccgacactggtgcggcgagacccgccgccggtgcggaaaatcatcggcgatctcagtgacacgcggcgggtgctgctggcgctcggcatcgcccatgatcgatctcacgcatcggagacgcaggacggggagacaggaaatggctctgactggagcgcatga

SEQ ID NO: 147363 - protein, 110 aa, Bradyrhizobium sp. ORS278
MTYHLGLFVTGQTLHSLRAIENLRRICEQEFAGLCVVEIIDVTERPDVAERERIVATPTLVRRDPPPVRKIIGDLSDTRRVLLALGIAHDRSHASETQDGETGNGSDWSA

SEQ ID NO: 147364 - DNA, 324 bp, Prochlorococcus marinus str. NATL2A
  CDS (1)..(324): transl_table=11
atgaatgcaagaaagacatatattctcaagctttatgtggctgggaatacaccaaactctatgagggctttgaacacgttgagagaaatcttagaaagtgaattcaaaggtgtctatgctctgaaggttattgatgttttaaaaagccctcaattagccgaagaagataaaatacttgccacaccaaccttgtctaagattttacccccacctgttcgaagaatcattggtgacctatcagatagagaaaaggtcttaattggactggaccttttgtatgatgaattatctgataatgaaatgttttactcttcagataaataa

SEQ ID NO: 147365 - protein, 107 aa, Prochlorococcus marinus str. NATL2A
MNARKTYILKLYVAGNTPNSMRALNTLREILESEFKGVYALKVIDVLKSPQLAEEDKILATPTLSKILPPPVRRIIGDLSDREKVLIGLDLLYDELSDNEMFYSSDK

SEQ ID NO: 147366 - DNA, 327 bp, Anabaena variabilis ATCC 29413
  CDS (1)..(327): transl_table=11
atgaataaagccagaaagacatacgtcctcaagctttacgtagcaggcaatacaccgaactcagtcagggcgttaaaaacactcaaaaatattttagaacaggagtttcaaggtatttatgccctaaaagtaattgatgtgctgaagaatccacaattagcagaagaagataaaatattagccaccccaacattatcaaagattttacccccaccagtccgcaaaatcattggtgatctttcagaccgtgaaagagttctgattggtttagatttgttgtatgaagaactaacagaagaagattgggaagcacaaagtagtctttaa

SEQ ID NO: 147367 - protein, 108 aa, Anabaena variabilis ATCC 29413
MNKARKTYVLKLYVAGNTPNSVRALKTLKNILEQEFQGIYALKVIDVLKNPQLAEEDKILATPTLSKILPPPVRKIIGDLSDRERVLIGLDLLYEELTEEDWEAQSSL

SEQ ID NO: 147368 - DNA, 270 bp, Rhodobacter sphaeroides 2.4.1
  CDS (1)..(270): transl_table=11
atgcgtcgcctcgtcctctatgtcgcgggtcagacccccaaatctctggccgccatcagcaacctccgccgcatctgcgaggaaaacctgcccggccagtatgaggtcgaggtcatcgacctgaagcagaatccgcggctcgccaaggaacacagcatcgtggcgatccccaccctcgtgcgcgagctgccggtgccgatccgcaagatcatcggcgacctgtccgacaaggagcaggtgctggtgaacctcaagatggacatggagtag

SEQ ID NO: 147369 - protein, 89 aa, Rhodobacter sphaeroides 2.4.1
MRRLVLYVAGQTPKSLAAISNLRRICEENLPGQYEVEVIDLKQNPRLAKEHSIVAIPTLVRELPVPIRKIIGDLSDKEQVLVNLKMDME

SEQ ID NO: 147370 - DNA, 291 bp, Rhodospirillum rubrum ATCC 11170
  CDS (1)..(291): transl_table=11
atggacatgacgatgaatagcccacggaaactaacgctctatgttgccgggcagacgcccaaatccttggcggcgatttcaaatctcgaacggatttgcgcggaacatctgccgggaaaatacaccgtcgaggtgatcgacctcaagaagaacccgcaactggcccgcgaacatagcatcgtcgccatcccgaccctggtcagggaattacccattcccctgcgcaagatcatcggcgatctatccgatacctataaagttctggtcaaccttcaggtcgaaatggattaa

SEQ ID NO: 147371 - protein, 96 aa, Rhodospirillum rubrum ATCC 11170
MDMTMNSPRKLTLYVAGQTPKSLAAISNLERICAEHLPGKYTVEVIDLKKNPQLAREHSIVAIPTLVRELPIPLRKIIGDLSDTYKVLVNLQVEMD

SEQ ID NO: 147372 - DNA, 315 bp, Trichodesmium erythraeum IMS101
  CDS (1)..(315): transl_table=11
atgagtcctctaaagaaaacctatgttttgaagttatacgttgctggaaatactcctaattctgtgcgggcattaaaaacactcaaagaaattctggaacaagaatttcaaggggtttatgccttaaaagtaatagacgtattgaaaaatcctcaactagcagaagaagataaaatattggcaacaccaactttgtccaaaatattacctccacccgttagaaaaatcattggtgatctctcagatcgagaaaaggtcttaattgggttggatctactttatgaagaactcaacgaagacgaatacaatctttaa

SEQ ID NO: 147373 - protein, 104 aa, Trichodesmium erythraeum IMS101
MSPLKKTYVLKLYVAGNTPNSVRALKTLKEILEQEFQGVYALKVIDVLKNPQLAEEDKILATPTLSKILPPPVRKIIGDLSDREKVLIGLDLLYEELNEDEYNL

SEQ ID NO: 147374 - DNA, 360 bp, Synechococcus sp. CC9311
  CDS (1)..(360): transl_table=11
atgagccctaggaagacttatatcctgaagctttatgtggcagggaacacgcccaattcgatgcgtgcactcaaaacgcttcgcaatattcttgaaacggaatttaagggtgtctacgctctcaaggtcattgatgtcttgaaaaatcctcagcttgcagaagaggacaaaattctggcaacccccacgttgtccaaaattcttccgcctcctgtgcgtcggattattggtgatctttctgatcgcgaacgagtgctgatcggacttgatcttctttacgacgagcttgttgacaacgacctcaactcttccctgatggacgcgttgggagtcccggatatcgaagaggcagattcttaa

SEQ ID NO: 147375 - protein, 119 aa, Synechococcus sp. CC9311
MSPRKTYILKLYVAGNTPNSMRALKTLRNILETEFKGVYALKVIDVLKNPQLAEEDKILATPTLSKILPPPVRRIIGDLSDRERVLIGLDLLYDELVDNDLNSSLMDALGVPDIEEADS

SEQ ID NO: 147376 - DNA, 330 bp, Magnetospirillum magnetotacticum MS-1
  CDS (1)..(330): transl_table=11
atgagcgggacggagccgatcgacggcgaggacgcccccgacgagggtcattaccatctgcgcctctacgtggccgggcagaccgccaaatccctcgcggcgatggcgaatctgaagcgcttctgcgaggagcacctcgccggtcactacgacatcgaggtggtcgacctcatgaagaacccgcagctcgccgcgggcgatcagatcctggcgatcccgaccctggtgcgccgcctgcccgccccgctcaagcgcatcatcggcgacctgtccaacaccgagaaggtgctgatcggactcgacatccggccgaaggcgggcgggttttga

SEQ ID NO: 147377 - protein, 109 aa, Magnetospirillum magnetotacticum MS-1
MSGTEPIDGEDAPDEGHYHLRLYVAGQTAKSLAAMANLKRFCEEHLAGHYDIEVVDLMKNPQLAAGDQILAIPTLVRRLPAPLKRIIGDLSNTEKVLIGLDIRPKAGGF

SEQ ID NO: 147378 - DNA, 315 bp, Nostoc punctiforme PCC 73102
  CDS (1)..(315): transl_table=11
atgattaaagccaaaaaaacctacgttctcaagctttacgtagcagggaatacccctaattcagttcgggcattgaaaacactcaaaaatattttagagcaggagtttgaaggtgtttatgctttaaaagtgatcgatgtattgaaaagcccacaactggcagaagaagataaaatattggcaacgccaacattatccaaaattttgcctccacctgttcgcaaaattatcggcgatctttcagatcgagaaagagtattgattggattagatttgctttatgaagaactgagtgaaggagattttgaagagtaa

SEQ ID NO: 147379 - protein, 104 aa, Nostoc punctiforme PCC 73102
MIKAKKTYVLKLYVAGNTPNSVRALKTLKNILEQEFEGVYALKVIDVLKSPQLAEEDKILATPTLSKILPPPVRKIIGDLSDRERVLIGLDLLYEELSEGDFEE

SEQ ID NO: 147380 - DNA, 285 bp, Crocosphaera watsonii WH 8501
  CDS (1)..(285): transl_table=11
atgaacaaatatctactcagactctacattacaggtaacactattaactctcaacgggcgatcgccaacttatttcgtatctgtcatgaagagttgcaagatcaatacaccatagaaatcatcgatgtccttgaacaaccccaaaccgccgagaaagaaaaaattttagttaccccaaccctaattaaacagttacctccacccttacaacgtattatcggggatatgtccaacacgcaaaaagtcctcttagggttagatttagtctcagaagataaaaactaa

SEQ ID NO: 147381 - protein, 94 aa, Crocosphaera watsonii WH 8501
MNKYLLRLYITGNTINSQRAIANLFRICHEELQDQYTIEIIDVLEQPQTAEKEKILVTPTLIKQLPPPLQRIIGDMSNTQKVLLGLDLVSEDKN

SEQ ID NO: 147382 - DNA, 360 bp, Synechococcus sp. RS9917
  CDS (1)..(360): transl_table=11
atgagtgctcgcaagacctacatcctcaagctctacgtcgccgggaacacgcctaactcgatgcgtgcgctcaagacgctgcgcaacatcctcgagaccgagttccagggggtgtacgccctcaaggtgatcgatgtgctcaaaaatccccagctggccgaggaggacaagattctggccacgccaacgctctcgaagatcctgccgccgccggtgcggcggatcatcggagacctctccgatcgggaacgggtgctgatcggtcttgatctgctctacgacgaactctctgacaatggcctgacctcctcgctgatggatgcgttggaggacgccgacacagacagcacagattcttaa

SEQ ID NO: 147383 - protein, 119 aa, Synechococcus sp. RS9917
MSARKTYILKLYVAGNTPNSMRALKTLRNILETEFQGVYALKVIDVLKNPQLAEEDKILATPTLSKILPPPVRRIIGDLSDRERVLIGLDLLYDELSDNGLTSSLMDALEDADTDSTDS

SEQ ID NO: 147384 - DNA, 360 bp, Synechococcus sp. WH 7805
  CDS (1)..(360): transl_table=11
atgagcccacgcaagacctacatcctcaagctgtatgtggccggcaatacgcctaactcgatgcgagctctgaaaacccttcgcaacattcttgaaaccgaattcaagggtgtctacgccttgaaggtgattgatgtgctgaagaatcctcagttggcggaagaagacaagattttggcaaccccgaccctctccaaaatcctgccgccccctgtgcgccgcatcatcggcgatctgtccgaccgggagagggtgctgattggtctggatcttctctatgacgaactttccgacaacagcctgacgtcgacgttgatggatgcgttggaagacgcagacacaacagattcagattcttaa

SEQ ID NO: 147385 - protein, 119 aa, Synechococcus sp. WH 7805
MSPRKTYILKLYVAGNTPNSMRALKTLRNILETEFKGVYALKVIDVLKNPQLAEEDKILATPTLSKILPPPVRRIIGDLSDRERVLIGLDLLYDELSDNSLTSTLMDALEDADTTDSDS

SEQ ID NO: 147386 - DNA, 315 bp, Microcystis aeruginosa
  CDS (1)..(315): transl_table=11
atgagcgtctttaaaaaaacctatgttttaaaactgtacgtcgccggcaatacccccaactccgtgcgtgccttaaaaaccctgaaaaatatcctagaagaggaatttcagggagtgtatgcgctcaaggtgattgacgtgctgaaaaacccgcaactagcggaggaagacaagattctcgctactcctacccttgcgaaagtcctccctcccccggtgcggaaaattattggtgatttgtccgatcgagagaaggttctgatcggtttagacttactatacgaggaaattcgtgaacgagaaaatgatagctag

SEQ ID NO: 147387 - protein, 104 aa, Microcystis aeruginosa
MSVFKKTYVLKLYVAGNTPNSVRALKTLKNILEEEFQGVYALKVIDVLKNPQLAEEDKILATPTLAKVLPPPVRKIIGDLSDREKVLIGLDLLYEEIRERENDS

SEQ ID NO: 147388 - DNA, 327 bp, Nostoc cycadae
  CDS (1)..(327): transl_table=11
atgaataaagccagaaaaacttatgttctcaagctttacgtagcggggaacactcctaactcagttcgggcattaaaaacactaaaaaacatattagaccaagagtttcaaggtgtttatgcactgaaagtcatcgatgtcatgaaaaatccccaactagctgaagaagataaaatcttagccacaccaacattatcgaaaattttgcccccacctgtgcggaaaattattggtgatctttcagacagagaaagagtattaattggattagatttactgtatgaagaactgagtgaagaagactgggaagagtcgcataacctttaa

SEQ ID NO: 147389 - protein, 108 aa, Nostoc cycadae
MNKARKTYVLKLYVAGNTPNSVRALKTLKNILDQEFQGVYALKVIDVMKNPQLAEEDKILATPTLSKILPPPVRKIIGDLSDRERVLIGLDLLYEELSEEDWEESHNL

SEQ ID NO: 147390 - DNA, 327 bp, Synechocystis sp
  CDS (1)..(327): transl_table=11
atggaaaatttaaacgctctatctggcaatcaaaacttggaagtttggcaactgcgtctgtatgtagcgggacaaactcctaaatccgtcacagcttttataaatttaaaaaagatttgtgaagaatatctaaacggtcaataccaaattgaaatcatcgatttgacccaacaacctgaattggcgattgaagatagtattttggcattgcctactttagtaagaaaattacccgaaccaatcaaaaaaattattggtgatttgtccaatacagaaaaggtattagtgggcttacaaattttaccctctatggattggaaaatctag

SEQ ID NO: 147391 - protein, 108 aa, Synechocystis sp
MENLNALSGNQNLEVWQLRLYVAGQTPKSVTAFINLKKICEEYLNGQYQIEIIDLTQQPELAIEDSILALPTLVRKLPEPIKKIIGDLSNTEKVLVGLQILPSMDWKI

SEQ ID NO: 147392 - DNA, 309 bp, Synechocystis sp
  CDS (1)..(309): transl_table=11
atggatatgaataggattgtgttaagactttatatcacgggtaattcggtgcgttctcagcaggcgatcgccaatatttaccgcatttgccaagaagatctaggggatcagtacaatgttgaaatcattgacgtgttggaacagcctcaacgggcggaagaggaaaaaatcatggtcacccccaccttgatcaaacaattgccccctcccctacagcggattatcggcgatatgtccaatacggaaaaagttttgctgggattagatattgtgcccgaaggtttgcaggttcgtttgccggaggattaa

SEQ ID NO: 147393 - protein, 102 aa, Synechocystis sp
MDMNRIVLRLYITGNSVRSQQAIANIYRICQEDLGDQYNVEIIDVLEQPQRAEEEKIMVTPTLIKQLPPPLQRIIGDMSNTEKVLLGLDIVPEGLQVRLPED

SEQ ID NO: 147394 - DNA, 315 bp, Acaryochloris marina
  CDS (1)..(315): transl_table=11
atgagctctatcagaaaaacctatgttcttaaactctatgttgctggcaacacccctaactctgtcagggctttaagaactttaaatcatattcttgaaactgaatttcagggcgtttatgccctaaaagtgattgatgtattgaaaaatccgcaactggctgaggaagacaaaattttagcgacgccaaccctagcaaaagttttgccccctcccgttcgcaaaattattggtgatctatccgatcgtgagcgagtgctgattggtttagatctactctatgaagaactttctgatggcattatggagtactag

SEQ ID NO: 147395 - protein, 104 aa, Acaryochloris marina
MSSIRKTYVLKLYVAGNTPNSVRALRTLNHILETEFQGVYALKVIDVLKNPQLAEEDKILATPTLAKVLPPPVRKIIGDLSDRERVLIGLDLLYEELSDGIMEY

SEQ ID NO: 147396 - DNA, 360 bp, Prochlorococcus marinus
  CDS (1)..(360): transl_table=11
atgagcccaagaaaaacctacatcctcaagttgtacgtagcagggaatacccctaattcgatgcgggcgcttaaaactctgcgcgatatcctcgagaacgagttccgtggcgtgtatgcgctcaaggtgatcgatgtgctcaagaatcctcagcttgcagaggcagacaaaattctggccacaccaaccttggccaagatcctgccgccaccggtgcgcaggatcattggtgacctctcagatcgcgaacgggttttgattggtcttgacctcctctatgacgagatctctgaggagatgctcggctcagcggagctcgatacgttggcagacgatgacattgcgtcgccagattcttaa

SEQ ID NO: 147397 - protein, 119 aa, Prochlorococcus marinus
MSPRKTYILKLYVAGNTPNSMRALKTLRDILENEFRGVYALKVIDVLKNPQLAEADKILATPTLAKILPPPVRRIIGDLSDRERVLIGLDLLYDEISEEMLGSAELDTLADDDIASPDS

SEQ ID NO: 147398 - DNA, 327 bp, Synechococcus elongatus
  CDS (1)..(327): transl_table=11
atggcccccttgcggaaaacctatgttctcaagctatacgttgccggtaacacacccaactcggtgcgtgccctaaaaactctcaataacattcttgaaaaagaatttaagggagtctatgcactcaaagtaatcgatgtcctcaaaaatccgcaactggctgaggaagataaaattttggccacgcctacccttgccaaagtcctaccgccccctgtgcgccggattattggggacttgtcgaatcgtgagaaggtgctcattggcttagatctcttgtatgaagagattggtgaccaagccgaggatgacttaggcttggaatag

SEQ ID NO: 147399 - protein, 108 aa, Synechococcus elongatus
MAPLRKTYVLKLYVAGNTPNSVRALKTLNNILEKEFKGVYALKVIDVLKNPQLAEEDKILATPTLAKVLPPPVRRIIGDLSNREKVLIGLDLLYEEIGDQAEDDLGLE

SEQ ID NO: 147400 - DNA, 315 bp, Synechococcus sp
  CDS (1)..(315): transl_table=11
atgagcccacgcaagacctacatcctcaagctctacgtcgccggaaacacgccgaattcgatgcgtgccctcaaaacgctgcgcaacatccttgaaaccgagttccgcggcgtttacgccctgaaggtgattgacgttctcaaaaatccccagcttgctgaggaagacaagatccttgctactcccaccctttcgaagatccttccgccgccggtgcgccgcatcatcggtgatctgtcggatcgtgagcgggtgctgatcggcctcgatctgctgtacgacgaattggccgacaacgccttcagttccggctag

SEQ ID NO: 147401 - protein, 104 aa, Synechococcus sp
MSPRKTYILKLYVAGNTPNSMRALKTLRNILETEFRGVYALKVIDVLKNPQLAEEDKILATPTLSKILPPPVRRIIGDLSDRERVLIGLDLLYDELADNAFSSG

SEQ ID NO: 147402 - DNA, 20 bp, Artificial sequence
  primer
atgagcccctttaaaaaaac

SEQ ID NO: 147403 - DNA, 20 bp, Artificial sequence
  primer
ttattggtcttctgcttccc

SEQ ID NO: 147404 - protein, 84 aa, Artificial sequence
  consensus sequence
  Variant (2)..(2): Xaa in position 2 is any amino acid
  Variant (4)..(4): Xaa in position 4 is any amino acid
  Variant (10)..(10): Xaa in position 10 is any amino acid
  Variant (13)..(13): Xaa in position 13 is any amino acid
  Variant (15)..(16): Xaa in position 15 to 16 is any amino acid
  Variant (18)..(20): Xaa in position 18 to 20 is any amino acid
  Variant (22)..(23): Xaa in position 22 to 23 is any amino acid
  Variant (25)..(25): Xaa in position 25 is any amino acid
  Variant (27)..(30): Xaa in position 27 to 30 is any amino acid
  Variant (32)..(32): Xaa in position 32 is any amino acid
  Variant (34)..(36): Xaa in position 34 to 36 is any amino acid
  Variant (40)..(43): Xaa in position 40 to 43 is any amino acid
  Variant (48)..(51): Xaa in position 48 to 51 is any amino acid
  Variant (53)..(53): Xaa in position 53 is any amino acid
  Variant (55)..(55): Xaa in position 55 is any amino acid
  Variant (59)..(61): Xaa in position 59 to 61 is any amino acid
  Variant (64)..(64): Xaa in position 64 is any amino acid
  Variant (66)..(68): Xaa in position 66 to 68 is any amino acid
  Variant (75)..(76): Xaa in position 75 to 76 is any amino acid
  Variant (78)..(78): Xaa in position 78 is any amino acid
  Variant (81)..(81): Xaa in position 81 is any amino acid
YXLXLYVAGXTPXSXXAXXXLXXIXEXXXXGXYXXXVIDXXXXPQLAXXXXIXAXPTLXXXLPXPXXXIIGDLSXXEXVLXGLD

SEQ ID NO: 147405 - protein, 61 aa, Artificial sequence
  protein pattern
  Variant (2)..(3): Xaa in position 2 to 3 is any amino acid
  Variant (4)..(4): Xaa in position 4 is any or no amino acid
  Variant (6)..(7): Xaa in position 6 to 7 is any amino acid
  Variant (8)..(8): Xaa in position 8 is any or no amino acid
  Variant (10)..(10): Xaa in position 10 is any amino acid
  Variant (12)..(12): Xaa in position 12 is any amino acid
  Variant (13)..(13): Xaa in position 13 is Ile, Leu or Val
  Variant (14)..(14): Xaa in position 14 is Glu or Lys
  Variant (15)..(15): Xaa in position 15 is Ile or Val
  Variant (18)..(18): Xaa in position 18 is Ile, Leu or Val
  Variant (19)..(21): Xaa in position 19 to 21 is any amino acid
  Variant (23)..(23): Xaa in position 23 is any amino acid
  Variant (24)..(24): Xaa in position 24 is Phe or Leu
  Variant (26)..(26): Xaa in position 26 is any amino acid
  Variant (27)..(27): Xaa in position 27 is Ala, Asp, Glu or Gly
  Variant (28)..(28): Xaa in position 28 is Asp, Glu or His
  Variant (29)..(29): Xaa in position 29 is any amino acid
  Variant (31)..(31): Xaa in position 31 is Leu or Val
  Variant (33)..(33): Xaa in position 33 is any amino acid
  Variant (37)..(37): Xaa in position 37 is any amino acid
  Variant (38)..(38): Xaa in position 38 is Lys or Arg
  Variant (39)..(39): Xaa in position 39 is any amino acid
  Variant (42)..(42): Xaa in position 42 is any amino acid
  Variant (44)..(44): Xaa in position 44 is Ile, Leu or Val
  Variant (45)..(46): Xaa in position 45 to 46 is Lys or Arg
  Variant (47)..(47): Xaa in position 47 is Ile or Leu
  Variant (50)..(50): Xaa in position 50 is Asp or Ser
  Variant (51)..(51): Xaa in position 51 is Leu or Met
  Variant (53)..(53): Xaa in position 53 is Asp or Asn
  Variant (54)..(56): Xaa in position 54 to 56 is any amino acid
  Variant (59)..(59): Xaa in position 59 is Ile, Met or Val
  Variant (60)..(60): Xaa in position 60 is any amino acid
  Variant (61)..(61): Xaa in position 61 is Leu or Met
IXXXEXXXGXYXXXXIDXXXXPXXAXXXXIXAXPTLXXXLPXPXXXXIGXXSXXXXVLXXX

SEQ ID NO: 147406 - protein, 19 aa, Artificial sequence
  protein pattern
  Variant (2)..(2): Xaa in position 2 is any amino acid
  Variant (8)..(8): Xaa in position 8 is Asn or Gln
  Variant (10)..(11): Xaa in position 10 to 11 is any amino acid
  Variant (13)..(13): Xaa in position 13 is Leu, Met or Val
  Variant (14)..(14): Xaa in position 14 is any amino acid
  Variant (16)..(16): Xaa in position 16 is Phe, Ile, Leu or Met
  Variant (17)..(18): Xaa in position 17 to 18 is any amino acid
LXLYVAGXTXXSXXAXXXL

SEQ ID NO: 147407 - DNA, 1500 bp, Synechocystis sp.
  CDS (1)..(1500): transl_table=11
atgcggattctcattttaaacccaccccacccggccattggtagccgaattccaaaggaacaactgccacctctggggcttttaagtattggtggcccattgttggatgctggccatgatgttactctgctcgatgctgaatttggtccacttacagacagtgaaatcgtagaacgagtttgcgctcattgcccacaattacttttgattgggcattctggatcaacttctgcccatcccatcgtttgccgcctaacgttgtttttacgtgaacgattgccaaacttgataattgtttatggtggtgtttttccgacttatcattttcatgacatcctaacaaaggaaccccaaattgattttattgttcgaggtgaaggtgaagctactgttgccaaattgatagccgcccttgaaaatcataatgatttaaataaagtagatggtattgccttccgtcgcgacgaacaaattattgaaacgcttcctgctccgatgattcaagaccttgatgtctatcgtgtgggctgggaactcgtagacttgaaaaaatatagttattatggcggtaaacaggccgtggttatccagttttcccggggttgtccccatttgtgtaactattgcggacaaaggggattttgggcccgttggcgacatcgtgatcctaaaaaatttgcccaggaaattgtctggctccatcgaactcacggcgtacaattatttaatttagcggatgaaaatccaacggtaaataaagccatttggcaagagttttgcgaagctatcatcgccgaaaatatatccataactattatcggttcaactcgagcagatgatattgtacgggatgccgatattctacatctttaccgcagggcaggagtcgagcgatttttgttaggtatggaaaatacaaatgaagctacgctcaagcacatacgaaaaggaagtaagacaagcactgatcgtgaagcaattcgattattaagacagcataatattctctcccttgccacttgggtaacggattttgaagaggttagagatcgtgattttattcaggctttaaagcagttactgtattacgatcccgatcaaattatgtcgttgtacgttacgccccatcgttggactagtttctatggcattgcatcggaaaggcgtgtcatccaacttgatcaaaccaaatgggactataagcaccaagttttagcagctacccatatgcctccctggcgaatttttctgtgggtaaagttgattgaaattttgctacaaactcgaccgaaagcactatggcgtttattgtttcaaccgaataaagcttcgcgacggggaatgtattggtttaccctgatgggtcgtcgcgttttagtacatgagctgattaattttttctttggcgatcgccgagtgaaaaatgggcccacactacaggaattttggggaatgccacaagaacatcaagaaattcccttgagtatcactcgtaaataa

SEQ ID NO: 147408 - protein, 499 aa, Synechocystis sp.
MRILILNPPHPAIGSRIPKEQLPPLGLLSIGGPLLDAGHDVTLLDAEFGPLTDSEIVERVCAHCPQLLLIGHSGSTSAHPIVCRLTLFLRERLPNLIIVYGGVFPTYHFHDILTKEPQIDFIVRGEGEATVAKLIAALENHNDLNKVDGIAFRRDEQIIETLPAPMIQDLDVYRVGWELVDLKKYSYYGGKQAVVIQFSRGCPHLCNYCGQRGFWARWRHRDPKKFAQEIVWLHRTHGVQLFNLADENPTVNKAIWQEFCEAIIAENISITIIGSTRADDIVRDADILHLYRRAGVERFLLGMENTNEATLKHIRKGSKTSTDREAIRLLRQHNILSLATWVTDFEEVRDRDFIQALKQLLYYDPDQIMSLYVTPHRWTSFYGIASERRVIQLDQTKWDYKHQVLAATHMPPWRIFLWVKLIEILLQTRPKALWRLLFQPNKASRRGMYWFTLMGRRVLVHELINFFFGDRRVKNGPTLQEFWGMPQEHQEIPLSITRK

SEQ ID NO: 147409 - DNA, 1326 bp, Thermotoga maritima MSB8
  CDS (1)..(1326): transl_table=11
atgagagtgctcctcataaatccctacagcggtgggtactactacagactaggtgccgtctatcctcccctcggtctcatgtacattagttcctccctcaagagaaaaggacacagcgtggctctgatagacatgaacgtggagaaattcgatctggaaaggttcaatttcagagattacgatgtggtggggatatctgccgatactgtgcggtttcccgttgtggaaaggatcgcaaagaaggctaaagcgcagaacgtaacggtggtgatgggaggcccccacgcgacagcctactaccatgagatccttcagaagggactctgcgattacgtcgtgctcggagaaggagaaagagccttttcagatcttgtagagagcatagcaagcaatgaaaaatatcctctcatacccggtgttgcctacatgaaggatggagaagtaatagctttgccttctcgatttttggagaatctggacgatctgccgttccccgatagagagaaagtccatctttacagaacgaaattcgcgggtgagagagcgacgagtctgatcacctcaaggggctgtcctttcaactgcgagttctgcagtgcttctcagttcatgggaaggagaatcaggtggagaagcatcgaaaacgtgatagatgagctgaaaatcttgaaaaagttgggatacggatctgtcatcttcttcgatgacaacttcacgataaatccaaaaagagtcgtgaatctgtgcgaggaaatgatgaggaaagaccttcgtttcaagtggtgggcgttttcgagggctgatgaacttctgggacgagaagatatggtggaagcgatgtcgaaggccggttgtagaatgcttttcataggtttcgagagtgcgaacgatgaggtgctcgaggaatacggaaagaatttgaaatcagatatagctttcgacgtgatgaagcttttgaagaagtacaaggtagacgtgtttgcgagctttgtgattggagcgctgaaggacacgaggaaaaccatagaaaaaaccgtgaaattcgccaaaaaattgaaagcctccatcgttcagttctccattctcacaccgtatcccggcaccgcccttttcgaaaaactgaaacacctgatctttgaaaaagactggagaaaattcgacgggacgcacctggttttcaagcatccgaatttctcaccaaaggagctgaggagactcttcataaaggcctactacgccgtttacacgtcaccgaggctgatattcagacggggcataccgttccttgtgcgtctgctcttttatagagaagcctattttctctga

SEQ ID NO: 147410 - protein, 441 aa, Thermotoga maritima MSB8
MRVLLINPYSGGYYYRLGAVYPPLGLMYISSSLKRKGHSVALIDMNVEKFDLERFNFRDYDVVGISADTVRFPVVERIAKKAKAQNVTVVMGGPHATAYYHEILQKGLCDYVVLGEGERAFSDLVESIASNEKYPLIPGVAYMKDGEVIALPSRFLENLDDLPFPDREKVHLYRTKFAGERATSLITSRGCPFNCEFCSASQFMGRRIRWRSIENVIDELKILKKLGYGSVIFFDDNFTINPKRVVNLCEEMMRKDLRFKWWAFSRADELLGREDMVEAMSKAGCRMLFIGFESANDEVLEEYGKNLKSDIAFDVMKLLKKYKVDVFASFVIGALKDTRKTIEKTVKFAKKLKASIVQFSILTPYPGTALFEKLKHLIFEKDWRKFDGTHLVFKHPNFSPKELRRLFIKAYYAVYTSPRLIFRRGIPFLVRLLFYREAYFL

SEQ ID NO: 147411 - DNA, 1386 bp, Methanothermobacter thermautotrophicus str. Delta H
  CDS (1)..(1386): transl_table=11
ttggacgtcgtgcttataaaccccgaggacaggacagccgtgaaaaataaactgggctttgttttgccgcccctcaacctgatgtaccttggagcctcccttgaaagggcatccttcagtgttaagataatcgacgatgacctccggagaatgggagttgagggggttgccagactcgttgagaggatcaaccccttcatcgtgggaataaccgcaaccaccgcaacaataagaacatctctcgagtacataaaggccataaaggatcgtttacccaacgtcctgacggttataggcggtcctcaccccacatttctccctgtagacacactgagggagtgcagggaccttgatgttgttgtcatgggtgagggtgaggccaccatcgttgaccttgcagagaaccatgagaggggaggatccctggatggtgttgcaggtatcacctaccgcgagggtgacaggatacggacaaacgaaccccggcccctcatagaggaccttgatgagatacccttccccgcaaggcacctggtgcccttcagggactatgagacatccagccaggacgccggggggatgataaccagccgcggctgtgtctacccctgcaggtactgttcatcatccctcataatgggtaagaagttcagattcaggagcccggagaacgtagtggatgaggttgaggaacttgtggaggtttatggcctccatgatatagcattccttgacgacaccttcatgctccaccgaccccgtgccagggagatctctgaggagatccggaggaggaaccttgatgtgagctttgtcacgtcctcaagggtggatatggtccaggagtcccttctcagggacctgaggaacgctggaatgagcacaatatattatggcgttgaatcagggtgtcagcgcgtccttgatatgatgaaaaagggcataaccgtgaagcaggccgaggatgctgtgagggtcaccaagaaggttggggtggatgtcataacatccttcatactgggatatcccggtgaaaaaccctccgagatggaccggaccatagacttttcaataaagcttgacccggactacagccagtactcaatactgaccccattccccggcaccccgatctatgcggagctcaagagccagggactcatcgaagatgactgggagaattacaccgttataaagccggttatcaaatacgagaagctcggactgagccgtgaactcatccagaaaaaactcgtgaaggcctacatcaagttctattcaagaccacgttacctcctgaagcacagttacatgatacgcgtattcttcgaaaccctctacaggacctatatcgagccaaaaatccccttcaaaaaggacagatga

SEQ ID NO: 147412 - protein, 461 aa, Methanothermobacter thermautotrophicus str. Delta H
MDVVLINPEDRTAVKNKLGFVLPPLNLMYLGASLERASFSVKIIDDDLRRMGVEGVARLVERINPFIVGITATTATIRTSLEYIKAIKDRLPNVLTVIGGPHPTFLPVDTLRECRDLDVVVMGEGEATIVDLAENHERGGSLDGVAGITYREGDRIRTNEPRPLIEDLDEIPFPARHLVPFRDYETSSQDAGGMITSRGCVYPCRYCSSSLIMGKKFRFRSPENVVDEVEELVEVYGLHDIAFLDDTFMLHRPRAREISEEIRRRNLDVSFVTSSRVDMVQESLLRDLRNAGMSTIYYGVESGCQRVLDMMKKGITVKQAEDAVRVTKKVGVDVITSFILGYPGEKPSEMDRTIDFSIKLDPDYSQYSILTPFPGTPIYAELKSQGLIEDDWENYTVIKPVIKYEKLGLSRELIQKKLVKAYIKFYSRPRYLLKHSYMIRVFFETLYRTYIEPKIPFKKDR

SEQ ID NO: 147413 - DNA, 1599 bp, Sulfolobus tokodaii str. 7
  CDS (1)..(1599): transl_table=11
atgaaggcattatttataagacctaataatccttcaggaagcggatatttcaaatattttggcttcttaccgactccacttgggcttattcagttagctagtgatgttttatcagttggtaattgggaagctaaaataattgatatggaagctgacaatatgacaatagatgatgtggtgagtactgctatttcttatgatccagacatgataggaataacgttacatgctactgcagctcataacatagctacaaaaatagcacaacaaataaaatctcaattaaatgataccgttattattgctggaggtcatcatgctacatttgttccgtatcaaatgttaaatgagggattcgatatagtagtcctaggtgaaggagacgatactataatgaagttagcttctgcattaaaggaaggtaatagagatttttcgcaaataaggggaatagtatataaaaaggaaggaaagatattcaaaacccctcctgcccctttaatttcggatcttgatagtctacccgaacctgcattggagttagtaaaaaaggagaattatccagttaagatatttggagatgatcagtatgtagcttgcctagaaactgctaggggatgtccttatgcgtgtgatttttgttccgtaactcctacttggggtaacaaatggagaaataagtctaataacagaattcttaaggaaataagtaaagcaaaagaattaggatataactggatattttttgtagatgatatttttatagtttggcctaatagatctcagagggctgcattatttagaaaaatgatagagactaaaaatactattaatttcatagcacagatgagggctgatgttactgcacggaatccagaattaattaaacttgcatcagatgctggattaagaatagcatttcttggaattgaaagtgggagtcaagaagttctaaagaaaatgcataaagggttagcagtatcagattcaattaatgccgtaaaaacacttcatgaaaacggagttatagtattggtaggattaatgataggagcgccatacgaaacaataaaggatattcgggcgaccgtaaaattatcaagaaaattagccgatgtgggagcagacgcggttcaattctcgatttatactcctttgcccggaactagaatatttgtagaatctctcaaaaataatttattatttacgctcaattgggatcgatatgatgttattactccagtagttaaaactaaagtaaatccagctcttgtacagttaattgcagcatatgctagctatacattttacatatacaagtatttaaaaagtaaactaagattatcgaagattaagatacctgagaagaagctaacgctattaagaaaagcagaaaaatacctatggaaaaagataccatatcttgttaaggagtctttaattgatttaccaatttctgcagtaaagactcttaaaatgtatctgaagagagataatatccctgcagatgtgatacaatctcttatagctcaatcaagtaatataatttatcttgaaactggtgataagaatagatactataatataaagaacgagtaa

SEQ ID NO: 147414 - protein, 532 aa, Sulfolobus tokodaii str. 7
MKALFIRPNNPSGSGYFKYFGFLPTPLGLIQLASDVLSVGNWEAKIIDMEADNMTIDDVVSTAISYDPDMIGITLHATAAHNIATKIAQQIKSQLNDTVIIAGGHHATFVPYQMLNEGFDIVVLGEGDDTIMKLASALKEGNRDFSQIRGIVYKKEGKIFKTPPAPLISDLDSLPEPALELVKKENYPVKIFGDDQYVACLETARGCPYACDFCSVTPTWGNKWRNKSNNRILKEISKAKELGYNWIFFVDDIFIVWPNRSQRAALFRKMIETKNTINFIAQMRADVTARNPELIKLASDAGLRIAFLGIESGSQEVLKKMHKGLAVSDSINAVKTLHENGVIVLVGLMIGAPYETIKDIRATVKLSRKLADVGADAVQFSIYTPLPGTRIFVESLKNNLLFTLNWDRYDVITPVVKTKVNPALVQLIAAYASYTFYIYKYLKSKLRLSKIKIPEKKLTLLRKAEKYLWKKIPYLVKESLIDLPISAVKTLKMYLKRDNIPADVIQSLIAQSSNIIYLETGDKNRYYNIKNE

SEQ ID NO: 147415 - DNA, 1641 bp, Chlorobium tepidum TLS
  CDS (1)..(1641): transl_table=11
atgaaaattctgatgattcagccgaattatcactcaggcggcgccgaaattgcaggcaactggacgccaagctgggttgcctacatcggcggtgcgttgaagcaggctggcttcaatcaggtaaagtttgtggatgcaatggctgacgacctgccggacgagaccattgaagagatcatccgcaaaaaccagccggatgtggtaatgaccaccaatatcaccccgtcgatcttcaaggcgcaggacatcatgaagatcgccaagaaggtcaacaagaatatccgcaccatcatgggcggcattcactccaccttcatgtacccgcaggtgctcaccgaagccccggagaccgattacgtcgttcgcggcgaaggcgaagaggtgaccgtcaacctcatgaaggcgatcgcggcagggaacgacaaagagacacgctccgaaatcaccggcatcgcctatatcgatgagaacggtaaagtattcgcgacggcggcccacccggtcatcgaagacctcgacaccctgtcaccggactggagcctctacgactgggacaagtacatctacacccctctgaactgccgtctggccgtaccgaacttcgccagaggctgccccttcacctgcaccttctgctcgcagtggcagttctggcgccggtaccgcgcccgcagcccgaagaacttcgtggacgaaatcgagattctggtcaagaaatacaaagtaggcttcttcattctcgccgacgaagagccgaccattaacaagcagaagttcgtttcgctctgccaagaactgatcgaccgcaagctcgacgtcacttggggcatcaacacccgtgtgaccgacatcatgcgtgacgaagacctcctgccgttctaccgcaaggccggcttggtgcacgtctctctcggcaccgaggccgcgagccagatgaacctgaaccgcttccgcaaggaaaccaccatcgaagagaacaagtacgccatcaagctgctccagaaaaacggcatcgtagcggaagcgcagttcgtgatgggtctcgagcacgaaactccagagaccatcgaagagacctaccagctctgcaaggactgggatcccgacatggccaactggacgatctacacgccgtggcccttctccgacctcttcaaggagcttggcgaccgcgtcgaagtgcgtgactactctcgctacaacttcgtctcgccgatcatcaagccagacaacatggaacgcgaggacgtgctcaagggcgtgctgaaatcgtacggtcgcttttacgctcgcaagaccttcttcagctacccgtggatcaaggatccgtatgtgcgcaagtacatgctcggctgcctaaaagcgttcgcgaagactacgctcaccaagcgtttctacgacatcgaccgcgtcaagaccaagaaccgcaagatcgagatcgacctcggtttcgaccagtcgcgaatcctgacgcaggaagaggcgaagaacctgaaagagcggaggccagaaatgatcgccgacatgagcttcggtctcaaggaagccggctaccagcgagagcacgacgaacacaactgggacgagttcgacgaatcaacgatcagggatcgtacatccagcaccgtccgcaactgctga

SEQ ID NO: 147416 - protein, 546 aa, Chlorobium tepidum TLS
MKILMIQPNYHSGGAEIAGNWTPSWVAYIGGALKQAGFNQVKFVDAMADDLPDETIEEIIRKNQPDVVMTTNITPSIFKAQDIMKIAKKVNKNIRTIMGGIHSTFMYPQVLTEAPETDYVVRGEGEEVTVNLMKAIAAGNDKETRSEITGIAYIDENGKVFATAAHPVIEDLDTLSPDWSLYDWDKYIYTPLNCRLAVPNFARGCPFTCTFCSQWQFWRRYRARSPKNFVDEIEILVKKYKVGFFILADEEPTINKQKFVSLCQELIDRKLDVTWGINTRVTDIMRDEDLLPFYRKAGLVHVSLGTEAASQMNLNRFRKETTIEENKYAIKLLQKNGIVAEAQFVMGLEHETPETIEETYQLCKDWDPDMANWTIYTPWPFSDLFKELGDRVEVRDYSRYNFVSPIIKPDNMEREDVLKGVLKSYGRFYARKTFFSYPWIKDPYVRKYMLGCLKAFAKTTLTKRFYDIDRVKTKNRKIEIDLGFDQSRILTQEEAKNLKERRPEMIADMSFGLKEAGYQREHDEHNWDEFDESTIRDRTSSTVRNC

SEQ ID NO: 147417 - DNA, 1698 bp, Rhodopseudomonas palustris CGA009
  CDS (1)..(1698): transl_table=11
atgcgcatccttctcattcacccgaattatcattccggtggcgcggagatcgccggccactggccgccggcatgggccccctatctggcaggcgcgctgaaggcgaacggattcgccgacatcaaattcgtcgatgcgatgaccgaggagatctccaacgaaggtctcgccaagatcatctccgactatcagcccgacctggtcggcgccacatcgatcaccccatcgatttacgcggccgaagaagcactgaaggttgccaagcaggtcaacccgaagatcgtcaccatgctgggcggcgtgcatgcgaccttcatgtatcagcaggtgctgagcgaagcgccgtgggtcgacgtgatcgtccgcggcgaaggcgaagagatcgtcgtcgagctggcgcgcgccgttgcctcgggcaactggccggcgaaccgctccgagatcaagggcctcgcctacaccgaaggctccaacggcgagagccagatcgtcgccaccgcggcggctccgacggtcaaggacctcgacgccatcaagccggactggggcgtactgaactggaatctgtatcgctacattccgatgaacacccgcgtggcgatcccgaacatggcgcgcggctgtccgttcacctgttcgttctgctcgcagtggaaattctggcgcgactaccgcgtccgcgacccgaagaaggtggtcgacgagatccaggagctggtcgagaagtatgacgtcggcttcttcatcctcgccgacgaagaaccgaccatcaaccgcaagaagttcatccagttctgcgaagagctgatcgctcgcggcctgaacaagaaggtgcagtggggcatcaacacccgcgtcaccgacatcctgcgcgacgagcaactgctgaaattctacaacgaagccggcctgatgcacgtctcgctcggcacagaagcggcggctcagctcaagctcgacctgttcaacaaggagaccaagatctccgacaacaagaaggcgatccgcctgctccgcgaagccggcatcgtcgtcgaagcccagttcatcgtcggtctcgactccgagacccccgaaacgctggaagaaacctaccgcatggcgatggactggaagccggacctcgccaactggtcgatgtacaccccgtggccgttcacaccgctgttcaaggaactgtccgacaaggtcgaggtgttcgacttcgcaaagtacaacttcgtcacgccgatcgtgaagccggcggcgatggagcgcggcgaactgctcgaccgggtgatgaacaactatcgccgcttctacatgtacaaagcgttcttctcgtatccctggtcgggaacgggacgtcggcgtcgctacctgctgggctgcctgaaggcgttcctcaaggccggcttcgagcgcaagttctacgacctcggccgcgtcggttattgggggccgcagtcgaagaagaaggtcgacttccagttcgacaccacccgcaagatctcgcacgcgcagatggcggactgggaagccaacgccgaccgctcccgcaaggcggccgcctctcagatggcgatcgtctcggcctgcggcggtggtaccgatcagatggaagagagcgaagccgatgccaaggcggcgctcgccaagaccgtaaccagccgcgtggcggacagcacccatgacgcaggttcggtcacccgtcactga

SEQ ID NO: 147418 - protein, 565 aa, Rhodopseudomonas palustris CGA009
MRILLIHPNYHSGGAEIAGHWPPAWAPYLAGALKANGFADIKFVDAMTEEISNEGLAKIISDYQPDLVGATSITPSIYAAEEALKVAKQVNPKIVTMLGGVHATFMYQQVLSEAPWVDVIVRGEGEEIVVELARAVASGNWPANRSEIKGLAYTEGSNGESQIVATAAAPTVKDLDAIKPDWGVLNWNLYRYIPMNTRVAIPNMARGCPFTCSFCSQWKFWRDYRVRDPKKVVDEIQELVEKYDVGFFILADEEPTINRKKFIQFCEELIARGLNKKVQWGINTRVTDILRDEQLLKFYNEAGLMHVSLGTEAAAQLKLDLFNKETKISDNKKAIRLLREAGIVVEAQFIVGLDSETPETLEETYRMAMDWKPDLANWSMYTPWPFTPLFKELSDKVEVFDFAKYNFVTPIVKPAAMERGELLDRVMNNYRRFYMYKAFFSYPWSGTGRRRRYLLGCLKAFLKAGFERKFYDLGRVGYWGPQSKKKVDFQFDTTRKISHAQMADWEANADRSRKAAASQMAIVSACGGGTDQMEESEADAKAALAKTVTSRVADSTHDAGSVTRH

SEQ ID NO: 147419 - DNA, 1512 bp, Geobacter sulfurreducens PCA
  CDS (1)..(1512): transl_table=11
atgaaaaaaataaagcgtgtggcgctcatcacgcccccctatcactcgggggtcgtggaatcagccggcacctggcttaatgtcggatttgtctacatcgccgggtctctcagggcagcggggtatgaggtcgattactatgatgccatgtccctgtggcacacgtggcccgacatcaggaggcggatcgaggcgttccgccccgacgtggtggccaccaccgccttcaccgcgtccatcgtcgacgcgatcaggctgctgcgcttcgccaaggagatcgatcccggcatcgtgaccgtgctcggcaatgtgcacgccaccttctgctacgacgagatcctcgcccatgaccacgacgccgtcgacttcatcgtccggggcgagggtgaagtaacgctgccccggctctgtacctgcctcaatgccggagacgatccgtacaaggtggaagggctcgccttccggcgggacggcggcgtggtggtaacgccgcgggcgccgtacattcacgaccttgacgggctccccatggcctgggatctggtggaatggcccatttacacctaccgggcaaagaacgacgcccggctcgccatcgtctcctcgtcccgggggtgcaagcagcagtgctccttttgttcccagcagctcttctggtcacagtcgtggcgggcccgctccgccgagaacttcgtggcggagcttgagatgctccacaccgtgcacggcgtccaggtggccatgctttcggacgagattcccacctttgaccggcagcgatgggtccgcatcctggacctgatgatcgagcggcaggttccggtcaagctcctcatggaaacgagggtggacgacatcctgcgtgatgcggacattatggacaggtaccgggaagggggcgtcgagcatatctacgtgggggtggaggccggcacccaggagaccctggaccttttcaagaaggacacccaggtggagcagtccaagcaggctatcgacctgatcaacaacgccgacatcgtctcggaaacctccttcgtgctcggcatgcccgacgatacgccggaatccattgcccagaccattgagctggccaagcactacaatcctgacatggcctttttcctggccatagcgccctggccctacgccgagctctatccccaactggaggagtacgtggccaccaaggactaccgcaagtacaacctggtggagccggtcatcaagccgaagcacatgaccctggaagagctggagcgccaactcggcaaggcgtcccagcagtttttcatgcacaaattccagaatctgcaccagctatcggcatggaagcaggaattcatgctctcggtactggatctcctcatcaatcattcctacctggccggccagatgcgggccatgctcaaggagggaaaggagatgccggccgaggtaaaggcgctgctgcgcgcggtcggcgagcgcacgggcgcagcccatccccacgcggtggcgccgatcccctga

SEQ ID NO: 147420 - protein, 503 aa, Geobacter sulfurreducens PCA
MKKIKRVALITPPYHSGVVESAGTWLNVGFVYIAGSLRAAGYEVDYYDAMSLWHTWPDIRRRIEAFRPDVVATTAFTASIVDAIRLLRFAKEIDPGIVTVLGNVHATFCYDEILAHDHDAVDFIVRGEGEVTLPRLCTCLNAGDDPYKVEGLAFRRDGGVVVTPRAPYIHDLDGLPMAWDLVEWPIYTYRAKNDARLAIVSSSRGCKQQCSFCSQQLFWSQSWRARSAENFVAELEMLHTVHGVQVAMLSDEIPTFDRQRWVRILDLMIERQVPVKLLMETRVDDILRDADIMDRYREGGVEHIYVGVEAGTQETLDLFKKDTQVEQSKQAIDLINNADIVSETSFVLGMPDDTPESIAQTIELAKHYNPDMAFFLAIAPWPYAELYPQLEEYVATKDYRKYNLVEPVIKPKHMTLEELERQLGKASQQFFMHKFQNLHQLSAWKQEFMLSVLDLLINHSYLAGQMRAMLKEGKEMPAEVKALLRAVGERTGAAHPHAVAPIP

SEQ ID NO: 147421 - DNA, 1605 bp, Bradyrhizobium sp. ORS278
  CDS (1)..(1605): transl_table=11
atgcggatcttgttgctgcatcccaattatcactccggcggcgccgagatcgccggcaactggccccccgcctgggcggcgtatatttccggcgcgctgaaggcggccggcttcacagacctccgcttcatcgacgcgatgaccaacgatctctccgaggagcaggtccgcagcatcctgcgctctgagaagccggatgtgatcggctgcaccgcgatcacgccgtcgatctacaaggccgagcggctgctggagatcgccaaggaggagcacccggacgcgctgaccgtgctcggcggcatccatgccaccttcatgtatcagcaggtgctgaccgaagcgccctggatcgacgcgatcgtgcgcggcgagggcgaggagatcatcgtcgacctgatgcgcgcccgcgaggacggccgctggcagaacgaccgccgcagcatcaagggcatcgcctatcgcgacggcggcgaggtcgtggcgaccgtggcggcgccgacggtgaagaatctcgatgcgatcacgcccgactggagcgtgctcgaatggagcaaatacatctacatcccgatgaacaagcgcgtcgccatccccaacatggcgcgcggctgcccgttcacctgcagcttctgctcgcagtggaagttctggcgcgattaccgcatccgcgacccgaagaaggtggtcgacgagatcgagaccctgatgcgcgagcacgatgtcggtttcttcatcctcgccgacgaggagccgaccatcaacaagaagaagttcgtggcgttctgcgaggagctgatccgccgcgacctcaagatcctctggggcatcaacacccgcgtcaccgacatcctgcgcgacgaggcgctgctgccgctgtaccgcaaggccggcctgatccacgtctcgctgggcacggaagccgccgcgcagatgaagctcgaccgcttcaacaaggagaccacggtcgcgcagaacaagaaggcgatccagctgttgcgcgatgccggcatcgtggtcgaggcgcagttcatcgtcggcctcgagaacgagacccgcgagacgctggaagagacctaccagatggcgcgggattggaagccggatctcgccaactgggcgatgtacacgccgtggccgttctccgacctgttccgcgacctcggcgacaaggtcgagatcttcgactacgagaagtacaatttcgtcacccccatcatgaagcccgacgcgatggaccgcggtgagctgctcgacggcgtgatgaacaattaccgccgcttctacatgcgcaaggcgctgttctcgtacccctgggccggctccggcgaacgcaggcggtatctgcttggctgcctgaaggcgtttctgaagtccggcttcgagcgcaagttctacgatctcggccgcgttaactattgggggccgcaatccaagggcaaggtcgatttcggcttcgacacctcgcgcaagcgcgccgagcccggcaaggtggaatggaagacgagccataatcgcaagctgagcggaccgcagcaggcgcaggtgatggcctgcggcggcggcaccgagcagatgagcgaagaggccgagacgggagtgcattga

SEQ ID NO: 147422 - protein, 534 aa, Bradyrhizobium sp. ORS278
MRILLLHPNYHSGGAEIAGNWPPAWAAYISGALKAAGFTDLRFIDAMTNDLSEEQVRSILRSEKPDVIGCTAITPSIYKAERLLEIAKEEHPDALTVLGGIHATFMYQQVLTEAPWIDAIVRGEGEEIIVDLMRAREDGRWQNDRRSIKGIAYRDGGEVVATVAAPTVKNLDAITPDWSVLEWSKYIYIPMNKRVAIPNMARGCPFTCSFCSQWKFWRDYRIRDPKKVVDEIETLMREHDVGFFILADEEPTINKKKFVAFCEELIRRDLKILWGINTRVTDILRDEALLPLYRKAGLIHVSLGTEAAAQMKLDRFNKETTVAQNKKAIQLLRDAGIVVEAQFIVGLENETRETLEETYQMARDWKPDLANWAMYTPWPFSDLFRDLGDKVEIFDYEKYNFVTPIMKPDAMDRGELLDGVMNNYRRFYMRKALFSYPWAGSGERRRYLLGCLKAFLKSGFERKFYDLGRVNYWGPQSKGKVDFGFDTSRKRAEPGKVEWKTSHNRKLSGPQQAQVMACGGGTEQMSEEAETGVH

SEQ ID NO: 147423 - DNA, 1506 bp, Geobacter metallireducens GS-15
  CDS (1)..(1506): transl_table=11
atgaaaatcaagagaatagccctcattacccccccctaccacgcgggcgttgtggagtcggccggcacctggctcaatgtcggttttgtctacatcgccggggcactcagagcggcggggtacgaggtggattactacgatgccatgtctctgtggcacaagtggcccgacatccagaagcggatcgaggcgttccgccccgatatggttgccacgaccgcctataccgcctccattgtcgaagcggtgaaactgctccggttcgccaagtccatcaacccccgcatcgtgacggcgctcggcaacgtccacgcggccttctgttacgacgaggttcttacccacgaccacgacgccgtggactacatcgtcaggggggagggggaggagacgctccccatgctctgccactgcctcaatgccggcgatgacccgaagaaggttctcggaatcgcctactggcgcgacggcggggtggtggttacccccaaggccccgtacattcatgacctggacaatcttcccacagcctgggatctggtggagtggcccatctatacctaccgggccaagaagaacgcccggctggccatcgtctcctcttcccgcggctgcaaatcccagtgttccttctgttcccagcagctcttctgggcccagtcatggcgcgcccggagcgccgagaacttcgtggccgagctggagatgctccacaacgtccacggtgtccaggtggccatgctctccgacgagcttcccaccttcgaccgggagcggtgggtccggatcctggatctcatggtggaacgggaagtgccggtgaagcttctcatggagacccgggtggacgacattctgcgggacgccgatatcatggacaagtaccgggaaggtggcgttgagcacatctatgtgggggtcgaggcgggaagccaggaaaccctcgacctcttcaagaaggatacggaagttgcccagtccaagcaggccatcgacctgattaatggggccgacatcgtttcggaaacctctttcgtcctcggcatgcccgacgacacccctgaatccattgagcagaccatcgagctcgccaagcactacaaccctgacatggcgttctttcttgccatcgccccctggccctatgccgagctctaccccgagctcgagccctacgtggccaccaaggattaccgcaaatacaacctggtggagccggtcatcaagcccaaaaacatgaccatggaagaactggagcgccagttggggaaagcatcccagaagttcttcatgcacaagttccagaacctggacaagctctccccctggaagcaggagttcatgctgtcggtcctcgatctcctcattaaccactcctatctggccggccagatgaaggcgatgctcaaggaggggaaggagatgcccgcggaggtcaaggcgctcctgaaaacggtcagccagcacaagcatgtcccccaccagacgatagcgcccattccatga

SEQ ID NO: 147424 - protein, 501 aa, Geobacter metallireducens GS-15
MKIKRIALITPPYHAGVVESAGTWLNVGFVYIAGALRAAGYEVDYYDAMSLWHKWPDIQKRIEAFRPDMVATTAYTASIVEAVKLLRFAKSINPRIVTALGNVHAAFCYDEVLTHDHDAVDYIVRGEGEETLPMLCHCLNAGDDPKKVLGIAYWRDGGVVVTPKAPYIHDLDNLPTAWDLVEWPIYTYRAKKNARLAIVSSSRGCKSQCSFCSQQLFWAQSWRARSAENFVAELEMLHNVHGVQVAMLSDELPTFDRERWVRILDLMVEREVPVKLLMETRVDDILRDADIMDKYREGGVEHIYVGVEAGSQETLDLFKKDTEVAQSKQAIDLINGADIVSETSFVLGMPDDTPESIEQTIELAKHYNPDMAFFLAIAPWPYAELYPELEPYVATKDYRKYNLVEPVIKPKNMTMEELERQLGKASQKFFMHKFQNLDKLSPWKQEFMLSVLDLLINHSYLAGQMKAMLKEGKEMPAEVKALLKTVSQHKHVPHQTIAPIP

SEQ ID NO: 147425 - DNA, 1641 bp, Prosthecochloris aestuarii DSM 271
  CDS (1)..(1641): transl_table=11
atgaaaattctgatgcttcagccaaattatcactctggaggagctgaaattgccggaaactggaccccaagctgggtggcctatatcggcggtgctcttaaaaaggtgggctttacacagataaggtttgttgatgccatggcagacgatctccctgatgaaaccatcgaggaaatcatccgtacaaatgagccggacgtggtcctgaccaccaatatcactccctcgattttcaaagctcaggatatcatgaagcttgccaagaaagtcaaccccaagatcagaacgatcatgggcggcattcactcgaccttcatgtacccgcaggtgctctccgaagcccctgaaacagattacgtgatccgtggcgaaggcgaagagatcgccgtcaatctcatcaaggcaatcgctgcgggaaccgacctgcaggaccgtgaaaacatcaccggtatcgcctatatcaatgaagagggcaaggtgcatgccactcccgctcaccctgtcattgaagaccttgacgatctgactccggactggagcctgtacgattgggataaatatatctacacgcctctcaactgccgtctcgccgtaccgaacttcgcaagaggctgccccttcacctgtacattctgctcgcagtggcagttctggcgccgttaccgcgcacgcagcccgaaacattttgtcgatgagatcgagattctggtcaagaaatacgatgtaggattcttcattcttgccgacgaagagccgacaatcaacaagcagaaattcgtttcactctgtcaggaactcatcgatcgcgaccttggcgtcacctggggtatcaataccagggtaaccgacatcatgcgagacgaagaccttttgccgttctaccgcaaagccggtcttgttcacgtctctctcggcaccgaagcagcaagccagatgaacctcaaccgtttccgtaaagagacgaccatcgaggaaaacaagtacgccatcaaactgcttcagaaaaacggtattgtcgccgaagcacagtttgtgatgggtctggaacatgagacgcctcaaaccatcgaagagacctatcagctctgtaaggactgggatcctgacatggccaactggaccatctacactccatggcctttctccgaccttttcaaggagctcggcgacagggttgaagtccgtgactactcacgctacaacttcgtttctccgatcatcaaaccggataacatggagcgtgaagatgtgctgaaaggtgttctgaaatcatacggacgcttttacgcacgaaaaacattcttcagctacccgtggatcaaagatccctatgttcgcaagtacatgctcggctgcctgaaagcgtttgctcaaacaacgctcaccaagagattctacgacatcgaccgcgtatcgaccaagaacagaaagatcgagatcgacctcggcttcgacaagtccagaatcctgacacaggcagaagtcaagaacctgaaggaactgagacctgaaatggttgcagacatgagcttcggcctgaaagaagcaggctatcagcgtgagcatgacgaacatgactggggcgaatttgatgaatcgaccatcaaagatcgcaactcatcaaccgtacgcaactgctga

SEQ ID NO: 147426 - protein, 546 aa, Prosthecochloris aestuarii DSM 271
MKILMLQPNYHSGGAEIAGNWTPSWVAYIGGALKKVGFTQIRFVDAMADDLPDETIEEIIRTNEPDVVLTTNITPSIFKAQDIMKLAKKVNPKIRTIMGGIHSTFMYPQVLSEAPETDYVIRGEGEEIAVNLIKAIAAGTDLQDRENITGIAYINEEGKVHATPAHPVIEDLDDLTPDWSLYDWDKYIYTPLNCRLAVPNFARGCPFTCTFCSQWQFWRRYRARSPKHFVDEIEILVKKYDVGFFILADEEPTINKQKFVSLCQELIDRDLGVTWGINTRVTDIMRDEDLLPFYRKAGLVHVSLGTEAASQMNLNRFRKETTIEENKYAIKLLQKNGIVAEAQFVMGLEHETPQTIEETYQLCKDWDPDMANWTIYTPWPFSDLFKELGDRVEVRDYSRYNFVSPIIKPDNMEREDVLKGVLKSYGRFYARKTFFSYPWIKDPYVRKYMLGCLKAFAQTTLTKRFYDIDRVSTKNRKIEIDLGFDKSRILTQAEVKNLKELRPEMVADMSFGLKEAGYQREHDEHDWGEFDESTIKDRNSSTVRNC

SEQ ID NO: 147427 - DNA, 1536 bp, Mesorhizobium loti MAFF303099
  CDS (1)..(1536): transl_table=11
atgaaaatcgtcctgatcaatccgccgcacaccgccatcggcagccgcgtgccggacgaccatttgcccccgcttggcctgctggcgatcggcggcccgctgatcgatgccggccacgacgtacgcctcgtcgatgccgagttcgggccgatgccgctcgacatagtggtgcgcgacgccttggatgatttcccggacttcgtcctgatcggccattccggctcgacctcggcgcacccgaccgccttgctgatcgccgaaatgatcaaacagcgggagccggcgacgatcatcatctatggcggcgtcttcccgacctatcactggcgcgacatcctgacggacacggacgtcttcgatttcatcgtgcgcggcgagggcgaggcgaccgtcgtggcgctggtcgaggcgctggaaatgcaccagccgccggcaagcgtcgccggcatcgcctttcgcgacgatctgcaccgcccctttgccacgcaggcggccatgacgattgccgaactcgacgcctaccgggtcggctgggagctgatcgaccaccgccgctacagctactggggcggcaagcgcgcggtggtgatgcagttttcgcgcggctgtccgcatctgtgcaactattgcggccaacgcggcttctggactcgctggcggcatcgcgatcccaaaaagttcgcgcaagaaatcgcttggctgcaccgcgaacacggcgtcgaactgatcaacctcgccgacgagaaccccacggtttcgaagaaggcgtggcgcgcctttctcgatgcgctgatcgccgaaaacgtgccggtgctgatcgtcggttcgacccgcgccgacgacatcgtgcgcgatgccgacatcctgcatctctaccgcaaggccggtgtcatccgatggctgctcggcatggaaaacaccgacgagcagacgcttcagttgatccgcaagggcggcagcacctcatccgaccgcgaggcgataaggctgctgcgcaagcatggcatattgtcgatggcgacctgggtggccggcttcgaggatgaggggtttcgcgacctgtggcgcggcttccgccagctcatcgcctacgaccccgaccagatccaggcgctttatgtgacgccgcatcgctggacgccgttcttccgtatcgcgcgcgaccgcaaggtcatccaaaaagatgcccggctgtgggactacaagcaccaggtgctgcagatgacacggctgaagccctggatgctgttcttcagcgtcaagctcatcgagctcgccgtgcagtcgcggccgaaggcgctggcgcgcatcctgttccaccccgatcccgagcagcggcattcgatgcgctggtacacgaaaatgggccgccgcgtctggttccgcgaggtctggggatttctggctcgcgacggcagggtgaaggacggaccgacgcttgccgaattctggggcacgccacaggacgcggaggaggaatcgatgtccgtcgcgcgaccgccgcgcaagccggccgaagctgcagtctcgatctag

SEQ ID NO: 147428 - protein, 511 aa, Mesorhizobium loti MAFF303099
MKIVLINPPHTAIGSRVPDDHLPPLGLLAIGGPLIDAGHDVRLVDAEFGPMPLDIVVRDALDDFPDFVLIGHSGSTSAHPTALLIAEMIKQREPATIIIYGGVFPTYHWRDILTDTDVFDFIVRGEGEATVVALVEALEMHQPPASVAGIAFRDDLHRPFATQAAMTIAELDAYRVGWELIDHRRYSYWGGKRAVVMQFSRGCPHLCNYCGQRGFWTRWRHRDPKKFAQEIAWLHREHGVELINLADENPTVSKKAWRAFLDALIAENVPVLIVGSTRADDIVRDADILHLYRKAGVIRWLLGMENTDEQTLQLIRKGGSTSSDREAIRLLRKHGILSMATWVAGFEDEGFRDLWRGFRQLIAYDPDQIQALYVTPHRWTPFFRIARDRKVIQKDARLWDYKHQVLQMTRLKPWMLFFSVKLIELAVQSRPKALARILFHPDPEQRHSMRWYTKMGRRVWFREVWGFLARDGRVKDGPTLAEFWGTPQDAEEESMSVARPPRKPAEAAVSI

SEQ ID NO: 147429 - DNA, 1527 bp, Bradyrhizobium japonicum USDA 110
  CDS (1)..(1527): transl_table=11
atgcgtgttcttcttgtcaacgtgcctcatccctcgatcggaagccgaattcccgatgatcatcttccgccgctgggtttgctcgcgatcggcggaccgctgatcgacgacggccatgcggtgcggctgatcgacgccgaattcggccccatgtcgatcgccgaggtcgtcagcgaagcgacgggcttcgccccggatgccgtgctgttcggccattccggctcgacttccggacatcccgtgatcgcggcggttgcttgtgccctggtgaaggtcatgccgcgcgtgctgatcgtctacggcggcgtcttcccgacctaccattggcgcgaaattctgcacgatgaaccctatgtcagcgcgatcgtgcgcggcgaaggtgaagagaccgcgcggcgcctgatgcgcgcgctggaatacggtcgcgatctcgccgacatagccggcatcgcgttccgcgatgtctcaggtccccgcgcgacgcagccggcgccggtgatcgcaaacctcgacgcctgtcgcatcggctgggaattgatcgatcatgcgcgctacagctattggggcggcctgcgcgccgtggtcgtccagttctcgcgcggctgtccgcatctgtgcaactattgcggccagcgcgggttctggacgcgctggcgtcaccgcgatccggtccgcttcgccaaggagcttgcgcgcctgcatcgcgagcagggggtcaaggtcatcaacttcgccgacgaaaacccgaccgtctcgaagaaagtctggcgcgcgttcctcgaagcgctgatcgctgagaacgtcgacctcatcctggttggctcgactcgcgccgacgacatcgtgcgcgacgccgacatcctgcatctctacaagaaggccggctggcagcgcttcctgctcgggcttgaaaataccgacgaaaggaccctggagttgatccgcaagggcgcgacgacggccgtcgaccgtgaggccatccgcctgctgcggcagcacggcattctgtcgatggcgacctgggtggtcgggttcgaggaggagaccgatcgcgatcactggcgcggcttgaagcagctgcttgcctacgatcccgatcaggttcagctgctctacgtcacgccgcatcgctggacgccttacttccgtctcgcggccgagcgccgcgtgatccagcccgatcgccggcgatgggactacaagcatcaggtgctcgccacgcgccatatggcgccgtggcgcgtgctggcctggttcaagttcacggaaatggtgttgcagtgtcgcccaaaggcgatctggcgggtgctgttccagcgcgacgcaggcctgcgccacgccatgcgctggtacacgcagatgggccgcagggtctggccgcacgagattctggaattcttgcgtgcacgtcgattgaaatgggggccttcggtcagggagttctggggtgctccgcaggacgacgaggagcagtcgatgacagccacgcggccggagcgccgcgtcgggaggcgagaggccgcgtga

SEQ ID NO: 147430 - protein, 508 aa, Bradyrhizobium japonicum USDA 110
MRVLLVNVPHPSIGSRIPDDHLPPLGLLAIGGPLIDDGHAVRLIDAEFGPMSIAEVVSEATGFAPDAVLFGHSGSTSGHPVIAAVACALVKVMPRVLIVYGGVFPTYHWREILHDEPYVSAIVRGEGEETARRLMRALEYGRDLADIAGIAFRDVSGPRATQPAPVIANLDACRIGWELIDHARYSYWGGLRAVVVQFSRGCPHLCNYCGQRGFWTRWRHRDPVRFAKELARLHREQGVKVINFADENPTVSKKVWRAFLEALIAENVDLILVGSTRADDIVRDADILHLYKKAGWQRFLLGLENTDERTLELIRKGATTAVDREAIRLLRQHGILSMATWVVGFEEETDRDHWRGLKQLLAYDPDQVQLLYVTPHRWTPYFRLAAERRVIQPDRRRWDYKHQVLATRHMAPWRVLAWFKFTEMVLQCRPKAIWRVLFQRDAGLRHAMRWYTQMGRRVWPHEILEFLRARRLKWGPSVREFWGAPQDDEEQSMTATRPERRVGRREAA

SEQ ID NO: 147431 - DNA, 1608 bp, Rhodospirillum rubrum ATCC 11170
  CDS (1)..(1608): transl_table=11
atgcgtattctcttcgtccatcccaactatcattccggcggcgccgaagtcgcgggcaagtggtccccggcatgggtcgcctatctggccggttacctgaaggccggcggctattccgacatccgcttcgtcgacgccatgaccgacgatatgacggaagaagagctgcgcgccatcttcgccgccgaacagcccgatgtcatcggcaccacggcggtcaccccggcgatctacaaggccgagcgggtgctggaaatcgcccgcgaggaatgccccaacgccgtcaccatcctaggcggcatccacgccaccttcatgttccagcaggttctggtcgaagcgccgtggatcgacaccgtggttcgcggcgagggcgaggcggtgacgctcaacctgatccgcgccatcgacgagggccgctggcccgccgatcgcgcctcgatcaagggcatcgcctatctggaagacaccaaggtcgtcgccaccccggccgagccgccgatccgcgacgtcgattccatcattcccgattggggcgtgctggaatggaagaagtacatctacattccgctcggcgtgcccgtcgccacccccaatatggcgcgcggctgtcccttcacctgcagcttctgttcgcaatggaagttctggcgcgattaccgggtgcgcgaccccaagaaggtggtcgacgagatcgagatcctggtgcgtcagcacggagtcggcttcttcatcctcgccgacgaggaaccgacgatcaaccgcaacaagttcgtcgagttctgcgaggagctgatccgccgcgatctgggcgtgatgtggggcatcaacacccgcgtcaccgacatcatgcgcgacgaggatctgctgccgctctaccgcaaggccggcctgatccatatctcgctcggcaccgaggccgcggcccagctcaacctcgacatcttccacaaggaaaccacggtcgcccagaacaagagggcgatcgagctgttgcgcaagcacggcatcgtcaccgaggcgcagttcatcgtcggtctggaaaacgagaccgccgagaccctcgaagaaacctacaagatgtgcatggactggaacccggacatggccaactggtccatgttcacgccctggcccttctccgatctgttccatgaactgggcgacaaggtcgagattttcgactttgagaagtacaacttcgtcaccccgatcatgaagcccaacgcgatggatcgcgccgagctgcttgaccgggtgatgcacaactatcgccgcttctatatgcgcaagtcgttcctgggctatccctgggtgctcaaccgggtgcgccggcgctatctgctgggctgcctgaaggcgttcttgctcagcgccttccagcgcaaattctatgacctgggccgggccggctattggggtccgcagtccaagaagaaggtcgatttccacttcgaccactcgcgcaccctggtcaaaccccaggaagacaactggaagaacgcgcccaagcacaagcgtccggccgcggcgatgaaggcctgtggtggcggcgacgagcagcttgccgaaagcctgaccccgccgccggtcaaggtgaagatctaa

SEQ ID NO: 147432 - protein, 535 aa, Rhodospirillum rubrum ATCC 11170
MRILFVHPNYHSGGAEVAGKWSPAWVAYLAGYLKAGGYSDIRFVDAMTDDMTEEELRAIFAAEQPDVIGTTAVTPAIYKAERVLEIAREECPNAVTILGGIHATFMFQQVLVEAPWIDTVVRGEGEAVTLNLIRAIDEGRWPADRASIKGIAYLEDTKVVATPAEPPIRDVDSIIPDWGVLEWKKYIYIPLGVPVATPNMARGCPFTCSFCSQWKFWRDYRVRDPKKVVDEIEILVRQHGVGFFILADEEPTINRNKFVEFCEELIRRDLGVMWGINTRVTDIMRDEDLLPLYRKAGLIHISLGTEAAAQLNLDIFHKETTVAQNKRAIELLRKHGIVTEAQFIVGLENETAETLEETYKMCMDWNPDMANWSMFTPWPFSDLFHELGDKVEIFDFEKYNFVTPIMKPNAMDRAELLDRVMHNYRRFYMRKSFLGYPWVLNRVRRRYLLGCLKAFLLSAFQRKFYDLGRAGYWGPQSKKKVDFHFDHSRTLVKPQEDNWKNAPKHKRPAAAMKACGGGDEQLAESLTPPPVKVKI

SEQ ID NO: 147433 - DNA, 1530 bp, Rhizobium leguminosarum bv. viciae 3841
  CDS (1)..(1530): transl_table=11
atgaagatcgttctgatcaatccgccgcatacggcgatcggcagtcgcattcccgatgatcaccttcccccgctcggccttctttcggtcggtggcccgctgatcgacgacggtcatatcgtcggtctcatcgatgccgagttcggaccgatgacgatagcggagattgtcagccgtgtggcggccagcggccccgatctggtgctgatcggtcattccggctcgacctcggcccatcccaccgcccgcgcgatcgcagaggcggtcaagcacagcgatcgtgctatccgcattgtttatggcggtgtcttcccgacctatcactggcgggaggtgctggccgagaccgaggcgttcgatatcctcgtgcgcggcgaaggcgaggaaacgatgcggcggctggccggcaccctgacggcgggccgcccgctcgcaaccgttcccggcatcgcctatcgcaatggcgatggcgaaatcctggcaacacagccggcacaggcgttcgccgatctcgatgcctatcgtgtcggctgggagttgatcgatcatcgccactacagttactggggcggcaagcgcgccgtcgtcatgcagttttcgcgcggctgtccgcatctttgcaactactgcggccagcgcggtttctggacccgctggcgtcaccgctcgccggaactgtttgcccgcgagatcgccaggctttatcgcgaagagggtgtagaacttatcaatctcgccgacgagaatccgacctcctcgcgaaaggcgtggctcgcttttctcgaagcgatgatcatcgagaatgtgccggtgcagatcgtcggatcgacacgggccgatgatatcgtccgcgatgccgatatcctgcatctctatcgcaaggcgggtgtcgtgcgctggttgatcggcatggaaaacaccgatgaggcgaccttgacgctgatcaagaagggcggtgccaaggcaactgatcgtgaggcgatccgtcttctgcgccaacacgatatcctgtccatggcgacctgggtcgtcggtttcgaggaggagacattgagccacctcttgcggggcttccggcaattgctctcttatgatcccgatcagatccaggcgctctatgtgacgccacatcgctggacgccgttcttccgtatcgcccgcgatcgacaggtcatcgaaaccgacatccgtaaatgggactacaagcatcaggtactgaagatgcggcatctcaacccgatcgtgctggtcgcctgcgtcaagctcatcgaggtggcggtccaggcgcggccgaaggcactgctgcgcatactcttccatcgcgatcgcgagcaacgccattccatgcgctggtatacgcaaatgggtcgtcgcgtctggtttcacgagatcctcgaattcctctttcgccgccgccatctcaaggatggcccgacgctcgagaatttctggggcgccccgcaggattcagaggaggaatccatgttgcgcccgcaacggtatgtgaaaagcctcgacgcggcggaataa

SEQ ID NO: 147434 - protein, 509 aa, Rhizobium leguminosarum bv. viciae 3841
MKIVLINPPHTAIGSRIPDDHLPPLGLLSVGGPLIDDGHIVGLIDAEFGPMTIAEIVSRVAASGPDLVLIGHSGSTSAHPTARAIAEAVKHSDRAIRIVYGGVFPTYHWREVLAETEAFDILVRGEGEETMRRLAGTLTAGRPLATVPGIAYRNGDGEILATQPAQAFADLDAYRVGWELIDHRHYSYWGGKRAVVMQFSRGCPHLCNYCGQRGFWTRWRHRSPELFAREIARLYREEGVELINLADENPTSSRKAWLAFLEAMIIENVPVQIVGSTRADDIVRDADILHLYRKAGVVRWLIGMENTDEATLTLIKKGGAKATDREAIRLLRQHDILSMATWVVGFEEETLSHLLRGFRQLLSYDPDQIQALYVTPHRWTPFFRIARDRQVIETDIRKWDYKHQVLKMRHLNPIVLVACVKLIEVAVQARPKALLRILFHRDREQRHSMRWYTQMGRRVWFHEILEFLFRRRHLKDGPTLENFWGAPQDSEEESMLRPQRYVKSLDAAE

SEQ ID NO: 147435 - DNA, 1656 bp, Thiocapsa roseopersicina
  CDS (1)..(1656): transl_table=11
atgcgtatattgatgatccagcctaactatcactgtggtggtgcggaaatcgcgggaaactggccacccggttgggtcgcctacatcggaggtgcgctcaagcacgcgggcatgacgaacatccggttcatcgatgccatgacctacgatattccggatgagaaactgcgcgagattattcgggtcaatcagcccgacgtcgtcctcgccaccgccatcacgccgcagatctacaaggcgcagaccacgctgcagatcgccaaggaggtgcttccgaactgcgtcaccgtgctcggcggcatccatccgaccttcatgtatacccaggtcttcagcgaggcgccctggatcgactatatcgtgcgcggagagggcgaggagatcgcggtcgctctcctgcaatcgatcgaggcgggcacccatcggcaagatcgcaagcgtatctggggtattgcctatatcgatgacgacggccaagtcgtcgcaacccctgcgcgtccggtgatcgaagatctggacaccttgacgccggactggtcgctgctcgactgggacaagtacatctacacccccctcaactgccgggtcgccgtgccgaacttcgcgcgtggctgcccctttacctgccgtttttgttcgcagtggaagttctggcgcaagtaccgtcatcgcgatccgaagaaattcgtcgacgagatcgaaaccctggttcgagactacaacgtcggcttcatgatcctcgccgacgaggagccgacgatcttccagaagaagttcgtcgcactctgcgaggagttgatcaagcgcgacctcccgctccattggggcatcaacacgcgcgtgaccgacatcatgcgcgatcgcaacctgctgcccttgtaccgtaaggccggtctggtccatgtctcgctcggcaccgaggcggtctcgcagttgaacctcgacaccttccgcaagcaaacgacggtcgagcagaacaagctcgcggtcaagctcctgcagcaggccggaatcgtcgcggaggtccagttcatcatgggcctcgaaaacgagacgcccgagaccatcgaggagacctacaagctcgcccaggactggaagcccgacatggcgaactggaacatgtatacgccatggccgttcgcggagctgttcgaggagttgggtgaccgggtggaggttcgcgactactcgaagtacaatttcgtcactccgatcatgaagcccgaggcgatgacccgcgagcaggtgctcaagggcgtcctgaagaattatgcgcgcttctacatgcgcaagagcttcttggagtatccttggatcaaggacaagttccgcagacgttacatgctcggctgcctcaaggccttcgcgaagaccacggcgtcgaaaaagttctacgacctcgagcgcctcaagatgaaggggatgtcgaccgaagtcgatttgggcttcgacgcgtccaaggtcctcactgcagacgagatcgcgcagttgaagcgggatcgtccggagctgtcggcggacatgaatttcaaagggacgcccgtcaagatcgtggcttgcggagctccggacgatctgcaggtttccgaatcggatctgccggtcaaagccgcagcctccaagcccaagatgacggcagtccaacctgactaa

SEQ ID NO: 147436 - protein, 551 aa, Thiocapsa roseopersicina
MRILMIQPNYHCGGAEIAGNWPPGWVAYIGGALKHAGMTNIRFIDAMTYDIPDEKLREIIRVNQPDVVLATAITPQIYKAQTTLQIAKEVLPNCVTVLGGIHPTFMYTQVFSEAPWIDYIVRGEGEEIAVALLQSIEAGTHRQDRKRIWGIAYIDDDGQVVATPARPVIEDLDTLTPDWSLLDWDKYIYTPLNCRVAVPNFARGCPFTCRFCSQWKFWRKYRHRDPKKFVDEIETLVRDYNVGFMILADEEPTIFQKKFVALCEELIKRDLPLHWGINTRVTDIMRDRNLLPLYRKAGLVHVSLGTEAVSQLNLDTFRKQTTVEQNKLAVKLLQQAGIVAEVQFIMGLENETPETIEETYKLAQDWKPDMANWNMYTPWPFAELFEELGDRVEVRDYSKYNFVTPIMKPEAMTREQVLKGVLKNYARFYMRKSFLEYPWIKDKFRRRYMLGCLKAFAKTTASKKFYDLERLKMKGMSTEVDLGFDASKVLTADEIAQLKRDRPELSADMNFKGTPVKIVACGAPDDLQVSESDLPVKAAASKPKMTAVQPD

SEQ ID NO: 147437 - DNA, 1650 bp, Chloroflexus aurantiacus
  CDS (1)..(1650): transl_table=11
atgcggatcatgatgatccagccgaattaccatgctggtggagcagagattgccggcaactggccaccgagctgggtggcgtacattggcggggctttacgggcagcaggttttgataacctgcgctttgttgatgccatgaccgaagacctgcctgacgagaagctacgtcttatcttgcgccacaatcgccctgatgttgtcatggcgacggcgatcacgccgatgatctacaaagcccaggagacgctcaagattgcccgcgaagaactaccaaatgcccggctgatcctcggtggtatccatccgacctttatgtatggtcaggtgctgactgaagcgccctggatcgactatatcgtgcgtggcgaaggtgaagagattattgtcgagttgatgcaggccatcgcctatggtagcgatcagcgtgaccgggtaaagattcgcgggattgcctacctcgaagatggcaaagtcgtggcgacgccggcccgtgatccgattgctgacctcgacaaactgacaccggattggagcctctacgactggaagcgctacatctacgtgccgttgaatgtgcgcgtggccgtgcccaacttcgcacgtggatgtccgttcacatgccgattctgttcacagtggaaattctggcgccgttaccgtgcgcgcagcccacagaaatttgttgatgaaatcgagacactggtacgtgattacaatgttggcttcttcatcctggctgatgaagaaccgacaatcaaccgcaagaaattcactgccctctgcgaagaattgatacggcgtcaggtacgagtctactggggcatcaacacgcgggtgaccgacattttgcgcgatgaagcgcagttaccgctctggcgagcggcgggattggtgcatatttcgctcggtaccgaggcggcagcccagatgaatctcgaccgcttccgcaaacagaccaccattgaacagaataaacgggcaatcgaactgattaagaagcacggcatggtggctgaagcccagttcatcatgggtatggagaacgagacgccggagaccatcgaggagacctatcgttacgtcctcgactggaagccggatatggcgaactggaacatgtacaccccgtggccatttgcggaactatttgaggaactgggcgaccgggttgaggtgcgtgattacgccaaatacaacttcgtgactccgatcatgaagcctgatttgatggatcgggaagaggtattgaaaggcgtcctccgcaactatgcacgcttctacatgcgtaaggcgtttctcgaatacccgtttatcaaagaccccttcaagcgccgctatatgttgggttgtttacgtgcctttatgaagacgacggtcacccgccgcttctacgatctgggtcgtgtgcatgtgcgcggcacacagcttgagattgatctgggtttcgacgagtcacgtgtgttgacgccagagcagatcgctgcgctgaaagagcacgaagtattgcatgccgataccacctttggtggcgcagcacccggcatcgatccagaggagatcaagattcaagcggaaaacccactcaacttaccgcttgaggcagcaagcgtcaaccccggtagcgaatccgagactcgctcagcctga

SEQ ID NO: 147438 - protein, 549 aa, Chloroflexus aurantiacus
MRIMMIQPNYHAGGAEIAGNWPPSWVAYIGGALRAAGFDNLRFVDAMTEDLPDEKLRLILRHNRPDVVMATAITPMIYKAQETLKIAREELPNARLILGGIHPTFMYGQVLTEAPWIDYIVRGEGEEIIVELMQAIAYGSDQRDRVKIRGIAYLEDGKVVATPARDPIADLDKLTPDWSLYDWKRYIYVPLNVRVAVPNFARGCPFTCRFCSQWKFWRRYRARSPQKFVDEIETLVRDYNVGFFILADEEPTINRKKFTALCEELIRRQVRVYWGINTRVTDILRDEAQLPLWRAAGLVHISLGTEAAAQMNLDRFRKQTTIEQNKRAIELIKKHGMVAEAQFIMGMENETPETIEETYRYVLDWKPDMANWNMYTPWPFAELFEELGDRVEVRDYAKYNFVTPIMKPDLMDREEVLKGVLRNYARFYMRKAFLEYPFIKDPFKRRYMLGCLRAFMKTTVTRRFYDLGRVHVRGTQLEIDLGFDESRVLTPEQIAALKEHEVLHADTTFGGAAPGIDPEEIKIQAENPLNLPLEAASVNPGSESETRSA

SEQ ID NO: 147439 - DNA, 1701 bp, Heliobacillus mobilis
  CDS (1)..(1701): transl_table=11
atgcgcatactgatgatccaaccgaattaccattgtggtggcgccgagatagcaggcaattggccgccgagctgggcagcgtatattggtggaacattaaaagcggctgggtacaccaacatcaagtttatcgatgccatgacagaggatcttccagatgacgtgctggccgaaatcatcaggaaaaatcaacctgatgtagtcctggcgagtgcaattacgcctatgatatataaagcccaggatacattgcgggttgctaaagaaagcaaccctaactgtaagaccgtcttgggcggtattcacccgacctttatgtacagtcaaatactgtctgaagcaccttggattgattatattgttcgcggcgaaggggaagagatcgtcgtcaatttgatgaatgtcatcgccgcaggaacagacattaaagaccgcaaagatgtcctggggattgcttatttggaagacgggaaagtggtggcgacaccagcccatccgccgattaaagatttggacagcctcacaccggactggagcatcctcgattgggataagtacatatatattcctcttaacacgcgcgtagccgtgccgaactttgcccgtggatgtccctttacctgccgcttctgctcgcagtggaagttctggcggacctatcgcgtacggaacccgaaaaagtttgtcgatgaaatcgagaccctcgtcaaagatcataaagtaggcttcttcattttggccgacgaagaaccgaccatcaaccgcgacaaattcgtcgccatgtgccaagagctgatcgaccggaaactggatgtgcactggggtatcaacacccgcgtgaccgacatcctgcgcgatgctcacctgcttcccttctatcggaaagctggtctcgtacatatctccctcggtacggaagcagccacacagatgaacctagaccgcttccgtaaagagacgacgatggaagaaaacaaacgtgccatcgatatgatcaaggccaacggtatggtcgccgaagcccagttcatcatgggcttagagaatgaaaccgttgaaacgattgaagaaacgttccaattggcccgctactgggatgccgacatggtcaactggaacatgtacactccctggcccttctcggaactctttgaagaactgggcgacaaggttgaagtacgcgattactcaaaatacaactttgtcacacccattatgcagccagaccacatggatcgcgaagacgtactcaaaggtgtcttgagaagctacgctcgtttctacatgcgcaagagcttcctcgactatccttttatcaaagatccttggaagcggaaatacatgatgggctgcttaaaagccttcttgaagatgacagcctcgaaacgcttctatgacatcggccgggttaagcggaaaggtctcagcacggaagttgaccttggcttcgacgaaagcaagatcgttagcaaggaagagatcgcaaagctcaaaacgacacgtcccgacttgaaagctgatatggattttggcacgatctctgcctgtggtgctccgaaacaagtcagcctcaacaacgtctctgcctgtggtgcccccaaagacctcgaaatctccgcttgcggcgccccacgggacttaccgtctctggacagccagcaagatgacaacacagcaacgagaggcatgatgaaaatatga

SEQ ID NO: 147440 - protein, 566 aa, Heliobacillus mobilis
MRILMIQPNYHCGGAEIAGNWPPSWAAYIGGTLKAAGYTNIKFIDAMTEDLPDDVLAEIIRKNQPDVVLASAITPMIYKAQDTLRVAKESNPNCKTVLGGIHPTFMYSQILSEAPWIDYIVRGEGEEIVVNLMNVIAAGTDIKDRKDVLGIAYLEDGKVVATPAHPPIKDLDSLTPDWSILDWDKYIYIPLNTRVAVPNFARGCPFTCRFCSQWKFWRTYRVRNPKKFVDEIETLVKDHKVGFFILADEEPTINRDKFVAMCQELIDRKLDVHWGINTRVTDILRDAHLLPFYRKAGLVHISLGTEAATQMNLDRFRKETTMEENKRAIDMIKANGMVAEAQFIMGLENETVETIEETFQLARYWDADMVNWNMYTPWPFSELFEELGDKVEVRDYSKYNFVTPIMQPDHMDREDVLKGVLRSYARFYMRKSFLDYPFIKDPWKRKYMMGCLKAFLKMTASKRFYDIGRVKRKGLSTEVDLGFDESKIVSKEEIAKLKTTRPDLKADMDFGTISACGAPKQVSLNNVSACGAPKDLEISACGAPRDLPSLDSQQDDNTATRGMMKI

SEQ ID NO: 147441 - DNA, 1728 bp, Rhodobacter capsulatus
  CDS (1)..(1728): transl_table=11
atgcgcatccttttcgtccaccccaattaccactccggcggggccgagatcgcggggaactggcccccgtcgtgggtcccctatcttgcgggtcacctgaaaaaagcgggtttcgacgacatccatttcatcgatgcgatgacgctgaacgtgtcgcatgacgagctgcgcaagaaatttgccgaactccagcccgacctgatcggcgtgacctcgatcacgccgtcgatctacgaggcggaagagacgctgaagatcgccaaggaagtcgtgccgaatgcggtgcgcgttctgggcggcgtgcatgcgaccttcatgttccgtcaggtgctgtcggaagcgccctgggtcgatgcgatcgtccgcggcgagggcgaagaaatcatggtcgagctggccaaatgcgtctccgagggccgctggccggaagaccgcgcctcgatcaagggtctggccttccatgacggcaccgagatcgtggcgacgcaagccgcgccgacggtcaaggacatcgacagcctgaaacccgactggtcgctgatcgactggaaacactacatctacatcccgctgggcgtgcgcgtggcgatcccgaacatggcgcggggctgccccttcacctgctcgttctgctcgcagtggaaattctggcgcgattaccgcgtccgttcgccgaaggccgtggtcgacgagatcgaagatctggtgaacaactacgacgtcggcttcttcatcctcgccgacgaggaaccgacgatcaacaagaagaaattcgtcgaattctgtcaggagatgatcgaccgcggtctgaaccacaaggtcaaatggggcatcaacacccgcgtgaccgacatctaccgcgaccgcgacctgctgaaattctaccgtgaggcgggccttgtccacatctcgctcggcaccgaagccgcggcgcagctgaagctcgacctgttcaacaaggaaaccaccgtcgccgagaacaaggaggcgatccgccttctgcgcgaggccgacatcttcaccgaagcgcagttcatcgtcggcctcgacaacgagaccaaggaaaccctggaagaaaccttccagatggcctgggactggcagccggacctggcgaactggtcgatgtacacgccctggcccttcacgccgctcttccaggagctgcgcgatcaggtcgaggtcttcgacttctcgaaatacaacttcgtgaccccgatcatgaagcccaaggcgctgacccgcggcgagcttctggacggcgtgatgaagaactaccgccgcttctacatgcgcaaggcgctgttccactatccgtggcgcggcaccggcttccgccgccgctatctgctcggctgcctcaaggccttcctcaaggccggggtggggcgcaccttctatgacctcggcaaggccggctattggggcccgcagaccaaggatacggtcgatttccacttcgacgagacccgcaagatcgccgaggcgcaggtcgccgactgggaagccgccgccgaccggtcgcgcaagcacaaggaacggcaggaagcgctgcgcgcccagatgaaggaccgcgccgccgaccgcaacaccgcgaacttcgtgatgcccgcggatgcggaagacgagttcgacctctcggccgaaacgcacgaggcgcgcagcgccgaacatgcggcgatggcctgcgggggcggcaaggaccagatggtcgacgccgcggaataa

SEQ ID NO: 147442 - protein, 575 aa, Rhodobacter capsulatus
MRILFVHPNYHSGGAEIAGNWPPSWVPYLAGHLKKAGFDDIHFIDAMTLNVSHDELRKKFAELQPDLIGVTSITPSIYEAEETLKIAKEVVPNAVRVLGGVHATFMFRQVLSEAPWVDAIVRGEGEEIMVELAKCVSEGRWPEDRASIKGLAFHDGTEIVATQAAPTVKDIDSLKPDWSLIDWKHYIYIPLGVRVAIPNMARGCPFTCSFCSQWKFWRDYRVRSPKAVVDEIEDLVNNYDVGFFILADEEPTINKKKFVEFCQEMIDRGLNHKVKWGINTRVTDIYRDRDLLKFYREAGLVHISLGTEAAAQLKLDLFNKETTVAENKEAIRLLREADIFTEAQFIVGLDNETKETLEETFQMAWDWQPDLANWSMYTPWPFTPLFQELRDQVEVFDFSKYNFVTPIMKPKALTRGELLDGVMKNYRRFYMRKALFHYPWRGTGFRRRYLLGCLKAFLKAGVGRTFYDLGKAGYWGPQTKDTVDFHFDETRKIAEAQVADWEAAADRSRKHKERQEALRAQMKDRAADRNTANFVMPADAEDEFDLSAETHEARSAEHAAMACGGGKDQMVDAAE

SEQ ID NO: 147443 - DNA, 1668 bp, Rhodocyclus gelatinosus
  CDS (1)..(1668): transl_table=11
atgcgtgtgctgttcatccaccccaactatcactccggcggtgccgagatcgccggcaactggcctcccgcgtgggtggcgtacctggcaggctacctcaaggcgggcggctacacggacgtcatcttcgtcgacgcgatgaccaacgacctgagcgaagaccaggtccgcgagaagatcaccacgctcaagcccgacatcgtcggctgcaccgcgatcaccccggcgatctacaaggccgagcgcacgctgcagatcgccaaggaagtgaaccccgacatcgtcacggtgctcggcggcatccacggcacgttcatgtatccgcaggtgctcaaggaagcgccgtggatcgacgccatcgtgcgcggtgaaggcgagcaggtcatgctgaacctggtcaccgccgtcgaccagggccgcttcatggccgaccgcaactgcgtcaacggcatcgcctacgcggcgccggacggcaaggtcgtcgccacgccggccgagcccccgatcgaggacctggaccgcatcacgccggactggggcatcctggagtgggaaaagtacatctacatcccgatgaacaagcgcgtcgcgatcccgaacttcgcgcgaggctgcccgttcacctgctcgttctgcagccagtggaagttctggcgcgactaccgcatccgtgacccgaagaaggtggtcgacgagatcgaggtcctggtcaagcagcacgacgtcggcttcttcatcctcgccgacgaggaaccgacgatccaccgcaagaagttcatcgagttctgcgaagagctgatcaagcgcgacctcggcgtgctgtggggcatcaacacccgcgtcaccgacatcctgcgcgacgagaagctgctgccgctgttccgcaaggccggcctgatccacgtctcgctgggcaccgaggccgccgcgcagctcaagctcgacatggtcaacaaggagaccacgatcgagcagaacaagcgcgcgatccagctcctgaaggacaacggcatcgtcaccgaagcgcagttcatcgtcggcctcgagaacgagaccgccgagacgctcgaagagacctacaagatggcccgggactggaacccggacatggccaactgggcgatgtacacgccctggccgttctccgacctgttccaggagctcggcgacaaggtcgaggtcttcgacttcgagaagtacaacttcgtgaccccgatcatgaagcccgacgcgatggaccgcggcgagctgctggaccgggtgatgagcaactaccgccggttcttcatgaacaaggcgttcctgcagtacccgttcaccaaggacaaggaacgccgcaagtacctgatgggctgcctgaaggcgttcctgaagagcggcttcgagcgcaagttctacgacctgggccgcgtcggctactggggcccgcagaccaagaagacggtcaacttcagcttcgacaagaaccgccgcatcgacgcccagaccgccgacgagctctcgcgcgtcgacgacggctgggtcacgatgcacggtccgaagatcgagatgcgccgtcgcaagggcgacgacaacttcgagatcgccaaggccgcgatggcctgcggcggcggcaccgagcagctgaccgaagagcagcaggccgccacggaggtgcgcgcgtcgtga

SEQ ID NO: 147444 - protein, 555 aa, Rhodocyclus gelatinosus
MRVLFIHPNYHSGGAEIAGNWPPAWVAYLAGYLKAGGYTDVIFVDAMTNDLSEDQVREKITTLKPDIVGCTAITPAIYKAERTLQIAKEVNPDIVTVLGGIHGTFMYPQVLKEAPWIDAIVRGEGEQVMLNLVTAVDQGRFMADRNCVNGIAYAAPDGKVVATPAEPPIEDLDRITPDWGILEWEKYIYIPMNKRVAIPNFARGCPFTCSFCSQWKFWRDYRIRDPKKVVDEIEVLVKQHDVGFFILADEEPTIHRKKFIEFCEELIKRDLGVLWGINTRVTDILRDEKLLPLFRKAGLIHVSLGTEAAAQLKLDMVNKETTIEQNKRAIQLLKDNGIVTEAQFIVGLENETAETLEETYKMARDWNPDMANWAMYTPWPFSDLFQELGDKVEVFDFEKYNFVTPIMKPDAMDRGELLDRVMSNYRRFFMNKAFLQYPFTKDKERRKYLMGCLKAFLKSGFERKFYDLGRVGYWGPQTKKTVNFSFDKNRRIDAQTADELSRVDDGWVTMHGPKIEMRRRKGDDNFEIAKAAMACGGGTEQLTEEQQAATEVRAS

SEQ ID NO: 147445 - DNA, 1839 bp, Rhodobacter sphaeroides
  CDS (1)..(1839): transl_table=11
atgcgtatcgtattcgttcacccgaactatcactccgggggcgccgagatcgccggcagctggccgccggcgtgggttgcctacctgtgtggcgcgctgaagaaggctggctacaccgactaccatttcattgacgcgatgaccgactatgtctcgcacgagaaactcgccgagaagctcagggagcttcagcccgacatcgttgccaccaccgccatcaccccctcgatctacgtcgccgaagagaccctgaaggtcgcgatggaggtcgtgccgaacgcgctgcgcgtgctgggcggcatccacgccaccttcatgttccggcaggtgctggaagaggcgccctggatcgacgtgatcgtgcgcggcgagggcgaggaggttctggtgaacctcgtgaaggcctacgaggccgacaatttcgccgagacccgccgtcaggtgaagggtctggccttcctcgacggcgacgagatcgtctcgaccgccgcggcccccaccatccgggacgtggattccatcgatcccgactggggcatcatcaactggaagaactacatctacgagccgctgggcgtgcgcgtcgcgatcccgaacatggcccgcggctgccccttcacctgctccttctgctcgcagtggaagttctggcgcgattaccgcgtgcgcgacccgaagaaggtcgtggacgagatcgagaagctcgtgaacgagcacggcgtgggcttcttcatcctcgccgacgaggaaccgaccatcaaccgcaagaaattcatcgaattctgcgaggagatgatcgcgcgcggcctgcccgacaaggtgaagtggggcatcaacacccgcgtgaccgacgtcaagcgcgacaaggaactgctgaagttctaccgcaaggccggtctcgtccatatctcgctcggcaccgaggccgcggcgcagctgaagctcgacgtcttcaacaaggagacgacggtggccgagaacaaggaggccatccgcctcctgcgcgaagccgacatcttcaccgaagcccagttcatcgtgggtctcgacaacgagaccaaggagacgctggaagaaacctaccggatggcgtgggactggcagccggacctcgccaactggtcgatgtacacgccctggcccttcacgccgctcttccaggagctgcgcgatcaggtcgaggtcttcgactattcgaaatacaacttcgtgacgccgatcatgaagccgaaggcgctgacccgcggcgagctgctcgacggcgtcatgaacaactaccgccggttctacatgaaaaaggcgctgttccactatccgtggcgcggcacgggcttccgccggcgctacctcctgggctgcctcaaggctttcctgaaggccggggtggggcgaaccttctacgacttgggcaaggccggctactggggcccgcagtccaaggacaaggtggacttccacttcgacgagacgcgcaagatcggcaacgcccagatggcggactgggaggcctcggccgaccgcgccgccaaggccgccgagcgccgcgaggcgctgcgcgtgcagggcaaggcccgtgccgaggagcgcaatgcggccaaggccgaggcggcgccgatcctgacggcgggcggtggcggctgcggcggccatgccgacgggtcggactgcggctgcggcggcaagaagcagcagcaggtggacgaattccacgtcccgatggcctgtggcggcggcaggcagcagatggccgaggacgaattcgccatgccgatggcctgcggcggcggcaagcagcagatggaagaggccgaggagcgtctcgtccgtccggcggagtga

SEQ ID NO: 147446 - protein, 612 aa, Rhodobacter sphaeroides
MRIVFVHPNYHSGGAEIAGSWPPAWVAYLCGALKKAGYTDYHFIDAMTDYVSHEKLAEKLRELQPDIVATTAITPSIYVAEETLKVAMEVVPNALRVLGGIHATFMFRQVLEEAPWIDVIVRGEGEEVLVNLVKAYEADNFAETRRQVKGLAFLDGDEIVSTAAAPTIRDVDSIDPDWGIINWKNYIYEPLGVRVAIPNMARGCPFTCSFCSQWKFWRDYRVRDPKKVVDEIEKLVNEHGVGFFILADEEPTINRKKFIEFCEEMIARGLPDKVKWGINTRVTDVKRDKELLKFYRKAGLVHISLGTEAAAQLKLDVFNKETTVAENKEAIRLLREADIFTEAQFIVGLDNETKETLEETYRMAWDWQPDLANWSMYTPWPFTPLFQELRDQVEVFDYSKYNFVTPIMKPKALTRGELLDGVMNNYRRFYMKKALFHYPWRGTGFRRRYLLGCLKAFLKAGVGRTFYDLGKAGYWGPQSKDKVDFHFDETRKIGNAQMADWEASADRAAKAAERREALRVQGKARAEERNAAKAEAAPILTAGGGGCGGHADGSDCGCGGKKQQQVDEFHVPMACGGGRQQMAEDEFAMPMACGGGKQQMEEAEERLVRPAE

SEQ ID NO: 147447 - DNA, 21 bp, Artificial sequence
  primer
atgcggattctcattttaaac

SEQ ID NO: 147448 - DNA, 22 bp, Artificial sequence
  primer
ttatttacgagtgatactcaag

SEQ ID NO: 147449 - protein, 429 aa, Artificial sequence
  consensus sequence
  Variant (2)..(7): Xaa in position 2 to 7 is any amino acid
  Variant (9)..(22): Xaa in position 9 to 22 is any amino acid
  Variant (23)..(25): Xaa in position 23 to 25 is any or no amino acid
  Variant (27)..(33): Xaa in position 27 to 33 is any amino acid
  Variant (35)..(35): Xaa in position 35 is any amino acid
  Variant (37)..(39): Xaa in position 37 to 39 is any amino acid
  Variant (41)..(46): Xaa in position 41 to 46 is any amino acid
  Variant (47)..(47): Xaa in position 47 is any or no amino acid
  Variant (50)..(63): Xaa in position 50 to 63 is any amino acid
  Variant (64)..(67): Xaa in position 64 to 67 is any or no amino acid
  Variant (70)..(76): Xaa in position 70 to 76 is any amino acid
  Variant (77)..(78): Xaa in position 77 to 78 is any or no amino acid
  Variant (80)..(83): Xaa in position 80 to 83 is any amino acid
  Variant (84)..(84): Xaa in position 84 is any or no amino acid
  Variant (86)..(96): Xaa in position 86 to 96 is any amino acid
  Variant (98)..(103): Xaa in position 98 to 103 is any amino acid
  Variant (106)..(106): Xaa in position 106 is any amino acid
  Variant (108)..(108): Xaa in position 108 is any amino acid
  Variant (110)..(115): Xaa in position 110 to 115 is any amino acid
  Variant (117)..(120): Xaa in position 117 to 120 is any amino acid
  Variant (121)..(123): Xaa in position 121 to 123 is any or no amino acid
  Variant (125)..(126): Xaa in position 125 to 126 is any amino acid
  Variant (133)..(137): Xaa in position 133 to 137 is any amino acid
  Variant (139)..(144): Xaa in position 139 to 144 is any amino acid
  Variant (146)..(152): Xaa in position 146 to 152 is any amino acid
  Variant (153)..(155): Xaa in position 153 to 155 is any or no amino acid
  Variant (157)..(157): Xaa in position 157 is any amino acid
  Variant (159)..(167): Xaa in position 159 to 167 is any amino acid
  Variant (168)..(171): Xaa in position 168 to 171 is any or no amino acid
  Variant (173)..(175): Xaa in position 173 to 175 is any amino acid
  Variant (177)..(179): Xaa in position 177 to 179 is any amino acid
  Variant (183)..(187): Xaa in position 183 to 187 is any amino acid
  Variant (188)..(188): Xaa in position 188 is any or no amino acid
  Variant (190)..(196): Xaa in position 190 to 196 is any amino acid
  Variant (198)..(198): Xaa in position 198 is any amino acid
  Variant (200)..(210): Xaa in position 200 to 210 is any amino acid
  Variant (211)..(214): Xaa in position 211 to 214 is any or no amino acid
  Variant (219)..(220): Xaa in position 219 to 220 is any amino acid
  Variant (222)..(223): Xaa in position 222 to 223 is any amino acid
  Variant (227)..(228): Xaa in position 227 to 228 is any amino acid
  Variant (231)..(233): Xaa in position 231 to 233 is any amino acid
  Variant (234)..(234): Xaa in position 234 is any or no amino acid
  Variant (236)..(236): Xaa in position 236 is any amino acid
  Variant (238)..(238): Xaa in position 238 is any amino acid
  Variant (240)..(244): Xaa in position 240 to 244 is any amino acid
  Variant (246)..(248): Xaa in position 246 to 248 is any amino acid
  Variant (250)..(253): Xaa in position 250 to 253 is any amino acid
  Variant (254)..(254): Xaa in position 254 is any or no amino acid
  Variant (256)..(259): Xaa in position 256 to 259 is any amino acid
  Variant (261)..(261): Xaa in position 261 is any amino acid
  Variant (264)..(264): Xaa in position 264 is any amino acid
  Variant (267)..(279): Xaa in position 267 to 279 is any amino acid
  Variant (280)..(280): Xaa in position 280 is any or no amino acid
  Variant (282)..(292): Xaa in position 282 to 292 is any amino acid
  Variant (293)..(294): Xaa in position 293 to 294 is any or no amino acid
  Variant (297)..(298): Xaa in position 297 to 298 is any amino acid
  Variant (301)..(301): Xaa in position 301 is any amino acid
  Variant (304)..(306): Xaa in position 304 to 306 is any amino acid
  Variant (308)..(310): Xaa in position 308 to 310 is any amino acid
  Variant (312)..(312): Xaa in position 312 is any amino acid
  Variant (315)..(320): Xaa in position 315 to 320 is any amino acid
  Variant (322)..(322): Xaa in position 322 is any amino acid
  Variant (324)..(329): Xaa in position 324 to 329 is any amino acid
  Variant (331)..(334): Xaa in position 331 to 334 is any amino acid
  Variant (336)..(344): Xaa in position 336 to 344 is any amino acid
  Variant (347)..(347): Xaa in position 347 is any amino acid
  Variant (349)..(362): Xaa in position 349 to 362 is any amino acid
  Variant (364)..(366): Xaa in position 364 to 366 is any amino acid
  Variant (369)..(374): Xaa in position 369 to 374 is any amino acid
  Variant (376)..(383): Xaa in position 376 to 383 is any amino acid
  Variant (384)..(386): Xaa in position 384 to 386 is any or no amino acid
  Variant (389)..(395): Xaa in position 389 to 395 is any amino acid
  Variant (398)..(398): Xaa in position 398 is any amino acid
  Variant (400)..(406): Xaa in position 400 to 406 is any amino acid
  Variant (407)..(407): Xaa in position 407 is any or no amino acid
  Variant (409)..(411): Xaa in position 409 to 411 is any amino acid
  Variant (412)..(412): Xaa in position 412 is any or no amino acid
  Variant (414)..(416): Xaa in position 414 to 416 is any amino acid
  Variant (418)..(428): Xaa in position 418 to 428 is any amino acid
MXXXXXXPXXXXXXXXXXXXXXXXXPXXXXXXXGXLXXXGXXXXXXXDAXXXXXXXXXXXXXXXXXXPDXXXXXXXXXTXXXXXAXXXXXXXXXXXPXXXXXXGGXHXTXXXXXXLXXXXXXXDXXVRGEGEXXXXXLXXXXXXGXXXXXXXXXXGXAXXXXXXXXXXXXXTXXXPXXXDLDXXXXXXWXXXXXXXYXYXXXXXXXXXXXXXXXRGCPXXCXXCSQXXFWXXXXRXRXPXXXXXEXXXLXXXXXVXXXXLXDEXPTXXXXXXXXXXXXXXIXXXXXXXXXXXXXTRXXDIXRDXXXLXXXRXAGXXXXXXGXEXXXXXXLXXXXKXXXXXXXXXAIXLXXXXXXXXXXXXXXGXXXETXXXXXXTXXXXXXXXXXXPDXXXXXXXTPXPXXXXXXXXLXXXXVXXXDXXXXXXXXXXXK

SEQ ID NO: 147450 - protein, 13 aa, Artificial sequence
  protein pattern
  Variant (3)..(3): Xaa in position 3 is Phe or His
  Variant (4)..(4): Xaa in position 4 is any amino acid
  Variant (6)..(6): Xaa in position 6 is any amino acid
  Variant (7)..(7): Xaa in position 7 is Phe or Tyr
  Variant (9)..(9): Xaa in position 9 is Gly or Ser
  Variant (10)..(10): Xaa in position 10 is Ala or Gln
  Variant (11)..(12): Xaa in position 11 to 12 is any amino acid
CPXXCXXCXXXXF

SEQ ID NO: 147451 - protein, 49 aa, Artificial sequence
  protein pattern
  Variant (2)..(4): Xaa in position 2 to 4 is any amino acid
  Variant (5)..(5): Xaa in position 5 is Leu or Met
  Variant (6)..(7): Xaa in position 6 to 7 is any amino acid
  Variant (8)..(8): Xaa in position 8 is Phe, Trp or Tyr
  Variant (9)..(10): Xaa in position 9 to 10 is any amino acid
  Variant (11)..(11): Xaa in position 11 is Ala or Gly
  Variant (13)..(14): Xaa in position 13 to 14 is any amino acid
  Variant (15)..(15): Xaa in position 15 is His or Arg
  Variant (16)..(17): Xaa in position 16 to 17 is any amino acid
  Variant (18)..(18): Xaa in position 18 is Ile, Leu or Val
  Variant (20)..(20): Xaa in position 20 is any amino acid
  Variant (22)..(25): Xaa in position 22 to 25 is any amino acid
  Variant (26)..(27): Xaa in position 26 to 27 is any or no amino acid
  Variant (29)..(32): Xaa in position 29 to 32 is any amino acid
  Variant (33)..(34): Xaa in position 33 to 34 is any or no amino acid
  Variant (36)..(36): Xaa in position 36 is Asp, Glu, Gly or Gln
  Variant (37)..(37): Xaa in position 37 is Ala, Gly, Ser or Thr
  Variant (38)..(39): Xaa in position 38 to 39 is any amino acid
  Variant (40)..(40): Xaa in position 40 is Ala, Glu or Ser
  Variant (41)..(41): Xaa in position 41 is any amino acid
  Variant (42)..(42): Xaa in position 42 is Asp, Asn or Ser
  Variant (43)..(43): Xaa in position 43 is Lys or Arg
  Variant (44)..(44): Xaa in position 44 is any amino acid
  Variant (47)..(47): Xaa in position 47 is any amino acid
  Variant (48)..(48): Xaa in position 48 is Leu or Met
  Variant (49)..(49): Xaa in position 49 is Ile or Leu
DXXXXXXXXXXGXXXXXXGXEXXXXXXLXXXXXXKXXXXXXXXXAIXXX

SEQ ID NO: 147452 - protein, 13 aa, Artificial sequence
  protein pattern
  Variant (3)..(3): Xaa in position 3 is Ile, Pro or Val
  Variant (4)..(4): Xaa in position 4 is Phe or His
  Variant (5)..(5): Xaa in position 5 is Ala, Gly, Pro or Ser
  Variant (7)..(10): Xaa in position 7 to 10 is any amino acid
  Variant (11)..(11): Xaa in position 11 is Asp, Glu or Gln
  Variant (12)..(12): Xaa in position 12 is any amino acid
GGXXXTXXXXXXL

SEQ ID NO: 147453 - protein, 9 aa, Artificial sequence
  protein pattern
  Variant (2)..(2): Xaa in position 2 is any amino acid
  Variant (3)..(3): Xaa in position 3 is Ile, Leu or Val
  Variant (4)..(4): Xaa in position 4 is Ile or Val
DXXXRGEGE

SEQ ID NO: 147454 - protein, 12 aa, Artificial sequence
  protein pattern
  Variant (2)..(2): Xaa in position 2 is any amino acid
  Variant (4)..(4): Xaa in position 4 is Asp, Asn or Ser
  Variant (6)..(7): Xaa in position 6 to 7 is any amino acid
  Variant (8)..(8): Xaa in position 8 is Phe or Val
  Variant (9)..(9): Xaa in position 9 is Ala or Val
  Variant (10)..(10): Xaa in position 10 is any amino acid
  Variant (12)..(12): Xaa in position 12 is Ile, Leu or Val
RXRXPXXXXXEX

SEQ ID NO: 147455 - protein, 29 aa, Artificial sequence
  protein pattern
  Variant (2)..(6): Xaa in position 2 to 6 is any amino acid
  Variant (7)..(7): Xaa in position 7 is Ile or Val
  Variant (8)..(8): Xaa in position 8 is any amino acid
  Variant (9)..(9): Xaa in position 9 is Asp, Glu or Asn
  Variant (10)..(10): Xaa in position 10 is Ile, Leu or Val
  Variant (12)..(16): Xaa in position 12 to 16 is any or no amino acid
  Variant (18)..(18): Xaa in position 18 is Asp, Glu, Gly or Ser
  Variant (19)..(19): Xaa in position 19 is Ile, Leu or Val
  Variant (20)..(20): Xaa in position 20 is any amino acid
  Variant (21)..(21): Xaa in position 21 is Asp, Glu or Asn
  Variant (22)..(24): Xaa in position 22 to 24 is any amino acid
  Variant (26)..(26): Xaa in position 26 is any amino acid
  Variant (28)..(28): Xaa in position 28 is any amino acid
  Variant (29)..(29): Xaa in position 29 is Ala, Gly or Pro
TXXXXXXXXXDXXXXXWXXXXXXXYXYXX

SEQ ID NO: 147456 - protein, 8 aa, Artificial sequence
  protein pattern
  Variant (3)..(3): Xaa in position 3 is Ala or Val
  Variant (4)..(4): Xaa in position 4 is Asp or Thr
  Variant (7)..(7): Xaa in position 7 is any amino acid
TRXXDIXR

SEQ ID NO: 147457 - DNA, 1215 bp, Synechocystis sp.
  CDS (1)..(1215): transl_table=11
atgacggacgctcgaccacggatttgtattttagggggaggatttggcggactttacaccgctctacgcctcggtcaactatcctgggagggccataccccaccggaaattgtcctcgtcgaccaacgggatcggtttttatttgcccctttcctctacgaactggtaacagaggaaatgcaaacttgggaaattgcccctccttttgtagaacttttagcggaatcgggggtaatttttcgtcaggcggaagtgaccgccattgattttgaccaccaaaaagtgttgttaaatgaccaggacaagggcaccgaaagtttagcgtttgatcagttagtcattgccctggggggccaaactcccctgccaaatctgccggggctaaaggattatggtttgggattccgcaccctggaagatgcctataaactcaagcaaaaattaaaatcactggaacaagccgacgcagagaaaattcgtattgctattgttggtgggggctacagcggggtggaattagcggccaaactcggcgatcgcctaggggaacggggccgcatccgcattattgagcggggcaaagaaattttagccatgtccccggagttcaatcgtcaacaggcccaggccagtctttccgccaagggaatttgggtggatacggaaaccaccgttaccgccatcaccgccaccgatgtcaccctccagttccgagagcaggaagatgtaattccagtggacttggtgctttggactgtgggcaccaccgtttctcctttgattcgtaatttagccctgccccataacgaccaaggccagcttagaaccaatgcccaactacaggtggaaggaaaaactaacatttttgccttgggggacggagccgaaggtcgggatgctagtggacaattaattcccaccacggcccaaggagccttccaacagacggactattgtgcctggaacatttgggctaacttaaccggccgtcccctgctgccctgtcgttatcaacccctaggggaaatgttggccctgggcaccgatggcgctgtgctgagtggtttgggcattaaattaagtggccccgccgccttgttggctcgtcgtttggtctatctctaccgttttcccacttggcaacatcaactgactgtgggcttgaattggctgacccgccccctgggggattggctcaaaaatgaaccttcctaa

SEQ ID NO: 147458 - protein, 404 aa, Synechocystis sp.
MTDARPRICILGGGFGGLYTALRLGQLSWEGHTPPEIVLVDQRDRFLFAPFLYELVTEEMQTWEIAPPFVELLAESGVIFRQAEVTAIDFDHQKVLLNDQDKGTESLAFDQLVIALGGQTPLPNLPGLKDYGLGFRTLEDAYKLKQKLKSLEQADAEKIRIAIVGGGYSGVELAAKLGDRLGERGRIRIIERGKEILAMSPEFNRQQAQASLSAKGIWVDTETTVTAITATDVTLQFREQEDVIPVDLVLWTVGTTVSPLIRNLALPHNDQGQLRTNAQLQVEGKTNIFALGDGAEGRDASGQLIPTTAQGAFQQTDYCAWNIWANLTGRPLLPCRYQPLGEMLALGTDGAVLSGLGIKLSGPAALLARRLVYLYRFPTWQHQLTVGLNWLTRPLGDWLKNEPS

SEQ ID NO: 147459 - DNA, 1194 bp, Prochlorococcus marinus str. MIT 9301
  CDS (1)..(1194): transl_table=11
atgaaatcaatacaaaaaccaatagtaatagttggagcaggttttgcaggcatgacatttgctttgagtttaaaaaatctttatccctctttaccgattcttgtggttgattctgaacctaacttcatatttaaacctttaatgtatgaagttttaagcaaagaaataagaagttgggaagccaccccaaaatttgcaaatattttttctgatgctggtataacttttttaagaaattgtttaaccaagatttccttcaaagatagtattcttgaatttagtgacgaattaaaattaagttatcagtatctcgttatctgtacaggatctattccaaatagtttttttataaaaggtgtagatgaaaattgttatttttttaatgatgttcacgatttaaataaattaaattcttttttaaaagaatcacaagatactgcgtcgcataaaaagttattcatagtgggaggtggtccctctggcatcgagttggcatgcaaaattaaagatatatatacagaccaatttgaaattaatgtaatagaaaaatcaaatgaaatcctaaataaaaacaaaatttttaatagagaacaatcagagaaggcattagaaaaaagaaaaatcaatgttattttgaattccacagttaaagaagtctcagaaactaagattagtatttctagtgaggttggaataacttccttggataaagatattgttatttggacagcaggagttaaacctaatttgtctttcttagaaacggatcaaataacaaaaaaatttggacgaattttagtcaataataatttgcaaatagaaaaccataaaaactgttttgctattggtgatatttcagttattgaaggaatggaggatttacccataactgctcaggtcgctatgcaggaaggaaatcatcttgctaataattttgaacttttaattcaaggaaaagattcgttaccctttgaatttcaagacaatggtgaaatgattagcttaggaataggcgaagcttcaatttctggactaggggttactttatctgggaaattggcttttgaggcaagaaggcttatatatgcttcaaaattgcctgatattacagaaagcttaaaatctgcatcttcatggatattcgaaaaaaaatctatttttaaaaagtttcttaaaaaagattattcaaattaa

SEQ ID NO: 147460 - protein, 397 aa, Prochlorococcus marinus str. MIT 9301
MKSIQKPIVIVGAGFAGMTFALSLKNLYPSLPILVVDSEPNFIFKPLMYEVLSKEIRSWEATPKFANIFSDAGITFLRNCLTKISFKDSILEFSDELKLSYQYLVICTGSIPNSFFIKGVDENCYFFNDVHDLNKLNSFLKESQDTASHKKLFIVGGGPSGIELACKIKDIYTDQFEINVIEKSNEILNKNKIFNREQSEKALEKRKINVILNSTVKEVSETKISISSEVGITSLDKDIVIWTAGVKPNLSFLETDQITKKFGRILVNNNLQIENHKNCFAIGDISVIEGMEDLPITAQVAMQEGNHLANNFELLIQGKDSLPFEFQDNGEMISLGIGEASISGLGVTLSGKLAFEARRLIYASKLPDITESLKSASSWIFEKKSIFKKFLKKDYSN

SEQ ID NO: 147461 - DNA, 1527 bp, Arabidopsis thaliana
  CDS (1)..(1527)
atgttcatgatcaaaaacctcacacgaatttcaccaaatacatcatcaatcatcaccagattcagaaactccggatcatcatcattatcatacactctcgcttctcgtttctgcacagctcaagagactcagattcaatctccagctaaaattccaaatgatgtggatcggagtcagtattcaggtttgccaccgacgagagaaggagagaagccgagagtagtggttctcgggtcgggttgggcgggttgtcgattgatgaaagggatcgatacgaatctctacgacgtcgtttgtgtttctccgagaaaccatatggttttcactcctcttcttgcttctacttgtgttggtactctcgaatttaggtctgttgctgaacctatctcacgtattcaacctgcgatttctagagagcctggttcttttttcttcctcgctaattgctctcgtcttgatgctgatgctcatgaggttcattgtgagactttgactgatggattgaacacattaaagccatggaagtttaagattgcttatgataagcttgtgatagcaagtggtgcagaggcttctacgtttggaatccatggtgttatggaaaatgcgatcttccttcgtgaagttcaccatgctcaggagattcgtaggaagctacttttgaatctgatgctctctgatactcctggtatatcgaaagaggagaaaaggaggctgttacattgtgttgtggttggtggtggaccaactggtgttgagtttagtggtgaactgagtgactttattatgaaagatgttcgtcaacgatatgcccatgttaaggacgacattcatgttactttgatagaggccagggatattctttcatccttcgatgatcgtctcagacgttatgctatcaagcagttaaacaagtctggagtacggtttgtgcgagggattgtgaaagatgtgcagtctcagaagttaatacttgacgatggcacagaggttccctacggactcttagtgtggtccactggtgttggtccttctcctttcgttaggtctcttggtcttccaaaagatcctactggaaggattggcattgacgaatggatgcgtgtaccttcagtgcaagacgtgtttgccattggtgactgcagcggatatctggagaccaccggaaaaccgactcttcctgctctagctcaggtagctgagagagaaggcaaatacttggcgaatctactaaatgcgatcgggaaaggcaatggaggacgagccaacagcgcaaaggagatagaacttggagttccctttgtgtataagcaccttggaagcatggctactatcggtcgatacaaagccctagtcgaccttcgcgagagcaaggacgcaaaagggatatcaatgactggtttcgtgagctggttcatatggagatcggcgtacctgactcgagtcataagctggagaaaccgattctatgtcgctatcaactggttcaccactttcgtttttggtcgtgacattagccgtatctaa

SEQ ID NO: 147462 - protein, 508 aa, Arabidopsis thaliana
MFMIKNLTRISPNTSSIITRFRNSGSSSLSYTLASRFCTAQETQIQSPAKIPNDVDRSQYSGLPPTREGEKPRVVVLGSGWAGCRLMKGIDTNLYDVVCVSPRNHMVFTPLLASTCVGTLEFRSVAEPISRIQPAISREPGSFFFLANCSRLDADAHEVHCETLTDGLNTLKPWKFKIAYDKLVIASGAEASTFGIHGVMENAIFLREVHHAQEIRRKLLLNLMLSDTPGISKEEKRRLLHCVVVGGGPTGVEFSGELSDFIMKDVRQRYAHVKDDIHVTLIEARDILSSFDDRLRRYAIKQLNKSGVRFVRGIVKDVQSQKLILDDGTEVPYGLLVWSTGVGPSPFVRSLGLPKDPTGRIGIDEWMRVPSVQDVFAIGDCSGYLETTGKPTLPALAQVAEREGKYLANLLNAIGKGNGGRANSAKEIELGVPFVYKHLGSMATIGRYKALVDLRESKDAKGISMTGFVSWFIWRSAYLTRVISWRNRFYVAINWFTTFVFGRDISRI

SEQ ID NO: 147463 - DNA, 1647 bp, Oryza sativa (japonica cultivar-group)
  CDS (1)..(1647)
atgagctgccgcgcggcgccgtgggggcgcccgtcgctccccggcggccggccctcccccggctcggcgcggcaacgcggtccattcggaggtttgaatgtatggaggaattcaatcctcaacaattcatggaggcttggtggtacgccaatgaagtttggactaccatctagattgttcagactcatggcttcaagtagctcaggagatggtggtttttcacggccttcatcaactgatgaagggccaatgccaatatactcttggccggataagcagcgtccacgagtgtgcatcttgggtggtggatttggtggcctgtacactgctcttagattagaatctcttgtatggcccaatgataagaagcctcaggtcatgctggttgatcaatctgacagatttgtatttaagcccatgttgtatgagctcttgtcaggagaagtggatgtttgggagatagctccatcatttacagagttactgaagaacactagtgttcaattcgtgaaggatagtgtaaagcttctgcgcccttctgatcactttagaagagattctggaggatcatgcactggtggagttgttcatctggaaagtggcaccgttattgaatatgattggctcgttctagctttaggggctgaagctaaaattgatgttgtcccaggatctgctgaatatgcaattcctttcacgactttggatgatgctttgaaagttgaaagccagctgaaaatgttggaaaggagaaggtttggtaaaaattcccccgatattcaggtggccattgtgggattgggttactctggtgtagagttagctgctactatctctgagagactaaagaacaaagggattgttcaagccatcaatgttcagacaactatctgtcccagtgcaccacctggaaaccgcgacgctgctctgaaggttcttgaatctcgaaatattcaacttttcttgggatattttgtgaactgcatcagagaagcttctgcatctgaggattcaagtagcatggttacagatgcaaaagaagttaatggtgaccataagaaactactattggaacttcaacctgctcaaaggggcatccagagccaggttctggaggctgatatggtattatggacagtgggttcaacctctcagattcctcggttacagcctccagatgctccatatgttattcctttaaatggtcggggccaggtagagactgaggaaacccttcaggtaaaaggccatcctcgaacttttgcaatcggtgattcagcagctctaagagacccatcaggcaaacttctcccagccactgcacaggttgcttttcaacaagcagattttgctggatggaatctctgggcagcaatcaatgaccgacctcttctgccattcaggtttcaaaatcttggtgagatgatgacacttggtagaagtgatgctgcgataacagcaagctttattgagggcctgaccttggaaggacctttagggcatgctgctaggaagattgtatactgccttaggatgcccacagatgaacatcgagtgaaggttggaatcagttggttcacaaagactgcagttgattcacttgcctccctgcaaaacgcagtaagtagcatgctaacaagcccatga

SEQ ID NO: 147464 - protein, 548 aa, Oryza sativa (japonica cultivar-group)
MSCRAAPWGRPSLPGGRPSPGSARQRGPFGGLNVWRNSILNNSWRLGGTPMKFGLPSRLFRLMASSSSGDGGFSRPSSTDEGPMPIYSWPDKQRPRVCILGGGFGGLYTALRLESLVWPNDKKPQVMLVDQSDRFVFKPMLYELLSGEVDVWEIAPSFTELLKNTSVQFVKDSVKLLRPSDHFRRDSGGSCTGGVVHLESGTVIEYDWLVLALGAEAKIDVVPGSAEYAIPFTTLDDALKVESQLKMLERRRFGKNSPDIQVAIVGLGYSGVELAATISERLKNKGIVQAINVQTTICPSAPPGNRDAALKVLESRNIQLFLGYFVNCIREASASEDSSSMVTDAKEVNGDHKKLLLELQPAQRGIQSQVLEADMVLWTVGSTSQIPRLQPPDAPYVIPLNGRGQVETEETLQVKGHPRTFAIGDSAALRDPSGKLLPATAQVAFQQADFAGWNLWAAINDRPLLPFRFQNLGEMMTLGRSDAAITASFIEGLTLEGPLGHAARKIVYCLRMPTDEHRVKVGISWFTKTAVDSLASLQNAVSSMLTSP

SEQ ID NO: 147465 - DNA, 1275 bp, Mesorhizobium loti MAFF303099
  CDS (1)..(1275): transl_table=11
gtgaatgagatgaaccaggccagccatcatgttgttgtcgtcggcgcggggttcggcggcctcgaactcacccacgcgctggctggacagccggtgcgcatcaccatgatcgacaagcgcaaccaccaccttttccagccgctgctctaccaggtggcgacgaccgcgctggcgacctccgaggttgcctggccgatccgccatctcttgcgcaagcgcaaggacgtgacgacgctgctggccaatgtcaccggcgtcgaccgtgccggcaaacgcgtgctgctcgatgacggcagcgccgtcgcctatgacacgctggtgctcgccactggcgcccgccatgcctatttcggccatgacgaatgggagcctttcgcgcccggcctgaagacgctggaggacgccaccaccattcggcggcgcattctcctggccttcgagcaggccgagcgggaaaccgatcccgccaaacgcgaggcgctgctgactattgcaatcgtcggcggtgggccgaccggcgtggaactggccggcactatcgtcgagctggcgcacgacacgctgcgcggcgagttccgcaacatcgacacgcggcaaacacgcgtggtgctgatcgaggccggtgatcgcatcctggccaatttcgcgccaaaactctccgactacgccagcaaggcgctcgagcggctcggcgtgacggtcgaactcggccgggccgtcacgcgctgcgacgccgaaggtgtcgtgtttggcgacaagcagttggcagcccgaacgatcctgtgggcagccggcgttgcggcttcgcccgcagccgaatggctgggcgcgaaggcggaccgtgcgggcagggtgctcgtcgagcctgacctcggcgtgcccggcagcccggagatttttgtcatcggcgacgcagcccttgtgctgcggcccgatggacggccggtgcccggcgtggcgccttccgccaagcaggagggccgccacgtcgccgcgaccatcaaggccaggctcggcggtgacaacaccgcgcggccatttcactacaaacatgccggcgatctggcgacgatcggcaaacgcgccgccgcgatcgatttcggctggatcaagctcacgggctggctcgcctggtggctgtggggcatcgcgcacatctatttcctgatcggtttccgcaaccggcttgcggtttccctgagctggctgtggatctacgtcaccggccagcgcagcgcccggctgatcacccagggcgacgacgacaagacctga

SEQ ID NO: 147466 - protein, 424 aa, Mesorhizobium loti MAFF303099
MNEMNQASHHVVVVGAGFGGLELTHALAGQPVRITMIDKRNHHLFQPLLYQVATTALATSEVAWPIRHLLRKRKDVTTLLANVTGVDRAGKRVLLDDGSAVAYDTLVLATGARHAYFGHDEWEPFAPGLKTLEDATTIRRRILLAFEQAERETDPAKREALLTIAIVGGGPTGVELAGTIVELAHDTLRGEFRNIDTRQTRVVLIEAGDRILANFAPKLSDYASKALERLGVTVELGRAVTRCDAEGVVFGDKQLAARTILWAAGVAASPAAEWLGAKADRAGRVLVEPDLGVPGSPEIFVIGDAALVLRPDGRPVPGVAPSAKQEGRHVAATIKARLGGDNTARPFHYKHAGDLATIGKRAAAIDFGWIKLTGWLAWWLWGIAHIYFLIGFRNRLAVSLSWLWIYVTGQRSARLITQGDDDKT

SEQ ID NO: 147467 - DNA, 1317 bp, Agrobacterium tumefaciens str. C58
  CDS (1)..(1317): transl_table=11
atgctttggcttgcgcatgctccgtgcgcgagctttggaaggcaaagacatatgcaagaacatcatgttgtcgtcgtgggtggaggcttcggcggtttacaactggtgcatgggctggagggggcccctgtccgcattacattaatcgaccgtcgcaatcaccacctgtttcagcccctgctgtatcaggttgcgacgacggcgctggcgacatccgagatcgcctggccgatccgccatctttaccgcgaccgcaaggaagtgacgaccctgcttgcggaggtgaccggcgtggaccgggcggcgcggaccgtgcagctgaattcgggccaggtgatcggcttcgatacgctggtgctggccaccggcgcgcgtcacgcctatttcggtcacgacgaatgggagcgttccgcccccggcctcaagacgctggaagatgcaacgacaatccgccgccgcctgcttctggccttcgaaagggccgaacttgccaccagtgaagaggagcggcaggcgctgctgaccttcgtcatcatcggggccggcccgaccggcgtggaaatggcgggcatgatcgccgagctcgcccacagggcgctgccggcggaattccgcaatgtcgataccagaaagacccgcgtattgcttgtggaggccggccctcgcgtcctgccggtcttcacggaggatctttcgacctatgcgaaggaagcgcttgagaagctcggcgtcgaggttctgctcggaacgccggtgacggcctgcacggatgagggcgtgacggtgggcgagacctattatccctgccgcaccgtcgtctgggccgccggtgtgcaggcctctccggcagcgaagtggctgaatgcggccggcgacagggcagggcgtgtcatcgtcgggccgcagcttcatctcgaagacgatgctgatatcttcgtcatcggcgataccgccgcggtcaatcaggaaaacggcaagccggtgccgggcatcgcgcccgcggcaaagcagcagggcgcttatgtggcaaaggtcatcaaggcgcgactggagggcaagccgataccggcacccttccgctacagccatcagggcaatctcgccaccatcggcaaacgcgcggcggtgatcgatttcggccggttcaagctgaagggcgtgctggcatggtggatatgggggcttgcccatatctacttcctgatcggaacgcggtcgcggctggccgtggcgtggagctggctgtggatttatctgagcggccagcacagtgcgcgcctgattacccagaaagagacgctgaaggacgaggcctga

SEQ ID NO: 147468 - protein, 438 aa, Agrobacterium tumefaciens str. C58
MLWLAHAPCASFGRQRHMQEHHVVVVGGGFGGLQLVHGLEGAPVRITLIDRRNHHLFQPLLYQVATTALATSEIAWPIRHLYRDRKEVTTLLAEVTGVDRAARTVQLNSGQVIGFDTLVLATGARHAYFGHDEWERSAPGLKTLEDATTIRRRLLLAFERAELATSEEERQALLTFVIIGAGPTGVEMAGMIAELAHRALPAEFRNVDTRKTRVLLVEAGPRVLPVFTEDLSTYAKEALEKLGVEVLLGTPVTACTDEGVTVGETYYPCRTVVWAAGVQASPAAKWLNAAGDRAGRVIVGPQLHLEDDADIFVIGDTAAVNQENGKPVPGIAPAAKQQGAYVAKVIKARLEGKPIPAPFRYSHQGNLATIGKRAAVIDFGRFKLKGVLAWWIWGLAHIYFLIGTRSRLAVAWSWLWIYLSGQHSARLITQKETLKDEA

SEQ ID NO: 147469 - DNA, 1575 bp, Synechocystis sp. PCC 6803
  CDS (1)..(1575): transl_table=11
gtggggttccagtttccaggaaattggccccactttttacttgcgtgctacctttacaggggaagtgcctccgggcatagtgaaacttgttcgggagtgggatggaaaactgtggccattaattcgtctgattcagcaacaacggtgattatcggtggtggttttgttggactattcactgctctccatctgcgtcatcatcagcacgccggccccattgtcctagtggaaccccaggcaaattttgtctttaagcccatgctctacgagttgctcaccgaagagttaccagagtcggtggtttgtcccagttatgaaaaattgttggccgatagcggcattgatatagtccaagcccgagttgcggatgtgcaattgaaggaaaaacggttagtacttgattctggccaagaacagcattatgactatttggtgctggcagtggggtcagtgcaggggtatttgggggcccagggggcggcagaaaatgcctttgctttccgttcccaaaccgaggcgatcgcccttagggatcatctcaaagcctgtttagaaaagtcgttaaccacagcagatcaagcggaaaaagaaagattattgaccgtggcgatcgtgggggccgggccggcgggggtggaaatggcggccacgttggcggatttactgcccagttggtatgtgcccatggggggcaatatcaacgatttaaaaatttacttggtcaaccatgcgccgggaattttggccggggatgccaatagcgggctcaagcgctgtgccctggaggagttgcaagctagaactattccggtgacgttgaagttaggggtgggggtcaaaagcgttaccccggaaagtttgcagtttgtggaaactggggaggaggaattgcgccacttagacactggcaccaccatttggaccgccggcacagcggttaaccctctactcaaaaccctcaaggaacagattccggccgaggaactcgatcgccatgggcaacccctagtaaccagtactttgcaattgcctagttttccccaggtatttgccgccggggactgtgtgacagtcaaagataatcccaaaccggccctggcccagattgcctaccaacaaggagcggcgatcgccaaaaatttaatggcggtacacaatggtaaaccgttagttagtcccgatccccaactgcggggcacattgatgaagttgggcttgaacaatggggtagccaatttatttgaccgggtacgcatccaaggcaaggcaggggatttattgcggaatgccacctatctagagctattgcccactcctctgcataacttcaaatccaccacccaatggctagcggaagaaaccatcgaccgtttccatcgtccccacgcccccaccgcccaggaactaaaatgggccgccatgaccccagcccaacggcaggaacaccaaggcatcaaggcgatcgccatcattgcgcccctgatttttatcgtcctgttgtaccttggcttcaaaacaccggaaagggaaagggctcctttcgtcccccaacctagccccggtatgaatcggtag

SEQ ID NO: 147470 - protein, 524 aa, Synechocystis sp. PCC 6803
MGFQFPGNWPHFLLACYLYRGSASGHSETCSGVGWKTVAINSSDSATTVIIGGGFVGLFTALHLRHHQHAGPIVLVEPQANFVFKPMLYELLTEELPESVVCPSYEKLLADSGIDIVQARVADVQLKEKRLVLDSGQEQHYDYLVLAVGSVQGYLGAQGAAENAFAFRSQTEAIALRDHLKACLEKSLTTADQAEKERLLTVAIVGAGPAGVEMAATLADLLPSWYVPMGGNINDLKIYLVNHAPGILAGDANSGLKRCALEELQARTIPVTLKLGVGVKSVTPESLQFVETGEEELRHLDTGTTIWTAGTAVNPLLKTLKEQIPAEELDRHGQPLVTSTLQLPSFPQVFAAGDCVTVKDNPKPALAQIAYQQGAAIAKNLMAVHNGKPLVSPDPQLRGTLMKLGLNNGVANLFDRVRIQGKAGDLLRNATYLELLPTPLHNFKSTTQWLAEETIDRFHRPHAPTAQELKWAAMTPAQRQEHQGIKAIAIIAPLIFIVLLYLGFKTPERERAPFVPQPSPGMNR

SEQ ID NO: 147471 - DNA, 1305 bp, Salmonella typhimurium LT2
  CDS (1)..(1305): transl_table=11
ttgactacaccattaaaaaagatcgtgattgtcggcggcggcgctggcgggctggaaatggcgacgcagttaggccataaactggggcgcaagaaaaaagcgaaaatcacgctggtagacagaaatcacagccatctgtggaaaccattgctgcacgaagtggcgactggctctctggacgaaggcgtggatgcgctgagctatctggctcatgcgcgtaatcatggtttccagttccagctggggtcggtgatggatatcgatcgcgaagcgaaaaccatcaccattgccgagttgcgtgatgaaaagggcgaactgctggtgccggagcgcaaaatcgcgtatgacacgctggtgatggcgctgggcagcacctctaatgatttcaacacgccgggcgtgaaagagcactgtatcttcctcgataacccgcatcaggcgcgccgttttcaccaggagatgctgaacctgttcctcaagtattcggctaatctgggcgcgaacggtaaggtcaatatcgccatcgttggcggcggtgcgacgggggttgagctgtcggctgaactgcataatgcggtaaaacagctgcatagctatggttataaggggctgaccaacgacgcgctgaacgtgacgttggttgaggctggcgagcgtattctgcctgcgttgccgccgcgtatctccagcgccgcgcataatgaactgaccaaactgggcgttcgcgtgctgacgcaaactatggtcaccagcgccgacgaaggcggtctgcatacgaaagaaggtgaatatattcaggccgatctgatggtgtgggcggcgggtatcaaagcgccagattttatgaaagagattggtggtctggaaacgaaccgcattaaccaactggtggtggaaccgacgctgcaaaccacgcgcgatcctgatatttatgcgattggcgactgcgcttcctgcgcacgtccggagggaggttttgtgccgcctcgcgctcaggcggcgcatcagatggctacctgcgcgatgaaaaacattctggcgcagatgaatggcaaaccgctgaaagcttaccagtataaagatcatggatcgctggtctctctgtccaacttctctaccgtgggtagtctgatggggaacctgacccgcggttcaatgatgattgaaggacgtatcgcccgcttcgtgtatatctcgctataccgtatgcaccagatagcgctgcatggatactttaaaaccggcctgatgatgctggtgggcagtattaaccgcgtcattcgtccgcgcctgaaactgcattaa

SEQ ID NO: 147472 - protein, 434 aa, Salmonella typhimurium LT2
MTTPLKKIVIVGGGAGGLEMATQLGHKLGRKKKAKITLVDRNHSHLWKPLLHEVATGSLDEGVDALSYLAHARNHGFQFQLGSVMDIDREAKTITIAELRDEKGELLVPERKIAYDTLVMALGSTSNDFNTPGVKEHCIFLDNPHQARRFHQEMLNLFLKYSANLGANGKVNIAIVGGGATGVELSAELHNAVKQLHSYGYKGLTNDALNVTLVEAGERILPALPPRISSAAHNELTKLGVRVLTQTMVTSADEGGLHTKEGEYIQADLMVWAAGIKAPDFMKEIGGLETNRINQLVVEPTLQTTRDPDIYAIGDCASCARPEGGFVPPRAQAAHQMATCAMKNILAQMNGKPLKAYQYKDHGSLVSLSNFSTVGSLMGNLTRGSMMIEGRIARFVYISLYRMHQIALHGYFKTGLMMLVGSINRVIRPRLKLH

SEQ ID NO: 147473 - DNA, 1230 bp, Nostoc sp. PCC 7120
  CDS (1)..(1230): transl_table=11
atgaccgaacagactaagagaattgtaattctgggtggaggctttggcggtctctatacagctttacgtgtaagccaattaccttgggaaactcagcaaaaaccggaaattgtgctggtagatcaaagcgatcgctttctattctcccccttattgtacgaattactcaccggagaactgcaatcatgggaaattgcacccccttttattgaacttctcgaaggtacaggtatacgtttttatcaagcagttgtttctggtattgatatcgaccagcaacgggtacatctgcaagatggcccagaaatcccttatgatcgcctagttttaacgctaggtggcgaaacaccattagatttagttcctggtgccatatcctatgcctatcctttccgtactattgctgacacctatcgcttggaagaacgtctgcgagtcttggaagaatcagatgcagaaaaaattcgtgtagcaattgttggtgctggttatagtggtgttgagttagcttgtaagttagcagatagactaggagaaagaggacgcttccgcctagtggaaatcagcgatcaaattttacgcacttccccagactttaaccgcgaagcagccaagaaagctttggatgcaaaaggtgtttttattgatttagaaaccaaagttgagtcaataggacaaaataccatctccctagagtacaaaaatcaagtagataccattcccgtagatttggtaatttggactgtgggtacaagggtgacaaacgtagtgaaaagtctgccctttaaacagaaccagcgtggtcaaatcactaatacaccaactctccaagttcttgaccatccagacattttcgccctgggagacttagctgactgtattgacgctgaaggtcagcaagtacccgctaccgcacaagccgcttttcaacaagcagactacgccgcttggaatatttgggcttctcttactcaacgtcccctattacctttccgttaccaacaattaggggagatgatggcactgggtacagataatgctacccttacaggtttaggagttaaattagatggttctttggcttatgttgcccgccgtctcgcctacttgtatagattaccaacactagatcatcaacttaaagttggctttaactggcttgtacgtcctattatagaaacaatttactcagcagtggatgctgtgaatgaaaagggtactaggtattag

SEQ ID NO: 147474 - protein, 409 aa, Nostoc sp. PCC 7120
MTEQTKRIVILGGGFGGLYTALRVSQLPWETQQKPEIVLVDQSDRFLFSPLLYELLTGELQSWEIAPPFIELLEGTGIRFYQAVVSGIDIDQQRVHLQDGPEIPYDRLVLTLGGETPLDLVPGAISYAYPFRTIADTYRLEERLRVLEESDAEKIRVAIVGAGYSGVELACKLADRLGERGRFRLVEISDQILRTSPDFNREAAKKALDAKGVFIDLETKVESIGQNTISLEYKNQVDTIPVDLVIWTVGTRVTNVVKSLPFKQNQRGQITNTPTLQVLDHPDIFALGDLADCIDAEGQQVPATAQAAFQQADYAAWNIWASLTQRPLLPFRYQQLGEMMALGTDNATLTGLGVKLDGSLAYVARRLAYLYRLPTLDHQLKVGFNWLVRPIIETIYSAVDAVNEKGTRY

SEQ ID NO: 147475 - DNA, 1413 bp, Nostoc sp. PCC 7120
  CDS (1)..(1413): transl_table=11
atgcagcaagcatctcatcccacagtcatcctgggtggtggctttgctggactgtttacggctctgcacttaagccagcaaaattactcctatccaattattttaatagaacagcgcgatcgctttagcttcaaaccattattgtatgaattactgagcggcgaactgcatagtcaacaagtatatcctcgttatcaagagctgttagctggtagcaaagttaagtttgtccaagacacggtgcaatcgattgatatacatcagcagagagttgataccgtctctggtcaagccttccactacagcaacttgatattagcactcggtagcaaaacaacttattttgctactcccggagcggcagaatatgcaatgccctttacttctggggaacaggcgatcgcactccgccaacacttgcgtcataagttatatcaagccattcaaacatccgactcagaacgtcgtcgcctactgttaactgtggccatcattggtgctgggccatctggtattgaattggcctgtacattagccgatttactccccatttggtacgacgagttgggcggtgatggtagtgaaattcatgttgtcctcgtcaaccgcagtcgggaaattctcaaaggcgatgttaatagccatttgcgctgcactgtcgaacgcgccatgaaaaatcgcctcattcccgtggactttttatttgatgctgctgtcacgaaaattacccctgacggtgtagagtgtcggcgacatgggcaaatacagatgttacaggcaggaacgatcgcttggactgctggtactgcacctcatcctttattaatggaattacccgtttctcaaaatcgagggcggttactggtaaaacctacattgcaactgtccaattttcccgaaatcttcgcggcgggtgactgtgccacagatagcgatcatccccaaccacccacagcccaagtagcctatcaacaaggaattgcgatcgctcaaaatctccaacgaatcagccaaaacaaaccaaccattcccgtacaagtccaactgcgcggcactttgatgaaactaggactcaacgaaggtgttgccaacttattcaacaaagtgcaaatcaaaggacaagcaggccatttgattcgagaaggaacatatttacaactactacccaactctgctcacaacctgaaagttacaaccgagtggctaacagacgaattatttcagcgtcaccgtgctgttacccccatgcagctgggacaaacaccttggttgtctggagtcgccaccaccgtagctgcactaatttttgccacccccctagtttggcgagtagcccaacctgcccaatttcagcaaaacctgagttggacaggcgttcccaccttactcaattacctaacacccagccgctaa

SEQ ID NO: 147476 - protein, 470 aa, Nostoc sp. PCC 7120
MQQASHPTVILGGGFAGLFTALHLSQQNYSYPIILIEQRDRFSFKPLLYELLSGELHSQQVYPRYQELLAGSKVKFVQDTVQSIDIHQQRVDTVSGQAFHYSNLILALGSKTTYFATPGAAEYAMPFTSGEQAIALRQHLRHKLYQAIQTSDSERRRLLLTVAIIGAGPSGIELACTLADLLPIWYDELGGDGSEIHVVLVNRSREILKGDVNSHLRCTVERAMKNRLIPVDFLFDAAVTKITPDGVECRRHGQIQMLQAGTIAWTAGTAPHPLLMELPVSQNRGRLLVKPTLQLSNFPEIFAAGDCATDSDHPQPPTAQVAYQQGIAIAQNLQRISQNKPTIPVQVQLRGTLMKLGLNEGVANLFNKVQIKGQAGHLIREGTYLQLLPNSAHNLKVTTEWLTDELFQRHRAVTPMQLGQTPWLSGVATTVAALIFATPLVWRVAQPAQFQQNLSWTGVPTLLNYLTPSR

SEQ ID NO: 147477 - DNA, 1326 bp, Ralstonia solanacearum GMI1000
  CDS (1)..(1326): transl_table=11
atggcagggcaggtggacggcgcgggtggtccgcgcatcgtggtggtcggcggtggcgccggcgggctggaactggcaacgcgcctgggcgacaagctcggcaagcgccgcgccgcgcgggtcgtcctggtcgatcgcaacccgacacatatctggaagccgctgctgcacgaagtggccgccggcagcatggacccgaacacccaccagctcgaatacgccgcccaggcgcgctggcacggcttcgagttccagcagggcgagctgaagggcctggaccgcgccgccaagaccatcaccgtgtccggctgcgtcgacgccgacggcaccgaggtgctgcccgagcgcgccatcgcctatgacatgctggtgctcgccatcggcagcgtgacgcatttcttcggcgtgccgggcacggccgagcatgcgattgcgctggatgccgcgtcgcaggccgagcgcttccgccgcaagctgatttcggcgtgcatgcgcgcgcagaacggcgtgggcgatgcgcgcgcgcaggtggacatcgccatcgtcggcgcgggcgcgaccggcgtggaactgtcggcggaactgcgcaacaccgcccacgtgctggcggcctacggcctgcacaagctggacccgctccgcgatatccgcatccacctgatcgaagggagcccgcgcatcctggccgccctgtccgaacgtgtctccaccgagaccaccaagctgctgcagaagctgaacgtggaggtgatcaccggcgagcgcgtcaaccaggtcaccgacagcgcggtcaagacggccagcggcaagtcgatcccggccgatctgacggtgtgggcggcgggcatccgcgcgccggcgatcctgggcgagctggggctgccggtgaacaagctggggcaggtggtcgtctcgcgcacgctgcaggccgaaggcgatgacgccatctatgccttcggcgattgcgccagctgcccgtggcccgaggcatcggccagcgtgccgccgcgcgcccaggccgcccaccagcaggcgacctatctgtataaagccctgtgccgccggctggaaggcaagccggtggagccgttcggcttcaaggatctgggctcgctggtgtcgctcggccacttcagcgcggtcggcagcctgatgggcggcctgatcggcggcaccatgttcatcgaagggatgatggcgcggctgatgtacacgtcgctgtaccgcatgcacgtgatggcgctgcacggcttcgtgcgcatggcgctggataccgtcacgcactggctgcgcagcaagaccaatccgcgggtcaagctacactag

SEQ ID NO: 147478 - protein, 441 aa, Ralstonia solanacearum GMI1000
MAGQVDGAGGPRIVVVGGGAGGLELATRLGDKLGKRRAARVVLVDRNPTHIWKPLLHEVAAGSMDPNTHQLEYAAQARWHGFEFQQGELKGLDRAAKTITVSGCVDADGTEVLPERAIAYDMLVLAIGSVTHFFGVPGTAEHAIALDAASQAERFRRKLISACMRAQNGVGDARAQVDIAIVGAGATGVELSAELRNTAHVLAAYGLHKLDPLRDIRIHLIEGSPRILAALSERVSTETTKLLQKLNVEVITGERVNQVTDSAVKTASGKSIPADLTVWAAGIRAPAILGELGLPVNKLGQVVVSRTLQAEGDDAIYAFGDCASCPWPEASASVPPRAQAAHQQATYLYKALCRRLEGKPVEPFGFKDLGSLVSLGHFSAVGSLMGGLIGGTMFIEGMMARLMYTSLYRMHVMALHGFVRMALDTVTHWLRSKTNPRVKLH

SEQ ID NO: 147479 - DNA, 1266 bp, Agrobacterium tumefaciens str. C58
  CDS (1)..(1266): transl_table=11
atgcaagaacatcatgttgtcgtcgtgggtggaggcttcggcggtttacaactggtgcatgggctggagggggcccctgtccgcattacattaatcgaccgtcgcaatcaccacctgtttcagcccctgctgtatcaggttgcgacgacggcgctggcgacatccgagatcgcctggccgatccgccatctttaccgcgaccgcaaggaagtgacgaccctgcttgcggaggtgaccggcgtggaccgggcggcgcggaccgtgcagctgaattcgggccaggtgatcggcttcgatacgctggtgctggccaccggcgcgcgtcacgcctatttcggtcacgacgaatgggagcgttccgcccccggcctcaagacgctggaagatgcaacgacaatccgccgccgcctgcttctggccttcgaaagggccgaacttgccaccagtgaagaggagcggcaggcgctgctgaccttcgtcatcatcggggccggcccgaccggcgtggaaatggcgggcatgatcgccgagctcgcccacagggcgctgccggcggaattccgcaatgtcgataccagaaagacccgcgtattgcttgtggaggccggccctcgcgtcctgccggtcttcacggaggatctttcgacctatgcgaaggaagcgcttgagaagctcggcgtcgaggttctgctcggaacgccggtgacggcctgcacggatgagggcgtgacggtgggcgagacctattatccctgccgcaccgtcgtctgggccgccggtgtgcaggcctctccggcagcgaagtggctgaatgcggccggcgacagggcagggcgtgtcatcgtcgggccgcagcttcatctcgaagacgatgctgatatcttcgtcatcggcgataccgccgcggtcaatcaggaaaacggcaagccggtgccgggcatcgcgcccgcggcaaagcagcagggcgcttatgtggcaaaggtcatcaaggcgcgactggagggcaagccgataccggcacccttccgctacagccatcagggcaatctcgccaccatcggcaaacgcgcggcggtgatcgatttcggccggttcaagctgaagggcgtgctggcatggtggatatgggggcttgcccatatctacttcctgatcggaacgcggtcgcggctggccgtggcgtggagctggctgtggatttatctgagcggccagcacagtgcgcgcctgattacccagaaagagacgctgaaggacgaggcctga

SEQ ID NO: 147480 - protein, 421 aa, Agrobacterium tumefaciens str. C58
MQEHHVVVVGGGFGGLQLVHGLEGAPVRITLIDRRNHHLFQPLLYQVATTALATSEIAWPIRHLYRDRKEVTTLLAEVTGVDRAARTVQLNSGQVIGFDTLVLATGARHAYFGHDEWERSAPGLKTLEDATTIRRRLLLAFERAELATSEEERQALLTFVIIGAGPTGVEMAGMIAELAHRALPAEFRNVDTRKTRVLLVEAGPRVLPVFTEDLSTYAKEALEKLGVEVLLGTPVTACTDEGVTVGETYYPCRTVVWAAGVQASPAAKWLNAAGDRAGRVIVGPQLHLEDDADIFVIGDTAAVNQENGKPVPGIAPAAKQQGAYVAKVIKARLEGKPIPAPFRYSHQGNLATIGKRAAVIDFGRFKLKGVLAWWIWGLAHIYFLIGTRSRLAVAWSWLWIYLSGQHSARLITQKETLKDEA

SEQ ID NO: 147481 - DNA, 1560 bp, Arabidopsis thaliana
  CDS (1)..(1560)
atggccgttctctcctctgtatcttctctcatacccttctcttatggggcaacgagactgactagtaaagcttcattagcctcaagaacttccggattcaatctctcttctcgttggaactcaacgagaaactcccctatgttgtatctttcgagagcagtgacaaacaacagtggcaccacagagatttctgataatgaaacagctccaaggacttactcatggcctgataacaagaggccaagggtgtgcattctaggtggtggctttggaggattgtacacagctttgagattagaatctcttgtttggcctgaagacaaaaagcctcaggtggttttggttgaccaatccgaacgttttgtgttcaagcccatgttgtatgaactactctctggagaagttgatgtgtgggagattgctccccgtttctcggatttgcttacaaacacggggatccaatttctccgagatagagtgaaaacattgcttccttgtgaccatttaggagttaatgggtctgagatttctgttactggaggaaccgtcttgctcgaaagcggttttaaaatcgaatacgattggttggttcttgctcttggcgctgaatctaaactcgatgttgttcccggtgcaatggagttggctttcccattctacactcttgaagatgccattagggttaacgaaaagctgagtaaattggagaggaagaattttaaagacggatctgccataaaagtagctgttgttggctgcggttatgcaggagtagagttggctgctaccatatcagagagactgcaagatcgtggaatagtgcagtccattaacgtatcaaagaatatactaacatcagcccctgatgggaacagagaagcggctatgaaggtccttacgtcgagaaaagtccaattactcttaggttatcttgttcaatccataaagagagcaagcaacctagaagaagatgaaggatattttttagagcttcaacctgcagaaagaggattagagagtcaaattattgaagcggatatagtgttatggacagttggtgctaagcctttgcttactaaattagaaccctcgggtcccaatgtccttcctttgaatgctagaggacaagcggaaacagacgagacactccgtgttaaaggacatccacggatatttgcattaggtgattcgtcttctctaagagactcaaacggaaagattcttcctacaacagctcaggttgcttttcaagaagcagactttactggctggaatatatgggcagctataaataaccgacctttattaccattcaggtttcagaacctaggtgagatgatgactcttggaagatatgatgctgctatatcgccaagtttcattgaagggcttacacttgaaggtccaattggtcacgcagcgagaaaactggcgtatttgattagactaccaactgatcaacacctgtttatggtcagaatcagttgcttagctaaatctgctgttgattcaattgctttacttcagagcaatctaaccaaggttttgtctggttcttga

SEQ ID NO: 147482 - protein, 519 aa, Arabidopsis thaliana
MAVLSSVSSLIPFSYGATRLTSKASLASRTSGFNLSSRWNSTRNSPMLYLSRAVTNNSGTTEISDNETAPRTYSWPDNKRPRVCILGGGFGGLYTALRLESLVWPEDKKPQVVLVDQSERFVFKPMLYELLSGEVDVWEIAPRFSDLLTNTGIQFLRDRVKTLLPCDHLGVNGSEISVTGGTVLLESGFKIEYDWLVLALGAESKLDVVPGAMELAFPFYTLEDAIRVNEKLSKLERKNFKDGSAIKVAVVGCGYAGVELAATISERLQDRGIVQSINVSKNILTSAPDGNREAAMKVLTSRKVQLLLGYLVQSIKRASNLEEDEGYFLELQPAERGLESQIIEADIVLWTVGAKPLLTKLEPSGPNVLPLNARGQAETDETLRVKGHPRIFALGDSSSLRDSNGKILPTTAQVAFQEADFTGWNIWAAINNRPLLPFRFQNLGEMMTLGRYDAAISPSFIEGLTLEGPIGHAARKLAYLIRLPTDQHLFMVRISCLAKSAVDSIALLQSNLTKVLSGS

SEQ ID NO: 147483 - DNA, 1656 bp, Schizosaccharomyces pombe 972h-
  CDS (1)..(1656)
atgcttttttctcggtctattctccgaggaatgccaaaggctggcattccaaaatctcccttagctttatcggcttctcgcaatcttcgccttgcaaacagcgtgcgctttgcttccgatgctgcttcttctcccaagagcaccacaagtaagtggaagatcctgaaacgtactacattaggtcttttcgctacggctgttgttctttatggtgccaatgtctaccgtttccgtcatcctgatcctcatcaacctttgcccgatccttccaaaaagactttggtcgtccttggtgctggttggggtgccacttctattcttcgtactattgatacttctctctttaacgttatcgttgtttcccctagaaactatttcttgttcacttctcttttgccttctactgccactggttccgttcatactcgaagcattgtacagcccattcgttatatgctccgtcataagtcctgctatgttaaattttacgaggctgaatgtacagacgtcgatgccgacaaaaaggtcatccatatcaagaaaaccaccactgatggagtcgatttagagcaggaaatcaagtatgattatcttgtttgctctcacggtgctgaaacacaaaccttcaacattcccggtatcgccgagtatggctgtttcttgaaggaaatttgggatgcccaaaagattcgcgctcgtatccttcattgcctcgaacaagcacagtttaaggatcttcctgctgaaactcgtcgcagatatgtacatactgtcgtagttggcggtggtcctactggtatggaatttgccggtgaaatggctgatttcattgaagatgatctgaaatcctggtatcctgaacttgctgatgactttgccgttactcttgtcgaagctttaccttctgttttgcccatgtttagcgccaagttacgtgattatacccaaagcttatttgacagcagccatattaagatcagaactaatactgccctaaaaaaggtcactgctgaaaatatccatgttgaagttaaaaaccctgatggaagtaagcaagaagaggttatcccttacggattattggtctgggctggtggtaaccgtgcccgccctcttaccaaaaagctcatggagggtagtgaagagcaaaataacagacgtggtttagtagtcgatgaatacttaaaattgaagggttacaaggacattttcgctctaggtgattgcactcacaccgcttatgctcccactgctcaagtggcttcacagcaaggtgcctacctcggtcaactttttaacaaacttggatcgttgaactttgagaagcctagcgaagatagacacattgccctcggtgatgaaatggattccagcacacttatctctttagcaaatgagaagcatgcctctaccaaggtcttccttcccttcaaatactctcaccaaggttctctcgcctatgtcggtcatgagaaagctattgccgatattgaagttccctggtttggaaaacaactccatgcaagcggtgctcttgccttctacttctggcgttcggtttacctttctgaattatactccttgcgtaaccgtaccaatgttacactagattggattagagttaagttatttggacgtgatatttcttccctttaa

SEQ ID NO: 147484 - protein, 551 aa, Schizosaccharomyces pombe 972h-
MLFSRSILRGMPKAGIPKSPLALSASRNLRLANSVRFASDAASSPKSTTSKWKILKRTTLGLFATAVVLYGANVYRFRHPDPHQPLPDPSKKTLVVLGAGWGATSILRTIDTSLFNVIVVSPRNYFLFTSLLPSTATGSVHTRSIVQPIRYMLRHKSCYVKFYEAECTDVDADKKVIHIKKTTTDGVDLEQEIKYDYLVCSHGAETQTFNIPGIAEYGCFLKEIWDAQKIRARILHCLEQAQFKDLPAETRRRYVHTVVVGGGPTGMEFAGEMADFIEDDLKSWYPELADDFAVTLVEALPSVLPMFSAKLRDYTQSLFDSSHIKIRTNTALKKVTAENIHVEVKNPDGSKQEEVIPYGLLVWAGGNRARPLTKKLMEGSEEQNNRRGLVVDEYLKLKGYKDIFALGDCTHTAYAPTAQVASQQGAYLGQLFNKLGSLNFEKPSEDRHIALGDEMDSSTLISLANEKHASTKVFLPFKYSHQGSLAYVGHEKAIADIEVPWFGKQLHASGALAFYFWRSVYLSELYSLRNRTNVTLDWIRVKLFGRDISSL

SEQ ID NO: 147485 - DNA, 1293 bp, Xanthomonas axonopodis pv. citri str. 306
  CDS (1)..(1293): transl_table=11
atgacctctctcccctcccaagctccgctgcatctggttgtggttggcggcggattcgccggcttatgggcgacccgcgcgctcgacgaccccggcatccgcatcactctggtcgaccgtcagaaccaccacctgttccagcccctgctgtatcaggtggccaccgccggcctgtcggcaccggacatcgccgcgccgctgcggcacatcctgcgcgagcaacgcaatgtcgaagtactgctcggcgatgtcaccgatatcgcaccaagccgccgcgaggtggtgttggccgatggcggcacgctcggctacgacatgttgctgctggccaccggcgccacccatgcctatttcggcaacgaccaatgggccgaacacgcccctggcctgaaaacgctgtacgacgcactggtgctgcggcgcaagctgctgctggccttcgaacgcgcagaagccgaatccgaccctgccgcacgcgccgcctggctgagctttgcagtggtcggcggcgggcccaccggcgtcgaactggccggcactctggccgaaatcgcccgccacacactcaagaacgagttccgccacatcgacccgcggcaggcgcgcgtgcggctggtcgaagccggtccgcgcgtgctgccctcgtttccggaagatctcaccgccaaggcgcgcaagcagttggaacgtctgggcgtggaggtgcacaccggaactccggtcacgcagatcgatgcattgggctaccagctcggcgacaccttcgtgccggcacgcaccgtggtgtgggccgccggcgtggccgcctcgccgctggcgcgtacgctgggcgtgccgctggatcgcgccggccgcgtgctggtcgaagccgacctcagcgtgccgggccacccggaaatcttcgtcggcggcgatctggcctcggtgcagcaggacggccgcccggtgccgggcgtggcaccggccgccaagcagatgggcaagcacatcgccaaggcgatccgggcgcggcagcgcggccagaccgcgccggcgttccgctaccaggactacggcaacctggccacgatcggccgcatggccgccatcgtgcatgtgggcaagctcaagctgtccggcgtcgtcgcctggtggttctggctggctgcgcacgtgtactttttgatcggcttccgcaaccggttcgtggtgctggtgaactgggcgatggcgtactggagctaccagcgcgccgcgcgcatcatcttcggcggcgccaccgacgatcctccccccagcagcaaggacggatga

SEQ ID NO: 147486 - protein, 430 aa, Xanthomonas axonopodis pv. citri str. 306
MTSLPSQAPLHLVVVGGGFAGLWATRALDDPGIRITLVDRQNHHLFQPLLYQVATAGLSAPDIAAPLRHILREQRNVEVLLGDVTDIAPSRREVVLADGGTLGYDMLLLATGATHAYFGNDQWAEHAPGLKTLYDALVLRRKLLLAFERAEAESDPAARAAWLSFAVVGGGPTGVELAGTLAEIARHTLKNEFRHIDPRQARVRLVEAGPRVLPSFPEDLTAKARKQLERLGVEVHTGTPVTQIDALGYQLGDTFVPARTVVWAAGVAASPLARTLGVPLDRAGRVLVEADLSVPGHPEIFVGGDLASVQQDGRPVPGVAPAAKQMGKHIAKAIRARQRGQTAPAFRYQDYGNLATIGRMAAIVHVGKLKLSGVVAWWFWLAAHVYFLIGFRNRFVVLVNWAMAYWSYQRAARIIFGGATDDPPPSSKDG

SEQ ID NO: 147487 - DNA, 1206 bp, Thermosynechococcus elongatus BP-1
  CDS (1)..(1206): transl_table=11
gtgatcagggaatcagcggtgagaagccaaatttgcattctgggtggtgggttcggtgggctttatacagccctccgcttggcgcaattcccgtggtcttcccctccagagatcacccttgtggatcacagcgatcgctttgtatttacgcccctgctttacgaactgattacgggggagctagaggcctgggaaattgcccctccctttgtggagctgctgcgggatacaccagtggtctttcatcagggagcggtgaccactattgatctccaggaaaaaactgttcacctgggcaagggcgacccctttacctatgaaaaacttgttctcgccctagggggtgaaaccccgaaaagcactatccccggtgtggcggcggatgccttgacgttccgtaccctcagtgacgcctaccgccttgaagaagcgctgcaacggtgtgagcactctgatcgcgatcgcatccgcgttgtcgttgtcggtgctggtccgagtggggtggaattggcctgtaaactggcggagcgactggggagccgaggtcgcattcggctggtggatcgcaacccagagattctgaagtcctcccctgaatttaatcgcaaggcggccctccgtgccctcgaagatcggggcgtttggattgatctagagaccacgccagttgccctaactcgcgatcgcatttcgctgcaatacaaagaccgggtggacgagttgcccgtggacattgttctttggaccgttggcacagcggtttcgccggtgattgcggcgcttgatttgcccaaaactgccagcggtcggctccaggtgacgcccacactgcaagtggttgatcaccccgatatttttgcccttggggatgcggcggatgcggtggatgaacagggacaacccattccccatacggcacaggcagcttttcagcaggcggactatgttgcttggaacctttgggccagtctcagcgatcgcccgctacttccctgtcgttactcccaccttggcgaaatgctcaccctcgggcgcgatcgcgctgccttggccggcctaggactgacccttgatggccccctggcctatttggcgcggcgactggcctacctctaccgcatgcccaccctcgaacatcaactgaaggtgggattgaattggatagccaagccctttttggatctcctgaccaccatcgctagttag

SEQ ID NO: 147488 - protein, 401 aa, Thermosynechococcus elongatus BP-1
MIRESAVRSQICILGGGFGGLYTALRLAQFPWSSPPEITLVDHSDRFVFTPLLYELITGELEAWEIAPPFVELLRDTPVVFHQGAVTTIDLQEKTVHLGKGDPFTYEKLVLALGGETPKSTIPGVAADALTFRTLSDAYRLEEALQRCEHSDRDRIRVVVVGAGPSGVELACKLAERLGSRGRIRLVDRNPEILKSSPEFNRKAALRALEDRGVWIDLETTPVALTRDRISLQYKDRVDELPVDIVLWTVGTAVSPVIAALDLPKTASGRLQVTPTLQVVDHPDIFALGDAADAVDEQGQPIPHTAQAAFQQADYVAWNLWASLSDRPLLPCRYSHLGEMLTLGRDRAALAGLGLTLDGPLAYLARRLAYLYRMPTLEHQLKVGLNWIAKPFLDLLTTIAS

SEQ ID NO: 147489 - DNA, 1305 bp, Shigella flexneri 2a str. 301
  CDS (1)..(1305): transl_table=11
ttgactacgccattgaaaaagattgtgattgtcggcggcggtgctggtgggctggaaatggcaacacagctggggcataagctgggacgtaagaaaaaagccaaaattacgctggtcgatcgtaaccacagccacctgtggaaaccactgctgcacgaagtggcgactggctcgcttgatgaaggcgtcgatgcgttgagctatctggcccatgcgcgcaatcatggtttccagttccagttgggttccgtcattgatattgatcgtgaagcgaaaacaatcactattgcagaactacgcgacgagaaaggtgaactgttggttccggaacgtaaaatcgcctatgacaccctggtcatggcgctgggtagcacctctaacgatttcaatacgccaggcgtcaaagagaactgcattttcctcgataacccgcaccaggcgcgtcgcttccaccaggagatgctgaatctgttcctgaaatactctgccaacctgggcgcaaatggcaaagtgaacattgcgattgtcggcggcggcgcgacgggtgtagaactctccgctgaattgcacaacgcgatcaagcaactgcacagctacggttacaaaggcctgaccaacgaagccctgaacgtaacgctggtagaagcgggagaacgtattttgcctgcattaccgccacgtatctctgctgcggcccacaacgagctaacgaaacttggcgttcgcgtgctgacgcaaaccatggtcaccagtgctgatgaaggcggcctgcacactaaagatggcgaatatattgaggctgatctgatggtatgggcagccgggatcaaagcgccagacttcctgaaagatatcggtggtcttgaaactaaccgtatcaaccagctggtggtggaaccgacgctgcaaaccactcgcgatccagacatttacgctattggcgactgcgcgtcatgcccgcgtccggaagggggctttgttccgccgcgtgctcaggctgcacaccagatggcgacttgcgcaatgaacaacattctggcgcagatgaacggtaagccgctgaaaaattatcagtataaagatcatggttcgctggtatcgctgtcgaacttctccaccgttggtagcctgatgggtaacctgacgcgcggctcaatgatgattgaaggacgaattgcgcgctttgtatatatctcgctataccgaatgcatcagattgcgctgcatggttactttaaaaccggattaatgatgctggtggggagtattaaccgcgttatccgtccgcgtttgaagttgcattaa

SEQ ID NO: 147490 - protein, 434 aa, Shigella flexneri 2a str. 301
MTTPLKKIVIVGGGAGGLEMATQLGHKLGRKKKAKITLVDRNHSHLWKPLLHEVATGSLDEGVDALSYLAHARNHGFQFQLGSVIDIDREAKTITIAELRDEKGELLVPERKIAYDTLVMALGSTSNDFNTPGVKENCIFLDNPHQARRFHQEMLNLFLKYSANLGANGKVNIAIVGGGATGVELSAELHNAIKQLHSYGYKGLTNEALNVTLVEAGERILPALPPRISAAAHNELTKLGVRVLTQTMVTSADEGGLHTKDGEYIEADLMVWAAGIKAPDFLKDIGGLETNRINQLVVEPTLQTTRDPDIYAIGDCASCPRPEGGFVPPRAQAAHQMATCAMNNILAQMNGKPLKNYQYKDHGSLVSLSNFSTVGSLMGNLTRGSMMIEGRIARFVYISLYRMHQIALHGYFKTGLMMLVGSINRVIRPRLKLH

SEQ ID NO: 147491 - DNA, 1302 bp, Bradyrhizobium japonicum USDA 110
  CDS (1)..(1302): transl_table=11
atgaaacagagaagcagcaagagtcgagggcgcatcatgaccaccacaccccatcgtgtcgtcatcgtcggcgccggcttcggcgggctggaggcgacctaccggctggcgggcaccccggtcgacatcacgctgatcgaccgccgcaaccatcatctgttccagccgctgctctaccaggtcgcgaccgcatcgcttgcgaccagcgagatcgcctggccggtccgccatctcatgcgcgaccggcgcgaggtgacgacgctgttcgcgacggtcagcggcgtcgatgcgacgaggcgctgcgtgctgatcgacgacggcagcgaggtgccctacgacacgctggtgctcgcgaccggcgcgcgtcacgcctatttcggccatgacgaatgggagcagttcgcgcccggcctgaagacgctggaggacgcgaccacgctgcgccgtcacatcctggtggcgttcgagcgcgccgagcgcgagaccgatccggccaagcgcgcggcgcggctgaccttcgtcatcgtcggcgccggccccaccggcgtcgagctcgccggcaccatcgccgaaatggcgcatcacaccctgccggaagatttccgcaacatcgatacgaccaaggcgcgcgtggtgctgatcgaggcggggccgcgcgtgctcgcaggcttcgccgacgagctctcggcctatgcacaggcgtcgctggagaagatcggcgtcgaggtcgtgctcggccagcccgtcaccgagatcgaccgcgacggcgtggtctatggcggcacgcgcctggacgcgaagaccaagatctgggccgcgggcgtgcgcgcctcgcccgccgccgaatggctgggcgtgccggccgatcgcgccggccgtgtgcaggtcgaggccgacctgacgatccccggccatcccgagatctttgccatcggcgacaccgtgacgatcagtgcctgggagggcaagccggtgcccggaatcgcgcccgccgccaaacagcaggggcggcacgtcgccgagaccgtcaaggcgcgcctgcgcggagagacgaagggagcgttccgctacaagcactctggcagccttgcgcagatcggcaagcgcctcgcggtgatcgatttcggccgcatcaagctgcgcggcaccatcgcgtggtggatctggggcatcgcccacatctacttcctgatcggcctccgccaccgcctcagcgtcgccctgagctggctctggatctacgcgcgagatcagcgcgctgcgaggctgattacgcaggggagtagtaaggtggtggggtga

SEQ ID NO: 147492 - protein, 433 aa, Bradyrhizobium japonicum USDA 110
MKQRSSKSRGRIMTTTPHRVVIVGAGFGGLEATYRLAGTPVDITLIDRRNHHLFQPLLYQVATASLATSEIAWPVRHLMRDRREVTTLFATVSGVDATRRCVLIDDGSEVPYDTLVLATGARHAYFGHDEWEQFAPGLKTLEDATTLRRHILVAFERAERETDPAKRAARLTFVIVGAGPTGVELAGTIAEMAHHTLPEDFRNIDTTKARVVLIEAGPRVLAGFADELSAYAQASLEKIGVEVVLGQPVTEIDRDGVVYGGTRLDAKTKIWAAGVRASPAAEWLGVPADRAGRVQVEADLTIPGHPEIFAIGDTVTISAWEGKPVPGIAPAAKQQGRHVAETVKARLRGETKGAFRYKHSGSLAQIGKRLAVIDFGRIKLRGTIAWWIWGIAHIYFLIGLRHRLSVALSWLWIYARDQRAARLITQGSSKVVG

SEQ ID NO: 147493 - DNA, 1299 bp, Pseudomonas syringae pv. tomato str. DC3000
  CDS (1)..(1299): transl_table=11
atgacgcatcgtattgttatcgttggcggaggcgctggcggtctggagctggcgaccagtctgggtaaaaccctgggcaagaaaggtacggccagcgtcacgctggtggacgccaacctgactcacatctggaaaccgctgttgcacgaagtggctgccggttcgctcaactcttatgaggacgagctgaactacgtggctcaggccaagtggaaccactttcagtttcagctcgggcgcatgaccgggctggatcgtgccagccgccagatccatctggcggccacgctggatgaaaccggtgccgagctggtgccggcgcgcagcctggggtatgactcgctggtgatcgcagtgggcagcaccaccaatgatttcggcaccacgggcgctgcggagcactgtctgtttctcgacagtcgcaagcaggccgagcgctttcatcagcaactgctcaaccactacctgcgtgctcacgcgggccaggcagacagtgcgcaggaaatcaccgttgccatcgttggcgcaggtgcaaccggtgttgagctggcggcagagctgcacaatgcagcgcatgaactggcggcttacgggctggggcagatcaagccggaaaacctgcgcatcacggtcatcgaggccgggcctcgggtgctgcctgcgttgcctgagcgtatcggtgcgccggtgcacaagacgctggaaaagcttggcgtcaccgtgctgaccaatgcggcggtgagtgaggtgacggccgatggtttgatcacggccaccgggcaggttattccggcgagtttgaaggtctgggcagcgggtatccgtgctccggcctttctgcatgagctggacgggctggagagcaaccgcatcaatcagttgcaagtgctgccgacgctgcaaactacccgcgatgaaaatatcttcgccttcggtgattgcgccgcctgcccgcagaaaggcactgatcgcaatgtcccgccgcgcgctcaggcggctcaccagcaggcatcgttgctggccaagtcgctgcgcctgcggatagaaggcaagacgttgccggagtacacctacaaggactacggctcgctgatctcgctgtcaagcttctcggcagtcggcaatctgatgggtaacctcatgggcagcgtcatgcttgagggctggttggcccgaatgttttatgtgtcgctataccgcatgcaccagatggcgctgtacggcactttccgcaccctgatgctgatgctgggcagcaagatcggcaaagggacagagccgcggatgaagctgcactaa

SEQ ID NO: 147494 - protein, 432 aa, Pseudomonas syringae pv. tomato str. DC3000
MTHRIVIVGGGAGGLELATSLGKTLGKKGTASVTLVDANLTHIWKPLLHEVAAGSLNSYEDELNYVAQAKWNHFQFQLGRMTGLDRASRQIHLAATLDETGAELVPARSLGYDSLVIAVGSTTNDFGTTGAAEHCLFLDSRKQAERFHQQLLNHYLRAHAGQADSAQEITVAIVGAGATGVELAAELHNAAHELAAYGLGQIKPENLRITVIEAGPRVLPALPERIGAPVHKTLEKLGVTVLTNAAVSEVTADGLITATGQVIPASLKVWAAGIRAPAFLHELDGLESNRINQLQVLPTLQTTRDENIFAFGDCAACPQKGTDRNVPPRAQAAHQQASLLAKSLRLRIEGKTLPEYTYKDYGSLISLSSFSAVGNLMGNLMGSVMLEGWLARMFYVSLYRMHQMALYGTFRTLMLMLGSKIGKGTEPRMKLH

SEQ ID NO: 147495 - DNA, 1305 bp, Salmonella enterica subsp. enterica serovar Typhi Ty2
  CDS (1)..(1305): transl_table=11
ttgactacaccattaaaaaagatcgtgattgtcggcggcggcgctggcgggctggaaatggcgacgcagttaggccataaactggggcgcaagaaaaaagcgaaaatcacgctggtagacagaaatcacagccatctgtggaaaccattgctgcacgaagtggcgactggctctctggacgaaggcgtggatgcgctgagctatctggctcatgcgcgtaatcatggtttccagttccagctggggtcggtgatggatatcgatcgcgaagcgaagaccatcaccattgccgagttgcgtgatgaaaagggcgaactgctggtgccggagcgcaaaatcgcgtatgacacgctggtgatggcgctgggcagcacctctaatgatttcaacacgccgggcgtgaaagagcactgtatcttcctcgataacccgcatcaggcgcgccgttttcaccaggagatgctgaacctgttcctcaagtattcggctaacctgggcgcgaacggtaaggtcaatatcgccatcgttggcggcggtgcgacgggggttgagctgtcggctgaactgcataatgcggtaaaacagctgcatagctatggttataaggggctgaccaacgacgcgttgaacgtgacgttggttgaggctggcgagcgtattctgcctgcgttgccgccgcgtatctccagcgccgcgcataatgaactgaccaaactgggcgttcgcgtactgacgcaaactatggtcaccagcgccgacgaaggcggtctgcatacgaaagaaggtgaatatattcaggccgatctgatggtgtgggcggcgggtatcaaagcgccagattttatgaaagaaattggtggtctggaaacgaaccgcattaaccaactggtggtggaaccgacgctgcaaaccacgcgtgatcctgatatttatgcgattggcgactgcgcttcctgcgcacgtccggagggaggttttgtgccgcctcgcgctcaggcggcgcatcagatggctacctgcgcgatgaataacattctggcgcagatgaatggcaagccgctgaaagcttaccagtataaagatcatggatcgctggtctctctgtccaacttctctaccgtgggtagtctgatggggaacctgacccgcggttcaatgatgattgaaggacgtatcgcccgcttcgtgtatatctcgctataccgtatgcaccagatagcgctgcatggatactttaaaaccggcctgatgatgctggtgggcagtattaaccgcgtcattcgtccgcgcctgaaactgcattaa

SEQ ID NO: 147496 - protein, 434 aa, Salmonella enterica subsp. enterica serovar Typhi Ty2
MTTPLKKIVIVGGGAGGLEMATQLGHKLGRKKKAKITLVDRNHSHLWKPLLHEVATGSLDEGVDALSYLAHARNHGFQFQLGSVMDIDREAKTITIAELRDEKGELLVPERKIAYDTLVMALGSTSNDFNTPGVKEHCIFLDNPHQARRFHQEMLNLFLKYSANLGANGKVNIAIVGGGATGVELSAELHNAVKQLHSYGYKGLTNDALNVTLVEAGERILPALPPRISSAAHNELTKLGVRVLTQTMVTSADEGGLHTKEGEYIQADLMVWAAGIKAPDFMKEIGGLETNRINQLVVEPTLQTTRDPDIYAIGDCASCARPEGGFVPPRAQAAHQMATCAMNNILAQMNGKPLKAYQYKDHGSLVSLSNFSTVGSLMGNLTRGSMMIEGRIARFVYISLYRMHQIALHGYFKTGLMMLVGSINRVIRPRLKLH

SEQ ID NO: 147497 - DNA, 1320 bp, Bordetella bronchiseptica RB50
  CDS (1)..(1320): transl_table=11
atgacgcagaccccgaatacaggttcccctcatcgcgtggtcatcgtgggcggcggcgccggcggcctcgaactggccgccaagctgggccgcgcccacgggcgcgagcgcgtcacgctggtcgacagccgccctttccacatctggaaaccctccctgcacgaagccgccgccggcacgctggacatccaccaggaaggcctgtcctacctgatgctggccaacatgtgcaacttcacgttcgcgcaaggcgaattgcagggcatcgagcgcgagcggcgccagatccaggtcgggccggtggccgacccgtccggccagcaggtcctgccgccgcgcgaactctcgtacgatacgctggtgctggccatgggcagcacttccaacttcttcaatacgccgggcgcggccgaacacgccgttaccctggacaccaccgagaacgccgagcagttccgcctgaccatgctcaaggccatggtgcaggtggacctgcgcaaggttcacgacccctcggcgcgcctggacctggtcatcgtcggcggcggggccaccggcgtcgaactggccgtggagctgatcgaggccagccatgtggtcagcgcctacggactgcccaatttccgcgccgaccgcgacctggtcatcacgctggtcgaaggcgcgccgcgcattctgtcggccctgcccgagaagatctcgcgcgcggcccacgcccgcctgaccgagctgggcgtgcgcgtcgaaaccgattgccgggtggccgaagtcggcgccgaccatgtcgtcaccgccgacggccggcgcttcgaggccacgatgtgcctgtgggccgccggcatcgaagggccgccgctgttccggcaactgggcctgccgctcaatcggctgggccagctggaagtcaacgaacgcctggaaagccccgatccccacatcctggcgctgggcgattgctgcgcggcgccctggaaggacggacgcaccgtgccggcccgcgcgcaggcggcgcaccagcaggccgactacctggcgcgcaagctgacggcccgcctgcgcaacgccgccgaacccaccgaggcctatgcgtaccacgaccacggctcgctggtttcgctgggccaggggtccggggtgggcagcctgatgggcaagctggccgggcgcggcctgttcgtaagcggtacactggcgcgcctgatgtacatgagtctgcacctgatgcaccaccgcgcggtgctcggtatttcgcggaccgccacgcttgccctggcgcgcctgttgatgcggcgcacccgtcccagggtcaaactgcactga

SEQ ID NO: 147498 - protein, 439 aa, Bordetella bronchiseptica RB50
MTQTPNTGSPHRVVIVGGGAGGLELAAKLGRAHGRERVTLVDSRPFHIWKPSLHEAAAGTLDIHQEGLSYLMLANMCNFTFAQGELQGIERERRQIQVGPVADPSGQQVLPPRELSYDTLVLAMGSTSNFFNTPGAAEHAVTLDTTENAEQFRLTMLKAMVQVDLRKVHDPSARLDLVIVGGGATGVELAVELIEASHVVSAYGLPNFRADRDLVITLVEGAPRILSALPEKISRAAHARLTELGVRVETDCRVAEVGADHVVTADGRRFEATMCLWAAGIEGPPLFRQLGLPLNRLGQLEVNERLESPDPHILALGDCCAAPWKDGRTVPARAQAAHQQADYLARKLTARLRNAAEPTEAYAYHDHGSLVSLGQGSGVGSLMGKLAGRGLFVSGTLARLMYMSLHLMHHRAVLGISRTATLALARLLMRRTRPRVKLH

SEQ ID NO: 147499 - DNA, 1185 bp, Prochlorococcus marinus subsp. pastoris str. CCMP1986
  CDS (1)..(1185): transl_table=11
atgaaatcaataaaaaaaccaatagtaatagttggagcaggctttggaggtatgacagttgcttcaaacttaaaagaacttaatccttctttgccgatcctagtcgttgattctgaagcaaagtttatatttaaacctttaatgtatgaagttttaagcgaagaattatcaatgtgggagactgctcctgaattttcaaatatattttcaaatttaggtattacatttctaagaaattgtttaactaaaattagatttgatgaaaagattctcgaatttagtgatgatttaaatataggttatgaatgtttgattctttgtacaggatccttatctagtaatttttcagttagaggagtagatgaaaattgttattttttcaataatttaaatgatcttaaaaaattaaagtcgtttttacaaaagtttcagaatgacaaaattaagaaaaacttatttgtaattggagctggtccttctggggtagagatcgcatgcaaaattaatgatatatataaaaataaatttgatataagtattgttgaaaggtctaatgaaattttaggtcgaaataagatttttaatcgagaagaagccgagaaagctttagaaaaaagaaaaataaatgttcttttaaattcaactgttcaagaaatttctgaccaaaaaattagtattttggatggttctgagattaaagacttagatcaagatattgtgatctggactgctggggtcaaacctaaccttccatacattgacgcacaagtcacacaaaaagatggaagaattctcgtgaatgaaaattttcagatagataattgtgtaaactcttttgctattggagatatttcaattattaaaggtatggaggatttgcctttgaccgctcaagttgcaatgcaacaaggaaatcatcttgctaaaaatatcgaattactctttcaagaaaaagagcttttgccttttaattttgaggacaatggtgaaatgattagtttaggaattggtgaagcatccatctctgctttaggtgtaactttatcgggtaaatttgcatttgaagcaagaagattgatttatgcttcaaaaatgcctgatattagtaaaagcttaaaatctacggcttcttggttatttcaaaaaaaatctactataaataactttattaataaaaaaccataa

SEQ ID NO: 147500 - protein, 394 aa, Prochlorococcus marinus subsp. pastoris str. CCMP1986
MKSIKKPIVIVGAGFGGMTVASNLKELNPSLPILVVDSEAKFIFKPLMYEVLSEELSMWETAPEFSNIFSNLGITFLRNCLTKIRFDEKILEFSDDLNIGYECLILCTGSLSSNFSVRGVDENCYFFNNLNDLKKLKSFLQKFQNDKIKKNLFVIGAGPSGVEIACKINDIYKNKFDISIVERSNEILGRNKIFNREEAEKALEKRKINVLLNSTVQEISDQKISILDGSEIKDLDQDIVIWTAGVKPNLPYIDAQVTQKDGRILVNENFQIDNCVNSFAIGDISIIKGMEDLPLTAQVAMQQGNHLAKNIELLFQEKELLPFNFEDNGEMISLGIGEASISALGVTLSGKFAFEARRLIYASKMPDISKSLKSTASWLFQKKSTINNFINKKP

SEQ ID NO: 147501 - DNA, 1170 bp, Prochlorococcus marinus str. MIT 9313
  CDS (1)..(1170): transl_table=11
atgatccccaacccgtcaaacgccaatgccgtggtggttgtcggaggcggatttgcagggctaactaccgcgctcgctctcagccactgccaacctcgcccccccattgtgttgattgaaccgcgccagcggttcgtctttctccccttgctttacgaactcttgagtggagagcttcaggcttgggaagtcgcacctccttatcactctctactcagtcaacgcggtattgcccttctcgaagaccgggttgacagcatcgacaccaaagcaaaaacggtaaccaccagctcagggctcaagctcaactacgcacaactagtactcagcactggctcaactccaacagatttcgacattcccggggtccgtaaacacgccctgatgtttcaccatctaaacgacgttgacgtgctgcgacaacgaattaaagaacttcaattgcgtagaaatcctcgtcaggaccttgtgattgttggagcggggccaactggcgtggaactggcctgcaagctggcagatctccttgaaggtgctgctcaactccacctcattgagcttggcgaaagggttctgcccagtgcgaaagccttcaaccaagaacaagccgagcgagccctcagcgaacgtggtgttcacgttcatttgctcacgcaagttcgagccatctcaacagaccaggttgaactcctaagcaaacaaaaagaacctgccataagttcagcaataactcacagtggtcttgtttggacagccggcacaagaccagtcataccagcactcagccccgactttgtccttaccgaagcaagactgcctatcgattcgtgcctacaagtgatcggactcagtgatgtgcttggccttggcgatgccacttacaacaaagatcactcctggccgcccacagcccaggtcgcacttcaacaaggggagctcgcggctcgaaacgtgatggcactacgaacaagcagtcctctccaaccttttgaatttaaggattttggcgaaatgctcagcctgggagtaggagaagcctccatcaccggcatgggtttcacactcgcaggtcctctggctttccaaattcgccggggtgcctatctaacaaaactacctggattgtctctaggcctgcgctcaggcggggcctggctgctcggacattga

SEQ ID NO: 147502 - protein, 389 aa, Prochlorococcus marinus str. MIT 9313
MIPNPSNANAVVVVGGGFAGLTTALALSHCQPRPPIVLIEPRQRFVFLPLLYELLSGELQAWEVAPPYHSLLSQRGIALLEDRVDSIDTKAKTVTTSSGLKLNYAQLVLSTGSTPTDFDIPGVRKHALMFHHLNDVDVLRQRIKELQLRRNPRQDLVIVGAGPTGVELACKLADLLEGAAQLHLIELGERVLPSAKAFNQEQAERALSERGVHVHLLTQVRAISTDQVELLSKQKEPAISSAITHSGLVWTAGTRPVIPALSPDFVLTEARLPIDSCLQVIGLSDVLGLGDATYNKDHSWPPTAQVALQQGELAARNVMALRTSSPLQPFEFKDFGEMLSLGVGEASITGMGFTLAGPLAFQIRRGAYLTKLPGLSLGLRSGGAWLLGH

SEQ ID NO: 147503 - DNA, 1149 bp, Synechococcus sp. WH 8102
  CDS (1)..(1149): transl_table=11
atgacgacacctctgtcatcacccgagaccgtggtggtgatcggtggtggattcgcgggactgttcagcgctctagccgtgagcgagcgcttgccggagcgaccggtgctgttgatcgagccccgtgaccgctttctgtttcaaccgcttctctacgaactgctcagcagtgaactgcagggctgggaagtagcgcccacctatcgccagctgctcagcagccgcggcatctgctggctgcaggaccgtgtcatcaacatcgatctgaacaaccaggagctcaccaccgccgcctccggtgctctccaatggggagatctggtgctggccacaggcaccgagctcaatgatttcggagttcccggggtccgcgagcatgcctgcagcttccgcgatctcaatgatgttgcccatctgcgcgcccttgttcgagagctgaacaagcgcagagagcccgacgccgctgtcgcgatcattggagcagggccaacgggggtggagctggcctgcaagctggcggacatgctggatggagcagcccggatacatctgattgaaaggggagacgggatccttcccaacagtgcctcgttcaaccgtgaacgcgctgccgcggcattggagcggcgggatgtctgcctgcacctcaacacagctgtgacggaggtccactccgatcgtgtccgcttcaaggacggcaccttgctcccccacagcggtctgatctggagcgccggcagcagaccgaccgtgcccgaaatccggccggaccctggtcacgccaaaggccctctcaacatcggccaggatctgcggctcctcggtcaccaacacgtctacgtgctgggggattgcggacgttgcagcgttgagccctggccagccaccgctcaggtggccatgcagcagggcgaagctgttgcagcggccctgcaggccatcagcaacaaccaggagccgaaaccatttcagttccaggatcgcggcgaaatgctcagtttgggcatcggtgacgccacgctcaccgggcttggcatcacgcttgcaggccccctggccttcaagatccgacgggccacctacctcacccggctgcctggtctctcactgggtcttcgctctgccggggcctggctgatgagtcgttga

SEQ ID NO: 147504 - protein, 382 aa, Synechococcus sp. WH 8102
MTTPLSSPETVVVIGGGFAGLFSALAVSERLPERPVLLIEPRDRFLFQPLLYELLSSELQGWEVAPTYRQLLSSRGICWLQDRVINIDLNNQELTTAASGALQWGDLVLATGTELNDFGVPGVREHACSFRDLNDVAHLRALVRELNKRREPDAAVAIIGAGPTGVELACKLADMLDGAARIHLIERGDGILPNSASFNRERAAAALERRDVCLHLNTAVTEVHSDRVRFKDGTLLPHSGLIWSAGSRPTVPEIRPDPGHAKGPLNIGQDLRLLGHQHVYVLGDCGRCSVEPWPATAQVAMQQGEAVAAALQAISNNQEPKPFQFQDRGEMLSLGIGDATLTGLGITLAGPLAFKIRRATYLTRLPGLSLGLRSAGAWLMSR

SEQ ID NO: 147505 - DNA, 1317 bp, Chromobacterium violaceum ATCC 12472
  CDS (1)..(1317): transl_table=11
atgttaagccgcaacgcggccgtgccgcggatcgtcatcgtcgggggcggggcaggggggctggagctggccacccggctgggacgcacgctgggggcgcgccaccgcgcccagatcgtgctggtggacggctcgcccacccatatctggaaaccgttgctgcatgaggtggctaccggcgcgctgaataccggcgaggatgaggtcaactacttcgcccacggctaccgcaacggttacgacttcgagttcggctacatgcagggcctggaccagaagcgccgcaccatccgcctgtcggcgataccgggcagcgacggccagctgttgagcccggagcgcgagatcggctatgactggctggtgatcgccgtcggcgccgaggccaatgatttcggcacgccgggcgtcgccgagcacgcgatgttcctgaatacccccaacgacgccgagaagctgcgccaccgcgtgctggagcaggccttccgcgccagcagcggcgaggagccggcgcgcgcgctgtccatcgccatcgtcggcggcggcgccaccggcgtcgaactggcggccgagctgaaccacaccatgtgcgagctgcaccactacggcgcgcggctgcagccggagcgggtgagaatcagcgtgatcgaggccgcggaccgcatcctggccgccgcgccgccgtccttgtcggcctatgccgaggagcagctggccggcaagaacatccgggtgctgaccggcagccgggtggcggcggtggaggccgacggcgtggcgctggccggcggcagcaaggtggaggccgacatcacggtgtgggcggccggcgtcaaggcctcggcctggctggccggcctggacgggttggagaccaatcgcgtcaaccagctggtggtggatacccggctgcattgcgccggcggcgactgcatctacgcgatgggcgactgcgcggcggctccggatggcgacagcggccgcatgctggcggccaccgcccaggtggcgcaccagcaggcgcgctatctggccgacgaactggcgcgcaggctggacgacaagccggcgcggcccttcgtgttcaagccgcagggcatgatggtgtcgctgggcaagcacaccgcggtgggcagcctggcggcggtggtgggaccgaagcgcgactaccacgtggaaggccgcggcgcgaagctgatctacgcctcgctgtaccggatgcaccaggctgcggtgcacggctgggcgctggcgattctgctgttcattggcgacaagctgcgccgcgcggcgcggccggcgttgaagctgcactga

SEQ ID NO: 147506 - protein, 438 aa, Chromobacterium violaceum ATCC 12472
MLSRNAAVPRIVIVGGGAGGLELATRLGRTLGARHRAQIVLVDGSPTHIWKPLLHEVATGALNTGEDEVNYFAHGYRNGYDFEFGYMQGLDQKRRTIRLSAIPGSDGQLLSPEREIGYDWLVIAVGAEANDFGTPGVAEHAMFLNTPNDAEKLRHRVLEQAFRASSGEEPARALSIAIVGGGATGVELAAELNHTMCELHHYGARLQPERVRISVIEAADRILAAAPPSLSAYAEEQLAGKNIRVLTGSRVAAVEADGVALAGGSKVEADITVWAAGVKASAWLAGLDGLETNRVNQLVVDTRLHCAGGDCIYAMGDCAAAPDGDSGRMLAATAQVAHQQARYLADELARRLDDKPARPFVFKPQGMMVSLGKHTAVGSLAAVVGPKRDYHVEGRGAKLIYASLYRMHQAAVHGWALAILLFIGDKLRRAARPALKLH

SEQ ID NO: 147507 - DNA, 1260 bp, Gloeobacter violaceus PCC 7421
  CDS (1)..(1260): transl_table=11
atgccgaccatgatgcccagcgaccgcaccgtgattctgggcggggggttcactggcctgtttaccgccctgcgcctcaaccgtcggcgctatccccacccggtcgtgctcgtcgaccgctcggagcgcttttcgttcaagcccttactttatgagttgctgagcggcgagatggacgtctaccaggtctggccgcgcttcgaagagttgctgcgcggcagccgcatcacctttatccaggatgcagtgcagactattgacctggaagggcgctgggtggagttggaatcaggactttcttacgcttacagcaatctggtgctggctctgggcggggctgtcggcagcactgggccggacaaccggcacgcttattttttgcgcacgggcgaagaggtgctcaaattgcggcagcacttgcgcctctgcctgcagcgggcaacccagcttggcgggccggacgagcgaaaacggctgctgacggtagcggtggtgggcggcggacccgcgggtatcgaactggcggcgacgctcgccgactggctgcccgcgagcttcacccggttggggggcgccggccgggaggtgcgcgtggcgctgttgcaaaggggaatgcagctattgccccaggacatgagcctctacctgcgcaagaccgccgtggacgcgctcgcccggcgcgctgtgccggtggaggtggttctgggggcgtcggtcaaaaaggtcgagccggacggggtgtactacgagcgcgaaggcaccgccgaaataatcccggccgcggccgtcgtctggacgggcggcggcggtggggcgacgatgccgttcaagcttcaggggttgtccccggaagggtacaacaaaaacggacgcctgctggtcaccccgacctggcagttgccgaattttccggaagtctttgccgggggggatctggccctcgacccggaccatccgcagcccaccacggcccaggccgcctaccaggagggcgaggcgatcgcctacaacatcgaagccctcgcgcgcgggcggcagatcgcggtagcccccgtgcgccaattaggaacgatgatgaaactcggcttgggcgaaggggcggtggaagtcttcgatcgctacgagatagcgggccgcctcggtctgctcatccgccagttgcgctatctggggctgttgcccacgccgatttacagcttcaaggccaccgcctactggttgaccgatttactgtggccgcgctcgggcatggccgcctga

SEQ ID NO: 147508 - protein, 419 aa, Gloeobacter violaceus PCC 7421
MPTMMPSDRTVILGGGFTGLFTALRLNRRRYPHPVVLVDRSERFSFKPLLYELLSGEMDVYQVWPRFEELLRGSRITFIQDAVQTIDLEGRWVELESGLSYAYSNLVLALGGAVGSTGPDNRHAYFLRTGEEVLKLRQHLRLCLQRATQLGGPDERKRLLTVAVVGGGPAGIELAATLADWLPASFTRLGGAGREVRVALLQRGMQLLPQDMSLYLRKTAVDALARRAVPVEVVLGASVKKVEPDGVYYEREGTAEIIPAAAVVWTGGGGGATMPFKLQGLSPEGYNKNGRLLVTPTWQLPNFPEVFAGGDLALDPDHPQPTTAQAAYQEGEAIAYNIEALARGRQIAVAPVRQLGTMMKLGLGEGAVEVFDRYEIAGRLGLLIRQLRYLGLLPTPIYSFKATAYWLTDLLWPRSGMAA

SEQ ID NO: 147509 - DNA, 1221 bp, Gloeobacter violaceus PCC 7421
  CDS (1)..(1221): transl_table=11
atgctggaagggtctttcacagcatcagccatggcgcgcattgtcattgtcggcggcggatttgcggggttgttcaccgcccttggcctcgaagcgtatcccttcaaagacgagcgcccagaaattctgctcatcgatcgctcggagcggtttgtcttctcgccgctcctttacgaactggtttcgggggagcttgccacctgggaggtggccccgcgcttcgacgaattgctcgaagggacgcgggtgcgcttcgtgcaggccgaggcgatgggtttcgacttcgaaaaccgcatcgtcaagcttgcgggcggcggtgccgaaagttacgaccggctggcccttaccgtgggcggcagcacacccgtggacatcgtgccgggggcgcgcgagcacgccttgccctttcgtaccctcgaagacgcccaggcgctgatcgcccggctcaaggccgccctcgatgccggggccgaccctgtgcgcgcagccctggtgggggcgggggcaagcggcgtcgaactcgcctgcaaactcgccgacaccctaggcgacaaaggcagcatcgttttgttcgaccgcgcagcggacatcctggccgagttcgacgcgccggagcgcaaaatggcccgtgccgaactcgaaaagcgcagagtgcggctgggactctccacaaaaattctgtcggtgagcgatgcgggcctgcaagtcgagaccgccgggcgcggcgtcgaggcgatccccgccgaggtggtgctctggacggtggggacggcggtgccggggctcatcaaagatctcgatctgcccaaggggccgggcggacggctggccgtcgagcccaccttgcaggtgcaggggcaccccgaaatcttcgccttaggcgatctggcagcgagcctcgatgccggcggcaagccgctcggtcccagtgcccagttggccttccaacaggcgggctactgcgcgtggaatctctgggcgagcctgagcgaccggccgctgctcgcctttcgctacaacgcgctgggcaagctgttggggttggggatcgacagcggcgtcgcctcgcttctgggcacggccgtcggcggtccgcccgcctatctcatccgccgactggcgtatctttaccggatgcccaccgacgcccaccggctgaaagtggccctgcactgggcaagtcggcctgttgtgcgctggctgggcggggcggcaccttag

SEQ ID NO: 147510 - protein, 406 aa, Gloeobacter violaceus PCC 7421
MLEGSFTASAMARIVIVGGGFAGLFTALGLEAYPFKDERPEILLIDRSERFVFSPLLYELVSGELATWEVAPRFDELLEGTRVRFVQAEAMGFDFENRIVKLAGGGAESYDRLALTVGGSTPVDIVPGAREHALPFRTLEDAQALIARLKAALDAGADPVRAALVGAGASGVELACKLADTLGDKGSIVLFDRAADILAEFDAPERKMARAELEKRRVRLGLSTKILSVSDAGLQVETAGRGVEAIPAEVVLWTVGTAVPGLIKDLDLPKGPGGRLAVEPTLQVQGHPEIFALGDLAASLDAGGKPLGPSAQLAFQQAGYCAWNLWASLSDRPLLAFRYNALGKLLGLGIDSGVASLLGTAVGGPPAYLIRRLAYLYRMPTDAHRLKVALHWASRPVVRWLGGAAP

SEQ ID NO: 147511 - DNA, 1305 bp, Photorhabdus luminescens subsp. laumondii TTO1
  CDS (1)..(1305): transl_table=11
atgacaacaccaaagaagagaattgttatcattggtggaggtgccggtggtttggaactggcaaccagtctggggcataagttaggtcgtaaaaagaaagcagaaattgtgctggtggatcgtaaccaaagtcatttatggaagccgttattacatgaagtggcaacaggctcccttgacgatggagttgatgcgttgagttatctggctcatgcccgtaaccactatttcagtttccaattaggggcattgactgatattcaccgtgatagcaaaaaaattactttgaatgagatcagggatgaatataacgaagtattggttcctgaacgtgaattgagctatgacattctcgttatggccttgggaagtacatctaatgattttaatacacaaggtgtgaaagagcactgtatcttcctggataacccacaacaggctcaccgtttccataatgaaatgttgaatctatttcttaaatattctgcaaactgtggtcagcaagataaggttaatattgctatcgttggcggtggagcgacaggtgttgagttatcagcggaattgcacaatgcggtaaaacagcttaacagttatggttttgaagggctgaattcagaagcgttgaacgtgacgttagtcgaagcaggggagcgaattttgcctgcattgccggcacgtatttctgctgcggcacatcaggaactcacaaaacttggcgttcatgtattaaccaaaactatggtgaccagcgctgatgaacatgggttgaatactaaagaaggtgagctgattaaagctgatctcatggtatgggctgccggtattaaagcacctgattttatgaaagatattgccggtcttgaaactaaccggattaatcagctagtggtaaagccaactctgcaaacgacacttgatgatcatatttttgccattggtgattgtgcatcatgctcgaagaaggaggggggttttgttccaccaagggcacaggcggctcatcaaatggctagccgctgttacagtaatattattgccttgttgcatgataaaccgttaaaagagtatacctacaaagatcatggctcattggtatcattgtctaaatttagtacggtgggtagtttgatgggcaatttgatgcgtggttcaatgatgatcgaagggcgtatagcccgtgcggtttatatctctttatatcgtatgcatcaggtggctttacatggttatattaaaactggcttgatgatgcttgttggcggaattaaccgtgttatccgtccgcgattgaaactacattaa

SEQ ID NO: 147512 - protein, 434 aa, Photorhabdus luminescens subsp. laumondii TTO1
MTTPKKRIVIIGGGAGGLELATSLGHKLGRKKKAEIVLVDRNQSHLWKPLLHEVATGSLDDGVDALSYLAHARNHYFSFQLGALTDIHRDSKKITLNEIRDEYNEVLVPERELSYDILVMALGSTSNDFNTQGVKEHCIFLDNPQQAHRFHNEMLNLFLKYSANCGQQDKVNIAIVGGGATGVELSAELHNAVKQLNSYGFEGLNSEALNVTLVEAGERILPALPARISAAAHQELTKLGVHVLTKTMVTSADEHGLNTKEGELIKADLMVWAAGIKAPDFMKDIAGLETNRINQLVVKPTLQTTLDDHIFAIGDCASCSKKEGGFVPPRAQAAHQMASRCYSNIIALLHDKPLKEYTYKDHGSLVSLSKFSTVGSLMGNLMRGSMMIEGRIARAVYISLYRMHQVALHGYIKTGLMMLVGGINRVIRPRLKLH

SEQ ID NO: 147513 - DNA, 1566 bp, Magnaporthe grisea 70-15
  CDS (1)..(1566)
atgtctttgaattgctcggcaagaagacaggctcttgtaacgttaaggaccaagacaaactgcacacataggtgcctcagatcgttatcaagttccgcgacagagccctcaggtaatcggggtctgggcacagaaagtcctagtggcaaacgaaaggagagggtcgtgatactgggctctggttgggcaggctacgcccttgcgcggacattagatccagccaaattcgaccgcgttgtcgtttccccaaggtcgcacttcgtttttactccccttctggcgtccactgccgtcggtactttagagttccgcgccgtggccgagcccgtccgccgcatccgccaggttatattccagcagggctgggcagacgacgtcgacttcacgcgcaaggtcgtccgggtcgaggctagtatcgatgacgatgccgcctcccacaccacgatccccgtgccagagccggcaacgataccagggaaggccgtgattcccaccaccccgcacaaggggcccatgatcgacgtgccgtacgacaagctagtggttgcggtgggtgcctattcgcagactttcaacattgacggggttcgcgagcatgcgcactttctccgcgacgttggggacgccaggcgcattcgccttcgcattctcgccctatttgagcactgcgccagcaacccgaccatatccgacgagcaaaagcgtgagctgctccactttgctgtggtgggcggcgggccgacgggcatcgagtttgcggccgagctgcacgacctcatttacgaggatctgataaaggtctaccctggtcttgtcccactggtccgcattaccgtctatgacatcgctccggcggtccttcccatgttcgacaaggagctggctggctacgccatggagctcttcaaccgcaggggtatcgagatacgtacagaacatcatctccaagccatacgcgccgagggagacggtctgaaattgaagatcaaagagcacggagaccaggaagtcggcgcagggatggtcgtttggagcaccggattgatgcagcacccgctggtcaagaaactcgtcgacaaccaagtccatgaccaaggttcaaacccaaactcgcctttgcgcctcaaaagtgaccccaaaactggcgccattgtgaccgatggacatatgcgggcacaaattacagaaaacgcctcgcggggacaatcaccaaggatggacgacgttttcgtcattggcgattgcgccttttgcgaagccgatcagtcactaccaaagacaggccaggttgcatcgcaacaggctgtatacctagccaaggccctgaatagcggaaatttagacgagagtaaaccgttttccttccgaaattggggaaccatggcatacctaggaggctggcgcgctattcaccaaagcagcgcggacgaactaaaaggacgtgccgcttgggttttgtggcggacggcatatttgacaaaaagcttgagcgtgcgcaacaagattattgtgccatttttctggtttatatcatggctctttggaagagatatatctcgtttttag

SEQ ID NO: 147514 - protein, 521 aa, Magnaporthe grisea 70-15
MSLNCSARRQALVTLRTKTNCTHRCLRSLSSSATEPSGNRGLGTESPSGKRKERVVILGSGWAGYALARTLDPAKFDRVVVSPRSHFVFTPLLASTAVGTLEFRAVAEPVRRIRQVIFQQGWADDVDFTRKVVRVEASIDDDAASHTTIPVPEPATIPGKAVIPTTPHKGPMIDVPYDKLVVAVGAYSQTFNIDGVREHAHFLRDVGDARRIRLRILALFEHCASNPTISDEQKRELLHFAVVGGGPTGIEFAAELHDLIYEDLIKVYPGLVPLVRITVYDIAPAVLPMFDKELAGYAMELFNRRGIEIRTEHHLQAIRAEGDGLKLKIKEHGDQEVGAGMVVWSTGLMQHPLVKKLVDNQVHDQGSNPNSPLRLKSDPKTGAIVTDGHMRAQITENASRGQSPRMDDVFVIGDCAFCEADQSLPKTGQVASQQAVYLAKALNSGNLDESKPFSFRNWGTMAYLGGWRAIHQSSADELKGRAAWVLWRTAYLTKSLSVRNKIIVPFFWFISWLFGRDISRF

SEQ ID NO: 147515 - DNA, 1431 bp, Gibberella zeae PH-1
  CDS (1)..(1431)
atggtcatggggacgagccccattgctcttgcacgtcaaccacgcttgttgatgaggctcagtggactaaattccaagaggctagccagtactgcggctcttgaaggctcagggtgggctggatatgctcttgcaaagaaaatatccccttcagcagcatcctgtgttctcatctctcctcgctctcacttcgtctttactcctctcatcgcctcaacagccgttggtactctcgagtttcgtgccgctgttgagccctgtcgaaaacttacccatacagagttccatcaagcctgggcttcagatattgactttgccaacaagagcatcaccgtcgaggccaaccatcgcgatggagtcacagctcgctcgggtaaggatctcaaaggccccgagttccagattccctacgacaagctcgttgtagccgttggttgctacagccaaacctttggtgtcgaaggtgtgaaggagcatgcatgctttcttcgagatgccactgatgctcgaaccgtgcgcttaagagttttgcaaaagtttgaacaggctgctttgcctagcacaaacactgctgagagaaaacggctgcttcactttgcagttgtaggtggtggtcccaccggtatcgagtttgcagctgagcttcatgatcttatacatgaggatctgtccaagctatatccagatctgatgcctcacgtcgccattacaatttatgatatcgcacccaaggttcttcccatgtttgatcagaacctagccgcatacgcaacaaatatcttcaagcgagaaggcatccgcatcaagacagagcatcacctacaaggcattcgtcgccagggcgatgtcctcctcatgcgtataaaggaggagcccgaggaagtcgcagcaggtgttgtagtctggagtacagggctcatgcagaatccactcgttggaaagacagtcggtcgtgaagtcgaaggtttgggcaagattgcaaaaaacgacaaaacaggtggttttgcggttgactcccatctccgcgtgcaagtggaaagcagagatctcaatggtaaagagatcacaaagtcattgcctgatgtgtacgccattggagattgtgcaaacattgaaggccaggcacttcctgcaacagcccaagtggcgagccaacaagcaacatatctcggcaagcgattcaattctggtatttcgtcacaaggccctcctactgcacccttccatttccgtaactggggaactatggcataccttggaggttggagggcgattcatcagaatggcgctgacgagctcaaaggccgagcggcgtggattctttggcgtacggcgtacttgaccaaaagtatgagtttcaagaacaaactcatgattccttattattggttaatcacttggatctttggacgagatatttcgagattttga

SEQ ID NO: 147516 - protein, 476 aa, Gibberella zeae PH-1
MVMGTSPIALARQPRLLMRLSGLNSKRLASTAALEGSGWAGYALAKKISPSAASCVLISPRSHFVFTPLIASTAVGTLEFRAAVEPCRKLTHTEFHQAWASDIDFANKSITVEANHRDGVTARSGKDLKGPEFQIPYDKLVVAVGCYSQTFGVEGVKEHACFLRDATDARTVRLRVLQKFEQAALPSTNTAERKRLLHFAVVGGGPTGIEFAAELHDLIHEDLSKLYPDLMPHVAITIYDIAPKVLPMFDQNLAAYATNIFKREGIRIKTEHHLQGIRRQGDVLLMRIKEEPEEVAAGVVVWSTGLMQNPLVGKTVGREVEGLGKIAKNDKTGGFAVDSHLRVQVESRDLNGKEITKSLPDVYAIGDCANIEGQALPATAQVASQQATYLGKRFNSGISSQGPPTAPFHFRNWGTMAYLGGWRAIHQNGADELKGRAAWILWRTAYLTKSMSFKNKLMIPYYWLITWIFGRDISRF

SEQ ID NO: 147517 - DNA, 1644 bp, Kluyveromyces lactis NRRL Y-1140
  CDS (1)..(1644)
atgtttgcgtctaagagtgttgttgcttctagcagagctttgaacgccggtgcgtcatctgctcgcttcgctcgcggtgctagatttttttctagtacaaaatcaatttctaatattggccaaaaagctgttgtcccagtaaagccatcgctagcaagaagagtggtttctaccactttgaaagtttctctagcggctttgttggctggtactggttacgtttcctatgaattgtacagggaagctaatccacctcctcaaattcctcaagctgccactttcgctaacggttctccaaggaaaacccttgtcgttttgggtactggttggggttctgtgtccttattgaaacatttggatacttctttgtataacgttattgttgtttctccaagaaactacttcttgttcactccattgctaccttctactccagtcggcaccgttgagttgaagtccattgtcgaacctgtcagatccatcaccagatcttcacctggtgaagttcattactatgaggctgaagccaaggacatcgatcctgttgccaagaccgttagaataaaatctgctactaaagaccatgactacgaacttgatttgaactatgattatttggtcgtcggtgttggtgctcaaccaactaccttcggtatcccaggtgtcttcgaaaacgcctccttcttgaaggaaattccggacgctcaagatattagaactaaaatcatgaataacattgaaaaggctgctactttgtctgctaacgaccctgaacgcaagagattgttgagtttcgttgttgttggtggtggtccaaccggtgttgaatttgctgctgaattgcaagattacgttgaccaagatttgtctaaatggatccctgaaatctccaaggaaattaaggttactttggtcgaagctttaccaaatatcttgaatatgtttgataagtctctatggcaatacgcccaagacttgttcgccatggaaaaaatcgatgtcaagttaaagactatggttaagaacgtcaactctactaccatcactgcccaatgtggtgatgcaactgaagatatcccatacggtttgttggtttgggctactggtaacgctccaagagaagtttccaagaacttgatggctaaattggaacaacaaaattccagacgtggtttattgatcaatgacaagatgcaactattaggcgctgaagactccatttgggccattggtgactgtactttcttcccaggtcttttcccaacagctcaagtggcacatcaagaagctgaatacttgactgaaactttgaaacaacaatacaagattgatcaattgaaatgggaaatctcgaaaactactaatgccactgaaacttctaaattgcactccaagttggacagaattgtgaaacaacaaaaacctttcaaatacaaccaccaaggtacccttgcttacattggttcagaacaagccattgctgacgttgctgtcggtgaatccaaatatcaaatggccggttctttcaccttcttattctggaagtctgcttacctagggatgtgtctctccttcagaaacagaatcttggtcgctatggactgggctaaagtttacttcctaggtagagactcatcggtatga

SEQ ID NO: 147518 - protein, 547 aa, Kluyveromyces lactis NRRL Y-1140
MFASKSVVASSRALNAGASSARFARGARFFSSTKSISNIGQKAVVPVKPSLARRVVSTTLKVSLAALLAGTGYVSYELYREANPPPQIPQAATFANGSPRKTLVVLGTGWGSVSLLKHLDTSLYNVIVVSPRNYFLFTPLLPSTPVGTVELKSIVEPVRSITRSSPGEVHYYEAEAKDIDPVAKTVRIKSATKDHDYELDLNYDYLVVGVGAQPTTFGIPGVFENASFLKEIPDAQDIRTKIMNNIEKAATLSANDPERKRLLSFVVVGGGPTGVEFAAELQDYVDQDLSKWIPEISKEIKVTLVEALPNILNMFDKSLWQYAQDLFAMEKIDVKLKTMVKNVNSTTITAQCGDATEDIPYGLLVWATGNAPREVSKNLMAKLEQQNSRRGLLINDKMQLLGAEDSIWAIGDCTFFPGLFPTAQVAHQEAEYLTETLKQQYKIDQLKWEISKTTNATETSKLHSKLDRIVKQQKPFKYNHQGTLAYIGSEQAIADVAVGESKYQMAGSFTFLFWKSAYLGMCLSFRNRILVAMDWAKVYFLGRDSSV

SEQ ID NO: 147519 - DNA, 1539 bp, Ustilago maydis 521
  CDS (1)..(1539)
atgtggacgatgactcgttcacgatggatgcatacgcagagcgcgcaggcagatgcaagtgcacgcaaacagcgtctggtcgtgctaggcacaggctggggcggatatgcgtttctcaagtcgctctcgtatgcaagcctacgccgattcgacgtcaaggtgatctcgcccaccacgtcgttttcgttcacaccgctgcttgcacaagcaagctgtgcaacgctcgactttcgaagtgtcgtcgaaccgatccactcgaaccgttggatggaataccaccatgcgtggtgcgatgcggtcgacctgaaagccaaccgcatcgaactcacctcggcgttcaaccctcagttccgactagcggatccactgctcgacgcaaaccctgcttccaaggacgagtccaacaaggacgagtcgaaacgcgtcacgtactcgctccagtacgactacctcgtgattggcgtcggctcgtacaacgctacgtttggcaccaagggcgtcaaagaaaacgcactcttcttgaaggacgtcagcgatgcgcgagcgattcgatggcgcattctgggcctcttcgaaagcgccaatgccaagcaacgccagtacacacaccagggtcaagtcgcgatctcggctgaacaagagcatcagctgcgacggctgctcagctttgtggttgtaggtggtggaccgaccggttccgagttcgccgcggaactgcacgacttgatcaacgacgagctctcgcgcttgtatccaaacgtgtgcgcatacgctacagtccgactgctggatgctggaagcacgatcctctcgtcgttcgatgcgcgtctcgccgagtatgcgatcaacaagtttgcacgcgacggcatccaggtgcaactcaacgccaagatccgacgtgtcgaacgcgatgccgtggtgctcgactctgccggcggccaccaagagcgcatcgctgctggaatggtgatctggagcacaggcatcaccacgtctcctctcatccaagccttccgcggtgttgccaaacaagaccgaactggcaaactgctgaccaaccatacgctcaacctagtcatccatccctcgcacccgaatcccggagccaacgtcctcaatcctgcagcggacgattcgcacatgggctcaccatcccagccgcccacaccgctcgacaacgtgtttgccctcggagactgctctgcgtcccccgacgccctgcccgctaccgcgcaggtcgcctcacaacaaggcacgtatctcgcgcacctcttcaactcacaccttgcctcggcctcgccctcatcccgatcctcgcagccgaaaccgtttgtgttccacgacaaaggcagtatggcgtcgatcggttcgcgaagcgcgctgatcgactctcctgtcaagaaggactcgggcacgcttgcttggctcctctggagatccgcctataccatcatggcgatgagctggagaaaccgcttcctggtccctgcgaattgggcaagcaacctcctcttcggcagagacgtaggccgcttctaa

SEQ ID NO: 147520 - protein, 512 aa, Ustilago maydis 521
MWTMTRSRWMHTQSAQADASARKQRLVVLGTGWGGYAFLKSLSYASLRRFDVKVISPTTSFSFTPLLAQASCATLDFRSVVEPIHSNRWMEYHHAWCDAVDLKANRIELTSAFNPQFRLADPLLDANPASKDESNKDESKRVTYSLQYDYLVIGVGSYNATFGTKGVKENALFLKDVSDARAIRWRILGLFESANAKQRQYTHQGQVAISAEQEHQLRRLLSFVVVGGGPTGSEFAAELHDLINDELSRLYPNVCAYATVRLLDAGSTILSSFDARLAEYAINKFARDGIQVQLNAKIRRVERDAVVLDSAGGHQERIAAGMVIWSTGITTSPLIQAFRGVAKQDRTGKLLTNHTLNLVIHPSHPNPGANVLNPAADDSHMGSPSQPPTPLDNVFALGDCSASPDALPATAQVASQQGTYLAHLFNSHLASASPSSRSSQPKPFVFHDKGSMASIGSRSALIDSPVKKDSGTLAWLLWRSAYTIMAMSWRNRFLVPANWASNLLFGRDVGRF

SEQ ID NO: 147521 - DNA, 1194 bp, Prochlorococcus marinus str. AS9601
  CDS (1)..(1194): transl_table=11
atgaaatcaatacaaaaaccaatagtaatagttggagcaggttttgcaggtatgacatttgctttgaatttaaagaaacttaatccttctttacctattcttgtagttgattctgaaactaactttatatttaaacctttaatgtacgaagttttaagtaaagagataagcagttgggaagccaacccaaaatttgcaaatattttttctgatgcgggtataacttttttaagaaattgtttaaccaaaattgacttcaaagaaaatattcttgaatttagtgatgaattaaaattaagttatcaatatctcgttatctgtacaggatctattccaaatagtttttttataaaaggtgtagatgaaaattgttatttttttaatgatgttaacgatttaaataaattaaattattttttaaaaaaatcacaaaatactgccttgcataaaaagttatttatagttggaggtggtccctctggtatcgagttggcatgcaaaattaaagatatatttacagaccaatttgaaattaatgtaatagaaaaatcaaacgaaatcctcaataaaaacaaaatttttaatagagaacaagcagagaaggcattagaaaaaagaaaaatcaatgttcttttgaattccacagttaaagaggtctcagaaactaaaattactatttctagtgaggttggaataacttccttggataaagatattgttatttggacagcaggtgttaaacctaatttgtcttacttagaaactgatcaaataacaaaaaaatttggacgaattttagttaataataacttgcaaatagaaaaccataaaaactgttttgctattggtgatatttcagttattgaaggaatggaggatttacccataactgctcaggtcgctatgcaggaaggaaatcatcttgctaataatttagaacttttagttcaaggaaaagatcctttaccctttgaatttcaagacaacggtgaaatgattagtttaggaataggcgaagcttcaatttctgggcttggggttactttatctgggaaattggcttttgaggcaagaagacttatatatgcttccaggttgcctgatattacagaaagcttaaaatctgcatcttcatggatattccaaaaaaaatctatttttaaaaagtttcttaaaaaagattattcgaattaa

SEQ ID NO: 147522 - protein, 397 aa, Prochlorococcus marinus str. AS9601
MKSIQKPIVIVGAGFAGMTFALNLKKLNPSLPILVVDSETNFIFKPLMYEVLSKEISSWEANPKFANIFSDAGITFLRNCLTKIDFKENILEFSDELKLSYQYLVICTGSIPNSFFIKGVDENCYFFNDVNDLNKLNYFLKKSQNTALHKKLFIVGGGPSGIELACKIKDIFTDQFEINVIEKSNEILNKNKIFNREQAEKALEKRKINVLLNSTVKEVSETKITISSEVGITSLDKDIVIWTAGVKPNLSYLETDQITKKFGRILVNNNLQIENHKNCFAIGDISVIEGMEDLPITAQVAMQEGNHLANNLELLVQGKDPLPFEFQDNGEMISLGIGEASISGLGVTLSGKLAFEARRLIYASRLPDITESLKSASSWIFQKKSIFKKFLKKDYSN

SEQ ID NO: 147523 - DNA, 1188 bp, Prochlorococcus marinus str. MIT 9515
  CDS (1)..(1188): transl_table=11
atgaaatcaataaaaaaaccaatagtaatagttggcgcaggctttggaggtatgacagttgcctcaaatttaaagcgacttaatccctctttgccaattctagtcgttgattctgaagctaggtttttatttaaacctctaatgtatgaggttataagcgaagaattgtcaatgtgggagactactcctgaattttcaaaaatattttcagacttaggtattacttttttgagaaattgtttaaccaaaattagatttgatgaaaaaattcttgaatttaatgatgacttacatataggttatgaatttttaattctttgtacaggctcagtatctagtaatttctcggtgaaaggtgttgatgaaaactgttatttttttaataacttaaaggaccttacaaagttaaagtcttttttgaaacaatttcaaaataacaaaataaagaagaacttatttgtaattggagcgggtccttcaggagtagagattgcttgtaaaattcatgatacgtataaagataaatttgatatttctattgttgaaagatctaatgaaattttaggtcaaaataagatttttaatcgtgaagaggctgaaaaagctttagagagaagaaaaataaatattctgttaaattcaactgttcaagagatttcagaaaaaaaaattagtattttgaatgattctgagattaaaaagttagaacaagatgttgtaatttggactgctggtattaaacctaacctgccttatattgacgaacaagtaaaacaaataaagggaagaattttagtaaataacaaatttcagatagaaaattatttgaattcttttgctattggagatatttcaatcattcaaggcatggaggaattgcctttgacagctcaagttgcaatgcaacaaggagaccatctcgctaaaaatatcgaacgaatctttctagaacaagatcttttgccttttgattttcaagataatggtgaaatgattagtttaggaatgggtgaagcctctatctccgctttgggtgtaactttatccgggaagttagcattcgaggcaagaaggttgatatacgcttcaaaaatgcctgacattagcagaagtttaaaatctaccgcttcttggttatttcaaaaaaaatctattatcaataaatttgttaacaaaagaccaaaataa

SEQ ID NO: 147524 - protein, 395 aa, Prochlorococcus marinus str. MIT 9515
MKSIKKPIVIVGAGFGGMTVASNLKRLNPSLPILVVDSEARFLFKPLMYEVISEELSMWETTPEFSKIFSDLGITFLRNCLTKIRFDEKILEFNDDLHIGYEFLILCTGSVSSNFSVKGVDENCYFFNNLKDLTKLKSFLKQFQNNKIKKNLFVIGAGPSGVEIACKIHDTYKDKFDISIVERSNEILGQNKIFNREEAEKALERRKINILLNSTVQEISEKKISILNDSEIKKLEQDVVIWTAGIKPNLPYIDEQVKQIKGRILVNNKFQIENYLNSFAIGDISIIQGMEELPLTAQVAMQQGDHLAKNIERIFLEQDLLPFDFQDNGEMISLGMGEASISALGVTLSGKLAFEARRLIYASKMPDISRSLKSTASWLFQKKSIINKFVNKRPK

SEQ ID NO: 147525 - DNA, 1242 bp, Prochlorococcus marinus str. NATL1A
  CDS (1)..(1242): transl_table=11
ttgagttttgaatgccgaattagtcaaagtttgtttagggtctttgaaatcatcttagatccagtccctatggacttgaacaatttgaaatctgatccaattgttgttgttggtggtggcttcggaggactctccactgtccaagcattattagctcggtcgaatggaatgccaatcattttgattgatcaaagcccaagatttctttttaagccattgctttatgaattattaagtggtgagcttgaattatgggaggttgcacctaaatattctgctttagcttcagaattaggatttatttttttagaagagtgtgttgttgaagttgatggactagagagaaagttaattacttcatcggggactaaagttaaatactctcaacttgtcataagcactggggtaacaaccgatttttctcttctccgagatttgaaagaatatgcgtacggtttctctagtttgaatgatctcgtaagaattcaagagttaataatctcaatcaataattcttctaaccactccaatcctttgattatcgctggagcaggaccaactggtgttgagctcgcatgcaaattatctgatttagttaataatagagtagaaatatacttggttgataaaggaaataaaattctatctaaatccaaatcttttaatagggaaaaagcaatagatgcaatagctgagagaaatatcaagatttatttggaacattatattgaatcaataaatgaaaatactatagaactttctactgttgagaccgaaagaaataattctctaaaaattaattattctggcttgttgtggactgctggattaagcccttgtcggttaccatttatagatcatcttttagatgaaaataagaagattaaagtaaacaaatttttgcaaataaaagaatatcagaatattttttttgttggagatatcgtattttgtgaggacgttccttttccttcttcagctcaagtagcaatgcagcagggttctttaacagctcaaaatattatttctctaagaaaaggcaacaaacttaaatcatttcaattcgaagatcttggagaaatgttgagtctaggtattggaaatgcatcaataactggttatggagttactttggcaggatctcttgcttccaaaataaggcattttgcatatttaatgcgaatgccaggtttttctctatttttgaaatctgcaggatcacggttattaagtaaaaaataa

SEQ ID NO: 147526 - protein, 413 aa, Prochlorococcus marinus str. NATL1A
MSFECRISQSLFRVFEIILDPVPMDLNNLKSDPIVVVGGGFGGLSTVQALLARSNGMPIILIDQSPRFLFKPLLYELLSGELELWEVAPKYSALASELGFIFLEECVVEVDGLERKLITSSGTKVKYSQLVISTGVTTDFSLLRDLKEYAYGFSSLNDLVRIQELIISINNSSNHSNPLIIAGAGPTGVELACKLSDLVNNRVEIYLVDKGNKILSKSKSFNREKAIDAIAERNIKIYLEHYIESINENTIELSTVETERNNSLKINYSGLLWTAGLSPCRLPFIDHLLDENKKIKVNKFLQIKEYQNIFFVGDIVFCEDVPFPSSAQVAMQQGSLTAQNIISLRKGNKLKSFQFEDLGEMLSLGIGNASITGYGVTLAGSLASKIRHFAYLMRMPGFSLFLKSAGSRLLSKK

SEQ ID NO: 147527 - DNA, 1170 bp, Prochlorococcus marinus str. MIT 9303
  CDS (1)..(1170): transl_table=11
atgatccccaacccgtcaaacgccaatgccgtggtggttgtgggaggcggatttgcagggctaacgaccgcgctcgctctcagcaactgccaacctcgcccccccatcgtgctgattgaaccgcgccagcggttcgtctttctccccttgctttacgaactcttgagtggagagcttcaggcttgggaagtcgcacctccttatcactctctactcagtcaacgcggtattgcccttctcgaagaccgggttgaaagcatcgacaccaaagcaaaaacagtcaccaccagctcagggctcaagctcaactacgcacaactggtaatcagcactggctcagctccaacagatttcgacattccaggggtccgtaaacacgccctgatgtttcaccgcctaaacgacgttgaagtgctgcgacaacgaattaaagaacttcaattacgtagaaaccctcgtcaggaccttgtgattgttggagcgggaccaactggcgtagaactggcctgcaagctggcagatctccttgacggggctgctgaactccacctcattgagcttggcgaacgggttctgcccagtgcgaaagccttcaaccaagaacaagccgagcgagcactcagcaaacgtggtgttcacgttcatttgctcacgcaagttcgatcaatctcgacagaccaggttgaactcctaagcaaacacaaggaacctgccatcagttcagcaataacgcacagtggtcttgtttggacagccggcacaagaccagtaataccagcactcaaccccgactttgtccttaccgaagcaagactgcctatcgattcgtgcctacaagtgatcggactcagtgatgtgcttggccttggcgatgccacttacaacaaagaccactcctggccatccacagcccaggtcgcacttcaacaaggggagatcgcggctcgaaacgtgatggcactacgagcaagcagtcctctccagccttttgaatttaaggattttggcgaaatgctcagcctgggagtaggggaagcctccctcaccggcatgggtttcacactcgcaggtcctctggctttccaaatacgccggggtgcctatctaacaaaactacctggattgtctctaggcctgcgctcaggcggagcctggctgctcggacattga

SEQ ID NO: 147528 - protein, 389 aa, Prochlorococcus marinus str. MIT 9303
MIPNPSNANAVVVVGGGFAGLTTALALSNCQPRPPIVLIEPRQRFVFLPLLYELLSGELQAWEVAPPYHSLLSQRGIALLEDRVESIDTKAKTVTTSSGLKLNYAQLVISTGSAPTDFDIPGVRKHALMFHRLNDVEVLRQRIKELQLRRNPRQDLVIVGAGPTGVELACKLADLLDGAAELHLIELGERVLPSAKAFNQEQAERALSKRGVHVHLLTQVRSISTDQVELLSKHKEPAISSAITHSGLVWTAGTRPVIPALNPDFVLTEARLPIDSCLQVIGLSDVLGLGDATYNKDHSWPSTAQVALQQGEIAARNVMALRASSPLQPFEFKDFGEMLSLGVGEASLTGMGFTLAGPLAFQIRRGAYLTKLPGLSLGLRSGGAWLLGH

SEQ ID NO: 147529 - DNA, 1305 bp, Erwinia carotovora subsp. atroseptica SCRI1043
  CDS (1)..(1305): transl_table=11
ttgacatcaccaaccaaaaaaattgtcattgtcggcgggggagctggcggacttgaactcgcaacgagtttgggccacacgttaggacgcaagaaaaaagcggacatcacgctggtggatcgtaaccatagccacctgtggaaaccattgcttcatgaagtggcgactggctcgctggatgacgatatggatgcgctgagctatctggcgcatgcccgcaatcacgctttccagttccaactggggatgctgacgaatatcgatcgtgagcagcagcagattcaactggccgaagtgtgtgatgagcaaggcggtgtgctggttgctgcgcgccgcatcccgtatgacattctggttgtggcattaggcagtgcctcaaatgacttcggtacgccgggcgtgaaagatcactgcattttcctggataacccgaaacaagcccgtcgcttccataatgaaatgctgaatttgttcctgaaattcaccgcaaatcaggacgaaaaagagcgagtcaatattgcgattgtcggcggtggggcgactggcgtcgagctgtctgcggaattgcataacgcggtgaaacaactgcacagctatggctttgacggactggataaccaaacactgaatgtgacgctggttgaagcgggcgaacgtattttgcccgcgctgccgccgcgcatttcagcggcagcacatcaggaactgaataatattggcgtccgcgtgctgacgaaaacgatggtaaccagcgcggaaagcggcggtctgaatacgaaggacggcgaatttatcgaagccgatctgatggtttgggcggctggaatcaaagcgccggatgcaatgaaagatattgcgggtctggaaacaaaccggatcaatcagctcgttgttgaacccacgttgcagacgacacgcgatcctaacattttcgccatcggcgactgtgcatcctgcccgcaggaaggcggcggtttcgtgccaccgcgcgcgcaggcggctcaccagatggcatcacgttgccatagcaacatcatcgcgttgctgaacggacaggcgctaaaatcttacgtctacaaagatcatggctcgctggtctcactgtctaaattcagtacggtgggtagcctgatggggaacctgatgcggggttctgtgatggtagaagggcgaattgctcgttttgtttacatctccctctatcgcatgcaccaggttgccctgcacggctatgtgaaaacaggtttgatgatgctggtcggtggcatcaaccgggtaatacgcccgcgtctcaaattgcattaa

SEQ ID NO: 147530 - protein, 434 aa, Erwinia carotovora subsp. atroseptica SCRI1043
MTSPTKKIVIVGGGAGGLELATSLGHTLGRKKKADITLVDRNHSHLWKPLLHEVATGSLDDDMDALSYLAHARNHAFQFQLGMLTNIDREQQQIQLAEVCDEQGGVLVAARRIPYDILVVALGSASNDFGTPGVKDHCIFLDNPKQARRFHNEMLNLFLKFTANQDEKERVNIAIVGGGATGVELSAELHNAVKQLHSYGFDGLDNQTLNVTLVEAGERILPALPPRISAAAHQELNNIGVRVLTKTMVTSAESGGLNTKDGEFIEADLMVWAAGIKAPDAMKDIAGLETNRINQLVVEPTLQTTRDPNIFAIGDCASCPQEGGGFVPPRAQAAHQMASRCHSNIIALLNGQALKSYVYKDHGSLVSLSKFSTVGSLMGNLMRGSVMVEGRIARFVYISLYRMHQVALHGYVKTGLMMLVGGINRVIRPRLKLH

SEQ ID NO: 147531 - DNA, 1305 bp, Yersinia pseudotuberculosis IP 32953
  CDS (1)..(1305): transl_table=11
ttgacaacgctgaagaaaaaaatcgttattattggtggtggtgcagggggtcttgagttggcaaccagtctcggccataaactcgggcgcagtaaaaaagcagatatagtcctggttgaccgtaaccatagccatctgtggaaaccactgttacatgaagttgctacaggctctttggatgatggtgtcgatgcgttgagctatttggcgcatgctcgtaatcactatttcaatttccaactgggttcattaaccggtattaaccgtgaaaacaaaacaatcagcctggctgagatttgtgatgaacacggtgatgtactggtgactcaacgtgagttgtcctatgacattctggtgatggccttgggcagtgtttctaacgatttcgggacaccgggcgtgaaggataactgcatcttcttggataaccctcatcaggcgcatcgtttccataatgaaatgctcaacctattcctgaagtattcggctcaaccgggtgaaaaaggcaaagtagacatcgctatcgttggcggcggggctaccggtgttgagctgtctgcagagttacacaatgcggtgaagcagttgcacagttatggttttgaggggttagataaccacgcgctgaatgtaactttggttgaggcgggtgaacgtattttaccggcgttgccaccacgtatctcttcagcagcccatcaagaactgactaaattgggtgtgcgcgtattgaccaaaaccatggtgaccagtgctgatgaaaatggcctgaataccaaagagggtgaatttattcatgctgatttgatggtatgggcggcgggtatcaaagcgccagactttatgaaagacattgccgggctggaaactaaccgtattaatcagttggtggttgagccaacgctgcaaacgacccgagatccaaatatcttcgctattggcgattgtgcttcttgcccgcaaccgagcggtggttttgttcctcctcgcgcgcagtctgcacatcagatggccagccgctgctacagcaatattctggccttactcaatgggcagagcctgaaaccatatatctacaaagatcatggttcactggtttcgctatctaagttcagcaccgtcggtagcctgatggggaacctgatgcgtggttcaatgatggtcgaagggcgtgtagcacgcgtcgtttatatctcgttgtatcgtatgcatcaggtcgcattacatggttataccaagacaggtctgatgatgctggtgggcgggattaatcgggtgattaggccacggttgaagcttcactaa

SEQ ID NO: 147532 - protein, 434 aa, Yersinia pseudotuberculosis IP 32953
MTTLKKKIVIIGGGAGGLELATSLGHKLGRSKKADIVLVDRNHSHLWKPLLHEVATGSLDDGVDALSYLAHARNHYFNFQLGSLTGINRENKTISLAEICDEHGDVLVTQRELSYDILVMALGSVSNDFGTPGVKDNCIFLDNPHQAHRFHNEMLNLFLKYSAQPGEKGKVDIAIVGGGATGVELSAELHNAVKQLHSYGFEGLDNHALNVTLVEAGERILPALPPRISSAAHQELTKLGVRVLTKTMVTSADENGLNTKEGEFIHADLMVWAAGIKAPDFMKDIAGLETNRINQLVVEPTLQTTRDPNIFAIGDCASCPQPSGGFVPPRAQSAHQMASRCYSNILALLNGQSLKPYIYKDHGSLVSLSKFSTVGSLMGNLMRGSMMVEGRVARVVYISLYRMHQVALHGYTKTGLMMLVGGINRVIRPRLKLH

SEQ ID NO: 147533 - DNA, 1335 bp, Synechococcus elongatus PCC 6301
  CDS (1)..(1335): transl_table=11
atgatttcgactgtcagcaaaccgcgtgtcgtcgtcattggcggcggttttggagggctgtataccgccctcaatcttggcaagacctctgtcgagctcaccctgattgataaacgaaactttcacctgtttcaacccttgctgtaccaagtggctacaggggaaatttcgccgggcgatatccctgcgccgctccgggcgatcgtaggtcgtaaccccaatacccgcgtcattctcggtgaagtgactgacatcgatccgcaggcccattgggtgcgcgttggcgatgaaattgtcgaatacgactacttggttgtggcgacgggtgccagccaccactactttggcaacgaccaatggcagccctttgctccggggctgaaaacggttgaagatgcgctggaaatgcgccgccggatttactttgccctcgagcaagctgagcaggagagcgatccagagcgtcagcaagcttggttgaccttcacgatcgtgggagcaggccccaccggcgttgaactagctggcgcgatcgcggaattaacccgcggtgaaatgcgcaaagaattccgcaatgtcgacaccaccaaagccaaggtcattttgattgaaggcatggatcgggtcttaccacccttcccgccagagctgtcagcccaagcgcaagtacagctagaaggcttgggcgtgactgtgcaaaccaaagccatggtcaccgacattcaagaagatcgcgtcgtctttaagactggcgacgacttgcatgagatccctagccgcacgaccctttgggctgcgggcgtcaaagcgtcacccttgggcaagctcctagcgcaacgaaccggtgcagaactcgatcgcattggtcgcgtcatcgtccagcctgatttgcagctgccgactgaccccaacgtctacgtcttgggtgacctggcccactgccctgatcaagcaggcaacccactgcccggtgtggcagcagtcgcgatgcagcagggggcttatctcggtaaggcactcaagcggcggctgaagagtcaacccgttgatcccttccgctaccaagacttcggcagcatggcagtgattggccgtaacgctgcggttgcccgcttagcaggtattcgcctcagtggtttccccgcatggctggtctgggcttttatccacgtctggtatttgattgaattcgacagcaaattgctggtgatggtgcagtgggcttggacctacttcaaccagaaacgcggcactcgcctaatcgtcaatcatcaccgcatgtcggccccggcagcgatgactaatccggccgaaaaagagttggcgaagtcctag

SEQ ID NO: 147534 - protein, 444 aa, Synechococcus elongatus PCC 6301
MISTVSKPRVVVIGGGFGGLYTALNLGKTSVELTLIDKRNFHLFQPLLYQVATGEISPGDIPAPLRAIVGRNPNTRVILGEVTDIDPQAHWVRVGDEIVEYDYLVVATGASHHYFGNDQWQPFAPGLKTVEDALEMRRRIYFALEQAEQESDPERQQAWLTFTIVGAGPTGVELAGAIAELTRGEMRKEFRNVDTTKAKVILIEGMDRVLPPFPPELSAQAQVQLEGLGVTVQTKAMVTDIQEDRVVFKTGDDLHEIPSRTTLWAAGVKASPLGKLLAQRTGAELDRIGRVIVQPDLQLPTDPNVYVLGDLAHCPDQAGNPLPGVAAVAMQQGAYLGKALKRRLKSQPVDPFRYQDFGSMAVIGRNAAVARLAGIRLSGFPAWLVWAFIHVWYLIEFDSKLLVMVQWAWTYFNQKRGTRLIVNHHRMSAPAAMTNPAEKELAKS

SEQ ID NO: 147535 - DNA, 1299 bp, Pseudomonas syringae pv. phaseolicola 1448A
  CDS (1)..(1299): transl_table=11
atgacgcatcgtattgttatcgttggcggcggcgctggcggtctggagctggcgaccagcctgggtaaaaccctgggcaagaaaggcacggccagtgtcacgctggtcgacgccaacctgacgcatatctggaaaccgctgttgcacgaggtcgcggccggttcgctcaactcgtatgaggacgagctgaactacgtggcgcaggccaagtggaacaactttcagtttcagctcgggcgcatgaccgggctggatcgcgccagtcgacagattcacctggccgagacgctggatgaaaacggtgccgaactggttccggcacgcagcctgggttacgactcgctggtcatcgccgtgggcagcaccaccaacgacttcggcaccacgggcgcggcggaacattgcctgtttctcgacagccgcaaacaggccgagcgtttccaccagcaactgctcaaccactacctccgcgcccacgccggtcaggctgacagtgctcaggaaatcaccgtggccatcgttggcgcaggtgcgactggtgttgaactggcggcagaactgcacaacgcggcgcacgagctggcggcttacgggctgggccagatcaagccggaaaacctgcgcattaccgtgatcgaagccgggcctcgggtgctgcctgcattgccagagcgtatcggcgcgcctgtgcacaagacactggaaaaacttggcgtgacggtgctgaccaatgccgcggtgagcgaagtgaccgccgacggcttgatcacggccagcgggcaggtcattccggccagtttgaaagtctgggcggcaggtattcgtgccccggcgtttctgcatgagctggatgggctggagagcaaccggatcaatcagttgcaagtgctgccgacgctgcaaaccacccgtgacgagaatattttcgccttcggtgactgcgccgcctgcccgcaaaaaggcaccgaccgcaacgtcccgccacgcgctcaggctgctcatcagcaggcgtcgttgctggcaaaatcgctgcgcctgcggatcgaaggcaagaccttgccggagtacacctacaaggactacggatcgctgatctcgctgtcgagcttctcggcagtcggcaatctgatgggtaacctgatgggcagcgtaatgcttgaaggctggctggcgcggatgttctatgtgtcgctgtatcgcatgcaccagatggcgctgtacggcaccttccgcaccctgatgctgatgctgggcagcaagatcggcaaaggcaccgagccacggatgaagctgcactaa

SEQ ID NO: 147536 - protein, 432 aa, Pseudomonas syringae pv. phaseolicola 1448A
MTHRIVIVGGGAGGLELATSLGKTLGKKGTASVTLVDANLTHIWKPLLHEVAAGSLNSYEDELNYVAQAKWNNFQFQLGRMTGLDRASRQIHLAETLDENGAELVPARSLGYDSLVIAVGSTTNDFGTTGAAEHCLFLDSRKQAERFHQQLLNHYLRAHAGQADSAQEITVAIVGAGATGVELAAELHNAAHELAAYGLGQIKPENLRITVIEAGPRVLPALPERIGAPVHKTLEKLGVTVLTNAAVSEVTADGLITASGQVIPASLKVWAAGIRAPAFLHELDGLESNRINQLQVLPTLQTTRDENIFAFGDCAACPQKGTDRNVPPRAQAAHQQASLLAKSLRLRIEGKTLPEYTYKDYGSLISLSSFSAVGNLMGNLMGSVMLEGWLARMFYVSLYRMHQMALYGTFRTLMLMLGSKIGKGTEPRMKLH

SEQ ID NO: 147537 - DNA, 1377 bp, Thermobifida fusca YX
  CDS (1)..(1377): transl_table=11
atgaccgaaagcaggaactaccggctggtgcccggcggcggtgacgcatcggagatcccgcacgtgctcatcgttggcggtgggtacctgggcatgtacaccgcgaagcggctggagaagaagctgggaccgggagaagcccgcatcaccgtggtggaccccaactcctacatgacctaccagccgttcctgcctgagacggccgcgggcagcatctccccgcgcaacgtcgtcgtcccgctgcgcaaagtcctgcgccgcacccgcgtcctcaacggccgggtcgtgcgcatcgaacacgcccagcgccgggtcgaatgcgtgaccaacgagggggagcgccgcgagctcacctacgactacctggtcatggcggctggagcagtctcccgcaccctccccattcctgggctagcggagcacggcattggcatcaaaaccgtccaggaagccgcctatctgcgcaaccacgtgctggagcagctcaacatcgctgactccaccgacgacccgcgagtgcggcgcaaggcgctgaacttcgtgttcgtcggcggcgggttcgcgggggccgaagccatcgcggagctggaagacctcgcccgcgacgccacccggatctacccgtcgatcagcatcgacgacctgcacttctacctcattgaggccgccgaccgcatcctgcccgaggtcggccccgaggtgggcgccaaggcactccagcagctccgcaaccgcggcatcgacgtgcgcctgtccaccttcctggagtcagcggtcgaccagcgcatcaagctcagcgacggcaccgagttcgaagccggcaccctggtgtggaccgccggcgtcaagcccagcccggtcgtccaagcctccgacctgccgctgggccccaagggccacgtggacaccaccgaatacttgaccgtcaggggggtggagaacgccttcgcgggcggcgacaacgcccaagtcccggacggcaacggcggctattacccgcccaacgcgcagaacgcggtccgccaggccccggtcctggccgacaacatcatcgccaccctgcgcggcaaggaactcaagccctaccggcacaagaacctgggggcggtcgccggactcggcatgtacaagggcgcggcccaagtgttcggcgcggtcaagctgaccgggctgcccgcgtggctggcgcaccgcagctaccacctgctggcggtgccgacgttcaaccgcaagatgcgggtcctcgccgactggacgctgggcttcttcctgcgccgcgacttcgcgtcgatcccggagatgagccagccccgtcaggcgttcaccgaagcagcccgcccgcaagtcgacggcagcaacctgcgccgcgtctcctga

SEQ ID NO: 147538 - protein, 458 aa, Thermobifida fusca YX
MTESRNYRLVPGGGDASEIPHVLIVGGGYLGMYTAKRLEKKLGPGEARITVVDPNSYMTYQPFLPETAAGSISPRNVVVPLRKVLRRTRVLNGRVVRIEHAQRRVECVTNEGERRELTYDYLVMAAGAVSRTLPIPGLAEHGIGIKTVQEAAYLRNHVLEQLNIADSTDDPRVRRKALNFVFVGGGFAGAEAIAELEDLARDATRIYPSISIDDLHFYLIEAADRILPEVGPEVGAKALQQLRNRGIDVRLSTFLESAVDQRIKLSDGTEFEAGTLVWTAGVKPSPVVQASDLPLGPKGHVDTTEYLTVRGVENAFAGGDNAQVPDGNGGYYPPNAQNAVRQAPVLADNIIATLRGKELKPYRHKNLGAVAGLGMYKGAAQVFGAVKLTGLPAWLAHRSYHLLAVPTFNRKMRVLADWTLGFFLRRDFASIPEMSQPRQAFTEAARPQVDGSNLRRVS

SEQ ID NO: 147539 - DNA, 1356 bp, Thermobifida fusca YX
  CDS (1)..(1356): transl_table=11
atggcacggccgcgcatcgtcgtggtcggcgcgggttttgcgggtctgaccgcgctgcgccgactcgaacagaggattccggaaggcaaggccgagatcgtactcgtcgcacccaacgactacatgctctaccagccgctgctgccccaagtggcgtccggcctgctgaccccgcagtcgatcgctgtctctctgcaccggcaactgcaccgcacccacatcattccggggatcgccgtcggcttggacacggaccggaacacggtggtggtccgcaagatctccggcgagtactcctatgagcgctacgaccggctgattctggcgcccggcagcgtgacccggacgttcaacatccccgggctgatcgagcacgcccgcggcaacaagaacctggccgaggcggtgtacttgcgcgaccacgtgctggcccagctggagttggcgaacgccagcgacgacccggcggagcgcgacgagcggtgcacgttcatcgtggtgggcggcggctacacaggggtggagaccgcggcgtccttggagctgctgtgcgaggcagcgtgcaagcagtatccgaagctgcgcccgcacatccagtggcacgtagtggacatcgccccccgcttgatgccggagctgggcgagcatctggggcagaagacgatggagctgctgcgccagcgcgggatcgaagtgtcgctgggggtgtcggtccgcgaggtgaccgaggacaaggtgacgttgaccgacgaccgggtgctgccgtgccgcacgttgatctggacggcgggcactgcgccgagcccgctgatcgcggcgaccgggctgcccacggaacgcgggaagctctcggtgggcgcggacttgtcggtgcccgggcatccggagattttcgggatcggtgattccgccgccgtccccgatttgagcaagggcgaggacggggcgctgtgcccgcctaccgcccagcacgcgtccacccaggggccggtggcggccgacaacgtgattgcttcgctgctgggccggtcgacgaagcactactactaccgggaccgcggcctgctcgtggatttgagcggccgggacgcggtggcccgccccttcggggtggagttcaacgggaccgcggccttggcgttgacccgggcctaccacttgtattcgctgccgtcgggaccggcccggatgcgggtggccgccaactggctgatccaggcgctgctgggctgcgacgtgtcccgcctggggttcctcaaccgcagcgtggagacgctggtggacgtggaggagtactcccgctacctcaaacccgagcaggccaaggagcgggtggggctggccgtgggcggatag

SEQ ID NO: 147540 - protein, 451 aa, Thermobifida fusca YX
MARPRIVVVGAGFAGLTALRRLEQRIPEGKAEIVLVAPNDYMLYQPLLPQVASGLLTPQSIAVSLHRQLHRTHIIPGIAVGLDTDRNTVVVRKISGEYSYERYDRLILAPGSVTRTFNIPGLIEHARGNKNLAEAVYLRDHVLAQLELANASDDPAERDERCTFIVVGGGYTGVETAASLELLCEAACKQYPKLRPHIQWHVVDIAPRLMPELGEHLGQKTMELLRQRGIEVSLGVSVREVTEDKVTLTDDRVLPCRTLIWTAGTAPSPLIAATGLPTERGKLSVGADLSVPGHPEIFGIGDSAAVPDLSKGEDGALCPPTAQHASTQGPVAADNVIASLLGRSTKHYYYRDRGLLVDLSGRDAVARPFGVEFNGTAALALTRAYHLYSLPSGPARMRVAANWLIQALLGCDVSRLGFLNRSVETLVDVEEYSRYLKPEQAKERVGLAVGG

SEQ ID NO: 147541 - DNA, 1173 bp, Prochlorococcus marinus str. NATL2A
  CDS (1)..(1173): transl_table=11
atggacttgaacaatttgaaatctgatccaattgttgttgttggtggtggcttcggaggactctccactgtccaagcattattagctcggtcgaatggaataccaatcattttgattgatcaaagcccaagatttctttttaagccattgctttatgaattattaagtggtgagcttcaattatgggaggttgcacctaaatattctgctttagcttcagaattaggatttatttttttagaagagtgtgttgttgaagttgatggactagagagaaagttaattacttcatcggggactgaagttacatactctcaacttgtcataagcactggagtaacaactgatttttctcttctccgaaatttgaaagaatatgcgtacggtttctctagtttgaatgatctcgtaagaattcaagagttaataatctcaatcaataattcttctaaccactccgatcctttgattatcgctggagcaggaccaactggtgttgagctcgcatgcaaattatctgatttagttaataacagagtagacatatatttggttgataaaggaaataaaattttatctaaatccaaatcttttaatagggaaaaagcaatagatgcaatagctgagagaaatatcaagatttatttggaacattatattcaatcaataaatgaaaatattatagaactttctactgttgagaccgaaagaaataattctctaaaaattaattattctggcttgttgtggactgctgggttaagcccttgtcggttacaatttatagatcatcttttagatgaaaataagaagattaaagtaaacaaatttttgcaaataaaagaatatcagaatattttttttgttggagatatcgtattttgtgaggacgatccttttccttcttcagctcaagtagcaatgcagcagggttttttaacagctcaaaatattatttctctaagaaaaggcaacaaacttaaatcatttcaatttgaagatcttggagaaatgttgagtctaggtattggaaatgcatcaataacgggttatggagttactttggcaggatctcttgctttcaaaataaggcattttgcatatttaatgcgaatgccaggtttttctctatctttgaaatctgcaggttctcggttattaagtaaaaaataa

SEQ ID NO: 147542 - protein, 390 aa, Prochlorococcus marinus str. NATL2A
MDLNNLKSDPIVVVGGGFGGLSTVQALLARSNGIPIILIDQSPRFLFKPLLYELLSGELQLWEVAPKYSALASELGFIFLEECVVEVDGLERKLITSSGTEVTYSQLVISTGVTTDFSLLRNLKEYAYGFSSLNDLVRIQELIISINNSSNHSDPLIIAGAGPTGVELACKLSDLVNNRVDIYLVDKGNKILSKSKSFNREKAIDAIAERNIKIYLEHYIQSINENIIELSTVETERNNSLKINYSGLLWTAGLSPCRLQFIDHLLDENKKIKVNKFLQIKEYQNIFFVGDIVFCEDDPFPSSAQVAMQQGFLTAQNIISLRKGNKLKSFQFEDLGEMLSLGIGNASITGYGVTLAGSLAFKIRHFAYLMRMPGFSLSLKSAGSRLLSKK

SEQ ID NO: 147543 - DNA, 1335 bp, Ralstonia eutropha JMP134
  CDS (1)..(1335): transl_table=11
atgaccacaggagcaaacggcagggcgcatcgcatcatcgtcgtagggggcggggcaggaggactggagctggtgacacggctgggcgacaagctcggcaagaagggcaccgcgcaagtggtgctcgtggaccgcttgcccacgcatatctggaaaccgctgctgcatgaagttgccgcgggcagcatggatcccaacacgcaccagctcgaatacgtggcgcaggcgcgctggcatcacttcgagttccagcagggtgaaatgaccggcatcgaccgcgagcgcaagacgatctcggttgcggcgtgcctcgaccccgacggtggcgagctgttgccggcgcgggagctgccttacgacacgcttgtgctggccatcgggtgcgtgacgcatttcttcggcgtgccgggtgcggcggagcatgcgattgcgctcgataccgtcgcacaggccgagcgcttccgccgtcgtctgatcgcggcctgcgtgcgcgcgcaaaacggacgcgggcgcgttggcgaggacggccggccgcgcgtggacgtggccatcatcggcgccggtgcgaccggcgtggaactgtcggcagagctgcgcaacaccgcgcatgtgctcaacgcctacggactgcacaagctcgatccgcgccgcgacgtgcgcattcacgtgatcgaggctggcccgcgcatcctgcctgcgctatcggagcgggtctcggccgaaaccgcaaagttgctgcgcaagctcgacgtcgatgtcttcaccagcgagcgcgtgaccgaggtcaacaccgaagccgtgctgactgcgagtggcaagcgcatcgatgccgacttgacggtgtgggcggcgggcattaccgcgccgccggtgctggcgacgcttgggttgccggtcagccggcaaggccagatcctcgtgcggcctacactgcagagcgaaggcgaccccgacatcttcgcgttcggcgattgcgcgagctgcccgtggcccgagaagcagactgcggtgccgccgcgcgcgcaggccgcgcatcagcaggcgacgttcctgttcgacgcactgcgcgcacgccttgccggcaagccgttgccggaattcgcgttcaaggacttcggctcgttggtatcgctcgggcatttcagcgcggtgggtagcctgatgggcgggctcatcggcgggtcgatgttcatcgaagggctgatggcgcgcttcatgtacacctcgctctaccgcatgcatgtgctggcgcttcacggcgcggtcggcatggggctcgacacggtgacgcactggttgcgcagcaagaccagcccgcgcgtgaagctgcactga

SEQ ID NO: 147544 - protein, 444 aa, Ralstonia eutropha JMP134
MTTGANGRAHRIIVVGGGAGGLELVTRLGDKLGKKGTAQVVLVDRLPTHIWKPLLHEVAAGSMDPNTHQLEYVAQARWHHFEFQQGEMTGIDRERKTISVAACLDPDGGELLPARELPYDTLVLAIGCVTHFFGVPGAAEHAIALDTVAQAERFRRRLIAACVRAQNGRGRVGEDGRPRVDVAIIGAGATGVELSAELRNTAHVLNAYGLHKLDPRRDVRIHVIEAGPRILPALSERVSAETAKLLRKLDVDVFTSERVTEVNTEAVLTASGKRIDADLTVWAAGITAPPVLATLGLPVSRQGQILVRPTLQSEGDPDIFAFGDCASCPWPEKQTAVPPRAQAAHQQATFLFDALRARLAGKPLPEFAFKDFGSLVSLGHFSAVGSLMGGLIGGSMFIEGLMARFMYTSLYRMHVLALHGAVGMGLDTVTHWLRSKTSPRVKLH

SEQ ID NO: 147545 - DNA, 1230 bp, Anabaena variabilis ATCC 29413
  CDS (1)..(1230): transl_table=11
atgaccgaacagactaagagaattgtaattctgggtggaggctttggcggtctctatacagctttacgcttaagccaattaccttgggaaactcagcaaaaaccagaaattgtactggtagatcaaagcgatcgctttctattctcccccttattgtacgaattactcacaggagaactgcaatcatgggaaattgcacccccttttattgaacttctcgaaggtacaggtatacgtttttatcaagcagttgtttctggtattgatatcgaccaacaacgggtacatctgcaagatggaccagaaatcccttacgatcgcttagttttaacactgggtggcgaaacaccattagacttagttcctggtgccacatcctacgcctatcctttccgtactattgctgatacctatcgcttggaagaacgtctgcgagtattggaagagtcagatgcagaaaaaatccgtgtcgcaattgttggtgctggttatagtggtgttgagttagcttgtaagttagcagatagactaggggaaagaggacgcttccgtctggtggagatcagcgatcaaattttacgcacctccccagattttaaccgcgaggctgccaagaaagctttggatgcaaaaggtgtgtttattgatttagaaaccaaagttgagtcaataggacaaaatactatctccctagagtacaaaaatcaagtggataccattcccgtagatttggtaatttggactgtgggtacaagggtgacaaacgtagtgaaaagtctgcctttcaaacagaaccagcgtggtcaaatcaccaatacaccaactctccaagttcttgaccatccagacatttttgctctgggagacttagccgactgtattgacgctgaaggtcagcaagtacctgctaccgcacaagccgcttttcaacaagcagactacgccgcttggaatatttgggcttctctgactcaacgccccctattacctttccgctaccaacagttaggggagatgttagcactgggtacagataacgccacccttacaggtttaggagttaaattagatggttctttggcttatgttgcccgccgtctcgcctacttgtatagattaccaaccctagatcatcaactaaaagttggttttaactggcttgtacgtcctattatagaaacaatttactcagcagtggatgctgtgaatgaaaagggtactaagtattag

SEQ ID NO: 147546 - protein, 409 aa, Anabaena variabilis ATCC 29413
MTEQTKRIVILGGGFGGLYTALRLSQLPWETQQKPEIVLVDQSDRFLFSPLLYELLTGELQSWEIAPPFIELLEGTGIRFYQAVVSGIDIDQQRVHLQDGPEIPYDRLVLTLGGETPLDLVPGATSYAYPFRTIADTYRLEERLRVLEESDAEKIRVAIVGAGYSGVELACKLADRLGERGRFRLVEISDQILRTSPDFNREAAKKALDAKGVFIDLETKVESIGQNTISLEYKNQVDTIPVDLVIWTVGTRVTNVVKSLPFKQNQRGQITNTPTLQVLDHPDIFALGDLADCIDAEGQQVPATAQAAFQQADYAAWNIWASLTQRPLLPFRYQQLGEMLALGTDNATLTGLGVKLDGSLAYVARRLAYLYRLPTLDHQLKVGFNWLVRPIIETIYSAVDAVNEKGTKY

SEQ ID NO: 147547 - DNA, 1413 bp, Anabaena variabilis ATCC 29413
  CDS (1)..(1413): transl_table=11
atgcagcaagcatctcatcccacagtcatcctgggtgctggctttgctggactgtttacggctctgcacttaagccagcaaaattactcttatccgattattttaatagaacagcgcgatcgctttagtttcaaaccgttattgtatgaattactaagcggtgagctgcatagcaaacaggtctatcctcgttatcaagagctgttagctggtagcaaagttaagtttgtccaagacacggtgcaatcgattgatatacatcagcagagagttgatacagtctctggtcaagctttccactacagcaacttggttttagcactcggtagcaaaacaacttattttgctactcccggtgcggcagaatatgcaatgccctttacctctggggaacaggcgatcgcactccgccaacacttgcgtcgcaaattatatcaagccattcaaacaccagactcagaacatcgtcgtttactgttaactgttgccatcattggtgctggaccagctggtattgaattggcctgtaccttagccgatttactgcccatttggtacgacgagttgggcggcgatggtagtgaaattcatgttgtcctggtcaaccgcagtcgggaaattctcaaaggcgatgttaatagccatttacgctgcacagttgaacgcgccatgaaaaatcgcctcattcccgtggattttttatttgatgcggctgtcacaaagattacatctgaaggtgtagagtatcggcgacaggagcaaatacagatgttaccagcaggaaccatcgcttggactgctggtactgcacccaatcctttgctgatggaattacccgtttctcaaaatcgagggcggttactggtaaaacccacattgcaactgtctaattttcccgaaatcttcgcggcgggtgattgtgctatggatagcgatcatccccagccacccacagctcaagtagcttatcaacaaggaattgcgatcgctcaaaatctccaacgaatcagccaaaacaaaccaaccgttcccgtacaagtccaactgcgtggcactttgatgaaattaggactcaacgaaggcgttgctaacttattcaacaaagtgcaaatcaaaggacaagcaggccatttgattcgcgaaggaacatatttacaactactacccaactctactcataacctgaaagttacaaccgagtggctaacagatgaattatttcagcgtcaccgtgctgctacccccatgcagctgggacaaacaccgtggttatctggagtcgccaccaccgcagcagcactaatttttgccacccccctagtttggcgagtagcccaacctacccaatttcagcaaaacctcagttggacaggcgttcccactttactcaatcacctcacaccccgccgctaa

SEQ ID NO: 147548 - protein, 470 aa, Anabaena variabilis ATCC 29413
MQQASHPTVILGAGFAGLFTALHLSQQNYSYPIILIEQRDRFSFKPLLYELLSGELHSKQVYPRYQELLAGSKVKFVQDTVQSIDIHQQRVDTVSGQAFHYSNLVLALGSKTTYFATPGAAEYAMPFTSGEQAIALRQHLRRKLYQAIQTPDSEHRRLLLTVAIIGAGPAGIELACTLADLLPIWYDELGGDGSEIHVVLVNRSREILKGDVNSHLRCTVERAMKNRLIPVDFLFDAAVTKITSEGVEYRRQEQIQMLPAGTIAWTAGTAPNPLLMELPVSQNRGRLLVKPTLQLSNFPEIFAAGDCAMDSDHPQPPTAQVAYQQGIAIAQNLQRISQNKPTVPVQVQLRGTLMKLGLNEGVANLFNKVQIKGQAGHLIREGTYLQLLPNSTHNLKVTTEWLTDELFQRHRAATPMQLGQTPWLSGVATTAAALIFATPLVWRVAQPTQFQQNLSWTGVPTLLNHLTPRR

SEQ ID NO: 147549 - DNA, 1368 bp, Anabaena variabilis ATCC 29413
  CDS (1)..(1368): transl_table=11
atgaacagcccaatatatcaaactgtgattgtcggcggtggttttaccggactatttacagcgttacacctagcacatgaacattatcctcgttctgtgattttgattgatagaaatgagcgcttttgctttaagccgctactatatgaatatttcgataacgaaatggatagctttcaagtagtaccgcgtttttcggaattgcttaaaggtagtggtgtcatctttgtgcaagatactgtacagacgatagacttacatcaacgggaagttaaattagcgtcgggtaattcctacagttacagcaacttagtattagctttaggtagtgttactggctatcatcatattgaaggtgcgaatattaatgcttttcctttctggacgcaagcagatgcgatcgcacttgacagacatttacgtgactgtttacaaaaagccatccaaactgaagatataaaacaacgccgccaactattaacagtagttgtagttggtggtggcgcttctggtgtggaaatggcagcaactttagctgattttctcccacattggtatgctgctttgggtggtaactctgaggaaatccgtgtgattctactcaatcatggtcaaaaaattcttgatggcgatattaacgatcctttgcgtccaattgctgaaaaagaattacaaaaacgtagcgtagcaatagaaattattacagaagcagaagctactgctgtgcatccaaatgcagttgaatataaaagtcatggtgaaattaagacactgacaacacataccacaatctggactgctggtacttctatccatcccctaattcaagagttaccaattccccaagaacatcgagatcatcacagccgtcccctagtcacttccactatgcaatttctcgattttccagaagtttttgcaggtggtgattgtgcagcagttcaggatagtttcctaccgcctacagcccaagtcgcttatcaacaaggagcaaatatagctcataatttgaaagcacttgcactaggagaagaactcgaacctgctaaggtgaacattcgaggaactctattgaagttggggttaaatgatgctgctgctaacttattcaatgtttttgaagttgtaggcgaacccgcacacttaatccgtcaaggcacttatttaacactattaccaacaccaattcatgactttcaagccacaacggaatgggtggatgaagagatttttcatcaccacctagaccctcacgatgtaggtaaaaaagttgtacaagcagtggaggtggttggtgccggaattgttagtgttttagtagggaggaagctattaaaaatgttaggtgatgacgagaaagttaaataa

SEQ ID NO: 147550 - protein, 455 aa, Anabaena variabilis ATCC 29413
MNSPIYQTVIVGGGFTGLFTALHLAHEHYPRSVILIDRNERFCFKPLLYEYFDNEMDSFQVVPRFSELLKGSGVIFVQDTVQTIDLHQREVKLASGNSYSYSNLVLALGSVTGYHHIEGANINAFPFWTQADAIALDRHLRDCLQKAIQTEDIKQRRQLLTVVVVGGGASGVEMAATLADFLPHWYAALGGNSEEIRVILLNHGQKILDGDINDPLRPIAEKELQKRSVAIEIITEAEATAVHPNAVEYKSHGEIKTLTTHTTIWTAGTSIHPLIQELPIPQEHRDHHSRPLVTSTMQFLDFPEVFAGGDCAAVQDSFLPPTAQVAYQQGANIAHNLKALALGEELEPAKVNIRGTLLKLGLNDAAANLFNVFEVVGEPAHLIRQGTYLTLLPTPIHDFQATTEWVDEEIFHHHLDPHDVGKKVVQAVEVVGAGIVSVLVGRKLLKMLGDDEKVK

SEQ ID NO: 147551 - DNA, 1692 bp, Rhodobacter sphaeroides 2.4.1
  CDS (1)..(1692): transl_table=11
atggtggggcccgcaaccgggagaatcgtcgtgacgtcacggatcgtggtcttgggcgggggcttcggaggcatgtatgccgcccgcgccctcaagcgccggctcggcagggccgccgagatcgagctcgtcaatgccgagaactatttcgtcttccagcccctcctgcccgaggtgggcgcgggctccatcacgcccgcccatgcggtctcgccgctgcgcttcctgctgcgcgacgtgttcgtccgcaaggccaccgtcgacagcgtcgatttcgaccgccgcctcgtcacggtctttcagggcgtccagcgccgcccgaccgagatcggctacgatcatctggtgatcgcgctgggacaggcggccgatctgtcgaagatgccggggctcgaggaacatgcgctgaccatgcgcacgctcgaggatgcccgccgcctgcgcgcccatgtgatcggccagctcgaacatgcccagatcacccgcctgcccgaggtcaagcgcggcgccctgaccttctgcgtggtgggcggcggcttctcggggatcgagaccgcgggcgaaatgaaggatctgatcgaccgctcgctgaagttctatcccgacatcgatccgtccgaggtgcggatgatcgtcgtcgaattcgccgaccggatcctgggcgagatgtctcaagggctggccgattatgcgacgcgcacgctgcgggagcgcgggatcgaggtcaagctcggcaccggcgtggcgagcgccacggggacgcagctcgtgaccacgaccggcgaggtgatcgacacccgcaccatcgtggccaccatcggcaatgccccctcgcccgtcgtccgccgcatggggctgccgtccgagcgcgggcggatctcggtcgaccgcacactggcggtgaagggacggagcgacgtctgggcgctcggagactgtgcgctgatcgcgctgaaggacgcgccgcaggggccgcgcgactatgcgcctcccaccgcgcagttcgcggtgcgggaggccgagcagctggccgagaacatcgcctccaccctcacgggcggcacgccgcagccgttcgactatcgctcgaagggggcgcttgcctcgctgggcgcgcgcaagggcgtggcgcaggtcttcggcctggagctgaagggctttccggcctggctcctgtggcgcttctactacctggccttcctgcccggcctcaccacgcggatcttcgtgcttctgaactggttcatggacgggatcagcccgcgcagcgtcgtgcagctgcatacgcgcagcgtgccgccgacccgctatgtccgctaccgcgcgggcgacgtgatctacgaggcgggcaaccgctcggacgggttctatacggtggtcaccggcgcggtggagatgacgcggaccgatcccgaaaccggcctgccgcaggtccgcaccatcgggcccggcggccatttcggcgagcggctgatcctcggggcgacgcggcggcagaccagcgtgcgtgcggccgaggatacgaaggtgctggtgatggaccgcgaggagttcctgaagctcgccgacagcttccaggccttccgggactatttcggcccctacatggcccgtcatggaatgacatggccgccgctcggcgagacggacggtcaggcggcccccaagccggtgccgacggagaaggactga

SEQ ID NO: 147552 - protein, 563 aa, Rhodobacter sphaeroides 2.4.1
MVGPATGRIVVTSRIVVLGGGFGGMYAARALKRRLGRAAEIELVNAENYFVFQPLLPEVGAGSITPAHAVSPLRFLLRDVFVRKATVDSVDFDRRLVTVFQGVQRRPTEIGYDHLVIALGQAADLSKMPGLEEHALTMRTLEDARRLRAHVIGQLEHAQITRLPEVKRGALTFCVVGGGFSGIETAGEMKDLIDRSLKFYPDIDPSEVRMIVVEFADRILGEMSQGLADYATRTLRERGIEVKLGTGVASATGTQLVTTTGEVIDTRTIVATIGNAPSPVVRRMGLPSERGRISVDRTLAVKGRSDVWALGDCALIALKDAPQGPRDYAPPTAQFAVREAEQLAENIASTLTGGTPQPFDYRSKGALASLGARKGVAQVFGLELKGFPAWLLWRFYYLAFLPGLTTRIFVLLNWFMDGISPRSVVQLHTRSVPPTRYVRYRAGDVIYEAGNRSDGFYTVVTGAVEMTRTDPETGLPQVRTIGPGGHFGERLILGATRRQTSVRAAEDTKVLVMDREEFLKLADSFQAFRDYFGPYMARHGMTWPPLGETDGQAAPKPVPTEKD

SEQ ID NO: 147553 - DNA, 1359 bp, Burkholderia sp. 383
  CDS (1)..(1359): transl_table=11
atggacaacaccacgcccaaccttgcaacggaccgcgcaccgcgcctgccgcgcatcgtgatcgtcggcggcggcgccggcggcctgcacctcgccacgcgtctcggcgatacggtcggacgccgcgggcaagccgaagtcgtgctcgtcgatcgctatccgacgcacttctggaagccgctgttgcacgaagccgcctcgggccatcgcgacccggcatcgcacacgatcgaatacgcggcgcaagcgaagcgccacggtttccgcttcgtgcagggcgcgctgcaacaggtcgaccgcgcggcacgcaccgcaacgatcgcggccgtacaggacgcggacggcacggaaatcctgccgcagcgcgagctcgactatgacgatctcgtgctcgcggtcggcagcgtgacgaacttcttcaatgtgccgggtgcggcgcgccacgcgctgccgctcgaaaacctcgaccaggccgaggatttccgccggaagtttctcgcggcctgcacgaaggcgaatcacctggccgagcagcagcccgcgcggcgcgcggcgccgatctgcatcaacgtgatcggtgcgggcgcgacgggcgtcgagctggcagcggcattgcgggattcgatccagcaactgacgacgtaccgcttcaaggcgctggtgtccgcacgcgacgtgcacatccggctgatcgaaggcggcccgcgcatcctgccggcgctcgacgagcggctgtccggcaagatgcacgcgcagcttcgcgcgctgaacgtcgacgtgctgaccgatacccgcgtggcggaagtcggcgcggatgccgtgacgacctcgaccggcgaacgcctcgcgagcgacatcacgatctgggcggccggcgtggcaggcccggcgttcctgcggcagatcggcgacatcgcgctcaaccgttcgaaccaggtgatcgtgaccgatacgctgcagacgccggacgatccgcacgtgtatgcgttcggcgactgcgccgcctgcccgacagccggtgcaaacgggttcctgccgccgcgcgcgcaggtcgcgtatcagcaggccgtgtacctcgtcaacgcgttcgcgcggcgcgtcgccggcaagccggtggccggcttcacgttccgcgatgcgggcaccgtcgtgtcgctcgggcatgcgggcgccgtgtaccaggccgacatcagcgtgcgttcgcgttcgctgatcgtggacgggcttgcggcgatcgggctgtacaagttcctgtatcgcaagcacctgttcagcgtggtcggcgtgaagcgtgcgctgttccagtcgctgagccactggctgcaaagccgtaaccagccgtcgatcaagctgcactga

SEQ ID NO: 147554 - protein, 452 aa, Burkholderia sp. 383
MDNTTPNLATDRAPRLPRIVIVGGGAGGLHLATRLGDTVGRRGQAEVVLVDRYPTHFWKPLLHEAASGHRDPASHTIEYAAQAKRHGFRFVQGALQQVDRAARTATIAAVQDADGTEILPQRELDYDDLVLAVGSVTNFFNVPGAARHALPLENLDQAEDFRRKFLAACTKANHLAEQQPARRAAPICINVIGAGATGVELAAALRDSIQQLTTYRFKALVSARDVHIRLIEGGPRILPALDERLSGKMHAQLRALNVDVLTDTRVAEVGADAVTTSTGERLASDITIWAAGVAGPAFLRQIGDIALNRSNQVIVTDTLQTPDDPHVYAFGDCAACPTAGANGFLPPRAQVAYQQAVYLVNAFARRVAGKPVAGFTFRDAGTVVSLGHAGAVYQADISVRSRSLIVDGLAAIGLYKFLYRKHLFSVVGVKRALFQSLSHWLQSRNQPSIKLH

SEQ ID NO: 147555 - DNA, 1146 bp, Synechococcus sp. CC9605
  CDS (1)..(1146): transl_table=11
atgcgttcaccctcgtccccaacggatgccgtggtgatcgttggcggtggattcggtggactgttcacggcacttgctcttcagcgacgacagcccaactgccccatcgttctgatcgaaccgcgggatcgctttctgtttcaaccgctgctgtacgaactgctcagcgatgaacttcaaggctgggaagtagccccccgctacgaccaactgctgaacaacggcatctgctggatccaagacagcgttgttggtgtcgacctaaccagccagaccatcgaattggcctccggagaccgcttggggtggtcacaactggtgctggcaacgggctcgaaaggcaatgatttcggcattccaggcgtcaaggagcacagctccggcttccgtgacctcagcgatgtgagccgcctcaagcaatggctgaacaacctgcaccagcaacggggtgaagcggccggactgattattgttggcgcgggacccaccggcgtggagctggcctgcaagctgacggatctgatcgacggtgctgccagcgttcgactggtggagatgggcgatgaaatccttcccggcagcacagccttcaatcgtgagcgggcccaggccgcgctggaacgcaaaggggtggtggtccaactcaacaccagcgtgagcgaagtgaaatccagcaccgcggttcttgccgatggtgctgttctgcctcacgcaggtttggtctggaccgcaggaagcagcccctccatcccccccatctcacccacacctgtactggaacgggggcgtctggccattgacgatgacctgcgcctggtgagcagcgccaacacattcgccctcggggatctctcagcccggcctggtagcccttggcccgctagcgcccaggtggcgatgcaacagggcgatgccactgccgcagccatcgcgacgttgcgcatggaccaagaaccacaaccctttgaattcgaggaccgaggcgaaatgctcagcctcggtgtcggtgacgccaccctcacgggcatggggctcaccttggctggccccttggccttccagttgcgacgagccacctacctcacccgtctgccagggctctccctgggtctgcgctcggcaggcgcctggttgctgaaccgttga

SEQ ID NO: 147556 - protein, 381 aa, Synechococcus sp. CC9605
MRSPSSPTDAVVIVGGGFGGLFTALALQRRQPNCPIVLIEPRDRFLFQPLLYELLSDELQGWEVAPRYDQLLNNGICWIQDSVVGVDLTSQTIELASGDRLGWSQLVLATGSKGNDFGIPGVKEHSSGFRDLSDVSRLKQWLNNLHQQRGEAAGLIIVGAGPTGVELACKLTDLIDGAASVRLVEMGDEILPGSTAFNRERAQAALERKGVVVQLNTSVSEVKSSTAVLADGAVLPHAGLVWTAGSSPSIPPISPTPVLERGRLAIDDDLRLVSSANTFALGDLSARPGSPWPASAQVAMQQGDATAAAIATLRMDQEPQPFEFEDRGEMLSLGVGDATLTGMGLTLAGPLAFQLRRATYLTRLPGLSLGLRSAGAWLLNR

SEQ ID NO: 147557 - DNA, 1215 bp, Prochlorococcus marinus str. MIT 9312
  CDS (1)..(1215): transl_table=11
atggataacaatatttcgctaatgaaagcaatacaaaaaccaatagtaatagttggagcaggtttcgcaggtatgacagctgctttgaatataaagaatcttaatccttccttacctgttattgtagtcgattctgcatccaactttatatttaaacctttaatgtatgaagttttaagtaaagaaataagactttgggaagccacgccaaaatttgctaatattttttctgatgcaggtataacttttttaaaaaattgtttaacaaagatttccttcaaagaaaatatacttgaatttagtgacgaattaaaattaagttttcaatatcttgtaatttgtacaggttctataccaaatacttttttgataaaaggtgtagaggaaaattgttatttttttaatgattttcatgatctaaataaagtaaaatcctttttaaaagaatcacaaaaaactttgcttcataaaaagttattcatagttggaggtggtccctctggcattgagttagcatgcaaaattaaagatatatacaaagatcaatttgaaattaatgtgatagaaagatctaatgaaatacttagtagaaacaaaattttcaatagggaacaagcagagaccgcattagaaaaaagaaaaatcaatgttcttttaaacaccacagttaaagaagtctcagaaactagaattattatttccagtgaggatgggataacttctttggataaagatattgttatttggactgcaggtgttaaacccaacttgtcttatttgcaaactgatgaaataacaaaaaaatttggaagaattttagttaataataatttgcaaatagaaaaccataataactgttttgctatcggcgatatttcgatcattgcagggatggaggatctacccataacagctcaggttgcgatgcaggaaggaaatcatctcgctaaaaatctagaactattaattcaaggaaaagatcctttaccttttgaatttcaagataatggtgaaatgattagcttaggaataggggaagcttcaattgcggggcttggggttactttatcgggaaaattagcttttgaggcaagaagacttatatatgcttccaagttgcctgatattaatgaaagtttaaaatctgcatattcatggatattccacaaaaaatctatttttcagaattttcttaaaaaagataatttcaattaa

SEQ ID NO: 147558 - protein, 404 aa, Prochlorococcus marinus str. MIT 9312
MDNNISLMKAIQKPIVIVGAGFAGMTAALNIKNLNPSLPVIVVDSASNFIFKPLMYEVLSKEIRLWEATPKFANIFSDAGITFLKNCLTKISFKENILEFSDELKLSFQYLVICTGSIPNTFLIKGVEENCYFFNDFHDLNKVKSFLKESQKTLLHKKLFIVGGGPSGIELACKIKDIYKDQFEINVIERSNEILSRNKIFNREQAETALEKRKINVLLNTTVKEVSETRIIISSEDGITSLDKDIVIWTAGVKPNLSYLQTDEITKKFGRILVNNNLQIENHNNCFAIGDISIIAGMEDLPITAQVAMQEGNHLAKNLELLIQGKDPLPFEFQDNGEMISLGIGEASIAGLGVTLSGKLAFEARRLIYASKLPDINESLKSAYSWIFHKKSIFQNFLKKDNFN

SEQ ID NO: 147559 - DNA, 1335 bp, Synechococcus elongatus PCC 7942
  CDS (1)..(1335): transl_table=11
atgatttcgactgtcagcaaaccgcgtgtcgtcgtcattggcggcggttttggagggctgtataccgccctcaatcttggcaagacctctgtcgagctcaccctgattgataaacgaaactttcacctgtttcaacccttgctctaccaagtggctacaggggaaatttcgccgggcgatatcgctgcgccgctccgggcgatcgtaggtcgtaaccccaatacccgcgtcattctcggtgaagtgactgacatcgatccgcaggcccattgggtgcgcgttggcgatgaaattgtcgaatacgactacttggttgtggcgacgggtgccagccaccactactttggcaacgaccaatggcagccctttgctccggggctgaaaacggttgaagatgcgctggaaatgcgccgccggatttactttgccctcgagcaagctgagcaggagagcgatccagagcgtcagcaagcttggttgaccttcacgatcgtgggagcaggccccaccggcgttgaactagctggcgcgatcgcggaattaacccgcggtgaaatgcgcaaagaattccgcaatgtcgacaccaccaaagccaaggtcattttgattgaaggcatggatcgggtcttaccacccttcccgccagagctgtcagcccaagcgcaagtacagctagaaggcttgggcgtgactgtgcaaaccaaagccatggtcaccgacattcaagaagatcgcgtcgtctttaagactggcgacgacttgcatgagatccctagccgcacgaccctttgggctgcgggcgtcaaagcgtcacccttgggcaagctcctagcgcaacgaaccggtgcagaactcgatcgcattggtcgcgtcatcgtccagcctgatttgcagctgccgactgaccccaacgtctacgtcttgggtgacctggcccactgccctgatcaagcaggcaacccactgcccggtgtggcagcagtcgcgatgcagcagggggcttatctcggtaaggcactcaagcggcggctgaagagtcaacccgttgatcccttccgctaccaagacttcggcagcatggcagtgattggccgtaacgctgcggttgcccgcttagcaggtattcgcctcagtggtttccccgcatggctggtctgggcttttatccacgtctggtatttgattgaattcgacagcaaattgctggtgatggtgcagtgggcttggacctacttcaaccagaaacgcggcactcgcctaatcgtcaatcatcaccgcatgtcggccccggcagcgatgactaatccggccgaaaaagagttggcgaagtcctag

SEQ ID NO: 147560 - protein, 444 aa, Synechococcus elongatus PCC 7942
MISTVSKPRVVVIGGGFGGLYTALNLGKTSVELTLIDKRNFHLFQPLLYQVATGEISPGDIAAPLRAIVGRNPNTRVILGEVTDIDPQAHWVRVGDEIVEYDYLVVATGASHHYFGNDQWQPFAPGLKTVEDALEMRRRIYFALEQAEQESDPERQQAWLTFTIVGAGPTGVELAGAIAELTRGEMRKEFRNVDTTKAKVILIEGMDRVLPPFPPELSAQAQVQLEGLGVTVQTKAMVTDIQEDRVVFKTGDDLHEIPSRTTLWAAGVKASPLGKLLAQRTGAELDRIGRVIVQPDLQLPTDPNVYVLGDLAHCPDQAGNPLPGVAAVAMQQGAYLGKALKRRLKSQPVDPFRYQDFGSMAVIGRNAAVARLAGIRLSGFPAWLVWAFIHVWYLIEFDSKLLVMVQWAWTYFNQKRGTRLIVNHHRMSAPAAMTNPAEKELAKS

SEQ ID NO: 147561 - DNA, 1437 bp, Synechococcus elongatus PCC 7942
  CDS (1)..(1437): transl_table=11
atgattgcctctacgtcgatcgctaaaccaacggtcattgtggggggtggctttgtcggcctgttctgcgccctgcacctacgccatcgccattacccagcgccgatcattttgattgatcccaaggatcgcttcatctttcggccactcctattcgacttcctcagtggtgaactgagcgacgagcaagtctggccgcgctacgaagaattgctgcagggcagtgaggtggagtttatccaggatgcggtcagcgccatcgatttggtcgagcgatcgctgacgacagcccaaggtttgacgtttgattacgggcacttggtactgggtttgggagcaacccaaggctactttggcacaccgggggcggccgactatgcctttgcctttcgcgatcgcgatcatgtcgtgaagctggagcagcacctgcggcagcggctgcaaaaagccagccaaatccacgatcgccagcagcgccgagacctgttgaccatcgcagtggtgggggcaggcccctccgggattgagatggtggccctcttggccgattggctgccgctgcactatggccgactgggcggcgatccccaagacctacgcctgatcttggtcaatcgcagtccagaaattctcaagggcgacgccaatgccagcctgcacgacctggtcttggaagagctgcagcagcgccaaatgcccgttgaattgctgttgggggttgcagtcgaagcagtaacgccagagggattacagtaccgccggtcgggaacggacgccttggaacaggtgcggggcaccgtgatttggacagcaggggtcagcaataatccacttttatcgcagttggagattcccgccagcgatcgcgatcgccatggcatgccctacgttttgccgaccctgcaactcctgggctatcccgaggtctttgcggcgggtgactgcgccgtggtcaaggagcagccgcaacccggactggcgcaagtggcctatcaacagggtgctgcgatcgcccataacctcttggcactcagccataatcagcccctcagtcctgccaaagtcagcctgcgtggcaccttgatgggactggggatcgacaatgcggtggccaatctgctgaatcgctaccgtgtcacgggcaagcccggatcattgctccgcaaggcaacctacttggagctgttgccgactccactccacaacttcaaagcaaccatggactggctctcggatgagctctttcagggccacagcgatcgaccccagacgctagagcaacgggaagctggcatcagccgcgcgatcgcgatcacgatcgttagtttggtggcaatcctcggcggcttctttgccactcgactgctgaacgaaccgcgatcgccacaaccgccgcagtccattcccacacaacctgcggcaccgcccacgccctaa

SEQ ID NO: 147562 - protein, 478 aa, Synechococcus elongatus PCC 7942
MIASTSIAKPTVIVGGGFVGLFCALHLRHRHYPAPIILIDPKDRFIFRPLLFDFLSGELSDEQVWPRYEELLQGSEVEFIQDAVSAIDLVERSLTTAQGLTFDYGHLVLGLGATQGYFGTPGAADYAFAFRDRDHVVKLEQHLRQRLQKASQIHDRQQRRDLLTIAVVGAGPSGIEMVALLADWLPLHYGRLGGDPQDLRLILVNRSPEILKGDANASLHDLVLEELQQRQMPVELLLGVAVEAVTPEGLQYRRSGTDALEQVRGTVIWTAGVSNNPLLSQLEIPASDRDRHGMPYVLPTLQLLGYPEVFAAGDCAVVKEQPQPGLAQVAYQQGAAIAHNLLALSHNQPLSPAKVSLRGTLMGLGIDNAVANLLNRYRVTGKPGSLLRKATYLELLPTPLHNFKATMDWLSDELFQGHSDRPQTLEQREAGISRAIAITIVSLVAILGGFFATRLLNEPRSPQPPQSIPTQPAAPPTP

SEQ ID NO: 147563 - DNA, 1197 bp, Synechococcus elongatus PCC 7942
  CDS (1)..(1197): transl_table=11
atggtcagcgccaactcagcaatctgtatcctcggcggtggctttggtggtctctataccgcgctagcgctggctcagcagtcttggcagggggccagtcggccgccgattcatttgattgaccgtggcgatcgctttgtttttttgccgctgctctacgaactgatcacgggtgaactccaaggctgggaagtcgcgccccgctaccgcgatctgctggcaaatacgccggtgcaattccatcggggggttgttagcgaggtcgatctccagcaacagcttgtcgtattggagtcgggacaagtttttgagtttggtcagctcgtgttggctttggggggtgaaacgcctcgtgatctcgcccccggtgcagaaactcacgccctaccgttccgcagtttggacgacgcgatcgccctcaatactcgcttgagtgagctggaacatcagcccgatcgccagatccgcattgcgatcgtgggagcgggtcccagtggggtcgagctggcctgcaaactggccgatcgcttgggcgatcgcgcctggattcgcctgattgagctgggtgaagacattctgcgcaactcgccagaatttaaccgtgaagcggcagaacgagctttacagcagcgccagattctcttggatctgaaaaccggtgtggctgccgtcgaagctgatgcgatcgtgctgcagcgcggggagcaaacggaacgactcagcaacatcgatctggtcttgtggacggttggcaaccgagtgcccgcagccgttgccgctctggatttacccaaaaatgctcgaggtcaactacaaaccgcgctgaccctacaaatcagcggtcacaataaccttttcgcgctgggtgacttggcagagctaccactggtggatggcaaagcgattccggccaccgctcaggcagcgttccagcaggcaaactgtctggctgcgaatttgatcgctcaacgccgtgagcaacctttgagcgatttccaataccaagccttgggtgaaatgctggcgctgggttccggcaacgccacattgacaggactcgggttgactttggaaggccccctagcggcagtcgcccgccgcttggcctacctttaccggatgcccactccaacgcaacaatgtcgcgtaggtctgaattggctcctgcaaccgttggactcgctgctgcattcctaa

SEQ ID NO: 147564 - protein, 398 aa, Synechococcus elongatus PCC 7942
MVSANSAICILGGGFGGLYTALALAQQSWQGASRPPIHLIDRGDRFVFLPLLYELITGELQGWEVAPRYRDLLANTPVQFHRGVVSEVDLQQQLVVLESGQVFEFGQLVLALGGETPRDLAPGAETHALPFRSLDDAIALNTRLSELEHQPDRQIRIAIVGAGPSGVELACKLADRLGDRAWIRLIELGEDILRNSPEFNREAAERALQQRQILLDLKTGVAAVEADAIVLQRGEQTERLSNIDLVLWTVGNRVPAAVAALDLPKNARGQLQTALTLQISGHNNLFALGDLAELPLVDGKAIPATAQAAFQQANCLAANLIAQRREQPLSDFQYQALGEMLALGSGNATLTGLGLTLEGPLAAVARRLAYLYRMPTPTQQCRVGLNWLLQPLDSLLHS

SEQ ID NO: 147565 - DNA, 1389 bp, Burkholderia xenovorans LB400
  CDS (1)..(1389): transl_table=11
atgatccagatcgaacagcaggcaggcgcaacaacgcaacgcgtgcaaggtgcgcaacgtaacgaaaacacggccgggcatcggatcgtcatcgtcggcggcggcgtgggcggacttgggctcgccacgcgcctgtccgaatcgctcgggcgtgccggactcgcgcggatcgtgctggtcgaccgctggcccacgcacttctggaagccgctgctgcatgaagccgcttcgggccagctcgatcccgccacgcatcaactgcaatacgcggtacaggcgcaacggcacggcttcgaattcgaacagggcgaactcaccgcgctcgaccgcacacaacgccacatcaccgtgagcgcgctgcgtgatgcggacggccgcgaaatcctgcccgcccgtcagatcgccttcgatacattggtgctggccgtgggcagcgtcacgcagtatttcggtgtgccgggcgccgccgaacatgcgttgccgctcgaatcggtcgcgcatgcggaagccttccgccgcaagctgctcgacgcctgcctgcgcgccagccacgcacgccgcgcacgcaccgcgcaagcggacacgccggtgtcgatcaacatcgtcggtgcgggggcgaccggcgtcgaacttgccgccgcgctgcgcgacacggtgcgtttgctgaatcgctacagtccattttcgctcgatcccgtgcgcgactttcgcatccgtctgatcgaaagcagtgagcgcgtgctgcctgccctgtccgaaacgatctccgcgcgcgctgaacggatgctcgaaagcctcggcgtggaagtgttgagcgcgacgcgcgtcaccgaagtgcgcgccgacgcggtactgaccgacggcggttccccactcgccagcgacatcgcgatctggaccgcgggtatcgcggggccgccgcttttgcgcacgctggacgatatcgcggtcaaccgcaacgcacagataagcgtgaatcgcaccctgcaatgcacgaacgacgcgaacgtattcggtctcggcgattgcgcggcctgccccgccgacaaccccggtgccttcctcgcgccacgtgcgcaggtcgcgcatcagcaggcgctgtttctcgcgcgtgcattgaagtgccgcgtggcaggcaaagcgctgcccgaattcgtgtatcgcgacgccggcacgctggtcggcttcgggcgtgaaggcacgatcggcagtctcagcggcggcttgctcacgcagccggtgttcgtcgacggctggttcgctaccgcggtctacaagctgatttatcgccggcacgtcatgacgctgaccggattcgcacgcatggcgctcgatacggcgagccactggctgcgcaggcgcgtgcatccggtgatccgtctgcactga

SEQ ID NO: 147566 - protein, 462 aa, Burkholderia xenovorans LB400
MIQIEQQAGATTQRVQGAQRNENTAGHRIVIVGGGVGGLGLATRLSESLGRAGLARIVLVDRWPTHFWKPLLHEAASGQLDPATHQLQYAVQAQRHGFEFEQGELTALDRTQRHITVSALRDADGREILPARQIAFDTLVLAVGSVTQYFGVPGAAEHALPLESVAHAEAFRRKLLDACLRASHARRARTAQADTPVSINIVGAGATGVELAAALRDTVRLLNRYSPFSLDPVRDFRIRLIESSERVLPALSETISARAERMLESLGVEVLSATRVTEVRADAVLTDGGSPLASDIAIWTAGIAGPPLLRTLDDIAVNRNAQISVNRTLQCTNDANVFGLGDCAACPADNPGAFLAPRAQVAHQQALFLARALKCRVAGKALPEFVYRDAGTLVGFGREGTIGSLSGGLLTQPVFVDGWFATAVYKLIYRRHVMTLTGFARMALDTASHWLRRRVHPVIRLH

SEQ ID NO: 147567 - DNA, 1404 bp, Ralstonia metallidurans CH34
  CDS (1)..(1404): transl_table=11
atgagtcacgcatacgacaaagaggacagcacgcagagggaggcggcaaccgtaagtactcagccccgcacggtggcacgatcggagaagcaggcacaccggatcatcgtggtcggtggcggagccggcgggctcgagcttgtcacgcggttgggcgacaagcttggcaagtccggcacggcgcaggtgacgctggtcgaccgctcgcccacgcacatctggaagccgctgctgcacgaggtggcggcgggcagcatggacccgaacacgcatcagctcgagtacgtggcccaggcgcgttggcactacttcgagttccagcaaggcgaactgaccggcatcgaccgggagcgcaagcttgtgaaggtggcggcgtgcctcgatcaggatggcgcggaattgctgcctgcccgggaattgccgtatgacacgctcgtgctcgccatcggttgcgtcacgcatttcttcggtgtgcctggagcagccgagaacgcgatcgcgctcgatacggtcgatcaggcagagcgcttccggcgcaagctgattgccgcgtgcgtgcgcgcgcagaacggccggggccgagtcggggaggatggccgcccacgggtcgacgtggcgatcatcggcgccggcgcgacgggggtggaactgtcagcggagttgcgcaatacagcgcacgtgctcaatgcgtacgggctgcaccagctcgatccgcgtcgcgacgtacgcatccatatcgtcgaggcgggcccgcgcatcctgccggcgctgacggagcgtgtatcggccgagacaaccaagctgctgcgcaagctcgatgtcgacgtgttcacttcggagcgcgtgaccgaagtcacgaaggacgccgtgctgactgccagcggcaagcatgtcgatgccgatctgacggtgtgggcggcgggtattaccgcgccgggtgtgctgcgcacgctcggcctgccggtcagcaagatgggccagatcgtcgtgggcccgacgctgcagtgcgagacggatccggacatcttcgcgttcggcgattgcgctgccgcgccgtggcccgagaagcagaccacagtgccgccgcgcgctcaggccgcgcaccagcaggcaacattcctctatgacgcgattcgcgcgcggctggctggcaagccgctgccgaagttcggcttcaaggacttcggctcgctggtgtcgttgggccacttcagcgccgtgggcagtctgatgggtggcctgatcggtggttcgatgttcatcgaggggctgttcgcgcgcttcatgtacacgtcgctgtaccggatgcatgtactggcgctgcatggggccattggcatggggctggacaccatcacgcactggctgcgcagcaagaccagcccgcgcgtgaagctgcactag

SEQ ID NO: 147568 - protein, 467 aa, Ralstonia metallidurans CH34
MSHAYDKEDSTQREAATVSTQPRTVARSEKQAHRIIVVGGGAGGLELVTRLGDKLGKSGTAQVTLVDRSPTHIWKPLLHEVAAGSMDPNTHQLEYVAQARWHYFEFQQGELTGIDRERKLVKVAACLDQDGAELLPARELPYDTLVLAIGCVTHFFGVPGAAENAIALDTVDQAERFRRKLIAACVRAQNGRGRVGEDGRPRVDVAIIGAGATGVELSAELRNTAHVLNAYGLHQLDPRRDVRIHIVEAGPRILPALTERVSAETTKLLRKLDVDVFTSERVTEVTKDAVLTASGKHVDADLTVWAAGITAPGVLRTLGLPVSKMGQIVVGPTLQCETDPDIFAFGDCAAAPWPEKQTTVPPRAQAAHQQATFLYDAIRARLAGKPLPKFGFKDFGSLVSLGHFSAVGSLMGGLIGGSMFIEGLFARFMYTSLYRMHVLALHGAIGMGLDTITHWLRSKTSPRVKLH

SEQ ID NO: 147569 - DNA, 1386 bp, Myxococcus xanthus DK 1622
  CDS (1)..(1386): transl_table=11
gtgagcccgaaatcaaagcgcgaagacctgccccacgtggtcatcctcggcggtggttttgccggcctctacgccgcccgtcatctctacagggcacccgtgcgcgtcacgatggtggaccggcagaatcaccacctgttccagcctctgctctaccaggtcgccacggcgacgctgagtcccagcgagattgcggcgccgctccgggcggtgctggggcaccaccaggtggcggtggtgctggcggaagtgacgggtgtggatacggctggcaagcgcgtgctgctctccgacggagagctgaactacgactacctcgtcatcgctacaggggccacacactcctacttcggcaatgacgcctgggctcagttcgctcccggcctgaagtccatcgaggacgcgctggcgattcgccggcggatcctggtggccttcgaactggcggagcgggagacggacccggagatccgccgctcgctcctcaacttcgtcatcatcggcgccggacccacgggggtggaactcgcgggctcgttggcggaaatcagccggcattcgcttcatggcgacttcaggaacttcgatccgcgggacgcgcgcatcatcctcatcgagggcatggacaaggtcctgcccgtctatccggatgacctgtcacagaaggcctgccgcacactcgagaagctgggggtggaggtccgtacgggggctcgggtcaccaacatcaccgagcaaggggtcttcatcggccaggagttcatccccgcgaggacggtattgtgggccgcgggcgtggcggcatcgccggtggcgaagtcgctgggcgtcgaactcgaccggtccgggcgcgtgctcgtcactcctgagctgaccataccgggccacgacgatgtcttcgtcgtcggtgacctgtccttgctcaaggatgcggagggcaagccggtgccaggccttgctcccgtggccatgcaggaaggcaagcacgccgcccacaacatccgccgccagttgcagggcaagccgatggtgcccttctcgtactgggaccgcggctcctacgcggtgattggccgaggccacgcggtgggcattgccttccgccgcttcaagcaggcgggcttcggtgcctggatggcctggctgctcatccacatcaccttcctcatcggcttccgtagcaggctggcggtgctgctcaactgggccttctcgtacctgacgtttggcaagtcggcgcgcatcatcaccggcccttcgcctcgcctggaccggctccagcccacccacgccttgccggagggtgggcagaccccgtccatcgcagagccccgcttccagacgacgacgtctcacgcggagtccgcgacgaccgggacgcactga

SEQ ID NO: 147570 - protein, 461 aa, Myxococcus xanthus DK 1622
MSPKSKREDLPHVVILGGGFAGLYAARHLYRAPVRVTMVDRQNHHLFQPLLYQVATATLSPSEIAAPLRAVLGHHQVAVVLAEVTGVDTAGKRVLLSDGELNYDYLVIATGATHSYFGNDAWAQFAPGLKSIEDALAIRRRILVAFELAERETDPEIRRSLLNFVIIGAGPTGVELAGSLAEISRHSLHGDFRNFDPRDARIILIEGMDKVLPVYPDDLSQKACRTLEKLGVEVRTGARVTNITEQGVFIGQEFIPARTVLWAAGVAASPVAKSLGVELDRSGRVLVTPELTIPGHDDVFVVGDLSLLKDAEGKPVPGLAPVAMQEGKHAAHNIRRQLQGKPMVPFSYWDRGSYAVIGRGHAVGIAFRRFKQAGFGAWMAWLLIHITFLIGFRSRLAVLLNWAFSYLTFGKSARIITGPSPRLDRLQPTHALPEGGQTPSIAEPRFQTTTSHAESATTGTH

SEQ ID NO: 147571 - DNA, 1353 bp, Rubrobacter xylanophilus DSM 9941
  CDS (1)..(1353): transl_table=11
atggcgctcaggaggtttctgaacccgcctccccgctacgccccgtgggagaagccgcgctaccgggacttcgagaagaaggtgctcatcgtcggcgggggcttcgccggctacacggcggccaagactttgtgcgagctggtgcgtgaccgggacgacgtgggcgtcctggtgctctcccgggagaactacttcaccttctggcccatcgtccccgaggtcgtcagcaacgacgtggacgcccacaacgtcgcccagccgctgcgccgggcgctcatcaccgcgggggccagcttccggcgggcccgggtgcagagggtcgtccccgagcgcaacgtggtcgtggccgagggcgacatagagttcccctacgaccagctcgtcatcgcggtcggcgggcagcccaacttcttcggcatccccggggtggaggagcacgccctcagcatgcgcgggctagaggacgctgagcagatccgcaaccgggtcatcgagcgcttcgaggaggtctccctgatccggggcgagatccccgagtccaagctgaccttcgtcgtcatcgggggcggggccacgggggtggaggtggcctcccagatccacaccctcgtgcacgagcacctggcctccgactacccaaacatagaccccaaccgggtgaggatctacctcgtcgaagccctcccggagatcctgccggagctcgacccggcgctgcgcaaggccgcccgcaaccggctctaccgccagcggatagaggtgctcaccaacaccctggccgaggaggtgaccgccgactgcgtcaggctcaagggcggcggcgagatctcgtcggagaacgtgatctggacggccggcaaccggcccaacgccgtgatccagaggctcggccttccctacgacgagaagaacggcataagggtggacgagtacctgcgggtggaggggcaccgggacatctgggccatcggcgactgcgcggccatcccggacgtccggcaggagggcaagatagtcccgcccaacgcccaggccgccgtgcaggaggggaagaccgtcgcccgcaacgtcctcgccgtgctcgacggccgcgaggacgaactggagcgtttcgagtacaagccgctcggccagcttgtggagctcggcagcgacttcgcggtgaacgaggtcatgggggtccggttctccggctttctggccgcgcttttctggcggctcgcctacctggtgcgcctcaccagcccccagagcaaggcgcgggtggcggcggactggatcgtcagcttcttcctccgcccggccgtcacgcaggttaggggggccagaaacaacgcggacgaccgcacttga

SEQ ID NO: 147572 - protein, 450 aa, Rubrobacter xylanophilus DSM 9941
MALRRFLNPPPRYAPWEKPRYRDFEKKVLIVGGGFAGYTAAKTLCELVRDRDDVGVLVLSRENYFTFWPIVPEVVSNDVDAHNVAQPLRRALITAGASFRRARVQRVVPERNVVVAEGDIEFPYDQLVIAVGGQPNFFGIPGVEEHALSMRGLEDAEQIRNRVIERFEEVSLIRGEIPESKLTFVVIGGGATGVEVASQIHTLVHEHLASDYPNIDPNRVRIYLVEALPEILPELDPALRKAARNRLYRQRIEVLTNTLAEEVTADCVRLKGGGEISSENVIWTAGNRPNAVIQRLGLPYDEKNGIRVDEYLRVEGHRDIWAIGDCAAIPDVRQEGKIVPPNAQAAVQEGKTVARNVLAVLDGREDELERFEYKPLGQLVELGSDFAVNEVMGVRFSGFLAALFWRLAYLVRLTSPQSKARVAADWIVSFFLRPAVTQVRGARNNADDRT

SEQ ID NO: 147573 - DNA, 1416 bp, Mesorhizobium sp. BNC1
  CDS (1)..(1416): transl_table=11
ttgatcgccaaggagctgcttgtgagtgcccgcgaagacatgccgccggcggagccggtcgccccacgttcatcgcgcatcgtcattgttggcgccggttttgccggccttgaggcggcaaaagagcttggcagggcgggcattcccgtcgtcttgcttgaccgccaaaaccatcatctctttcagccgctgctctaccaggtggcaaccgcagcactttctgccgcggatatagccgagccgatccgcaaaattctaaggccctacgaaagcgtacaggtgcttcttggcgaggtgacgagcatcgacatggccgcccgggtgctgcatctggcggacggctcatgtttgaattttgactatctgattctcgcgaccggcgcctcgcacagctatttcggtcatcctgattgggcgcgttttgcacccggcctgaaaacgatcgctgatgctcggcgaattcgtgccaaagcactgctcgcctttgagcgcgccgaacgcactctcgatccagatgaacaggctcgccagatgaccatagccatcgtaggcggtgggccgacgggcgtggagcttgcaggatccctggctgagcttagccgcctcacgcttgcccgcgattttcgcagcgcccggcccgaggcggcaaggataatgctgatcgaggcgggaccgcgcatcctccctgctttttccgaaaaaatctctgcctacgcgcacgaacgccttgaaaggctgggtgtggaggtgcacacgagcactccggtggaggacatccaaaaggatagcatcacttttggcggcagcaccgtccccgtcggtctggttctttgggccgcgggcgtggctgcctcgcctctagccgcgcaactcggcgctgaaaccgatcgggcagggcgcgtgattgtcgacggggccatgcgggtcaggggcctccgcaatgtcttcgccatgggcgatgcggctctgttcgcgggacaggacgggaagcctctgccgggcctcgcacaggttgcgaagcaacagggccggcatctcggccgcatgctcgcccgccatctacgcgacggaaagccgctcgacgaattcgtctatcacggccgcgggaatacggccattgtcggccgccacgccgcggtgttcgagcaaggtcgtttcaagctcaccggctggctcgcctggctctcctgggcgatcatccatgtctatctgctggtgggatttcaacatcgcctgacggtgtcagttcaatggctctggcgctacctcaccttcgaacgcggcgcgaggctgataacggacgaatccctggtatccgatcggtcgccaatgcttgaagaagccgaaaccgtcgccgctgaagctaaggcgcgaacagccgcttctgtgtctttgccaaaggaacgagcaccatga

SEQ ID NO: 147574 - protein, 471 aa, Mesorhizobium sp. BNC1
MIAKELLVSAREDMPPAEPVAPRSSRIVIVGAGFAGLEAAKELGRAGIPVVLLDRQNHHLFQPLLYQVATAALSAADIAEPIRKILRPYESVQVLLGEVTSIDMAARVLHLADGSCLNFDYLILATGASHSYFGHPDWARFAPGLKTIADARRIRAKALLAFERAERTLDPDEQARQMTIAIVGGGPTGVELAGSLAELSRLTLARDFRSARPEAARIMLIEAGPRILPAFSEKISAYAHERLERLGVEVHTSTPVEDIQKDSITFGGSTVPVGLVLWAAGVAASPLAAQLGAETDRAGRVIVDGAMRVRGLRNVFAMGDAALFAGQDGKPLPGLAQVAKQQGRHLGRMLARHLRDGKPLDEFVYHGRGNTAIVGRHAAVFEQGRFKLTGWLAWLSWAIIHVYLLVGFQHRLTVSVQWLWRYLTFERGARLITDESLVSDRSPMLEEAETVAAEAKARTAASVSLPKERAP

SEQ ID NO: 147575 - DNA, 1323 bp, Rhodococcus sp. RHA1
  CDS (1)..(1323): transl_table=11
atgaccaacgaatcagctggagagccaactcgcatcgtcgtggtgggaagcggcttcgccggattcgaatgcgcacgcgctctcacgcgtcgcctccgggggaccgatacccgcatcaccctgatctcggcgcacgactacatgctctacacaccgctcctgcccgaggtggcgggcggaatcctggacgcacggttcgtcacggttccgctggccgaggcgctgccgaacgtcgaactggtgaagggcaacgtcgattccgtcgacttcgaggcccgcaccgtgcacgtgaccgactgcgagcacggtgtcgaggacgtggcctgggaccgggtggtgctcaccccggggtcggtgacccgcctgttcgacattcccggtctcgccgagcacgccaggggactcaagacgccggccgaggcgctgtacttccgcgaccagctgctcacccagatcgaactcgcagagcgggacaccgacccttcggtcgccgacgcccgccggacggtcgtcgtggtgggggcgtcctacgcgggcacggaactcaccgcccaactgcgcgccctcgccgacgaggcggccgcgcggcgaaacctcgaccccgcgaagatccggttcctgctgctcgacgccgccgacacggtgatgccggaggtgggcgagaagctgggcggcaaggtgttggacgtgctgcgctcccgcggcatcgacgtgcgactggaaaccacgctgaccgaactcggacccgaacacgtcacgctcgacgacggcaccgtgatccccacccgcaccgtcgcctgggtgacgggcgtgaccgcaagcccgctcatcgacacgctcggattacccaccgagaagggaaggttgacggtccgccccgacctctcggtggacgggcatcccgacgtcttcgcgggcggcgacgccgcggctgttcccgatccgaggaacagcgggtcgatcaccccacccaccgcccagcacgccgtccggcaagggcagaccctggcccgtaacgtcgcggccagcctgggcgtcggcgacccgaaaccgtacggccaccgcgacatgggtctcgtcgtggatctcggcccggggttcgccgtcgcgaaccctctcggcatccagctgtcggggttcctcgcgaaggtggtcacgcgcgcctaccacctgtacgccatgccgaacacggccaatcgctgggcggtcgccctcgcctatctcaccgatctgctcttcccccgcccactcgtgtcgatcggactggtcaccgattcggaatcgcggttcgcggcgggcgagggcgtaggagcgcagcactga

SEQ ID NO: 147576 - protein, 440 aa, Rhodococcus sp. RHA1
MTNESAGEPTRIVVVGSGFAGFECARALTRRLRGTDTRITLISAHDYMLYTPLLPEVAGGILDARFVTVPLAEALPNVELVKGNVDSVDFEARTVHVTDCEHGVEDVAWDRVVLTPGSVTRLFDIPGLAEHARGLKTPAEALYFRDQLLTQIELAERDTDPSVADARRTVVVVGASYAGTELTAQLRALADEAAARRNLDPAKIRFLLLDAADTVMPEVGEKLGGKVLDVLRSRGIDVRLETTLTELGPEHVTLDDGTVIPTRTVAWVTGVTASPLIDTLGLPTEKGRLTVRPDLSVDGHPDVFAGGDAAAVPDPRNSGSITPPTAQHAVRQGQTLARNVAASLGVGDPKPYGHRDMGLVVDLGPGFAVANPLGIQLSGFLAKVVTRAYHLYAMPNTANRWAVALAYLTDLLFPRPLVSIGLVTDSESRFAAGEGVGAQH

SEQ ID NO: 147577 - DNA, 1374 bp, Trichodesmium erythraeum IMS101
  CDS (1)..(1374): transl_table=11
atgagtcttaaaccaggaaaagcatcaatctatcttcaatctcctcaccacgttgtcatcgttggaggtggatttgcaggactagaagctgccaagcaacttgggaaagcacctgtaaaagtaaccttggttgacaaaagaaatttccatctatttcaaccactactttatcaggtagcgacaggaagtctttcccctggagatattgcctctcctcttcggggtgtagttgcagaacagaaaaacacccatgttattatgggagaagtcgtagacatcgatcccgaagagaaaaaacttaccttacatgatcaagaattaaattatgattcattagttatagccactggtgtgagccataactacttcggaaatgattggtcagaaaaagctcccggactaaaaacagtagaagatgcattagaaatgcgtcggagaatattcgcctcctttgaagcagcagaaaaagaaacagacttagaaaaacggaaggcactcttaacctttgctattgtgggtgcaggtccaacaggtgttgaattagctggtgctctagcagaactagctcataccaaattaaaagaagaatatcgttctatcaataccactgaagctaaaatttatctgattcaaagtggagacagagttttaccctccttcaagcctgctttatcacagaaagccagactagaactagagaaattgggcgtcacagtaatgaccaaaacacgagtaactaatattgaaaacaatgtagttactgttagctctggagaaacaaaaaccgaaattccagctcatacaatattatggggagcaggagttaaagcatcaaaagtatctgaaatcatatctaaccgtacaggagcaaaattagaccgtgcaggccgtgtgtttgtcaacaaagacttgacaatacctaattattctgatatatttgtaattggagacttagccaacttctcccatcaaggtgactccccaattcctggagttgcaccagcagcaatgcaggaaggattttatgtcgcaaagctaattagaaagcgcttgaaaggtgaaagtttaaagccattctattatattgactatggtagtttagctgttatcggtcgtcaccaagcagttgtacagtacaaagccattcgtttctcaggacctatagcttggcttgcctggttatttattcatatctactatatgatagaatttgataaccaattaattgtaatgatccagtgggcatggagctactttacaggtcaaggtggtgctcgtctaatcactgaaaaatcaatgaagacacccagttatgaagaacgtcaagctcgctatactccattagtaccaagtaaatcatctattgaaacctaa

SEQ ID NO: 147578 - protein, 457 aa, Trichodesmium erythraeum IMS101
MSLKPGKASIYLQSPHHVVIVGGGFAGLEAAKQLGKAPVKVTLVDKRNFHLFQPLLYQVATGSLSPGDIASPLRGVVAEQKNTHVIMGEVVDIDPEEKKLTLHDQELNYDSLVIATGVSHNYFGNDWSEKAPGLKTVEDALEMRRRIFASFEAAEKETDLEKRKALLTFAIVGAGPTGVELAGALAELAHTKLKEEYRSINTTEAKIYLIQSGDRVLPSFKPALSQKARLELEKLGVTVMTKTRVTNIENNVVTVSSGETKTEIPAHTILWGAGVKASKVSEIISNRTGAKLDRAGRVFVNKDLTIPNYSDIFVIGDLANFSHQGDSPIPGVAPAAMQEGFYVAKLIRKRLKGESLKPFYYIDYGSLAVIGRHQAVVQYKAIRFSGPIAWLAWLFIHIYYMIEFDNQLIVMIQWAWSYFTGQGGARLITEKSMKTPSYEERQARYTPLVPSKSSIET

SEQ ID NO: 147579 - DNA, 1197 bp, Trichodesmium erythraeum IMS101
  CDS (1)..(1197): transl_table=11
atgactgaaaaaactcaacgcatttgtattctcggtggtggttttggcggactttataccgcccttcgcttaatccagtttccctgggagtcatcaaaaaaacctgaaataatcttgatagacaaacgcgatcgctttctttttgccccactattatacgaactagtcaccggggaactgcaaacctgggaaattgctccaccatttgaagaattattagcaaacactgatattcacttttgtcaaggtgttgtttccggaatagacctcaaccaacaacaagtggaactagaaaatggtcaagcattcagttaccatcgtctcgttttagccatgggaggcgaaacacccatagaaatggtgcctggtgctgccgaatacgctattccattccggacagttaacgatgcttaccgtcttcaagaaaaattacgagttttagaagcatctgagcgtgagaaaatcagaattgctgttatcggtggtggttatagtggagtagaactagcttgtaaattagcagaccgtttacaagaaaaaggtagaattagactagtcgaacgcaataacatgatattgggaacatccccagactttaaccgagaaagtgctactaaagcattgtcagaaaaaaatatttggattgacttagaaaccgaagtagaatcaatagaagccactcaaatttccttaaaatatcaagagcaagttgacactatccccgtagatatcgttttatggacagttggtacaaaagttgctccagtagtggagtcattaccattaacaaaaaatgaacgtcaacaaattattactagtgcaactctacaagtgcaagacaatcagaaaatatttgctattggagatttagcagactgccaagatgcagatgggcaaaaagttcctaccactgctcaagtagcaatacaacaatcagattatgtcgcctggaatatctgggcatctttaactggacgacctctattaccattccgttatcaagcattaggtgaaatgatggcattgggacttgataatgccacccttaccagtttaggcattaaactagatggtcaaatagcatatatggcaaggcgtttagtttatctatatagattgccaaccttagagcatcagattaaagttgctttcaactggatgattaatcctattcaggatttactatcaggtctataa

SEQ ID NO: 147580 - protein, 398 aa, Trichodesmium erythraeum IMS101
MTEKTQRICILGGGFGGLYTALRLIQFPWESSKKPEIILIDKRDRFLFAPLLYELVTGELQTWEIAPPFEELLANTDIHFCQGVVSGIDLNQQQVELENGQAFSYHRLVLAMGGETPIEMVPGAAEYAIPFRTVNDAYRLQEKLRVLEASEREKIRIAVIGGGYSGVELACKLADRLQEKGRIRLVERNNMILGTSPDFNRESATKALSEKNIWIDLETEVESIEATQISLKYQEQVDTIPVDIVLWTVGTKVAPVVESLPLTKNERQQIITSATLQVQDNQKIFAIGDLADCQDADGQKVPTTAQVAIQQSDYVAWNIWASLTGRPLLPFRYQALGEMMALGLDNATLTSLGIKLDGQIAYMARRLVYLYRLPTLEHQIKVAFNWMINPIQDLLSGL

SEQ ID NO: 147581 - DNA, 1218 bp, Trichodesmium erythraeum IMS101
  CDS (1)..(1218): transl_table=11
atggaaactggagaaatacctcaaggagaaaaaccaagtaataaaatcacaaaaatttgcatattgggtagtggctttggtggtctttacacggcattgtatctgaatagtttttggggttttaaacataaaaattgtgaagttatattaatagatcaacatgatcatcttgtttttactcccctactgtatgaggtaattacagatgaactccaaacttgggaaatagctccctcttttgctaaacttctacaaaataagaaaatacttttttgtcaagatacgattcaaaatattgattttaaagctcgtaaagttaaacttttagaacaaggaagtttagcttatgactacttagttattacggtgggtgttactaatggaaaattaccaactactgcagaaaatgttttaacattccgaactttagctgatgctcaaatattagagaaaaaactacaaactttggaaaattctaatcaagaattaattcgagtatctattgtgggtggtggtccaagtggagtagagttggcaggaaaaatagcagatagattaggaagacgaggagaaatacgcttaatagaaagaggaaaagaaatactaaaaaactttactccagctactcgtaaaaatgctcaacgtgctttagataaacgaaatgttttaataagtttagagacaactgttgatactattgaagttgacaaaattactttatggcagtctaatgaaagtgttattattctaacagatttggtactgtggactgcaggtactcaagtaagagagtgggttaaaaatttgaattgttaccacaattctagaggtcaacttatttgcgagcaaactttacaattagttggctattcagaagtttttgccttgggagatattgctgagattttatatcccaatggtaaaaaacttccagctacagctcaagttgcttatcaacaagcaagtcaagcagcaaaaaatctctgggcaattttaaataataaacgtcccaaaccttttcgttatttacacttaggagaaatgattactttgggagtaaattctgctgctgtttcgagttttggtattagtttgcatggttggttagctgctttagtgagacttagtgtttatttacaacgtttaccgactttttctcatggttttcaggttttatgtaatagattgaaaatttggctagctaaaaggaaaagataa

SEQ ID NO: 147582 - protein, 405 aa, Trichodesmium erythraeum IMS101
METGEIPQGEKPSNKITKICILGSGFGGLYTALYLNSFWGFKHKNCEVILIDQHDHLVFTPLLYEVITDELQTWEIAPSFAKLLQNKKILFCQDTIQNIDFKARKVKLLEQGSLAYDYLVITVGVTNGKLPTTAENVLTFRTLADAQILEKKLQTLENSNQELIRVSIVGGGPSGVELAGKIADRLGRRGEIRLIERGKEILKNFTPATRKNAQRALDKRNVLISLETTVDTIEVDKITLWQSNESVIILTDLVLWTAGTQVREWVKNLNCYHNSRGQLICEQTLQLVGYSEVFALGDIAEILYPNGKKLPATAQVAYQQASQAAKNLWAILNNKRPKPFRYLHLGEMITLGVNSAAVSSFGISLHGWLAALVRLSVYLQRLPTFSHGFQVLCNRLKIWLAKRKR

SEQ ID NO: 147583 - DNA, 1311 bp, Synechococcus sp. CC9311
  CDS (1)..(1311): transl_table=11
gtgttggagttctgccgcctcagccttggggccagcggcaacgacaggctgattcttggaggtggacacatccctcatctctccatcttccaacgccgaggggcatggtgtcatgtctatggtttcaaaaccatttctgaagttctgacttccgacaccaccatgcacaacgatccaatcattgttgtgggaggtggatttgcaggtctaacaacagcattagcgctgagtaatcaacggccacgtccgccgttgttattgattgagccgcgccaacaattcctcttcttacctcttctctatgagcttctcagcggcgaaatgaagagctgggagatcgctcccagctacgacagtcttctccaggggcgacgcattccccacctcgatgaccgagtgacatcgatcaatacagagcagaaatctctacaaaccagccgcggccaggttctgaactacagccagctggtgctcgcaactggctctgagcccgatgactttgggattgcaggagtcaaggagcatgccctgacctttcattccctactggatattcctccactcaaagaacgcgtccacagtctttgcaatcgagcagccaaggatggggcactggtcatcgttggcgcaggagcaacaggcgttgaattggcttgcaaactcagcgacatgctgaagggatccgccgccgttcatctcgtcgaattaggggacagcattctctcccgctcccgagccttcaatcgtgaacaagcacaaaaggcacttgatcaacggggcgtgcatcgtcacctgaacacccgcgtgacctccttatcagcaaacgccgtacaactccttacaaacgacttaccgcaatctctcaaccatgacggtttgatctggacggcagggaccaaaccggtgctgcccaccctgagccccaaccccacccgggagcgagggcttctctgtgttgacgatgggttgcaattaacgacagaccccaatgtcgtggtccttggggatgtcgcctctcataacgatgcagacgccccttggccccgctctgcgcaatcggcactccagcaaggagcggcggcggctcgaacacttcaggccattcgaagaggacaggctgttcccagttttcagtttcaagatcttggagagatgctcagtcttggcatgggagacgcctcgattacaggaatgggactcacccttgccggcccactcgcctatcgcatgaggcgactcacttacctcgctcgaatgccaggactctccttgagcttgaggtctgcaggcgcctggctggttcattcttga

SEQ ID NO: 147584 - protein, 436 aa, Synechococcus sp. CC9311
MLEFCRLSLGASGNDRLILGGGHIPHLSIFQRRGAWCHVYGFKTISEVLTSDTTMHNDPIIVVGGGFAGLTTALALSNQRPRPPLLLIEPRQQFLFLPLLYELLSGEMKSWEIAPSYDSLLQGRRIPHLDDRVTSINTEQKSLQTSRGQVLNYSQLVLATGSEPDDFGIAGVKEHALTFHSLLDIPPLKERVHSLCNRAAKDGALVIVGAGATGVELACKLSDMLKGSAAVHLVELGDSILSRSRAFNREQAQKALDQRGVHRHLNTRVTSLSANAVQLLTNDLPQSLNHDGLIWTAGTKPVLPTLSPNPTRERGLLCVDDGLQLTTDPNVVVLGDVASHNDADAPWPRSAQSALQQGAAAARTLQAIRRGQAVPSFQFQDLGEMLSLGMGDASITGMGLTLAGPLAYRMRRLTYLARMPGLSLSLRSAGAWLVHS

SEQ ID NO: 147585 - DNA, 1419 bp, Mycobacterium smegmatis str. MC2 155
  CDS (1)..(1419): transl_table=11
atgcgcccagccagaattgtgatcgtcggtagcggattcgccggcttcgaatgcgcacgccggctgagcaaacagctgaaacggcaccgatccgaggcagtcgtgaccctcatatctccggtcgactacctgctgtacaccccgcttctgcccgaggttgccggtggcgcaacagatccacgcttcgccaccgtgcccctgaacgacaggctcccggaagtccagttcatccgcgcctatgtcgattcggtggacttgtccgcgcgttcgctgcgctgtcgcgatcaggagaacatgtcccacgagctttcgtgggatcgcctcgtcctgacccctggctcgatcagtcgcctgttcgacatccccggactcgccgaacatggacgcgggctcaaatcgacggcgcaggcgctttttctgcgcgatcacatcatcgaacagttcgaactggcacgcatcgacgaggaccgtgaacgcgcgaacgcgcgtaagacggtggtggttgtcggatcttcatattccggaacggaactcatcgcacagctgtgcgcgatggcttcggtggcggtgcacgacttcggattcgagcccggcgacgtacgactgatcctggtggagcgttcgggacggttgatgcccgaaatcgggcctgcgctggcagttcgcgccgaacacgtgctcaaacggcgcggcgtacggttcctcaccggtgtcacactgtctcgggtcgctgccgaccacgtcatcctgagcgacggaacccgcatcggcacctacaccgtcgcgtgggttgccggagtcgtcgccagcccgctgatcacggccacgggcctgccgaccgagaagggcaggctcaaggtgggtcctgatctgcaggtccccggtttcgacggcgtcttcgcaggcggcgatgccgcagcggtacccgatgtcaccaatcccgggacgataacgccgccgacggcccaacacgccaccaggcaaggcaaaattctggcccgaaacgtcgccgcaagcctcggctacggcagcgcgcgcgagtatcggcaccgcgatctcgggaccgttgttgacctgggtcccgggttcgccgtcgccaatcctctcaacatcccgctctccgggtttctggcgaaactcgtgacccgcgcctaccacctgtacgccattccgcgtaacgccaaccggtgggcagtggcgctcgggtatctcaccaacgtcctgttcgggcggccattggtgtcgatcggcttcgcccagccgtcgtgggcacagttttccgcgagcgaggagttcatgaccgcacccacggcgacgcagccactcgacgagcagatgtacaccgacgacctccgcttccaggaagcttccgccgaccgggcctcggcgccgggcgatcgggccagaaaggcaacatga

SEQ ID NO: 147586 - protein, 472 aa, Mycobacterium smegmatis str. MC2 155
MRPARIVIVGSGFAGFECARRLSKQLKRHRSEAVVTLISPVDYLLYTPLLPEVAGGATDPRFATVPLNDRLPEVQFIRAYVDSVDLSARSLRCRDQENMSHELSWDRLVLTPGSISRLFDIPGLAEHGRGLKSTAQALFLRDHIIEQFELARIDEDRERANARKTVVVVGSSYSGTELIAQLCAMASVAVHDFGFEPGDVRLILVERSGRLMPEIGPALAVRAEHVLKRRGVRFLTGVTLSRVAADHVILSDGTRIGTYTVAWVAGVVASPLITATGLPTEKGRLKVGPDLQVPGFDGVFAGGDAAAVPDVTNPGTITPPTAQHATRQGKILARNVAASLGYGSAREYRHRDLGTVVDLGPGFAVANPLNIPLSGFLAKLVTRAYHLYAIPRNANRWAVALGYLTNVLFGRPLVSIGFAQPSWAQFSASEEFMTAPTATQPLDEQMYTDDLRFQEASADRASAPGDRARKAT

SEQ ID NO: 147587 - DNA, 1356 bp, Nostoc punctiforme PCC 73102
  CDS (1)..(1356): transl_table=11
atggtaaattcacttgacaataatccaccccataaagtagtaatagttggcggtggttttggtggactttatgcagcaaaaacactcgccaaagcggcagtaaacgttactctgattgataaacgtaactttcatctatttcaaccccttttatatcaagtcgccacaggagcgctatctccggctgatatctcctcaccgttgcgttctgtcctcagcaagagcaagaatacgaaagtgctgctgggagaggtgaataatatcgatccagaagcccaaaaagtgactgtgggtgaagaagcaatagcttacgatacgttaattgtcgccacaggtgcaaagcattcctactttggtaaagataactgggaagaattcgccccaggcttgaaaactgtagaagatgccatagaaatgcgtagccggattttttcagcctttgaagccgcagaaaaagaaaccgatccagaaaaacgccgtgcgtggttaacttttgtaattgtgggtggcggcccaactggtgtagagttagctggtgcgatcgcagaattggcaaatcaaaccctcaaagaagatttccgcaacatcgacacatcagaagccaagattctgctattagaaggtttggatcggattctgccaccctttgcaccagagttatcacaagaagcggaagcatccctaacgcgcttgggggtggttgtccagacaaaaacactggtaacgaatattgaaaatgatactgttagcctcaaacaaggcgatgaagttaaagaaattgcctcaaaaacggtattatgggcagcaggtgtaaaagcttcagcaatgggaaaagtgctagcagaacgtacaggtgctgagtgcgatcgcgctggacgcattattgtcgaacctgacttgagtattaagggacatcccaatatttttgtagttggcgacttagcaaatttctctcatcaaaatggtaaacccctacctggtgttgcacctgtagccaagcaagaaggtgaatatgtagcaacactagtccaaaagcggcttgcaggtaacagtttgccaccctttgcttatactgatcatggtagtttagcaatgattgggcacaattctgctgtagtcgatttgggctttatcaagctgaaaggtttcgttgcatggctgttttggctggtgattcacatctacttcttaattgaatttgacaacaaattagtagtaatcattcagtgggcatggaattatttcacccggaatcgtggagcaagattaattacaggtaaagaatcgctcacggagtttgtaattagcgatcgcaacaattattcagccgagaataaacagccggtaaatgtctaa

SEQ ID NO: 147588 - protein, 451 aa, Nostoc punctiforme PCC 73102
MVNSLDNNPPHKVVIVGGGFGGLYAAKTLAKAAVNVTLIDKRNFHLFQPLLYQVATGALSPADISSPLRSVLSKSKNTKVLLGEVNNIDPEAQKVTVGEEAIAYDTLIVATGAKHSYFGKDNWEEFAPGLKTVEDAIEMRSRIFSAFEAAEKETDPEKRRAWLTFVIVGGGPTGVELAGAIAELANQTLKEDFRNIDTSEAKILLLEGLDRILPPFAPELSQEAEASLTRLGVVVQTKTLVTNIENDTVSLKQGDEVKEIASKTVLWAAGVKASAMGKVLAERTGAECDRAGRIIVEPDLSIKGHPNIFVVGDLANFSHQNGKPLPGVAPVAKQEGEYVATLVQKRLAGNSLPPFAYTDHGSLAMIGHNSAVVDLGFIKLKGFVAWLFWLVIHIYFLIEFDNKLVVIIQWAWNYFTRNRGARLITGKESLTEFVISDRNNYSAENKQPVNV

SEQ ID NO: 147589 - DNA, 1371 bp, Nostoc punctiforme PCC 73102
  CDS (1)..(1371): transl_table=11
atgaacagcccagtttatcaaactgtgattgtcggcggtggttttaccgggctatttacagccttacatttagctcacgaacattatccccgctctgttatcttgattgataaagacgagcgcttttgctttaagccactattatatgaatatttcgatggtgagatggatacctttcaggtagtgccgcgtttttcggaactgcttaaaggtagtggtgtcatctttgtgcaagatacagtgcaatcgataaacttgcatcaacgggaagttaaattagcttcgggaaattcctacaattacagcaatttagtattagctttgggcagcgttactggctatcatcaagttgaaggtgctagagaaaatgcctttcctttctggacgcaagcagatgcgatcgctcttgaccgtcatttacgtgactgtttgcaaaaagctgtccaaactgaagatgtagaacaacgccgaaagctattaacagtagtcatagttggtggtggtgcaagtggtgtggaaatggcagcaactctagctgattttctcccacattggtatagcgctttgggaggaaattcaagtgaaattcgtgtagtactactcaatcatggtaaagaaatccttgatggtgatataaataacccattgcgtgaaattgccgaacgggaattgaacaaacgtgctgtgccaatagaaatgattgtggaagcagaagctactgctattggttccacctcaattcaatataagcgtaacgagcaaattgagacattagctacacatactacagtttggactgctggcacttctacccatccactgattaaagatttgccaattcctaaagaacatcgagatcgtcgcgatcgccctttagttactcctaacttgcaattactcgattttccagaagtctttgtcggtggtgattgtgcagcagttcaggataattcgctaccgcctacggctcaagttgcttatcagcaaggagccaatattgcccagaatttgaaagcattagcattaggagaagaacccaaacctgctaaggttaacatccggggaacccttttgaaattggggataaatgatgctgctgctaaccttttcaatgtttttgaagttgtaggcgaaaccgcgcatttaatccgtcaaggcacttatttaacgctattaccagcaccaattcatgactttaaagccaccactgaatgggtagatgaagaagtttttcatcagcaccttgaccctcatgatgtcgggaaaaaagtggtgcaagcagcggaaatagtcggcgtaggagttgtaggtattctagctgcaagaaaattactgaaaatgttgggagatgaagataaaaacagtaagtag

SEQ ID NO: 147590 - protein, 456 aa, Nostoc punctiforme PCC 73102
MNSPVYQTVIVGGGFTGLFTALHLAHEHYPRSVILIDKDERFCFKPLLYEYFDGEMDTFQVVPRFSELLKGSGVIFVQDTVQSINLHQREVKLASGNSYNYSNLVLALGSVTGYHQVEGARENAFPFWTQADAIALDRHLRDCLQKAVQTEDVEQRRKLLTVVIVGGGASGVEMAATLADFLPHWYSALGGNSSEIRVVLLNHGKEILDGDINNPLREIAERELNKRAVPIEMIVEAEATAIGSTSIQYKRNEQIETLATHTTVWTAGTSTHPLIKDLPIPKEHRDRRDRPLVTPNLQLLDFPEVFVGGDCAAVQDNSLPPTAQVAYQQGANIAQNLKALALGEEPKPAKVNIRGTLLKLGINDAAANLFNVFEVVGETAHLIRQGTYLTLLPAPIHDFKATTEWVDEEVFHQHLDPHDVGKKVVQAAEIVGVGVVGILAARKLLKMLGDEDKNSK

SEQ ID NO: 147591 - DNA, 1194 bp, Nostoc punctiforme PCC 73102
  CDS (1)..(1194): transl_table=11
atgactcaacaaaattctagaatttgtatccttggcggaggctttggtggtctctacacagccttgcgcttaagccaattaccttgggaatctacgcaaaaacccgaaattgttttggtagatcaaagcgatcgcttcctattctcccctttactttacgaattactcactggcgaactgcaaacctgggaaattgccccaccctttgaagaacttttacaaggcacaggcgtgcgtttttatcaaggggttgtgtctggaattgacattgagcagcaacgggtagacatacatgaagggccagaaatcccttacgatcgcttagtactggcactaggaggtgagacaccgctagatttagtccccggtgcggcagcctacggctacccattccgcacaatttctgatgcctatcgcttagaagaacgcctgcgatttttagaagaatcggatgctgataaaattcgggtagcaattattggggctggctacagtggtgtagagttagcctgtaagttagccgacagactcggtgaaagaggacgctttcggatcgttgaaattgccgatcaaattttgcgaacttctccagagtttaaccgggaagcagcaaaaaaagctttagatgcccgtggcgtgtttctagatttagaaaccaaagtcgaattaatagagcaaaatagcatcaccctagagtacaaaaaccagttagacacgattcccgtagatttggtaatttggactgtgggaaataaggttgcgcctgtagtgaaatctcttcccctcaagcaaaatcagcgcggtcaaattaacactacatccaatctacaagtcatcgatcatccagaaatctttgctttgggagatttagcagactgtcatgatgttgaaggacagcaagtccccgccacggcacaagcggcttttcaacaagctgattatactgcttggaatatttgggcaagtctcactaatcgtcctctccttcctttccactaccaacagttaggagaaatgatgacattgggtaaaaacaatgccacccttactggtttgggaattaaactagatggccccttggcatccgtcgctcgtcggattgcctatttatataggttgccaactttagaccatcaactcaaagttggttttaattggctagtgcgtccaatcatcgagacactttctaagtaa

SEQ ID NO: 147592 - protein, 397 aa, Nostoc punctiforme PCC 73102
MTQQNSRICILGGGFGGLYTALRLSQLPWESTQKPEIVLVDQSDRFLFSPLLYELLTGELQTWEIAPPFEELLQGTGVRFYQGVVSGIDIEQQRVDIHEGPEIPYDRLVLALGGETPLDLVPGAAAYGYPFRTISDAYRLEERLRFLEESDADKIRVAIIGAGYSGVELACKLADRLGERGRFRIVEIADQILRTSPEFNREAAKKALDARGVFLDLETKVELIEQNSITLEYKNQLDTIPVDLVIWTVGNKVAPVVKSLPLKQNQRGQINTTSNLQVIDHPEIFALGDLADCHDVEGQQVPATAQAAFQQADYTAWNIWASLTNRPLLPFHYQQLGEMMTLGKNNATLTGLGIKLDGPLASVARRIAYLYRLPTLDHQLKVGFNWLVRPIIETLSK

SEQ ID NO: 147593 - DNA, 1359 bp, Burkholderia vietnamiensis G4
  CDS (1)..(1359): transl_table=11
atgaaccacaacacgcacaccgttgcaacggaccgcgcaccacccacgccgcgcatcgtgatcgtcggcggcggggccggcggcctgcagctcgcgacgcgcctcggcgacacggtcgggcgccgcgggcaggccgaagtcgtgctcgtcgaccgctacccgacgcacttctggaagccgctgctgcacgaagccgcatccggccatcgcgatccggccacgcacacgatcgaatacgtcgcgcaggccaagcgccacggcttccggttcgtgcagggcgcgctgcaggcgctcgaccgcgcgacgcgcacggtgacgatcgccgccgtgcacgacgccgacggcaccgagatcctgccgcagcgcgaactcggctacgacgacctcgtgctcgccgtcggcagcgtgacgaactttttcaacgttccgggcgcggcccgccacgcgctgccgctcgaaaacctcgaccaggcggaagattttcggcgcaagttcctcgccgcatgcacgcgggccaaccacgcggccgagcagcatccggcgcggcgcgcggcaccggtctgcatcagcgtgatcggcgcgggcgcgacgggcgtcgaactggccgcggcgctgcgtcacgcggtccagcaactgacgacgtatcgcttcaaggcgctggtgtccacgcgcgacgtgcacatccggctgatcgaaggcggggcgcgcatcctgccggcgctcgacgagcggctgtcggcgcgcatgcatgcgcagttgcgcacgctgagcgtcgacgtgctgacggatacgcgcgtcgcgcaagtcgatgccgacgcggtcacgaccgcgaccggcgagcggctggcgagcgacatcacgatctgggcggccggcgtggccggccccgcgatcctgcgggagctcggcggtatcgcgctcaaccggtcgaaccaggtgatcgtgaccgacacgctgcaaacgcccgacgatgcgcacgtgtatgcgttcggcgattgcgccgcgtgcccgtcggccgatgcgctgagcgtgctgccgccgcgcgcgcaggtcgcgcaccagcaggccgtgtacctcggcgacgcgttcgcgcggcgcctcgccggcaagcgggtggcgcgcttcgcgttccgcgatgcgggcaccgtggtgtcgctcggccacaccggcgccgtctatcaggccgacttcggcgcgcggccgcgctcggtgatcgtcgacgggctcgccgcgatcgggctgtacaagttcctgtaccgcaagcatctgttcagcgtgtacggactgaagcgcgcgctgttccagtcgctcgggcactggctgcaacgccgcaaccagccgtcgatcaagctgcactga

SEQ ID NO: 147594 - protein, 452 aa, Burkholderia vietnamiensis G4
MNHNTHTVATDRAPPTPRIVIVGGGAGGLQLATRLGDTVGRRGQAEVVLVDRYPTHFWKPLLHEAASGHRDPATHTIEYVAQAKRHGFRFVQGALQALDRATRTVTIAAVHDADGTEILPQRELGYDDLVLAVGSVTNFFNVPGAARHALPLENLDQAEDFRRKFLAACTRANHAAEQHPARRAAPVCISVIGAGATGVELAAALRHAVQQLTTYRFKALVSTRDVHIRLIEGGARILPALDERLSARMHAQLRTLSVDVLTDTRVAQVDADAVTTATGERLASDITIWAAGVAGPAILRELGGIALNRSNQVIVTDTLQTPDDAHVYAFGDCAACPSADALSVLPPRAQVAHQQAVYLGDAFARRLAGKRVARFAFRDAGTVVSLGHTGAVYQADFGARPRSVIVDGLAAIGLYKFLYRKHLFSVYGLKRALFQSLGHWLQRRNQPSIKLH

SEQ ID NO: 147595 - DNA, 1191 bp, Crocosphaera watsonii WH 8501
  CDS (1)..(1191): transl_table=11
atgagtgaacaaccattacgcatttgcattgttgggggagggtttgggggactgtacactgctttacgtctcacccagtttacttgggaagaggatcagactcctgaaattatcttaattgataaaagcgatcgcttcttatttactccccttctctatgagttaataacagaagagatgcaaacgtgggaaatagcccccccttatgaggaacttttagcagatacaccgattcgctttcatcagggttgtgtcactggtattaatatcgaaaacaaacaactagaattggataatcataatagtctacattatgaccgtttggtgttagcaatggggggaaaaactcccttagataattttagtggtgttaaagattatgccattccttttcgtactttagaagatgcttatcgtatcaaagaaagattacgcttattagaagataaaaaagcagagaaaattcgtattgctgtagttgggggcggatatagcggtgtagagttggcttgtaaatttgcagatcgtttaggggatacagggcgaattagattggttgaaagaggagataaaatactcagcaactctcccgaatttaaccgagaagttgccgaaaatgccttagagtctcgaagagtttttatcgatctagaaacagaagtcactcaagttagtttcgatagtgtttctttatcttataaaggaaagattgatagcattcctgttgatttagtattgtggactgtgggaactcaagttatcgaaatggtcaaagaattaccgttagaaaagacaagtaatggactattaaaaataacccctgaattacaagccattgagcatcctgaaatttttgctattggtgatttagcagcttattatgatgaatctaaggagccaattcctgcaacggcacagacagcttttcaacagtctgattattgtgcttggaatctttgggcttcgattactgagcgtccactgttaccttttgcttatcaaccattaggagaaatgatggctctgggaatagataatgctacattatcaggattaggagttaacttggatggctcgttaggttatattgccagaagattagtttatttataccgtttaccaaccctaaaacatcaaatcaacgttggtattaattggatgactaaaccattaactgacttgttattataa

SEQ ID NO: 147596 - protein, 396 aa, Crocosphaera watsonii WH 8501
MSEQPLRICIVGGGFGGLYTALRLTQFTWEEDQTPEIILIDKSDRFLFTPLLYELITEEMQTWEIAPPYEELLADTPIRFHQGCVTGINIENKQLELDNHNSLHYDRLVLAMGGKTPLDNFSGVKDYAIPFRTLEDAYRIKERLRLLEDKKAEKIRIAVVGGGYSGVELACKFADRLGDTGRIRLVERGDKILSNSPEFNREVAENALESRRVFIDLETEVTQVSFDSVSLSYKGKIDSIPVDLVLWTVGTQVIEMVKELPLEKTSNGLLKITPELQAIEHPEIFAIGDLAAYYDESKEPIPATAQTAFQQSDYCAWNLWASITERPLLPFAYQPLGEMMALGIDNATLSGLGVNLDGSLGYIARRLVYLYRLPTLKHQINVGINWMTKPLTDLLL

SEQ ID NO: 147597 - DNA, 1239 bp, Crocosphaera watsonii WH 8501
  CDS (1)..(1239): transl_table=11
atgactagaacaatcgttgttggtggtggttttgtcggactttttaccgttttacatctttaccatcacaaatatccccaatccctgtttttcatagataataaagatcattttgtctttaaccctttgttatttgaactaatgacaggagaaatgacacctgatcaagtttgtcccctgtatcgggaactattaaaaggaagtcccattacttttttagaagatcaagtgactcagatcgatttactagaaaaaaaagtttatctagcttctgatatccactacgattatgataatttagttctcgcactaggaagaaaagccggattttttcgggttgaaggcgcacaggaatatgcttttccttttaaaacaaaagaagatgctgaaactttacgtcaacatttacagcaatgtttaaaaaaagcaagtcaaacggaggatgaaaccacccgtaaaactttattaacttttgctattgtgggaggggtacccactggaattgaaatggccggaacgttaggagatttattggcaaattggtatcaaaaactagatcaatctgctcaagaaatccgtattttaattattaatcgtccccaggaattgttacaaggagatattaatgttcatttacgagaagcggttagtcaagcttttgctaaatcttctatttctatcgaattaattttaggggcatctgtcactaaagttacccctgatagcgtaacctatgaacagaatgggcagactttaaccattgagactaacactaccatttggtctgctggaaccgctactaaccctctgattgaaaacttggctatctctcctgaaaaccgcaccaaaaatggctcattaaaggtcttacctaccttacaattacccgaatttcctgaagtgtttgcagccggggattgtactatgttatcttcagatcccctccctgctacggctcaagtagcctatcaacagggaaaagcgatcgcccataatctcaacgctatgatcaaaggacattctctcacccctgctcaagtaaaattgcggggatctatgatgaaattgggcattgagaaaagtgttgctaatatatttgatcgctttgaagtcacaggacattcaggacacctgattagagagggaacttatttacaattacttcccacccccatccatgattttaaggtgacaactaattggattgttgacgaaatttttcatcgtcacagtcaatag

SEQ ID NO: 147598 - protein, 412 aa, Crocosphaera watsonii WH 8501
MTRTIVVGGGFVGLFTVLHLYHHKYPQSLFFIDNKDHFVFNPLLFELMTGEMTPDQVCPLYRELLKGSPITFLEDQVTQIDLLEKKVYLASDIHYDYDNLVLALGRKAGFFRVEGAQEYAFPFKTKEDAETLRQHLQQCLKKASQTEDETTRKTLLTFAIVGGVPTGIEMAGTLGDLLANWYQKLDQSAQEIRILIINRPQELLQGDINVHLREAVSQAFAKSSISIELILGASVTKVTPDSVTYEQNGQTLTIETNTTIWSAGTATNPLIENLAISPENRTKNGSLKVLPTLQLPEFPEVFAAGDCTMLSSDPLPATAQVAYQQGKAIAHNLNAMIKGHSLTPAQVKLRGSMMKLGIEKSVANIFDRFEVTGHSGHLIREGTYLQLLPTPIHDFKVTTNWIVDEIFHRHSQ

SEQ ID NO: 147599 - DNA, 1179 bp, Prochlorococcus marinus str. MIT 9211
  CDS (1)..(1179): transl_table=11
atggctgtcaatttttctaattctgaacctgttgtattaataggaggcggatttgctggattaaccacggcattggctttaagtagggatagaccaagatgtccaattatcctggttgaaccacgaccgagatttgtttttataccacttctttatgaacttttaagtggtgaagttagattgtgggagattgcgccttctttaaggaatctgattgcaggcaagggaataattgttattcaagaatatgtcaagaaaatggatattgatagaaagctagttattacttcttctggcaaagcaattgactattcacaacttgtcattgcaactggatcaaaaccagattttttgggcattcctggggcttctgatcacgctttgatgtttaatcaaatagaagatgtgcaaatattgaaagatttaatttctagactaaaaaactgttcttcagagaaaaaatcattagtgattgttggtgcaggttctgccggagtggaacttgcttgtaaagttgcagatcttgtggagaatcaagtaaagattcacttgattgaatctgcagaaagagtattacccaagggacaatcttttaatcaggaacaagttgaacttgccttaaaaaaaaggagagtagaaattcatttgcaaacaagtgtcacagcagttacggcagatagcattcacttaaaaactatgaatgaacatgctttatcgagtattactcattcaggtttggtttggactgctggtgtgaagccagtactcccattggggatgcctcccgaaaacttgctgctagggcgaatttctattgactcttctttaagagttaatggatcacaagatatttttgctattggtgatattgcttttaacgcagataacccttggaaaccaactgcgcaagttgcaattcaacaaggagagactgctgctaagaacatagttgcgattcgtgaaagaagacctctagaaccttttctgtttagagatttaggagaaatgctcagtttggggattggagatgcaactattacaggattggggatgacaatgtctggtcctcttgcttttcaattaaggcgcatggcttatttgtctaagttgcctagactttctttagggattcgttctgctagtgcctggctgatacctgatgacaagaaatctttttaa

SEQ ID NO: 147600 - protein, 392 aa, Prochlorococcus marinus str. MIT 9211
MAVNFSNSEPVVLIGGGFAGLTTALALSRDRPRCPIILVEPRPRFVFIPLLYELLSGEVRLWEIAPSLRNLIAGKGIIVIQEYVKKMDIDRKLVITSSGKAIDYSQLVIATGSKPDFLGIPGASDHALMFNQIEDVQILKDLISRLKNCSSEKKSLVIVGAGSAGVELACKVADLVENQVKIHLIESAERVLPKGQSFNQEQVELALKKRRVEIHLQTSVTAVTADSIHLKTMNEHALSSITHSGLVWTAGVKPVLPLGMPPENLLLGRISIDSSLRVNGSQDIFAIGDIAFNADNPWKPTAQVAIQQGETAAKNIVAIRERRPLEPFLFRDLGEMLSLGIGDATITGLGMTMSGPLAFQLRRMAYLSKLPRLSLGIRSASAWLIPDDKKSF

SEQ ID NO: 147601 - DNA, 1140 bp, Synechococcus sp. RS9917
  CDS (1)..(1140): transl_table=11
atggaaaccgatgctgtggtgatcgtcggcggcggcttcggcggcctcagcacagccctggccctgagccagcaccagccccgcccgccgatcgtgctgatcgagccgaacgatcgcttcctgttcctgcccctgctctacgagctgctcagcaacgagctgcgcccctgggaagtggcccccagctacgacaccctgctgagaagccgtggcatcgcctggatccagagccgggccagccgcatcgacaccagctcacgcacggttcagacctcgaatggcgactgcctcagctacggacagctggtgctggccagcgggtcagaacccgacgacttcggcattcccggtgtcgaagaccatgccctgcggtttcacaccctccaggatgtgaccctgctgcgggagcggattcaagccctgaaccgtcagcagcaccgcaacgtggcgatcgtgggcgccggcgcagccggagtcgagctggcctgcaagctcgccgacctgctgcggggatcggccacggtgcatctgatcgaacgcggcgacacgatcctccccaacgcgaaagcgttcaaccgtgagcaggccagccgcgccctccagaagagaggagtcgagctccaccttcgccgctccgtccgttccgtcgacgccagcgtggtgcatctcgaccagggcagcctcggccacgatggcttgatctggacggccggcacccgtgcccgcctgccgtcgctgacgccgtcgctcccctgccgccagggccgactgctggtcaatgacgtgctctgcagcgtcgcctgtccatcgctgctggcgatcggtgatgtggccgtgcgtcagacggtggaggcggccgtcgacacctggccgcacaccgcccaggcagcactgcagcagggccaggctgcggcccgaaccgtgatggcgctccgcgccggatccgaaccgatgccgttccagttccgggatctgggcgaaatgctcagcctgggcgtgggcgaggccacgatcaccggcatgggcctcaccctggccggccccctcgccttccagctgcgccggctcatctatctggcccggctgccggatctgtcgcttggcctgcgctccgccggcgcctgggcactgggcggttga

SEQ ID NO: 147602 - protein, 379 aa, Synechococcus sp. RS9917
METDAVVIVGGGFGGLSTALALSQHQPRPPIVLIEPNDRFLFLPLLYELLSNELRPWEVAPSYDTLLRSRGIAWIQSRASRIDTSSRTVQTSNGDCLSYGQLVLASGSEPDDFGIPGVEDHALRFHTLQDVTLLRERIQALNRQQHRNVAIVGAGAAGVELACKLADLLRGSATVHLIERGDTILPNAKAFNREQASRALQKRGVELHLRRSVRSVDASVVHLDQGSLGHDGLIWTAGTRARLPSLTPSLPCRQGRLLVNDVLCSVACPSLLAIGDVAVRQTVEAAVDTWPHTAQAALQQGQAAARTVMALRAGSEPMPFQFRDLGEMLSLGVGEATITGMGLTLAGPLAFQLRRLIYLARLPDLSLGLRSAGAWALGG

SEQ ID NO: 147603 - DNA, 1242 bp, Synechococcus sp. WH 5701
  CDS (1)..(1242): transl_table=11
atggaggagcccagcaggagcccggccaacacgcccccacaggcgtccggccccatcaggccggtgctgattgccggcggcggcttcggcggtctgtacaccgccctggccctggcttcccagcgccatcacccgccgattctgctggtggagcctcagcagcggttcctgttcctgcccctgctttacgagctgctctcggaggaattgcgcggctgggaagtggccccccgctacgacaccctgctggccagccggggagtggcctggctgcaggaccggatcagccgcatcgatgccagcgccggctgtgtctacaccgagcagggtcggcagctggcctattcgcgcctggtgatcgccaccggcagccgcggcaccagctacggcattcccggggtggaggagttggccatccccttccgcagccttgccgacgtggagcatctgcaggagctggttcagcacctgcgcagccaccccaggcccctgcagcggctggcgctggtgggagccggaccgagcggggtggagctggcctgcaagctggccgatctgctccagggcagcaccgtgatcgaactgatcgagcagggcaccgatctgctgccccaggcccgggccttcaaccgcgagcaggcccgctcggcgctgctgcgccgcgacatccgcctgcgcacccacacccgggtgctggccctggagcctggccgtctggagttgagcctcacggcggggggggagggcagcagccgcgaaacactgccggtggatggcgtgatctggaccgctggggtgacggtggccccgcccccgatcgagcctgccgccagcctcgatgaccggggccgcctgctctgcgaatcgacccttgagctgaagcagacccccggagtgtttgcgatcggtgatgtggcccacgtcgctgatgccgatggggcgcccctggcggccacggcccaggtggccttccagcaggctgactgcctggcggagaacctgctgcgctcgctcgagggtgagtcgttgcagccgttccgttggaaggatctgggcgagatgatcagcctgggcatcggagaggccagcctcacaggcctgggcctgaccctggcgggacccgccgcctaccggatccgtcagctcacctacctctcaagacttccgggcctgccgcaccagctcagggtggcagcgggctggttgagcgatctcggccgccccctgaacgtgcctcgatga

SEQ ID NO: 147604 - protein, 413 aa, Synechococcus sp. WH 5701
MEEPSRSPANTPPQASGPIRPVLIAGGGFGGLYTALALASQRHHPPILLVEPQQRFLFLPLLYELLSEELRGWEVAPRYDTLLASRGVAWLQDRISRIDASAGCVYTEQGRQLAYSRLVIATGSRGTSYGIPGVEELAIPFRSLADVEHLQELVQHLRSHPRPLQRLALVGAGPSGVELACKLADLLQGSTVIELIEQGTDLLPQARAFNREQARSALLRRDIRLRTHTRVLALEPGRLELSLTAGGEGSSRETLPVDGVIWTAGVTVAPPPIEPAASLDDRGRLLCESTLELKQTPGVFAIGDVAHVADADGAPLAATAQVAFQQADCLAENLLRSLEGESLQPFRWKDLGEMISLGIGEASLTGLGLTLAGPAAYRIRQLTYLSRLPGLPHQLRVAAGWLSDLGRPLNVPR

SEQ ID NO: 147605 - DNA, 1176 bp, Synechococcus sp. WH 7805
  CDS (1)..(1176): transl_table=11
ttgcagccagtatccaacccgcaggaacggccgatcatcgtggtgggaggtggcttcgcaggattatcaaccttgctgacactcagcagagtgcatccccgcccgcccttggtcctgattgaaccaaaggcccaatttgtttttgttcccttgctctacgaactgctcagcggagagctgcaggcatgggaagtggctcccgactacgcaccattgattcagggacatggcatcagccatatcagagacatcgtcacctcagtcaatgttgaggatcacagcatcaccacagcagggggagaccatctggtttacagccagctcgtcctagccaccggagcagtccctgacgacttcgggatccctggtgttcgcgatcacgcgctgggattccactccctccgcgaccttgccccactgcaggaacgcctgaggcagcttcgtctgcgtccatccggcacgagctctgttgtgatcgtcggagccggggccacaggcgtggaactggcttgcaagctggtggacctgcttgaaggagcagcacaagttcatctcgtggatcaaggcgatcagatccttgcccgctcgcgggctttcaacagagagcaggcagagcgtgccctgaaacggcgaggtatcaacgtccatctgaagacacgcgttctcagcgtcaaaccggactccgtccgctggaacggcatcgaaggcgatgtcgagcagcctcacgacggtctgatctggactgccggcagcaagccgaacatccctgacctgcaaccttcagcagaattgcatcagaagcgactgcctgttgatcagaccctgcggctgcagggacagcctgacgtccttgccctcggggacatcgccacccatgcccccacagatgaaggccaaactccatggcccctgtcggcccaagccgccattcagcagggccaggcagcagcacgcactctcgaagctcatctcaaaggcggcacaccttcacctttcatttttcaggatctcggtgaaatgctcagtcttgggatcagtgatgccacgatcacggggatgggcatgaccttggctggccctctcgccttcaagattcggcgattggcctatctcactcgcctgccaggactatcccttggactgcgctctgcaggggcctggttgctcggttcttga

SEQ ID NO: 147606 - protein, 391 aa, Synechococcus sp. WH 7805
MQPVSNPQERPIIVVGGGFAGLSTLLTLSRVHPRPPLVLIEPKAQFVFVPLLYELLSGELQAWEVAPDYAPLIQGHGISHIRDIVTSVNVEDHSITTAGGDHLVYSQLVLATGAVPDDFGIPGVRDHALGFHSLRDLAPLQERLRQLRLRPSGTSSVVIVGAGATGVELACKLVDLLEGAAQVHLVDQGDQILARSRAFNREQAERALKRRGINVHLKTRVLSVKPDSVRWNGIEGDVEQPHDGLIWTAGSKPNIPDLQPSAELHQKRLPVDQTLRLQGQPDVLALGDIATHAPTDEGQTPWPLSAQAAIQQGQAAARTLEAHLKGGTPSPFIFQDLGEMLSLGISDATITGMGMTLAGPLAFKIRRLAYLTRLPGLSLGLRSAGAWLLGS

SEQ ID NO: 147607 - DNA, 1203 bp, Synechococcus sp. RS9916
  CDS (1)..(1203): transl_table=11
atgacctcccgatccactggctttgagggggagacagcacggcccgtggtgatcgtcggcggaggctttgcaggcctcacggttgccctcaggctgagccggcagaggccaagacctggagtggttttggtggaacccaggaaacagttcgccttcctgccgctgctctacgaactcctcagcggtgaaatgcagccttgggaagtcgtgcccagctacgacaccctcctcaacagctccggcatcgctgtcattcacgaccgcgtcagtgccgtgaattggaaagacaaagaggtgcagaccgcctccggccaacgactcgcctacgagcagctcgtgcttgccacgggctcgcaacccaatgatttcggagtaccaggggtcaaggagcatgccctgcaattccattcccctgacgatgtaacagcgctgcggcagcgcatcaaagacctgcaacgccagggaggtgctgtggaaggggcagtgcccgcgctggtgatcgtcggggcgggtgccgccggcgtagagctggcctgcaagctggccgacctcaccgaagggcgcatcagtgtgcacctgatcgaacagggcgatcgcatccttcccatggccaaggccttcaaccgcgaacaagcggaggcctacctggcgcaacaaggcgtgcactgccacctgaacacccgcgtggagtccgtcacgcccaacgacgtcagtcttcgcgatggcgatcaatccaccgtgctcccccatcagggattgatctggacagcgggcaacaaaccaagacggccccagctgatccccgagatcacagccagcaacgggcgactggcagtggatgaggcgctccgcagccaggatttacccgattgtctggtgctgggggatctggccatgcgtgctcaggcggatggtgcggaaagaagcccatggccttgcacagcccaggtggcgatgcagcaaggagaagccgcggccaacaccttgatcgcccttcaaaaggggacacaacccgagccatttgcctacaacgacctcggcgaaatgctcagcctggggatcggcaaagccaccctcaccggcatggggatcaccctcgccggcccgctggccttcaagttgcggcgtctcacgtacctcgcccggttcccaaggctttcactgggcttgcgatccgctggagcctggctgctgagccgttga

SEQ ID NO: 147608 - protein, 400 aa, Synechococcus sp. RS9916
MTSRSTGFEGETARPVVIVGGGFAGLTVALRLSRQRPRPGVVLVEPRKQFAFLPLLYELLSGEMQPWEVVPSYDTLLNSSGIAVIHDRVSAVNWKDKEVQTASGQRLAYEQLVLATGSQPNDFGVPGVKEHALQFHSPDDVTALRQRIKDLQRQGGAVEGAVPALVIVGAGAAGVELACKLADLTEGRISVHLIEQGDRILPMAKAFNREQAEAYLAQQGVHCHLNTRVESVTPNDVSLRDGDQSTVLPHQGLIWTAGNKPRRPQLIPEITASNGRLAVDEALRSQDLPDCLVLGDLAMRAQADGAERSPWPCTAQVAMQQGEAAANTLIALQKGTQPEPFAYNDLGEMLSLGIGKATLTGMGITLAGPLAFKLRRLTYLARFPRLSLGLRSAGAWLLSR

SEQ ID NO: 147609 - DNA, 1683 bp, Aspergillus niger
  CDS (1)..(1683)
atgaggctaccgggctacctcgtcgcttgcaagcgtccatcctctctcctcatctccgtctcccgctcaaccataaagcccataaccatcaccagaactttcgcaacacagatcagccactcaaccgcattccgtgaagagcatgataaagaacgcgttgtcattctcggctccggctggggcggctacaacctctctcgcaagctctccccgaacaaatacaaccccatcatcatctcccctcgatcatacttcgtcttcactcctctcctcaccgatgccgccggcggctccctagacttctcccatatcgtcgaacccatccgcgacccctcctccaaagttgacttcatccaagccgccgcgcgatccgtcaacttcgccgacaaaaccatcacctgcgaagccaccgtcgtgaagagcggcgtgaccgaaaccccgcgaaccagcgaggacgaggaattccaactcaatgctacccaatccacaagccaaaagcctacctgggaaaccggcgaaacattcaccatcccctacgacaagctcgtcatctccgtcggcactgtctccaagaccttcagaacccccggcgtgcgcgaaaacgccctcttcttcaaagacatcggagacgcgcgcaaagtccgtcgccgagtccgagaatgcttcgaactcgccgtcctgcccaccacctccccagagctccgctcttacctcctccacttcgccatagtcggcgccggcccaacaggcaccgaactcgccgcctcattacgcgacttcatcgtaaaggaccttgttgccctctacccagccctcaaaggcatccctagaatcagcctctacgacatcgctcccaaagtcctctccatgttcgacgagaaactctcccaatacgccatggacaccatgcaaaaggaaggcatcgagatcaaaccctcccatcacgtccaaagcctccgatggggcgagcccggcgctgaaccaccctacgagatggaccctaagcgctgcctcaccctaaccacagaagaagaaggcgaagtcggcgtcggcatgtgcgtctgggctacaggaaacgcaatgaacaaattcgtccgcgatgccctaacaaccgtcgacgagtatccctccaaatctgctcacttgatatccccatcctcctccactacaactgacccccaaccaaccaccaccaatacaacctggcacgtcaaaaaagcccccaaagtcggtgccctcctcgtcgacggccacctccgcgtccaactcgaatcatccgacgaatcgaatccccagacagcaatcctccaagacgtctacgccctcggcgacaatgctatgcccgaaaccggcgctcccccggcaaccgcgcaagcgacatttcaagaagcgaagtggctagcgacgcgtctgaacaaagatgactttgcgacggcaccgcccttctcgttccggaatatggggacgttggcgtatatcggagatgcgaaggcgttgatgcagatcccgcatgataagggtgatggtgggcggtacttgccagaggggttgacgggccggatggcgtggctggtgtggaattcggcgtatttgaccatgagtattagttggaggaataagttgagagtggggtttaggtggttcttgaatcagatttttgggagggatgtttcgaggtattag

SEQ ID NO: 147610 - protein, 560 aa, Aspergillus niger
MRLPGYLVACKRPSSLLISVSRSTIKPITITRTFATQISHSTAFREEHDKERVVILGSGWGGYNLSRKLSPNKYNPIIISPRSYFVFTPLLTDAAGGSLDFSHIVEPIRDPSSKVDFIQAAARSVNFADKTITCEATVVKSGVTETPRTSEDEEFQLNATQSTSQKPTWETGETFTIPYDKLVISVGTVSKTFRTPGVRENALFFKDIGDARKVRRRVRECFELAVLPTTSPELRSYLLHFAIVGAGPTGTELAASLRDFIVKDLVALYPALKGIPRISLYDIAPKVLSMFDEKLSQYAMDTMQKEGIEIKPSHHVQSLRWGEPGAEPPYEMDPKRCLTLTTEEEGEVGVGMCVWATGNAMNKFVRDALTTVDEYPSKSAHLISPSSSTTTDPQPTTTNTTWHVKKAPKVGALLVDGHLRVQLESSDESNPQTAILQDVYALGDNAMPETGAPPATAQATFQEAKWLATRLNKDDFATAPPFSFRNMGTLAYIGDAKALMQIPHDKGDGGRYLPEGLTGRMAWLVWNSAYLTMSISWRNKLRVGFRWFLNQIFGRDVSRY

SEQ ID NO: 147611 - DNA, 1437 bp, Arabidopsis thaliana
  CDS (1)..(1437)
atggctgttttagatcttatgttctgttctaattattatttcttgtttcatagtggtgggggacttatagtttactctgaggcaaatccatcatatagcaacaatggtgttgaaactaaaaccaggaagagaaaagtagtgctgctcggaactggatgggctggagcaagttttttgaagactttgaataactcttcttatgaggttcaggttatatctcctcgaaactactttgctttcactcccttgttacctagtgttacttgtggaactgttgaagctcgcagcgttgttgaacctattcgcaacattgcaagaaagcagaatgttgagatgtctttcttggaggcagaatgtttcaaaattgatccaggaagcaagaaagtttactgccgatcaaaacaaggcgtgaattcgaaagggaagaaagagtttgatgttgactatgactaccttgtaatcgctactggagctcagtctaacacatttaacattcctggcgtggaggagaactgtcatttcctcaaagaggttgaagatgcacagagaattcgtagtactgtcattgattcatttgagaaggcaagtttacctggactaaacgaacaagagagaaagagaatgctacattttgtagttgttggtggtggaccaacaggtgttgagtttgcttctgagcttcatgattttgttaacgaggatctagtcaaactatatcctaaagccaaaaacttagtgcagatcactcttctagaggctgcagaccacatcttgaccatgtttgacaagagaatcacagagtttgctgaagaaaaatttactagagatggtattgatgtgaaattaggttctatggtggtcaaagtgaatgataaggaaatttctgcaaaaaccaaagcaggagaggtctcaactattccttatggaatgattgtttggtcaactggtattgggactcgtcctgtgatcaaagattttatgaaacaaattggtcaggtgagtagccaaagacgtgctttagcaaccgatgaatggcttcgtgttgaaggatgtgataatatatatgcacttggtgattgtgcaacaatcaaccagagaaaagtcatggtcgctgctcaacaagggacttaccttgcaaaatgctttgatcgtatggaagtatgcgagaagaatcctgaaggtcccattaggattagaggagaaggtcgtcaccgcttccgtcccttcaggtatagacatttgggacaatttgctccattaggaggcgaacaaaccgcggcgcaacttccaggagactgggtttcgataggacacagcagtcaatggctgtggtactccgtttacgctagtaagcaagtgagctggcgaacgagagtcctggtggtctcagactggatgagacgattcatcttcgggagggattcaagtcgcatttga

SEQ ID NO: 147612 - protein, 478 aa, Arabidopsis thaliana
MAVLDLMFCSNYYFLFHSGGGLIVYSEANPSYSNNGVETKTRKRKVVLLGTGWAGASFLKTLNNSSYEVQVISPRNYFAFTPLLPSVTCGTVEARSVVEPIRNIARKQNVEMSFLEAECFKIDPGSKKVYCRSKQGVNSKGKKEFDVDYDYLVIATGAQSNTFNIPGVEENCHFLKEVEDAQRIRSTVIDSFEKASLPGLNEQERKRMLHFVVVGGGPTGVEFASELHDFVNEDLVKLYPKAKNLVQITLLEAADHILTMFDKRITEFAEEKFTRDGIDVKLGSMVVKVNDKEISAKTKAGEVSTIPYGMIVWSTGIGTRPVIKDFMKQIGQVSSQRRALATDEWLRVEGCDNIYALGDCATINQRKVMVAAQQGTYLAKCFDRMEVCEKNPEGPIRIRGEGRHRFRPFRYRHLGQFAPLGGEQTAAQLPGDWVSIGHSSQWLWYSVYASKQVSWRTRVLVVSDWMRRFIFGRDSSRI

SEQ ID NO: 147613 - DNA, 1680 bp, Aspergillus oryzae
  CDS (1)..(1680)
atgaggtcggtgtttgtgaatagtcccgtccgtctcggacggatatcaaggcctttgctatcaagtacataccccgtgagtcagtcgagctttgtacagtgtaaaagatgtctggctacgcaggctgatcattcggctgcaattcctgaatccgacagggggaaggaaagagtggtcatacttggatccggttggggagggtataccctctcccgaaaactgtcgtcaaagtcgttttcgccagtcatcatatcccctcgttcatactttgtcttcacacctctcctgactgacgctgctggcgggtcgttggatttctcaaacatcgtggagccagttcgggatcctcacgctaaagtcgatttcatccaggccgctgcacgggctgtcaacctggaaaagaagactgttctctgtgagtcaaccgtggtcacgagtggcgttacagagacgccgcggacccacgagaatgaaagagagtccgaagaaggcccggatacgacctcaatgaggcccatgcaagaggcgcgcaaatgggagaagggggattttttcgaggttccctatgacaaattagtcatcgccgttggtgcagtcagcaaaactttcaacacccctggagtgaggcataatgccatgttcttcaaggatattggtgacgcgcgacgcgtgagacgtcgggtacgagaatgctttgaattggcggtgctaccgaccacgactccggagatgcggaaatggctgctacatttcgctattgttggtgctggaccgacaggaactgagctagcggcatcgcttcgtgacttcatttacaaggatatgacgatactatatccagccctgaaagatctcccccgtattaccctttacgatgtagcaccgaaggtgctatctatgttcgacgagtccctatcaaagtacgccatggagaccatgaagaaagagggtatcgacatcaagacctcgcaccacgtagaaggactacgctggggcgagccaggggccgaacctccttacgaaatggaccctaaacgctgccttacaatcactaccaaagaagaaggcgaagtaggcatcgggatgtgcgtctgggtaaccggaaacgcaatgaacaagttcgtgaataaagctctccaagatgtggaaacattccccaccgcatcaaccctgctgaaagacggcacccacccgcccccagaactcacaaaagacacaacatggcacatcaaaaaggcaccaaaagtgggtgccctcctcgtcgacggacaactccgcgtccagctcgaaaacgccgacggcaaaatcgccgtttatcaggacgtcttcgctctcggtgacaacgccatgccggaaaccggtgcgccgcccgcgacagcgcaggcgacgacccaggaagcgaagtggcttgctaccaggctgaacaagggcgatcttcaaacatcccaaccgttctctttccataatatgggcaccctggcgtatattggagatgccaatgcgttgatgcagttccctaccgaggatgataaaccgcctaagtatttgacgggacggatggcgtggtttgtgtggaattcggcatatttgaccatgagtatgagttggaggaataagttgcggattgcgtttcggtggctattgaataatatctttgggagggacgtgtcgaggtattag

SEQ ID NO: 147614 - protein, 559 aa, Aspergillus oryzae
MRSVFVNSPVRLGRISRPLLSSTYPVSQSSFVQCKRCLATQADHSAAIPESDRGKERVVILGSGWGGYTLSRKLSSKSFSPVIISPRSYFVFTPLLTDAAGGSLDFSNIVEPVRDPHAKVDFIQAAARAVNLEKKTVLCESTVVTSGVTETPRTHENERESEEGPDTTSMRPMQEARKWEKGDFFEVPYDKLVIAVGAVSKTFNTPGVRHNAMFFKDIGDARRVRRRVRECFELAVLPTTTPEMRKWLLHFAIVGAGPTGTELAASLRDFIYKDMTILYPALKDLPRITLYDVAPKVLSMFDESLSKYAMETMKKEGIDIKTSHHVEGLRWGEPGAEPPYEMDPKRCLTITTKEEGEVGIGMCVWVTGNAMNKFVNKALQDVETFPTASTLLKDGTHPPPELTKDTTWHIKKAPKVGALLVDGQLRVQLENADGKIAVYQDVFALGDNAMPETGAPPATAQATTQEAKWLATRLNKGDLQTSQPFSFHNMGTLAYIGDANALMQFPTEDDKPPKYLTGRMAWFVWNSAYLTMSMSWRNKLRIAFRWLLNNIFGRDVSRY

SEQ ID NO: 147615 - DNA, 1188 bp, Thermus thermophilus
  CDS (1)..(1188): transl_table=11
atgggcggggcttggccagaggtggtaatcctgggcggaggctttgcggggcttgccgccgcccgggttctggaaagggcgcggattccctacctcttggtggacgcccgaaaccaccacctgttccagccgctcctctaccaggtggccacgggctttctggaggggccggccatcgcctaccccctgcgggccctggtgcggcgggggcgggtgcttctcgcccgggcgcgggcggtggacctcgagggccgaaggctcctcctggaggacggggatgttcttccctaccgccacctcgtcgtggccaccggaagcctcccgagcgatctaggggtgccgggggtgggggagcgagccctcctgctcaagaccctaggccaggcccttagggtgcggcaccgcctcctcatggcgctggagcgggccgcccgagagggggcccccttgagcctggtggtggtgggcggggggcctaccggggtggagctctccggagctttagccgagttcctgcgctacgccctgccccgggacttccccgagattcccgaagcccgggtggtccttctggaggcggggcccaggctccttcccgccttccgccccgccctttcccgttacgccgagcgggccctcgcgcacctgggggtggaggtccgccttggggcccaagtggcggcggtggaggaaaggggggtgcggttggcctcgggcgaagggcttgtggggtacctcattctctgggcggtgggcgtgaggggcaaccccttgccggggcttcccgcggacccccggggccgggtgcccacggacccctatctacgcctccccggccaccccgaggtctacgtggagggcgacctcaacgggctcggctttcctcagcttgcccccgtggccctgcagcagggggcctgggcggcgggtaacctcctcagggccctaaggggccaggaccccctgcccttccgctaccgcgaccggggccagcttgcggtgatcggccggaaccgggcggtggccgagctttggggccggggcttcgctgggtttcccgcctggctcctctgggccttcgtgcaccttagagagctcgtgggcttccgcaaccgcctcttggtctttttggactgggcctacacctacctcttccgcgagcccggggtgcgggtcctgcccgactag

SEQ ID NO: 147616 - protein, 395 aa, Thermus thermophilus
MGGAWPEVVILGGGFAGLAAARVLERARIPYLLVDARNHHLFQPLLYQVATGFLEGPAIAYPLRALVRRGRVLLARARAVDLEGRRLLLEDGDVLPYRHLVVATGSLPSDLGVPGVGERALLLKTLGQALRVRHRLLMALERAAREGAPLSLVVVGGGPTGVELSGALAEFLRYALPRDFPEIPEARVVLLEAGPRLLPAFRPALSRYAERALAHLGVEVRLGAQVAAVEERGVRLASGEGLVGYLILWAVGVRGNPLPGLPADPRGRVPTDPYLRLPGHPEVYVEGDLNGLGFPQLAPVALQQGAWAAGNLLRALRGQDPLPFRYRDRGQLAVIGRNRAVAELWGRGFAGFPAWLLWAFVHLRELVGFRNRLLVFLDWAYTYLFREPGVRVLPD

SEQ ID NO: 147617 - DNA, 1804 bp, Arabidopsis thaliana
  CDS (101)..(1756)
gtagagagcgtggaacccaaaacatccataagaaacgagacgcctcaaaaaatatcacttccatctccggcaaacattccggcgatatataaagtcagcaatggccgttctctcctctgtatcttctctcatacccttctcttatggggcaacgagactgactagtaaagcttcattagcctcaagaacttccggattcaatctctcttctcgttggaactcaacgagaaactcccctatgttgtatctttcgagagcagtgacaaacaacagtggcaccacagagatttctgataatgaaacagctccaaggacttactcatggcctgataacaagaggccaagggtgtgcattctaggtggtggctttggaggattgtacacagctttgagattagaatctcttgtttggcctgaagacaaaaagcctcaggtggttttggttgaccaatccgaacgttttgtgttcaagcccatgttgtatgaactactctctggagaagttgatgtgtgggagattgctccccgtttctcggatttgcttacaaacacggggatccaatttctccgagatagagtgaaaacattgcttccttgtgaccatttaggagttaatgggtctgagatttctgttactggaggaaccgtcttgctcgaaagcggttttaaaatcgaatacgattggttggttcttgctcttggcgctgaatctaaactcgatgttgttcccggtgcaatggagttggctttcccattctacactcttgaagatgccattagggttaacgaaaagctgagtaaattggagaggaagaattttaaagacggatctgccataaaagtagctgttgttggctgcggttatgcaggagtagagttggctgctaccatatcagagagactgcaagatcgtggaatagtgcagtccattaacgtatcaaagaatatactaacatcagcccctgatgggaacagagaagcggctatgaaggtccttacgtcgagaaaagtccaattactcttaggttatcttgttcaatccataaagagagcaagcaacctagaagaagatgaaggatattttttagagcttcaacctgcagaaagaggattagagagtcaaattattgaagcggatatagtgttatggacagttggtgctaagcctttgcttactaaattagaaccctcgggtcccaatgtccttcctttgaatgctagaggacaagcggaaacagacgagacactccgtgttaaaggacatccacggatatttgcattaggtgattcgtcttctctaagagactcacacggaaagattcttcctacaacagctcaggttgcttttcaagaagcagactttactggctggaatatatgggcagctataaataaccgacctttattaccattcaggtttcagaacctaggtgagatgatgactcttggaagatatgatgctgctatatcgccaagtttcattgaagggcttacacttgaaggtccaattggtcacgcagcgagaaaactggcgtatttgattagactaccaactgatgaacaccggtttaaggtcggaatcagttggtttgctaaatctgctgttgattcaattgctttacttcagagcaatctaaccaaggttttgtctggttcttggtctctgtttgttttgctctggagattaattcgcttccgtatgaaagacaaatggggagtgtcactttgtatcctttattggaatatcattgtataaaattgactctctgagacacaaaggtcatatcaaggataaggaagctgg

SEQ ID NO: 147618 - protein, 551 aa, Arabidopsis thaliana
MAVLSSVSSLIPFSYGATRLTSKASLASRTSGFNLSSRWNSTRNSPMLYLSRAVTNNSGTTEISDNETAPRTYSWPDNKRPRVCILGGGFGGLYTALRLESLVWPEDKKPQVVLVDQSERFVFKPMLYELLSGEVDVWEIAPRFSDLLTNTGIQFLRDRVKTLLPCDHLGVNGSEISVTGGTVLLESGFKIEYDWLVLALGAESKLDVVPGAMELAFPFYTLEDAIRVNEKLSKLERKNFKDGSAIKVAVVGCGYAGVELAATISERLQDRGIVQSINVSKNILTSAPDGNREAAMKVLTSRKVQLLLGYLVQSIKRASNLEEDEGYFLELQPAERGLESQIIEADIVLWTVGAKPLLTKLEPSGPNVLPLNARGQAETDETLRVKGHPRIFALGDSSSLRDSHGKILPTTAQVAFQEADFTGWNIWAAINNRPLLPFRFQNLGEMMTLGRYDAAISPSFIEGLTLEGPIGHAARKLAYLIRLPTDEHRFKVGISWFAKSAVDSIALLQSNLTKVLSGSWSLFVLLWRLIRFRMKDKWGVSLCILYWNIIV

SEQ ID NO: 147619 - DNA, 1533 bp, Arabidopsis thaliana
  CDS (1)..(1533)
  misc_feature (426)..(426): m is a or c
atgttgtggatcaaaaacctagcaagaatctcgcagaccacttcttcgtctgtcggaaacgtgttcagaaaccccgaatcctacactctctcgtcccgtttctgcaccgctctgcaaaagcaacaagtaaccgacacggttcaagcaaaggaggatgtagttaatgcgttggagccacaacgttacgacggtttggctccgacgaaagagggagagaagccgagagttttggttctcgggtcgggttgggcgggttgtcgggtattaaaagggatcgatactagtatttacgacgtcgtttgtgtctctcctaggaaccacatggtcttcactcctctcttggcttctacttgcgttggtacgcttgagtttaggtctgttgctgaaccaatctctcgtatccaaccggcgatttcacgagaaccmggttcttattacttccttgctaattgctccaaacttgatgctgataatcatgaggtgcattgtgagactgtaactgaggggtctagcacattgaagccatggaagttcaagatagcttatgacaaactggtactagcttgtggtgcagaagcatccacatttggaattaatggcgtcttagaaaacgccattttcctccgtgaggttcaccacgctcaggagatccgtaggaagcttcttcttaacctcatgctctctgaagttccaggcataggtgaagatgagaagaagaggctgttgcattgcgttgtggttggaggtgggccaactggtgttgagtttagtggtgaattgagtgatttcatcatgaaagatgttcgtcagagatattctcatgtgaaagacgacattcgtgttactctgattgaggcaagggatatactttcttcttttgacgatcggctaaggcactatgcaatcaagcagttaaacaagtctggagtgaagcttgtgcgtgggattgtgaaagaagtgaagcctcagaagctaatccttgatgatggcactgaagttccttacggtctcttagtctggtcaactggtgttggtccatcttcatttgtgaggtctcttgattttcctaaagatccaggtggaaggattggtattgatgagtggatgcgtgtaccttctgtacaagacgtgtttgcaattggtgactgtagcggttatctcgagagcacagggaaatcaacacttcctgcacttgcacaggtggctgagagagaaggcaaatacttgacgaatctgtttaacgtgatgggaaaagctggaggaggacgggccaatagcgcaaaggaaatggagcttggggaaccatttgtgtataaacatctcggaagtatggctactattgggagatacaaagctctcgttgatctccgtgagagcaaggaagggaaaggaatatcaatggcaggttttctgagctggttcatatggaggtctgcttatctgactcgagtcgtcagctggagaaaccgtttctacgttgctatcaattggctcactacctttgtctttggtcgggacattagccgaatctga

SEQ ID NO: 147620 - protein, 510 aa, Arabidopsis thaliana
MLWIKNLARISQTTSSSVGNVFRNPESYTLSSRFCTALQKQQVTDTVQAKEDVVNALEPQRYDGLAPTKEGEKPRVLVLGSGWAGCRVLKGIDTSIYDVVCVSPRNHMVFTPLLASTCVGTLEFRSVAEPISRIQPAISREPGSYYFLANCSKLDADNHEVHCETVTEGSSTLKPWKFKIAYDKLVLACGAEASTFGINGVLENAIFLREVHHAQEIRRKLLLNLMLSEVPGIGEDEKKRLLHCVVVGGGPTGVEFSGELSDFIMKDVRQRYSHVKDDIRVTLIEARDILSSFDDRLRHYAIKQLNKSGVKLVRGIVKEVKPQKLILDDGTEVPYGLLVWSTGVGPSSFVRSLDFPKDPGGRIGIDEWMRVPSVQDVFAIGDCSGYLESTGKSTLPALAQVAEREGKYLTNLFNVMGKAGGGRANSAKEMELGEPFVYKHLGSMATIGRYKALVDLRESKEGKGISMAGFLSWFIWRSAYLTRVVSWRNRFYVAINWLTTFVFGRDISRI

SEQ ID NO: 147621 - DNA, 1542 bp, Arabidopsis thaliana
  CDS (1)..(1542)
atggccgttctctcctctgtatcttctctcatacccttctcttatggggcaacgagactgactagtaaagcttcattagcctcaagaacttccggattcaatctctcttctcgttggaactcaacgagaaactcccctatgttgtatctttcgagagcagtgacaaacaacagtggcaccacagagatttctgataatgaaacagctccaaggacttactcatggcctgataacaagaggccaagggtgtgcattctaggtggtggctttggaggattgtacacagctttgagattagaatctcttgtttggcctgaagacaaaaagcctcaggtggttttggttgaccaatccgaacgttttgtgttcaagcccatgttgtatgaactactctctggagaagttgatgtgtgggagattgctccccgtttctcggatttgcttacaaacacggggatccaatttctccgagatagagtgaaaacattgcttccttgtgaccatttaggagttaatgggtctgagatttctgttactggaggaaccgtcttgctcgaaagcgccaggttggttcttgctcttggcgctgaatctaaactcgatgttgttcccggtgcaatggagttggctttcccattctacactcttgaagatgccattagggttaacgaaaagctgagtaaattggagaggaagaattttaaagacggatctgccataaaagtagctgttgttggctgcggttatgcaggagtagagttggctgctaccatatcagagagactgcaagatcgtggaatagtgcagtccattaacgtatcaaagaatatactaacatcagcccctgatgggaacagagaagcggctatgaaggtccttacgtcgagaaaagtccaattactcttaggttatcttgttcaatccataaagagagcaagcaacctagaagaagatgaaggatattttttagagcttcaacctgcagaaagaggattagagagtcaaattattgaagcggatatagtgttatggacagttggtgctaagcctttgcttactaaattagaaccctcgggtcccaatgtccttcctttgaatgctagaggacaagcggaaacagacgagacactccgtgttaaaggacatccacggatatttgcattaggtgattcgtcttctctaagagactcaaacggaaagattcttcctacaacagctcaggttgcttttcaagaagcagactttactggctggaatatatgggcagctataaataaccgacctttattaccattcaggtttcagaacctaggtgagatgatgactcttggaagatatgatgctgctatatcgccaagtttcattgaagggcttacacttgaaggtccaattggtcacgcagcgagaaaactggcgtatttgattagactaccaactgatcaacacctgtttatggtcagaatcagttgcttagctaaatctgctgttgattcaattgctttacttcagagcaatctaaccaaggttttgtctggttcttga

SEQ ID NO: 147622 - protein, 513 aa, Arabidopsis thaliana
MAVLSSVSSLIPFSYGATRLTSKASLASRTSGFNLSSRWNSTRNSPMLYLSRAVTNNSGTTEISDNETAPRTYSWPDNKRPRVCILGGGFGGLYTALRLESLVWPEDKKPQVVLVDQSERFVFKPMLYELLSGEVDVWEIAPRFSDLLTNTGIQFLRDRVKTLLPCDHLGVNGSEISVTGGTVLLESARLVLALGAESKLDVVPGAMELAFPFYTLEDAIRVNEKLSKLERKNFKDGSAIKVAVVGCGYAGVELAATISERLQDRGIVQSINVSKNILTSAPDGNREAAMKVLTSRKVQLLLGYLVQSIKRASNLEEDEGYFLELQPAERGLESQIIEADIVLWTVGAKPLLTKLEPSGPNVLPLNARGQAETDETLRVKGHPRIFALGDSSSLRDSNGKILPTTAQVAFQEADFTGWNIWAAINNRPLLPFRFQNLGEMMTLGRYDAAISPSFIEGLTLEGPIGHAARKLAYLIRLPTDQHLFMVRISCLAKSAVDSIALLQSNLTKVLSGS

SEQ ID NO: 147623 - DNA, 1488 bp, Solanum tuberosum
  CDS (1)..(1488)
atgccatggttcaagaatctcatcaaaatctccaaaacaattacaaaccaatcatcatcttacaaatctataactccattagcctcacctttacttactcaatttctacaattcactaaacaatactctactaatgatcatgttgttggtttggaagcaacaaaaagtgaccaaaagccaagaattgttgtgttaggttctggatgggcaggatgtaggctaatgaaagacattgacacaaatatttatgatgttgtgtgtgtgtcacctaggaatcatatggtgttcactccattattagcatctacttgtgttggtactcttgagtttaggtctgttgctgaacctattggaaggattcaacctgctgtttcaacacaaccagcttcttatttctttcttgctaattgcaatgccattgattttgataatcatatgatagaatgcgaaacagtgacagagggagttgaaaccttggaggcatggaagtttaatgtttcatatgacaagttagtgattgcatctggagcacatgctttgacatttggaattaagggtgtaaacgagcacgctacatttcttcgtgaagttcatcatgctcaggaaatacggaggaaactacttctaaatctcatgttgtctgatgtgcctggagttagtgaggaagaaaagcgtagactcttacactgtgttgtagttggaggtggtccgacaggagttgagttcagtggcgaacttagtgattttatcctcaaggatgttcatcaaagatatgctcatgtcaaagactacattcacgtcacattgattgaggcaaatgagatattatcctcctttgatgatcgtttacgtgtatatgcaaccaaccagttgactaagtcaggagttcgtcttgtacgaggccttgtccaacatgtccaaccggataacataatacttagcgatggcacaaacgttccctatggtctgttagtgtggtctactggtgttggcccttcaccttttgtcaactcacttgatataccaaaagctaaagggaggattggaattgatgaatggttacgcgtcccatcggtacaagatgtatactcaattggtgattgcagtggttttcttgaaagtacaggcagacaagttcttccagctcttgcccaagttgcagagaggcagggaaaatatttggcaagtttgttgaacaaggtgggtaaacaaggtggagggcatgccaattgtgcacaaaacataaacttgggagatccatttgtctacaaacatttgggaagcatggctactattggaagatacaaggcccttgttgaccttagagagagcaaggaagcaaaaggtgtatctctagcaggattcacaagtttttttgtttggcgttcagcatatttgactcgtgtagtgagctggaggaacaaaatttatgttctaattaattggttgacaaccttagtatttggtcgtgatataagtaggatatag

SEQ ID NO: 147624 - protein, 495 aa, Solanum tuberosum
MPWFKNLIKISKTITNQSSSYKSITPLASPLLTQFLQFTKQYSTNDHVVGLEATKSDQKPRIVVLGSGWAGCRLMKDIDTNIYDVVCVSPRNHMVFTPLLASTCVGTLEFRSVAEPIGRIQPAVSTQPASYFFLANCNAIDFDNHMIECETVTEGVETLEAWKFNVSYDKLVIASGAHALTFGIKGVNEHATFLREVHHAQEIRRKLLLNLMLSDVPGVSEEEKRRLLHCVVVGGGPTGVEFSGELSDFILKDVHQRYAHVKDYIHVTLIEANEILSSFDDRLRVYATNQLTKSGVRLVRGLVQHVQPDNIILSDGTNVPYGLLVWSTGVGPSPFVNSLDIPKAKGRIGIDEWLRVPSVQDVYSIGDCSGFLESTGRQVLPALAQVAERQGKYLASLLNKVGKQGGGHANCAQNINLGDPFVYKHLGSMATIGRYKALVDLRESKEAKGVSLAGFTSFFVWRSAYLTRVVSWRNKIYVLINWLTTLVFGRDISRI

SEQ ID NO: 147625 - DNA, 3002 bp, Saccharomyces cerevisiae
  CDS (977)..(2614)
gatcttcactctgtacacgctatatactaaataacaataagaaaaagaaaaagaagcacaatataggaaagcgttctaattaactaaagaaaaaaaaaaaataaaaaaaaaataaaaaaaaggtaactaaaaaggacaaaaaacataacagctgtttataaagtactttatacgtaagaaactactggcactattcattccaataaaaggacaggtataaagtgtctgcttatcttctcgtcttttcggcttttaacttctcaagcttttcagcctctcttctagcatctgcggcggcctgcttttgtctcaagatttcggcgtctgactccattcttttcttaggatcaccactctttttctggttcttagccatgtccttttgttttttcaagtttttttgtcttgccaagtctctttgattacctctagccattgttaaagatgtatcgtcttgcgacgtaatttgttgctctgtgtagtattgatcttgttggtattgctagaaatgcttcagcaatactgtataaaatatggaaacgttgccatggcaagacaaaagaagtgatcttgagtgaaataatagagcccggatggccgggtaaattcaaccgctcgtaccgtttataatacgcataaacgccgaaaatgtctctattttagtcattccccagagtgcggtattgcgtacacctgtcatgcgttccttagtgccgatagatatactaatatcgatgcgtcacagtagcagatcatctctgacacttgtttccccatttttttttttcattttttaaagggtttctctacagcctacaggcctcccctaataagtcagcccctccctttggagtgcgctgttgacctgcgtatataagaggtatatcagtgccagtaggtaaacccatcttgcggggattgtaccaggaacatagtagaaagacaaaaacaaccaccgtacttgccattcgtatagatgctgcccagacttggttttgcgaggactgctaggtccatacaccgtttcaagatgacccagatctctaaaccttttttccattccactgaagttggtaagcccggaccacagcagaagctatcgaaatcttacactgcggtattcaagaaatggtttgtcagaggtttaaagttaaccttttacacgacgttggccggcacattgtatgtgtcatacgagctgtacaaagaatcgaacccacccaaacaggttccccaatcgaccgcttttgctaatggtttgaaaaagaaggagctggttattttgggtacaggctggggcgccatatctcttttgaagaaattagacacgtctttgtataacgtgaccgtggtgtcgccaagaagcttctttttgttcacaccgttattaccctcaacgcctgtgggtacgatagagatgaagtctattgtcgaaccggttagatcgatcgctagaagaacgcctggagaagttcactacattgaggcggaagcgttggacgttgatccaaaggccaaaaaagtaatggtgcaatcggtgtcagaggacgaatatttcgtttcgagcttaagttacgattatcttgttgttagtgtaggcgctaaaaccactacttttaacattcccggggtctatggcaatgctaacttcttgaaagagattgaagatgctcaaaatattcgtatgaagttaatgaaaaccatagaacaggcaagttcatttcctgtgaacgatccggaaaggaagcgattattaacgttcgtggttgttggagggggccctacgggggttgaatttgccgccgaactgcaagattacatcaatcaagatttgaggaagtggatgcccgacttaagtaaagaaatgaaggttatcttaattgaagccctgcctaatatcctaaacatgttcgataagacgttgatcaagtatgccgaggacctttttgccagagatgaaattgacttgcaagtgaatactgccgtgaaagtcgtagagccaacctatatacgcactctgcaaaacggccaaacaaacacggatatcgaatacgggatgctggtttgggccacgggaaatgaaccaatcgatttttcaaagacactgatgagtagaataccggagcaaactaataggcgtggtctgttaattaatgacaagttggagcttctcggttctgagaattcgatttatgcaattggtgattgtaccgcacacacgggtttctttcccacggcacaagttgcacatcaggaaggcgaatacttggccaagatcttggataaaaaattacagatagaacaattggaatgggacatgctcaacagtaccgatgaaactgaggtatcacgtctacaaaaagaggttaatttgaggaaatctaagttggataagttcaactacaagcatatgggtgcccttgcgtacatcggctctgaaaccgcaattgcagatttgcatatgggcgactcatcataccagttgaaaggtatgtttgccttcttgttttggaaatccgcttatttggccatgtgtctctctatcaggaataggattttaattgccatggactggaccaaagtttactttcttggaagggattcctccgtgtagtccttgttttatatattcattgttccaattcaaattgtttactatcatttacgtattataaccagtatttccctttattggtcatggaagattcgcgttacccttactcgttaacagtgatattatttgtatatgtgatgaaaatttaagaaaaaaatagtcgacaacacgccgaataaacaaagggtttcttcaatacctgatatagtagctagagggcagaagtttgaggtgatatctttctgagtgttgttatttttgtaagtcgtaacacggaactgtttgcctgttggaattttacgttactattctcatcggtataactagcttatattcactttggcaataggttaaaaaaagctcgttcatttttttaaaaacagcaacg

SEQ ID NO: 147626 - protein, 545 aa, Saccharomyces cerevisiae
MLPRLGFARTARSIHRFKMTQISKPFFHSTEVGKPGPQQKLSKSYTAVFKKWFVRGLKLTFYTTLAGTLYVSYELYKESNPPKQVPQSTAFANGLKKKELVILGTGWGAISLLKKLDTSLYNVTVVSPRSFFLFTPLLPSTPVGTIEMKSIVEPVRSIARRTPGEVHYIEAEALDVDPKAKKVMVQSVSEDEYFVSSLSYDYLVVSVGAKTTTFNIPGVYGNANFLKEIEDAQNIRMKLMKTIEQASSFPVNDPERKRLLTFVVVGGGPTGVEFAAELQDYINQDLRKWMPDLSKEMKVILIEALPNILNMFDKTLIKYAEDLFARDEIDLQVNTAVKVVEPTYIRTLQNGQTNTDIEYGMLVWATGNEPIDFSKTLMSRIPEQTNRRGLLINDKLELLGSENSIYAIGDCTAHTGFFPTAQVAHQEGEYLAKILDKKLQIEQLEWDMLNSTDETEVSRLQKEVNLRKSKLDKFNYKHMGALAYIGSETAIADLHMGDSSYQLKGMFAFLFWKSAYLAMCLSIRNRILIAMDWTKVYFLGRDSSV

SEQ ID NO: 147627 - DNA, 1542 bp, Saccharomyces cerevisiae
  CDS (1)..(1542)
atgctatcgaagaatttgtatagtaacaagaggttgctcacctcgacgaatacgctagtcagattcgcttccaccagatccacaggggtggaaaactccggagcaggtcctacatcttttaagaccatgaaagtcattgaccctcagcacagcgacaaaccaaacgtgctgatactgggttcggggtggggagctatttcgtttttaaagcacattgacaccaagaagtacaacgtttccatcatctctcctagaagctatttcttatttacgcctttgttaccttctgcaccagttgggacagtagacgaaaagtcaattattgagcccatcgttaattttgctctcaagaaaaaggggaacgttacctactatgaggcagaagccacctctatcaatcccgacaggaataccgttaccataaaatcattatctgccgttagccagctataccaacctgaaaaccatctagggctgcatcaagcagaacctgctgaaattaagtacgattatttaatcagtgctgtaggtgcggaacctaacacatttggtattcctggggtcactgattacggtcatttcctgaaggaaattcccaactctttggaaataagaagaacttttgccgccaatctagagaaggctaacttattgccaaagggtgatcccgaaagaagaagactactgtccattgtcgtggttggtggtgggcctactggtgtagaggccgctggtgaactacaggattatgttcaccaggacctgagaaagtttctccctgcattggccgaagaagtccaaattcacttggtcgaagctctgcccatcgttttgaatatgtttgagaaaaagctttcatcatacgcgcaatcacatttagaaaacacttcgatcaaagtacatctgagaacggctgtcgccaaagttgaagaaaagcaattgttggcaaagaccaaacacgaagacggtaaaataaccgaagaaactattccatacggtactttgatttgggccacgggtaacaaggcaagaccggtaatcactgaccttttcaagaaaattcctgagcaaaactcgtccaagagaggattggcagtgaatgactttttgcaggtgaaaggcagcaacaacattttcgccattggtgacaatgcatttgctgggttgccaccaaccgcccaagtagcgcaccaagaggccgaatatttggccaagaattttgataaaatggctcaaataccaaatttccaaaagaatctatcttcaagaaaggataaaattgatctcttgttcgaggagaacaactttaaacctttcaaatacaacgatttaggtgccttagcatacctgggatccgaaagggccattgcaaccatacgttccggtaagagaacattttacaccggtggtggcttaatgaccttctacttatggagaattttgtacttgtccatgattctatctgcaagatcgagattaaaggtctttttcgactggattaaattagcatttttcaaaagagacttttttaaaggattatag

SEQ ID NO: 147628 - protein, 513 aa, Saccharomyces cerevisiae
MLSKNLYSNKRLLTSTNTLVRFASTRSTGVENSGAGPTSFKTMKVIDPQHSDKPNVLILGSGWGAISFLKHIDTKKYNVSIISPRSYFLFTPLLPSAPVGTVDEKSIIEPIVNFALKKKGNVTYYEAEATSINPDRNTVTIKSLSAVSQLYQPENHLGLHQAEPAEIKYDYLISAVGAEPNTFGIPGVTDYGHFLKEIPNSLEIRRTFAANLEKANLLPKGDPERRRLLSIVVVGGGPTGVEAAGELQDYVHQDLRKFLPALAEEVQIHLVEALPIVLNMFEKKLSSYAQSHLENTSIKVHLRTAVAKVEEKQLLAKTKHEDGKITEETIPYGTLIWATGNKARPVITDLFKKIPEQNSSKRGLAVNDFLQVKGSNNIFAIGDNAFAGLPPTAQVAHQEAEYLAKNFDKMAQIPNFQKNLSSRKDKIDLLFEENNFKPFKYNDLGALAYLGSERAIATIRSGKRTFYTGGGLMTFYLWRILYLSMILSARSRLKVFFDWIKLAFFKRDFFKGL

SEQ ID NO: 147629 - DNA, 1500 bp, Oryza sativa
  CDS (1)..(1500)
atggcggcgtcgtccttgctccggtcgctctcccgcatctcgcgccgcggctgcgtgggaggcgcggggccgagcccgttccaccacagccgcctcccgtactcgccgttctccaccgcggcggcggatgcggtggagaggagggggttcgcggggctggggccgacggcgaagggggagaaggcgcgggtggtggtgctggggaccgggtgggcggggtcgcggctgatgaaggacatcgacacgaccgggtacgaggtggtgtgcgtctccccgcgcaaccacatggtgttcacgccgctcctcgcctccacctgcgtcggcacgctcgagttccgctccgtcgccgagcctctcgcgcgcatccagcccgccgtgtccaagtcccccggctcctacttcctcctcgcccgctgcaccgccgtcgaccccgacgctcacacgattgattgcgagacagttactgaaggtgagaaagataccttgaaaccttggaaattcaaggtagcgtatgataagctggtctttgcgtgtggagctgaggcctcaacttttgggatacgtggtgttactgaccatgcaatatttctccgggaagttcaccatgctcaagaaattcgcagaaagctccttctgaacctgatgctatctgatgtacctggaatatcggaggaagaaaagcgcagacttttgcattgcgttgttgttggaggtggtccaacaggtgtcgaatttagtggtgaacttagtgattttatcatcagagatgttaaacagcgttattcacatgttaaagattatatccatgttaccttgattgaggcaaatgagatattgtcatcttttgatgttcgcctcaggcaatatgctacaaatcaactaactaagtcaggtgttaggcttgtgagaggcattgtgaaggatgtacaacccaacaaattaatcctggacaatggagaagaggttccttatggtttgctggtatggtctactggagttggtccttcatcattcgttaagtcgttgccatttccaaagtcaccaggtggaaggattggggttgatgagtggttacgtgttccttctgcccgggatgtgttcgctattggggattgcagtggatttcttgaaagcacaggcaaggatgttctcccagctttagctcaggttgcagaacgacaaggcaagtatctagctcacctgcttaaccatgtcatgaaagctggaggagggcatgcgaactgtgagatcgacgttgatctaggtcctgcctttgtgtataagcatctggggagcatggcaactgtcggaagatacaaagctctagtcgatctgaggcaaagcaaggaatcgaaagggatatctcttgcaggatttgtgagctggttcatctggcgctcagcatacctgactcgtgttgttagctggaggaacaggttttatgtggctatcaactggctgaccacactgttatttggccgtgacattagccgtatttag

SEQ ID NO: 147630 - protein, 499 aa, Oryza sativa
MAASSLLRSLSRISRRGCVGGAGPSPFHHSRLPYSPFSTAAADAVERRGFAGLGPTAKGEKARVVVLGTGWAGSRLMKDIDTTGYEVVCVSPRNHMVFTPLLASTCVGTLEFRSVAEPLARIQPAVSKSPGSYFLLARCTAVDPDAHTIDCETVTEGEKDTLKPWKFKVAYDKLVFACGAEASTFGIRGVTDHAIFLREVHHAQEIRRKLLLNLMLSDVPGISEEEKRRLLHCVVVGGGPTGVEFSGELSDFIIRDVKQRYSHVKDYIHVTLIEANEILSSFDVRLRQYATNQLTKSGVRLVRGIVKDVQPNKLILDNGEEVPYGLLVWSTGVGPSSFVKSLPFPKSPGGRIGVDEWLRVPSARDVFAIGDCSGFLESTGKDVLPALAQVAERQGKYLAHLLNHVMKAGGGHANCEIDVDLGPAFVYKHLGSMATVGRYKALVDLRQSKESKGISLAGFVSWFIWRSAYLTRVVSWRNRFYVAINWLTTLLFGRDISRI

SEQ ID NO: 147631 - DNA, 1506 bp, Zea mays
  CDS (1)..(1506)
atggccgcctcctccctgctccggtcgttcacccgccgcagctgcgcgggcccgagcgctttcgcttaccgccaccaccaacgacagcaaccttggtctcccttctccaccagcgccgctgcggtcacgcaggacgaagcggcgaagaggttccctggactagggccgacggcgaagggggagaaggccagggtggtggtgttggggacagggtgggcggggtctcggctaatgaaggacctcgatacacaaggctacgacgtggtctgcgtcgccccgcgcaaccacatggtgttcacgccgctgctcgcctccacctgcgtcggcacgctcgagttccgatccgtcgctgagccggtcgcgcgcatccagcccgccgtgtccaagtcgccgggctcctacttcctcctcgcccgttgcaccggcgtcgaccccgacggccacacgattgattgcgaaacagttacagatggtgagaaagattccttggagccatggaaattcaaggttgcttatgacaagttggtttttgcctgtggagctgaggcatcaacttttgggatacatggtgttaccgaccatgcaatctttcttcgcgaagttcatcatgctcaagagattcggagacggctcctccttaatctgatgttgtctgatctccctggaatttcagaagaagaaaagtgcagattattgcactgtgttgttgttggaggtggtccaacaggggtggaatttagtggtgaacttagtgattttattatacgagatgtcaaacaacgttattcacatgtgaaggattatattcatgtgaccctgattgaggcaaatgagatattgtcatcattcgatgttcggctcaggcaatatgctacaaagcaactaattaagtcaggtgttaggcttgtgcaaggaattgttaaggatgtgcagcccaacaaaataattcttgacaatggagaggaagttccttatggtttactggtatggtccaccggagttggtgcttcaccattcgttaagtcattgccatttcctaagtcacctggtggaaggatcggtgtcaatgagtggttacgtgtcccttctgttcatgatgtttatgccattggtgactgcagtggatttctcgagagcaccggcaaggaagttctccctgctttagctcaggttgctgaacgacaaggcaagtacctggcaagcctgctcaaccatgtcatgaaagctggaggagggcatgcaaactctgagactgaagcagatctgggtcgtccaccctttgtgtacaagcatctaggcagcatggcaactgttggaagatacaaagctctagtcgatctgaggcaaagcaaggagtcaagagggatatctcttgcaggatttgtgagctggttcatctggcgctcggcatatttaactcgtgttgttagctggaggaataggttctatgtggctatcaattggctgaccactctcttatttggccgggacataagcagaatctag

SEQ ID NO: 147632 - protein, 501 aa, Zea mays
MAASSLLRSFTRRSCAGPSAFAYRHHQRQQPWSPFSTSAAAVTQDEAAKRFPGLGPTAKGEKARVVVLGTGWAGSRLMKDLDTQGYDVVCVAPRNHMVFTPLLASTCVGTLEFRSVAEPVARIQPAVSKSPGSYFLLARCTGVDPDGHTIDCETVTDGEKDSLEPWKFKVAYDKLVFACGAEASTFGIHGVTDHAIFLREVHHAQEIRRRLLLNLMLSDLPGISEEEKCRLLHCVVVGGGPTGVEFSGELSDFIIRDVKQRYSHVKDYIHVTLIEANEILSSFDVRLRQYATKQLIKSGVRLVQGIVKDVQPNKIILDNGEEVPYGLLVWSTGVGASPFVKSLPFPKSPGGRIGVNEWLRVPSVHDVYAIGDCSGFLESTGKEVLPALAQVAERQGKYLASLLNHVMKAGGGHANSETEADLGRPPFVYKHLGSMATVGRYKALVDLRQSKESRGISLAGFVSWFIWRSAYLTRVVSWRNRFYVAINWLTTLLFGRDISRI

SEQ ID NO: 147633 - DNA, 20 bp, Artificial sequence
  primer
atgacggacgctcgaccacg

SEQ ID NO: 147634 - DNA, 21 bp, Artificial sequence
  primer
ttaggaaggttcatttttgag

SEQ ID NO: 147635 - protein, 557 aa, Artificial sequence
  consensus sequence
  Variant (2)..(2): Xaa in position 2 is any amino acid
  Variant (4)..(5): Xaa in position 4 to 5 is any amino acid
  Variant (7)..(12): Xaa in position 7 to 12 is any amino acid
  Variant (14)..(32): Xaa in position 14 to 32 is any amino acid
  Variant (33)..(38): Xaa in position 33 to 38 is any or no amino acid
  Variant (42)..(91): Xaa in position 42 to 91 is any amino acid
  Variant (92)..(133): Xaa in position 92 to 133 is any or no amino acid
  Variant (135)..(136): Xaa in position 135 to 136 is any amino acid
  Variant (139)..(141): Xaa in position 139 to 141 is any amino acid
  Variant (143)..(149): Xaa in position 143 to 149 is any amino acid
  Variant (150)..(151): Xaa in position 150 to 151 is any or no amino acid
  Variant (153)..(186): Xaa in position 153 to 186 is any amino acid
  Variant (187)..(211): Xaa in position 187 to 211 is any or no amino acid
  Variant (214)..(214): Xaa in position 214 is any amino acid
  Variant (216)..(217): Xaa in position 216 to 217 is any amino acid
  Variant (219)..(219): Xaa in position 219 is any amino acid
  Variant (221)..(244): Xaa in position 221 to 244 is any amino acid
  Variant (245)..(257): Xaa in position 245 to 257 is any or no amino acid
  Variant (259)..(268): Xaa in position 259 to 268 is any amino acid
  Variant (269)..(269): Xaa in position 269 is any or no amino acid
  Variant (271)..(273): Xaa in position 271 to 273 is any amino acid
  Variant (275)..(308): Xaa in position 275 to 308 is any amino acid
  Variant (309)..(338): Xaa in position 309 to 338 is any or no amino acid
  Variant (340)..(341): Xaa in position 340 to 341 is any amino acid
  Variant (343)..(364): Xaa in position 343 to 364 is any amino acid
  Variant (365)..(402): Xaa in position 365 to 402 is any or no amino acid
  Variant (404)..(413): Xaa in position 404 to 413 is any amino acid
  Variant (414)..(427): Xaa in position 414 to 427 is any or no amino acid
  Variant (430)..(434): Xaa in position 430 to 434 is any amino acid
  Variant (435)..(446): Xaa in position 435 to 446 is any or no amino acid
  Variant (448)..(449): Xaa in position 448 to 449 is any amino acid
  Variant (452)..(452): Xaa in position 452 is any amino acid
  Variant (454)..(454): Xaa in position 454 is any amino acid
  Variant (456)..(480): Xaa in position 456 to 480 is any amino acid
  Variant (481)..(514): Xaa in position 481 to 514 is any or no amino acid
  Variant (516)..(520): Xaa in position 516 to 520 is any amino acid
  Variant (522)..(524): Xaa in position 522 to 524 is any amino acid
  Variant (526)..(535): Xaa in position 526 to 535 is any amino acid
  Variant (536)..(545): Xaa in position 536 to 545 is any or no amino acid
  Variant (547)..(556): Xaa in position 547 to 556 is any amino acid
GXGXXGXXXXXXLXXXXXXXXXXXXXXXXXXXXXXXXXPLLXXXXXXXXXXXXXXXXXXXXXXXXXXXXXXXXXXXXXXXXXXXXXXXXXXXXXXXXXXXXXXXXXXXXXXXXXXXXXXXXXXXXXXXXXXXXYXXLVXXXGXXXXXXXXXGXXXXXXXXXXXXXXXXXXXXXXXXXXXXXXXXXXXXXXXXXXXXXXXXXXXXXXXXXXXVGXGXXGXEXXXXXXXXXXXXXXXXXXXXXXXXXXXXXXXXXXXXXLXXXXXXXXXXXAXXXLXXXXXXXXXXXXXXXXXXXXXXXXXXXXXXXXXXXXXXXXXXXXXXXXXXXXXXXXXXXXXXXXWXXGXXXXXXXXXXXXXXXXXXXXXXXXXXXXXXXXXXXXXXXXXXXXXXXXXXXXXXXXXXXXLXXXXXXXXXXXXXXXXXXXXXXXXGDXXXXXXXXXXXXXXXXXPXXAQXAXQXXXXXXXXXXXXXXXXXXXXXXXXXXXXXXXXXXXXXXXXXXXXXXXXXXXXXXXXXXXGXXXXXGXXXAXXXXXXXXXXXXXXXXXXXXGXXXXXXXXXXY

SEQ ID NO: 147636 - protein, 13 aa, Artificial sequence
  protein pattern
  Variant (2)..(2): Xaa in position 2 is Ala or Gly
  Variant (4)..(4): Xaa in position 4 is any amino acid
  Variant (5)..(5): Xaa in position 5 is Ala, Ser or Thr
  Variant (7)..(7): Xaa in position 7 is Ala, Ile or Val
  Variant (9)..(12): Xaa in position 9 to 12 is any or no amino acid
GXGXXGXEXXXXL

SEQ ID NO: 147637 - DNA, 666 bp, Synechocystis sp.
  CDS (1)..(666): transl_table=11
atggagccagacccgatcgccgccgctgtgttggccgaactggccggggcggatggtattacagcccatttacgggaagaccgtcgccacattcaagagcgggacgtggaaatattgcgaaaaacggtgcgcacccacttaaacctggagatggccgccaccaaggaaatggtggaaattgccctcaaccttaaaccggattacgtcaccctggtaccggaacggcgggaagaagtgaccacggaagggggtttggatgtggctgggaacttgaactatttgctgggagtagttgagcagttacaatcccgacatattcccgttagtcttttcatcgacccggatgtggcccaactgaaagcctctgcccaaaccggagcaaaattcattgaattacatacgggcaaatatgccaatgcccccaccgctgacgaccaagctagggaattggggtccctggcgatcgcctgtgacattgctctagaactggggctaaggatcaacgctggccatgggttgacctattggaatgtgcgcccagtggcggaattaccgggcatggaagagttaaacatcggccacagcatcatgagccgggccattctggtgggcatggaaagggccgtgcgggaaatgaaattagccatgttggggctgccattttaa

SEQ ID NO: 147638 - protein, 221 aa, Synechocystis sp.
MEPDPIAAAVLAELAGADGITAHLREDRRHIQERDVEILRKTVRTHLNLEMAATKEMVEIALNLKPDYVTLVPERREEVTTEGGLDVAGNLNYLLGVVEQLQSRHIPVSLFIDPDVAQLKASAQTGAKFIELHTGKYANAPTADDQARELGSLAIACDIALELGLRINAGHGLTYWNVRPVAELPGMEELNIGHSIMSRAILVGMERAVREMKLAMLGLPF

SEQ ID NO: 147639 - DNA, 726 bp, Myxococcus xanthus
  CDS (1)..(726): transl_table=11
atgggacagcgactgggtgtcaacgtggaccatgtggcgacgctgcgtcaggcgaggcgcaccacgtatccggatccggtgacggccgcggcgcttgcggagcttgccggcgcgcagcaaatcaccatccacctgcgcgaggaccggcgtcacatccaggaccgggatttgcgcatcctccgtgagacggtgcagacgctcctgaacctggagatggccgccaccgcggagatggtgaagctcgcctacgagcacaagccggacgtggtgacgctggtgcccgagcgccgcgaggagctcaccacggagggcggcctggaggtcgccaaccagcgcgagcacatcgcgaagatcatcaagaacctgaaggacggcgagattgccgtctcgctcttcatcgacccggacctggaccaggtgcgggcggcgcacaaggtgaacgcggaccgcatcgagctgcacacgggccgctactgcgaggcgcgcaacgagaaggagcgggcccgggagctggcgcgcatcatcgacgcggccaaggcgggcaccaagctgggcctgggcgtggccgcgggccatgggctcaactacgacaacgtgcaccccattgcccgcatctccgagatcgacgagctgaacatcgggcacgccatcgtcggtcgcgcggtgctggtgggcttcgagcgggcggtgcgtgagatgctcgaaatcatgcgcaacccggggtag

SEQ ID NO: 147640 - protein, 241 aa, Myxococcus xanthus
MGQRLGVNVDHVATLRQARRTTYPDPVTAAALAELAGAQQITIHLREDRRHIQDRDLRILRETVQTLLNLEMAATAEMVKLAYEHKPDVVTLVPERREELTTEGGLEVANQREHIAKIIKNLKDGEIAVSLFIDPDLDQVRAAHKVNADRIELHTGRYCEARNEKERARELARIIDAAKAGTKLGLGVAAGHGLNYDNVHPIARISEIDELNIGHAIVGRAVLVGFERAVREMLEIMRNPG

SEQ ID NO: 147641 - DNA, 732 bp, Escherichia coli
  CDS (1)..(732): transl_table=11
atggctgaattactgttaggcgtcaacattgaccatatcgctacgctgcgcaacgcgcgcggtaccgcttacccggatccggtgcaggccgcgtttattgccgagcaggcgggagcggacggcattaccgtgcatttacgtgaagatcgccgtcacattactgaccgcgacgtgcgcatcctgcgtcagacgctggatacccgcatgaatctggagatggcggtgaccgaagagatgctggcgatcgccgttgagacgaagccacatttttgctgcctggtaccggaaaagcgtcaggaagtaacaaccgaaggcggcctggatgtcgcagggcagcgtgacaaaatgcgcgatgcctgcaaacgtctggcagatgccgggattcaggtttctctgtttattgacgccgatgaagagcagatcaaagctgcggcagaggttggcgcaccgtttatcgagatccacaccggttgctatgctgatgccaaaactgacgccgaacaggcgcaagagctggcgcgtatcgccaaagccgcgacctttgccgcaagcctcggtctgaaagttaacgccggacacggtctgacctatcacaacgtgaaagccattgccgccatccctgagatgcatgaactgaatatcggtcatgccattattggtcgtgcagtgatgaccggactgaaagatgcggtggcagaaatgaagcgtctgatgctggaagcgcgtggctaa

SEQ ID NO: 147642 - protein, 243 aa, Escherichia coli
MAELLLGVNIDHIATLRNARGTAYPDPVQAAFIAEQAGADGITVHLREDRRHITDRDVRILRQTLDTRMNLEMAVTEEMLAIAVETKPHFCCLVPEKRQEVTTEGGLDVAGQRDKMRDACKRLADAGIQVSLFIDADEEQIKAAAEVGAPFIEIHTGCYADAKTDAEQAQELARIAKAATFAASLGLKVNAGHGLTYHNVKAIAAIPEMHELNIGHAIIGRAVMTGLKDAVAEMKRLMLEARG

SEQ ID NO: 147643 - DNA, 771 bp, Bradyrhizobium sp. ORS278
  CDS (1)..(771): transl_table=11
atgtcccatcccccgaagctgcgcctcggcgtcaatgtcgaccacatcgctacgttgcggaatgcgcgcggcggccgtgcgccggatccggtacgcgctgcgctgctcgccatcgaggccggcgccgacggcatcaccgcgcatctgcgcgaggaccggcggcacatccgcgacgacgacatggcccgcctcaaggcgcagatctccaggccgctgaacttcgagatggcggccaccgaggagatggtgcggatcgcgctggcgacgaagccgcatgcctgctgcctggtgcccgagcggcgcgaggaactgaccaccgagggcgggctcgacgtcgtcggccagcacaatgcgctggcgccggcgatcgcccggctcagcgaggccggcatccgggtctcgctgttcatcgccgccgaccccgcccagatcgagatggcggcgcggctgcgcgcgccagtcatcgagatccataccggcggctggtgcgacgcgatcaccgatggccaccatgacaaggcggacgccgaatggcagcgcatcgtggccggtgcccgccaagcctatgccgcagggctcgaggtccatgccggccatggcctggattacgccaccgccgagcagatcgcggccttgcctgaaatccgcgagctgaacatcggctacttcataatgggcgaggcgctgttcgtgggcctggccgagagcgtgcggacgatgcgcgcggcgatggatcggggccgcgaccgggcgacaggggccacggcatga

SEQ ID NO: 147644 - protein, 256 aa, Bradyrhizobium sp. ORS278
MSHPPKLRLGVNVDHIATLRNARGGRAPDPVRAALLAIEAGADGITAHLREDRRHIRDDDMARLKAQISRPLNFEMAATEEMVRIALATKPHACCLVPERREELTTEGGLDVVGQHNALAPAIARLSEAGIRVSLFIAADPAQIEMAARLRAPVIEIHTGGWCDAITDGHHDKADAEWQRIVAGARQAYAAGLEVHAGHGLDYATAEQIAALPEIRELNIGYFIMGEALFVGLAESVRTMRAAMDRGRDRATGATA

SEQ ID NO: 147645 - DNA, 732 bp, Escherichia coli O157:H7 EDL933
  CDS (1)..(732): transl_table=11
  misc_feature (41)..(41): y is t or c
atggctgaattactgttaggcgtcaacattgaccatatcgytacgctgcgcaacgcgcgcggtaccgcttacccggatccggtgcaggccgcgtttattgccgagcaggcgggggcggacggcattaccgtgcatttacgtgaagatcgccgccacattactgaccgcgatgtgcgcatcctgcgtcagacgctggatacccgcatgaatctggagatggcggtgaccgaagagatgctggcgatcgcggttgagacgaagccgcatttttgctgcctggtaccagaaaagcgtcaggaagtaacaaccgaaggcggcctggacgttgcagggcagcgtgacaaaatgcgcgatgcctgcaaacgtctggcggatgccgggattcaggtttctctgtttatcgacgccgatgaagagcagatcaaagctgcggcagaggttggcgcaccgtttatcgagatccacaccggttgctatgctgatgccaaaactgacgccgaacaggcgcaagagctggcgcgtatcgccaaagccgcgacctttgccgctagtctcggtttgaaagttaacgccggacacggtctgacctatcacaacgtaaaagccattgccgccatccctgagatgcacgaactgaatatcggtcatgccattattggtcgtgcagtgatgaccggactgaaagatgcggtggcagaaatgaagcgcctgatgctggaagcgcgtggctaa

SEQ ID NO: 147646 - protein, 243 aa, Escherichia coli O157:H7 EDL933
  misc_feature (14)..(14): The Xaa at location 14 stands for Ala, or Val.
MAELLLGVNIDHIXTLRNARGTAYPDPVQAAFIAEQAGADGITVHLREDRRHITDRDVRILRQTLDTRMNLEMAVTEEMLAIAVETKPHFCCLVPEKRQEVTTEGGLDVAGQRDKMRDACKRLADAGIQVSLFIDADEEQIKAAAEVGAPFIEIHTGCYADAKTDAEQAQELARIAKAATFAASLGLKVNAGHGLTYHNVKAIAAIPEMHELNIGHAIIGRAVMTGLKDAVAEMKRLMLEARG

SEQ ID NO: 147647 - DNA, 816 bp, Agrobacterium tumefaciens str. C58
  CDS (1)..(816): transl_table=11
ttgcggtcggcgtcaacctgcgtgaaacaaggtatcaattccgaaccggagcccgatgccatgcctgcaaaactttccgtcaatctgaacgcaattgccatgttacgcaaccgccgcgatcttccctggcctgatgtcgcgcatttcgggcagattgcgctctcggcgggtgcaagcgggttgactgtacacccgcggcccgaccagcgccatatccgcttttcggatctgccggtgctgcgggcgctgatcgatgatcgtttccccggcgcggaattcaacatcgaagggtatcccaccgaggattttctcgttctctgcgaaaagacccagccggaacaggtgacgctggtgcctgacgacccgtcgcaggcgacgtcagaccacggctgggatttccgcaaacatgctgtttttctgaaagatgtcgtcgggcgcctgaaggccggtggcatgcgcgtttcactgtttgccgatggcgacggggaacgcgagccggtggagctggcggccgagacgggggccgcccgcatcgagctttacaccggcccttatggcggctgttttgacgatacgcaaaaggctgacctgcttgtcgagaagcttgggcagacggcggatcatgccgcagcactcgggcttgctgtcaatgccggccatgatctgacggttgcgaacctgcccaagctgatgaaacgtatccccaatctcgctgaggtatcgatcggccacgggctgacggcagatgccatggaatatggcatggctgaaacagtccggcgtttttgtcaggcctgcggtcagcgtaattcataa

SEQ ID NO: 147648 - protein, 271 aa, Agrobacterium tumefaciens str. C58
MRSASTCVKQGINSEPEPDAMPAKLSVNLNAIAMLRNRRDLPWPDVAHFGQIALSAGASGLTVHPRPDQRHIRFSDLPVLRALIDDRFPGAEFNIEGYPTEDFLVLCEKTQPEQVTLVPDDPSQATSDHGWDFRKHAVFLKDVVGRLKAGGMRVSLFADGDGEREPVELAAETGAARIELYTGPYGGCFDDTQKADLLVEKLGQTADHAAALGLAVNAGHDLTVANLPKLMKRIPNLAEVSIGHGLTADAMEYGMAETVRRFCQACGQRNS

SEQ ID NO: 147649 - DNA, 732 bp, Shigella flexneri 2a str. 301
  CDS (1)..(732): transl_table=11
atggctgaattactgttaggcgtcaacattgaccatattgcaacgctgcgtaacgcacgcggtactgcttacccggatccggtgcaggcggcgtttattgccgagcaggcgggagcggacggcattaccgtgcatttacgtgaagatcgccgccacattactgaccgcgatgtgcgcatcctgcggcagacgctggatacccgaatgaatctggagatggcagtgaccgaagagatgctggcgatcgccgttgagacgaagccacatttttgctgcttggtaccggaaaagcgtcaggaagtaacaaccgaaggcggcctggacgttgcagggcagcgtgaaaaaatacgcgatgcctgcaaacgtctggcagatgccgggattcaggtttctctgtttatcgacgccgatgaagagcagatcaaagctgcggcagaggttggcgcaccgtttatcgagatccacaccggttgctatgctgatgccaaaactgacgccgaacaggcgcaagagctggtgcgtatcgccaaagccgcgacctttgccgctagtctcggtctgaaagttaacgccggacacggtctgacctatcacaacgtgaaagccattgccgccatccctgagatgcatgaactgaatatcggtcatgccattattggccgtgcagtgatgaccggactgaaagatgcggtggcagaaatgaagcgtctgatgctggaagcgcgtggctaa

SEQ ID NO: 147650 - protein, 243 aa, Shigella flexneri 2a str. 301
MAELLLGVNIDHIATLRNARGTAYPDPVQAAFIAEQAGADGITVHLREDRRHITDRDVRILRQTLDTRMNLEMAVTEEMLAIAVETKPHFCCLVPEKRQEVTTEGGLDVAGQREKIRDACKRLADAGIQVSLFIDADEEQIKAAAEVGAPFIEIHTGCYADAKTDAEQAQELVRIAKAATFAASLGLKVNAGHGLTYHNVKAIAAIPEMHELNIGHAIIGRAVMTGLKDAVAEMKRLMLEARG

SEQ ID NO: 147651 - DNA, 738 bp, Prochlorococcus marinus str. NATL1A
  CDS (1)..(738): transl_table=11
atggcaagtcttggcgtaaacattgatcacatagcaaatgtccgagaagctcgtaagacatttgaacctgacccagtaaaaatggttcttttagcggaattaggtggagctgacggcataacagttcatctaagagaagatagaaggcatattcaagatagagatctaaatcttctaaaagagactgtacatactcgactaaatcttgaaatggctgcaactgaagaaatgacttcaatagcacttaatctcaagccagatatggttacattggttcctgagaaaagggaagaggtcacgacagaaggaggactcgatgtcattaaaaacaaaaacaaattaaaggaaataattcaacgtctttcaggtgaggacattccagttagtctttttgttgatccagtccaagctcaattagaaaattgcgctgaagtaaaggccgcttggattgaactgcacacaggtaaatatgcaattacaaaaaacaaggcaagagatttagaattatctattcttaaagagaacacagctaaagcaaagtcttatggtttgagagtaaacgcagggcatggattgacatatcaaaacgttgaaccgattgcagctattgaagggattgaagaattaaatattggccatacaattatttctagagccctttcagtaggtctatctcaggcagtaaaagaaatgaaaagcctaattatcaatccaagaaaagacaacttcttactttaa

SEQ ID NO: 147652 - protein, 245 aa, Prochlorococcus marinus str. NATL1A
MASLGVNIDHIANVREARKTFEPDPVKMVLLAELGGADGITVHLREDRRHIQDRDLNLLKETVHTRLNLEMAATEEMTSIALNLKPDMVTLVPEKREEVTTEGGLDVIKNKNKLKEIIQRLSGEDIPVSLFVDPVQAQLENCAEVKAAWIELHTGKYAITKNKARDLELSILKENTAKAKSYGLRVNAGHGLTYQNVEPIAAIEGIEELNIGHTIISRALSVGLSQAVKEMKSLIINPRKDNFLL

SEQ ID NO: 147653 - DNA, 768 bp, Herminiimonas arsenicoxydans
  CDS (1)..(768): transl_table=11
atgagttttctccagccacaatcatccatcatcgatctcggtatcaacatcgaccacgtcgctacattgcgcaatgcgcgcggtacggtgtatccctaccccttgcaggccgccttgcaggctgaagaagccggcgccgatgcgatcacattgcatctgcgcgaagacaggcggcacatcagggatgccgacgtcgaattgatccgtccgcaactacgcacacgaatgaatctggagtcggcagtgacgagcgagatgatcgattttgcctgtcgtatcaagccgcaggatgtctgcctggtaccggagcggcgcgaagaggtcaccaccgaaggcggtctcgatatcgttaaatatttttcggaagtatctgcagcaatcaggcaattgcagggtgaaggcatacgtgtgagcctgttcatcgatgccgatgtggcgcagattcaggccgccgccgaagctggtgcgccggtgattgaattgcatactggacgttatgccgacgcgcatgacgaagccggccagcagatggaattgcagcgcgtcaagcagggcgttcatgaaggtgtaaaacgcggtttgaaggtgaatgccggtcacggactgcattacactaatgtgcaggcgattgcggcgattcaggatattgccgagctgaacatcggccatgcgattgtggctcatgcagtgttcgtcggctggcaaaatgcagtgcgtgaaatgaaggcgatcatgacggccgcacgattgagcggacggcagcgatga

SEQ ID NO: 147654 - protein, 255 aa, Herminiimonas arsenicoxydans
MSFLQPQSSIIDLGINIDHVATLRNARGTVYPYPLQAALQAEEAGADAITLHLREDRRHIRDADVELIRPQLRTRMNLESAVTSEMIDFACRIKPQDVCLVPERREEVTTEGGLDIVKYFSEVSAAIRQLQGEGIRVSLFIDADVAQIQAAAEAGAPVIELHTGRYADAHDEAGQQMELQRVKQGVHEGVKRGLKVNAGHGLHYTNVQAIAAIQDIAELNIGHAIVAHAVFVGWQNAVREMKAIMTAARLSGRQR

SEQ ID NO: 147655 - DNA, 807 bp, Legionella pneumophila subsp. pneumophila str. Philadelphia 1
  CDS (1)..(807): transl_table=11
gtgaatagcagtttgtcaagaactgcattatactctgcattttatattttttggtgcaaaatgaataaagagttattgttaggtgttaatattgatcatatagcaaccataagacaagcacgaggaactcgttatcctgatcctgtccaggcagcaatggatgctgaagaagcaggggcagatggaattactttgcatatgagagaggacttacgacatattcaggcgcgtgatgtcagattgattaaacaggttctgcaaacacgtatgaatcttgagctggcggttactgaagccatgcttgattttgccgaggaaatatcgccggagcatgcttgcttagtgcctgaaaagcgggaagaactaactacagaaggtggattggatattttgactcaccgaaatgtggtggaaaaggcagtacgtcgcttacaattaatgggaagtgaggtttctttatttattgacccggataaagagcaaataagagctgcggttgatgttggggcgccagttatcgaattgcacactgggtgttatgctgatgccacctcagaggaaaagcagcattatgaattgcaacgaattaaagaggcagctgaatttgctgccagtttaaacttggtagtgaatgccggtcatgggttgcactatcataatgttaaaccgattgcagcgattagggagttaaatgaacttaacataggacatgccattattgccagagcattattctgtggattaaaagaggcagtaagacacatgcgccaattaatgcaggaagcgagactttatgtcaacgactga

SEQ ID NO: 147656 - protein, 268 aa, Legionella pneumophila subsp. pneumophila str. Philadelphia 1
MNSSLSRTALYSAFYIFWCKMNKELLLGVNIDHIATIRQARGTRYPDPVQAAMDAEEAGADGITLHMREDLRHIQARDVRLIKQVLQTRMNLELAVTEAMLDFAEEISPEHACLVPEKREELTTEGGLDILTHRNVVEKAVRRLQLMGSEVSLFIDPDKEQIRAAVDVGAPVIELHTGCYADATSEEKQHYELQRIKEAAEFAASLNLVVNAGHGLHYHNVKPIAAIRELNELNIGHAIIARALFCGLKEAVRHMRQLMQEARLYVND

SEQ ID NO: 147657 - DNA, 762 bp, Anaplasma marginale str. St. Maries
  CDS (1)..(762): transl_table=11
ttgttttaccattactaccgcgtgcggtgtttggggagtgttgtcgtgcagcttggtgttaatgtcgatcatgtagctaccttgcgcaatcttagaagcaccgcctatccggacgttgtgaggattgcaagtaaagctgtagagtgtggcgcagattttattactgttcacctcagagaagatcgtagacacataagggatggcgacgtctttgcactgaagaagcacctggcagttcctctaaaccttgaaatggctgccacgcgcgaaatgttagagatcgcaaagaaggttgcgccccgatacgtttgtttggtgccggaaaagagggaagaaattaccacagagtctggtgttgatgcgaaaggcatgtttgaaatacttgcgccggttgtatcagatttgcggcagagcggcattggcgttactctgtttattgagccagaaaaggagcaggtggattatgcgaaaaagttgtgtgcagataaggtagagctgcatgtaggtgcttactgtctgagtaagtcgcaaggggagctggaaagaatagccaacgcagcggcttatagccatgaacaaggaatggagtgccatgctgggcatggaatagactacggcaccgcggctacgatagctacgattcggcatgtatctgccctgaatgttggacattttttgatatgtgagtctctgctccatggggttgggagtgcggtacggaatatgaaaaaaataatcttggaacagcgccacaacgcctag

SEQ ID NO: 147658 - protein, 253 aa, Anaplasma marginale str. St. Maries
MFYHYYRVRCLGSVVVQLGVNVDHVATLRNLRSTAYPDVVRIASKAVECGADFITVHLREDRRHIRDGDVFALKKHLAVPLNLEMAATREMLEIAKKVAPRYVCLVPEKREEITTESGVDAKGMFEILAPVVSDLRQSGIGVTLFIEPEKEQVDYAKKLCADKVELHVGAYCLSKSQGELERIANAAAYSHEQGMECHAGHGIDYGTAATIATIRHVSALNVGHFLICESLLHGVGSAVRNMKKIILEQRHNA

SEQ ID NO: 147659 - DNA, 747 bp, Anabaena variabilis ATCC 29413
  CDS (1)..(747): transl_table=11
atgactgtagatagggagatattcgccttggctactcttggggtaaacattgaccatatcgctaccattcgacaagcgcggcggacggtggaaccagaccctgtggcggcggcggtgctggcagaattaggtggtgctgatggcatcaccgtacatctacgggaagaccgtaggcatatccaagaccgggatgtacaactgttgcgccaaactgtgcgtactcacctgaatttggaaatggcggctacagacgaaatggtgggaatagcccttgacattaaacccgattatgtgacactggttcccgaaaaacgggaagaagttaccacagagggtggtttagatattgttggtcaaattgctagaataggtgaggtcgtcagtaaattgcagaatgctgccattcctgtgagcttgtttattgatgctgaaccagcacaaatagaggcatctgtcaaggtacaagcaaagtttattgaactgcacactggcaggtatgctgaggcgaccgacgagactagccgtcagcaagagctagcatttttggctacagggtgtgaacaagcgattaaagccggactaagagtcaacgctggtcatggactcacctactggaacgtttaccccgtggctgcacttccagggatggaagaactcaatattggtcacaccattatcagccgagcggctttagtaggaatagaaagagctgttcgagaaatgaaacaggcgataagaggggagtag

SEQ ID NO: 147660 - protein, 248 aa, Anabaena variabilis ATCC 29413
MTVDREIFALATLGVNIDHIATIRQARRTVEPDPVAAAVLAELGGADGITVHLREDRRHIQDRDVQLLRQTVRTHLNLEMAATDEMVGIALDIKPDYVTLVPEKREEVTTEGGLDIVGQIARIGEVVSKLQNAAIPVSLFIDAEPAQIEASVKVQAKFIELHTGRYAEATDETSRQQELAFLATGCEQAIKAGLRVNAGHGLTYWNVYPVAALPGMEELNIGHTIISRAALVGIERAVREMKQAIRGE

SEQ ID NO: 147661 - DNA, 750 bp, Synechococcus sp. CC9605
  CDS (1)..(750): transl_table=11
atggcaagcctcggcgtcaatatcgaccacatcgccaacatccgtgaagcgcggcgcaccgttgagccggatcctgtctcgatggcactgctggctgaactcggtggggccgatgggatcacagtgcacctcagggaagaccggcgtcacatccaggatcgggatgtggagttgctgcgccaaaccgtgcgctcccgtctcaacctggaaatggcctccaccgaggagatggtggcgatcgcgctgcggatcaagcccgacatggtcaccctggtgccggaacgtcgggaggaggtcaccacggaggggggcctggatgttgccggacagaaagcctctctgagcgccatggttcaaacccttcaggccgctgggattcctgtgagcctgtttgtggatccggaggccacccagctccaggcctgcaagaacacgggggcctgctgggtggaattgcacacggggcgctacgccgatgccgactggagcacccagccccaggagctggcccggttgcaggaaggcaccgccatcgcccagcagcttggtctgcgggtcaatgcaggccatggcctcacgtatcagaacgttgagcccatcgcggccattgctgggatggaggaactcaacatcggccacacgatcgtggcccgttctgtggccgtcggactgcaacaggctgtgcgggatatgaaggtcttggttcagaatccccgccttgatccccttttcggacaggcgcccggatga

SEQ ID NO: 147662 - protein, 249 aa, Synechococcus sp. CC9605
MASLGVNIDHIANIREARRTVEPDPVSMALLAELGGADGITVHLREDRRHIQDRDVELLRQTVRSRLNLEMASTEEMVAIALRIKPDMVTLVPERREEVTTEGGLDVAGQKASLSAMVQTLQAAGIPVSLFVDPEATQLQACKNTGACWVELHTGRYADADWSTQPQELARLQEGTAIAQQLGLRVNAGHGLTYQNVEPIAAIAGMEELNIGHTIVARSVAVGLQQAVRDMKVLVQNPRLDPLFGQAPG

SEQ ID NO: 147663 - DNA, 798 bp, Synechococcus elongatus PCC 7942
  CDS (1)..(798): transl_table=11
gtggacatacgctcgtgcctggctgtgaaattgggtcaacagttctggattgttggttctggaggagctgctaccttgcccaccctaggcgtcaatattgaccatgttgccaccgtgcgccaagctcgccggacggttgagccagacccgatcgcggctgctgtgctggcggagctggcaggtgcagaaggcattacggcgcatctgcgggaagaccgtcgacatattcaagatcgtgatgtgcgcttacttcggcagacggtacgcacccgcctcaatttagaaatggcggccacggatgagatggtggcgatcgccttagacattcgcccggactacgtcaccctggtgcccgaacggcgggaggaagtgacaacggaaggcggtctgaacgtggtggggcagcgcgatcgcctagctctggttgtcgatcagcttcaaagcgctgggattcccgtcagcttgttcatcgatgcggaaccggatcagattgcagcgtcggctgcgattcaagctcagtggatcgagttgcatacgggtcgctatgccgaggccgagacggaagccgcccaagctcaggaactcgcagcactccgccaaggctgtgagcaagcgatcgcagccggtctacgcgtcaatgcgggccatggattgacctactggaacgtctatccggtggcacagttgccggggatggaagaactcaatattggtcacacgatcatcagtcgagccgtattggttgggctagagcgggcggtgcgcgaaatgaagctcgcaatgcagggtaaactctag

SEQ ID NO: 147664 - protein, 265 aa, Synechococcus elongatus PCC 7942
MDIRSCLAVKLGQQFWIVGSGGAATLPTLGVNIDHVATVRQARRTVEPDPIAAAVLAELAGAEGITAHLREDRRHIQDRDVRLLRQTVRTRLNLEMAATDEMVAIALDIRPDYVTLVPERREEVTTEGGLNVVGQRDRLALVVDQLQSAGIPVSLFIDAEPDQIAASAAIQAQWIELHTGRYAEAETEAAQAQELAALRQGCEQAIAAGLRVNAGHGLTYWNVYPVAQLPGMEELNIGHTIISRAVLVGLERAVREMKLAMQGKL

SEQ ID NO: 147665 - DNA, 774 bp, Burkholderia thailandensis E264
  CDS (1)..(774): transl_table=11
atgagcttcttcctgacaacgcccaccgccatcgaactgggggtgaacatcgaccacgtcgcaacgctgcgcaacgcgcgcggcaccgcgtatccggaccccgtgcgcgcggcgctcgccgccgaggacgcgggggcggacgcgatcacgctgcatctgcgcgaagaccgccggcacatcgtcgatgcggatgtgcgcacgctgcgtccgctcgtgaagacgcggatgaatctcgagtgcgcggtgacgccggagatgctcgacatcgcatgcgaggtccggccgcacgacgcctgcctcgtgccggagaagcgctcggagctgacgacggaaggcggcctcgacgtcgtcgggcatttcgacgcggtgcgcgccgcgtgcaagcagctcgcggacgcgggcgtgcgcgtgtcgctcttcatcgatccggacgatgcgcagatccgcgccgcgcacgaaacgggcgcgcccgtgatcgagctgcacaccggccgctatgcggacgcgcacgacacggccgagcagcagcgcgagttcgagcggatcgcgacgggcgtcgacgccggcatcgcgctcgggctgaaggtgaatgcgggccacggattgcactacacgaacgtgcaggcgatcgccgcgctgcccggcatcgccgagctgaacatcgggcacgcgatcgtcgcgcacgcggtgttcgcgggctgggacaacgcggtgcgcgagatgaaggcgatcatggtcgccgcgcgcgtcgccgcgctgcacggcggccgctga

SEQ ID NO: 147666 - protein, 257 aa, Burkholderia thailandensis E264
MSFFLTTPTAIELGVNIDHVATLRNARGTAYPDPVRAALAAEDAGADAITLHLREDRRHIVDADVRTLRPLVKTRMNLECAVTPEMLDIACEVRPHDACLVPEKRSELTTEGGLDVVGHFDAVRAACKQLADAGVRVSLFIDPDDAQIRAAHETGAPVIELHTGRYADAHDTAEQQREFERIATGVDAGIALGLKVNAGHGLHYTNVQAIAALPGIAELNIGHAIVAHAVFAGWDNAVREMKAIMVAARVAALHGGR

SEQ ID NO: 147667 - DNA, 765 bp, Syntrophus aciditrophicus SB
  CDS (1)..(765): transl_table=11
ttggagaaaggagcagctctatccatgccaatgggaggagtattttatttcaagcgtaattttttaagtgtaaagatcgattatctggcaatgttgggtgaagcacggggcaataatcctgacctcgttgaaggtgcggtcatctgcgaaaatgccggcagtgacggcattacagtccatcttcggaaagacaggcgtcatatacaggataaggatgtcttagctttaaaaggcgtggtccgcggaaaattcaacattgagataccgctctccgatgaaatcatcggtatagcaaaagaaattaaaccgactcaggttacaattgtcccagaaaagaagcatgaaagcaaagaaggcggcggatttgacgtcagacgatacagacaaaaagtcaaagacacagttaaattctttcatgatcaagacatactggtttctctcctggttgaccccgacgcggaaacagttgaactttcgaaagactgcgatgctgatttcgtagagatccatgccgggacatattgtaacgccgttgacaaagccgtaattgatcgagaaatcgctcggatatatggagccgccaaccgtgcggcagaaattggaatacaattcaatgccggacatggtctgaattaccagaatgttttgccagtcttaaatgcaaagttactgggcgatgtcataatcggacgttcaatatttgaaagggctgaaactgtcggcctgttcaaggcagttgatgaaatgctggaagtattggaatag

SEQ ID NO: 147668 - protein, 254 aa, Syntrophus aciditrophicus SB
MEKGAALSMPMGGVFYFKRNFLSVKIDYLAMLGEARGNNPDLVEGAVICENAGSDGITVHLRKDRRHIQDKDVLALKGVVRGKFNIEIPLSDEIIGIAKEIKPTQVTIVPEKKHESKEGGGFDVRRYRQKVKDTVKFFHDQDILVSLLVDPDAETVELSKDCDADFVEIHAGTYCNAVDKAVIDREIARIYGAANRAAEIGIQFNAGHGLNYQNVLPVLNAKLLGDVIIGRSIFERAETVGLFKAVDEMLEVLE

SEQ ID NO: 147669 - DNA, 744 bp, Novosphingobium aromaticivorans DSM 12444
  CDS (1)..(744): transl_table=11
gtgaacagcgccctgacctcgggacgcctccgcctcggcgtcaacatcgaccacgtcgccaccatccgcaacgcgcgcggcggcgaccatcccgatcccgtgcgcgcggcagagatcgtcgcggcggtcggcggcgacgggatcaccgcgcacctgcgcgaggatcgccgccacatccgcgacgaggacctcgcccgaatccaggcggcaaccagcctgccgctcaatctcgaaatggccgcgaccgacgagatgctcgagatcgcgctgcgccacaagccgcacgccgcctgcatcgtccccgaacggcgcgaggaacgcacgaccgaaggcgggctcgacgccgccggccagcacaaccgcctggccccgatcgtcgcgcgtctttcggatgccggcatccgcgtcagcctgttcatcgcccccgagccgcggcagatcgaagccgcgatgaagctcggcgcgccggtggtggaactgcacacgggcgaatatgcccatgccgaaggcgatgcccgcgccgtggaactcaggcgcatcgccgacatggccgcgcttgccgcgcgcaacggcatcgaaccgcacgccggccacggcctcacctacgagaacgtgcagcccatcgccgcgattccacagctcgcggaactcaacatcggccactacctgatcggcgaggcgatcttcgtcgggctcgatacggcggtgcgccggatgcgcgatctcatggacgaagcgcggtga

SEQ ID NO: 147670 - protein, 247 aa, Novosphingobium aromaticivorans DSM 12444
MNSALTSGRLRLGVNIDHVATIRNARGGDHPDPVRAAEIVAAVGGDGITAHLREDRRHIRDEDLARIQAATSLPLNLEMAATDEMLEIALRHKPHAACIVPERREERTTEGGLDAAGQHNRLAPIVARLSDAGIRVSLFIAPEPRQIEAAMKLGAPVVELHTGEYAHAEGDARAVELRRIADMAALAARNGIEPHAGHGLTYENVQPIAAIPQLAELNIGHYLIGEAIFVGLDTAVRRMRDLMDEAR

SEQ ID NO: 147671 - DNA, 720 bp, Ehrlichia chaffeensis str. Arkansas
  CDS (1)..(720): transl_table=11
atgtcagatgttgcattgggagtaaatattgatcatgttgcaacgttgcgtaatgcaagaaatgttgattatccagatattgtggaagtagcaaatatagcagtaagcaatggtgcagattttatcactgtgcatttaagagaagatcgtaggcatataaaggatgatgatgtttttagattgaaaaatagtttaaaagttccactaaacttagaaattgccccaactgatgagatgttatcaatagcaataaaggtaagaccaaaatgtgtctgtttagttcctgaaaaaagacaagaacttacaacagaagggggactagatgtaaaacgtgctttttcttatttaatatcatttattgaaaaactacatacttacaacatagatgttacactatttattgaacctgatgtagaccaaattgatcaagcaaaaaaactatctgctgataacgtagagctacatactggaaaatactgtaacaatactacacaaagtgaactatctcaagtaataaaagctgcagaatactgctaccaacgaaacataggctgtcatgctggacacggcttaaattatcaaagtgctgctattatagcaaaagtaccatacatatcagcacttaacatagggcattttttaatttgtgaatctgtactacatggtataggtacatccgttcataaaatgaaaaaggccattgctagcgctcctaattaa

SEQ ID NO: 147672 - protein, 239 aa, Ehrlichia chaffeensis str. Arkansas
MSDVALGVNIDHVATLRNARNVDYPDIVEVANIAVSNGADFITVHLREDRRHIKDDDVFRLKNSLKVPLNLEIAPTDEMLSIAIKVRPKCVCLVPEKRQELTTEGGLDVKRAFSYLISFIEKLHTYNIDVTLFIEPDVDQIDQAKKLSADNVELHTGKYCNNTTQSELSQVIKAAEYCYQRNIGCHAGHGLNYQSAAIIAKVPYISALNIGHFLICESVLHGIGTSVHKMKKAIASAPN

SEQ ID NO: 147673 - DNA, 723 bp, Methylobacillus flagellatus KT
  CDS (1)..(723): transl_table=11
atgaaactaggcgtcaatatcgatcacgtggccaccctgcgccaggcgcgcggcactcaataccccagtgtggtgcaggccgccctgcgcgccgaagaggcgggggcggacagcatcaccattcatttgcgcgaggaccggcgccatattcaggatgccgatgtttttgcgttgcgtccgttgctgcagacgaaaatgaatctggaaatggcggtaaccgacgaaatggtcggcatcgcccttcaggtgaggccgcaggatgtctgcctggtgcctgagcgccgcgaagagcgcacgaccgagggcggtctgaacgtgatcggcaacctaggcgctatcaagggcgcctgcaagacgctgggagatgctggaattcgcgtttccttgtttatcgggccggagctggaacaagtcgaagctgccaaggcggcaggcgcgccggtcattgaaattcacacaggggcatttgccgacgccggtaccgaggcagcaaaacatgctgaattgcagcgcattcgcatggcagtggaccatgggctggcactgggcctgactgtcaacgccgggcacggcctgaatattcacaacgtgcatgagattgtcagcattcccggtatcgaggaactcaatatcggccatgcgatcgtggcccacgccctgtttgtcggctgggagtacgcagtgcgcgaaatgaaggcgctgatcgtgcagaaggcgacctaa

SEQ ID NO: 147674 - protein, 240 aa, Methylobacillus flagellatus KT
MKLGVNIDHVATLRQARGTQYPSVVQAALRAEEAGADSITIHLREDRRHIQDADVFALRPLLQTKMNLEMAVTDEMVGIALQVRPQDVCLVPERREERTTEGGLNVIGNLGAIKGACKTLGDAGIRVSLFIGPELEQVEAAKAAGAPVIEIHTGAFADAGTEAAKHAELQRIRMAVDHGLALGLTVNAGHGLNIHNVHEIVSIPGIEELNIGHAIVAHALFVGWEYAVREMKALIVQKAT

SEQ ID NO: 147675 - DNA, 744 bp, Myxococcus xanthus DK 1622
  CDS (1)..(744): transl_table=11
atgagcgaggtgcggtcgatgggacagcgactgggtgtcaacgtggaccatgtggcgacgctgcgtcaggcgaggcgcaccacgtatccggatccggtgacggccgcggcgcttgcggagcttgccggcgcgcagcaaatcaccatccacctgcgcgaggaccggcgtcacatccaggaccgggatttgcgcatcctccgtgagacggtgcagacgctcctgaacctggagatggccgccaccgcggagatggtgaagctcgcctacgagcacaagccggacgtggtgacgctggtgcccgagcgccgcgaggagctcaccacggagggcggcctggaggtcgccaaccagcgcgagcacatcgcgaagatcatcaagaacctgaaggacggcgagattgccgtctcgctcttcatcgacccggacctggaccaggtgcgggcggcgcacaaggtgaacgcggaccgcatcgagctgcacacgggccgctactgcgaggcgcgcaacgagaaggagcgggcccgggagctggcgcgcatcatcgacgcggccaaggcgggcaccaagctgggcctgggcgtggccgcgggccatgggctcaactacgacaacgtgcaccccattgcccgcatctccgagatcgacgagctgaacatcgggcacgccatcgtcggtcgcgcggtgctggtgggcttcgagcgggcggtgcgtgagatgctcgaaatcatgcgcaacccggggtag

SEQ ID NO: 147676 - protein, 247 aa, Myxococcus xanthus DK 1622
MSEVRSMGQRLGVNVDHVATLRQARRTTYPDPVTAAALAELAGAQQITIHLREDRRHIQDRDLRILRETVQTLLNLEMAATAEMVKLAYEHKPDVVTLVPERREELTTEGGLEVANQREHIAKIIKNLKDGEIAVSLFIDPDLDQVRAAHKVNADRIELHTGRYCEARNEKERARELARIIDAAKAGTKLGLGVAAGHGLNYDNVHPIARISEIDELNIGHAIVGRAVLVGFERAVREMLEIMRNPG

SEQ ID NO: 147677 - DNA, 717 bp, Cytophaga hutchinsonii ATCC 33406
  CDS (1)..(717): transl_table=11
atgacccgattaagtgtaaatattaataaaatagctacgatacgtaatgccagaggcggaaataatccggatctgttgaaagtagcactggattgcgaacggtttggcgcagaaggcataactattcatccaagacctgatgagcgtcatatccgctatcaggatgcatatgatctgaaaaaaattgtaacaacagaattcaacattgaaggaaatccggaaggagaatttattgcgctggtggaaaatataaaaccggatcaggtaacacttgttccggatgcagttaatgcgattacatcaaatgccggctgggatactattacacaccaatcgtttcttactgaaatcatcagcaattttaaaaaagccggcatccgtgtttctgtatttgtagatcctgtaacggcaatggttgaaggagccgcgaaggcaggagcagaccgtgttgaattatatacagaaccgtacgccacttcgtttcattcaaataaagaagcagctataaaagaatacatagaagcggctgcagcggctaaatcactgggattgggaataaatgcagggcatgatctggatctgtttaatctaaattatctaaaaaagaatatccctttcttagatgaagtatccatcgggcatgcattaatctgtgacgcactatactatggattggaaaacacgatacagttatatcttcgtgaattaaaaaagtaa

SEQ ID NO: 147678 - protein, 238 aa, Cytophaga hutchinsonii ATCC 33406
MTRLSVNINKIATIRNARGGNNPDLLKVALDCERFGAEGITIHPRPDERHIRYQDAYDLKKIVTTEFNIEGNPEGEFIALVENIKPDQVTLVPDAVNAITSNAGWDTITHQSFLTEIISNFKKAGIRVSVFVDPVTAMVEGAAKAGADRVELYTEPYATSFHSNKEAAIKEYIEAAAAAKSLGLGINAGHDLDLFNLNYLKKNIPFLDEVSIGHALICDALYYGLENTIQLYLRELKK

SEQ ID NO: 147679 - DNA, 723 bp, Trichodesmium erythraeum IMS101
  CDS (1)..(723): transl_table=11
ttgcccactcttggcgtcaatatagatcatgttgctacaattagacaagcgcgacaaactgtagaacctgacccggtagcagcagcagttttagctgaactagctggtgctgatggcattactgtccatctacgggaagatcgtcgccacattcaagaacgagatgtccatattctccgacaaacagtgcagactcatttgaatctcgaaatggcccctactgatgaaatggtggcgatcgctctggaaattaaaccggactatattactctggtaccagaacgccgagaagaagtgacgacagaaggtggtttagatgtagcaggaaatctctcccaaatgaggaaagttgtagcccagttacaaggagtgggtattcctgtgagtatgtttattgatcccgaaagactacagatagaagcttccgcccaaattgaggccaagtttattgaactccatacaggatcttatgctgaagctaaaaatgaggccacacgccacaaagaattaactattttggcagatggatgcaacatagctattaatcatggtcttcgggtaaatgctggacatggcctcacttatgagaatgtttattcagttgcttgtctaaaaggcatggaagaactcaacattggtcatacaattgtttctaaggcggtactcgtgggtatggagcgagctgtccgtgaaatgaagcttgctattaatggcaagttctaa

SEQ ID NO: 147680 - protein, 240 aa, Trichodesmium erythraeum IMS101
MPTLGVNIDHVATIRQARQTVEPDPVAAAVLAELAGADGITVHLREDRRHIQERDVHILRQTVQTHLNLEMAPTDEMVAIALEIKPDYITLVPERREEVTTEGGLDVAGNLSQMRKVVAQLQGVGIPVSMFIDPERLQIEASAQIEAKFIELHTGSYAEAKNEATRHKELTILADGCNIAINHGLRVNAGHGLTYENVYSVACLKGMEELNIGHTIVSKAVLVGMERAVREMKLAINGKF

SEQ ID NO: 147681 - DNA, 738 bp, Shewanella sp. MR-4
  CDS (1)..(738): transl_table=11
atgagccgtatcttattgggtgttaatatcgaccacattgcgaccctgcgtcaggctcgcggcaccagttatcccgatcctgtccatgcggcggcggttgccgagcatgcgggtgccgacggtatcacgattcatttacgggaagacagacgccatattatcgaccgcgatgtgtatctgctggcaaaaaccttaaagacgcggatgaactttgagtgtgcagtgactgaagaaatgctcaacatcgcctgcgaagtcaaaccaacctacgtttgtttagtccctgaaaaacgtcaagaagtgacgactgaaggcggtttagatgtggctggtcaattagataaaatcactgcagcggtaagccgtttagccgccaatggtattcaagtgtcactgtttattgatgccgataagacgcaaatcgatgccgcagtcgaatctggcgcgccacttatcgaaatccataccggttgctatgccgatgctaaaacagctgaggaagaggccaaagagcttgcgcgtatcagcgaaatggctaaatacgcccacggtaagggcttagtcgtgaatgcgggccacgggctgcattaccacaatgttaagccgattgcggcgatccctgagctgtatgaactcaacattggccatgccattgtcgcgcgtgcggccattgatggcttagcgacagcggttaaagacatgaaagcactgatgttagaaggtcgtcgaggcgaataa

SEQ ID NO: 147682 - protein, 245 aa, Shewanella sp. MR-4
MSRILLGVNIDHIATLRQARGTSYPDPVHAAAVAEHAGADGITIHLREDRRHIIDRDVYLLAKTLKTRMNFECAVTEEMLNIACEVKPTYVCLVPEKRQEVTTEGGLDVAGQLDKITAAVSRLAANGIQVSLFIDADKTQIDAAVESGAPLIEIHTGCYADAKTAEEEAKELARISEMAKYAHGKGLVVNAGHGLHYHNVKPIAAIPELYELNIGHAIVARAAIDGLATAVKDMKALMLEGRRGE

SEQ ID NO: 147683 - DNA, 786 bp, Alkalilimnicola ehrlichei MLHE-1
  CDS (1)..(786): transl_table=11
atgatcactgaccaggaggacatagccatcgtgccccaggacgatcccgcggaccgccccctgttattgggggtcaacatcgaccacgtggccacgctgcgccaggcccgcggcaccgcctatcccgacccggtgcaggcggccttcgcggcggagcaggccggcgccgatctgatcacggtccatctgcgcgaggaccggcgccacattcaggaccgggatgtggcgctgctggcgcagaccgtccagacgcggatgaacctggagatggcggtcaccgacgagatgctgcgcatcgccaccgaactgcggccctcggactgctgcctggtgccggagcggcgggaggagctcaccaccgagggtggcctggacgtccaggcccaaccggaccggatcgccgaggcctgcgcccggctgggtgaggcggggatacgggtgtcgctgtttatcgaccccgaccccgagcaggtggaggcggctgcccgggtcggtgcgccggtggtggagctgcacaccggcgcctgggccgaggcgggcaacccgcgggatgcccgggtggaactggagcggctgcgcaccgcagtgggtcacgggctccagtgcggcctgcaggtgaatggcgggcacggactgcactatcacaatgtgcagccggtggcggccatcaccggcgtgcgggagctcaacatcggccacgccatcatcgcccgtgcggtcttctccggtctgcccgatgcggtgcgggagatgaaacgcctgatgcgggaggcccgtcagctatga

SEQ ID NO: 147684 - protein, 261 aa, Alkalilimnicola ehrlichei MLHE-1
MITDQEDIAIVPQDDPADRPLLLGVNIDHVATLRQARGTAYPDPVQAAFAAEQAGADLITVHLREDRRHIQDRDVALLAQTVQTRMNLEMAVTDEMLRIATELRPSDCCLVPERREELTTEGGLDVQAQPDRIAEACARLGEAGIRVSLFIDPDPEQVEAAARVGAPVVELHTGAWAEAGNPRDARVELERLRTAVGHGLQCGLQVNGGHGLHYHNVQPVAAITGVRELNIGHAIIARAVFSGLPDAVREMKRLMREARQL

SEQ ID NO: 147685 - DNA, 744 bp, Hyphomonas neptunium ATCC 15444
  CDS (1)..(744): transl_table=11
atgaccagccgtctccgcctcggggtcaatattgatcatgtggcgaccatccgcaacgcgcgcggaggcgcccatcctgatccgatgcgcgccgctgaaattgcggcggctgcgggcgcggacggcatcaccatccacctgcgcgaagaccgccgccacatccgcgacggagacctcgacgccattcgcgcggcgacccatttgccgatcaatctggaaatggcggcaaccgatgagatgacggaaatcgccgtccgcttccgcccccatgccgcctgtatcgtgcccgagcggcgcgaggaacgcaccaccgagggcggcctgaatgtcgccgggctgcataaccagatcgccccgatcgtcagccgtctgaatcaggcgggcgcgcgcgtctcgctcttcattgagcccgatcctgtgcagatcgctgttgcggaagtgcttggggcgccggtggtggagctgcacaccggccgctatgcagagctctggatcgaaggcggggcagaggccgccgcgccggagctggagcgtctgaagctcgccgccgccgatgcccgccgccggggcatcgagccccatgccggccatgggctcacatttgaaaatgtcggccccgttgccgccattccggaagtcgcggagctcaatatcggccacttcctgattggcgaggcgatcttcatcggtcttgatgcggccatccgcgaaatgcgccgcctgatggacgaggcacggcgatga

SEQ ID NO: 147686 - protein, 247 aa, Hyphomonas neptunium ATCC 15444
MTSRLRLGVNIDHVATIRNARGGAHPDPMRAAEIAAAAGADGITIHLREDRRHIRDGDLDAIRAATHLPINLEMAATDEMTEIAVRFRPHAACIVPERREERTTEGGLNVAGLHNQIAPIVSRLNQAGARVSLFIEPDPVQIAVAEVLGAPVVELHTGRYAELWIEGGAEAAAPELERLKLAAADARRRGIEPHAGHGLTFENVGPVAAIPEVAELNIGHFLIGEAIFIGLDAAIREMRRLMDEARR

SEQ ID NO: 147687 - DNA, 732 bp, Magnetococcus sp. MC-1
  CDS (1)..(732): transl_table=11
atgattttactgggtgtcaatattgatcacatcgcaaccctacgtcaggctcggggggagcgttatcccgatccggttgatgccgcttttgcggcagaacgggccggtgccgatagcataaccgtccatctgcgcgaggatcgtcgtcatatccaggatcgtgatgtggtgctgctccagcaaacctgccagaccaagattaatttagagatggccgccagtgagccaatgctgacgcttgcggagcgctggaaaccgcaagattgctgtctggtccctgaaaaacggcatgaattaaccaccgaagggggcttggatgtggtgggtaatcggcataggctcgccgacgcagtagcccgtttgcacgatgccggtattcgtgtctcgctctttgtagatccagatttggagcagatttctgcggcaggcgccattggtgcaacggtggttgagatgcacactggccgctatgccaatgcagcgacgcaagcacaacgcaacttggagcttgagcagctttaccgcgcggcccatcaggccagcctcaatgggttaaccgtccatgctgggcatggtttgacctatcacaatgtacaacccattgccagattgcccgatttgaaggagctcaatatcggtcacgccatcattgcccgtgctgtgatggtcggcatggagagcgccgtcaaagagatgaaacggttgatgcgtgaagcggttaaaacaccatga

SEQ ID NO: 147688 - protein, 243 aa, Magnetococcus sp. MC-1
MILLGVNIDHIATLRQARGERYPDPVDAAFAAERAGADSITVHLREDRRHIQDRDVVLLQQTCQTKINLEMAASEPMLTLAERWKPQDCCLVPEKRHELTTEGGLDVVGNRHRLADAVARLHDAGIRVSLFVDPDLEQISAAGAIGATVVEMHTGRYANAATQAQRNLELEQLYRAAHQASLNGLTVHAGHGLTYHNVQPIARLPDLKELNIGHAIIARAVMVGMESAVKEMKRLMREAVKTP

SEQ ID NO: 147689 - DNA, 750 bp, Azoarcus sp. BH72
  CDS (1)..(750): transl_table=11
gtgatcgaactcggcgtcaatatcgaccacgtcgccacgctgcgccaggcgcgccgcacctgggagccggacccgacctgggccgcggtagaagcccatctcggtggagcggacggcatcaccgtgcatctgcgcgaagaccgccgtcacatccaggacgacgacgtccgccgcctgcgcgaactcacccagatcaagttgaacctcgagatggcggccaccgacgagatggtcggtatcgcgcgcagcatcaagccggaaatggcgatgctggtgccggagggccgccacgaggtcaccaccgaaggcgggttggacatcgtgtcgcaggaagcgcgcctgaaggacgtgatcgcccggctggcggacgccggcatcgtcaccagtgtcttcatcgatgcggagatcgcccagatcgacgccgccgcgcgcatcggcgccagggtgtgcgagatccacaccggcccctatgcccacgcctttcacgcccaggggcgcgatgctgaaagcccggcggtgctggccgagatcgacaagatccgccgcgccggcgaagccatctgcagccacggcatgcgcttcaacgccggccatgcgctcaactactacaacgtgcaaccgattgcccggttgcccggcatccgcgaactgcacatcggccacgccatcgtcagccgcgcggtcttttccggcatccgcgaggcggtagcggagatgaagcgtctgatgcgcgaggcggccgccggctga

SEQ ID NO: 147690 - protein, 249 aa, Azoarcus sp. BH72
MIELGVNIDHVATLRQARRTWEPDPTWAAVEAHLGGADGITVHLREDRRHIQDDDVRRLRELTQIKLNLEMAATDEMVGIARSIKPEMAMLVPEGRHEVTTEGGLDIVSQEARLKDVIARLADAGIVTSVFIDAEIAQIDAAARIGARVCEIHTGPYAHAFHAQGRDAESPAVLAEIDKIRRAGEAICSHGMRFNAGHALNYYNVQPIARLPGIRELHIGHAIVSRAVFSGIREAVAEMKRLMREAAAG

SEQ ID NO: 147691 - DNA, 780 bp, Acidovorax sp. JS42
  CDS (1)..(780): transl_table=11
atgaccacctcccacgcgcgcaccgccctctccgtgaacgtcaacaaagtggcgctggtgcgcaacacgcgccatctgggcattcccagcgtgctgcgcgccgcgcagctgtgcctggaggcgggggcgcagggcatcaccgtccatccgcgccccgacgagcggcacattcgtgcacacgatgtgtaccaactggccgagctgctcaagcaatggccgcaggccgagtacaacatcgagggcaaccccacgcacaacctgatggagttcatccgccaggtgcgcccgcaccaggccaccttcgtgcccgacagccaggaccagttcaccagcgaccacggctggagctttccgcaagatgccgagcgcctggcgcccctgattgccgaatgccggcagttgggcgtgcgcgtgagcctgttcatggaccccgtgcccgagcagatggccgccgcgcacgccgtgggggccgaccgcgtggagctgtacaccgagccttacgccgccgcctggggcacgccgcagcaggccgtgcaactggagcgctaccgtgctgccgcccaggccgcgctggatgtcggcctgggggtgaacgcgggccacgacctcagccgcgacaacctggcggacttcctggcccacgtgcccggcgtgctggaggtgtccatcggccatgcgctgatcgccgatgcgctggagttgggctacggcgacacggtgcgcgcctaccagcgctgcatcgcccagggcatgacggagcggggactcctgaaaccatag

SEQ ID NO: 147692 - protein, 259 aa, Acidovorax sp. JS42
MTTSHARTALSVNVNKVALVRNTRHLGIPSVLRAAQLCLEAGAQGITVHPRPDERHIRAHDVYQLAELLKQWPQAEYNIEGNPTHNLMEFIRQVRPHQATFVPDSQDQFTSDHGWSFPQDAERLAPLIAECRQLGVRVSLFMDPVPEQMAAAHAVGADRVELYTEPYAAAWGTPQQAVQLERYRAAAQAALDVGLGVNAGHDLSRDNLADFLAHVPGVLEVSIGHALIADALELGYGDTVRAYQRCIAQGMTERGLLKP

SEQ ID NO: 147693 - DNA, 735 bp, Magnetospirillum magnetotacticum MS-1
  CDS (1)..(735): transl_table=11
atgtccagccgtcttcgcctcggggtcaatattgatcacgtcgccaccatccgtaacgcccgcggcggtcaccatcccgatccggtgcgggcggcgcatatggcggcaagcgccggggcggacggcatcaccgcccatctgcgcgaggatcggcgccatatctccgatcgggatatggagcggctggccaacgagatcacccttccgctcaatttcgagatggccgccaccgaggagatggtggccatcgcgctgcgccaccggccccatgccgcttgcatcgtgcccgagcgccgcgaggagcgcaccacagagggcggcctcgacgtggtggggcagttcgacagcctgaagcctctggtcgggcgtctggtcgaggcgggcatccgcgtttccatgttcatcgaggccaaccttaagcaactggacgcctccaaggccctgggcgcgccggtcatcgaactgcatacgggggcctattgcgacgccgagggcgaggcccgcgaccgcgaattcgcccgcatccgcgaagccgccgcccatgcccattccatcggcctggaatgccatgccgggcatggcttgtcttacgacacggtcaagccggtggcggcgctgccttccatcatggaactgaatatcggccacttcctggtgggtgaagccatctttgtcggactggaagcttccatccgccatatgcgccaactgatggacgaggcgcgccgaaggtga

SEQ ID NO: 147694 - protein, 244 aa, Magnetospirillum magnetotacticum MS-1
MSSRLRLGVNIDHVATIRNARGGHHPDPVRAAHMAASAGADGITAHLREDRRHISDRDMERLANEITLPLNFEMAATEEMVAIALRHRPHAACIVPERREERTTEGGLDVVGQFDSLKPLVGRLVEAGIRVSMFIEANLKQLDASKALGAPVIELHTGAYCDAEGEARDREFARIREAAAHAHSIGLECHAGHGLSYDTVKPVAALPSIMELNIGHFLVGEAIFVGLEASIRHMRQLMDEARRR

SEQ ID NO: 147695 - DNA, 723 bp, Crocosphaera watsonii WH 8501
  CDS (1)..(723): transl_table=11
ttgctcacccttggtgttaatatcgatcatgttgccactgtccgccaggccagacgaaccgttgaacccgatcccgttgcggctgcggttttagcggagttagggggggcaaatggtattacggcgcatttgagggaagatcgccgtcatatacaagatcgagacattcgcttactcagagaaaccgttcgcacccatcttaatctcgaaatggcagccactgaagaaatggtgtccattgccctagatgttaaaccagactatgttacccttgtcccagagaaacgggaagaagttaccacagaagggggcttagatatagctggaagcttggaaaaactaaaaaatgtggtggatcgcctccaaagcgcaaacatccctgtgagcctctttattgatgcagatgaatcacaaattaaagcctctgctgatacccaagcgaaatttatagaactccacactggaaaatatgccgatgcaccaaacccagaaatacgccaaaaggaattagaatcgttaaaattaggttgcgaacaagcattaaacttaggtttacgggttaatgccggtcatgggttaacctatataaatgtctatcctgtgggttgtttaccaggaatggaagagttaaatattggtcataccattgtcagtcgtgcggtgttagtggggatggaaagggcggttaaagaaatgaaactggccatgagaggggagttttga

SEQ ID NO: 147696 - protein, 240 aa, Crocosphaera watsonii WH 8501
MLTLGVNIDHVATVRQARRTVEPDPVAAAVLAELGGANGITAHLREDRRHIQDRDIRLLRETVRTHLNLEMAATEEMVSIALDVKPDYVTLVPEKREEVTTEGGLDIAGSLEKLKNVVDRLQSANIPVSLFIDADESQIKASADTQAKFIELHTGKYADAPNPEIRQKELESLKLGCEQALNLGLRVNAGHGLTYINVYPVGCLPGMEELNIGHTIVSRAVLVGMERAVKEMKLAMRGEF

SEQ ID NO: 147697 - DNA, 810 bp, Prosthecochloris aestuarii DSM 271
  CDS (1)..(810): transl_table=11
atgggcgaagcggaagaaaaatcgcagagagcaacccttttaccctgtatttgtcatttgtttctgattagtaacctctcacttttgacttttgctgccatgagactagccgtcaacgtcgaccatatagcaacccttcgaaacgcccgcaatgcaagccttcctgacccggtgaccgctgccgtgatcgctgaactcaacggggcatcaggaatcgtctgccacctgcgtgaagaccgccgccacatcaaagaccgcgacctggaacgcctccgtgaagccgtcacaacaagacttgatcttgaaatggcaatgaccactgaaatgcagcacatcgctatcaggaccaaaccggaactcatcacgcttgtccctgaaaaacgcgaagaactcaccactgaaggcggatttgacatcattcgtcactatgacaccctctgcaggtatatcaaacccgttcaggacgcaggcatcgaagtcagcatcttcatcgaacccgaagaagaagccatcgaacgagcagcatctgcaggagccgagatcgtcgaactgcataccggcccctactcgctcaaaaaaacgcctgcagaacttgaaaccgaactgatgagaatccgcaaagcagcaaccttcgcccgcagccgagggctgcgcgtcgtcgccggtcacgggctcgactatttcaatatcgtccccttcagaacaattgaagagatcgaagaagtcagcatcggccatgcgctgatagcacgcgctgcactcgtcggcatggaaaccgccgtgcgtgacatgcttcgaattatcaactga

SEQ ID NO: 147698 - protein, 269 aa, Prosthecochloris aestuarii DSM 271
MGEAEEKSQRATLLPCICHLFLISNLSLLTFAAMRLAVNVDHIATLRNARNASLPDPVTAAVIAELNGASGIVCHLREDRRHIKDRDLERLREAVTTRLDLEMAMTTEMQHIAIRTKPELITLVPEKREELTTEGGFDIIRHYDTLCRYIKPVQDAGIEVSIFIEPEEEAIERAASAGAEIVELHTGPYSLKKTPAELETELMRIRKAATFARSRGLRVVAGHGLDYFNIVPFRTIEEIEEVSIGHALIARAALVGMETAVRDMLRIIN

SEQ ID NO: 147699 - DNA, 714 bp, Croceibacter atlanticus HTCC2559
  CDS (1)..(714): transl_table=11
atgacaaaattaagtgtaaatattaataagatagctactcttagaaactcgagaggtggcaattatccaaatgtagttcaagtagctaaagatgtggagcgttttggtggtcaaggtattactgtgcatcctaggccagatgagcgccatatacgttatcaagatgttagagatttggcacctattgtgactactgagtttaatatagagggaaatccaaatcctaagtttatagatttggtgttgcaaaacaaaccgacacaagttactttagtgcccgatgctgttgatgctattacatctaatgctggttgggatactgtaaagcataaagactttttaactgaaattatttcagagtttaaaaacaacggtatccgtacatctgtatttgtagatcctgttgcggcaatgattgaaggtgcttcaaaaattggagcagatcgcattgagctttatacagaagcttttgcagataaatttactattagcccagaagaagctgtaagaccatatacagaaagtgcaatgttggcacattctttaaatttgggcataaatgcagggcatgatctgtctcttaaaaacattgcttattttaaagaaaaggtgccatatttattagaggtgtcaatagggcatgcattaataggagaaagtctttacttgggtcttgaaactgttatttctaattatttaaaagcattaaaataa

SEQ ID NO: 147700 - protein, 237 aa, Croceibacter atlanticus HTCC2559
MTKLSVNINKIATLRNSRGGNYPNVVQVAKDVERFGGQGITVHPRPDERHIRYQDVRDLAPIVTTEFNIEGNPNPKFIDLVLQNKPTQVTLVPDAVDAITSNAGWDTVKHKDFLTEIISEFKNNGIRTSVFVDPVAAMIEGASKIGADRIELYTEAFADKFTISPEEAVRPYTESAMLAHSLNLGINAGHDLSLKNIAYFKEKVPYLLEVSIGHALIGESLYLGLETVISNYLKALK

SEQ ID NO: 147701 - DNA, 753 bp, Sulfitobacter sp. EE-36
  CDS (1)..(753): transl_table=11
atggcggcacaaggtaagcttcggctgggcgtaaatattgaccacgtggcgactgtgcggaatgcgcgcggcggtgcctatccggacccgctgcgcgcagcccgcgccgcgcaagaggcaggcgctgatggcatcaccgcgcacctgcgcgaggatcgacgccacatcaccgacgcggatatcgaaggactgcaagaggtgttgaacgtgccgctcaacttcgagatggccgccacggaagagatgcaggccatcgccctgcgccacaaaccccatgccgtctgcatcgtgccggaaaagcgcgaagagcggacaaccgaaggcgggcttgaagtcgcacgcgaggaaaaccggctggcgcattttattgctcctctgcgcgaagcgggcagccgcgtcagcatcttcatcgccgccgatcagcgccagattgaggcggcgaaccgcattggggcagaggtgatcgaactgcacaccggtgcctattgcgacgcctatgccgaaggacattgggaggaagcgcaaaaggagctgcaaaagctcgaggagatgtcaaaattcgcccataatctggggcttgaggtgcacgcgggccacggcctgacctatgataccgtcagccccgtcgcagctttccccgaggtgcaagagctgaacatcgggcatttccttattggcgaggcgatctttctgggcctcggccccgccatcgccgagatgcgccgcctgatggatgatgcccgcaagggctga

SEQ ID NO: 147702 - protein, 250 aa, Sulfitobacter sp. EE-36
MAAQGKLRLGVNIDHVATVRNARGGAYPDPLRAARAAQEAGADGITAHLREDRRHITDADIEGLQEVLNVPLNFEMAATEEMQAIALRHKPHAVCIVPEKREERTTEGGLEVAREENRLAHFIAPLREAGSRVSIFIAADQRQIEAANRIGAEVIELHTGAYCDAYAEGHWEEAQKELQKLEEMSKFAHNLGLEVHAGHGLTYDTVSPVAAFPEVQELNIGHFLIGEAIFLGLGPAIAEMRRLMDDARKG

SEQ ID NO: 147703 - DNA, 750 bp, Roseovarius nubinhibens ISM
  CDS (1)..(750): transl_table=11
atgcaagccgacaaccatctgcgcctgggcgtgaatatcgaccatgtggccaccatccgcaacgcgcgcggcggggcctatcccgatccggtgcgggcggcgaaactggccgaagaggccggggccgatggcatcacggcgcatctgcgcgaggaccggcggcatattctcgacgccgatatcgatgggctgatggaggcgctcactgtgccgctcaactttgagatggcggcgacggatgagatgcaggcgattgccctgcgccacaaaccccatgcggtctgcatcgtgccggaaaagcgcgaggaacggaccactgaaggcgggctcgaagtggcgcgcgaggaaaacaagctcgcccatttcatcgcgccgctgcgcgaggcgggctgtcgggtgtcgattttcatcgccgccgaccgcgcccagatcgaggccgcgcatcgcatcggcgccgaggtgatcgagctgcacaccggggcctattgcgactatcacgccgagggcgattttgccgcccgcgaccgcgaattggtggcgctgaccgagatggcgacctttgcccattcgctcggtctcgaagtgcatgcgggccatgggctcacctatgacacggtggcgccgattgcggcgctgccggaggtgcgcgagctcaacatcgggcatttcctcatcggcgaggcgatctttcgcgggctgaccccggcgattgccgagatgcgcgccgcgatggatgcggcgcggagctga

SEQ ID NO: 147704 - protein, 249 aa, Roseovarius nubinhibens ISM
MQADNHLRLGVNIDHVATIRNARGGAYPDPVRAAKLAEEAGADGITAHLREDRRHILDADIDGLMEALTVPLNFEMAATDEMQAIALRHKPHAVCIVPEKREERTTEGGLEVAREENKLAHFIAPLREAGCRVSIFIAADRAQIEAAHRIGAEVIELHTGAYCDYHAEGDFAARDRELVALTEMATFAHSLGLEVHAGHGLTYDTVAPIAALPEVRELNIGHFLIGEAIFRGLTPAIAEMRAAMDAARS

SEQ ID NO: 147705 - DNA, 750 bp, Oceanicola batsensis HTCC2597
  CDS (1)..(750): transl_table=11
atgagcgaaccagcgctgcggctcggggtgaacatcgaccatgtcgctacggtccggaacgcccgcggcggagcctatccggaccccctccgcgcggcgaaactggcccaggaggccggggccgacggcatcaccgcgcatctgcgcgaagaccggcggcatatctcggacgcggatatcgaggggctgatggcgaccctgtccctgccgctcaacttcgagatggcggccacggacgagatgcaggccatcgcgctgcggcaccggccacatgccgtctgcatcgtgccggagcggcgcgaagagcggacgaccgagggcgggctggaggtcgcgcgcgaagagaacaggctggcacattttatcgcgccgctgcgcgaggcagggtgccgcgtctcgatattcatcgcggcggacagcaagcagatcgaggccgcgcacaggatcggcgcgcaggtgatcgagcttcacaccggcgcctattgcgatgcccatgccgaggaacggttcgaggaacgcgacgcggagctggcgcggctgaccgagatggcgacattcgcgcattcgctcgggctcgaggtccacgcaggacacgggctgacctatgacacggtgcagcccgtcgcggccctgcccgaggtgcgggagctgaacatcggccatttcctggtcggcgaggcgatcttccgggggctcgatccggccatccgcgagatgcggcgcctgatggacgacgcgcgcgctgcgtga

SEQ ID NO: 147706 - protein, 249 aa, Oceanicola batsensis HTCC2597
MSEPALRLGVNIDHVATVRNARGGAYPDPLRAAKLAQEAGADGITAHLREDRRHISDADIEGLMATLSLPLNFEMAATDEMQAIALRHRPHAVCIVPERREERTTEGGLEVAREENRLAHFIAPLREAGCRVSIFIAADSKQIEAAHRIGAQVIELHTGAYCDAHAEERFEERDAELARLTEMATFAHSLGLEVHAGHGLTYDTVQPVAALPEVRELNIGHFLVGEAIFRGLDPAIREMRRLMDDARAA

SEQ ID NO: 147707 - DNA, 744 bp, Erythrobacter sp. NAP1
  CDS (1)..(744): transl_table=11
atgaccaagcctctccgcctcggcgtcaatatcgaccacgtcgcgaccatccgtaatgcgcgcggcggcgatcatcctgatcctgtgcgcgccgcggaaatcgtggctgccgtcggaggcgacgggattaccgctcaccttcgcgaagatcgccgtcatattcgcgacgaagaccttgcgcggattcaggatgcgaccgaccttccgctcaacctcgaaatggccgcgaccgaggaaatgctcgagatcgcgctgaggcacaaaccgcatgcagcctgcatcgtcccggagaagcgagaggaacgcacaaccgagggcgggcttgatgctgcggggcttcacaacacgctgacaccgattgtgtatcggttgaaggatcacggcatccgagtctcgctctttatcgaggcggatgagcgccagcttgatgccgcgctgaaactgggcgtgccggtcgtcgaatttcacaccggagaatacgcgcacgcgattctcgacggcgacagcgaacgcaccgcaaaggaattgcgccgcatcaccgacattgccgcgctcgccgcaaagaacgggatcgagccacatgcaggccacggtctgacatttgacaatgtccagccgatcgccgccatcccgcagatcgccgagctcaatattggccattacctgattggcgaggcgatcttcgcagggcttgaacctgcaatccgccgcatgcgcgacttgatggatgaggcgcgcgggtga

SEQ ID NO: 147708 - protein, 247 aa, Erythrobacter sp. NAP1
MTKPLRLGVNIDHVATIRNARGGDHPDPVRAAEIVAAVGGDGITAHLREDRRHIRDEDLARIQDATDLPLNLEMAATEEMLEIALRHKPHAACIVPEKREERTTEGGLDAAGLHNTLTPIVYRLKDHGIRVSLFIEADERQLDAALKLGVPVVEFHTGEYAHAILDGDSERTAKELRRITDIAALAAKNGIEPHAGHGLTFDNVQPIAAIPQIAELNIGHYLIGEAIFAGLEPAIRRMRDLMDEARG

SEQ ID NO: 147709 - DNA, 750 bp, Synechococcus sp. RS9917
  CDS (1)..(750): transl_table=11
gtggccagcctcggtgtgaacatcgaccacatcgccaacgtgcgtcaggcccgccgcaccgttgagcccgatccggtgagctacgccctgctggccgaactgggcggcgccgacggcatcaccgtgcacctgcgcgaagaccgtcgccacatccaggaccgtgacgtggacttgctgcgccagacggtgcgcagccgtctcaatctggagatggcggccaccaccgagatggaagcgatcgccctgcggatccggcccgacatggtcaccctggtgccggagaagcgcgaagaggtgaccaccgaagggggcctcgatgtggccggccaggtggaaccgctccagcgactggtcggccgattgcaggacgccgggatcggcgtgagcctgtttgtggatgccgacgcacgccagctgcaggcttgccgcaccacgggagctcgctgggtggaattgcacaccggccgctatgccgaagcggcgtggcccgaccagcctttggagctggcgcggttgatcgagggcagtgcgatcgcccgcaatctcgacctgcgcgtcaacgccggccatggcctcacctaccagaacgtggaagcggtggcggcgatcgaaggcatggaggagctgaacatcggccacacgatcgtggcccgcgccctggcggtcggcctgcagagcgccgtcagcgaaatgaagcgtctggttcagaatccccgccgtgagccgctctttggaagcaccccgtcatga

SEQ ID NO: 147710 - protein, 249 aa, Synechococcus sp. RS9917
MASLGVNIDHIANVRQARRTVEPDPVSYALLAELGGADGITVHLREDRRHIQDRDVDLLRQTVRSRLNLEMAATTEMEAIALRIRPDMVTLVPEKREEVTTEGGLDVAGQVEPLQRLVGRLQDAGIGVSLFVDADARQLQACRTTGARWVELHTGRYAEAAWPDQPLELARLIEGSAIARNLDLRVNAGHGLTYQNVEAVAAIEGMEELNIGHTIVARALAVGLQSAVSEMKRLVQNPRREPLFGSTPS

SEQ ID NO: 147711 - DNA, 750 bp, Synechococcus sp. WH 5701
  CDS (1)..(750): transl_table=11
atggccagccttggcgtgaacatcgatcacatcgccaacgtgcgtcaggcccgccgggccctggaaccagatccggtcaccctggcgctgctggcggagctggggggcgccgatgggatcaccgtgcatctgcgcgaagaccggcgccacatccaggagcgcgacgtcgagctgctgcgggccaccgtgcgcagccgcctcaacctggagatggctgccacccctgagatggaggcgatcgccctgcggatccgcccggacatggtgaccctggtgccggaacatcgccaggaggtcaccaccgaaggcggactcgacgtggtgagccagctcggcacgctccaggcactggtgggccgcctgcagggctcaggcatcccggtcagcctgttcgtggatccggaggtcactcagctggaagccagccgtgccagcggtgcccgctgggtggagctgcatacaggcgcctacgccgaggccgactgggctgagcagccgcgggaactggcgcggctcgaagagggcagcttcgtggcccgttccctggggctgcgggtcaatgctggccacgggctcacgtaccagaacgtggagccgatcgccgcgatcgaggggatcgaggagctgaacatcggccacacgatcgtggccagggccctggccgtggggttgcagagcgctgtgagggagatgcgctccctgattcagaatccacgccgcgaccccctgttcagcagcaacaccccatga

SEQ ID NO: 147712 - protein, 249 aa, Synechococcus sp. WH 5701
MASLGVNIDHIANVRQARRALEPDPVTLALLAELGGADGITVHLREDRRHIQERDVELLRATVRSRLNLEMAATPEMEAIALRIRPDMVTLVPEHRQEVTTEGGLDVVSQLGTLQALVGRLQGSGIPVSLFVDPEVTQLEASRASGARWVELHTGAYAEADWAEQPRELARLEEGSFVARSLGLRVNAGHGLTYQNVEPIAAIEGIEELNIGHTIVARALAVGLQSAVREMRSLIQNPRRDPLFSSNTP

SEQ ID NO: 147713 - DNA, 732 bp, Pseudoalteromonas tunicata D2
  CDS (1)..(732): transl_table=11
atgaaagatattttattaggtgtgaatgttgaccatgttgctacgttgcgccaagcacgtggcacgacttttcctgatccagctcatgcagcagccgtagcagagcatgccggtgctgatgggatcaccattcatttacgtgaagatcgccgacatatccaagacagagatgtgcatgtgatgagtaaaaccattcaaacgcgcatgaactttgaaatagccgttactgaagagatgttgcaattagcgcttgaaatcaagcctgcgtttgtttgtttagtgccagaaaaacgcgaagaactaacaactgaaggcggtttagatgtcgcgggcaatcaattgaaaattgccgaggctgttgcacgtttaaccgctgcgggcattaaagtatccttgtttgttgatgccgatccgattcaactcaaagcctgtgctgcggttcatgctccgtatattgaaattcataccggtgcttatgctgatgcagaaactgaagaggcacaactcgaagaactggaacgcattaaagcgggtgtaaaaacagcggttgatttaggtttaattgttaacgctggtcatggcttgaattatcataatgtaaaaccaattgctgcgattgaagatatttatgagcttaatattggtcacgccattgttgctcgtgccgttattgatgggtttgaaaaagccgtacgagatatgaaacgtttgatgctcgaagctagaatgtaa

SEQ ID NO: 147714 - protein, 243 aa, Pseudoalteromonas tunicata D2
MKDILLGVNVDHVATLRQARGTTFPDPAHAAAVAEHAGADGITIHLREDRRHIQDRDVHVMSKTIQTRMNFEIAVTEEMLQLALEIKPAFVCLVPEKREELTTEGGLDVAGNQLKIAEAVARLTAAGIKVSLFVDADPIQLKACAAVHAPYIEIHTGAYADAETEEAQLEELERIKAGVKTAVDLGLIVNAGHGLNYHNVKPIAAIEDIYELNIGHAIVARAVIDGFEKAVRDMKRLMLEARM

SEQ ID NO: 147715 - DNA, 732 bp, Photobacterium sp. SKA34
  CDS (1)..(732): transl_table=11
atgaacaatatattacttggcgtgaacatcgatcatattgcgacattacgtaatgcgcgtggtacaagttacccagatccagttcatgctgcagaagtagctgagcgagcgggcgctgatggcatcactattcatttgcgtgaagatcgtcgccacattaatgatcgtgatgtgcgtattttacgtgagacgatccaaactcgaatgaatttagaaatggccgtcactgatgaaatggtggcaattgcgttagatgttaagccagaatatgtttgcctcgtaccagaaaagcgtgaagagttaaccactgaaggtggtttagatgtctcgggtcaactagaaaaagtaaaagcggcaacggaaaagcttactgctgctgggatcaaagtgtcacttttcattgatgctgatcgcgcgcaaattgatgctgctcatgcttgtggcgcaccgtttattgaacttcatactgggcaatatgcagaagcaaaaaccgaagaagcacaattggatgagctgaagaaggttgctgcaggtgcaagctacgcccataatttaggcattaaagtaaatgcagggcatggtttaacttatcacaatgttaagcttatagcggcattaccagagctctatgaactcaacattggtcattctattatgggtcgagcaatgtttgatggattagaaaagtcagttgcagatatgcgtttgttaatgcaggaagcgcgtggttaa

SEQ ID NO: 147716 - protein, 243 aa, Photobacterium sp. SKA34
MNNILLGVNIDHIATLRNARGTSYPDPVHAAEVAERAGADGITIHLREDRRHINDRDVRILRETIQTRMNLEMAVTDEMVAIALDVKPEYVCLVPEKREELTTEGGLDVSGQLEKVKAATEKLTAAGIKVSLFIDADRAQIDAAHACGAPFIELHTGQYAEAKTEEAQLDELKKVAAGASYAHNLGIKVNAGHGLTYHNVKLIAALPELYELNIGHSIMGRAMFDGLEKSVADMRLLMQEARG

SEQ ID NO: 147717 - DNA, 774 bp, Oceanospirillum sp. MED92
  CDS (1)..(774): transl_table=11
gtgatagaaccgtcacgtttactattgggtgttaacattgatcatgtggcaactatcagacaagctcgtggtacccgctatcctgatactgttcaggctgcggcgctggctgaagaggcaggtgctgatggcataacgattcatttgcgtgaagatcgtcgtcacattcaggatcgtgatgtgtatttgttaaaagaaacattacaaacgcgcatgaattttgaaatggcagttaccgacgaaatgattgccattgctgaagacgtaaagcctgctcactgttgccttgtaccagagaagagagaagagctaaccacagagggtggcttggatgtagctgggcaggaagcacgaattcaagaagcctgtaaccgcctgtcaaatgcagggattgaagtttctctgtttatcgatcctgattttcagcaaattgatgccacaattcgttgtggtgctccagtgatcgagttacacacgggagcttatgctgaagccgaaagcgctgaagagcagaaggcggaattaacacgtatacgtgaagcggctgcctacgcttatcagaaaggcctgatagtcaatgctgggcatggtcttcattatcataatgttgagcagattgccgaaattccagaaatgaatgaactaaatattggtcatggaatcattgcaagagcattgtttgttgggttgaaagaagcggtttcagaaatgaagcagcagatgatgcttgctcagtcccgtgtacaggctaaacgtgacgcattaagtgaatga

SEQ ID NO: 147718 - protein, 257 aa, Oceanospirillum sp. MED92
MIEPSRLLLGVNIDHVATIRQARGTRYPDTVQAAALAEEAGADGITIHLREDRRHIQDRDVYLLKETLQTRMNFEMAVTDEMIAIAEDVKPAHCCLVPEKREELTTEGGLDVAGQEARIQEACNRLSNAGIEVSLFIDPDFQQIDATIRCGAPVIELHTGAYAEAESAEEQKAELTRIREAAAYAYQKGLIVNAGHGLHYHNVEQIAEIPEMNELNIGHGIIARALFVGLKEAVSEMKQQMMLAQSRVQAKRDALSE

SEQ ID NO: 147719 - DNA, 774 bp, Xanthobacter autotrophicus Py2
  CDS (1)..(774): transl_table=11
atggcggtgctgaagccggtgcggctcggagtgaacgtcgatcacgtggcgacggtgcgcaacgcgcgcggcggcgcccttcccgacccggtgcgcgccgccgccctcgccaaggccgccggagcccatggcatcaccgcccacttgcgcgaagaccgccgccacatccgcgacgcggacatggagcggctgaaggccgagatcgacctgccgctcaatttcgagatggcggcgactgacgagatggttgccatcgcctgccgcgtccgtcccaacgcctgctgcctggtgcccgagcggcgcgaggagcgcaccaccgagggtgggctcgatgctgccggccagcgggcggagcttgcgccccggatcgcccggctgaaggcggcgggcatccgcgtctccctgttcatcgcggcggatccggcccagatcgcggcggcggccgagctcggcgcggacatcgtggaactgcacaccggcgcctggtgcgacgcggtgacggaaggccggcatgtggaggccgaggccgagttcgtgcggctgaaggccggggcgcggcaggcggcggggctcgggctggaggtccatgcgggccacggcctcgactatgccaccgccgagcgcatcgccgccttcccgcagatcgtggagctgaacatcggccacttcctcatcggcgaggccattttcgtggggctcgaccaggccattgcgcgcatgagggcggccatcgcggcgggccgggccgccgtcggggacggcgcggcggcatga

SEQ ID NO: 147720 - protein, 257 aa, Xanthobacter autotrophicus Py2
MAVLKPVRLGVNVDHVATVRNARGGALPDPVRAAALAKAAGAHGITAHLREDRRHIRDADMERLKAEIDLPLNFEMAATDEMVAIACRVRPNACCLVPERREERTTEGGLDAAGQRAELAPRIARLKAAGIRVSLFIAADPAQIAAAAELGADIVELHTGAWCDAVTEGRHVEAEAEFVRLKAGARQAAGLGLEVHAGHGLDYATAERIAAFPQIVELNIGHFLIGEAIFVGLDQAIARMRAAIAAGRAAVGDGAAA

SEQ ID NO: 147721 - DNA, 741 bp, Oceanobacter sp. RED65
  CDS (1)..(741): transl_table=11
atgaaagtcaataaacgcgtattacttggtgtcaacatcgaccacatcgctactttacgtcaggcgcgaggtacccgttatcctgatccagtatatgcggcattggtggctgaagaagctggtgctgacggtattactttgcacttgcgcgaagatcgcagacacattcaagatgctgacgtttatgccctaagagagcgtctgaatacccgcatgaatttagaaatggctgtaacagatgagatggtagccatcgccaaagaagtaaaacctcatgctgtatgtttagtcccagaaaaacgcgaagaactcacgacagagggcgggctagatgtccttggtaacgaggcgaaaattaaacaggcgtgtgatgatctcgcgtctgttggcagcgaagtatctctgtttatagatgcagacacgaaacaaattgatgcggcagtgcgctgcggtgcaccagtaatcgagattcatactggtcactacgctgaagctcaatctgcggcggagatgcagcgtgaattgaagaaaattgaagacggtgcgagctatgcactggagcaaggtttgattgtgaatgccggtcacggtttacattatcacaataccgaagcaatcgccgcgatatcgggcatgaacgaattgaatattggtcacgcgattatcgcccacgcggcgtttgtcggtcttaagcaagccgttaaagaaatgcgagatctcattactgcagtgaatcagtaa

SEQ ID NO: 147722 - protein, 246 aa, Oceanobacter sp. RED65
MKVNKRVLLGVNIDHIATLRQARGTRYPDPVYAALVAEEAGADGITLHLREDRRHIQDADVYALRERLNTRMNLEMAVTDEMVAIAKEVKPHAVCLVPEKREELTTEGGLDVLGNEAKIKQACDDLASVGSEVSLFIDADTKQIDAAVRCGAPVIEIHTGHYAEAQSAAEMQRELKKIEDGASYALEQGLIVNAGHGLHYHNTEAIAAISGMNELNIGHAIIAHAAFVGLKQAVKEMRDLITAVNQ

SEQ ID NO: 147723 - DNA, 747 bp, Synechococcus sp. RS9916
  CDS (1)..(747): transl_table=11
gtggcaagcctcggcgtcaacatcgatcacattgccaatgttcgtcaggcccgacagaccgttgaacccgatccggtgacgatgtgtctgcttgctgaactcggaggcgcagacggcatcaccgttcacctgcgcgaagaccgtcgacacatccaagatcgcgacgtggaactgctgcgtcagaccgttcgcagccgcctgaacctggaaatggcagccaccggggagatgcaaaccatcgcccttcggatcaaacccgacatggtcaccctggtgcccgaacgtcgagaagaagtgaccacggagggcgggctcgatgtggccggtcagatccccagcctgacctccatggtgcaaacccttcagggttcggggattcccgtgagtctgtttgtggatcctgagctgggccaactcaaggcctgtcaagcgacgggagcgcgatgggttgaactgcacaccggcacgtacgccgaagcctcctgggatgagcagccagcggaactggcaaggctcacagaagccacagcccaggctcgggcactgggattaagagtgaatgctggccacggactcacctaccaaaacgttgaacctgtggctgccatcgaagggatggaggaactcaacatcggccacacgatcgtggcgcgcgcccttgccgtgggattgcaggccgctgttcaagagatgcggactctggtccagaatccccgccgtgaccccctgttcggacgtctgaactga

SEQ ID NO: 147724 - protein, 248 aa, Synechococcus sp. RS9916
MASLGVNIDHIANVRQARQTVEPDPVTMCLLAELGGADGITVHLREDRRHIQDRDVELLRQTVRSRLNLEMAATGEMQTIALRIKPDMVTLVPERREEVTTEGGLDVAGQIPSLTSMVQTLQGSGIPVSLFVDPELGQLKACQATGARWVELHTGTYAEASWDEQPAELARLTEATAQARALGLRVNAGHGLTYQNVEPVAAIEGMEELNIGHTIVARALAVGLQAAVQEMRTLVQNPRRDPLFGRLN

SEQ ID NO: 147725 - DNA, 732 bp, Vibrio sp. Ex25
  CDS (1)..(732): transl_table=11
atgagctcaatttatttaggcgtcaatatcgaccatattgccactctacgtaatgcacgtggtacaaaataccctgatcctgttcacgctgcagaaattgctgagcgtgcaggcgcggatggtatcacaattcacttacgtgaagaccgtcgccatattttggaccgtgatgtacgtattctgcgtgaaaccattcaaacgcgtatgaatctagagatggcagtgactgacgaaatggttgagattgcgctgcaaactcaaccagagtttgtgtgtttagtgcctgaaaagcgtgaagaactgacgacggaaggtggcttagatgtagtagggcagcttgaaaaaattaaagctgcgacgaaaaagctgacagatgcaggcattaaagtttcactctttattgatgctgaccgtcaacagattgaagctgcgaaaaagtgtggtgctccgtttattgagctacacacgggtcattatgctgatgcgacgacagaagacgaacaacaagctgaactgaagaagattgccgctggtgcgagttatgctcatgacctaggtattattgttaatgccgggcatggcctgacttatcacaatgtcgcgccaattgctgcattaccagaaatttacgaactcaacattggtcactcaatcattggtcgcgcggtatttgatggtttgaataaagcggttgcggacatgaaagcactgatgattgaggcacgccagtaa

SEQ ID NO: 147726 - protein, 243 aa, Vibrio sp. Ex25
MSSIYLGVNIDHIATLRNARGTKYPDPVHAAEIAERAGADGITIHLREDRRHILDRDVRILRETIQTRMNLEMAVTDEMVEIALQTQPEFVCLVPEKREELTTEGGLDVVGQLEKIKAATKKLTDAGIKVSLFIDADRQQIEAAKKCGAPFIELHTGHYADATTEDEQQAELKKIAAGASYAHDLGIIVNAGHGLTYHNVAPIAALPEIYELNIGHSIIGRAVFDGLNKAVADMKALMIEARQ

SEQ ID NO: 147727 - DNA, 732 bp, Alteromonadales bacterium TW-7
  CDS (1)..(732): transl_table=11
atgaaagatattcttttgggtgtaaatgttgatcacattgcaacgcttcgccaagcacgaggaacaacttatcctgacccagcacatgcagcaagcgttgcagagcacgccggtgcagacggcattaccattcatttacgtgaagaccgccgccacattcaagaccgtgacgtgtacgtaatggcaaaaaccattcaaacgcgtatgaacctcgaaacagcagtaaccgatgaaatgattgctattgctttagaggtgaagcctgaatatgtttgtttagtgccggaaaaacgagaggaattgaccactgagggcggtttagatgttgcaggtaatatagaaaaaataaaagcggcaactaaaacccttaccgatgcaggtatcaaagtctcattatttattgacgcggatactgcacaactagatgctgcaaaagcctgtggcgcaccttatgtagaaatacacaccggtgcatacgcagatgctacaaacgatagcgacttaagcaaagaacttgaacatattcgtcaaggagtacaatacgctgcaagtttaggcttaattgtaaatgcaggacatggtttaaattaccataatgtaaaaccaatagcggctatgccagaaatttatgagttaaatataggccacgctattattgcgcgtgccgccattgatggcttagataaagcggtgcgtgatatgaagcgcctaatgattgaagcgcggatttaa

SEQ ID NO: 147728 - protein, 243 aa, Alteromonadales bacterium TW-7
MKDILLGVNVDHIATLRQARGTTYPDPAHAASVAEHAGADGITIHLREDRRHIQDRDVYVMAKTIQTRMNLETAVTDEMIAIALEVKPEYVCLVPEKREELTTEGGLDVAGNIEKIKAATKTLTDAGIKVSLFIDADTAQLDAAKACGAPYVEIHTGAYADATNDSDLSKELEHIRQGVQYAASLGLIVNAGHGLNYHNVKPIAAMPEIYELNIGHAIIARAAIDGLDKAVRDMKRLMIEARI

SEQ ID NO: 147729 - DNA, 711 bp, Candidatus Desulfococcus oleovorans Hxd3
  CDS (1)..(711): transl_table=11
atgacacatctggccgtcaacgtagatcacatcgccaccctgcgccaggcacggggcgtggattatcccgaccccgtggccggggccgtgctggcccagctggccggtgcccacggcatcgtggcccacctgcgggaggaccggcgccacattcaggacaccgacgtggtgcggctccgggccgccgcccgccgttttatcctggagatggcggtgaccccggagatggagaaaatcgccctttcggtcaagcccgacctggtcaccctggtgccggaaaagcgaaaagagctcaccaccgaaggggggctcaaccttgccagacacggcgggccggtggcaaaaaccattgaaaccctgcaccgcaacgaaattccggtcagcctgtttattgacccggaccccggccaggtgcgccgttcccatgatgcaggggccatggccgtggagattcacaccggcgccttttgcgaggccgccaccgaaaaaatccgtcaaaaagagtttgaccggattcgaaaggccgtggaagtggcccgcaaccttgggctgattgtcaatgccgggcacgggctctgttacaccaccattgaatggatggtcaccttaaaggagatcgacgaattcagcatcggccacagcatcgtctcccgggccgccctggtggggatggaccgggccgtccgcgatatgctggcccttatctcatga

SEQ ID NO: 147730 - protein, 236 aa, Candidatus Desulfococcus oleovorans Hxd3
MTHLAVNVDHIATLRQARGVDYPDPVAGAVLAQLAGAHGIVAHLREDRRHIQDTDVVRLRAAARRFILEMAVTPEMEKIALSVKPDLVTLVPEKRKELTTEGGLNLARHGGPVAKTIETLHRNEIPVSLFIDPDPGQVRRSHDAGAMAVEIHTGAFCEAATEKIRQKEFDRIRKAVEVARNLGLIVNAGHGLCYTTIEWMVTLKEIDEFSIGHSIVSRAALVGMDRAVRDMLALIS

SEQ ID NO: 147731 - DNA, 741 bp, Pseudomonas putida GB-1
  CDS (1)..(741): transl_table=11
gtgactcacagcaaccgcatgcttcttggcgtaaacatcgaccacgtggcgaccctgcgccaggcccgtggcacgcgttaccctgacccggtcaaggctgccctggacgccgaggaagcgggcgccgatggcatcactgtgcacctgcgcgaagaccgccggcacatccaggagcgggatgtggtggtgctcaaggatgtgctgcagacgcgcatgaacttcgagatgggcgttaccgaagagatgatggcgtttgccgagaagattcgcccggcacacatctgcctggtacccgaaacccgtcaggagctgaccaccgaaggtggcctggacgtggcaggacaggaagctcggatcaaggctgccgttgagcgcctggcgcgtaccggtgccgaggtgtcgctgttcatcgatgccgatgagcggcagatcgaggcctcgcgtcgggttggcgcgccggcgatcgagctgcacaccgggcgttatgccgatgcccaaaccccaaccgaagtggctgaagaactcaagcgtatcgtcgatggtgtggcgtttggtgtggggcaggggctgatcgtcaatgctggccatgggttgcattaccacaacgtcgaggcagtcgcggcaatcaaaggcatcaatgaactgaacatcggccatgcgctcgtggcacatgccttgttcgttggcttcaaagctgctgtggcggagatgaaagccctgatcgtagcggcttcgcgctga

SEQ ID NO: 147732 - protein, 246 aa, Pseudomonas putida GB-1
MTHSNRMLLGVNIDHVATLRQARGTRYPDPVKAALDAEEAGADGITVHLREDRRHIQERDVVVLKDVLQTRMNFEMGVTEEMMAFAEKIRPAHICLVPETRQELTTEGGLDVAGQEARIKAAVERLARTGAEVSLFIDADERQIEASRRVGAPAIELHTGRYADAQTPTEVAEELKRIVDGVAFGVGQGLIVNAGHGLHYHNVEAVAAIKGINELNIGHALVAHALFVGFKAAVAEMKALIVAASR

SEQ ID NO: 147733 - DNA, 735 bp, Marinobacter sp. ELB17
  CDS (1)..(735): transl_table=11
atgaactccagagtattgcttggtgtgaatattgatcacgtggccactttgcgtcaggcccgcggcacacgttatcccgatccggtacaggctgcattgctggcggaagaagccggcgccgacggcataaccattcacccgcgggaagatcgccgtcacattcaagaccgtgacgtgctgctgttacgcgataccttgcagaccaaaatgaaccttgaaatggcggttaccgacgccatgctggattttgctgaacaaatccgcccggcctgcgtgtgcctggtgcctgaaaagcgcgaagaactgaccaccgagggcggtttggacgttgagggccaggaagcccgcatcgccaaagcctgcgaacgcctggcggccataggtgcggaagtatccctgttcatcgacccgaacaaaattcagattgatgccgccgtgcgctgtggcgcgccggtgattgaattgcacaccggcgagtacgccgaggccagtggcgcggctgcggatgcggctttcaaagtattggtggaagcggtctcctacgctcgcaagaagggtttggtggttaacgcaggccatggtctgaattatcacaacaccgagcgggtggcagcgattgccgggattaacgagttgaatatcggccatgctattatcgcccgggcggtcttcaccggtctgaaagaagcagtgcgggatatgaaaacactgattgataacgcttgccggcgttag

SEQ ID NO: 147734 - protein, 244 aa, Marinobacter sp. ELB17
MNSRVLLGVNIDHVATLRQARGTRYPDPVQAALLAEEAGADGITIHPREDRRHIQDRDVLLLRDTLQTKMNLEMAVTDAMLDFAEQIRPACVCLVPEKREELTTEGGLDVEGQEARIAKACERLAAIGAEVSLFIDPNKIQIDAAVRCGAPVIELHTGEYAEASGAAADAAFKVLVEAVSYARKKGLVVNAGHGLNYHNTERVAAIAGINELNIGHAIIARAVFTGLKEAVRDMKTLIDNACRR

SEQ ID NO: 147735 - DNA, 732 bp, Shigella boydii
  CDS (1)..(732): transl_table=11
atggctgaattactgttaggcgtcaacattgaccatattgcaacgctgcgtaacgcacgcggtactgcttacccggatccggtgcaggcggcgtttattgccgagcaggcgggagcggacggcactaccgtgcatttacgtgaagatcgccgccacattactgaccgcgatgtgcgcatcctgcggcagacgctggatacccgaatgaatctggagatggcagtgaccgaagagatgctggcgatcgccgttgagacgaagccacatttttgctgcctggtaccggaaaagcgtcaggaagtaacaaccgaaggcggcctggacgttgcagggcagcgtgaaaaaatgcgcgatgcctgcaaacgtctgacagatgccgggattcaggtttctctctttatcgacgccgatgaagagcagatcaaagctgcggcagaggttggcgcaccgtttattgagatccacaccggttgctatgctgatgccaaaactgacgccgaacaggcgcaagagctggtgcgtatcgccaaagccgcgacctttgccgctagtctcggtctgaaagttaacgccggacacggtctgacctatcacaacgtgaaagccattgccgccatccctgagatgcatgaactgaatatcggtcatgccattattggccgtgcagtgatgaccggactgaaagatacggtggcagaaatgaagcgtctgatgctggaagcgcgtggctaa

SEQ ID NO: 147736 - protein, 243 aa, Shigella boydii
MAELLLGVNIDHIATLRNARGTAYPDPVQAAFIAEQAGADGTTVHLREDRRHITDRDVRILRQTLDTRMNLEMAVTEEMLAIAVETKPHFCCLVPEKRQEVTTEGGLDVAGQREKMRDACKRLTDAGIQVSLFIDADEEQIKAAAEVGAPFIEIHTGCYADAKTDAEQAQELVRIAKAATFAASLGLKVNAGHGLTYHNVKAIAAIPEMHELNIGHAIIGRAVMTGLKDTVAEMKRLMLEARG

SEQ ID NO: 147737 - DNA, 726 bp, Acinetobacter sp
  CDS (1)..(726): transl_table=11
atggctgcattgcttggtgtcaatattgatcatgtagcgaccttgagacaggcgagaggaacacgttatccagatccagtgagtgctgctttggtatgtgagcaggcaggtgctgaaggaattactttgcatctacgtgaagaccgtcgtcacattcaggatgatgatgtgcgtcgtatgcgtccattgcttaaaacacgcatgaatctagaactggcagtgactgatgagatgattgcctttgccaaagaaattcagccacagcacgtctgctttgtacctgagcgtcgtcaggaagtcaccacagaaggtggtctggatgtagtcggccagtttgaaaaagtcaaagcggcaactcaaacgttagcggcagtgggatgtgatgtttccctatttattgatgctgatcttgcgcaaattgatgctgcgattgcatgtggtgcgccaaccattgagttacatacgggtgcatatgcagatgctgaaactgaagagcagcaacaggcagagttgcaacgtatcattgaaggggttgagtatgcagccagcaaaggattggtggttaatgcagggcatggtctgaaccttgataatatcacgccaattgcagcgattccgcaaattcatgagctgaatattggtcattcaattattgcggatagtgtgtttgttggattggcgcaagctgtacagcatatgaaagctgcgattcaggcagcacgataa

SEQ ID NO: 147738 - protein, 241 aa, Acinetobacter sp
MAALLGVNIDHVATLRQARGTRYPDPVSAALVCEQAGAEGITLHLREDRRHIQDDDVRRMRPLLKTRMNLELAVTDEMIAFAKEIQPQHVCFVPERRQEVTTEGGLDVVGQFEKVKAATQTLAAVGCDVSLFIDADLAQIDAAIACGAPTIELHTGAYADAETEEQQQAELQRIIEGVEYAASKGLVVNAGHGLNLDNITPIAAIPQIHELNIGHSIIADSVFVGLAQAVQHMKAAIQAAR

SEQ ID NO: 147739 - DNA, 756 bp, Agrobacterium tumefaciens
  CDS (1)..(756): transl_table=11
atgcctgcaaaactttccgtcaatctgaacgcaattgccatgttacgcaaccgccgcgatcttccctggcctgatgtcgcgcatttcgggcagattgcgctctcggcgggtgcaagcgggttgactgtacacccgcggcccgaccagcgccatatccgcttttcggatctgccggtgctgcgggcgctgatcgatgatcgtttccccggcgcggaattcaacatcgaagggtatcccaccgaggattttctcgttctctgcgaaaagacccagccggaacaggtgacgctggtgcctgacgacccgtcgcaggcgacgtcagaccacggctgggatttccgcaaacatgctgtttttctgaaagatgtcgtcgggcgcctgaaggccggtggcatgcgcgtttcactgtttgccgatggcgacggggaacgcgagccggtggagctggcggccgagacgggggccgcccgcatcgagctttacaccggcccttatggcggctgttttgacgatacgcaaaaggctgacctgcttgtcgagaagcttgggcagacggcggatcatgccgcagcactcgggcttgctgtcaatgccggccatgatctgacggttgcgaacctgcccaagctgatgaaacgtatccccaatctcgctgaggtatcgatcggccacgggctgacggcagatgccatggaatatggcatggctgaaacagtccggcgtttttgtcaggcctgcggtcagcgtaattcataa

SEQ ID NO: 147740 - protein, 251 aa, Agrobacterium tumefaciens
MPAKLSVNLNAIAMLRNRRDLPWPDVAHFGQIALSAGASGLTVHPRPDQRHIRFSDLPVLRALIDDRFPGAEFNIEGYPTEDFLVLCEKTQPEQVTLVPDDPSQATSDHGWDFRKHAVFLKDVVGRLKAGGMRVSLFADGDGEREPVELAAETGAARIELYTGPYGGCFDDTQKADLLVEKLGQTADHAAALGLAVNAGHDLTVANLPKLMKRIPNLAEVSIGHGLTADAMEYGMAETVRRFCQACGQRNS

SEQ ID NO: 147741 - DNA, 720 bp, Anabaena sp
  CDS (1)..(720): transl_table=11
ttggctactcttggggtaaacatagaccatatcgctaccattcgacaagcgcggcggacggtggaaccagaccctgtggcggcggcggtgctggcagaattaggtggtgctgatggcatcacagtacatctacgggaagaccgtaggcatatccaagaccgggatgtacaactgttgcgccacactgtgcgtactcacctgaatttggaaatggcggctacagatgaaatggtgggaatagcccttgacattaaacccgattatgtaactctcgttcccgaaaaacgggaagaagtcactacagaaggtggtttagatattgttgggcaaattgctagaataggtgaggtcgtcagtaaattgcagaatgctgccattcctgtgagcttgtttattgatgctgaaccatcacaaatagaggcatctgtcaaggtacaagcaaagtttattgaactacacactggcaggtatgctgaggcgaccgacgagactagccgtcagcaagagctagcatttttagccgcagggtgtgaacaagcgattaaagccggactacgagtcaacgctggtcatggactcacctactggaacgtttaccccgtggctgcacttccagggatggaagaactcaatattggtcacaccattatcagccgagcggctttagtcggaatagaaagagctgttcgggaaatgaaacaggcgataagaggggagtag

SEQ ID NO: 147742 - protein, 239 aa, Anabaena sp
MATLGVNIDHIATIRQARRTVEPDPVAAAVLAELGGADGITVHLREDRRHIQDRDVQLLRHTVRTHLNLEMAATDEMVGIALDIKPDYVTLVPEKREEVTTEGGLDIVGQIARIGEVVSKLQNAAIPVSLFIDAEPSQIEASVKVQAKFIELHTGRYAEATDETSRQQELAFLAAGCEQAIKAGLRVNAGHGLTYWNVYPVAALPGMEELNIGHTIISRAALVGIERAVREMKQAIRGE

SEQ ID NO: 147743 - DNA, 729 bp, Aquifex aeolicus
  CDS (1)..(729): transl_table=11
atgagactcggagtaaacgttgaccacgtggccaccgtaaggcaggcgaggagaacctttgagccctcccccgtattcgcggccctcatagcccagcaggcgggagcggatcagataaccctccatctcagggaggacaggagacacatacaggacagggatttagaactcataaaggaactaataaccattcccgtaaaccttgagatggctcccactgaagagatgagagaaatagccctgagagtaaaacctgacagaataacccttgttcccgaaagaagggaggaaatcaccaccgaaggtggtcttgacgtagtatcactgaaggaaaaactcaaagaatacttaaagcccataaaggaggcaggtattgaagtctccctctttatagaagctcagaaggaacaaatagacgcaagtgtagaagtaggggctgacgccatagaaatccacacaggaaggtacgcaaacctctggaacgaacacaggtttgaggaagcgaaggaagagctaaacaggataaaggaagcggcaatttacgcgaaggaaaaaggactgaaggtttacgcgggacacggacttacttaccacaacgtaaaagactttgtcagggaactcaaaggctacgtagaagaattaaacatcggtcactcaattgtggcaaacgccgtgatattcggatttgaaagagctgtgaaggagatgttaaaccttattaagacttga

SEQ ID NO: 147744 - protein, 242 aa, Aquifex aeolicus
MRLGVNVDHVATVRQARRTFEPSPVFAALIAQQAGADQITLHLREDRRHIQDRDLELIKELITIPVNLEMAPTEEMREIALRVKPDRITLVPERREEITTEGGLDVVSLKEKLKEYLKPIKEAGIEVSLFIEAQKEQIDASVEVGADAIEIHTGRYANLWNEHRFEEAKEELNRIKEAAIYAKEKGLKVYAGHGLTYHNVKDFVRELKGYVEELNIGHSIVANAVIFGFERAVKEMLNLIKT

SEQ ID NO: 147745 - DNA, 756 bp, Azoarcus sp
  CDS (1)..(756): transl_table=11
gtgatcgaactcggcgtcaacatcgaccacgtcgcgacgctgcgtcaggcgcgccgcacgtgggaaccggatcccgcctgggcggcgatggaagctcatctgggcggagcggacggcatcaccgtgcatctgcgcgaagaccgccgccacattcaggacgaggacgtgcgcaggctgcgcgaactcacgcaggtcaagctgaacctcgagatggccgcgaccgacgagatggtcggcatcgcatgcgcgctcaggcccgagatggcgatgctggtgcccgaagggcgccacgaggtgaccaccgagggcggactcgacgtgctggcgcaggaagggcggctgaaggacgtcgtcgcacggctcgccgatgccggaatcgtcacgagcgtgttcatcgatgccgaactcgggcaggtcgaagcggcggcccgcatcggcgcccgggtctgcgaaatccataccggcccctacgcccatgcattccacgccgccggccgcgatccgcagagtgctgcggtcgtggacgagatcgacaaggtccgccgcgccggcgaggcgatccgggcgcttggcatgcgcttcaatgccggccatgcgctgaactactacaacgtgcagccgatcgcgcgtttgccggaggtgcgcgaactgcatatcggccacgcgatcgtcagccgttcggtgttcaccggcctgcgcgacgcggtgcgcgaaatgaagcggctgatgcgcgaggccgccggcgtcgggcgatga

SEQ ID NO: 147746 - protein, 251 aa, Azoarcus sp
MIELGVNIDHVATLRQARRTWEPDPAWAAMEAHLGGADGITVHLREDRRHIQDEDVRRLRELTQVKLNLEMAATDEMVGIACALRPEMAMLVPEGRHEVTTEGGLDVLAQEGRLKDVVARLADAGIVTSVFIDAELGQVEAAARIGARVCEIHTGPYAHAFHAAGRDPQSAAVVDEIDKVRRAGEAIRALGMRFNAGHALNYYNVQPIARLPEVRELHIGHAIVSRSVFTGLRDAVREMKRLMREAAGVGR

SEQ ID NO: 147747 - DNA, 714 bp, Bacteroides thetaiotaomicron
  CDS (1)..(714): transl_table=11
atgactaaattaagtgtaaacataaacaaggttgctacattgagaaatgcacgcggaggggatacccccaatgtggtgaaggtagcacttgattgtgaagctttcggggctgacggtattactgttcatccccgtcccgacgaacgccacatccgccgggcagatgtatatgatctgcgtccgttgttgcggactgaattcaatatcgagggctacccgtcgccggagtttatagacctggtattgaaagtgaaacctcatcaggtgacgctggttcctgacgatccttcgcagattacttccaactccggttgggatacaaaagcaaatctggaatttctgtcggaagttctcgatcagttcaacagcgcaggcatccgtacttccgtctttgttgccgccgatccggagatggtggaatatgcggcaaaagcaggtgccgaccgtgtggaactttatacggaaccctatgctacggcatatccgaagaatccggaagcggctgttgccccatttgtggaagcagccaaaacagcccgcaaactgggtatcggcttgaacgccggacacgacttgagtcttgtgaatttaaactatttctataaaaacattccttgggtggacgaagtatccataggtcatgccttgatcagcgacgcattgtatctgggactggaacgtactattcaggaatataaaaactgtctacgctaa

SEQ ID NO: 147748 - protein, 237 aa, Bacteroides thetaiotaomicron
MTKLSVNINKVATLRNARGGDTPNVVKVALDCEAFGADGITVHPRPDERHIRRADVYDLRPLLRTEFNIEGYPSPEFIDLVLKVKPHQVTLVPDDPSQITSNSGWDTKANLEFLSEVLDQFNSAGIRTSVFVAADPEMVEYAAKAGADRVELYTEPYATAYPKNPEAAVAPFVEAAKTARKLGIGLNAGHDLSLVNLNYFYKNIPWVDEVSIGHALISDALYLGLERTIQEYKNCLR

SEQ ID NO: 147749 - DNA, 744 bp, Blochmannia floridanus
  CDS (1)..(744): transl_table=11
atgtctaatttattgttggctttaaatatcgatcatatagcgactgtaagaaatgcccgaggtacacaatacccagatccagtatatgctgcatatattgctgaacagtctggtatagatggtattactgtgcatttaagagaggatcgtagacatattactgatagagatgtgaaattgctgcgagaaattgtacaaactactatgaatttagaaatggcggcaacagatgaaatggttatgattgcatgtcaattaaaaccacattattgttgtttggtaccggaaaggcgtagagagcttactacagaaggtggattagatcttatttatcaaatagataagatgcaaaatatagtattaaaattaagtgatgctggtattcgagtatcattatttatagatcctgatatagaacaaatagatgcatcttataaaataggagttcggtgtattgagttaaataccggaaaatatgctgaatctaaaaataaagaggatagaatattggagtatcgacgtatagagaaaagtataaagcatgcattaagttatggtttgatgataaatgcagggcacggtctgaattatgataatgtaaaatttattgcaatgttaagtcaaatacgagaattaaatatcggtcatgctattgtgagtcgtgctgtgttttgtggtttacctaaagcaattaaagatatgaaggaattattgaaagaatttagaaaaaaggatgatcagtga

SEQ ID NO: 147750 - protein, 247 aa, Blochmannia floridanus
MSNLLLALNIDHIATVRNARGTQYPDPVYAAYIAEQSGIDGITVHLREDRRHITDRDVKLLREIVQTTMNLEMAATDEMVMIACQLKPHYCCLVPERRRELTTEGGLDLIYQIDKMQNIVLKLSDAGIRVSLFIDPDIEQIDASYKIGVRCIELNTGKYAESKNKEDRILEYRRIEKSIKHALSYGLMINAGHGLNYDNVKFIAMLSQIRELNIGHAIVSRAVFCGLPKAIKDMKELLKEFRKKDDQ

SEQ ID NO: 147751 - DNA, 747 bp, Bordetella bronchiseptica
  CDS (1)..(747): transl_table=11
atgattgaactaggtgtcaacatcgaccatgtggccacgctgcggcagcagcgccatacggcttatcccgaccccgtgcaggcggcgctgcgcgccgaggacgccggcgccgacctgatcacgctgcatctgcgcgaagaccgccgccacatccaggacgccgatgtctacgccatccgccccttgctgcgcacccgcatgaacctcgagtgcgcggtcacgccggagatgctggagatcgcctgcgcggtcaagcccagcgacgtgtgcctggtgccggaaaagcgtaccgagttgacgaccgaaggcggcctggatgtggccggcgcgcaggcggccgtcaccgacgcggtgcaattgctggccgaggccggcatccgggtgtcgctgttcatcgatccggacgcgcgccagatcgaagcggcggcgcgcgccggcgcgccggtcatcgagctgcacacgggcgcctacgccgaggcgcgcgacgatgccgcggtgcaggccgagctggcgcgcgtgcgcgccgccgtggccgaggggctgcgccatggcttgcgggtcaacgccggccatgggctgcactacggcaacgtgcaggcggtggcggcgctcgacggcatcgccgaactgaacatcggccatgccatcgtggcccagtccatcttcgacggctgggacaaggcggtgcgcgacatgaaggcgctgatggtgcaggcgcgcctggcggccgtgcgcggccacgcctga

SEQ ID NO: 147752 - protein, 248 aa, Bordetella bronchiseptica
MIELGVNIDHVATLRQQRHTAYPDPVQAALRAEDAGADLITLHLREDRRHIQDADVYAIRPLLRTRMNLECAVTPEMLEIACAVKPSDVCLVPEKRTELTTEGGLDVAGAQAAVTDAVQLLAEAGIRVSLFIDPDARQIEAAARAGAPVIELHTGAYAEARDDAAVQAELARVRAAVAEGLRHGLRVNAGHGLHYGNVQAVAALDGIAELNIGHAIVAQSIFDGWDKAVRDMKALMVQARLAAVRGHA

SEQ ID NO: 147753 - DNA, 753 bp, Bradyrhizobium japonicum
  CDS (1)..(753): transl_table=11
atgcccgcttctccgctccgcctcggcgtcaatgtcgaccatgtcgcgaccctgcgtaacgcgcgcggcggccgcaatcccgatccggtgcgcgccgccctgctggcgatcgaggccggcgccgacggcatcaccgcgcatctgcgcgaggatcgccgccatatccgcgacgaggacatggcgcggctgaaggccgagatctccaagccgctcaatttcgagatggcggcgaccgacgacatgatgcgcatctcgctcgccaccaggccgcacgcggtgtgcctcgtgccggagcgccggcaggaggtgacgaccgagggcggactggatgtcgtcggccagcacaatgcgctcgcgccctacatcgcccggctgaacgatgccggaatccgcgtctcgctgttcatcgccgcggaccccgcgcagatcgagatggcggcgcggctgcgcgcgcccgtgatcgagatccacaccggcgcctggtgcgatgccgtcgtcgacggccacaccgagaaggccgacgcagagtggaagcggatcgtggcgggtgcgaagctggcgaaggacgcggggctggaggttcacgccggccacgggctcgactatgcgacggcggagacgatcgcagctctgcccgacatcatggagctcaatatcggctactacatgatcggcgaggcgctgttcgtcggtctcgccgagacggtgcgcagcatgcgcgctgcgatggaccgcggccggagccgggcatga

SEQ ID NO: 147754 - protein, 250 aa, Bradyrhizobium japonicum
MPASPLRLGVNVDHVATLRNARGGRNPDPVRAALLAIEAGADGITAHLREDRRHIRDEDMARLKAEISKPLNFEMAATDDMMRISLATRPHAVCLVPERRQEVTTEGGLDVVGQHNALAPYIARLNDAGIRVSLFIAADPAQIEMAARLRAPVIEIHTGAWCDAVVDGHTEKADAEWKRIVAGAKLAKDAGLEVHAGHGLDYATAETIAALPDIMELNIGYYMIGEALFVGLAETVRSMRAAMDRGRSRA

SEQ ID NO: 147755 - DNA, 774 bp, Burkholderia pseudomallei
  CDS (1)..(774): transl_table=11
atgagcttcttcctgacaacgcccaccgccatcgacctgggcgtgaacatcgaccacgtcgcgacgctgcgcaatgcgcgcggcaccgcgtatccggaccccgtgcgcgcggcgctcgccgccgaggacgcgggcgccgacgcgatcacgctgcacctgcgcgaagaccgccggcacatcgtcgacgcggacgtgcgcgcgttgcgtccgcgcgtgaagacgcggatgaatctcgagtgcgcggtgacgccggagatgctcgacatcgcatgcgagatccggccgcacgacgcgtgcctcgtgccggagaagcgttcggagctgacgacggagggcggtctggacgtcgtcgggcacttcgacgcggtgcgcgccgcatgtaagcagctcgcggatgcgggcgtgcgcgtgtcgctcttcatcgatccggacgaggcgcagatccgcgccgcgcacgagacgggcgcgcccgtgatcgaactgcacaccggccgctacgcggacgcgcacgacgcggccgagcagcagcgcgagttcgagcggatcgcgacgggcgtcgacgccggcatcgcgctcgggctgaaggtgaacgcgggccacggattgcactacacgaacgtgcaggcgatcgccgcgctgcccggcatcgccgagctgaacatcgggcacgcgatcgtcgcgcacgcggtgttcgtcggctgggacaacgcggtgcgcgagatgaaggcgatcatggtcgccgcgcgcgtcgccgcgctgcacggcggccgctga

SEQ ID NO: 147756 - protein, 257 aa, Burkholderia pseudomallei
MSFFLTTPTAIDLGVNIDHVATLRNARGTAYPDPVRAALAAEDAGADAITLHLREDRRHIVDADVRALRPRVKTRMNLECAVTPEMLDIACEIRPHDACLVPEKRSELTTEGGLDVVGHFDAVRAACKQLADAGVRVSLFIDPDEAQIRAAHETGAPVIELHTGRYADAHDAAEQQREFERIATGVDAGIALGLKVNAGHGLHYTNVQAIAALPGIAELNIGHAIVAHAVFVGWDNAVREMKAIMVAARVAALHGGR

SEQ ID NO: 147757 - DNA, 765 bp, Caulobacter crescentus
  CDS (1)..(765): transl_table=11
atgagcttgcggctgggcgtcaatatcgatcacgtggccacgatccggaacgcgcgcggcgcttcgtatcccgagcccgtccgcgcggccgagctggccttgatcgccggcgccgacggcatcaccgcccacctgcgcgaggatcgccgacacatcagtgacgccgacatcgcggtgctgaccgacctctgccacaagcgcggcaagccgttgaacttcgagatggcggtcaccgacgagatggtcggcatcgccctgaacgcgcgtccgcacgccgcgtgcctggtgcccgagcgccgcgaggaggtcaccaccgagggcggcctcgacgtcatcaagggccagaagcgtatcgccgacgccaccgcgcggctgcgcaccgtgggggcgcgggtctcgctgttcatcgagcccgatcccgatcagatccgcgcctgcgtcacggcgggggctcaagtggtcgagctgcacaccggcgcctattgtgacgcggcgcgggcgggtgagacggcgcgggccgaggcgatcctgaagcggctcaaggccggcgccgccttggcccatgagcttggccttgaggtccatgccgggcatggcatcgactacgccacggtgaagccggtcgccgccatcccgcagatcgccgagctcaatatcggccacttcctgatcggtgaggcgatcttcgtgggcctgcctgaagcgatccaccgcatgcgggccctgatggaggccgcgcgcgtcgaacttgaggtcctggcgtga

SEQ ID NO: 147758 - protein, 254 aa, Caulobacter crescentus
MSLRLGVNIDHVATIRNARGASYPEPVRAAELALIAGADGITAHLREDRRHISDADIAVLTDLCHKRGKPLNFEMAVTDEMVGIALNARPHAACLVPERREEVTTEGGLDVIKGQKRIADATARLRTVGARVSLFIEPDPDQIRACVTAGAQVVELHTGAYCDAARAGETARAEAILKRLKAGAALAHELGLEVHAGHGIDYATVKPVAAIPQIAELNIGHFLIGEAIFVGLPEAIHRMRALMEAARVELEVLA

SEQ ID NO: 147759 - DNA, 714 bp, Chlorobium tepidum
  CDS (1)..(714): transl_table=11
atgagacttgccgtcaatattgaccatattgccaccctgcgcaacgctcgcaacgaagggcatcccgatcccgtcgaagccgctctgctcgccgaaaagcacggcgcggcaggtatcgtctgccacctgcgcgaagaccgccgccacatcaaggacgacgacctcgcacggctgcgagaggagatcaccaccaagctcgacctcgaaatggccatgaccgacgagatgcagaaaatcgcgctctcggtcaggcccgacctggtgacgcttgtgcccgaaaagcgcgaggagctgaccaccgagggtggattcgccatccagaagcacttcacccgcctcacggaattcgtcaaaccgttgcgggacaaggagataggcgtcagcgtcttcatcgagccggaagaggaggccatcgaactcgctgccgaagccggggcgaacatcgtcgaattccacaccggtacctactcgctctgcaccagcgacaaacagacggcctacgagctggaacgcatccgcaattcggcgcgcatcgcccgcgaaatggggctgaccgtggttgccgggcacggcctgagcgtactgaacatcgctccgttcaaggagctgcacgacatcgaggaggtgagcatcggccacgccatcatctcacgcgccgtgttcatcggccttccggcagccatccaggaaatcctcgatctcatccgccggtaa

SEQ ID NO: 147760 - protein, 237 aa, Chlorobium tepidum
MRLAVNIDHIATLRNARNEGHPDPVEAALLAEKHGAAGIVCHLREDRRHIKDDDLARLREEITTKLDLEMAMTDEMQKIALSVRPDLVTLVPEKREELTTEGGFAIQKHFTRLTEFVKPLRDKEIGVSVFIEPEEEAIELAAEAGANIVEFHTGTYSLCTSDKQTAYELERIRNSARIAREMGLTVVAGHGLSVLNIAPFKELHDIEEVSIGHAIISRAVFIGLPAAIQEILDLIRR

SEQ ID NO: 147761 - DNA, 729 bp, Chromobacterium violaceum
  CDS (1)..(729): transl_table=11
atgattttgttgggcgtaaacatcgatcacgtcgccacgctgcgccaggcgcgcggcacccgctatcccagcccggtggaagccgcgctggtggcggagtccagcggcgccgacctgatcacgctgcatttgcgcgaggatcgccgccacatccaggacgccgacgtcaaggcgatgcgcccggtgctgaagacgcggatgaacctggaaatggcgatgacgccggagatgctggcgcacgcgctgcaggtggcgccggaagacgtgtgcctggtgccggaaaagcgcgaggaagtcaccaccgaaggcggcctggatgtgcgcggccactacgccgacgtcaagcattacaccggcaagctgaccgaggccggcatccgcgtgtccatcttcatcgacccggaccgcgagcagatccagaaggcgtttgacgccggcgcgcgcgtgatcgagctgcacaccggcgcttacgccgacgcgccgcacgccagcgagcgcgaagccgagctggcccgcatccgcgaggccgccgaattcggcgccagcctcggcatggtggtcaacgccggccacggactcaattaccacaacgtcaagcccatcgccgcgattccgcagatcgccgagctgaatatcgggcacgccatcgtcgcccatgcgctgttcgtcggcttcccgcaggcggtgcgcgagatgaaggcgctgatggaaagcgcgcgcgcccgctga

SEQ ID NO: 147762 - protein, 242 aa, Chromobacterium violaceum
MILLGVNIDHVATLRQARGTRYPSPVEAALVAESSGADLITLHLREDRRHIQDADVKAMRPVLKTRMNLEMAMTPEMLAHALQVAPEDVCLVPEKREEVTTEGGLDVRGHYADVKHYTGKLTEAGIRVSIFIDPDREQIQKAFDAGARVIELHTGAYADAPHASEREAELARIREAAEFGASLGMVVNAGHGLNYHNVKPIAAIPQIAELNIGHAIVAHALFVGFPQAVREMKALMESARAR

SEQ ID NO: 147763 - DNA, 741 bp, Colwellia psychrerythraea
  CDS (1)..(741): transl_table=11
atgtctgaattattattaggtgtaaacgttgaccatattgccactttaagacaggcgcgtggtactaattatcctgacccagtttatgctgcaagcgttgcagagcatgccggagcagatggtattactgtgcacctgcgcgaagataggcgtcatatccaagatagagatattcatgttttaaaacaaacattacatactcgtatgaactttgaaatggctgtcactgatgaaatgatagcgatagcttgtgatgtgaaaccagtattttgttgtttagttcctgagaaacgcgaagagttgactactgaaggtggtttagatgttgtagggcagttagataagataactaaagcaacagagcaattaacagctgcaggtatcgctgtaagtttatttattgatgcggataaagcacaaattgatgctgcggttgccagtaaagctccttatatagaaatacatacgggacattatgcagatctaagctcagaagaagagcagctgatagaacttgagcgcctaactgtcggtattaagtatgcgcataacttaggattaaaagttaatgcaggtcatggtttaaattattttaatgtcaaacctattgctgctattaaagaaattatcgagttgaatattggccatgccataatagcgcgtgcggctattgatggcttagataaagctgttagagatatgaaacagctgatgttagaagcaagaacttataatacttaa

SEQ ID NO: 147764 - protein, 246 aa, Colwellia psychrerythraea
MSELLLGVNVDHIATLRQARGTNYPDPVYAASVAEHAGADGITVHLREDRRHIQDRDIHVLKQTLHTRMNFEMAVTDEMIAIACDVKPVFCCLVPEKREELTTEGGLDVVGQLDKITKATEQLTAAGIAVSLFIDADKAQIDAAVASKAPYIEIHTGHYADLSSEEEQLIELERLTVGIKYAHNLGLKVNAGHGLNYFNVKPIAAIKEIIELNIGHAIIARAAIDGLDKAVRDMKQLMLEARTYNT

SEQ ID NO: 147765 - DNA, 723 bp, Coxiella burnetii
  CDS (1)..(723): transl_table=11
atggttcgtttaggcgtgaatatcgatcatatcgccaccttgcgccaagcgcggggagtggattatcccgatcctgtggaagcggctatgatggctatagaagcgggtgctgatggaattacgctgcatttgcgagaagatcgccgccatattcaagatgacgacgtccgtaatttaaagcgcaaattaacagtgccaatgaatttggaaatggcgactgccgaagacattatccaatttgccgaggaaattaagcccgaacattgttgcctcgtgcctgaaaaacgcgaagagctgacaaccgagggaggcttagacgttgccggccagcaaaatactttaaaaaaagtttgtgcgcgtctggcgaaagtcggtatagaagtttctctatttatcgaccccgaagaaaaacaaattgatgcagcgaaagccgcaggcgctcctgttatcgaaatccacaccggccattacgccaacgccaaaaccgatcatgagcacaaccaacaattaaaacgcattgccgacgccgctgcctacgccgatagcctcggcctcaccgtaaacgccggccacggtctaaccattcacaacgtccaatccatcgccgccatccccgtcattaacgaactcaatatcggtcatagcattatttctcgcggggtactgattgggctagcggaagcggtgaaagaaatgaaaacgctgatcgcgggagcgcaataa

SEQ ID NO: 147766 - protein, 240 aa, Coxiella burnetii
MVRLGVNIDHIATLRQARGVDYPDPVEAAMMAIEAGADGITLHLREDRRHIQDDDVRNLKRKLTVPMNLEMATAEDIIQFAEEIKPEHCCLVPEKREELTTEGGLDVAGQQNTLKKVCARLAKVGIEVSLFIDPEEKQIDAAKAAGAPVIEIHTGHYANAKTDHEHNQQLKRIADAAAYADSLGLTVNAGHGLTIHNVQSIAAIPVINELNIGHSIISRGVLIGLAEAVKEMKTLIAGAQ

SEQ ID NO: 147767 - DNA, 756 bp, Dechloromonas aromatica
  CDS (1)..(756): transl_table=11
atgattgaactaggcgtcaacattgatcacatcgcgaccatccgtcaggcccgtcggacctacgaaccagatccggtctggggagcggttgaagctcatctggggggggctgacggaatcacggttcatttacgcgaggaccggcgccacattcaggattccgatgtacggcgcctgcgtgaaaccacgcagattaaacttaatcttgaaatggcggcgaccgacgagatggtcggcatcgcttgtggcctgaagccggaaatggccatgttggtaccggaaggtcgccatgaggtgacgactgaaggcggtctcgacatccttgcccaggaggctcggttgaagggggtgatttcccgtcttgctgacgccggtattgtcaccagcgtcttcattgatgccgatccggagcagattgaagctgcagcacgaattggtgccagtgtctgcgaaattcacaccggtccgtatgcgcatgccttttacgataaaggccgagatgctgaggcgccagccgtgctggctgagatcgccaagattcgcaaagccggacagaccattcgccaccttggcatgcgcttcaatgccggccacgccctgaactactacaatgtgcaaccgcttgccaggctggccggcattcgcgaattgcatattggtcacgcaattgtcagtcgcgccgtcttcgttgggctacgcgaagcggtgcgcgaaatgaaggttctgatgcgcgaagcagcggaacgcggcgaatga

SEQ ID NO: 147768 - protein, 251 aa, Dechloromonas aromatica
MIELGVNIDHIATIRQARRTYEPDPVWGAVEAHLGGADGITVHLREDRRHIQDSDVRRLRETTQIKLNLEMAATDEMVGIACGLKPEMAMLVPEGRHEVTTEGGLDILAQEARLKGVISRLADAGIVTSVFIDADPEQIEAAARIGASVCEIHTGPYAHAFYDKGRDAEAPAVLAEIAKIRKAGQTIRHLGMRFNAGHALNYYNVQPLARLAGIRELHIGHAIVSRAVFVGLREAVREMKVLMREAAERGE

SEQ ID NO: 147769 - DNA, 726 bp, Desulfovibrio vulgaris
  CDS (1)..(726): transl_table=11
atgcccatactcgtagtcaacgtcgaccatgtggccaccctgcggcagcaacgcctcggcatcgaaccagaccccgtaaccgccgcgcacatggccgaacttgcaggcgcacggggcatcatagtgcacctgcgcgaagaccgccgccacatacaggacagggacgtgtcgctcttgcggcagacgctgaagacccgcctgcacctcgaaatggcagctaccgaagagatgcagggcatcgcccttgccgagaagccgcacatggtctgcctcgtccctgaaaaacgggaagaactcaccaccgaaggcggcctcgtggtggctgggcgcgtggacttccttcaggcatatgtaaagccgttccacgaaatcggtatcgccaccagcctgttcatagaggccgaccccgaccagattcgcgcagccgcacgcgtcggggtcacccatgtggaactgcatacagggcacttcgccgacgcgcccgacgccgcagaacgcaagcgccagcgtgacgccatcgtcgccggcatcggccttgcccgcacactggggctcaaggtcaacctcgggcacggcctcaactacgataacatcttcgacttcgaagccgtacccggcatctgcgaattctccatcggacactccatcgtctcgcgcgccgtgctcacgggcttcggcccggcggtgcgcgacatggtcgacatcatcaaccgcttccccgggtaa

SEQ ID NO: 147770 - protein, 241 aa, Desulfovibrio vulgaris
MPILVVNVDHVATLRQQRLGIEPDPVTAAHMAELAGARGIIVHLREDRRHIQDRDVSLLRQTLKTRLHLEMAATEEMQGIALAEKPHMVCLVPEKREELTTEGGLVVAGRVDFLQAYVKPFHEIGIATSLFIEADPDQIRAAARVGVTHVELHTGHFADAPDAAERKRQRDAIVAGIGLARTLGLKVNLGHGLNYDNIFDFEAVPGICEFSIGHSIVSRAVLTGFGPAVRDMVDIINRFPG

SEQ ID NO: 147771 - DNA, 717 bp, Ehrlichia canis
  CDS (1)..(717): transl_table=11
atgtcaagtattgccttaggtgttaatattgatcatattgcaacgttgcgcaatgcaaggaatgttgattatccgtgtattattgaagtagcaaatatagcggtaaataatggtgcagattttataactgttcatttaagagaagatcgcaggcatatcatggatgatgatgtttttagattaaagagcagtttaaaggttccattgaacttagaaattgctgcaactgatgagatgttgtcaatagcaatagaagtaaagccaaaatgtgtttgcctggttcctgagaaaaggcaagaacttacaactgaaggtggcctagatgtaggaagtatcttttcttatctagtatcatttattgagaaattacactcttatgatatagatgttacattatttattgagcctgatatatctcaaattgaccttgcaaagaaattacatgcaaataatgtggaactacatactggtaagtattgtaataacgctacacaaaatgaactatctaaaataataaaagctgctgaacactgccatcaccagaacataacctgccatgctggacatggcttgaattatcaaagtgctgctactatagcaaaagtaccatatatatcagcacttaacatagggcattttttaatttgtgaagctgtactacatggtataggtaaatccatttataaaatgaaacaggtcattgctagtacagattaa

SEQ ID NO: 147772 - protein, 238 aa, Ehrlichia canis
MSSIALGVNIDHIATLRNARNVDYPCIIEVANIAVNNGADFITVHLREDRRHIMDDDVFRLKSSLKVPLNLEIAATDEMLSIAIEVKPKCVCLVPEKRQELTTEGGLDVGSIFSYLVSFIEKLHSYDIDVTLFIEPDISQIDLAKKLHANNVELHTGKYCNNATQNELSKIIKAAEHCHHQNITCHAGHGLNYQSAATIAKVPYISALNIGHFLICEAVLHGIGKSIYKMKQVIASTD

SEQ ID NO: 147773 - DNA, 720 bp, Geobacter sulfurreducens
  CDS (1)..(720): transl_table=11
gtggcaaagctcggagtcaacattgatcatgtagcaacaatccgccaagcccggggcggcgttgagcccgacccggtggcggccgccgccattgccgagttcgccggtgccgacgggataacggtgcacctgcgcgaggaccggcggcatattcaggaccgggacctgcgtctgctccgtcagaccgttaagacgaagctcaatctggaaatggccgccaccgacgagatggtgggtatagctttgtcggtcaaacccgacatgtgcaccctggtaccggagcgacgccaggagcttaccactgagggggggcttgatgtgagagtcggcatgcaggcgcttgccgatgccattggacgccttcaggacggcggcattgtagtgagtttgttcattgatcccgatgcggatcaggtcaaggcatccagcaaggtgggggccgactacatcgaaatccacaccggaacctttgccgaggcacgggagtggaaaaaggagcaggccgaacttgagcgcatcgaaaacgccatcaagctcggcacaaagctcgggctcggcatcaatgccgggcatggcctcaattataccaatgttcgcaaagtcgcggccctcggaggtatcgaggaattcaacatcggacattccataatctcacgcgcagtgtttaccgggctcgaccgtgccgtgcgggacatggtagacctcgtcaagtacgcatga

SEQ ID NO: 147774 - protein, 239 aa, Geobacter sulfurreducens
MAKLGVNIDHVATIRQARGGVEPDPVAAAAIAEFAGADGITVHLREDRRHIQDRDLRLLRQTVKTKLNLEMAATDEMVGIALSVKPDMCTLVPERRQELTTEGGLDVRVGMQALADAIGRLQDGGIVVSLFIDPDADQVKASSKVGADYIEIHTGTFAEAREWKKEQAELERIENAIKLGTKLGLGINAGHGLNYTNVRKVAALGGIEEFNIGHSIISRAVFTGLDRAVRDMVDLVKYA

SEQ ID NO: 147775 - DNA, 699 bp, Gluconobacter oxydans
  CDS (1)..(699): transl_table=11
atgatccgtcttggagtgaacattgatcacgtcgccacgctgcgcaatgccagaggggggacgttccccgacccggtggcggcggccgaactggccatcgcatccggcgcggacgggattacggcgcatctgcgggaagaccggcgccatatccgcgatgccgacatgccccgcctcagggcactttccgcgccgctgaacttcgagatggccgcgacggacgagatggtccggattgcctgtgatcttcggccgcatgcctgctgcctggttcctgaaaaacgccaggaagtcacaaccgaaggcggcctggatatcgtgggacagagtgaggcactcaagccgaaaatcgcgcggctgcgggatgctggcatccgggtttcactgttcatcgatcccgaggcgcgacagatcgaaaccgccgcagctctgggagcgcccgttgtagagcttcataccggagcttacgctctgggcggcagtgaggaactggagcgcctgcggtcagcggcggggacggtcgcagcctgtgggctggaactccatgccgggcacggactgacttacgacaatgtgggcgcgattgcggacctgacagggcttgccgaactgaatatcggccatttcctgattggacaggccatttttgacgggctgggaccggtggtccggaaaatgaaaagcctcatcaattcataa

SEQ ID NO: 147776 - protein, 232 aa, Gluconobacter oxydans
MIRLGVNIDHVATLRNARGGTFPDPVAAAELAIASGADGITAHLREDRRHIRDADMPRLRALSAPLNFEMAATDEMVRIACDLRPHACCLVPEKRQEVTTEGGLDIVGQSEALKPKIARLRDAGIRVSLFIDPEARQIETAAALGAPVVELHTGAYALGGSEELERLRSAAGTVAACGLELHAGHGLTYDNVGAIADLTGLAELNIGHFLIGQAIFDGLGPVVRKMKSLINS

SEQ ID NO: 147777 - DNA, 729 bp, Idiomarina loihiensis
  CDS (1)..(729): transl_table=11
atgaaaggtttacgcctgggcgttaacattgaccatgtggccacgttgcgtaacgcacgtggagtccgttatcctgacccggtagctgcggcagctattgccgaacaagctggtgccgacggcattaccattcatttgcgtgaagaccgccgccacattactgaccgcgacgttgctatgctgaagcagacattgaacgtccccatgaatctggaaatggctgttaccgaggaaatgctcgatatagcgataaaaacgcaacctacctacagttgtctggtaccggaaaaacgccaggaactgactacagaaggtggcctgaatgttgccggtcagttagaaaccatcaccgatgctactcgtcgcttaagtgatgcaggtattcaggtgtcgttgtttattgacgctgaccatgagcaaatagacgccgctaaaaaagccggtgcgcccattgtggaattgcacaccgggcaatacgcagaggccgaaactgaagagcagcgtaccgttgaactggcacgcttaatggaagcgtcagaatacgcgcattctattggtttgcaggtgaatgtaggtcacggtctgcattatcacaacacattagaggtggcggaaattccacaagtttgtgaactgaacattggtcattcgattattgcccgtgcggtattggttggcttggatcaggctgtgcgcgatatgcgcaatattttagataaggcacgctaa

SEQ ID NO: 147778 - protein, 242 aa, Idiomarina loihiensis
MKGLRLGVNIDHVATLRNARGVRYPDPVAAAAIAEQAGADGITIHLREDRRHITDRDVAMLKQTLNVPMNLEMAVTEEMLDIAIKTQPTYSCLVPEKRQELTTEGGLNVAGQLETITDATRRLSDAGIQVSLFIDADHEQIDAAKKAGAPIVELHTGQYAEAETEEQRTVELARLMEASEYAHSIGLQVNVGHGLHYHNTLEVAEIPQVCELNIGHSIIARAVLVGLDQAVRDMRNILDKAR

SEQ ID NO: 147779 - DNA, 726 bp, Nitrosomonas europaea
  CDS (1)..(726): transl_table=11
atgatagctctgggtgtcaatatcgaccatgtggcaacagtgcgccaggcacgcggcacgacttatcccagcccggtcgaagccgcactggttgccgaggtggctggtgcagatgcgattacgctgcatttgcgcgaagatcgtcgtcatatacaggaaaatgatgtcgtaattctgcgtgatcggcttaaaaccagaatgaatctggaaagtgccgtaacagaagaaatgattgcttttgcctgccggatcaaaccgcacgatatctgcctggtgccagagcgacgtgaagaactgacgacggaaggcgggctggatgtcattcgccatttccagcaggtgagtgtggcgtgcaagcgcctggcagaagcgggaatccgcgtttcactgttcgtcgatgcgcaggccggtcaaatcgatgccgcagtcgaggcaggtgctcccgtaattgaactgcataccggccgttatgcggatgctgcaacacccgaaatgcagcaggtcgagctggaaacaattcgtaccatggcagcctatgcttttggccggggattgcaggtcaacgccgggcatgggctgcattacgaaaataccgtacagatcgccgccataccggagctgtccgagttgaatatcggccatgccatcgttgcccgggcattgttcgtcggttttgctgaagcggttcgcgaaatgaaagccctgctccagcaggcgcgtgcatga

SEQ ID NO: 147780 - protein, 241 aa, Nitrosomonas europaea
MIALGVNIDHVATVRQARGTTYPSPVEAALVAEVAGADAITLHLREDRRHIQENDVVILRDRLKTRMNLESAVTEEMIAFACRIKPHDICLVPERREELTTEGGLDVIRHFQQVSVACKRLAEAGIRVSLFVDAQAGQIDAAVEAGAPVIELHTGRYADAATPEMQQVELETIRTMAAYAFGRGLQVNAGHGLHYENTVQIAAIPELSELNIGHAIVARALFVGFAEAVREMKALLQQARA

SEQ ID NO: 147781 - DNA, 732 bp, Photobacterium profundum
  CDS (1)..(732): transl_table=11
atgaacaacatacttcttggtgtcaatatcgatcatattgcaacgttacgtaatgctcgtggtacgcgttacccagatcctgtacatgccgctgaagttgcagagcgtgcaggcgcagatggtattacggttcacctacgtgaagaccgtcgtcatattaatgatcgtgatgttcgtatcctgaaagaaaccattcaaacacgtatgaatttagaaatggcagtgactgatgagatggtaagcatcgcactagacactaaacctgaattcgtatgtttagtaccagagaaacgtgaagagttgaccactgaaggcggtttagacgttgcaggtcagctagaaaaaattaaagcggcgacgcaaaagctaacagacgcgggtattaaagtatcgttgttcatcgatgcagatcgcgcgcaaattgacgcaaccttggcgtgtggcgccccatttgttgagctgcatacgggtcactatgccgatgctgaaacagaagaagctcagcaagctgaactagagaaaattgcgtcagcggcgacttacgcgcacggtttaggcattaaagtgaacgcgggtcatggcctgacgtaccacaacgtaaagccaatagcggcactacctgaactgtacgagttgaatattggtcactcgatcattagccgtgcagctttcgatggcttgaacaaagctgtcgctgacatgaaagtagaaatgctggacgcgcgtcgttaa

SEQ ID NO: 147782 - protein, 243 aa, Photobacterium profundum
MNNILLGVNIDHIATLRNARGTRYPDPVHAAEVAERAGADGITVHLREDRRHINDRDVRILKETIQTRMNLEMAVTDEMVSIALDTKPEFVCLVPEKREELTTEGGLDVAGQLEKIKAATQKLTDAGIKVSLFIDADRAQIDATLACGAPFVELHTGHYADAETEEAQQAELEKIASAATYAHGLGIKVNAGHGLTYHNVKPIAALPELYELNIGHSIISRAAFDGLNKAVADMKVEMLDARR

SEQ ID NO: 147783 - DNA, 717 bp, Porphyromonas gingivalis
  CDS (1)..(717): transl_table=11
atgacaaggctaagcgtaaacgtaaataagatagctaccctccgcaatgcacgcggaggcaatgtccccgatgtcctccgagtggctctcgactgtgagcggttcggtgcacaggggattaccgtccatccgcgtcccgacgaacgccatatccgtcggtcggatgtgtacgacctcaaaaaggcactgaccacagagttcaacatagagggcaatcccgacgagcgtttcatccgtctgatcgaggaaatccgtcccgagcaggtgaccatggtacccgatgctcccgatgtcctgacctccaatgccggatgggatgtggcccgaaactacgaccatctctgccgtctggtggagcggttccatgcctggggtatcaggacttccatattcatcgataccgacttggacaatatctcgtgggctgccaagacaggtacagaccggatagagctttacaccgagccgtatgcagccgcctatcataaggacatggctgctgccgtacagccctatgtcaaggcttcggtacacgctcattcgctcggtctcggtatcaatgccggacacgatttgaatctggacaacctccgttactttgccgaacgactgccctatttggacgaagtttccatcggccacgcactgattgccgatgctctctatttagggctggaggagactatcagacaatatcgagaccaacttgcgttataa

SEQ ID NO: 147784 - protein, 238 aa, Porphyromonas gingivalis
MTRLSVNVNKIATLRNARGGNVPDVLRVALDCERFGAQGITVHPRPDERHIRRSDVYDLKKALTTEFNIEGNPDERFIRLIEEIRPEQVTMVPDAPDVLTSNAGWDVARNYDHLCRLVERFHAWGIRTSIFIDTDLDNISWAAKTGTDRIELYTEPYAAAYHKDMAAAVQPYVKASVHAHSLGLGINAGHDLNLDNLRYFAERLPYLDEVSIGHALIADALYLGLEETIRQYRDQLAL

SEQ ID NO: 147785 - DNA, 1020 bp, Prochlorococcus marinus
  CDS (304)..(1020): transl_table=11
atggtgagtattaagccgtcccatcttgatctgtgggttggagccaaaataatagaggaattcataggaatcgaaaaaccattttttaatattttcttttttctaaaaaagaatctcaaaacaacgtcctgggtaacgaacattgcaataaatcccaatagagggttgattttatgccaaatatctaaggaattcttcttcaagttctatttactatatattaataatttaagtgtttgcctttttttattagctattattgggcggttactagattgtctagaaactaagattttcaaaattatggcaactttaggagtaaacattgatcatattgcaaatgtaaggcaagcaaggaaaactgtggagcctgaccctgtgcaatttgcttttttagctgaattaggaggtgcagactccataacagttcatctaagagaagatagaagacatatacaagatagagacgtattccttctgaaggagactataaaaacaaaactcaatttagagatggctgctacagaagaaatgttagaaattgctaaaaaaactctacccgattatgtaacacttgtacccgagaaaagagaggaagttactactgaaggcgggttggatttaaaaagtaatgcgcaataccttaagaattttgttgaaaatttaaagcattcaaatatagaagtaagtgcattcattgatcctcttggtgaacagataaattattccaaagaaatagggtttgattttatagaattacatactggaaaatatgctgaactatcaggatctgaacagtataaagagctccaaaggattatagagtctacacatttagcaaatgatcttggattagttgttaatgctggtcatggccttaactacaataatgttaaaaaaattgcatcaattaacaatatgaacgagttgaacataggtcatagtattgttgcaagggctttagcgataggattagaaaagtctgtacgtgaaatgaagtcccttattacatcaaattaa

SEQ ID NO: 147786 - protein, 238 aa, Prochlorococcus marinus
MATLGVNIDHIANVRQARKTVEPDPVQFAFLAELGGADSITVHLREDRRHIQDRDVFLLKETIKTKLNLEMAATEEMLEIAKKTLPDYVTLVPEKREEVTTEGGLDLKSNAQYLKNFVENLKHSNIEVSAFIDPLGEQINYSKEIGFDFIELHTGKYAELSGSEQYKELQRIIESTHLANDLGLVVNAGHGLNYNNVKKIASINNMNELNIGHSIVARALAIGLEKSVREMKSLITSN

SEQ ID NO: 147787 - DNA, 741 bp, Prochlorococcus marinus
  CDS (1)..(741): transl_table=11
atgacaagtcttggagtaaacatcgatcacattgcaaacatacgtcaagctcggcttgcaaatgaacctgatccagtgcaaatggcgcttctagcagaacttggaggggctgatggaataacaattcatctaagagaagacaggaggcatattcaagatagagatttaaaacttttaagagaaacaattaagtctcgtctcaacctagagatggcagctacaacagaaatgattgaaattgccttagatttaaagccagacatgatcactctggtacctgaaagaagagaagaaattactaccgaaggcggcttagatgttgcatcaaatgcaaaaagccttaaggaaatcgtaaccaaaatggaatcatgttgtattccaacaagcctttttgtagatgcaaattcaaagcaattggaagcctcttcaaagattggtgctacatgggtagagcttcacacgggtccttatgcaagagcttcatggaaaaatcaacctctagaatttgccaaaataagtgaaggtgtcgcgagagctagaaatcttggtttacgtgtaaatgctggacatggtctgacatatcaaaatgtagagccaattgcatcaataacagaaatggaagaactaaatattggtcatacaattattgcaagagcaattgcaattggtcttaaagaagcagttaaagaaatgaaagaactaataaaaaatcctcgtcatgaacccttctttggttcatag

SEQ ID NO: 147788 - protein, 246 aa, Prochlorococcus marinus
MTSLGVNIDHIANIRQARLANEPDPVQMALLAELGGADGITIHLREDRRHIQDRDLKLLRETIKSRLNLEMAATTEMIEIALDLKPDMITLVPERREEITTEGGLDVASNAKSLKEIVTKMESCCIPTSLFVDANSKQLEASSKIGATWVELHTGPYARASWKNQPLEFAKISEGVARARNLGLRVNAGHGLTYQNVEPIASITEMEELNIGHTIIARAIAIGLKEAVKEMKELIKNPRHEPFFGS

SEQ ID NO: 147789 - DNA, 738 bp, Prochlorococcus marinus
  CDS (1)..(738): transl_table=11
atggccagcctcggggtcaacatcgaccacattgccaatgtgcgccaggctcgccaaaccgtggaacccgatccagtgccgatggctctattggcggaacttggtggagccgatggcatcacagttcacttaagagaagatcgccgtcatattcaggatcgagacctggacctgcttcgggcaacagtgcgcagtcgtctcaatttggagatggcagccactgctgaaatggtgggaattgctttaaaaattcaacctgacatggtgacactcgtaccagagcgacggcaggaggtgaccacagaaggaggtttggatgttgctgcccagcagggatccttgaaaggcatggttgatcagctgcaggttgcagggattcccgtcagcttgtttgtagatcctgtttctcaacaactggaggcagcttttaagagtggtgctcggtgggtggagctgcacactggcgcttacgccgaagcctgttgggctgatcaatcctttgaacttgcacgcttgactgaagcgacagcaagagcgcgcagccttggcttacgcgtgaatgctgggcatggcctcacttatcagaatgtagaagccgtggctgcgattgaagggattgaagaattgaatattggtcatacgattgtggcccgttcgattgctgtaggccttaaagaagctgtaagagagatgaagcgtcttgtccagaatccccgacgagagcctctttttgggtag

SEQ ID NO: 147790 - protein, 245 aa, Prochlorococcus marinus
MASLGVNIDHIANVRQARQTVEPDPVPMALLAELGGADGITVHLREDRRHIQDRDLDLLRATVRSRLNLEMAATAEMVGIALKIQPDMVTLVPERRQEVTTEGGLDVAAQQGSLKGMVDQLQVAGIPVSLFVDPVSQQLEAAFKSGARWVELHTGAYAEACWADQSFELARLTEATARARSLGLRVNAGHGLTYQNVEAVAAIEGIEELNIGHTIVARSIAVGLKEAVREMKRLVQNPRREPLFG

SEQ ID NO: 147791 - DNA, 747 bp, Pseudomonas fluorescens
  CDS (1)..(747): transl_table=11
gtgaccaccagcaatcgcattcttcttggcgtgaacatcgaccacgttgccaccctgcgccaggcacggggcacccgttacccggacccggtcaaggcagcgctggacgcggaagaggcgggcgccgacggcatcaccgtgcacctgcgcgaagatcgccggcatatccaggagcgcgacgtgctgctgctcaaggatgtgctgcagacccgcatgaacttcgaaatgggcgtcaccgaagagatgatggcttttgccgagcgtatccgtccggcacatatctgcctggtgccggaaacccgccaggagctgaccactgaaggcggcctggatgtggcggggcaggaggcgcggatcaaggcggcggtagagcggctgtcgaaaatcggttccgaagtgtcccttttcatcgacgccgacgagcgccagatcgaggcctccaagcgggtcggcgcgccggccatcgagttgcacaccgggcgttatgccgatgcccagacacccagtgaagtggccgaggagctgcagcgtatcgtcgacggcgttgctgttggcctggcccagggcctgatcgtcaacgccggccatggcctgcattaccacaacgtcgaggcggtggcggcgatcaagggcatcaacgagctgaacatcggccatgccctggtggcacacgctctgtttgtcggtttcaaaggtgcggtggctgagatgaaggccttgatcctggcggctgcggccaaggcctga

SEQ ID NO: 147792 - protein, 248 aa, Pseudomonas fluorescens
MTTSNRILLGVNIDHVATLRQARGTRYPDPVKAALDAEEAGADGITVHLREDRRHIQERDVLLLKDVLQTRMNFEMGVTEEMMAFAERIRPAHICLVPETRQELTTEGGLDVAGQEARIKAAVERLSKIGSEVSLFIDADERQIEASKRVGAPAIELHTGRYADAQTPSEVAEELQRIVDGVAVGLAQGLIVNAGHGLHYHNVEAVAAIKGINELNIGHALVAHALFVGFKGAVAEMKALILAAAAKA

SEQ ID NO: 147793 - DNA, 792 bp, Ralstonia solanacearum
  CDS (1)..(792): transl_table=11
atgatctttcatgcctcgccgggtgtcatcgaccttggggtcaatatcgaccacgtcgccacgctgcgcaacgcgcgcggcaccacctacccggacccgatcgccgcggcgctgctggccgaggaggccggcgccgacctcatcacgctgcacctgcgcgaagaccgccggcacatcaaggacgccgacgtgcgcgcattgcggccgcaactgcgcacgcggatgaacctggagtgcgctgtcacgcaggagatgctcgacattgcgtgcgatatcggtccgcaggacgtctgtctggtgcccgagcggcggcaggaggtgaccaccgagggcggtctggacgtggtgggcggcttcgccaaggtgcaggccgcgtgccagcagttggcgggcgcgggcatccgcgtgtcgctgttcatcgatccggacccggcgcagatcgaggccgctgcggcgaccggggcgccggtcgttgagctgcataccggccgctacgcggaggccaccgacgacgccgaagtgaaggccgagctggtgcgcatcgagcgtgcggtggaagagggcatccgctgggggctgcgcgtcaatgccgggcacggcctgcactacaccaacgtgcagccgatcgcggcgatggcgggcatccacgaactcaacatcggccacgccatcgtcgcgcatgccgtgtttgccggctggcagaacgcggtgcgcgagatgaaggccatcatggtggcggcacgcctgtcggcgacgacgccagcggcagcgcatccgggcgtgccggcatga

SEQ ID NO: 147794 - protein, 263 aa, Ralstonia solanacearum
MIFHASPGVIDLGVNIDHVATLRNARGTTYPDPIAAALLAEEAGADLITLHLREDRRHIKDADVRALRPQLRTRMNLECAVTQEMLDIACDIGPQDVCLVPERRQEVTTEGGLDVVGGFAKVQAACQQLAGAGIRVSLFIDPDPAQIEAAAATGAPVVELHTGRYAEATDDAEVKAELVRIERAVEEGIRWGLRVNAGHGLHYTNVQPIAAMAGIHELNIGHAIVAHAVFAGWQNAVREMKAIMVAARLSATTPAAAHPGVPA

SEQ ID NO: 147795 - DNA, 741 bp, Rhizobium loti
  CDS (1)..(741): transl_table=11
atgcccgcaaagctttccgtcaacctcaacgccatcgccatgctgcgcaaccggcgcgacctgccatggcccagcgtcaccggcatcggccggcttgcgcttgccgccggtgcgcatgggctgaccgtgcatccgcgtcccgacgagcgtcacacgcggcattccgacctgcccgaaatccgggcgctgatcgacgatgagttcccgcaggcggaattcaatatcgagggctacccgagcgaggatttcctggcgcttgtggaaaagcatcagcccgaacaggtgacgctggttcccgatgatccggcgcaggcaacctccgaccatggctggaacttcgtcgccgatgcggcgttgctgacaccgatcgtcaggcgcctgaagaagggcggcttcagggtgtcgctgttttccgacgccgatcccgccggcatgacagccgcgcgagacaccggcgccgaccggatcgagctctataccggcccttatggcagctaccattccgattccgcaaaagccgacaaagaactggaaagattggggaaaacagccgacgcggcattcgccgccggcctccaggtcaatgccgggcacgatctgacggtgggcaatctgccggccctggccaagcgcattccggcattggccgaagtgtcaatcggacatgggttgacagccgacgcgttggagtatggcatggccggcacggtggggcggtttctcagggcctgcggttggtaa

SEQ ID NO: 147796 - protein, 246 aa, Rhizobium loti
MPAKLSVNLNAIAMLRNRRDLPWPSVTGIGRLALAAGAHGLTVHPRPDERHTRHSDLPEIRALIDDEFPQAEFNIEGYPSEDFLALVEKHQPEQVTLVPDDPAQATSDHGWNFVADAALLTPIVRRLKKGGFRVSLFSDADPAGMTAARDTGADRIELYTGPYGSYHSDSAKADKELERLGKTADAAFAAGLQVNAGHDLTVGNLPALAKRIPALAEVSIGHGLTADALEYGMAGTVGRFLRACGW

SEQ ID NO: 147797 - DNA, 753 bp, Rhizobium meliloti
  CDS (1)..(753): transl_table=11
atgcctgcaaagctctccgtaaatctcaatgccatcgccatgctgcgcaaccggcgtgatctcccctggccatccgtgaccggcctcgggcgcaccgccttgcaggcgggagcgagcggactgaccgttcacccgcgcccggaccagcggcatatccgcttttccgatctccagccgatccgcgacctgatcgacgacgagtttccggctgcggaattcaacatggagggctttccgaacgaggcgtttctcgaactggtcgagcggcacgaaccggaacaggtgacactggtgccggacgatccggcgcaggcgacctccgaccatggctgggattttcgcaagagccataacctgctcggcaacgtcgtcgggcggctgaagaagagaggtttccgcgtctcgctgtttgccgacggcattcccgacccggaggcgctgaagcttgcgaaggagaccggggccgaccgcatagaactctataccggaccctatggcggctgttacgacgatccggagaaagcggagcggatcgcgatcgaactgggccgcactgcggagatcgcgatcggccttggcctggccgtcaatgccggccacgacctgaccgtcgccaacctgccgttgctcgtcgaacacattcccgaactcgccgaagtctcgatcggacacgggctgacggccgatgcgctcgaatacggaatggccgagaccgtacgacgcttccgccgtgcctgcggcgagacggcttaa

SEQ ID NO: 147798 - protein, 250 aa, Rhizobium meliloti
MPAKLSVNLNAIAMLRNRRDLPWPSVTGLGRTALQAGASGLTVHPRPDQRHIRFSDLQPIRDLIDDEFPAAEFNMEGFPNEAFLELVERHEPEQVTLVPDDPAQATSDHGWDFRKSHNLLGNVVGRLKKRGFRVSLFADGIPDPEALKLAKETGADRIELYTGPYGGCYDDPEKAERIAIELGRTAEIAIGLGLAVNAGHDLTVANLPLLVEHIPELAEVSIGHGLTADALEYGMAETVRRFRRACGETA

SEQ ID NO: 147799 - DNA, 741 bp, Rhodopirellula baltica
  CDS (1)..(741): transl_table=11
atgccgcacttcattgatctcggcgtcaacgtcgatcacgtcgccacccttcgacaagctcgtcgagggcaggaaccggatccaatcaccgcggcgtcgctggcggaacaggggggagcggatggcattacgtttcaccttcgcgaagatcgacgacatatctccgatcgtgacgtggagctgttcgtgcagacggttcaagtgcgaacgaattttgagttggcttgcgccgcggatgtcttggcgatctgttgccgcgtgcaaccggattgggcactgttggttcccgagagtcgcgaagaagtgacaaccgaaggtggcttggacgtcgccggcgactcaggccgcatcgccgatgcgattcaaatgctgaaggacgccggaattgcgaccagtctgttcctggacccggaacccaatcaaatcgaagcggcggcgaagttgcaagtcgatgcggtggagttgcacacggggccatatgcgttggcaagaggtgccgcggtacagcacgaactgcgtcgattggcggataccggcaagatgatccgtgatgccggcatgcgtttgcacgctgggcacggattgaattacgtcaatgtccgacctgttgcggcgatcgatgggatggcggagctgaacatcggacacagcatcgtcagtcgatcggtaatggttgggatgcgcgaagcggtcgcggagatgcgacggttgctcgatagcgtgacgatcgcggctcagtga

SEQ ID NO: 147800 - protein, 246 aa, Rhodopirellula baltica
MPHFIDLGVNVDHVATLRQARRGQEPDPITAASLAEQGGADGITFHLREDRRHISDRDVELFVQTVQVRTNFELACAADVLAICCRVQPDWALLVPESREEVTTEGGLDVAGDSGRIADAIQMLKDAGIATSLFLDPEPNQIEAAAKLQVDAVELHTGPYALARGAAVQHELRRLADTGKMIRDAGMRLHAGHGLNYVNVRPVAAIDGMAELNIGHSIVSRSVMVGMREAVAEMRRLLDSVTIAAQ

SEQ ID NO: 147801 - DNA, 750 bp, Rhodospirillum rubrum
  CDS (1)..(750): transl_table=11
atgagccgggtgttgaggctgggtgtgaacatcgaccatgtggcgacgattcgcaacgccaggggcggggaccatcccgacccgctgcgcgcggccaagatcgcagcagaggccggggccgatggcatcaccgcccatctgcgcgaggatcgccgccatatcggcgatcgcgatatcgcccgcctgcgtgacgagatcgatctgccgctgaacctggaaatggccgcgaccgccgagatgctggccatcgccctgcgccatcgcccccatgccgcctgcatcgtgcccgaaaagcgcgaggagcggacgaccgagggcgggctggacgttgttggcggggccgtccatctggcgccgatcatcacagccctgggcgaggccggggtgcgggtgtcgctgtttatcgaacccgatctccgccagctcgacgccgcccgcgccttgggcgctccggtggtggaactccataccggcgcctattgcgacgccgccgccggtccggcgcgcgaggcccagttcctgcgcatcgacaaggcggcccgccatgcccaggccctggggctggaatgccatgccggccacggtctgacctatgacacggtcgagccggtggcggcgctgcccgccatcgccgagctcaatatcggccatttcctgatcggcgaggcgatcttcgtcggcttgcatcaggcgatcgcccgcatgcgcgcccatatggacgcggcgctgcgcggcggggtggcggcgtaa

SEQ ID NO: 147802 - protein, 249 aa, Rhodospirillum rubrum
MSRVLRLGVNIDHVATIRNARGGDHPDPLRAAKIAAEAGADGITAHLREDRRHIGDRDIARLRDEIDLPLNLEMAATAEMLAIALRHRPHAACIVPEKREERTTEGGLDVVGGAVHLAPIITALGEAGVRVSLFIEPDLRQLDAARALGAPVVELHTGAYCDAAAGPAREAQFLRIDKAARHAQALGLECHAGHGLTYDTVEPVAALPAIAELNIGHFLIGEAIFVGLHQAIARMRAHMDAALRGGVAA

SEQ ID NO: 147803 - DNA, 759 bp, Rhodobacter sphaeroides
  CDS (1)..(759): transl_table=11
atgaaacctttgggccggctgcggctgggcgtgaacattgaccatgtggcgacggtgcggaatgcgcgcgggacctcctatcccgatccgctgcgcgcggggcttctggccgaagcggccggcgccgacggcatcaccgcccacctgcgcgaggatcgccgccacatccgggatgaagacatcaccgccctcatgcaggggctgcgcgtgccgctgaacctcgagatggcgaccacgcccgagatgcaggccattgcactgcgccacaagccgcacgccgtctgcctcgtgccagagcggcgcgaggagcgcacgaccgagggcggcatcgacgtggcgggcgacatcgggcggctgaaggatttcgtggcccctctgcgcgcggcgggctgccgcgtgtcgatgttcatcggccacgacgtgcgccagatcgaggcctcggccgagatcggtgcggcggtggtcgagctgcacaccggccattactgcgaccttgtggcggaaggccgcaccgccgaggccgcgcgcgagctggaagccctgcgcgagggggcggcgctcgcccattcgctgggcctcgaggtccatgccggccacgggatcagttacgacacggtggccgagatcgcggccttcccgcaggtgatggagctcaacatcggccatttcctgataggcgaggcgatcttccgcggcctcggcagcgccatcgaggggatgcggcggcgcatggatgcggcgcgcgaggccgcagcttga

SEQ ID NO: 147804 - protein, 252 aa, Rhodobacter sphaeroides
MKPLGRLRLGVNIDHVATVRNARGTSYPDPLRAGLLAEAAGADGITAHLREDRRHIRDEDITALMQGLRVPLNLEMATTPEMQAIALRHKPHAVCLVPERREERTTEGGIDVAGDIGRLKDFVAPLRAAGCRVSMFIGHDVRQIEASAEIGAAVVELHTGHYCDLVAEGRTAEAARELEALREGAALAHSLGLEVHAGHGISYDTVAEIAAFPQVMELNIGHFLIGEAIFRGLGSAIEGMRRRMDAAREAAA

SEQ ID NO: 147805 - DNA, 732 bp, Salmonella typhimurium
  CDS (1)..(732): transl_table=11
atggctgaattactgttaggcgtcaatattgaccacattgccacgttacgtaatgcgcgcggcaccgactatccggatccggtacaggcggcgtttattgctgaacaggcaggcgcggacggcattaccgtacacctgcgcgaagatcgtcgccacattaccgatcgcgatgtgcgcattctgcgtcagacgctgcatacgcgtatgaatctggagatggcggtgaccgaagagatgctggcgatcgccgtagaaaccaggccgcatttctgttgtctggtgccggaaaaacgccaggaagtcaccaccgaaggcggtctggatgtggccggacagcgcgataaaatgcgtgatgcctgtgcgcgcctggcggcggctggcatccaggtttcgctctttatcgatgccgatgaaacgcaaatcaacgcggcggcggaagtcggcgcgccgtttatcgaaatccataccggctgctacgccaacgcagaaaccgatgcggaacaggcaaaagagctggcgcgtattgccagcgccgcgaccctggcggcccgtctggggctaaaagtaaatgcgggtcatggtctgacctaccataacgtcaaagctattgccgcactgccggaaatgcacgagctcaatatcggtcatgccattattggtcgggcagtgatgacggggctgaaagaggcggtggctgaaatgaaacgtttgatgctggaagcgcgcggctaa

SEQ ID NO: 147806 - protein, 243 aa, Salmonella typhimurium
MAELLLGVNIDHIATLRNARGTDYPDPVQAAFIAEQAGADGITVHLREDRRHITDRDVRILRQTLHTRMNLEMAVTEEMLAIAVETRPHFCCLVPEKRQEVTTEGGLDVAGQRDKMRDACARLAAAGIQVSLFIDADETQINAAAEVGAPFIEIHTGCYANAETDAEQAKELARIASAATLAARLGLKVNAGHGLTYHNVKAIAALPEMHELNIGHAIIGRAVMTGLKEAVAEMKRLMLEARG

SEQ ID NO: 147807 - DNA, 738 bp, Shewanella oneidensis
  CDS (1)..(738): transl_table=11
atgagccgtatcttattgggtgtaaatatcgatcatattgcgaccctacgtcaggctcgcggaaccagttatcctgatcctgtccacgctgcggccgttgccgaacatgcaggcgctgacggtatcaccattcatttgcgggaagatagacgtcatatcattgaccgcgatgtgtatttgttggcaaaaaccttaaaaacgcggatgaacttcgagtgtgcagtgactgaagaaatgctcaatatcgcctgcgaagtgaaacccacttacgtttgcttagtgcctgaaaagcgccaagaagtgaccacagaaggcggcttagatgtggctggtcaattagataaaatcactgccgctgttagccgtttagctgccaatggtattcaagtctcactgtttatcgatgcagataaaacccaaatcgatgcagcggttgcttctggtgcccctcttatcgaaatccatacgggttgctatgccgatgccaaaacggcagatgaagaagctaaagagcttgagcgtattcgtgaaatggcaaaatatgcccacggcaagggactgattgttaacgctggtcatggactgcattatcacaatgtgaagccgattgcggctatccctgagctgtatgaactcaatattggccatgccattgtggcccgcgccgcgattgatggccttgcaacagcggtgaaagatatgaagacgctgatgttagaaggtcgtcggggcgaataa

SEQ ID NO: 147808 - protein, 245 aa, Shewanella oneidensis
MSRILLGVNIDHIATLRQARGTSYPDPVHAAAVAEHAGADGITIHLREDRRHIIDRDVYLLAKTLKTRMNFECAVTEEMLNIACEVKPTYVCLVPEKRQEVTTEGGLDVAGQLDKITAAVSRLAANGIQVSLFIDADKTQIDAAVASGAPLIEIHTGCYADAKTADEEAKELERIREMAKYAHGKGLIVNAGHGLHYHNVKPIAAIPELYELNIGHAIVARAAIDGLATAVKDMKTLMLEGRRGE

SEQ ID NO: 147809 - DNA, 747 bp, Silicibacter pomeroyi
  CDS (1)..(747): transl_table=11
atgtctgttccccacctgcgccttggcgtgaatatcgaccatgtggcaaccgtgcgcaacgcccgcggcggtgagtatccggacccgatccgcgccgccaaaatcgccgaacaggcgggcgcggatggcattaccgcgcatctgcgcgaggatcgccgccatatcaccgatgccgatatcgacgggctgatggcggcgctgagcgtgccgctcaacttcgagatggccgccactgacgagatgcagaagatcgccctgcgccacaagccgcacgcggtctgcatcgtgcccgaaaagcgcgaggaacgcaccaccgagggcgggcttgaggtcgcgcgcgaagaaaaccggctggcccatttcatcgcaccgctgcgcgaggtcgggtgccgggtgtcgatcttcatcgccgccgaccgacgccaggtcgaggccgcgcaccggatcggcgcgcaggtgatcgaattgcataccggcgcctattgcgatgcccatgccgagggcgactttgccacgcgcgaccgcgagctggaggccctgcgcgaaatgtccgcctttgcccattcgctgggtcttgaggtgcacgcgggccacgggctgacctatgacacggtgcagccggtcgcggcattccccgaggtgatggagctgaatatcggccatttcctgataggcgaggcgatctttcgcgggctgcaccctgccatcgccgaaatgcgccgcctgatggacgaggcgcgggcatga

SEQ ID NO: 147810 - protein, 248 aa, Silicibacter pomeroyi
MSVPHLRLGVNIDHVATVRNARGGEYPDPIRAAKIAEQAGADGITAHLREDRRHITDADIDGLMAALSVPLNFEMAATDEMQKIALRHKPHAVCIVPEKREERTTEGGLEVAREENRLAHFIAPLREVGCRVSIFIAADRRQVEAAHRIGAQVIELHTGAYCDAHAEGDFATRDRELEALREMSAFAHSLGLEVHAGHGLTYDTVQPVAAFPEVMELNIGHFLIGEAIFRGLHPAIAEMRRLMDEARA

SEQ ID NO: 147811 - DNA, 750 bp, Synechococcus sp
  CDS (1)..(750): transl_table=11
atggccagcctcggggtcaacatcgaccacatcgccaacattcggcaggcacgccggacggtggaaccagatcctgtgcccttcgccatgctcgccgaactcggtggtgccgatggcatcacggttcatctgcgggaggatcgccgccacatccaggaccgtgatgtgcagctgctgcgtcagacggtgcgctcccgactgaatctggagatggcagcgacgcaggagatggtggagatcgccctggccgttgagccagacatggtcacccttgtgccggaaaagcgggaagaggtcactaccgagggagggctggatgtagctgcgcagttaagcgggctgacaccaatggtggagcggctgcagcagcgaggcatccccgtgagcctgttcgttgatgctgaaaccacccaactggaggcctgccgcaacagcggggctcactgggtggaactgcacaccgggacctacgccgatgcatcctgggccgatcagcccggtcagctggcgcgcatcacggagggggctgccacagcacgccatctcggccttcgcgtcaacgcaggccatggactcacctatcagaacgtggaaccgattgctgcgattcctgggatggaggaattgaacatcggccacacgatcgtggcccgtgcggttgccgtcggtctgcaacaagcggtgcgcgagatgaaggccttgatccagaatccccgcctggatcccctgttcggacacgcgctcggatga

SEQ ID NO: 147812 - protein, 249 aa, Synechococcus sp
MASLGVNIDHIANIRQARRTVEPDPVPFAMLAELGGADGITVHLREDRRHIQDRDVQLLRQTVRSRLNLEMAATQEMVEIALAVEPDMVTLVPEKREEVTTEGGLDVAAQLSGLTPMVERLQQRGIPVSLFVDAETTQLEACRNSGAHWVELHTGTYADASWADQPGQLARITEGAATARHLGLRVNAGHGLTYQNVEPIAAIPGMEELNIGHTIVARAVAVGLQQAVREMKALIQNPRLDPLFGHALG

SEQ ID NO: 147813 - DNA, 741 bp, Thiobacillus denitrificans
  CDS (1)..(741): transl_table=11
atgggcggtgcaatgagcatctacctcggcgtcaacatcgaccacatcgcgacgctgcgccaggcgcgcaagacgcgttatccgagtccggtcgaagccgcgctcgcggccgagaccgcgggcgccgattcgatcaccctgcatctgcgcgaagaccggcgccacatccaggacgccgacgtcacgatcctgcggcagacgctgaagacgaaaatgaacctcgagatggcggtgaccgaagagatgctcggcatcgcgctcgagacccggccttcggacgtgtgtctggtgccggaaaagcgcgaggagctgacgaccgagggcggtctcgatgtggcggggcagcaagcgaagatgcgcgacgcctgtgcacgcctgggcgacgcgggtatccgcgtctcgctcttcatcgacgccgacttcgcgcaactcgacgccgcgcacgccgcgggtgcgccggtcgtcgaaatccacaccgggcattacgccgatgcggcgagcgatgccgcgcgtgccgccgaattcgaacgcatccgccgggcggtcgcctacggccgcagcctcggcctcaccgtcaacgccggccacggcctgacctatcacaacgtgcagcccatcgccgccttgcccggcatccatgagctcaacatcggccacgcgatcgtcgcgcaggcgctgttcgtcggctggaaggaagcggtcgcggaaatgaagcggctgatggtcgccgcggcggggtag

SEQ ID NO: 147814 - protein, 246 aa, Thiobacillus denitrificans
MGGAMSIYLGVNIDHIATLRQARKTRYPSPVEAALAAETAGADSITLHLREDRRHIQDADVTILRQTLKTKMNLEMAVTEEMLGIALETRPSDVCLVPEKREELTTEGGLDVAGQQAKMRDACARLGDAGIRVSLFIDADFAQLDAAHAAGAPVVEIHTGHYADAASDAARAAEFERIRRAVAYGRSLGLTVNAGHGLTYHNVQPIAALPGIHELNIGHAIVAQALFVGWKEAVAEMKRLMVAAAG

SEQ ID NO: 147815 - DNA, 732 bp, Vibrio cholerae
  CDS (1)..(732): transl_table=11
atgagctcaatttatcttggtgtgaatatcgatcacgtggcgactttgcgtaacgcacgcggcacacaatatcccgatccagtgcatgcagcggaaattgctgaacgtgcgggcgcggatggcatcaccatccatctgcgtgaagatcgtcgtcacatcacagatcgcgatgtccgtattttgcgtgaaacactgcaaacgcgcatgaaccttgaaatggcagtgacggatgagatggtcgagattgcgctgcaaactcagccagaatacgtctgcttggtgccggaaaaacgtgaagagttgaccactgaaggcggtcttgatgtgctaggtcagttggagcgtgtcaaagcggcaacggaaaaactcactgcggctggcattaaagtttctctgtttatcgatgccgatcgtgagcaaattgatgcggccaaagcctgtggcgcaccttttattgagctgcatactgggcactactccgatgcgaaaagcgatgtcgatcagcaaaatgagctgaagaaaattgcagccgcagcggcttacgcacacgatttaggcattactgtgaatgcgggtcatggcttgacctaccacaatgtcgctgcgattgcggccattcctgaaatttacgagctgaacatcggccatgcgatcattggtcgcgcggtttttgatggtttagcgaaagccgtcgccgatatgaaagccatcatggttgctgcgcgtcgataa

SEQ ID NO: 147816 - protein, 243 aa, Vibrio cholerae
MSSIYLGVNIDHVATLRNARGTQYPDPVHAAEIAERAGADGITIHLREDRRHITDRDVRILRETLQTRMNLEMAVTDEMVEIALQTQPEYVCLVPEKREELTTEGGLDVLGQLERVKAATEKLTAAGIKVSLFIDADREQIDAAKACGAPFIELHTGHYSDAKSDVDQQNELKKIAAAAAYAHDLGITVNAGHGLTYHNVAAIAAIPEIYELNIGHAIIGRAVFDGLAKAVADMKAIMVAARR

SEQ ID NO: 147817 - DNA, 732 bp, Vibrio parahaemolyticus
  CDS (1)..(732): transl_table=11
atgagctcaatttatttaggcgttaatatcgaccatattgccactctacggaatgcgcgtggtacaaaatacccagatcctgtacacgctgcggaaatcgcagagcgtgctggggcggacggcattaccatccacctgcgtgaagaccgtcgccatattttggatcgtgatgtgcgtattctacgtgagacgattcaaacacgtatgaatctagaaatggcggtcactgaggaaatggttgagatcgcactaaaaactaagccagagtttgtttgtctcgtaccagaaaagcgtgaagagctcactactgaaggcggcttagatgtggttggtcaacttgacaaagtaaaagcggcaacgcaaaagctgacggaagcgggcattaaagtttctctgtttattgatgcggatcgtcagcaaattgaagcggcgaagcagtgtggtgcaccatttatcgagcttcatactggtcattacgctgatgcagaaacagaagaagagcaacaagcagaattgaagaagattgctgcgggcgcaagctacgctgatgaccttggtattattgtgaacgctggccacggtctgacttaccacaacgtggcaccaattgctgcgctaccagaaatttacgagttgaacattggtcactctatcattggccgtgcagtgtttgatggcctagaaaagtctgtggcagagatgaaagcactgatgatcgcggcacgcaaataa

SEQ ID NO: 147818 - protein, 243 aa, Vibrio parahaemolyticus
MSSIYLGVNIDHIATLRNARGTKYPDPVHAAEIAERAGADGITIHLREDRRHILDRDVRILRETIQTRMNLEMAVTEEMVEIALKTKPEFVCLVPEKREELTTEGGLDVVGQLDKVKAATQKLTEAGIKVSLFIDADRQQIEAAKQCGAPFIELHTGHYADAETEEEQQAELKKIAAGASYADDLGIIVNAGHGLTYHNVAPIAALPEIYELNIGHSIIGRAVFDGLEKSVAEMKALMIAARK

SEQ ID NO: 147819 - DNA, 732 bp, Vibrio vulnificus
  CDS (1)..(732): transl_table=11
atgagttcaatttacctgggtgttaacatcgaccacgtcgccactttacgcaatgcccgcggtactaagtatcctgatcctgtccatgccgcagaagtggcagagcgagcgggcgcggatggcattaccattcatttacgcgaagaccgtcgccacattaccgaccgtgacgttcgtattctgcgtgaaaccctgcaaacgcgtatgaatttagaaatggctgtcacagatgaaatgatcgagattgccctcaaaacgcaacctgaatatgtttgcttggtacctgaaaagcgtgaagagctcaccaccgaaggcgggttagatgttgctggccatttagacaaaatcaaagctgcgacggaaaaattaaccgcagcgggcattaaagtctccctattcattgatgcagatcgtgaacaaattgatgccgccaaagcgtgtggcgcgccttttattgagcttcatacgggtcattacgcggatgccgcgacagaagccgaccaattggatgagctgaagaagattgctgcaggcgcaagttacgcagcggatttgggtattacggtgaacgcaggtcatggtttgacttaccacaacgtggcaccaattgcggcattgcctgagatttacgagctgaacatcggccatgcgatcattggtcgtgcggtatttgatggtctccataaagcggtagcggacatgaaagccatcatggttgcggctcgtcagtaa

SEQ ID NO: 147820 - protein, 243 aa, Vibrio vulnificus
MSSIYLGVNIDHVATLRNARGTKYPDPVHAAEVAERAGADGITIHLREDRRHITDRDVRILRETLQTRMNLEMAVTDEMIEIALKTQPEYVCLVPEKREELTTEGGLDVAGHLDKIKAATEKLTAAGIKVSLFIDADREQIDAAKACGAPFIELHTGHYADAATEADQLDELKKIAAGASYAADLGITVNAGHGLTYHNVAPIAALPEIYELNIGHAIIGRAVFDGLHKAVADMKAIMVAARQ

SEQ ID NO: 147821 - DNA, 738 bp, Wigglesworthia glossinidia brevipalpis
  CDS (1)..(738): transl_table=11
atgtctaaattacttttaggtgtaaatgtcgatcatgtagcttctttgagaaatgttagaggaggaaaatttccagatccagtgcaattagctatattagcagaaatagctggtgctgacagtataacaactcatttaagagaagataatcgtcatataaatgaaaaagatgttatttgtataaaaaaatcaatccaatcaagattaaatttagaaatttccacaaaaaaagaaatgataaataaggcaataaatatattgccatattcttgttgtttagttccagaaaacaggcaagaaataacaacagagagcggaatagacgtaataaaaaataaaaaatatttaaaaaaagtaatatgtaaattaaaaagtttaggaataaaagtatctctttttgttgatccaataaaaaatcaaattttatcatcttcagaaattaatgcggattgcattgagataaatactggaaaatattcagaacaagataaaaaagaaaataaagaagaaataaatttaattaaattatgcgcaaaatacgcaaataaattaggattagaagttcatgcaggacatggattaaattattttaatgtaagaagtattgtaaatattaaagaaataaaagaattaaatattggacactcaattataagcagaagtttaatagtaggaatgcaaaatgccgttaaagaaatgaaagatataatatattcggaaaaaataaaatggcaataa

SEQ ID NO: 147822 - protein, 245 aa, Wigglesworthia glossinidia brevipalpis
MSKLLLGVNVDHVASLRNVRGGKFPDPVQLAILAEIAGADSITTHLREDNRHINEKDVICIKKSIQSRLNLEISTKKEMINKAINILPYSCCLVPENRQEITTESGIDVIKNKKYLKKVICKLKSLGIKVSLFVDPIKNQILSSSEINADCIEINTGKYSEQDKKENKEEINLIKLCAKYANKLGLEVHAGHGLNYFNVRSIVNIKEIKELNIGHSIISRSLIVGMQNAVKEMKDIIYSEKIKWQ

SEQ ID NO: 147823 - DNA, 789 bp, Wolinella succinogenes
  CDS (1)..(789): transl_table=11
atgcttttgggtgtgaatatcgatcatattgctacgcttagagaggcgcgcaaaatcaatgagcccgaccctctagaggcggtttttttggccaagagggcgggagccttccagatcacgattcatctaagagaggatcgacgccatatccacgactatgatgtggagcggatcgtggaatcctcgtttttgcccgtgaacgtggagtgctccacggataaacagattgttgatctgctctgtgagctaagaccccatcggatcactttggtgccagagaagcgcgaagaggtgaccacggagggggggcttgatcttttggggcgctttgagattttgaagtctagaattgcccagtttagagagaatgatattgcggtatccctctttgttgaccccgacatcacctctatcgagctctccaaggagctaggggcggatatggtggaacttcacacgggcacttttgcaaatcttcatcttatgctaagaagcaacctccctaaaacccctcacgccatccccgctctagagatggatcgccgttctttgagtctcgcctatcgcgaaagcctcctaacccttcaaaaggcagcgcaaaaggccaatacccttggaatcgaagtggcagcagggcatggactcaactatcaaaatgtgagcgagattgtgaagattcccgaaatcatcgaactcaatatcggtcatagtctcattgcacgctccatctttacgggatttgaggcggcggtgagggagatggtggagctgcttgggagaggcgattga

SEQ ID NO: 147824 - protein, 262 aa, Wolinella succinogenes
MLLGVNIDHIATLREARKINEPDPLEAVFLAKRAGAFQITIHLREDRRHIHDYDVERIVESSFLPVNVECSTDKQIVDLLCELRPHRITLVPEKREEVTTEGGLDLLGRFEILKSRIAQFRENDIAVSLFVDPDITSIELSKELGADMVELHTGTFANLHLMLRSNLPKTPHAIPALEMDRRSLSLAYRESLLTLQKAAQKANTLGIEVAAGHGLNYQNVSEIVKIPEIIELNIGHSLIARSIFTGFEAAVREMVELLGRGD

SEQ ID NO: 147825 - DNA, 732 bp, Yersinia pseudotuberculosis
  CDS (1)..(732): transl_table=11
atggctgatttgttgctgggcgttaatattgatcacatcgcgacactacgaaatgcacgtgggaccatttatcccgatccggttcaggctgcttttattgctgagcaagcgggcgctgacggcattactgtacatttacgtgaagatcgccgtcatattacggatcgcgatgtgcgtattttgcgtcagaccatccagactcgcatgaatctggaaatggcggtaacggatgaaatggttgatattgcttgtgatatcaaaccgcatttttgttgtctggtacctgaaaaacgtcaggaagtcacgactgaaggcgggctagatgttgccggtcaggttgataaaatgaccctggtggtagggcggttagcggatgttggcatactggtttcactctttattgatgcagattttcgccaaatcgatgcggctgttgccgctggcgcaccttatattgaaattcacaccggtgcttatgctgatgcctcgaccgttctggaacgtcaggctgaattaatgcgtatcgccaaagcagcgacctatgctgcaggcaaagggttgaaagtgaatgcgggtcatggtctgacataccataatgtgcagccaatagctgcattgccagaaatgcatgagctgaatattggtcatgcgatcattggccaggctgtgatgacaggccttgctaccgcagtgacagacatgaaggtattgatgcgggaagcgcgccgttaa

SEQ ID NO: 147826 - protein, 243 aa, Yersinia pseudotuberculosis
MADLLLGVNIDHIATLRNARGTIYPDPVQAAFIAEQAGADGITVHLREDRRHITDRDVRILRQTIQTRMNLEMAVTDEMVDIACDIKPHFCCLVPEKRQEVTTEGGLDVAGQVDKMTLVVGRLADVGILVSLFIDADFRQIDAAVAAGAPYIEIHTGAYADASTVLERQAELMRIAKAATYAAGKGLKVNAGHGLTYHNVQPIAALPEMHELNIGHAIIGQAVMTGLATAVTDMKVLMREARR

SEQ ID NO: 147827 - DNA, 771 bp, Zymomonas mobilis
  CDS (1)..(771): transl_table=11
atgaccaaaagaataaggcttggggtcaatattgaccatgttgccactattcgcaatgcacgcggtggaatccatcctgatcccgtaagagctgcccagctggccgcacatgcgggtgccgatgggattacgacccatcttcgagaagatcgccgtcatattagcgatgacgatctgattaatcttgaaaaaggcattacgctgccccttaatctggaaatggcagccaccgaagaaatgctggaaatcgcgcttcagcatcgcccccatgcggtctgtctggttcctgaaaaacgggaagaacagaccaccgaaggcggtcttgatgccgcaggccagattgacagcttaaagccgattgttgcgaaattattggccgccggtattcgggtcagtttgttcatcgaaccggatgaaacccagatcagagccgccaaggccttgaatgcgccggttatcgaattgcataccggccattatgccaatagcgttaatgaagaactggcagccgagctgatccgtatagagcaagcggccaagctggcaaaaagcctcaatatcgaggttcatgccggtcacggtctcacttatgaaaatgtgataccgattgccgctttggaagaaattgccgaattgaatatcggccatttcctgatcggtgaggcgattttcatcggacttgaagccagtatcaaacggatgcgctatttaatggatgccgcccgtgctgaagacaaggtcgattttctggtcaagcatatcgctttatga

SEQ ID NO: 147828 - protein, 256 aa, Zymomonas mobilis
MTKRIRLGVNIDHVATIRNARGGIHPDPVRAAQLAAHAGADGITTHLREDRRHISDDDLINLEKGITLPLNLEMAATEEMLEIALQHRPHAVCLVPEKREEQTTEGGLDAAGQIDSLKPIVAKLLAAGIRVSLFIEPDETQIRAAKALNAPVIELHTGHYANSVNEELAAELIRIEQAAKLAKSLNIEVHAGHGLTYENVIPIAALEEIAELNIGHFLIGEAIFIGLEASIKRMRYLMDAARAEDKVDFLVKHIAL

SEQ ID NO: 147829 - DNA, 20 bp, Artificial sequence
  primer
atggagccagacccgatcgc

SEQ ID NO: 147830 - DNA, 22 bp, Artificial sequence
  primer
ttaaaatggcagccccaacatg

SEQ ID NO: 147831 - protein, 261 aa, Artificial sequence
  consensus sequence
  Variant (5)..(5): Xaa in position 5 is any amino acid
  Variant (8)..(8): Xaa in position 8 is any amino acid
  Variant (11)..(11): Xaa in position 11 is any amino acid
  Variant (13)..(13): Xaa in position 13 is any amino acid
  Variant (16)..(17): Xaa in position 16 to 17 is any amino acid
  Variant (18)..(19): Xaa in position 18 to 19 is any or no amino acid
  Variant (23)..(25): Xaa in position 23 to 25 is any amino acid
  Variant (27)..(28): Xaa in position 27 to 28 is any amino acid
  Variant (30)..(32): Xaa in position 30 to 32 is any amino acid
  Variant (36)..(36): Xaa in position 36 is any amino acid
  Variant (39)..(39): Xaa in position 39 is any amino acid
  Variant (49)..(49): Xaa in position 49 is any amino acid
  Variant (51)..(51): Xaa in position 51 is any amino acid
  Variant (53)..(55): Xaa in position 53 to 55 is any amino acid
  Variant (57)..(63): Xaa in position 57 to 63 is any amino acid
  Variant (64)..(69): Xaa in position 64 to 69 is any or no amino acid
  Variant (71)..(71): Xaa in position 71 is any amino acid
  Variant (73)..(73): Xaa in position 73 is any amino acid
  Variant (75)..(75): Xaa in position 75 is any amino acid
  Variant (77)..(77): Xaa in position 77 is any amino acid
  Variant (80)..(82): Xaa in position 80 to 82 is any amino acid
  Variant (84)..(87): Xaa in position 84 to 87 is any amino acid
  Variant (89)..(92): Xaa in position 89 to 92 is any amino acid
  Variant (97)..(97): Xaa in position 97 is any amino acid
  Variant (99)..(99): Xaa in position 99 is any amino acid
  Variant (101)..(101): Xaa in position 101 is any amino acid
  Variant (109)..(122): Xaa in position 109 to 122 is any amino acid
  Variant (124)..(126): Xaa in position 124 to 126 is any amino acid
  Variant (128)..(129): Xaa in position 128 to 129 is any amino acid
  Variant (134)..(139): Xaa in position 134 to 139 is any amino acid
  Variant (140)..(141): Xaa in position 140 to 141 is any or no amino acid
  Variant (143)..(149): Xaa in position 143 to 149 is any amino acid
  Variant (152)..(154): Xaa in position 152 to 154 is any amino acid
  Variant (156)..(156): Xaa in position 156 is any amino acid
  Variant (160)..(160): Xaa in position 160 is any amino acid
  Variant (162)..(167): Xaa in position 162 to 167 is any amino acid
  Variant (168)..(195): Xaa in position 168 to 195 is any or no amino acid
  Variant (197)..(210): Xaa in position 197 to 210 is any amino acid
  Variant (212)..(215): Xaa in position 212 to 215 is any amino acid
  Variant (221)..(221): Xaa in position 221 is any amino acid
  Variant (223)..(223): Xaa in position 223 is any amino acid
  Variant (225)..(227): Xaa in position 225 to 227 is any amino acid
  Variant (228)..(229): Xaa in position 228 to 229 is any or no amino acid
  Variant (231)..(236): Xaa in position 231 to 236 is any amino acid
  Variant (237)..(237): Xaa in position 237 is any or no amino acid
  Variant (244)..(248): Xaa in position 244 to 248 is any amino acid
  Variant (250)..(252): Xaa in position 250 to 252 is any amino acid
  Variant (254)..(257): Xaa in position 254 to 257 is any amino acid
  Variant (259)..(260): Xaa in position 259 to 260 is any amino acid
LGVNXDHXATXRXARXXXXPDPXXXAXXAXXXGADXITXHLREDRRHIXDXDXXXLXXXXXXXXXXXXXNXEXAXTXEMXXXAXXXXPXXXXLVPEXRXEXTTEGGLDXXXXXXXXXXXXXXLXXXGXXVSLFXXXXXXXXQXXXXXXXGAXXXEXHTGXYXXXXXXXXXXXXXXXXXXXXXXXXXXXXXXXXXXEXXXXXXXXXXXXXXGXXXXAGHGLXYXNXXXXXAXXXXXXXELNIGHXXXXXAXXXGXXXXVXXM

SEQ ID NO: 147832 - protein, 40 aa, Artificial sequence
  protein pattern
  Variant (2)..(2): Xaa in position 2 is Phe or Leu
  Variant (4)..(4): Xaa in position 4 is any amino acid
  Variant (5)..(5): Xaa in position 5 is Ala or Gly
  Variant (6)..(6): Xaa in position 6 is any amino acid
  Variant (7)..(7): Xaa in position 7 is Ala, Ser or Thr
  Variant (8)..(9): Xaa in position 8 to 9 is any amino acid
  Variant (10)..(10): Xaa in position 10 is Ile or Met
  Variant (11)..(13): Xaa in position 11 to 13 is any amino acid
  Variant (15)..(18): Xaa in position 15 to 18 is any amino acid
  Variant (20)..(23): Xaa in position 20 to 23 is any amino acid
  Variant (24)..(24): Xaa in position 24 is Phe, Ile or Leu
  Variant (28)..(28): Xaa in position 28 is any amino acid
  Variant (30)..(30): Xaa in position 30 is any amino acid
  Variant (32)..(32): Xaa in position 32 is any amino acid
  Variant (38)..(38): Xaa in position 38 is Ile or Leu
  Variant (39)..(39): Xaa in position 39 is Asp, Glu or Asn
  Variant (40)..(40): Xaa in position 40 is Ala, Ile, Leu or Val
NXEXXXXXXXXXXAXXXXPXXXXXVPEXRXEXTTEGGXXX

SEQ ID NO: 147833 - protein, 14 aa, Artificial sequence
  protein pattern
  Variant (2)..(2): Xaa in position 2 is Ile or Leu
  Variant (3)..(5): Xaa in position 3 to 5 is any amino acid
  Variant (9)..(9): Xaa in position 9 is Asp or Gly
  Variant (11)..(13): Xaa in position 11 to 13 is any amino acid
  Variant (14)..(14): Xaa in position 14 is Asn or Thr
GXXXXAGHXLXXXX

SEQ ID NO: 147834 - protein, 21 aa, Artificial sequence
  protein pattern
  Variant (3)..(3): Xaa in position 3 is any amino acid
  Variant (6)..(6): Xaa in position 6 is His or Tyr
  Variant (7)..(7): Xaa in position 7 is any amino acid
  Variant (8)..(8): Xaa in position 8 is Ile or Leu
  Variant (9)..(9): Xaa in position 9 is Ile, Met or Val
  Variant (10)..(10): Xaa in position 10 is Ala, Gly or Ser
  Variant (11)..(11): Xaa in position 11 is any amino acid
  Variant (12)..(12): Xaa in position 12 is Ala, Gly or Ser
  Variant (13)..(15): Xaa in position 13 to 15 is any amino acid
  Variant (17)..(19): Xaa in position 17 to 19 is any amino acid
  Variant (20)..(20): Xaa in position 20 is Ala, Ser, Thr or Val
  Variant (21)..(21): Xaa in position 21 is Ile or Val
ELXIGXXXXXXXXXXGXXXXX

SEQ ID NO: 147835 - protein, 18 aa, Artificial sequence
  protein pattern
  Variant (2)..(5): Xaa in position 2 to 5 is any amino acid
  Variant (6)..(6): Xaa in position 6 is any or no amino acid
  Variant (8)..(9): Xaa in position 8 to 9 is any amino acid
  Variant (10)..(10): Xaa in position 10 is Ile or Val
  Variant (12)..(12): Xaa in position 12 is Phe, Ile, Leu or Met
  Variant (13)..(13): Xaa in position 13 is His or Tyr
  Variant (15)..(15): Xaa in position 15 is Glu or Gly
  Variant (16)..(16): Xaa in position 16 is any amino acid
  Variant (17)..(17): Xaa in position 17 is Phe, Trp or Tyr
  Variant (18)..(18): Xaa in position 18 is Ala, Cys, Gly or Ser
AXXXXXAXXXEXXTXXXX

SEQ ID NO: 147836 - DNA, 2094 bp, Synechocystis sp.
  CDS (1)..(2094): transl_table=11
atgacgagttccctttatttaagcaccaccgaagcccgcagcggtaaatctctagtagtattgggcattttagacttaattctcaaaaaaaccacccgtattgcctattttcgtcccattattcaagacccagttaatggcaaacatgataacaacattattctggtgctggaaaattttcgtctccaacaaacctataccgattcctttggtttgtatttccatgaagcggtgagtttagcctccgatggagctattgatcaggtattagaccgaattttggctaaatatcgccatttggcagatcaagtagattttattctctgtgaaggctcagactatttgggggaggaatcggcttttgaatttgatctcaacaccacgatcgccaagatgttgaactgccccattttgctgttgggcaatgccatgggcaacaccattgccgatagtttgcaacccatcgatatggccctgaatagctatgaccaagagtcttgtcaggtggtgggggtaatcattaaccgagtgcagcccgaattagccacagaaattcaagcccaactggaacagcgttatggcgatcgcccgatggtgttgggcactattccccaggacattatgctcaaaagtctgcgcctgagggaaattgtcagcgggctcaatgcccaagtactcagcggtgcggatttgctcgataacttggtctatcaccatttagtggtggcgatgcacattgcccacgccctccattggttgcacgaaaaaaataccctaattattacccctggcgatcggggcgacatcattctgggggtgatgcaggcccaccgctccctcaactatcccagcattgccggtattttgctcactgcagattaccatcccgaaccggccattatgaaactaattgaagggctacccgacgcccctcccctgttgctgactagcacccacacccatgaaacttccgcccgtttggaaactctccaccctgccctgagccctacggataattataaaattcgccacagtattgcgctgtttcaacaacaaattgatggggagaaattactcaattaccttaaaaccatccgcagtaaaggtattacccccaaactgtttctctacaatttagttcaagccgccaccgccgcccaacgacatattgtcctaccggaaggggaagaaattcgtattctcaaggcggccgctagcttaattaaccacggcattgtccgtttgactttactcggtaacattgaggcgatcgagcaaacggtaaaaattaatcacattgacttagatttgagcaaagttcgcctcattaatcctaaaactagcccagaccgagagcgctacgccgaaacctattaccagctacgtaaacataagggggtaaccctggccatggctcgggatatcctcaccgatatttcctattttggaacgatgatggtgcatttgggagaggccgatggcatggtttctggctccgtcaataccacccaacataccgtgcgtcctgctttacaaattattaaaacccagccaggtttttccttggtttcttcagtcttttttatgtgtttagaagaccgagttttggtctatggagattgtgctgttaatcccgatcccaatgcagaacagttagcagaaattgcccttacttctgcggctacggccaagaattttggcattgagcccagggtagctctattgtcctattcttccggttcttctgggcaaggggccgatgtggaaaaagtgcggcaagccacggcgatcgccaaggaaagagagccagatttagcattggaagggccgatccagtatgatgcggcggtggattccacagtggcggcccaaaaaatgcctgggtcagcggtggcgggtaaagcaacggtgtttatttttcccgatttaaataccggtaacaatacttacaaggcagtgcaaagagaaacaaaggcgatcgccattggccccattttacaaggattaaataaaccagttaatgatctaagtcggggttgtttagtggaggatattattaatacggtggtaattacagctttgcaagttaaataa

SEQ ID NO: 147837 - protein, 697 aa, Synechocystis sp.
MTSSLYLSTTEARSGKSLVVLGILDLILKKTTRIAYFRPIIQDPVNGKHDNNIILVLENFRLQQTYTDSFGLYFHEAVSLASDGAIDQVLDRILAKYRHLADQVDFILCEGSDYLGEESAFEFDLNTTIAKMLNCPILLLGNAMGNTIADSLQPIDMALNSYDQESCQVVGVIINRVQPELATEIQAQLEQRYGDRPMVLGTIPQDIMLKSLRLREIVSGLNAQVLSGADLLDNLVYHHLVVAMHIAHALHWLHEKNTLIITPGDRGDIILGVMQAHRSLNYPSIAGILLTADYHPEPAIMKLIEGLPDAPPLLLTSTHTHETSARLETLHPALSPTDNYKIRHSIALFQQQIDGEKLLNYLKTIRSKGITPKLFLYNLVQAATAAQRHIVLPEGEEIRILKAAASLINHGIVRLTLLGNIEAIEQTVKINHIDLDLSKVRLINPKTSPDRERYAETYYQLRKHKGVTLAMARDILTDISYFGTMMVHLGEADGMVSGSVNTTQHTVRPALQIIKTQPGFSLVSSVFFMCLEDRVLVYGDCAVNPDPNAEQLAEIALTSAATAKNFGIEPRVALLSYSSGSSGQGADVEKVRQATAIAKEREPDLALEGPIQYDAAVDSTVAAQKMPGSAVAGKATVFIFPDLNTGNNTYKAVQRETKAIAIGPILQGLNKPVNDLSRGCLVEDIINTVVITALQVK

SEQ ID NO: 147838 - DNA, 2058 bp, Dichelobacter nodosus VCS1703A
  CDS (1)..(2058): transl_table=11
atgacaaaatcaatacttttagttgcaacccatcgtggcgcgggattaacttcttccgttttaggattgagtcacgctattgaaaaattaggcgtaaaagtggcattgcataaacccgttttgcaatgcgcttgcgaggcatcatgcgcttgcaattctgcagcaacctgtaccgatcgcgcgttatccatttcgccagaacgcattcaacaagctttaaaaaatcagaaaatcgatgaattgatggaagaagccttacaacatttcgtcgccgctaaagccgatgccgatatcgttgtgatggaaggattattggaaacgcctaacgcgccgtatgctcatttaatcaaccaaaaaatcgcgcgttcattgggcgccgacgttatcgttgtgagcagcgcagatgtagaaagtatcgatcgtttagaaagacgtttgagctttgccggcgaatattttgccggacgtttattaggcgccatcatcaatcgcgtaggcggcgaaggcaatttaacgcaagaatgtttacaaaaaagcagctgctttaatgatgcattacctttacttgccaccatttctgaaaatgcagagttagccgcaccgcgcgtgctcgatttgcaacgtcatttagacgctgaaatattattttccggcgaaatcaacagccgccgaatttatgactacgtattatttgcgcgcagcgtgcaaaatgcgattcctgttttgcgcgacggcgtgtgcgttttttcgcctgccgaccgtgacgatactttaatggcagtaaccaccgccgtggcttctggtacgcatttggcgtgtttggttttaaccggtgaagaacgcagcgatgatgcggttatgcgtttgtgtaaaccattgttagaaaaatcaaaattaccggtgttgcggattaaacgcgacagttgggaaagtactcgcgcgatggaaggatttaatgcgcatctcgccgcagatgataaagaacgcatcgaaaaaatccgcacattttttgttgagcacctcaataaagaatggattaaaaattatgttgcgcgcggcgacgaacaacgtctttcacccgcagcattccgttataacgtggtgcaaaaagcgattgcagcgaaaaaaaccatcgttttacctgaaggtgatgaacccagaaccgtggttgctgccagtcaatgtgcggcgcgcggcatggcaaaatgtgttttattagctaaaccagaacgcgtgcacgcagttgccgccgaacaaggcgttactttaggcgacggcatctccatcattgatccggaacaagcccgcgaacaatacgttgcccgtttggtggaattgcgtaaacacaaaggcatggacgaggctactgcccgcagtcaattagaaaataatgtgatgttgggcacattaatgttggaagctggcgaagttgatggtttggtttctggcgcagtacacaccaccgccgataccatgcgtccgccgttgcaattaattaagacggcaaaaggcgcgagcatggtttcttccgtctttttcatgtgtttgccggaacaagttttggtgtacggcgattgcgcgattgttcccaaaccaactgttgatgatttggcgcaaattgcgattcaatcaaacgatactgccaaagcctttggcattgaaccgaaagtggcaatgatttcttattcaaccggtaattcaggtcaaggtgaagacgtagaaaaagttaaagccgcaacggcaaaagtgcgggaattgcgtccggatattatcgttgatggtccaatgcaatacgacgccgcgtcagtggcttcagtaggtcgcgctaaagcgccgaacagccccgttgctggacaagcaaccgtattcgttttccccgatttaaataccggaaatactacttataaagcggtgcaacgcacagcgcacgccgtttctatgggacccgtattgcaaggtatgcgtaaaccggttaacgatttatcgcgcggcgctttgattgaagatattgtttacaccattgcgctgactgccgttcaagcaacattagctgaatag

SEQ ID NO: 147839 - protein, 685 aa, Dichelobacter nodosus VCS1703A
MTKSILLVATHRGAGLTSSVLGLSHAIEKLGVKVALHKPVLQCACEASCACNSAATCTDRALSISPERIQQALKNQKIDELMEEALQHFVAAKADADIVVMEGLLETPNAPYAHLINQKIARSLGADVIVVSSADVESIDRLERRLSFAGEYFAGRLLGAIINRVGGEGNLTQECLQKSSCFNDALPLLATISENAELAAPRVLDLQRHLDAEILFSGEINSRRIYDYVLFARSVQNAIPVLRDGVCVFSPADRDDTLMAVTTAVASGTHLACLVLTGEERSDDAVMRLCKPLLEKSKLPVLRIKRDSWESTRAMEGFNAHLAADDKERIEKIRTFFVEHLNKEWIKNYVARGDEQRLSPAAFRYNVVQKAIAAKKTIVLPEGDEPRTVVAASQCAARGMAKCVLLAKPERVHAVAAEQGVTLGDGISIIDPEQAREQYVARLVELRKHKGMDEATARSQLENNVMLGTLMLEAGEVDGLVSGAVHTTADTMRPPLQLIKTAKGASMVSSVFFMCLPEQVLVYGDCAIVPKPTVDDLAQIAIQSNDTAKAFGIEPKVAMISYSTGNSGQGEDVEKVKAATAKVRELRPDIIVDGPMQYDAASVASVGRAKAPNSPVAGQATVFVFPDLNTGNTTYKAVQRTAHAVSMGPVLQGMRKPVNDLSRGALIEDIVYTIALTAVQATLAE

SEQ ID NO: 147840 - DNA, 2139 bp, Pasteurella multocida subsp. multocida str. Pm70
  CDS (1)..(2139): transl_table=11
atgtcacgtacaattatccttatcccgattagtgctggtgtaggcttaaccagtgtcagcttaggtttaacacatgcactggagcaaaaaggggcgaaagtcggctttatgaaaccaatttctcagccgaactcaggtgaagatatgattgatcgcacaacatcaattattcgcaccagtaccaccattgaaaccagtgaaccgtttatgttaagtgtagcggaatcactaatcggtcaaaatcaatctgatgtggtactagaaaaaattgttgaaaatcatcaacaactcgccaaaaacaatgaaattgtcgtggtggaaggtttaatccctacgcgtaagcattcttatgccaatagcattaactatgaaattgctcaagcacttgatgcagaaatcattcttgttgcagcaccagcgacggaaacaccagcagaactcaaagaacgcatcaaagccgcagcctcattatttggcagcaaaaataaccctaatttacttggtgttgtgatcaataaatttaatgcgccgattgatgaatctggtcgtactcgccctgacttggcagaaatttttgattctttccaacacacacaaaatcaagtatctgagatttatcatttatttgagaaaagcccaattaaaatcttggcatgtattccttggagcgcagaattaattgcgactcgtgccattgatttagccaaacatttaggtgctgccattattcatgaaggcgctatcaatgaacgtcgcattcgtggcatcactttctgtgcacgtaatttgaccaatatggtggaacatttccgtgttggaagtttacttgtcacttccgcagatcgtcctgatgtgatcgtcgcagcggcattatctgccatgaatggcgttgaaattgcaggtgttttattaaccggtggttacaaaattgatgcacaaatcaagaaactctgtcaacacgcgatcgaaagtacaggtttaccagtcttccgtgtcgaaggcaacacttggcaaactgcactggcactacaaagttttaacctcgaagtgcctgttgatgataaagaacgtatcgaaaaaattaaacattatattagcgacctactcgacagcaattttatcgattcattagcggcggcctcttctcgtttacgtcgtttatcgccacctgctttccgtttccaattaaccgaattagcacgtcaagcgcaaaaacgcattgtattgcctgaaggggatgaaccacgtacagtaaaagctgctgccttatgtgcagagcgtggtatcgctgaatgtgtgttattagctacaccagaatccgtcatgcgtgttgccgaagcacaaggcatacaattaggcaaagggattacgattattgatcctgctacagtgcgtgaaaactatgttgcacgtttagtggaattgcgtaaaaacaaaggcatgaccgaagattctgcacgtgaacaattagaagacaatgtggtacttggtacaatgatgttagaagcgaacgaagtagatggtttagtctctggtgccgtacatacgacagccaatactattcgtccgccgatgcaaatcatcaaaactgcaccgggtaattcgattgtgtcttcaatcttcttcatgttattacctgatcaagtcttggtttatggtgactgcgcagtcaacccagatccaacagcagaacaattagcagaaatcgcgattcaatccgcagactcagccaaagcctttggtattgatccaaaagtggcgatgatctcttactcaactggtacttctggtagtggtgcagatgtagagaaagtgaaagaagccactcgtctggcacaagaaaaacgtccagatttaatcatcgacggtccattacaatatgatgcggcagtgatggaagatgtagcgcgttctaaagcaccaaattcaccagtggcaggtaaagcgacggtctttattttccctgatttgaataccggtaataccacttataaagcggtacaacgctctgctgaccttgtgtctattggaccgatgttacaaggtatgcgtaaaccagtgaatgatttatcacgtggtgcgttagtggacgatatcgtgtacacaattgccttaactgcaattcaagcaacacaataa

SEQ ID NO: 147841 - protein, 712 aa, Pasteurella multocida subsp. multocida str. Pm70
MSRTIILIPISAGVGLTSVSLGLTHALEQKGAKVGFMKPISQPNSGEDMIDRTTSIIRTSTTIETSEPFMLSVAESLIGQNQSDVVLEKIVENHQQLAKNNEIVVVEGLIPTRKHSYANSINYEIAQALDAEIILVAAPATETPAELKERIKAAASLFGSKNNPNLLGVVINKFNAPIDESGRTRPDLAEIFDSFQHTQNQVSEIYHLFEKSPIKILACIPWSAELIATRAIDLAKHLGAAIIHEGAINERRIRGITFCARNLTNMVEHFRVGSLLVTSADRPDVIVAAALSAMNGVEIAGVLLTGGYKIDAQIKKLCQHAIESTGLPVFRVEGNTWQTALALQSFNLEVPVDDKERIEKIKHYISDLLDSNFIDSLAAASSRLRRLSPPAFRFQLTELARQAQKRIVLPEGDEPRTVKAAALCAERGIAECVLLATPESVMRVAEAQGIQLGKGITIIDPATVRENYVARLVELRKNKGMTEDSAREQLEDNVVLGTMMLEANEVDGLVSGAVHTTANTIRPPMQIIKTAPGNSIVSSIFFMLLPDQVLVYGDCAVNPDPTAEQLAEIAIQSADSAKAFGIDPKVAMISYSTGTSGSGADVEKVKEATRLAQEKRPDLIIDGPLQYDAAVMEDVARSKAPNSPVAGKATVFIFPDLNTGNTTYKAVQRSADLVSIGPMLQGMRKPVNDLSRGALVDDIVYTIALTAIQATQ

SEQ ID NO: 147842 - DNA, 2115 bp, Pseudomonas aeruginosa PAO1
  CDS (1)..(2115): transl_table=11
atgcataccttcttcatcgccccgaccggtttcggcgtcggcctcacctcgatcagcctcggcctgcttcgcgccctggaacgcgccgggctgaaggtcggcttcttcaaacccatcgcccaactgcatcccggcgacctcggcccggagcgctccagcgaactggtggcgcgcacccacggcctggatacgccgaagccgctgccgctggcccaggtcgagcgcatgctcggcgacggccaactggacgaactgctcgaagagatcatcagcctctaccagcgcgccgccgccgacaaggacgtggtgatcgtcgaaggcatggtaccgacccgtcacgccagctacgccgcgcgggtcaacttccacctggcaaagagtctcgacgccgaggtgatcctggtctccgcgccggaaaacgagacgctcaccgaactgaccgaccgtatcgagatccaggcccagctgttcggcggcccgcgcgatccgaaggtgctcggggtgatcctcaacaaggtccgcggcgaggccgacgcggccaacgccgaggacggcgtggcggacttcgcccggcgcctcaccgaacactcgccgctgctgcgcgacgacttccgcctgatcggctgcattccctggcaggacgaactcaacgccgcgcgcacccgcgacatcgccgacctgctcagcgcacgggtgatcaacgccggcgactatgagcagcgccgggtgcagaagatcgtgctatgcgcccgcgccgtgcccaacaccgtgcaactgctcaagcccggcgtgctggtggtgacccccggcgaccgcgacgacatcatcctcgccgccagcctggccgcgatgaacggcgtacccttggccggcctgctgctgtgcagcgacttcccgcccgacccgcggatcatggaactctgccgcggcgccctgcagggcggcctgccggtgctgtcggtggccaccggctcctacgacaccgcgaccaacctgaaccggatgaacaaggaaatcccggtggacgaccgcgagcgcgccgagcgggtcaccgagttcgtcgccgggcacatcgatttcgaatggctcaagcagcgctgcggcacgccgcgcgagctgcgcctgtcgccgccggcgttccgctaccaggtggtgcaacgcgcgcagaaggccggcaagcgcatcgtcctgcccgagggcagcgagccgcgcaccgtacaggcggcggcgatctgccaggcgcgcggcatcgcccgctgcgtgctgctggccaagccggaagaggtccaggcggtggcccaggcccagggcatcgtgctaccggaaggcctggagatcatcgaccctgacctggtgcggcagcgctacgtcgaaccgatggtcgagctgcgcaagggcaaggggctgaacgcgccgatggcggagcagcaactggaggacagcgtggtcctggcgaccatgatgcttgccctggacgaggtcgacggcctggtctccggcgccatccacaccaccgccagcaccatccgcccggcgctgcaactgatcaagaccgcgcccggctacaacctggtgtcgtcagtgtttttcatgttgttaccggaccaggtgctggtctacggcgattgcgcggtgaatcccgatccttcggccagtgacctggccgagatcgccgtgcagagtgccgcgtcggcgcaggctttcggcatcccggcacgggtcgcgatgatcagctactccaccggcgactccggttccggggtggatgtcgacaaggttcgcgaggccacccgcctggcgcgcgagcagcgccccgacctgttgatcgacggacccttgcagtatgatgccgccgccatcgccagcgtcggccgccagaaggcgccgaacagcccggtggccgggcaggccacggtgttcatcttccccgacctgaacaccggcaacaccacctacaaggcggtgcagcgcagcgccgattgcgtcagcgtcgggccgatgctgcaaggcctgcgcaaaccggtgaacgacctgtcgcgcggcgcgctggtggaagacatcgtctacaccatcgccctcaccgccatccaggcggacgcccaggccccggcctga

SEQ ID NO: 147843 - protein, 704 aa, Pseudomonas aeruginosa PAO1
MHTFFIAPTGFGVGLTSISLGLLRALERAGLKVGFFKPIAQLHPGDLGPERSSELVARTHGLDTPKPLPLAQVERMLGDGQLDELLEEIISLYQRAAADKDVVIVEGMVPTRHASYAARVNFHLAKSLDAEVILVSAPENETLTELTDRIEIQAQLFGGPRDPKVLGVILNKVRGEADAANAEDGVADFARRLTEHSPLLRDDFRLIGCIPWQDELNAARTRDIADLLSARVINAGDYEQRRVQKIVLCARAVPNTVQLLKPGVLVVTPGDRDDIILAASLAAMNGVPLAGLLLCSDFPPDPRIMELCRGALQGGLPVLSVATGSYDTATNLNRMNKEIPVDDRERAERVTEFVAGHIDFEWLKQRCGTPRELRLSPPAFRYQVVQRAQKAGKRIVLPEGSEPRTVQAAAICQARGIARCVLLAKPEEVQAVAQAQGIVLPEGLEIIDPDLVRQRYVEPMVELRKGKGLNAPMAEQQLEDSVVLATMMLALDEVDGLVSGAIHTTASTIRPALQLIKTAPGYNLVSSVFFMLLPDQVLVYGDCAVNPDPSASDLAEIAVQSAASAQAFGIPARVAMISYSTGDSGSGVDVDKVREATRLAREQRPDLLIDGPLQYDAAAIASVGRQKAPNSPVAGQATVFIFPDLNTGNTTYKAVQRSADCVSVGPMLQGLRKPVNDLSRGALVEDIVYTIALTAIQADAQAPA

SEQ ID NO: 147844 - DNA, 2145 bp, Escherichia coli O157:H7 EDL933
  CDS (1)..(2145): transl_table=11
gtgtcccgtattattatgctgatccctaccggaaccagcgtcggtctgaccagcgtcagccttggcgtgatccgtgcaatggaacgcaaaggcgttcgtctgagcgttttcaaacctatcgctcagccgcgtaccggtggcgatgcgcccgatcagactacgactatcgtgcgtgcgaactcttccaccacgacggccgctgaaccgctgaaaatgagctacgttgaaggtctgctttccagcaatcagaaagatgtgctgatggaagagatcgtcgcaaactaccacgctaacaccaaagacgctgaagtcgttctggttgaaggtctggtcccgacacgtaagcaccaatttgcccagtctctgaactacgaaatcgctaaaacgctgaatgcggaaatcgtcttcgttatgtctcagggcactgacaccccggaacagctgaaagagcgtatcgaactgacccgcaacagcttcggcggtgccaaaaacaccaacatcaccggcgttatcgttaacaaactgaacgcaccggttgatgaacagggtcgtactcgcccggatctgtccgagattttcgacgactcttccaaagctaaagtaaacaatgttgatccggcgaagctgcaagaatccagcccgctgccggttctcggcgctgtgccgtggagctttgacctgatcgcgactcgtgcgatcgatatggctcgccacctgaatgcgaccatcatcaacgaaggcgacatcaatactcgccgcgttaaatccgtcactttctgcgcacgcagcattccgcacatgctggagcacttccgtgccggttctctgctggtgacttccgcagaccgtcctgacgtgctggttgccgcttgcctggctgccatgaacggcgtagaaatcggtgccctgctgctgactggcggctacgaaatggacgcgcgcatttctaaactgtgcgaacgtgctttcgctaccggcctgccggtatttatggtgaacaccaacacctggcagacttctctgagcctgcagagcttcaacctggaagttccagttgacgatcacgagcgtatcgagaaagttcaggaatacgttgctaactacatcaacgctgactggatcgattctctgactgccacttctgagcgcagccgtcgtctgtctccgccagcgttccgttatcagctgactgaacttgcgcgcaaagcgggcaaacgtatcgtactgccggaaggtgacgaaccgcgtaccgttaaagcagccgctatctgtgctgaacgtggtatcgcaacttgcgtactgctgggtaatccggcagagatcaaccgtgttgcagcgtctcagggtgtagaactgggtgcaggcattgaaatcgttgatccagaagtggttcgcgaaagctatgttggtcgtctggtcgagctgcgtaagaacaaaggcatgaccgaaaccgttgcccgcgaacagctggaagacaacgtggtgctcggtacgctgatgctggaacaggatgaagttgatggtctggtttccggtgctgttcacactaccgcaaacaccatccgtccgccgctgcagctgatcaaaactgcaccgggcagctccctggtatcttccgtgttcttcatgctgctgccggaacaggtttacgtttacggtgactgtgcgatcaacccggatccgaccgcagaacagctggcagaaatcgcgattcagtccgctgattccgctgcagccttcggtatcgaaccgcgcgttgctatgctctcctactctaccggtacttctggtgcaggtagcgacgtagaaaaagttcgcgaagcaactcgtctggcgcaggaaaaacgtcctgacctgatgatcgacggtccgctgcagtacgacgctgcggtaatggctgacgttgcgaaatccaaagcgccgaactctccggttgcaggtcgcgctaccgtgttcatcttcccggatctgaacaccggtaacaccacctacaaagcggtacagcgttctgccgacctgatctccatcgggccgatgctgcagggtatgcgcaagccggttaacgacctgtcccgtggcgcactggttgacgatatcgtctacaccatcgcgctgactgcgattcagtctgcacagcagcagtaa

SEQ ID NO: 147845 - protein, 714 aa, Escherichia coli O157:H7 EDL933
MSRIIMLIPTGTSVGLTSVSLGVIRAMERKGVRLSVFKPIAQPRTGGDAPDQTTTIVRANSSTTTAAEPLKMSYVEGLLSSNQKDVLMEEIVANYHANTKDAEVVLVEGLVPTRKHQFAQSLNYEIAKTLNAEIVFVMSQGTDTPEQLKERIELTRNSFGGAKNTNITGVIVNKLNAPVDEQGRTRPDLSEIFDDSSKAKVNNVDPAKLQESSPLPVLGAVPWSFDLIATRAIDMARHLNATIINEGDINTRRVKSVTFCARSIPHMLEHFRAGSLLVTSADRPDVLVAACLAAMNGVEIGALLLTGGYEMDARISKLCERAFATGLPVFMVNTNTWQTSLSLQSFNLEVPVDDHERIEKVQEYVANYINADWIDSLTATSERSRRLSPPAFRYQLTELARKAGKRIVLPEGDEPRTVKAAAICAERGIATCVLLGNPAEINRVAASQGVELGAGIEIVDPEVVRESYVGRLVELRKNKGMTETVAREQLEDNVVLGTLMLEQDEVDGLVSGAVHTTANTIRPPLQLIKTAPGSSLVSSVFFMLLPEQVYVYGDCAINPDPTAEQLAEIAIQSADSAAAFGIEPRVAMLSYSTGTSGAGSDVEKVREATRLAQEKRPDLMIDGPLQYDAAVMADVAKSKAPNSPVAGRATVFIFPDLNTGNTTYKAVQRSADLISIGPMLQGMRKPVNDLSRGALVDDIVYTIALTAIQSAQQQ

SEQ ID NO: 147846 - DNA, 2169 bp, Deinococcus radiodurans R1
  CDS (1)..(2169): transl_table=11
ttggcaggccccatcccctttttcctgcccctgtctccccccgttcccaaggagtcccgcatgaaaaccctgtttctcgcacccacccgcaacggtgtggggctgtcgagcacggcgctcggcctcgcccgcgccctggagcgccagagcctgaaagtcgcctttctcaagccgattgcccagacgtatgaaccgcgcaccgacgacagcgtgcactttgcccgcgcggtggcgcacctgaccacgcccgacccgattccactgacccgcgccgaggagctgctcagtcagggtggcgaggaagacctgatggagcaggtgattgccctggcgcgcgaggcggcgggcgagggcagcgacgtgctgattgccgaggggctggcactcaacgagcgcaacgtgtacgcgggcaccctcaacgcccggctcgcccgcaacctggaggccgacaccgtgctggtgagcagcctcgccggggtcacgcccgccgaactcgccgatgaactggaaatcgccgcacagggctaccgccgcagcgacggctcggggctggcgggtttcgtgctcaacttcgcgccgcgtgagctggatttcggctcgctgatggccgagttgcgctcgcgcagccgggtgctggcttcgggcgaactgccgctgctcggcgtggtgtcgctcgacccggcgctgcgacaactgcgcacgctcgacgtggcccgcgctctggacgccgaaatcatcaacgcgggcgaggccgaaagccggcgcgtgagcagcacggtggtcactgcccgcagtgtgccgcagatgaccaacctctttacctccggggcgctcatcgtgacccccgccgaccgcgaggacgtgattatggcggcggcgctctcgcatctcagcggcacaccgctcgccgggctgatgtacacctccggcagcgcgcccgaggccaccattcagcaactctgcgaggtggcgctgacgagcagcctgccggtgttgcgggtgcccaccaactccttcgagacggcctcgcgcctcgtgcacctcgatttccgtgtgccgcacgatgacccgcgccgcatggaccggatgctcgactacatcgccgaccgcctcgacaccgtgccgctcggtgcccgactgcgcgctcccggtgtggcaggcgagcgccggctgcccccaagcgcctttcgctacgaactcattcagcgcgcgcgggcggcgaataaacgcatcgtgctgcccgagggcgacgagccgcgcaccgtcaaggccgccatccgctgcaccgaaaaagggattgcccgctgcgtgctgctcgccccacccgagaaagtgcggcaggtggcgcaggggcagggcctcgaactgcccgagggcctggaaatcatcgaccccgaaacggtgcgcggcaagtacgtcgccccgatggtggaactccgcaagagcaaggggctgactgagccgcaggccgaggcgcaactcgaagacagcgtggtgctcggcaccatgatgctggcgctcggcgaggtggacggactggtgtccggcgcggtgcacaccaccgccagcacggtgcgcccggcgctgcaactcatcaagacggcgcccggcagctcactggtcagctcggtgtttttcatgctgatgcccgagcaggtgctcgtctacggcgacgcggccatcaaccccgaccccaacgcgcaggaactcgccgacatcgccattcagtcggcagacagcgcccacgccttcgggattccggtgcgggtggcgatgctcagttattccactggcgaatcgggcagcggcgaggacgtggaaaaggtcaaggaagccaccaaactggtccgcgagcgccgtcccgagttgctggtggacggcccgctgcaatacgacgccgccagcgtgccgagcgtgggccgctccaaagcccccgacagcccggtggcggggcgcgccacggtcttcatcttccccgacctcaacaccggcaacaccacctacaaggccgtgcagcgcagcgcgggcgtggtcgccgtggggccgatgcttcagggcctgcgcaagccggtcaacgacctctcgcgcggggcgctggtggacgacatcgtgtacaccatcgccctcacggctattcaggcgacccagagcgcggcggattgcggttga

SEQ ID NO: 147847 - protein, 722 aa, Deinococcus radiodurans R1
MAGPIPFFLPLSPPVPKESRMKTLFLAPTRNGVGLSSTALGLARALERQSLKVAFLKPIAQTYEPRTDDSVHFARAVAHLTTPDPIPLTRAEELLSQGGEEDLMEQVIALAREAAGEGSDVLIAEGLALNERNVYAGTLNARLARNLEADTVLVSSLAGVTPAELADELEIAAQGYRRSDGSGLAGFVLNFAPRELDFGSLMAELRSRSRVLASGELPLLGVVSLDPALRQLRTLDVARALDAEIINAGEAESRRVSSTVVTARSVPQMTNLFTSGALIVTPADREDVIMAAALSHLSGTPLAGLMYTSGSAPEATIQQLCEVALTSSLPVLRVPTNSFETASRLVHLDFRVPHDDPRRMDRMLDYIADRLDTVPLGARLRAPGVAGERRLPPSAFRYELIQRARAANKRIVLPEGDEPRTVKAAIRCTEKGIARCVLLAPPEKVRQVAQGQGLELPEGLEIIDPETVRGKYVAPMVELRKSKGLTEPQAEAQLEDSVVLGTMMLALGEVDGLVSGAVHTTASTVRPALQLIKTAPGSSLVSSVFFMLMPEQVLVYGDAAINPDPNAQELADIAIQSADSAHAFGIPVRVAMLSYSTGESGSGEDVEKVKEATKLVRERRPELLVDGPLQYDAASVPSVGRSKAPDSPVAGRATVFIFPDLNTGNTTYKAVQRSAGVVAVGPMLQGLRKPVNDLSRGALVDDIVYTIALTAIQATQSAADCG

SEQ ID NO: 147848 - DNA, 2154 bp, Yersinia pestis KIM
  CDS (1)..(2154): transl_table=11
gtgtcccgtacaataatgttgatcccaacaggcaccagcgttggtttaaccagcgtcagcttaggtgtcatccgttccatggagcaaaaaggggtaagcttgagcgtattcaagcctatcgcccagccacgtgcgggtaatgatgctcctgaccaaaccacgaccatcatccgggcgaactccagcatcactgctgctgagccgctgaacatgaactacgtggaaaccttgctgagttctaaccagcaagatgtcttgatggaagaaattgttgcccgttatcacgaaaataccaaagacgcagaagtggttctggttgaaggtctggtgcctacacgcaaacatcagtttgccaatgcactgaactatgaaatcgctaaaacgctgaacgctgaaatcgtctttgttattgcccttggtaatgactcgccagatcagttgaaagagcgtatcgaactggcccgctccagttttggtggcagcaagaacaaaaacatcactggcgttatcatcaataaactgaatgccccggttgatgaacaaggccgtacccgccctgacctgtctgaaatctttgatgactccaccaaggccagtgttgcgaacatcgatccaagccagctattcgctaacagcccgatccctgttctgggttgtgtaccgtggagcttcgagctgatcgccacccgtgccattgatatggccaagcacctgaatgcccgcattattaacgaaggcgatattaaaacgcgtcgagttaaatccgtgacattctgtgcgcgcagcatcccgcatatgctagagcacttccgtccgggttctctgctagtgacctcagcagaccgccctgatgtgttggtgtctgcctgtttggcggcgatgaacggtgtggaaatcggtgccatcctgctgacgggaggttatgccattgatgatcgtatcaataatttgtgtgaacgtgccttccaaactggcttgccagtatttatggttgataccaacacctggcagacctctctgagcctgcaaagctttaatctggaagtcccagcagatgaccatgagcgtgttgagaagttgcaaaactacgttgccagccatatcagcagcgagtggatcgactccctgaccgccgcctctgagcgcccacgtcgcttgtctccaccggccttccgttatgagctgactgagttggcccgtaaagctggcaaacgtatcgtactgccagaaggcgatgagccgcgcaccattaaagccgcgtctatctgtgctgaacgtggtatcgccacttgtgtcctgttgggtaacccggaagagatccaacgcgttgccacatctcaaggtgttgagttgggtaaaggcgttgaaattatcgaccctgttgcggtacgtgagcaatatgttccacgcttggttgagctgcgtaagagcaaaggcatgaccgaagtggttgcccgtgaacagttggaagacaacgtggttcttggcaccctgatgctggagaaaggggaagttgacggtctggtttctggtgcagtacataccaccgcgaacaccatccgcccaccactacagttaatcaaaactgcaccgggcagttcgctggtctcctctgtgttcttcatgctgctgcctgaccaggttctggtgtacggcgactgcgcgatcaacccagatccaacggcggagcaactgtctgagattgctatccaatcggctgattctgcggcagcctttggtatcgaacctcgtgtggcgatgatctcgtactccaccggtaactccggtgccggtagcgatgtcgaaaaagtgcgtgaagcgactcgtctcgcccaagaaaaacgcccagatctgatcatcgatggcccgttacagtatgatgcggcaatcatggcggatgtggctaaatctaaagcgcctaactcaccggtagcaggtagagcgaccgtgttcatcttcccagacctgaacaccggtaacaccacctataaagccgtgcaacgttctgccgacctgatctctatcgggccgatgttgcaagggatgcgcaagccggtgaatgatttgtcccgtggtgcgctggtagacgatattgtctataccgtggcgctgacggcgatccaatcagctcaggctgattcagccgcgtcttaa

SEQ ID NO: 147849 - protein, 717 aa, Yersinia pestis KIM
MSRTIMLIPTGTSVGLTSVSLGVIRSMEQKGVSLSVFKPIAQPRAGNDAPDQTTTIIRANSSITAAEPLNMNYVETLLSSNQQDVLMEEIVARYHENTKDAEVVLVEGLVPTRKHQFANALNYEIAKTLNAEIVFVIALGNDSPDQLKERIELARSSFGGSKNKNITGVIINKLNAPVDEQGRTRPDLSEIFDDSTKASVANIDPSQLFANSPIPVLGCVPWSFELIATRAIDMAKHLNARIINEGDIKTRRVKSVTFCARSIPHMLEHFRPGSLLVTSADRPDVLVSACLAAMNGVEIGAILLTGGYAIDDRINNLCERAFQTGLPVFMVDTNTWQTSLSLQSFNLEVPADDHERVEKLQNYVASHISSEWIDSLTAASERPRRLSPPAFRYELTELARKAGKRIVLPEGDEPRTIKAASICAERGIATCVLLGNPEEIQRVATSQGVELGKGVEIIDPVAVREQYVPRLVELRKSKGMTEVVAREQLEDNVVLGTLMLEKGEVDGLVSGAVHTTANTIRPPLQLIKTAPGSSLVSSVFFMLLPDQVLVYGDCAINPDPTAEQLSEIAIQSADSAAAFGIEPRVAMISYSTGNSGAGSDVEKVREATRLAQEKRPDLIIDGPLQYDAAIMADVAKSKAPNSPVAGRATVFIFPDLNTGNTTYKAVQRSADLISIGPMLQGMRKPVNDLSRGALVDDIVYTVALTAIQSAQADSAAS

SEQ ID NO: 147850 - DNA, 2094 bp, Streptomyces coelicolor A3(2)
  CDS (1)..(2094): transl_table=11
gtgacgcgcagcgtgtacgtgaccggcatcgaccgcggcgacggccgccaggtcgtcgagctgggggtcatggaactgctgacccggcaggtcgaccgggtcggcgtcttccgtcccctggtgcacgacgggccggaccggctcttcgaactgctgcgcgcccgctaccggctctcgcaggaccccgcgacggtctacggcatggactaccaggaggcctccctcctccaggcggaacagggcgtggacgagctggtgtccgcgctggtcgaccgcttccacctggtcgcgcgggactacgacgtcgtcctggtcctgggcaccgactacgccgacacccagttcccggacgagctgtccctgaacgcgcggctcgccaacgagttcggcgcctcggtcctccccgtcgtcgggggccgcaagcagaccgccgactcggtgctggccgagacccacaacgccttccgtgcctacgacggcctcggctgcgacgtgctcgccatggtgaccaaccgggtcgcgcgcgaggaccgggacgagatcgccgagcggctcgcgcaccggctgccggtgccgtgctgggtggtaccggacgagcccgccctgtcggcgccgacggtctcccagatcgcgcacgccctgggcgccgagatcgtcctcggcgacgactccgggctcgcccgcgacgcgctggacttcgtcttcggcggggccatgctgcccaacctgctggccgcgctgaccccgggctgcctggtcatcacgcccggcgaccgcgccgacctggtgatcggcacgctggccgcgcacagcgccggcaccccgccgatagccggggtgctgctgacgctgaacgaggtgcccggcgagggcatcctcaccctcgccgcccggctggcccccggcacgccggtgctctcggtgacgggcaccagctttcccaccgcggaacggctcttctccctggagggcaagctgggcgcggccaccccgcgcaaggcggagaccgccctcggcctcttcgagcggtacgtcgacaccgccgagctgaacaagcgggtctccgcgcccagcagcgaccgcgtcacgccgatgatgttcgagcacaagctgctcgaacaggcccgctccgacctgcgccgggtcgtcctgccggagggcaccgaggagcgggtgctgcacgcggcggaggtgctgctgcggcgcggggtgtgcgagctgacccttctcggccccgtcgagcagatccgcaagaaggccgccgacctcggcatcgacctcggcggcgccgagctgatcgacccggccgccagcgagctgcgcgactccttcgccgagaagtacgccgccctgcgcgcccacaagggcgtgaccgtggagctggcgtacgacgtggtctcggacgtgaactacttcggcacgctgatggtgcaggaggggttcgccgacggcatggtgtcggggtcggtgcactcgacggcggcgaccatccggcccgccttcgagatcatcaagaccaagccggacgcggccatcgtctcctccgtcttcttcatgtgcctggccgacaaggtgctggtctacggcgactgcgcggtcaacccggacccggacgcggagcagctcgccgacatcgcgacgcagtccgcctcgaccgccgcgcagttcggggtggagccgcggatcgcgatgctgtcgtactcgaccggcacgtccggttccggcgcggacgtcgacaaggtccgcgaggccaccgagctggtccgctcgcgccgcccggacctcagcgtcgaggggccgatccagtacgacgcggcggtcgagccgtcggtcgccgcgaccaagctgcccggctccgcggtcgccgggcaggccagcgtgctgatcttccccgacctgaacaccggcaacaacacctacaaggcggtgcagcgctcggccggcgccatcgcggtcggcccggtgctccagggcctgcgcaagccggtcaacgacctgtcccggggcgcgctcgtgcaggacatcgtcaacaccgtcgccatcacggcgatccaggcccagcagtccccgaccgagaaggcgtccgcccagtga

SEQ ID NO: 147851 - protein, 697 aa, Streptomyces coelicolor A3(2)
MTRSVYVTGIDRGDGRQVVELGVMELLTRQVDRVGVFRPLVHDGPDRLFELLRARYRLSQDPATVYGMDYQEASLLQAEQGVDELVSALVDRFHLVARDYDVVLVLGTDYADTQFPDELSLNARLANEFGASVLPVVGGRKQTADSVLAETHNAFRAYDGLGCDVLAMVTNRVAREDRDEIAERLAHRLPVPCWVVPDEPALSAPTVSQIAHALGAEIVLGDDSGLARDALDFVFGGAMLPNLLAALTPGCLVITPGDRADLVIGTLAAHSAGTPPIAGVLLTLNEVPGEGILTLAARLAPGTPVLSVTGTSFPTAERLFSLEGKLGAATPRKAETALGLFERYVDTAELNKRVSAPSSDRVTPMMFEHKLLEQARSDLRRVVLPEGTEERVLHAAEVLLRRGVCELTLLGPVEQIRKKAADLGIDLGGAELIDPAASELRDSFAEKYAALRAHKGVTVELAYDVVSDVNYFGTLMVQEGFADGMVSGSVHSTAATIRPAFEIIKTKPDAAIVSSVFFMCLADKVLVYGDCAVNPDPDAEQLADIATQSASTAAQFGVEPRIAMLSYSTGTSGSGADVDKVREATELVRSRRPDLSVEGPIQYDAAVEPSVAATKLPGSAVAGQASVLIFPDLNTGNNTYKAVQRSAGAIAVGPVLQGLRKPVNDLSRGALVQDIVNTVAITAIQAQQSPTEKASAQ

SEQ ID NO: 147852 - DNA, 2088 bp, Pseudomonas putida KT2440
  CDS (1)..(2088): transl_table=11
atgcagacatttttcattgcgccgaccgactttggtgtcggcctgacttcgatcagcctgggcctggtgcgcaccttggagcgtgccggcctgaaggtcggcttcttcaagcctatcgcccagccccacccgggtgacaccggccccgagcgctccaccgaactggtcgcccgcactcacggcatcaagccaccggtcccactgagcctggcccacgtcgagcgcatgctcggcgatggccaactggacgagctgcttgaagaaatcatccgcctctaccagcaagcctgcgtcggcaatgacgtggttgtggtcgagggaatggtgcccacgcgccacgccagctacgcagcgcgggtcaacctgcacctggccaagagcctggatgccgaggtaatcctggtatcggccccggaaaacgaagtgctcagcgagctgtctggccgggtcgaactgcaggcccaactgtttggcggcccacgcgacccgaaagtgctgggggtgatcctcaacaaggtgcgtaccgacgagagcatggcggacttcgccacccgcctgcgcgagcactcgccattgctgcgcggtaatgacttccgcctgcttggctgcatcccctaccagcccgagctgaacgccccgcggacccgcgatgtggccgagctgctcggcgcccaggtgctcaatgccggcgattacgagcagcggcgcatgagcaagatcatcatctgtgcacgcacggtggccaacacggtcccgctactgacctcgggcaccctggtggtaaccccgggcgaccgcgacgacatcatcctcgctgtcagcctggcagcgatcaatggcgtccccctggccggcttgctgctgaccagcgacagcaagcctgacgtgcgtatccttggcctgtgccgcggtgccctgcaggccggcctgccgatcctttcggtcagcaccggctcgtacgacaccgccaaccagctcaactcgctgaaccgcgaaatcccggtggacgaccgcgagcgtgccgagttcattaccgacttcgtcgccagccacctcgacgcggcctggctgcaccagcgctgcggcacgccgcgcgaactgcgcctgtcaccggcagtgttccgctaccagctgatccaacgtgcgcagcaggccaacaagcgcatcgtcctgccagaaggcgccgagccactgttggtgcaggccgcagccatctgccaggcccgcggcatcgcccgctgtgtgctgctggccaaacccgaagatgttgacgccgtggcccgcgcccagggcatcacgttgccgccagggctggagattctcgaccccgaactgattcgcgggcgctacgtggaacccatggtcgagctgcgcaaaagcaagaacctcaacgcaccgatggccgagcagcagctggaagacccggtggtgatcggcaccatgatgctggccctggacgaagtggacggcctggtctcgggcctggtgcactccacggccaacaccatccgcccggccctgcagctgatcaagaccgcacccggctcgagcctggtctcgtcggtgttcttcatgctgttccccgagcaggtgctggtgtacggcgactgcgtgatgaacccgcacccaagcgctgccgagctggcggagattgcccaacagagtgccgcctcggcgcaggccttcggcatcgcgccacgggtggcgatgatcagctattcaagcgattcggccagcgatgaagaggtcgagaaagtgcgcgaagcgacacgcctggcacaggacgcggcgcaggagctactgatcgatgggccgttgcagtatgacgcagcggccaacccggcgatcgcccgagagctggcgccggctagcccggtggccgggcgcgccacggtgttcgtgttccccgacctgaataccggcaataccacgcacaaggcggtacagcgcagtgccgacggggtcagcctggggccgatgctgcagggtttgcgcaagccggtgaacgacttgccgcgaggggcgcaggttgacgatatcgtgcataccatagccctgacggcgattcaggccagcgtggcgcgctaa

SEQ ID NO: 147853 - protein, 695 aa, Pseudomonas putida KT2440
MQTFFIAPTDFGVGLTSISLGLVRTLERAGLKVGFFKPIAQPHPGDTGPERSTELVARTHGIKPPVPLSLAHVERMLGDGQLDELLEEIIRLYQQACVGNDVVVVEGMVPTRHASYAARVNLHLAKSLDAEVILVSAPENEVLSELSGRVELQAQLFGGPRDPKVLGVILNKVRTDESMADFATRLREHSPLLRGNDFRLLGCIPYQPELNAPRTRDVAELLGAQVLNAGDYEQRRMSKIIICARTVANTVPLLTSGTLVVTPGDRDDIILAVSLAAINGVPLAGLLLTSDSKPDVRILGLCRGALQAGLPILSVSTGSYDTANQLNSLNREIPVDDRERAEFITDFVASHLDAAWLHQRCGTPRELRLSPAVFRYQLIQRAQQANKRIVLPEGAEPLLVQAAAICQARGIARCVLLAKPEDVDAVARAQGITLPPGLEILDPELIRGRYVEPMVELRKSKNLNAPMAEQQLEDPVVIGTMMLALDEVDGLVSGLVHSTANTIRPALQLIKTAPGSSLVSSVFFMLFPEQVLVYGDCVMNPHPSAAELAEIAQQSAASAQAFGIAPRVAMISYSSDSASDEEVEKVREATRLAQDAAQELLIDGPLQYDAAANPAIARELAPASPVAGRATVFVFPDLNTGNTTHKAVQRSADGVSLGPMLQGLRKPVNDLPRGAQVDDIVHTIALTAIQASVAR

SEQ ID NO: 147854 - DNA, 2145 bp, Escherichia coli CFT073
  CDS (1)..(2145): transl_table=11
gtgtcccgtattattatgctgatccctaccggaaccagcgtcggtctgaccagcgtcagccttggcgtgatccgtgcaatggaacgcaaaggcgttcgtctgagcgttttcaaacctatcgctcagccgcgtaccggtggcgatgcgcccgatcagactacgactatcgtgcgtgcgaactcttccaccacgacggccgctgaaccgctgaaaatgagctacgttgaaggtctgctttccagcaatcagaaagatgtgctgatggaagagatcatcgcgaactaccacgctaacaccaaagacgctgaagtcgttctggtggaaggtctggtcccgacacgtaagcaccagtttgcccagtctctgaactacgaaatcgccaaaacgctgaacgcagaaatcgtcttcgttatgtctcagggcactgatactccggaacagttgaaagagcgtatcgaactgactcgcaacagcttcggcggtgcaaaaaacaccaatattaccggcgttatcgttaacaaactgaacgctccggttgatgagcagggtcgtacccgtccggatctgtccgagatttttgacgactccaccaaagcaaaagtgaacaacgttgatccggcgaagctgcaagaatccagcccgctgccggttctcggcgctgtgccgtggagctttgacctgatcgcgactcgtgcgatcgatatggctcgccacctgaatgcgaccatcatcaacgaaggcgacatcaatactcgccgcgttaaatccgtcactttctgcgcacgcagcattccgcacatgctggagcacttccgtgccggttctctgctggtgacttccgcagaccgccctgacgtgctggttgccgcttgcctggctgccatgaacggcgtagaaatcggtgccctgctgctgactggcggctacgaaatggacgcgcgcatttctaaactgtgcgaacgtgctttcgctactggcctgccggtatttatggtgaacaccaacacctggcagacttctcttagcctgcagagcttcaacctggaagttccggttgacgatcatgagcgtatcgaaaaagttcaggaatacgtggctaactacatcaacgctgactggatcgattctctgactgccacttctgagcgcagccgtcgtctgtctccgccagcgttccgttatcagctgactgaacttgcgcgcaaagcgggcaaacgtatcgttctgccggaaggtgacgaaccgcgtaccgttaaagcagccgctatctgtgctgaacgtggtatcgcaacttgcgtactgctgggtaatccggcagagatcaaccgtgttgcagcctctcagggtgtagaactgggtgcaggcattgaaatcgttgatccagaagtggttcgcgaaaactatgttggtcgtctggtcgaactgcgtaagaacaaaggcatgaccgaaaccgttgcccgcgaacagctggaagacaacgtggttctcggtacgctgatgctggaacaagatgaagttgatggtctggtttccggtgctgttcacaccaccgcaaacaccatccgtccgccgctgcagctgatcaaaactgcaccgggcagctccctggtatcttccgtgttcttcatgctgttgccggaacaggtttacgtttacggtgactgtgcgatcaacccggatccgaccgcagaacagctggcagaaatcgcgattcagtccgctgattccgctgcggccttcggtatcgaaccgcgcgttgctatgctctcctactccaccggtacttctggtgctggtagcgacgtagaaaaagttcgcgaagcaactcgtctggcgcaggaaaaacgtcctgatctgatgatcgacggtccgctgcagtacgacgctgcggtaatggctgacgttgcgaaatccaaagcaccgaactctccggttgcaggtcgcgctaccgtgttcatcttcccggatctgaacaccggtaacaccacctacaaagcggtacagcgttctgctgacctgatctctatcggaccgatgctgcagggtatgcgcaagccggttaacgacctgtcccgtggcgcactggttgatgatatcgtctacaccatcgcgctgactgcgattcagtctgcacagcagcagtaa

SEQ ID NO: 147855 - protein, 714 aa, Escherichia coli CFT073
MSRIIMLIPTGTSVGLTSVSLGVIRAMERKGVRLSVFKPIAQPRTGGDAPDQTTTIVRANSSTTTAAEPLKMSYVEGLLSSNQKDVLMEEIIANYHANTKDAEVVLVEGLVPTRKHQFAQSLNYEIAKTLNAEIVFVMSQGTDTPEQLKERIELTRNSFGGAKNTNITGVIVNKLNAPVDEQGRTRPDLSEIFDDSTKAKVNNVDPAKLQESSPLPVLGAVPWSFDLIATRAIDMARHLNATIINEGDINTRRVKSVTFCARSIPHMLEHFRAGSLLVTSADRPDVLVAACLAAMNGVEIGALLLTGGYEMDARISKLCERAFATGLPVFMVNTNTWQTSLSLQSFNLEVPVDDHERIEKVQEYVANYINADWIDSLTATSERSRRLSPPAFRYQLTELARKAGKRIVLPEGDEPRTVKAAAICAERGIATCVLLGNPAEINRVAASQGVELGAGIEIVDPEVVRENYVGRLVELRKNKGMTETVAREQLEDNVVLGTLMLEQDEVDGLVSGAVHTTANTIRPPLQLIKTAPGSSLVSSVFFMLLPEQVYVYGDCAINPDPTAEQLAEIAIQSADSAAAFGIEPRVAMLSYSTGTSGAGSDVEKVREATRLAQEKRPDLMIDGPLQYDAAVMADVAKSKAPNSPVAGRATVFIFPDLNTGNTTYKAVQRSADLISIGPMLQGMRKPVNDLSRGALVDDIVYTIALTAIQSAQQQ

SEQ ID NO: 147856 - DNA, 2130 bp, Vibrio vulnificus CMCP6
  CDS (1)..(2130): transl_table=11
atgcttatccctgcgagtgctggtgttggtcttactagcgtaagcatgggtgttcttcgcgctatggagcgcaaaggcgttaaagtttctttctacaagcctatcgcacaaccacgtagcggcggtgatcttcctgatcttactaccactatcgttggcgcaaacagcgatatgaagattggcgaacccctattgatgtctgttgctgagaacctaatcggtaacgacaacatggacgaactgctagaaacggttgtagaacgttacaaccaaattaataaagatgcagacgttacgctaatcgaaggtcttgttcctactcgtaagcacccatttgctaaccaagtgaacgcggaaatcgcagcaacacttggtgctgaaattgttcttgtggcgaccccaggcactgacaacccagcacagctaaaagagcgtatcgaagtggcttgttcaaacttcggtggcacgaaaaacaaaaacatctctggtgttatcatcaacaagctaaacgcgccagttgatgaagcaggccgtacgcgtcctgatctatcagagatcttcgatgacgcagacagcgcgaaacaaaaccagctagaagtgatgcaaatcttcaactctagcccaattcgcgttctaggttgtgtgccatggagcatcaacctgattgcaactcgcgcaatcgatatggcgaaacacctgaaagcagaagtgatcaacgaaggcgacatcaacactcgtcgtattaagagcatcaccttctgtgcacgttctctgccacacatgattgagcacttcaaaccaggctcactgcttgtgacttctgcagaccgtccagatgttatcgttgcggcctctctagcagcaatgaatggtgttgaaattggcgcagtacttctgactggcggttacgatattcctacagaaatcgaaaacctatgtaagccagcgtttgaaagtggccttccaattttcaaagcacaaggtaacacttggcagacttcgctcaatctacagagcttcagcctagaagtacctgcagacgataaagagcgtatcgagttcatcaatgaccacgttgcaggtcacatcgatggcaactggattgagtcaatgacagaaggtactgagcgttctcgtcgtctaagtcctccagcattccgttaccagttgactgagcttgctcgtaaagcgggtaaacgcatcgttcttcctgaaggtgacgagccacgtactgtgaaagcggcagcgatctgtgctgaacgcggtatcgcagaatgtgtgctgctaggtaaccctgaagagatcaagcgcgtggccgcacagcaaggtgttgaactaggtgctggcgttaagatcatcgatgcagacgcgattcgcgaaaactacgttgctcgtcttgttgagctacgtggctcgaaaggcatgacggaagttgtcgctcgtgagaagcttcaagattctgtgttcctaggcactatgatgcttgagaacgatgaagttgacggtctagtatctggtgcggttcacacgacggcaaacaccatcgttcctccgttccaaatcatcaagacagcaccaaatgcgtctatcgtatcttctgtattcttcatgcttctgcctgatcaagtactggtttacggtgactgtgcgatcaacccggatccaacggcagaacagcttgcagaaatcgcgattcaatctgcggattctgctgcagcctttggtatcgacccacgcgtagcaatgatctcttactctactggtgagtctggtaagggtgcagacgttgataaagtacgtgaagcgaccaaactggctcaagagaaacgtcctgatctgatcatcgacggtcctctgcagtacgacgcagcgatcatggaaaacgtggcagcgtctaaagcgcctaactctccagtagcaggtaaagcgaccgtattcgtattcccagacctcaacacgggtaacacgacttacaaagcggtacaacgttcagccgaccttgtttctatcggtccaatgctgcaaggtatgcgcaagccggtaaacgacctgtctcgtggcgcgctagtcgacgatatcgtctacaccatcgctctaactgcaatccaagcgactcaagatcagaaataa

SEQ ID NO: 147857 - protein, 709 aa, Vibrio vulnificus CMCP6
MLIPASAGVGLTSVSMGVLRAMERKGVKVSFYKPIAQPRSGGDLPDLTTTIVGANSDMKIGEPLLMSVAENLIGNDNMDELLETVVERYNQINKDADVTLIEGLVPTRKHPFANQVNAEIAATLGAEIVLVATPGTDNPAQLKERIEVACSNFGGTKNKNISGVIINKLNAPVDEAGRTRPDLSEIFDDADSAKQNQLEVMQIFNSSPIRVLGCVPWSINLIATRAIDMAKHLKAEVINEGDINTRRIKSITFCARSLPHMIEHFKPGSLLVTSADRPDVIVAASLAAMNGVEIGAVLLTGGYDIPTEIENLCKPAFESGLPIFKAQGNTWQTSLNLQSFSLEVPADDKERIEFINDHVAGHIDGNWIESMTEGTERSRRLSPPAFRYQLTELARKAGKRIVLPEGDEPRTVKAAAICAERGIAECVLLGNPEEIKRVAAQQGVELGAGVKIIDADAIRENYVARLVELRGSKGMTEVVAREKLQDSVFLGTMMLENDEVDGLVSGAVHTTANTIVPPFQIIKTAPNASIVSSVFFMLLPDQVLVYGDCAINPDPTAEQLAEIAIQSADSAAAFGIDPRVAMISYSTGESGKGADVDKVREATKLAQEKRPDLIIDGPLQYDAAIMENVAASKAPNSPVAGKATVFVFPDLNTGNTTYKAVQRSADLVSIGPMLQGMRKPVNDLSRGALVDDIVYTIALTAIQATQDQK

SEQ ID NO: 147858 - DNA, 2091 bp, Pseudomonas syringae pv. tomato str. DC3000
  CDS (1)..(2091): transl_table=11
atgcagacgtttttcattgcccccacggattttggtgtggggttgacctccattagcctgggcctggtgcgcacgcttgagcgtgcgggcttgaaggtaggtttcttcaaaccgatagcgcaaccgcaccccggcgatctcggccctgaacgctcgaccgagctgatggcccgtactcacggcctgaaaccgcccaaaccgctgggtctggcgcacgtcgaacgcatgctgggcgatggccagctggacgaactgctcgaagaaatcatcaatctttatcagcaggcagccgtcggcaaggatgtgctggtggtcgaaggcatggtcccgacccgcagcgcgagctatgccgcacgggtcaacctgcacctggccaagagcctggacgccgaagtgatactggtttccgcgccggaaaacgaagtgctgaccgaactgtcgggaagggtcgagttacaggcgcagctgtttggcggccccaaggacccaaaagtattgggcgtcatcctcaataaagtgcgcaccgaagagagcatggaagtctttgctgcgcgccttaaagaacattcgccgctgctgcgcaacggcgatttccggctgttgggctgcattccctatcgcgccgaactcaatgcgccgcgtacccgtgatgtggccgagttgctgggcgctcaggtgctgaatgcgggcgactacgatcaacggcgcatgtcaagaatcatcatctgtgcgcgcacggtgctcaataccgtgccgctgctcaagcccggcgtattggtcgtaaccccgggcgaccgcgacgacatcatcctcgccgtgagcctggcagcgatcaatggagtaccgctggcaggcctgctgttgaccagcgataccgtgcccgacccgcgcatcatggaactgtgccggggcgcgcttcaggccggcctgccggtgctgtcggtgagcactggctcctatgacacggccaaccgcctcaatcagttgaacaaggaaatccccatcgatgaccgcgagcgcgcggaaatcatcaccgatttcgtcgccagtcatctggacgccagctggctgcaccagcgctgcggcaccccacgagagctgcgcctgtcacctgcggtgttccgctatcagttgattcagcgcgcccaggcggccaataaacgcatcgtgctacccgaaggcaacgaaccgctgaccattcaggccgcggcgatctgtcaggcgcgcggtatcgctcgctgtgtgttactggccaggcccgaagaggtgcaggcggttgcgcaggcacatggcatcgagctgccaccggggctggagattctcgacccggacctgattcgcgagcgctatgtcgcgccgatggtcgaactgcgcaagagcaaaagcctgaacgcgccgatggccgagcaacagcttgaagaccccgtagtgatcggcacggtgatgctggcactcgatgaggtagacgggctggtgtccggcgtggttcattccacggccaacaccatccgcccggccctgcaactgatcaagaccgcgccgggctgcacgctggtgtcgtcggtgtttttcatgctgtttcccgagcaggtgctgatgtatagcgactgcatcatgaatcctcacccaagcgccagcgaactgtccgagatcgccctgcaaagcgccgattcggccactgcgttcggcatctcgccccgcgtggcgatgattagttattccagcggcaattcggccagcggtgaagaagtcgagaaagttcgcgaggcaacgcaactggcacgcgaaacccgccgcgatctattgatcgacggaccgctgcagtatgatgccgccgccaacgaacacgtcgcccggcaactggccccggacagtcaggtggcaggacgcgccaatgtgttcgtgtttccagacctcaacactggcaacaccacgtacaaggcggtgcaacgcagcgccgactgtgtaagcttgggcccgatgctgcaaggcctgcgcaaaccggtgaacgacctgccacgtggcgcgcaggtcgatgacatcgtctacaccatcgcactgacggcgatacaggccgacacactttcctga

SEQ ID NO: 147859 - protein, 696 aa, Pseudomonas syringae pv. tomato str. DC3000
MQTFFIAPTDFGVGLTSISLGLVRTLERAGLKVGFFKPIAQPHPGDLGPERSTELMARTHGLKPPKPLGLAHVERMLGDGQLDELLEEIINLYQQAAVGKDVLVVEGMVPTRSASYAARVNLHLAKSLDAEVILVSAPENEVLTELSGRVELQAQLFGGPKDPKVLGVILNKVRTEESMEVFAARLKEHSPLLRNGDFRLLGCIPYRAELNAPRTRDVAELLGAQVLNAGDYDQRRMSRIIICARTVLNTVPLLKPGVLVVTPGDRDDIILAVSLAAINGVPLAGLLLTSDTVPDPRIMELCRGALQAGLPVLSVSTGSYDTANRLNQLNKEIPIDDRERAEIITDFVASHLDASWLHQRCGTPRELRLSPAVFRYQLIQRAQAANKRIVLPEGNEPLTIQAAAICQARGIARCVLLARPEEVQAVAQAHGIELPPGLEILDPDLIRERYVAPMVELRKSKSLNAPMAEQQLEDPVVIGTVMLALDEVDGLVSGVVHSTANTIRPALQLIKTAPGCTLVSSVFFMLFPEQVLMYSDCIMNPHPSASELSEIALQSADSATAFGISPRVAMISYSSGNSASGEEVEKVREATQLARETRRDLLIDGPLQYDAAANEHVARQLAPDSQVAGRANVFVFPDLNTGNTTYKAVQRSADCVSLGPMLQGLRKPVNDLPRGAQVDDIVYTIALTAIQADTLS

SEQ ID NO: 147860 - DNA, 2145 bp, Vibrio parahaemolyticus RIMD 2210633
  CDS (1)..(2145): transl_table=11
atgtctcgtactattatgcttatccctgcaagtgctggtgttggtctaactagcgtaagcatgggtgttcttcgcgcaatggagcgcaaaggcgttaaggtttctttctacaaaccaatttctcaaccacgttctggtggtgatcaacctgatctgacttctactatcgttggccacaacagcgatatgaagatcggtgaacctatggcgatgtctgttgctgagagcctaatcggtaacgacaacatggacgagctactagaaactgttgttgagcgttacaaccaaatcaataaagatgcggatgtaacacttatcgaaggtctagtaccaactcgtaagcacccattcgctaaccaagtgaacgctgaaatcgcagcaacacttggcgcagaaattgttctagtggctactccaggcactgataacccagctcaacttaaagagcgcatcgaagtagcatgttctaacttcggcggtactaagaacaaaaacatctctggcgttatcatcaacaagctaaacgcacctgttgacgaagctggccgtactcgccctgacctatctgaaatctttgacgatgcagacagcgcgaagcaaaacgaaatgaaagtgatggaaatcttcaacacttctccaattcgtgttctaggttgcgtgccatggagcatcgatcttattgctactcgtgcaatcgacatggcgaagcacctgaaagcagatatcatcaacgaaggtgacatcaacactcgtcgcatcaagagcatcacgttctgtgcacgttctctgccaaacatgattgagcacttcaaaccaggttctctacttgttacttctgcagaccgtccagacgtaatcgttgcagcttctctagcggcaatgaacggcgttgatatcggtgctgtactgctaactggcggttacgacatcccacgtgagatcgaaggtctatgtaagccagcattcgaaactggtctacctatcttcaaagcacaaggtaacacttggcagacttctctaaacctacagagcttcagcattgaagtacctgcagacgacaaagagcgtatcgagttcattaacgagcacgttgctggtcacatcgacggtaactggatcgagtcaatgacggaaggtactcaaaaatctcgtcgtctaagcccaccagcattccgttaccagctaactgaacttgctcgtaaagcaggtaagcgcatcgttcttcctgaaggtgatgagccacgtacagtgaaagcagcggctatctgtgcagagcgcggcattgcagaatgtgtgcttctaggtaacccagcagaaatcaaacgcgttgcagcgcagcaaggtgttgagctaggtgctggcgttcaaatcatcgacgctgatgctattcgcgaaaactacgttgctcgtctggttgagctacgtggcgcgaaaggtatgactgaagttgtagctcgtgagaaactacaagattcagtattccttggcacaatgatgcttgagaacaacgaagttgacggcctagtttctggtgctgttcacactacggcgaacactatcgttcctccgttccaaatcatcaagactgcaccaaacgcctctatcgtatcttcagtattcttcatgcttctgcctgatcaagtactggtatacggtgactgtgcaatcaacccagatccaacagctgaacaacttgctgaaatcgctatccaatctgctgactctgcagcagcattcggtatcgaaccgcgcgttgcaatgatctcttactctactggtgaatctggtaaaggtgcagacgttgataaagtacgtgaagcaacaaaactggctcaagagaaacgtcctgatcttatcatcgacggtcctctacagtacgacgctgcgatcatggaaaacgttgctgcttctaaagcaccaaactctccagttgcaggtaaagcgacagtattcgtattcccagacctaaacactggtaacacgacttacaaagcggtacaacgttcagcagacctagtatctatcggtccaatgctgcaaggtatgcgcaagccagtaaacgacttgtctcgtggcgcgctagtagacgatatcgtgtacaccatcgctctaacggcaatccaagcaactcaagaacagaagtaa

SEQ ID NO: 147861 - protein, 714 aa, Vibrio parahaemolyticus RIMD 2210633
MSRTIMLIPASAGVGLTSVSMGVLRAMERKGVKVSFYKPISQPRSGGDQPDLTSTIVGHNSDMKIGEPMAMSVAESLIGNDNMDELLETVVERYNQINKDADVTLIEGLVPTRKHPFANQVNAEIAATLGAEIVLVATPGTDNPAQLKERIEVACSNFGGTKNKNISGVIINKLNAPVDEAGRTRPDLSEIFDDADSAKQNEMKVMEIFNTSPIRVLGCVPWSIDLIATRAIDMAKHLKADIINEGDINTRRIKSITFCARSLPNMIEHFKPGSLLVTSADRPDVIVAASLAAMNGVDIGAVLLTGGYDIPREIEGLCKPAFETGLPIFKAQGNTWQTSLNLQSFSIEVPADDKERIEFINEHVAGHIDGNWIESMTEGTQKSRRLSPPAFRYQLTELARKAGKRIVLPEGDEPRTVKAAAICAERGIAECVLLGNPAEIKRVAAQQGVELGAGVQIIDADAIRENYVARLVELRGAKGMTEVVAREKLQDSVFLGTMMLENNEVDGLVSGAVHTTANTIVPPFQIIKTAPNASIVSSVFFMLLPDQVLVYGDCAINPDPTAEQLAEIAIQSADSAAAFGIEPRVAMISYSTGESGKGADVDKVREATKLAQEKRPDLIIDGPLQYDAAIMENVAASKAPNSPVAGKATVFVFPDLNTGNTTYKAVQRSADLVSIGPMLQGMRKPVNDLSRGALVDDIVYTIALTAIQATQEQK

SEQ ID NO: 147862 - DNA, 2091 bp, Streptomyces avermitilis MA-4680
  CDS (1)..(2091): transl_table=11
gtgacgcgcagcgtgtacgtgaccggaatcgaccgcggcgacggccgccaggtcgtcgagctgggggtcatggagcttctgacccgccaggtcgaccgggtgggggtgttccgcccgcttgtgcacgacggtcccgaccgcctcttcgagctgctgcgcgcccgctaccggctcgcccaggacccggcgaccgtgtacggcatggactatcacgaggcgtccgcgctccaggccgagcaggggaccgacgagctgatgtccacgctggtcgaccggtttcatctggtcgcgcgcgactacgacgtcgtcctcgtcctcggcacggacttcgccgacacccagttccccgacgagctggccctcaacgcccgcctcgcgaacgagttcggcgcggccgtgatccccgtggtcggcgggcgcgggcagaccgccgagtcggtgcgcgccgagacccgtaacgcctaccgcgcgtacgaggggctcggctgcgacgtcctcgccatggtggtgaaccgggtggcccgagaggaccgcgaggaactggccgcacggctcgattcccttctcgccgtgccctgttacgtactcccggacgagccggcgctctccgcgccgacggtcgcgcagatcacgcacgccctgggcggcaaggtgctcctcggcgacgactcggggctcgcccgggacgccctcgacttcgtgttcggcggtgcgatgctgccgaacttcctcaacgcgctgaccccggggtgtctggtggtcaccccgggcgaccgcgccgacctggtggtgggcgcgctcgccgcgcacagcgcgggcaccccgccgatagccggtgtgctgctcaccctcgacgagcggcccagcgacgaggtcctcaccctggccgcccggctcgcgcccggcaccccggtggtctcggtggccggcaccagcttccccaccgcggccgaactgttctccctggaggggaagctgaacgcggcgacgccccgcaaggcggagaccgcactcggcctgttcgagcggtacgtcgacaccggcgacctgctgaagcgggtgtccgccccgagcagtgaccggctcacgccgatgatgttcgagcacaagctcctggagcaggcccgctccgacaagcggcgcgtcgtgctgcccgagggcaccgagacgcgcgtcctgcacgccgccgaggtgctgctgcgccggggcgtgtgcgatctgacgctgctcggcccggtcgaccagatccgcaagaaggccgccgacctgggcatcgatctgggcggctcccagctgatcgacccggtgacctcacagctgcgggactccttcgccgagaagtacgcccagctccgggcccacaagggggtctcggtggagctggcctacgacgtcgtcgccgacgtcaactacttcgggacgctgatggtgcaggaggggctcgccgacggcatggtgtcgggctccgtgcactccacggccgccaccatccggcccgcgttcgagatcatcaagaccaagccggacacgaagatcgtgtcgtccgtcttcttcatgtgcctcgccgacaaggtgctggtgtacggcgactgcgcggtcaaccccgacccgaacgccgagcagctgtgcgacatcgccgtccagtcggccgccaccgcccggcagttcggggtggagccgcggatcgcgatgctgtcgtactcgacgggtacgtccggttcgggcgccgacgtcgacaaggtgcgcgaggcgacggaactggtccggctgcgccgcgacgacctgaagatcgagggaccgatccagtacgacgccgccgtcgagccgtccgtcgcggcgaccaagctgccgggctcggacgtcgccgggcaggcgtccgtgctgatcttcccggacctcaacaccggcaacaacacctacaaggccgtgcagcgctcggccggcgcgatcgccgtcggcccggtcatgcagggtctgcgcaagcccgtcaacgacctgtcccgcggcgccctcgtgcaggacatcgtgaacaccgtcgccatcaccgcgatccaggcccagtccccccacgagaaggcgaccgcccagtga

SEQ ID NO: 147863 - protein, 696 aa, Streptomyces avermitilis MA-4680
MTRSVYVTGIDRGDGRQVVELGVMELLTRQVDRVGVFRPLVHDGPDRLFELLRARYRLAQDPATVYGMDYHEASALQAEQGTDELMSTLVDRFHLVARDYDVVLVLGTDFADTQFPDELALNARLANEFGAAVIPVVGGRGQTAESVRAETRNAYRAYEGLGCDVLAMVVNRVAREDREELAARLDSLLAVPCYVLPDEPALSAPTVAQITHALGGKVLLGDDSGLARDALDFVFGGAMLPNFLNALTPGCLVVTPGDRADLVVGALAAHSAGTPPIAGVLLTLDERPSDEVLTLAARLAPGTPVVSVAGTSFPTAAELFSLEGKLNAATPRKAETALGLFERYVDTGDLLKRVSAPSSDRLTPMMFEHKLLEQARSDKRRVVLPEGTETRVLHAAEVLLRRGVCDLTLLGPVDQIRKKAADLGIDLGGSQLIDPVTSQLRDSFAEKYAQLRAHKGVSVELAYDVVADVNYFGTLMVQEGLADGMVSGSVHSTAATIRPAFEIIKTKPDTKIVSSVFFMCLADKVLVYGDCAVNPDPNAEQLCDIAVQSAATARQFGVEPRIAMLSYSTGTSGSGADVDKVREATELVRLRRDDLKIEGPIQYDAAVEPSVAATKLPGSDVAGQASVLIFPDLNTGNNTYKAVQRSAGAIAVGPVMQGLRKPVNDLSRGALVQDIVNTVAITAIQAQSPHEKATAQ

SEQ ID NO: 147864 - DNA, 2088 bp, Nitrosomonas europaea ATCC 19718
  CDS (1)..(2088): transl_table=11
atgcatactttctttgttacctctaccggctttggtgtcggactcacttcaaccagtttaggattggtgcgggcgctcgaatatggcggccttaaagcgggtttttataaacctgtcgctcagcaacatcccggtaattccaagcttgaatattccactgaactgatctcgcgaacgttgggcctggcaccacccgctccgcttccgttagctacagttgaacatctgctgggtgaaggtcagattgacgacttgatggaagatatcgtccggcgatttaagcaagcctctgaaggttatgatgtgatggtggtagaaggtatggtacctacacgccatgtcagctatgcctcacgcgtgaataccaggctggccagcagccttgatgctgatatcatcctcgtttcatctgccgaagatgatgcactgcaggcaattacagatcgtattgaaattcaggctcaattttttggtggtgctcagaatcctcgtctattgggcgtaatcctcaataaaattcgcaccgatcattctgatgatctttttgaacagctaaaaaaccattccaccctgttccatcaatccagctttcagattctgggttgtattccctgggaggattccttgaatgctcctcgcatggcagacgttgtcacacagctgcaagctcagatcgtaaacgcgggggatagtgaaaaacgccgtgtacaggatatcgtgctgtttgccagtgccgcccccaattcagtgacattgttacgtcccggagttctggtggtaacacctggtgaccgggacgatattgtcatggccgccagccttgccgtactgaatggtgtaccactggcggggttactgctgtgcagtgattttccgccagatccgcgcgtgctggaattgtgcaaaggtgcactgacaaaaggattaccagtttgtaccgtcacgaccaattcatacgataccgccgccaacctgcatcgcatgaatcgggagattccgctggatgaccacgagcgtgctgagcgcatcaccaactttgtggcgaatcatattcgtcaggaattattggttaagcgctgtggtgagccacaggaacaacgcctttctccccccgccttccgctatcgcctggtcaagcgggcgcaagaggctgattgccgtatcgtgttaccggaagggtacgaaccccgcaccatacaagcggcaaccatttgccaggaacgtggcattgcccgttgcgtgttgctggcaaaacctgatgcagtaaaagcggtggccagcgcacgtggcattaccctgcccgaagggcttgaaatgattgatccggaaaaagtgcgccgaaattatgtggcggctatggtggagttacgcaagcacaaaggattaaatgaacccatggcgctggcgcaactggaggacaatgtcgtgctgggcaccatgatgctggcgacgggtgaagtcgatggcctcgtctccggcgcaatcaataccaccgccaataccattcgccccgctttgcaactgatcaaaacagcaccgggttttaaacttgtctcctctgtcttctttatgctgctgccagaacaagtcgtcgtgtatggagattgtgcggtcaatcctaatcctacggctgaagaactggccgatatcgcactgcaaagtgccgcgtcggcacaggcactgggtatcgagccacgcgtagccatgttgagttattccaccggtgattccggcagcgggcaagaagtggaaaaagtacgcgaagccactcgacttgcccgtttggcacgtcccgatctgctgatcgacggccctctgcaatacgatgccgctgcgattgccagcgtgggccggcaaaaagcacctggcagcccggtagcagggcgcgctaccgtgtttatctttccggatctcaacaccggcaataccacttacaaagccgtacagcgcagcgccaacgtagtcagtgtcggccccatgttgcaaggcctgcgtaagccggtgaatgatctgtcacgcggcgcatcggtggaagatattgtttataccattgccttgactgccgtacaggcggccagtcaacgctaa

SEQ ID NO: 147865 - protein, 695 aa, Nitrosomonas europaea ATCC 19718
MHTFFVTSTGFGVGLTSTSLGLVRALEYGGLKAGFYKPVAQQHPGNSKLEYSTELISRTLGLAPPAPLPLATVEHLLGEGQIDDLMEDIVRRFKQASEGYDVMVVEGMVPTRHVSYASRVNTRLASSLDADIILVSSAEDDALQAITDRIEIQAQFFGGAQNPRLLGVILNKIRTDHSDDLFEQLKNHSTLFHQSSFQILGCIPWEDSLNAPRMADVVTQLQAQIVNAGDSEKRRVQDIVLFASAAPNSVTLLRPGVLVVTPGDRDDIVMAASLAVLNGVPLAGLLLCSDFPPDPRVLELCKGALTKGLPVCTVTTNSYDTAANLHRMNREIPLDDHERAERITNFVANHIRQELLVKRCGEPQEQRLSPPAFRYRLVKRAQEADCRIVLPEGYEPRTIQAATICQERGIARCVLLAKPDAVKAVASARGITLPEGLEMIDPEKVRRNYVAAMVELRKHKGLNEPMALAQLEDNVVLGTMMLATGEVDGLVSGAINTTANTIRPALQLIKTAPGFKLVSSVFFMLLPEQVVVYGDCAVNPNPTAEELADIALQSAASAQALGIEPRVAMLSYSTGDSGSGQEVEKVREATRLARLARPDLLIDGPLQYDAAAIASVGRQKAPGSPVAGRATVFIFPDLNTGNTTYKAVQRSANVVSVGPMLQGLRKPVNDLSRGASVEDIVYTIALTAVQAASQR

SEQ ID NO: 147866 - DNA, 2100 bp, Rhodopirellula baltica SH 1
  CDS (1)..(2100): transl_table=11
ttgattcaacgcagcgtctacattggcaccaacggcaacgcgaccggtaaacgcatggtcgccctggggatgatggaattggcggctcggcgattcggtcgggtggctttctttcgcccggtcgtccatgtcggccccaacgaagaccaaagcatccgcatgatgcgatcccggtatgggatcgtcactcccgccgatgagatgttcggtgtcacacgggcacaagcccgacaaatgttggcggatgaccgatacagcaacctcattcagctcattcaacaacgcttcaagtcattggaagcgaaggccgactttgttgtcgtcgaaggcaccagctaccaaggcctcgcaccggagttggagtttgaactgaatgcggacatcgccgccaacatcggttcgcgagttctctctgtttacgcaatgggcgatcgctcagtcgatgaatgcgttcaatccgtgctgattggaaacgagagttttgtggatcgaggcgcccagttgatcgcgacgatcatcaacaaagtccccgacgatcaatcgactgctctgaacgcggcgatcaagacatcaaaattggattccaaagcacctctgtactttcttcccgatgagccgttgcttcgccaaccaacggtccgtgaaattcaatccggcatcggtgccaaactggtttctggcgatgagtcctccctggatcgtgaagtcgcggttcgcaaagtcgcggcgatgcaactgcctggctttttggaacggttgtccaacgcggccttggtgatgacacccggtgaccgcagcgacatcctggtcggctgcgtgctggcttgttcgcaacccgacggaccatcgccggctgcggtcgtactgaccggcggaatcctgccacctccatccatccggcgtttagtggaaaacgcgaacgcattgccgattttggttgctattgaagacacttacacggtcgcctccaaggccgctgaggttcgcgccgaaatcggagatcactccccgagaaagattgaatctgcgatcggagtcttcgaacgtcacgtcgacacggactcgctggccgatcgactgcaagctcccatcgttccgcgaatcacgccgatgctgtttgaacactcgttgatccagcgggcaagacaacaacgcgtcaaaatcgtattgcccgaagcaaccgaaccgcgaatcctgcaagccgtcgatgtgttgcggcgtcgcgatgtgaccgatgtggtactgctcggcgatcccaatctgattgccgccgcggcggcgcgggcgggcgtcatgcttcccaacgacgggctcgagatcattgatcccgcgaccagtccactcaggaactcgttcgctagtgagtactatcagcttcgtaaacacaaaggcgtcaccaccgacatcgctcatgaccgaatgatcgatgtcacgtattttggcacgatgctcgtgcatcgcggtttggcgggcggtttggtttccggcgcggttcacaccaccgccaataccatccgtcccgcgtttgaattcattcgcacgcgacctgatgtcaacgtggtcagcagtgtatttctgatgtgtttgaagaatggggtgctggtgtacggtgactgcgcagtgatccccaatccgaccgccgagcaactgactgaaattgcaatcagcagtgctgaaacagccgtgcagtttggcattgaaccgcgaattgccatgctgtcttattccaccggcgaaagtggccatggagaagatgttgacaaggtgcgcgaggcgacggcgatggttcgcaaacgacggcctgatttgctggtcgaaggccccctgcaatacgacgccgccgtcgatcccgacgtcgccgcaacgaagatgccgggcaaccccgtcgcgggacaagccaccgtgttggtcttccccgacctgaacaccggcaacaacttgtacaaagccgtccagcgatccgcgggtgccatcgcaattggtcccgtcctgcaaggattgaacaaaccggtcaacgatctctctcgcggatgcacagtgacggacatcgtcaacaccgtcgcgatcacggccatccaagcacaaacggtggcttcatga

SEQ ID NO: 147867 - protein, 699 aa, Rhodopirellula baltica SH 1
MIQRSVYIGTNGNATGKRMVALGMMELAARRFGRVAFFRPVVHVGPNEDQSIRMMRSRYGIVTPADEMFGVTRAQARQMLADDRYSNLIQLIQQRFKSLEAKADFVVVEGTSYQGLAPELEFELNADIAANIGSRVLSVYAMGDRSVDECVQSVLIGNESFVDRGAQLIATIINKVPDDQSTALNAAIKTSKLDSKAPLYFLPDEPLLRQPTVREIQSGIGAKLVSGDESSLDREVAVRKVAAMQLPGFLERLSNAALVMTPGDRSDILVGCVLACSQPDGPSPAAVVLTGGILPPPSIRRLVENANALPILVAIEDTYTVASKAAEVRAEIGDHSPRKIESAIGVFERHVDTDSLADRLQAPIVPRITPMLFEHSLIQRARQQRVKIVLPEATEPRILQAVDVLRRRDVTDVVLLGDPNLIAAAAARAGVMLPNDGLEIIDPATSPLRNSFASEYYQLRKHKGVTTDIAHDRMIDVTYFGTMLVHRGLAGGLVSGAVHTTANTIRPAFEFIRTRPDVNVVSSVFLMCLKNGVLVYGDCAVIPNPTAEQLTEIAISSAETAVQFGIEPRIAMLSYSTGESGHGEDVDKVREATAMVRKRRPDLLVEGPLQYDAAVDPDVAATKMPGNPVAGQATVLVFPDLNTGNNLYKAVQRSAGAIAIGPVLQGLNKPVNDLSRGCTVTDIVNTVAITAIQAQTVAS

SEQ ID NO: 147868 - DNA, 2139 bp, Haemophilus ducreyi 35000HP
  CDS (1)..(2139): transl_table=11
atgtctaggacgattattcttatcccaatcacaactgatgttggtcttacaagcgttagcttaggattagttcatgcattagaacaaaaaggaattaaagttggctttttaaaacctattgctcaaccgattagcggtgaagataaattagaccgctctacttcaattattcaagctgctcaaacaacagaagtgggcgagccacttctgttaagtgaagcggaattattaattggccagaatcaagcagatgttttattagaaaagattgttgagcgttaccaacaattgtctaaaaataatgaagtgattattattgaagggttaatcccaacgcgtaaaaattcatacgcaaacagcattaattatgatgttgcacaagcattagatgcagaaattattttagtggcagcgccaggttcagataaacctgtacaattaaaagaacgtatagaagcggttgcatcagagtttggtggtcgtgataatcctaacttattaggcgtaatcattaataaatttaatgcgcctgtagatgagtcaggtcgtactcgcccagatctaactgaaatttttgattcattccaacatagtgcacaaaacattgcagaagtagaagcactatttgctaaaagcccaattaatttattggcttgtataaaatggaaatccgatttaattgcaactcgtgcaattgatgtcgccaaacatttacatgccgccattattaatgaaggtgatttacacactcgccgtatccgtggtgtttcattttgtgcgtgtagtattccgcatatggttgactactttaaagcgggtaatttattggttacttctgccgatcgcccagaagtattagttgctgcttctttagctgtaatgaatggtattgaaattggtgccatattattaaccggtggatataaaattgatcataatgttgccaaactttgtcaacaagcgtttgaaacaggcttacctgtattccgtgttgaaggaaatacttggcaaactgcattaaatctacaaagtgttagcttagaagtgccagtagatgataaaggacgtattgatgcaattaaagaatatgttgcaagccaatttgatgctcactttgtggatgaagtatctaaagttgcaacgcgtgtacgtcgcctctcccctgctgctttccgttatcaattaacagaatatgcacgtgaagcgaaaaaacgtattgtactgcctgaaggtgatgagcctcgtactattaaagctgctgctttatgtgcgaaacgtggcattgcagaatgtgtacttttagctaatcctgttgatgttcaacgtattgcagaggcacaaggggtggtattgggtaaagggattaccattattaatccggaagatgtgagtgaaaactacgtttctcgtttagttgaattacgtaaaaataaaggtatgacggaagtagtcgcgcgtgagcaattaacggataccgtagtgctgggtacaatgatgttagaagcgggagaagttgatggcttagtgtccggtgcagtacataccaccgcaaatacgatccgtccaccaatgcaaatcattaaaactgcaccaggtagctctattgtttcttctatcttctttatgctattaccagatcaagtgctagtatatggagactgtgccgtaaatccggatccaacagcggaacaattagctgaaattgcgatccaatcggcagaatcagcaaaagcatttggcattgatccacgtgtcgcaatgatttcttattcgacaggtagttcaggctctggtgctgatgttgagaaagtaaaagaagcaactcgtattgctcaagaaaagcgcccagatttaattattgatggtccattacaatatgatgcggcggtgatggaagatgtagcacgttctaaagcgcctaattcaccagtagcaggtaaagcgactgtctttgtattccctgatttgaatacaggtaatacaacgtataaagcggttcaacgttctgctgatttagtctctattggtccaatgctacaaggtatgcgtaaaccagttaatgatctttcacgtggagcattagttgatgatattgtgtacactattgcattgacggcaattcaagctactcaatcttag

SEQ ID NO: 147869 - protein, 712 aa, Haemophilus ducreyi 35000HP
MSRTIILIPITTDVGLTSVSLGLVHALEQKGIKVGFLKPIAQPISGEDKLDRSTSIIQAAQTTEVGEPLLLSEAELLIGQNQADVLLEKIVERYQQLSKNNEVIIIEGLIPTRKNSYANSINYDVAQALDAEIILVAAPGSDKPVQLKERIEAVASEFGGRDNPNLLGVIINKFNAPVDESGRTRPDLTEIFDSFQHSAQNIAEVEALFAKSPINLLACIKWKSDLIATRAIDVAKHLHAAIINEGDLHTRRIRGVSFCACSIPHMVDYFKAGNLLVTSADRPEVLVAASLAVMNGIEIGAILLTGGYKIDHNVAKLCQQAFETGLPVFRVEGNTWQTALNLQSVSLEVPVDDKGRIDAIKEYVASQFDAHFVDEVSKVATRVRRLSPAAFRYQLTEYAREAKKRIVLPEGDEPRTIKAAALCAKRGIAECVLLANPVDVQRIAEAQGVVLGKGITIINPEDVSENYVSRLVELRKNKGMTEVVAREQLTDTVVLGTMMLEAGEVDGLVSGAVHTTANTIRPPMQIIKTAPGSSIVSSIFFMLLPDQVLVYGDCAVNPDPTAEQLAEIAIQSAESAKAFGIDPRVAMISYSTGSSGSGADVEKVKEATRIAQEKRPDLIIDGPLQYDAAVMEDVARSKAPNSPVAGKATVFVFPDLNTGNTTYKAVQRSADLVSIGPMLQGMRKPVNDLSRGALVDDIVYTIALTAIQATQS

SEQ ID NO: 147870 - DNA, 2082 bp, Chromobacterium violaceum ATCC 12472
  CDS (1)..(2082): transl_table=11
atgcagacattcttcctcgcccccaccggcttcaatgccggcctgacctcggtcacgctgggcgccatccgttcgctggagcaggccggcctgcgcgtgggcttcgtcaagcccatcgcccaggacaccaaggacggcgaagccgagcgctccacccacttcgcccaggccatctgccgcctgaatccgccgcagccgatcagcatggaacgcgtcgaatacctgctgtcgcaaggccaggtcgatcaattgatggaagaggtggtcagcctctaccagcaggccgcgcaaaacgtggacgccgtgatcgtggaaggcctggtgccggaccagaagcaggtgttctccaccttcctcaacaccaagatcgcccgcaacctgcaggcgcagaccatcctggtcagctcggtgaaggaattgggcgccgcggaaatcgccgaacagctcgagatgaacatccaggccttcggcagccaggccatcgccggctacatcctcaaccacgtgctgcccgccgtcgaccgcgccgagctggcgcgcgaggtgcgggaatccggcaacctgaagaaagccggcctgccgctgctgggcgtgattccctaccagtccgagctgctggcgccgcgcacgcaggacgtggcccgctacctgaacgccaacgtggtgcatgccggccagcaggccagccgccgcgtgcgcaacatggtggtggccgcccgcaccgcgcccaacatcgtcaatctgctgaagccgggcgcgctgatcatcaccccgggcgaacgcgaagacgtggtgatggccacctcgatggcagcgatgaacggcgtgccgctggccggcctgctgctgacctgcgactcccagcccgacccgcgcatccagcagctgtgccaacaggcgttcaccggcggcctgccggtgctggccacttcgctgaactcgatggaaaccgccggcgcgctgaacgcgatgagccaccaggtgccgtccgacgacctggagcgcatggagaaggtgatcgagcacgtcgccgaattcctcgacgtgtcctcgctgaagcaaagcgtcggcgagccgcgcgaactgcgcctgccgccgccggccttccgcttccaattgatggaaaaggcccgcaaggccaacaagcgcatcgtgctgccggaaggcaacgagccgcgcaccatccaggccgccgccatctgccaggaaaaaggcatcgcccgctgcgtgctgctgggcaaccgcgccgaaatcctgcaagtggccgaaacccagggcgtgacgctgccggaatcggtcgaaatcctcgacccgaacgaaatccgcggccgctacgtcgagccgatggtcgagctgcgcaagggcaagggcctgaacgcgccgatggcgctggcgcagctggaagacaccgtggtgctgggcaccatgatgctggcgatgaacgaagtggacggcctggtttccggcgccgtgcacaccaccgccaacaccatccgtccggcgctgcagctgatcaagaccgccccgggctccagcatcgtgtcctcggtattcttcatgctgatgccggaacaggtgtacgtttacggcgactgcgcggtgaacccggacccgaccgccgagcagctggccgacatcgccatccagtccgccgattccgccgtcgccttcggcatcaacccgcgcgtggcgatgatctcctactccaccggctcgtccggcagcggcagcgacgtggagaaggtgcgcgaagccacccgcatcgcccaagagaagcgccctgacctgctgatcgacggtccgatgcagtacgacgccgcctcggtggaatccgtcggccgccagaaggccccggacagccaagtagccggccgcgccaccgtgttcgtgttcccggacctgaacaccggcaacaccacctacaaggcggtgcagcgctccgccaacgtggtctcggtgggtccgatgctgcaaggcctgcgcaagccggtcaacgacctgtcgcgcggcgcgctggtggacgacatcgtctacaccatcgccctgaccgcgctgcaggccgagcagacgccggccagctaa

SEQ ID NO: 147871 - protein, 693 aa, Chromobacterium violaceum ATCC 12472
MQTFFLAPTGFNAGLTSVTLGAIRSLEQAGLRVGFVKPIAQDTKDGEAERSTHFAQAICRLNPPQPISMERVEYLLSQGQVDQLMEEVVSLYQQAAQNVDAVIVEGLVPDQKQVFSTFLNTKIARNLQAQTILVSSVKELGAAEIAEQLEMNIQAFGSQAIAGYILNHVLPAVDRAELAREVRESGNLKKAGLPLLGVIPYQSELLAPRTQDVARYLNANVVHAGQQASRRVRNMVVAARTAPNIVNLLKPGALIITPGEREDVVMATSMAAMNGVPLAGLLLTCDSQPDPRIQQLCQQAFTGGLPVLATSLNSMETAGALNAMSHQVPSDDLERMEKVIEHVAEFLDVSSLKQSVGEPRELRLPPPAFRFQLMEKARKANKRIVLPEGNEPRTIQAAAICQEKGIARCVLLGNRAEILQVAETQGVTLPESVEILDPNEIRGRYVEPMVELRKGKGLNAPMALAQLEDTVVLGTMMLAMNEVDGLVSGAVHTTANTIRPALQLIKTAPGSSIVSSVFFMLMPEQVYVYGDCAVNPDPTAEQLADIAIQSADSAVAFGINPRVAMISYSTGSSGSGSDVEKVREATRIAQEKRPDLLIDGPMQYDAASVESVGRQKAPDSQVAGRATVFVFPDLNTGNTTYKAVQRSANVVSVGPMLQGLRKPVNDLSRGALVDDIVYTIALTALQAEQTPAS

SEQ ID NO: 147872 - DNA, 2142 bp, Photorhabdus luminescens subsp. laumondii TTO1
  CDS (1)..(2142): transl_table=11
gtgtcccgtacaattatgttaatccctactagcaccagcgtcggcttgaccagtgttagtttaggtgtcatccgctcaatggaacaaaaaggcgtcagcctgagtgttttcaaacctatcgcccagcctcgttgccgtgccgcccaagatcaaaccaccaccatcatccgcgctaattccagcataaagaccgctgaaccgctggacatggcacatgtggaatctttgctgacaaccaatcagaaagatgtgctgatggaaaagatcgtggccctttaccacgaaaataccaaagacgcagaagtcattctgattgaaggtctggttccaacccgtaaacattcattcgcccaatctctcaactatgaaattgccaagaccctgaacgctgaaatcgtattcgtattggcgctaggtaacgattccccggaacagttgaaagaacgagttgaactggctcgtgctgaatttggcggtaacaaaaaccagaacattaccggcgttattatcaataaactgaatgcgccagttgatgatcaaggccgtacccgtccggatctgtcagaaatctttgacgaatcctcaaaagccatcgtatccaacatcgatccgaacacgctgttcaaaaatagcccattgccaattctgggttgcattccgtggagttttgacctgattgcaacccgcgcaattgatatggcaaaacacctgaacgcccgtattatcaacgaaggtgcaatcaaaacccgccgtgtgaaatctgtgactttctgtgcccgcagcattccacacatgttagagcacttccgtcccggttctctactggtcacttcggctgatcgtccagacgttctggtttcagcttgtctggcggcgatgaatggggttgaaatcggtgcaatcctgctgactggcggttatgccatcgatgagccgattaagcaattgtgcgaacgtgccttcaacactggcctacctgtctttatggttgataccaacacctggcaaacttctctgaacctgcaaagtttcagcctggaagttccggcagatgaccatgaacgcatcgaaaaactgcaaaactacgtcgcacaccacatcaacaaagagtggatcgactccctgacagcgaactctgagcgcccacaccgcctctctccacctgcattccgttatcaattaaccgaactggcacgcaaagcaggcaaacgcgttgttctgccggaaggtgacgaacctcgtaccgtgaaagcggcatctatctgtgctgatcgcggtatcgcgcgatgtgttctgctgggtgatccagaagagatccgtcgggttgccgcggctcagggcgtagaactgggtgcaggtattgaaattgtcgatcccattgctgtacgtgaacgttatgtcccacgtctggttgagctacgcaaaaacaaaggcatgaccgaagtcgttgcgcgtgaacaattggaagacaacgttgttctgggtacgttgatgctggaacagggcgaagtcgatggtttggtttccggtgcggtacacaccacggcaaacaccatccgtccaccattgcaattaatcaaaactgcaccgggtagctcgctggtatcatccgtattctttatgctgctgccagaacaggttctggtttatggtgactgcgcaatcaacccagatccgactgctgaacaactgtctgaaatcgctattcaatcggcggattcagccaaagcatttggtatcgaaccgcgcgttgccatgatctcctactctaccggcaactccggtgcaggtagtgatgttgagaaagtgcgtgaagcaacccgtttagcacaggaaaaacgtccagatctgatcattgatggcccactgcaatatgacgccgcgatcatggcagatgtagcgaaatccaaagcaccaaactcaccggttgccggtcaagctaccgtgttcatcttccctgatctgaataccggtaacactacctataaagcagtacaacgttctgcggatctggtttccatcgggccaatgctgcaaggtatgcgtaaaccggtgaacgacctgtcccgtggcgctttggtagacgatattgtttacaccgttgcactgaccgcaattcaatcagcacaaggggaagcgtaa

SEQ ID NO: 147873 - protein, 713 aa, Photorhabdus luminescens subsp. laumondii TTO1
MSRTIMLIPTSTSVGLTSVSLGVIRSMEQKGVSLSVFKPIAQPRCRAAQDQTTTIIRANSSIKTAEPLDMAHVESLLTTNQKDVLMEKIVALYHENTKDAEVILIEGLVPTRKHSFAQSLNYEIAKTLNAEIVFVLALGNDSPEQLKERVELARAEFGGNKNQNITGVIINKLNAPVDDQGRTRPDLSEIFDESSKAIVSNIDPNTLFKNSPLPILGCIPWSFDLIATRAIDMAKHLNARIINEGAIKTRRVKSVTFCARSIPHMLEHFRPGSLLVTSADRPDVLVSACLAAMNGVEIGAILLTGGYAIDEPIKQLCERAFNTGLPVFMVDTNTWQTSLNLQSFSLEVPADDHERIEKLQNYVAHHINKEWIDSLTANSERPHRLSPPAFRYQLTELARKAGKRVVLPEGDEPRTVKAASICADRGIARCVLLGDPEEIRRVAAAQGVELGAGIEIVDPIAVRERYVPRLVELRKNKGMTEVVAREQLEDNVVLGTLMLEQGEVDGLVSGAVHTTANTIRPPLQLIKTAPGSSLVSSVFFMLLPEQVLVYGDCAINPDPTAEQLSEIAIQSADSAKAFGIEPRVAMISYSTGNSGAGSDVEKVREATRLAQEKRPDLIIDGPLQYDAAIMADVAKSKAPNSPVAGQATVFIFPDLNTGNTTYKAVQRSADLVSIGPMLQGMRKPVNDLSRGALVDDIVYTVALTAIQSAQGEA

SEQ ID NO: 147874 - DNA, 2145 bp, Vibrio vulnificus YJ016
  CDS (1)..(2145): transl_table=11
atgtcccgtactattatgcttatccctgcaagtgctggtgttggtcttactagcgtaagcatgggtgttcttcgcgctatggagcgcaaaggcgttaaagtttctttctacaagcctatcgcacaaccacgtagcggcggtgatcttcctgatctcactaccactatcgttggcgcaaacagcgatatgaagattggcgaacccctattgatgtctgttgctgagaacctaatcggtaacgacaacatggacgaactgctagaaacggttgtagaacgttacaaccaaattaataaagatgcagacgttacgctaatcgaaggtcttgttcctactcgtaagcacccatttgctaaccaagtgaacgcggaaatcgcagcaacacttggtgctgaaattgttcttgtggcgaccccaggcactgacaacccagcacagctaaaagagcgtatcgaagtggcttgttcaaacttcggtggcacgaaaaacaaaaacatctctggtgttatcatcaacaagctaaacgcgccagttgatgaagcaggccgtacgcgtcctgatctatcagagatcttcgatgacgcagacagcgcgaaacaaaaccagctagaagtgatgcaaatcttcaactctagcccaattcgcgttctaggttgcgtgccatggagcatcaacctgattgcaactcgtgcaatcgatatggcgaagcacctgaaagcagaagtgatcaacgaaggcgacatcaacactcgtcgtattaagagcatcaccttctgtgcacgttctctgccacacatgattgagcacttcaaaccaggctcactgctggtgacttctgctgaccgtccagacgttatcgttgcggcttctctagcagcaatgaacggcgtggaaatcggtgcggtacttctgactggcggttacgacattcctacagagatcgaaaacctatgtaagccagcgtttgaaagtggccttccaattttcaaagcacaaggtaacacttggcagacttcgctcaatctacagagcttcagcctagaagtacctgcagacgataaagagcgtatcgagttcatcaacgaccacgttgcgggtcacatcgatggcaactggattgagtcaatgacggaaggtactgagcgttctcgtcgcctaagtcctccagcattccgttaccagttgactgaacttgctcgtaaagcgggtaaacgcatcgttcttcctgaaggtgacgaaccacgtactgtgaaagcggcagcgatctgtgctgaacgcggtatcgcagaatgtgtactgctaggtaaccctgaagagatcaagcgcgtggcagcacaacaaggtgttgaactgggcgctggcgttaagatcatcgatgcagacgcgattcgcgaaaactacgttgctcgtcttgttgaactacgtggctcgaaaggcatgactgaagttgtggctcgtgagaagctgcaagattctgtgttcctaggcactatgatgcttgagaacgatgaagttgacggtctagtatctggcgcggttcacacgacggcaaacaccatcgttcctccgttccaaatcatcaagacagcaccaaatgcgtctatcgtatcttctgtattcttcatgcttctgcctgatcaagtactggtttacggtgactgtgcgatcaacccagatccaacggcagaacagcttgcagaaatcgcgattcaatctgctgattctgctgcagcctttggtatcgacccacgcgtagcaatgatctcttactctactggtgaatctggtaagggtgcagacgttgataaagtgcgtgaagcgaccaaactggctcaagagaaacgtcctgatctgatcatcgacggtcctctgcagtacgacgcagcgatcatggaaaacgtggcagcgtctaaagcgcctaactctccagtagcaggtaaagcgactgtattcgtattcccagacctcaacacgggtaacacgacttacaaagcagtacaacgttcagcagaccttgtttctatcggtccaatgctgcaaggtatgcgcaagccggtaaacgacctgtctcgtggcgcgctagtcgacgatatcgtctacaccatcgctctaactgcaatccaagcgactcaagatcagaaataa

SEQ ID NO: 147875 - protein, 714 aa, Vibrio vulnificus YJ016
MSRTIMLIPASAGVGLTSVSMGVLRAMERKGVKVSFYKPIAQPRSGGDLPDLTTTIVGANSDMKIGEPLLMSVAENLIGNDNMDELLETVVERYNQINKDADVTLIEGLVPTRKHPFANQVNAEIAATLGAEIVLVATPGTDNPAQLKERIEVACSNFGGTKNKNISGVIINKLNAPVDEAGRTRPDLSEIFDDADSAKQNQLEVMQIFNSSPIRVLGCVPWSINLIATRAIDMAKHLKAEVINEGDINTRRIKSITFCARSLPHMIEHFKPGSLLVTSADRPDVIVAASLAAMNGVEIGAVLLTGGYDIPTEIENLCKPAFESGLPIFKAQGNTWQTSLNLQSFSLEVPADDKERIEFINDHVAGHIDGNWIESMTEGTERSRRLSPPAFRYQLTELARKAGKRIVLPEGDEPRTVKAAAICAERGIAECVLLGNPEEIKRVAAQQGVELGAGVKIIDADAIRENYVARLVELRGSKGMTEVVAREKLQDSVFLGTMMLENDEVDGLVSGAVHTTANTIVPPFQIIKTAPNASIVSSVFFMLLPDQVLVYGDCAINPDPTAEQLAEIAIQSADSAAAFGIDPRVAMISYSTGESGKGADVDKVREATKLAQEKRPDLIIDGPLQYDAAIMENVAASKAPNSPVAGKATVFVFPDLNTGNTTYKAVQRSADLVSIGPMLQGMRKPVNDLSRGALVDDIVYTIALTAIQATQDQK

SEQ ID NO: 147876 - DNA, 2088 bp, Mycobacterium avium subsp. paratuberculosis K-10
  CDS (1)..(2088): transl_table=11
ttggctgacatttcggcgatctacgttgccgctcccgaaccggagaccggcaagtccaccgtcgcgctgggcctgctgcaccggctgaccgcgacggtcgccaaagtcggtgtgtttaggccgattacgcgtgacgggcaggaccgcgactacatcttggagctgctgctgtcgcgcaccaccgcggggctgtcctaccagcagtgcgtcggcgtcacctaccaacagctgcacgccgacggcgacgcggcgatcgccacgatcgtcgacgcctaccacgcgatggccgagctgtgcgacgtggtggtcatcgtcggcagcgactattccgaactgggacaggcgatccggcccgcggagctgtccaccaacgcccggatcgcggtcaacctcggtgcgccgatcctgctgacggtcagcggcaaggggcgcaccgccgccgaggtcgccaccgtcgtgcaggtctgcctggccgagctggacgcccagcacgcgcacaccgcggcggtggtggtcaaccggtgcgagccggccgagctggacgcggtggccgaagcgttgcgcggctttccccagcgctgctacgtgctgcccgacgagccgctgctgtcggcgccgacggtggccgaactggaaaaggcggtcgccggttcgccggtcagcggcgaggagtcgctgcgcgagcgcgaggtcaccggcatcctggtcgccgggatgaccgccgaccacgtgctggagcgcctcgcggacggcatggccgtcatcacccccggcgaccgctccgacgtggtgctcgccgtggccagcgcccatgccgccgaaggctttccgtcgctgtcgtgcatcgtgctcaacggcgggttcgcgctgcatccgtccatcgcggcgctggtggccgggctgcggctgcggctgcccatcgtcgccaccgcgctgggcacctacgacaccgccagtgcggcggccgcggcccgcggcagggtgacggccacctcacagcgcaagatcgacaccgcgctggagctgatggaccggcacgtcgacatcgcggatctgcttgaacagcttgccattccgattcccaccgtgaccacgccgcagatgttcatccatcagctgaccctgcaggcgcgcgcggaccgcaagcacatcgtgctgcccgagggcgacgacgaccgcatcctgcgcgccgccggcagggtgctgcagcgccgcgtcgccgacctgaccatcctgggcgacgaggcccggatccggcagcgctcgggggaactcggggtggacctgagcgacgtgaaggtcatcgacccgcgcaccagcgcgctgcgccccgagttcgcgcagcagtacgcgcagctgcgcaaggccaagggcgtcaccgtcgagcaggcccgcgaaatcatgcgcgacgcaacgtacttcggcaccatgctggtgtacacctcccaggtcgacgggatggtgtccggcgccgcccacaccaccgcacacaccgtgcgcccggccttcgagatcatcaagacggtgccggacgtctccaccgtgtccagcatcttcctgatgtgtctgcccgaccgggtacttgcctacggcgactgcgcgatcatccccaacccgacaccggagcagctggccgacatcgcgatctcctcggcgcgcaccgccgcccagttcggcatcgaaccgcgggtggccatgctgtcctactcgacgggtgactccggcaccggagccgacgtcgaaaaggtaagaacggcaacgcaattggtgcggcagcgcaaccccgacctgccggtcgagggccccatccaatacgacgccgccatcgaaccgtcggtcgccgccaccaagctgcgggattcgccggtggccggtcgggccaccgtgttgatctttcccgacctcaacaccggcaacaacacctacaaggcggtacagcgcagcgccggcgcgctggccatcgggccggtactgcagggcctgcgcaagccggtcaacgacctgtcgcggggtgcgctggtcgaagacatcgtgaacaccattgccatcaccgcgattcaggcgcaggggttgcccggtggacggtag

SEQ ID NO: 147877 - protein, 695 aa, Mycobacterium avium subsp. paratuberculosis K-10
MADISAIYVAAPEPETGKSTVALGLLHRLTATVAKVGVFRPITRDGQDRDYILELLLSRTTAGLSYQQCVGVTYQQLHADGDAAIATIVDAYHAMAELCDVVVIVGSDYSELGQAIRPAELSTNARIAVNLGAPILLTVSGKGRTAAEVATVVQVCLAELDAQHAHTAAVVVNRCEPAELDAVAEALRGFPQRCYVLPDEPLLSAPTVAELEKAVAGSPVSGEESLREREVTGILVAGMTADHVLERLADGMAVITPGDRSDVVLAVASAHAAEGFPSLSCIVLNGGFALHPSIAALVAGLRLRLPIVATALGTYDTASAAAAARGRVTATSQRKIDTALELMDRHVDIADLLEQLAIPIPTVTTPQMFIHQLTLQARADRKHIVLPEGDDDRILRAAGRVLQRRVADLTILGDEARIRQRSGELGVDLSDVKVIDPRTSALRPEFAQQYAQLRKAKGVTVEQAREIMRDATYFGTMLVYTSQVDGMVSGAAHTTAHTVRPAFEIIKTVPDVSTVSSIFLMCLPDRVLAYGDCAIIPNPTPEQLADIAISSARTAAQFGIEPRVAMLSYSTGDSGTGADVEKVRTATQLVRQRNPDLPVEGPIQYDAAIEPSVAATKLRDSPVAGRATVLIFPDLNTGNNTYKAVQRSAGALAIGPVLQGLRKPVNDLSRGALVEDIVNTIAITAIQAQGLPGGR

SEQ ID NO: 147878 - DNA, 2115 bp, Desulfovibrio vulgaris subsp. vulgaris str. Hildenborough
  CDS (1)..(2115): transl_table=11
atgtccaacaatctgtacatcaccgcgacagagtcgaagagcggcaagtccgcggtggtgctaggcatgatgcaactgctgctgcgcgacgtccgcaaggtggccttcttcaggcccatcatcaatcaggcgtccaccgacgtccgcgaccacgacatcaatctcatcctgcgtcacttcgggctcgacatcgcctacgaggacacctacgcgtactcgctgcaggacgcccgcgaactgatcaacaacggtcagcacgccacccttctggacaacatcctcaagaagtacaagaagctcgaagacgcctacgatttcgtgctctgcgagggcaccgactttctcggcaaggatgccgcgttcgagttcgaactcaacgccgacatcgccgccaacctcggctgccccgtcatggtggtggccaacggccagcagaaggccgcccgtgagctcatcgcctcgacgcagctgaccatcgaccttctcgacgagaagggcctcgacgtggtcacggcggtcatcaaccgcgccaccgtcaccgaagccgagcgcgaagagatcatcaagagcctcgagtgcaaggtcaactgctcgaacccgctcgccgtgtacgtgctccccgaagagtccaccctcggcaagcccaccatgaacgacgtcaagaagtggctcggcgcacaggtgctctacgggcacggtcgcctcgacacgctggtggacgactacatcatcgccgccatgcagatcggcaacttcctcgactacgtctcgcagggctgcctcgtcatcactcccggcgaccgttccgacatcatcctctcgagcctcgcctcgcgtctttccacggcctatcccgacatctcgggcctgctgctcaccggcggcctcgagcccgcagccaacgtccatcgcctcatcgaaggctggacgggcgtgcccatccccatcctgtcggtgaaggaccacacctacaagaccatccagacgctgaacgaactgtacggcaagatcgagccggacaacgaccgcaagatcaacacggccctcgccctgttcgagcgtcatatcgacagcagcgaactcggctcgcgcctgatcaaccgcaagtccagccgcatcacgcccaagatgttcgaattcaacctcatcgagaaggccaagcgcaaccgtatgcgcatcgtccttcccgaaggggccgaagagcgcatcctgcgtgccgccgacatcctcgtgcgccgcgaagtggccgacatcatcctgctgggcgatgccaacaccgtaggctcgcgcatcggcgacctcggcctcgacatggacggcgtgcagattgtccagccgaacctctcgcccaagttcgacgagtacgtcgcagcctaccacgagtgccgcaagaagaagggcatcagcatggagcaggcgcgcgacatgatgaacgaccccacctacttcggcactatgatggtgcacaagggcgatgccgacggcatggtctccggcgccatcaacaccaccgcacacaccatccgcccggccttcgagttcatcaagaccaagcccggcgtgtccatcgtgtcgagcgtgttcctgatgtgcctcaaggaccgcgtgctggtcttcggcgactgcgcagtgaaccccaaccccactgccgaacagctggccgaaatcgccatcagcgcctcgcacaccgcccgtatcttcggcgtcgacccgcgcgtggccatgctctcgtactccaccggcagttccggcaagggtgccgacgtggagaaggtcatcgaggccacccgcatcgccaaggagcgcgcccccgaactgctgctggaaggcccgctgcagtacgacgccgccatcgacatggatgtggcacgcaccaagctgcccggcagcactgtcgccggtcaggccaccgtgttcatcttccccgacctgaacaccggcaacaacacctacaaggcggtgcagcgcgccgccggtgccgtggccatcggcccggtgctccagggcctcaacaagcccgtcaacgacctctcccgcggctgcacggtggctgacatcgtgaacaccgtcgcgatcacggccatacaggcccaggccgaaaagggcctgatctaa

SEQ ID NO: 147879 - protein, 704 aa, Desulfovibrio vulgaris subsp. vulgaris str. Hildenborough
MSNNLYITATESKSGKSAVVLGMMQLLLRDVRKVAFFRPIINQASTDVRDHDINLILRHFGLDIAYEDTYAYSLQDARELINNGQHATLLDNILKKYKKLEDAYDFVLCEGTDFLGKDAAFEFELNADIAANLGCPVMVVANGQQKAARELIASTQLTIDLLDEKGLDVVTAVINRATVTEAEREEIIKSLECKVNCSNPLAVYVLPEESTLGKPTMNDVKKWLGAQVLYGHGRLDTLVDDYIIAAMQIGNFLDYVSQGCLVITPGDRSDIILSSLASRLSTAYPDISGLLLTGGLEPAANVHRLIEGWTGVPIPILSVKDHTYKTIQTLNELYGKIEPDNDRKINTALALFERHIDSSELGSRLINRKSSRITPKMFEFNLIEKAKRNRMRIVLPEGAEERILRAADILVRREVADIILLGDANTVGSRIGDLGLDMDGVQIVQPNLSPKFDEYVAAYHECRKKKGISMEQARDMMNDPTYFGTMMVHKGDADGMVSGAINTTAHTIRPAFEFIKTKPGVSIVSSVFLMCLKDRVLVFGDCAVNPNPTAEQLAEIAISASHTARIFGVDPRVAMLSYSTGSSGKGADVEKVIEATRIAKERAPELLLEGPLQYDAAIDMDVARTKLPGSTVAGQATVFIFPDLNTGNNTYKAVQRAAGAVAIGPVLQGLNKPVNDLSRGCTVADIVNTVAITAIQAQAEKGLI

SEQ ID NO: 147880 - DNA, 2163 bp, Acinetobacter sp. ADP1
  CDS (1)..(2163): transl_table=11
atgaatacaattttaatgatcccgactggcgaaggtgtcgggttaacttcagcctgtcttgggctgatttatgcactcgattgtaatggaattaaagcaggttttttaaagccattttcacaagaacttcccaatcaggttgatcgtacgacctcactgtttagccatctttttcaaggcaagacagtaacttctatttcacacgaaaaagtattgcaacgtcttgctttgggcgaacgagatgagcttcttgaagaagccgtgagtattcatcgtaatgttgcggcaaattatgatgtgattattgtggagggtttacttccaaacgcacaggatcattttgcgacagaactcaatgctgcactcgcacaagcactagatgccaaagtcgttttggttagtactgccgatgttcaaaacccacgccgtactgcggaaaaaattgaagctcacctgcatcactttggtggagtttcatccaatcgtaccgcaggtgtgctttttatgcgtacacgaggcttacctgaagaaacggcacaaatcccgcttactatagatccatcactccgcctcaatacagagattgcagcttttagccaagaattgcagcgctataaccgtaatctgggtacaaccaccctaccgatcattggtttagtgccttttagcaataccttgagcgtcccacgcacactggatattgcatccatcattgagggagactggattcatcaaggtgaagccagacatcgtcgtatcctgcactctagtctgatcgcctcgagtatcgaatatgaactgaacaaatttgttgcaggtgaactgatcatcagcgcatctgagcgaactgatgtcttgttggccagtagtctcgctacaagcaatggtattccactggctggtcttgtcctgactgaacgtaaagcacctaatccacaaattttggatttctgtcagcatgccatcaagcagggcttacctattttacatacacagctcaatacattagaaactgcgcagcgtcttgcagattttggcaatgaaattccagtggatgataccgaacgtgcggaacaagtgactcgctttgtttcgagtcatatcgacactgcatggctcaactcacaaatcaatactggtgtgcagccgcgcttatctccgtctgcatttcgtcatgagttggtgcaaaaatcaattgcagcaaaaaaacgtattgtacttcccgaaggtgatgagcctcggacagtacaagctgcagcaatctgccaatcacgtggtattgctcattgtatcttgcttgcaaaacctgaagctgtggtagaagtagccaaagcacggggtatcgagctgcctgatgatctggaaatcattgatccagatctaattcgtaaccaatacatcacaccgatggttgagctacgtaatggcaaacttaacgaattacaagccaaagaacagctacaagataccgtcgttttgggtaccatgatgctcgcacttgatcaggtggatggtttggtttcaggtgccattcataccacagcaaatacggtacgccctgcatttcaactgattaaaacagcacctgattactcattggtttcatcagttttctttatgttgttgccagatgaagtatatgtatatggtgactgcgcaatcaatccagatccagatgccgaccaactggccgaaattgcaattcagtctgcagattcagctaaagcctttggaattaaccctcgcattgcaatgatcagttattctactggtacttctggtgcaggagcagatgtagagaaagttgccaaagcaactgaaattgccaaacagcgtcgtccagatttattgatcgatggcccattacaatacgatgcagcctcggtagaaagtgtaggccgacaaaaagcaccagactctcaagttgctggacgggcaaacgtctttattttcccagacttaaatacagggaatacgacttataaagcggttcaacgctctgccaatgttgtgagtgtgggtccaatgctgcaaggcttgaataaacccgtaaatgatctgtctcgtggtgcattggtcgatgacattgtgtttaccattgccttaactgcgattcaggccgaacaacaacttgaagccaaagctgctgcgctagcgtcataa

SEQ ID NO: 147881 - protein, 720 aa, Acinetobacter sp. ADP1
MNTILMIPTGEGVGLTSACLGLIYALDCNGIKAGFLKPFSQELPNQVDRTTSLFSHLFQGKTVTSISHEKVLQRLALGERDELLEEAVSIHRNVAANYDVIIVEGLLPNAQDHFATELNAALAQALDAKVVLVSTADVQNPRRTAEKIEAHLHHFGGVSSNRTAGVLFMRTRGLPEETAQIPLTIDPSLRLNTEIAAFSQELQRYNRNLGTTTLPIIGLVPFSNTLSVPRTLDIASIIEGDWIHQGEARHRRILHSSLIASSIEYELNKFVAGELIISASERTDVLLASSLATSNGIPLAGLVLTERKAPNPQILDFCQHAIKQGLPILHTQLNTLETAQRLADFGNEIPVDDTERAEQVTRFVSSHIDTAWLNSQINTGVQPRLSPSAFRHELVQKSIAAKKRIVLPEGDEPRTVQAAAICQSRGIAHCILLAKPEAVVEVAKARGIELPDDLEIIDPDLIRNQYITPMVELRNGKLNELQAKEQLQDTVVLGTMMLALDQVDGLVSGAIHTTANTVRPAFQLIKTAPDYSLVSSVFFMLLPDEVYVYGDCAINPDPDADQLAEIAIQSADSAKAFGINPRIAMISYSTGTSGAGADVEKVAKATEIAKQRRPDLLIDGPLQYDAASVESVGRQKAPDSQVAGRANVFIFPDLNTGNTTYKAVQRSANVVSVGPMLQGLNKPVNDLSRGALVDDIVFTIALTAIQAEQQLEAKAAALAS

SEQ ID NO: 147882 - DNA, 2139 bp, Erwinia carotovora subsp. atroseptica SCRI1043
  CDS (1)..(2139): transl_table=11
gtgtcccgtataatcatgttgatccccactggcaccagcgttggtctgacaagcgtcagcctgggtgtcatccgctccatggaacaaaaaggcgttcgcctgagcgtgttcaaacctatcgcccagccacgcagtggcgacaatacgccagatcaaaccaccaccattattcgtgctaattccgccatcaacgccgccgagccgctggcgatgagtcgcgttgaagctttgctgagctccaaccagcaagacgtgctgatggaagaaatcatcgcgcgctaccacgaaaataccaaagatgctgaagtcgttctggttgaaggtctggttcctacgcgtaagcaccagtttgctaacgcgctgaactatgaaatcgccaaaacgctgaacgcagaaatcgtcttcgtactggcgctgggtaacgattccccggcacagttgaaagaccgcatcgaactggcacgctccagcttcggcggcagcaaaaacaaaaacatcactggcgtgatcatcaacaaactgaatgcgccagtagacgatcaaggccgtactcgccctgacctgtctgaaatctttgatgactccacgaaagccagcgttgccaacatcgatcctaagcaactgtttgctaacagcccgctgccagttctaggctgcattccgtggagcttcgacctgattgctacgcgtgccatcgatatggcgaagcacctgaatgcccgcatcgtcaatgaaggtgatattcagacgcgtcgcgttaagtctgtaaccttctgcgcacgcagcattcctcatatgctggagcatttccgtccgggttcactgctggtgacctccgccgaccgtcctgacgttctggttgctgcttgcctggctgccatgaacggcgtggaaatcggtgccctgctgctgactggcggctacgaaatggacccaagcattgccaagctgtgcgaacgcgccttccagactggcctgccagtattcatggttgacaccaacacctggcagacctcactcagcctgcaaagcttcaaccttgaagtaccggctgatgaccgtcagcgtgtcgagaaagtgcaggaatatgtcgcacgccacatcgacacccagtggatcgattccctgagcgctgagtctgagcgttcacgtcgtctgtctccgccagcgttccgctaccagttgaccgaactggcgcgcaaagcgggcaaacgtatcgttctgccagaaggtgatgaaccacgtaccgttaaagcagcgtctatctgtgctgaacgcggtattgcacactgtgtactgatcggtaacccagaagaaattcaacgtgttgccgcagctcagggcgtagaactgggcaaaggcatcgaaatcgtcgacccgattgtcgtacgtgagcgctatgttgcacgtctggttgaactgcgtaagagcaagggcatgaccgaagtggttgcgcgcgaacagctcgaagacaacgtggttctgggcacgctgatgttggaacagggtgaagttgacggtctggtttctggtgccgttcataccaccgctaacaccatccgtccgccgttgcagctgatcaaaacctcaccaggcagctcgctggtgtcttccgtgttcttcatgctgctgcctgagcaggttctggtctacggcgactgcgctatcaacccagatccaaccgcagagcaactggctgaaatcgctatccagtctgctgactccgctaccgcattcggtatcgacccacgtgttgcaatgatctcctactctaccggtaactccggcgcgggtagcgatgttgagaaagtgcgtgaagcgacccgtctggcgcaggaaaaacgtcctgatctggtcatcgatggtccgctgcaatacgacgccgctatcatggcagacgttgcacagtccaaagcaccgaactcacctgttgcgggtaaagctaccgtgttcatcttccctgatctgaacaccggtaacaccacgtacaaagcggtacagcgttctgccgacctgatctccatcgggccaatgctgcaaggcatgcgcaaaccggttaacgacctgtctcgtggcgcactggtagacgatatcgtttacaccgtcgctctgaccgcaattcaggctacacagctctaa

SEQ ID NO: 147883 - protein, 712 aa, Erwinia carotovora subsp. atroseptica SCRI1043
MSRIIMLIPTGTSVGLTSVSLGVIRSMEQKGVRLSVFKPIAQPRSGDNTPDQTTTIIRANSAINAAEPLAMSRVEALLSSNQQDVLMEEIIARYHENTKDAEVVLVEGLVPTRKHQFANALNYEIAKTLNAEIVFVLALGNDSPAQLKDRIELARSSFGGSKNKNITGVIINKLNAPVDDQGRTRPDLSEIFDDSTKASVANIDPKQLFANSPLPVLGCIPWSFDLIATRAIDMAKHLNARIVNEGDIQTRRVKSVTFCARSIPHMLEHFRPGSLLVTSADRPDVLVAACLAAMNGVEIGALLLTGGYEMDPSIAKLCERAFQTGLPVFMVDTNTWQTSLSLQSFNLEVPADDRQRVEKVQEYVARHIDTQWIDSLSAESERSRRLSPPAFRYQLTELARKAGKRIVLPEGDEPRTVKAASICAERGIAHCVLIGNPEEIQRVAAAQGVELGKGIEIVDPIVVRERYVARLVELRKSKGMTEVVAREQLEDNVVLGTLMLEQGEVDGLVSGAVHTTANTIRPPLQLIKTSPGSSLVSSVFFMLLPEQVLVYGDCAINPDPTAEQLAEIAIQSADSATAFGIDPRVAMISYSTGNSGAGSDVEKVREATRLAQEKRPDLVIDGPLQYDAAIMADVAQSKAPNSPVAGKATVFIFPDLNTGNTTYKAVQRSADLISIGPMLQGMRKPVNDLSRGALVDDIVYTVALTAIQATQL

SEQ ID NO: 147884 - DNA, 2130 bp, Leifsonia xyli subsp. xyli str. CTCB07
  CDS (1)..(2130): transl_table=11
gtggcaaggtcgctctacatcacctcggccgaggggcacaccggcaaatcgacggtcgctctcggcgtgctggaggcgttgcggcactcggtcgaacgggtcgcggtgttccggccgatcgcccgctccacggtcgagcgcgactacgtgctcgatctgctgctcactcgcgtgaccgcgcagatcggctacgaggaggcggtcggcgtcagctacgaggacgtccacgcggacgcggacgcggcgctcggcgaaatcgtccggcggttccgggctgtggaggccaaagccgacgccgtcgtcatcctcggctcagactacaccgatgtcggcagcccgaccgagctcggctataacgcgcgtatcgccgcgaatctgggcgccccggcgctgcttgtgctcggcggacgggtcggccagggcttcggggagcgtctcgggcaggctgacccgcgctctccggaggagctgcggcagctggcggagctcgccgtcgccgagcttcgcgccgagcacgccggactgctcgcggtggtcgcgaaccgcgcggacagcgatcggctggagacgatcgtcgaagcggtcggcgaagcggtggccgcgggtgccccggctcagggcgcccggccgcaggtgtgggccatcccggaagaccccttcctcgtcgcgccgagcatccgctcgatcatggaggtcaccgccggcgagctgctcgccggcgaccgcgagctgctggcgcgtgaggcgctgggcgtggtcgtggcgggcatgtcgatgaacaatgtgctgcctcgtctggtggagggggcggtcgtggtggtccctggcgaccgcaccgaggtcctgctcgccgtgctgatggcgaacgcgtccggaacgttctcctctgtcgccgggatcgtgctcaacggcggcttcgagctgcccgagccgatcgagcgcctgctggcgggtctgcgctcgccgctgccgatcgtttacacgtggctcgacacctacgagacggtggtccgcatcacgcacgcgcgcggccggctggccgcggactcgcagcggaagtacgacacagcgctcgccctgttcgagcggcatgtggatgccggggcgctgctcgcgcgcctcgatgtcacccgtcacgaggtcgtgacgccgctgatgttcgagtacgacctgatcgagcgcgcccgcgccgccgacaagcacatcgtgctgccggagggggaggacgaccgcatcctgcgcgccgctgcgaccctgcttgcccgcggtgtggcccggctcaccatcctcggcgagccgttcgaggtgcgttcgcgcgcgatcgagatcggtctggacatctccggcgcggaggtgctcagcccgttcgacgatgtgctgcggctgcgcttcgcgcacgagtacgccgaactgcgcgcacacaagggcatcacggtcgatcaggcgtcggacacggtgacggacccgtcctacttcggcacgatgatggtccacgctgggctcgccgacggcatggtgtcgggggccgcgaacacgacggcgcacaccatccgcccggcgttcgagatcatcaagaccagcccgagcgtctcggtcgtgtcgagcgtgttcctgatggcgctcgccgaccgggtgctcgtctacggcgactgcgcggtcatcccggacccgaccgccgagcagctcgccgacatcgcggtctcctcggcgcgaaccgccggccagttcggcatcgagccgagggtggcgatgctctcctactcgaccggcgactcgggcacgggggcggatgtggacaaggtgcgcaccgcgacggcgctcgtccgcgaccgggcgccgcagctcccggtggccgggccgatccagtacgacgccgccgcggacgccgcggtcggcgccgccaagatgcccggctcggaggtggccggccgcgccacagtgttcgtcttcccggacctcaacaccgggaacaacacctacaaggcggtccagcgcagcgccggggccgtcgccatcggcccggtgctgcagggcctcagaaagccgatcaacgacctctcgcgcggggcgacggtggacgacatcgtcaacacggtcgcgatcacggccatccaggcggccctgtcgtga

SEQ ID NO: 147885 - protein, 709 aa, Leifsonia xyli subsp. xyli str. CTCB07
MARSLYITSAEGHTGKSTVALGVLEALRHSVERVAVFRPIARSTVERDYVLDLLLTRVTAQIGYEEAVGVSYEDVHADADAALGEIVRRFRAVEAKADAVVILGSDYTDVGSPTELGYNARIAANLGAPALLVLGGRVGQGFGERLGQADPRSPEELRQLAELAVAELRAEHAGLLAVVANRADSDRLETIVEAVGEAVAAGAPAQGARPQVWAIPEDPFLVAPSIRSIMEVTAGELLAGDRELLAREALGVVVAGMSMNNVLPRLVEGAVVVVPGDRTEVLLAVLMANASGTFSSVAGIVLNGGFELPEPIERLLAGLRSPLPIVYTWLDTYETVVRITHARGRLAADSQRKYDTALALFERHVDAGALLARLDVTRHEVVTPLMFEYDLIERARAADKHIVLPEGEDDRILRAAATLLARGVARLTILGEPFEVRSRAIEIGLDISGAEVLSPFDDVLRLRFAHEYAELRAHKGITVDQASDTVTDPSYFGTMMVHAGLADGMVSGAANTTAHTIRPAFEIIKTSPSVSVVSSVFLMALADRVLVYGDCAVIPDPTAEQLADIAVSSARTAGQFGIEPRVAMLSYSTGDSGTGADVDKVRTATALVRDRAPQLPVAGPIQYDAAADAAVGAAKMPGSEVAGRATVFVFPDLNTGNNTYKAVQRSAGAVAIGPVLQGLRKPINDLSRGATVDDIVNTVAITAIQAALS

SEQ ID NO: 147886 - DNA, 2133 bp, Desulfotalea psychrophila LSv54
  CDS (1)..(2133): transl_table=11
atgacacaaaatctctacataacagccacagaagagcgtagcggcaagtcagtaattgtccttggtgttatgcaaatgctgatgaaagaagtccggaatgttgccttcttccgtcccattattagcgacacagagcccggcgatgacgatccagacattaatttagtgctcgattattttgatttggatattccctatgaggacacctatggctgtaccctctccaaggcctatgagctcattaactccggcaaagaggatcagcttcacgaccttattttaaagaaatacaagaaacttgaggctgatcacgatttcattctctgtgagggcactgatttcagaggatcagacacctcctttgaggcagaaatcaatgccgatatagcagccaacctcggagcccctcttcttcttgttctctccggccgtaaaaagatcgaaaaagagataatgcaggcaacccagctctccattgatactatgctggaaaaaggtagctcctttgccgcctgcataattaatcgggcagcagaaactatcacccctgaaactttccacaaattacaggcaaaaaaccgcgccctctctcgcattcccttttatgtaatgcctgagaattcgaaccttgccagtcccagcgtgatggatgttaaaaagtggttagatgcatcggtcatgcacggctctgaaaagcttgccggcctggtggaaaactatgtggttgccgccatgcaaattggcaacttcctcgaccatatcaagccgggaagctgcgttattaccccaggtgatcgctcggatatcattttggccagtctcgcctccaaggcatcatctacctatccggacatttccggaattgtcctcaccggcgatatgaaacctgctgaaagcgttcaaaagctcatcgagggttggcagggcacccccactcccattctctccgtggccaccaacacctatcaaacgatcatgcgcctcaatgagctctatagccatatccaggcaagtgactcacagagaatagcaaccgctctgggaactttttccaagcatgttgataccaaagagcttaccgaacatctgatatcgagtataccgaccaccatcaccccgaagatgtttgaatatgccctgatggaaaaagccagccaggacaaacaacgcattgtcctacccgagggcacctgcgagcgcatacttcgagcagcggatatcttactgagacgcggcgttgccaatctcaccctgctgggacccgcagatgaggttaagagccgcgccgctgcctgtggcatggatacacgttgggtggaaattattgatccacaaaacaccaaccttctcgctcccttcgtagatgaatatatgaaggcccgagcccataagggcatgattgaagatatcgcccgggacagaatgacagaccctacctattttggcaccatgatggttcatacaggctatgccgacggcatggtctcaggggcagagaacaccaccgcccataccattcgtccagcctttgaatttatcaagactaaacccggtatatccacggtctcctcggtcttcctcatgtgcctcagtgaccgggtactcgtctatggtgactgtgccgtaaatccaaatcctacagccaaacaacttgccgagatcgccctcagctcagccgaaactgcccgtctcttcggcattgaaccccgagtggccatgctcagctattcaacgggatcatccggtaagggcgaggatgtcgagagagtcatagaggcaaccaaaattgctcaggctctgatcattgagcgcaagctcgatataaatcttgagggccccatccaatacgatgcggctattgatccggatgttgcccggaccaaactgcctaattccttagtggcaggcaaggcgacagtctttaccttccctgacctcaacacaggaaacaacacctacaaggcagtacagagagctgcaggtgccgttgccattggccccatcctgcagggattgaacaagcctgtaaatgatctttccagaggatgcaccgtggacgacattgttaatacggtagcaattaccgccattcaggctcaagaagagaagagactttttgccctgaaaaaatag

SEQ ID NO: 147887 - protein, 710 aa, Desulfotalea psychrophila LSv54
MTQNLYITATEERSGKSVIVLGVMQMLMKEVRNVAFFRPIISDTEPGDDDPDINLVLDYFDLDIPYEDTYGCTLSKAYELINSGKEDQLHDLILKKYKKLEADHDFILCEGTDFRGSDTSFEAEINADIAANLGAPLLLVLSGRKKIEKEIMQATQLSIDTMLEKGSSFAACIINRAAETITPETFHKLQAKNRALSRIPFYVMPENSNLASPSVMDVKKWLDASVMHGSEKLAGLVENYVVAAMQIGNFLDHIKPGSCVITPGDRSDIILASLASKASSTYPDISGIVLTGDMKPAESVQKLIEGWQGTPTPILSVATNTYQTIMRLNELYSHIQASDSQRIATALGTFSKHVDTKELTEHLISSIPTTITPKMFEYALMEKASQDKQRIVLPEGTCERILRAADILLRRGVANLTLLGPADEVKSRAAACGMDTRWVEIIDPQNTNLLAPFVDEYMKARAHKGMIEDIARDRMTDPTYFGTMMVHTGYADGMVSGAENTTAHTIRPAFEFIKTKPGISTVSSVFLMCLSDRVLVYGDCAVNPNPTAKQLAEIALSSAETARLFGIEPRVAMLSYSTGSSGKGEDVERVIEATKIAQALIIERKLDINLEGPIQYDAAIDPDVARTKLPNSLVAGKATVFTFPDLNTGNNTYKAVQRAAGAVAIGPILQGLNKPVNDLSRGCTVDDIVNTVAITAIQAQEEKRLFALKK

SEQ ID NO: 147888 - DNA, 2139 bp, Mannheimia succiniciproducens MBEL55E
  CDS (1)..(2139): transl_table=11
atgtcacgtacaattatccttattccaatcagcgcaggcgtaggtttaacaagtgtaagtctcgggcttattcgtgcattagaacaaaaagggactaaaatcggtttcatgaagccgatttcacaacctcgttccggtgaagatatgcttgatagaacaacctcaattgttcgcacaagcacgacaatcgaaactaccgaacctgttatgctaagtgaggctgaaaatttaatcggtcaaaaccaaacagacgttttattagaaaaaattgttgcccagcatcaacaaatcagcaaagacaatgatatcgtgatcgtcgaaggtttaattccttcccgcaaaaactcttatgctaacagtgtaaactacgatatcgcgcaagcactggatgccgaaatcattttagtttccgcgcctgcaaccgaaacgcccgctcaattaaaagagcgcgttgaagcggccgccgcctcattcggcggtaaaagcaatcctaatttacttggtgtggttattaataaatttaatgcgccggttgatgaatcgggtcgtacccgtccggatttaacggaaattttcgattcattccagcatagtcacaataatatcaaagaaatttacaaactatttgaaaacagcccgattaaagtattggcttgtattccttggtctgcagatttaattgctacccgtgcgattgatttggtaaaacatttgggcgcttctattcttaacgaaggcgatatgaaccgtcgtatccgcagtatcactttctgcgcaagaacgctgcctaatatgattgaacacttcaaagcgggcagcttgctggtagtttccgccgaccgccctgaaattttaaccgcagccgcgttagccgctactacaggtattgaacttggcggtattttattaaccggcggttacaaaatagattgcgaaatcaaaaaattatgtaacccgacattcgaaaataccaaattaccggtattccgtattgaaggtaacacttggcaaacggctttaagcttacagagttttaatcttgaagtaccggttgacgataaagaacgtatcgaaaatatcaaacaatataccagcggacaatttgatgcggatttcattcattcactggcttccgcttccgtgcgtgcccgtcgtttatctccgccggcattccgttatcaattaaccgagttagcgcgtgcggcgaaaaaacgtattgttttgcctgaaggtgacgaacctcgtacgattaaagcggcggtactttgtgcagaacgcggtattgcggaatgcgtattattggcgaaacctgaagacgtaaaacgtgttgccgattctcaaggcgtgaaattaggtaacggaattaccgttatcgatcccgcttcagttcgtgaaaactatgtcgctcgtttagtagaactgcgtaaagcaaaaggtatgactgaaatggcagcccgcgaacaactggaagacaccgttgtattaggtacaatgatgttagaagccggcgaagtagacggtttggtatccggtgcggtccatactactgcaaatacgattcgtccgccgatgcaaattatcaaaaccgctcccggtagttcgattatttcatcgatcttcttcatgttgttaccggatcaagtattagtatatggtgactgtgcggttaacccggatccgactgcggaacaattagcggaaattgctattcaatctgcggaatcggcgaaatccttcggtattgaccctcgcgttgctatgatctcttactcaaccggcacatcaggctccggcgcagatgttgaaaaagtgaaagaagcgactcgtatcgcacaggaaaaacgccctgatttattaatcgacggtccgttacaatatgatgccgccgtaatggaagatgttgcgcgttctaaagcgccgaattctaaagtagccggtaaagcgaccgtatttgtattccctgacttaaatacgggtaatacgacttataaagcggttcaacgttctgccgatttagtatcaatcggtccgatgttacaaggtatgcgtaaaccggtgaacgacctttcccgcggtgcattggttgacgatatcgtctataccatcgcattaacggcaattcaggcgacacaatgctaa

SEQ ID NO: 147889 - protein, 712 aa, Mannheimia succiniciproducens MBEL55E
MSRTIILIPISAGVGLTSVSLGLIRALEQKGTKIGFMKPISQPRSGEDMLDRTTSIVRTSTTIETTEPVMLSEAENLIGQNQTDVLLEKIVAQHQQISKDNDIVIVEGLIPSRKNSYANSVNYDIAQALDAEIILVSAPATETPAQLKERVEAAAASFGGKSNPNLLGVVINKFNAPVDESGRTRPDLTEIFDSFQHSHNNIKEIYKLFENSPIKVLACIPWSADLIATRAIDLVKHLGASILNEGDMNRRIRSITFCARTLPNMIEHFKAGSLLVVSADRPEILTAAALAATTGIELGGILLTGGYKIDCEIKKLCNPTFENTKLPVFRIEGNTWQTALSLQSFNLEVPVDDKERIENIKQYTSGQFDADFIHSLASASVRARRLSPPAFRYQLTELARAAKKRIVLPEGDEPRTIKAAVLCAERGIAECVLLAKPEDVKRVADSQGVKLGNGITVIDPASVRENYVARLVELRKAKGMTEMAAREQLEDTVVLGTMMLEAGEVDGLVSGAVHTTANTIRPPMQIIKTAPGSSIISSIFFMLLPDQVLVYGDCAVNPDPTAEQLAEIAIQSAESAKSFGIDPRVAMISYSTGTSGSGADVEKVKEATRIAQEKRPDLLIDGPLQYDAAVMEDVARSKAPNSKVAGKATVFVFPDLNTGNTTYKAVQRSADLVSIGPMLQGMRKPVNDLSRGALVDDIVYTIALTAIQATQC

SEQ ID NO: 147890 - DNA, 2091 bp, Pseudomonas syringae pv. syringae B728a
  CDS (1)..(2091): transl_table=11
atgcagactttttttatcgcccccactgactttggcgtggggttgacctccatcagcctgggactggtgcgcacgctggagcgcgctggtttgaaagtaggctttttcaaaccgatcgcccagccacatcccggcgatctgggccccgagcgctcgaccgaactgatggctcgcacccatggcctcaaaccgcccaagcctctgggactggcgcatgtcgagcgcatgctcggtgatggtcaactggatgaactgctcgaagagatcatcaatctttatcagcaggcagctgtcggcaaggacgtgctggtcgtcgaaggcatggtcccgacccgcagcgcgagctatgccgcacgggtcaatctgcatttggccaagagcctggatgccgaagtcattctggtctctgctccggaaaacgaagtgctcgccgatctgtcgggcagggtcgaattgcaggcccagctgtttggcggccccaaggatcccaaggtgctgggcgtgatactcaacaaggtgcgcaccgaagaaagcatggaagtcttcgcctcgcgcctgaaagagcactcccccttgctgcgcagcggcgactttcgcctgctgggctgcattccgtatcgcgccgaactcaacgcgccgcgtacccgcgatgtggccgagctgctcggcgcgcaggtgctgaacgcaggcgactatgatcagcgccgcatgaccagaatcatcatttgtgcgcggaccgtgctcaacacggttccactgctcaagccgggtgttctggtggtgacgccaggcgaccgcgacgacatcatcctggcggtgagccttgcggcaatcaacggcgtaccgctggccggcctgctgctgaccagcgataccgtgcccgacccacgcatcatggagctgtgccgcggcgcactgcaggcggggctgccggtgctgtcggtcagcagcggttcgtatgacacggccaatcgcctgaatcagttgaacaaggaaatccccatcgatgaccgcgagcgcgcggaaaacatcaccgacttcgttgccagtcatctggacgccaactggctgcaccagcgctgcggcacaccccgtgagctgcgcctgtcgcccgcggtgtttcgctatcagttgatccagcgcgcgcaggcggccaacaagcgcatcgtgctgcctgaaggcaacgaaccgctgaccattcaggctgccgccatctgccaggcgcgcggtatcgcgcgttgcgtgttgctggccaggcccgaggaagtgcatgccgttgcgcaggcgcacggcatcgagctgccgcaggggctggaaattcttgacccggacctgattcgtgaacgctacgttgcgccgatggtggaactgcgcaaaagcaaaagcctgaacgcgcccatggctgagcaacagctcgaagacccggtggtgatcggtacggtgatgctcgcgctggatgaggtcgacgggctggtgtccggcgtcattcactccactgccaacaccatccgcccggccctgcaactgatcaagaccgcgccaggctgcacgctggtgtcttcagtgttcttcatgctctttcccgagcaggtgctgatgtacggcgactgcatcatgaacccgcatccgagtgccagcgagctgtccgagattgccttgcagagcgccgattcggccactgcgttcggcatctcgccgcgtgtggcgatgatcagctattccagcggcaactcggccagcggcgaagaagtcgaaaaggtccgcgaagcgacgcaactggcacgcgaaacccgacgcgatctattgatcgacgggccgctgcagtatgatgcggccgccaacgaacaggtcgcccggcagctggctccagacagcgcggtcgcaggacgcgccaacgtgttcgtgttccccgacctgaacaccggcaataccacgtacaaggcggtgcaacgcagtgccgactgtgtgagcctcggcccgatgctgcagggcctgcgcaaaccggtaaacgatctgccgcgcggcgcgcaggtcgacgacattgtctacaccatcgcgctgacagccatacaggccgacacgctgtcctga

SEQ ID NO: 147891 - protein, 696 aa, Pseudomonas syringae pv. syringae B728a
MQTFFIAPTDFGVGLTSISLGLVRTLERAGLKVGFFKPIAQPHPGDLGPERSTELMARTHGLKPPKPLGLAHVERMLGDGQLDELLEEIINLYQQAAVGKDVLVVEGMVPTRSASYAARVNLHLAKSLDAEVILVSAPENEVLADLSGRVELQAQLFGGPKDPKVLGVILNKVRTEESMEVFASRLKEHSPLLRSGDFRLLGCIPYRAELNAPRTRDVAELLGAQVLNAGDYDQRRMTRIIICARTVLNTVPLLKPGVLVVTPGDRDDIILAVSLAAINGVPLAGLLLTSDTVPDPRIMELCRGALQAGLPVLSVSSGSYDTANRLNQLNKEIPIDDRERAENITDFVASHLDANWLHQRCGTPRELRLSPAVFRYQLIQRAQAANKRIVLPEGNEPLTIQAAAICQARGIARCVLLARPEEVHAVAQAHGIELPQGLEILDPDLIRERYVAPMVELRKSKSLNAPMAEQQLEDPVVIGTVMLALDEVDGLVSGVIHSTANTIRPALQLIKTAPGCTLVSSVFFMLFPEQVLMYGDCIMNPHPSASELSEIALQSADSATAFGISPRVAMISYSSGNSASGEEVEKVREATQLARETRRDLLIDGPLQYDAAANEQVARQLAPDSAVAGRANVFVFPDLNTGNTTYKAVQRSADCVSLGPMLQGLRKPVNDLPRGAQVDDIVYTIALTAIQADTLS

SEQ ID NO: 147892 - DNA, 2100 bp, Pseudomonas fluorescens Pf-5
  CDS (1)..(2100): transl_table=11
atgcaaacttttttcatcgcgcccaccgattttggagtgggtctgacctccatcagcctcgggctggtgcgtacgctggaacgggctggcctcaaggtcggcttcttcaaacccatagcccaacctcaccccggtgacaccggccccgagcgttccaccgaactggtggcgcgcacccatggcctgaaaccgccacaacccctgggcctggcccatgtggagcggatgctcggcgacggccagctggatgagttgctggaagaaatcatcaccctctaccagcaggcggccatcggcaaggatgtattgatcgtcgaaggcatggtgccgacccgcagtgccagctacgccgcccgggtcaacctgcacctggcaaaaagcctggatgccgaggtgatcctagtatccgccccggaaaacgaagtgctcaccgagctgtccggacgggtcgagttgcaggcccagctgttcggcggcccgcgggacccgaaagtgctgggggtgatcctcaacaaggtgcgcaccgacgaaagcatggaggcgttttccgcgcgcttgaaggaacattcgcccttgctgcgcagcggcgacttccgcctgctgggctgcattcccttccaaccggaactgaacgcgccgcgcacccgtgacgtagcggacctgatgggcgcccaggtgctcaacgccggcgactacgaaagccggcgcatgaccaagatcatcatttgcgcccgcaccatgcgcaacaccgtggaactgctcaagcccggcgtgctggtggtgaccccgggcgaccgtgacgacatcatcctcgccgtgagcctggcggccatcaacggcgtgcccctggccggcctgctgctgaccagcgacaccctgcccgacccgcggatcatggagctctgccggggcgccctgaacgccggcctgccagtgctttcggtgagcaccgggtcctacgacaccgccaaccagctcaatggcctgaacaaggaaattcccatcgatgaccgcgagcgcgcggaaatcatcaccgacttcgtcgccagtcatctggacgccaactggctgcaccaacgctgcggcaccccgcgggaaatgcgcctgtcgccggcagtgttccgctatcagttgatccagcgggcacaggaagccaacaagcgtatcgtcctgcccgaaggcagcgagccgctgaccgtgcaggccgccgccatctgccaggcccggggcatcgcccgctgcgtgctgttggccaagcccgaggacgtgcacgcggtggcccgggcccagggcatcgaactgcccgaaggcctggagattctcgacccggacctgattcgccaacgctatgtggagcccatggtggccctgcgcaagagcaagagcctcaacgctcccatggccgagcagcagctggaagatccggtggtgatcggcacggtgatgctggccctggatgaagtcgatggcctggtttccggggtcatccactccactgccaacaccatccgcccggccctgcagttgatcaagaccgcgccgggctgcagcctggtgtcctcggtgttcttcatgctgttccccgaggaagtgctggtgtatggcgactgcgtgatgaacccgcaccccagcgccagcgagctggcggaaatcgccctgcagagcgccgactcggcagccgccttcggtatcaccccgcgcgtggcgatgatcagctactccagcggcgactcggccagcggcgaggaagtggagaaagttcgcgaagccaccctgctggcccacgaagcccagcgttcgctgctgatcgacgggccgttgcaatacgacgccgcggccaacgaaaacgtcgcccggcaactggcccctaacagccaggtcgcgggcaaggccacagtcttcgtgttccctgacctcaacaccggcaacaccacccacaaggcggtgcaacgcagcgccgattgcgtgagcctggggccgatgctgcaaggcctgcgcaagccggtgaacgacctgccccggggcgcccaggtggacgacatcgtctacaccatcgcccttaccgcgattcaagccgccaaccgacctatggatgtctaa

SEQ ID NO: 147893 - protein, 699 aa, Pseudomonas fluorescens Pf-5
MQTFFIAPTDFGVGLTSISLGLVRTLERAGLKVGFFKPIAQPHPGDTGPERSTELVARTHGLKPPQPLGLAHVERMLGDGQLDELLEEIITLYQQAAIGKDVLIVEGMVPTRSASYAARVNLHLAKSLDAEVILVSAPENEVLTELSGRVELQAQLFGGPRDPKVLGVILNKVRTDESMEAFSARLKEHSPLLRSGDFRLLGCIPFQPELNAPRTRDVADLMGAQVLNAGDYESRRMTKIIICARTMRNTVELLKPGVLVVTPGDRDDIILAVSLAAINGVPLAGLLLTSDTLPDPRIMELCRGALNAGLPVLSVSTGSYDTANQLNGLNKEIPIDDRERAEIITDFVASHLDANWLHQRCGTPREMRLSPAVFRYQLIQRAQEANKRIVLPEGSEPLTVQAAAICQARGIARCVLLAKPEDVHAVARAQGIELPEGLEILDPDLIRQRYVEPMVALRKSKSLNAPMAEQQLEDPVVIGTVMLALDEVDGLVSGVIHSTANTIRPALQLIKTAPGCSLVSSVFFMLFPEEVLVYGDCVMNPHPSASELAEIALQSADSAAAFGITPRVAMISYSSGDSASGEEVEKVREATLLAHEAQRSLLIDGPLQYDAAANENVARQLAPNSQVAGKATVFVFPDLNTGNTTHKAVQRSADCVSLGPMLQGLRKPVNDLPRGAQVDDIVYTIALTAIQAANRPMDV

SEQ ID NO: 147894 - DNA, 2157 bp, Psychrobacter arcticus 273-4
  CDS (1)..(2157): transl_table=11
atgcaaactattttacttgtgcccatcagccgcggtatcggtgtgacatcagcagctttgggcttgattcgtgcttttgattataacggtatcaaagcgggttttatgaagccgtttttacaagatgatgctctggataagcaaaacagtttagacagttcaagcgccttggccatgcatgcttttgggctaaagccacctaaatctatcagccgtcaacatgttgagcgcatgattggcgatgacaatcttgatgacttaatggaagaggtggtcgttaattatcataccctcggtgatgactacgatgtagtgatctgcgaaggcttagtaccgacgactgaaacttcttatgcctcacaaatcaaccgggcgattgcccatgcattagatgccagaatcatctttgttagcaccgctgataccagtaagcctgcctatttggccgataagcttgatgtccatgctcgtgaatttggtggtatggcaagtgatcgtatgcttggctgtatcttgatgcgtatgcatgatttgccgaatacgcaaagcaccttagaaaatcaaatcgttgcccctggtgaagcgattgtgagtttggacagcggctttatacaagaagtccagcgcctatcgccgcacttcaatagcgaacaattccgcttaattggtgtcgtaccgtttagtgattcgctatcagtaccgcgtacttgggatatcgctgctgagcttgacgccacttggctgaatgttggtgaggcaaaatcgcgccgcatcaatcgcattagcttgactgcgcgctcggttgcacgtgtcgatgaagtgttcaaacggggcacgcttatcgtggtgccgggcgaccgcgacgatttattgttggcagctggcctggcctgtatcaatggtgttccgctagcaggattggtattgaccggtggcgtgttaccaagctcaacagtggccgagctttggcaatctgcgctgaaaactggtattccagtaatgagtgtcgagacggacagctatgagacggtacaaaacctggtacacatgagtgctgagattccaagcgatgatacggaacgtgccgaggaagtggctcgctatgtcgctgcgcatttagatcttagctggattaaagcatattttagccaaaatcatgagccgcgtttgtcaccttctgctttccgtcatcaagtggtcaaaaaagcgcaaattgccaaaaaacgtatcgtgctaccagaaggctctgagccgcgtacggtagaggcggcctgtatctgtcaaagccgtggtatcgccaactgtgtgctactcgctaagcgtagcgatgtcgaacaagtcgctaaaaaccgcgacttagtattaccagaagggcttgagattattgatcctgatagcttagatatgagcaaatatatcgctgcagtagtcgagcgccgtaaaggtaaaaccagcgcagaagtggctgctgaatatctgcaagataccgtttatctaggtacgactatgctgcagatggatgaagtcgatggcttggtctctggtgcgatacataccacggcgaataccgtccgcccagcgtttcagttgattaaaacggcaccggagtattcactcgtatcgtcaattttctttatgctgttgccggagcaagtggtggtctatggtgactgcgcgatcaaccctaatccaaatgcggaagagctggctgagattgccattcagtctgcgcaatcagccgccgcctttggtattgatccaaaagtggcgatgattagctactctactggctcatcaggaatgggtgcagacgtcgaaaaagttacccgtgcgacccaaatcgtccgtgaacgtgcaccgaatctaaaagtcgatggaccgctacagtatgacgccgcttctgtcatgagcgtcggcaagcaaaaagcccctgactcgccagttgcaggtcaagcaaacgtctttatcttccctgacctgaatacgggtaataccacttataaagcggtacaacgtagtgccaatgtggtcagtgtcggaccgatgttgcaaggcttaaataaaccggtcaatgacttgtcacgtggtgccttggtcgatgatattatctataccatcgccctcactgccattcaggcgcatagcgacgttatttaa

SEQ ID NO: 147895 - protein, 718 aa, Psychrobacter arcticus 273-4
MQTILLVPISRGIGVTSAALGLIRAFDYNGIKAGFMKPFLQDDALDKQNSLDSSSALAMHAFGLKPPKSISRQHVERMIGDDNLDDLMEEVVVNYHTLGDDYDVVICEGLVPTTETSYASQINRAIAHALDARIIFVSTADTSKPAYLADKLDVHAREFGGMASDRMLGCILMRMHDLPNTQSTLENQIVAPGEAIVSLDSGFIQEVQRLSPHFNSEQFRLIGVVPFSDSLSVPRTWDIAAELDATWLNVGEAKSRRINRISLTARSVARVDEVFKRGTLIVVPGDRDDLLLAAGLACINGVPLAGLVLTGGVLPSSTVAELWQSALKTGIPVMSVETDSYETVQNLVHMSAEIPSDDTERAEEVARYVAAHLDLSWIKAYFSQNHEPRLSPSAFRHQVVKKAQIAKKRIVLPEGSEPRTVEAACICQSRGIANCVLLAKRSDVEQVAKNRDLVLPEGLEIIDPDSLDMSKYIAAVVERRKGKTSAEVAAEYLQDTVYLGTTMLQMDEVDGLVSGAIHTTANTVRPAFQLIKTAPEYSLVSSIFFMLLPEQVVVYGDCAINPNPNAEELAEIAIQSAQSAAAFGIDPKVAMISYSTGSSGMGADVEKVTRATQIVRERAPNLKVDGPLQYDAASVMSVGKQKAPDSPVAGQANVFIFPDLNTGNTTYKAVQRSANVVSVGPMLQGLNKPVNDLSRGALVDDIIYTIALTAIQAHSDVI

SEQ ID NO: 147896 - DNA, 2121 bp, Colwellia psychrerythraea 34H
  CDS (1)..(2121): transl_table=11
atgccacatagaattatgttaatccctgttggctcaggtgtcggcttaaccagcgtatcgttaggtttattacatgcctgtcagcaaaaaggaattaaagtaggacacttcaaacccattagccaaccttcgaggaacagcttagctaaaaaaaacaaaacaattgatgccattagcctgtctcaaaatagcactagcgtttcgcttagttatgtagaggggaaaatgggcgatggacttcacgatgttgttttagaagaaatcgttgcgaatttcaatgcgtttaaagaagatcacgacgtcatcattattgaaggtctagtccctacaccaagacaaccttatgctggtcgcattaaccgtgatgtagctcaagcacttggggcaaatattgtcttagttgctagcccgggaaatgacagcgccgaagaatttgaagatagacttgaagtcagtgccgagacctatggtggtataaagaaccgacacctcattggttgtgttatcaacaagctcaattgccctgaccaagaagaatttggtttattacccaaagaagaagaaattgaaaatgattttaatctaaaccattggttagatttatcaatttttaaaggcagacactttgatttacttggcacggttcaatgggaaattgatctcatcgctccacgtgtttgtgatatcagtaactaccttgaagctaaagtaattaataatggcgatatggaacatcgtcgttttcgcagtgtcgcattttgcgcccgaaccgtatcaaacctagtgagttacttggttcctggtcgactcattgttacgccaggtgatcgcaccgatattattattgctgcctgtttatccgcgttaaatggtactaaattaggtgggttgattttaaccaatggctttgaaccatccgagcaagtttgggagctatgtaaacaagcacttgatgcgggtttacctgtcttatctgtaccttgggatacttggcaaacatcacgtcatatcatgggctttaatcctgaaatacctaaagacgatatccaacgccaagataaagtaaagcaacatgtagccgataatttaagtagtagttggcttgaaagcctgacctcgaaaaacaatagttataacttattatcaccgcctgcttttagacataaattaaccgagctagctcgccaagcaaataaattaatcgttttacctgaaggaacagatatacgtaccattaaagcggctgcaatttgctgcgaacgaaacattgctcgctgccaactaataggtaacaaagaagaaatacttcagattgctgaacatcaaggtattaacttaccagataacttattaataacagatcccgactccattagagataattacgttggacctatggtcgagctacgtaaaaataaaggcctaacggatgttattgccctagaaaatttaaaagataatgttgttttagcgactatgatgttacaacttggccaagttgatggcctagtttctggcgcagtaaatacgacagcaaacaccataagacccgctttgcagttaatcaaaactgcacctgacagctcattagtttcatcagttttctttatgttactacctgatcaagtacttgtttatggtgactgtgctattaaccctgagcctaatgcagaacagttggctgatatagccattcaatctgctgactcagctagagcatttgatattgaaccaagagttgccatgatcagctacagtaccggcagatcgggtcatggtgctgacgttgagaaagttgctaaggccactgaaattgctaaagctaagcgacctgatctcattattgatggaccactgcaatatgatgcggccattatggagaatgttgctaagaaaaaagcgccaaatagcccagtcgcaggtaaagcgacagtattcatattccctgatttaaatactggtaatactacttacaaagcagtacagcgttcagctgacttagtgagcattggacccatgttacaaggaatgaataaacctgttaatgatttatcacgcggcgccctagtcgatgacattgtttatactattgccttaacggcgatacaagcgaccatgtag

SEQ ID NO: 147897 - protein, 706 aa, Colwellia psychrerythraea 34H
MPHRIMLIPVGSGVGLTSVSLGLLHACQQKGIKVGHFKPISQPSRNSLAKKNKTIDAISLSQNSTSVSLSYVEGKMGDGLHDVVLEEIVANFNAFKEDHDVIIIEGLVPTPRQPYAGRINRDVAQALGANIVLVASPGNDSAEEFEDRLEVSAETYGGIKNRHLIGCVINKLNCPDQEEFGLLPKEEEIENDFNLNHWLDLSIFKGRHFDLLGTVQWEIDLIAPRVCDISNYLEAKVINNGDMEHRRFRSVAFCARTVSNLVSYLVPGRLIVTPGDRTDIIIAACLSALNGTKLGGLILTNGFEPSEQVWELCKQALDAGLPVLSVPWDTWQTSRHIMGFNPEIPKDDIQRQDKVKQHVADNLSSSWLESLTSKNNSYNLLSPPAFRHKLTELARQANKLIVLPEGTDIRTIKAAAICCERNIARCQLIGNKEEILQIAEHQGINLPDNLLITDPDSIRDNYVGPMVELRKNKGLTDVIALENLKDNVVLATMMLQLGQVDGLVSGAVNTTANTIRPALQLIKTAPDSSLVSSVFFMLLPDQVLVYGDCAINPEPNAEQLADIAIQSADSARAFDIEPRVAMISYSTGRSGHGADVEKVAKATEIAKAKRPDLIIDGPLQYDAAIMENVAKKKAPNSPVAGKATVFIFPDLNTGNTTYKAVQRSADLVSIGPMLQGMNKPVNDLSRGALVDDIVYTIALTAIQATM

SEQ ID NO: 147898 - DNA, 2100 bp, Pseudomonas fluorescens PfO-1
  CDS (1)..(2100): transl_table=11
atgcaaactttttttatcgcgcccaccgactttggtgtgggtctgacctccatcagcctcgggctggtgcgtacgctggaacgggccgggctgaaagtcggcttcttcaaaccgattgcccagccgcatccgggcgacaccggccctgagcgctccaccgagctggttgcccgcacccacggcctgaaaccgccgcagccactgggcctggcccacgtcgagcggatgctcggcgacggccagctcgacgagttgctcgaagaaatcatcaccctctaccagcaggctgccatcggcaaagacgtgctggtcgtcgaaggcatggtgccgacccgcagcgccagctacgccgcgcgggtcaacctgcacctggccaagagcctggatgccgaggtgattctggtctcggccccggaaaacgaagtgctgaccgaactgtcgggccgcgtcgagttgcaggcgcaactgttcggcgggccgaaagacccgaaagtcctcggcgtgatcctcaacaaggtcaagaccgacgagagcatggacgccttcgccgcgcgcctgaaagagcattcgccgttgctgcgtactggcgacttccgtctgctcggctgcattccgttccagccggaactcaacgctccgcgcacccgcgatgtggccgatctgatgggcgcccaggtgctcaacgccggcgactacgaaacccggcgcatgaccaagaccatcatttgcgcacgcaccatgcgcaacaccgtggatctgctcaagcccggcgtgctggtggtgacccccggcgatcgcgacgacatcatcctcgccgtcagtctcgccgctatcaacggcgtgccgctggccggcctgctgctgaccagcgataccctgccggatccgcgcatcatggacttgtgccgtggcgcgttgcaggccggtctgcctgtgctgtcggtgagcaccggctcctacgacacggccaacctgctcaacggcctgaacaaggaaatccccgtcgatgaccgcgaacgcgcggagatcatcaccgacttcgtcgccagccatctggacgccaactggctgcaccagcgctgcggcacgccacgggaaatgcgcctgtcgccggcggtgttccgttatcaattgattcaacgcgcgcaggccgccaacaaacgcatcgtcctgcccgaaggcagcgagccgttcaccgtgcaagcggcggcgatctgtcaggaacgcgggattgcccgttgcgtgctgctggccaaaccggcagacgttgaagccgtggccagagcccagggcatcacgctgccgccggggctggaaatcctcgacccggacctgatccgcgaacgctacgtcgaaccgatggtcgccctgcgcaagagcaaaagcctcaacgcgccgatggccgagcagcaactggaagacaccgtggtgatcggcaccatgatgctcgcgctggatgaagtcgacggcctggtctccggcatcatcaacaccaccgccaacaccatccgcccggcgcttcaactgatcaagaccgcgccgggctgcacgctggtgtcgtcggtgttcttcatgctgttccccgaggaagtgctggtctatggcgactgcgtgatgaacccgcacccgagcgccagcgaactggccgaaatcgccctgcaaagcgccgactcggccgccgcgttcggcatcaccccgcgcgtggcgatgatcagctactccagcggcgaatcggccaccggcgaggaagtcgaaaaggtccgcgaagccaccctgctcgcccacgaacaacagcactctttgctgatcgacggcccgttgcaatacgacgccgccgccaacgaaaccgtggcccgccaactggcgccgaacagccaggtggccggtcgcgccacagtgttcgtgttccccgacctgaacaccggcaacaccacccacaaagccgtgcagcgcagcgccgattgcgtcagcctcggcccgatgctgcaaggcctgcgcaaaccggtgaacgatctgccgcgcggcgcgcaggtcgacgacatcgtctacaccatcgccctgaccgcgattcaggctgccaaccgacctctggatatctga

SEQ ID NO: 147899 - protein, 699 aa, Pseudomonas fluorescens PfO-1
MQTFFIAPTDFGVGLTSISLGLVRTLERAGLKVGFFKPIAQPHPGDTGPERSTELVARTHGLKPPQPLGLAHVERMLGDGQLDELLEEIITLYQQAAIGKDVLVVEGMVPTRSASYAARVNLHLAKSLDAEVILVSAPENEVLTELSGRVELQAQLFGGPKDPKVLGVILNKVKTDESMDAFAARLKEHSPLLRTGDFRLLGCIPFQPELNAPRTRDVADLMGAQVLNAGDYETRRMTKTIICARTMRNTVDLLKPGVLVVTPGDRDDIILAVSLAAINGVPLAGLLLTSDTLPDPRIMDLCRGALQAGLPVLSVSTGSYDTANLLNGLNKEIPVDDRERAEIITDFVASHLDANWLHQRCGTPREMRLSPAVFRYQLIQRAQAANKRIVLPEGSEPFTVQAAAICQERGIARCVLLAKPADVEAVARAQGITLPPGLEILDPDLIRERYVEPMVALRKSKSLNAPMAEQQLEDTVVIGTMMLALDEVDGLVSGIINTTANTIRPALQLIKTAPGCTLVSSVFFMLFPEEVLVYGDCVMNPHPSASELAEIALQSADSAAAFGITPRVAMISYSSGESATGEEVEKVREATLLAHEQQHSLLIDGPLQYDAAANETVARQLAPNSQVAGRATVFVFPDLNTGNTTHKAVQRSADCVSLGPMLQGLRKPVNDLPRGAQVDDIVYTIALTAIQAANRPLDI

SEQ ID NO: 147900 - DNA, 2160 bp, Desulfovibrio desulfuricans G20
  CDS (1)..(2160): transl_table=11
atgcccgacccggggcagatgaaatggatatgcaaggagtccaacgtgtccaaaaacctgtacatcacagcgacggagtccaaaagcggcaagtccgccatcgtgctgggaatgatgcagctattgcttcgcgatgtccgcaaagtcgcgtttttccgccccatcatcaacaacaccagcaaggaagtccgcgaccacgacatcaatctgattctgacgcgtttcggtctggatattccctacgaaaagacctacgcctactcgcttcacgaagccagagagctgatcaacaacgggcagcacgccaccctgcttgagaacattctcaacaagtataaagcccttgaagcagagtacgatttcgtactgtgcgaaggcaccgactttctgggcaaagacgcggcattcgagtttgacctgaatgccgacatcgccgccaacctcggctgccctgtgctggtggtggccaacggtctggacaaaaacagcgaggaaatcatcggctccacccagctgaccatcgaccagctggacgaaaagagccttgacgtggtggccgccgtggtcaaccgcgccagcgttacccccgctgaaaaagacaacatcatcaaaagccttgagtgcaaggtgaactgcgccaacccgctggccgtgtacgtggtgcccgaagagcccaccctcggcaaacccaccatgggcgacgtgaaaaagtggctgggagcctctgtgctgtacggccacggccgccttgacacgctggttgacgactacatcattgcggccatgcaggtgggcaacttcctggattatctgggacagggcaccctcatcatcactcccggcgaccggtccgacatcattctggccagccttgcctcgcgcctgtcttcctcctaccccgacatttccggcattctgctgaccggcgggctggagcctgcggccaatgtgcaccgccttatcgaaggctggaccggtgtgcccgtgcccgtgctgtgcgcaaaggaacacacctacctgaccacgcagatactcaacgatctgtacggcaagatagaccccgaagacgaccgcaagatagccacggctctcggcgtgtttgaacagaacgtggacaccgccgaaataagcaaccgcatcatcagccgccgctcttcgcgcattacgcccaaaatgttcgagtacaatctcatcgaacaggccaaaaaacacaaaatgcgcatcgtgctgcccgaaggggccgaagaacgcattctgcgtgcagccgacattcttgtgcgccgcggcgtggcagacctgattctgctgggcaatgccgacgaagtaggcaaaaaaatcggcgatctgggactggaccttgacggcgtgaccatcatccagcctgaacttgcacccaacttcgaagactatgtgcagacgtactacgaagcccgcaagaaaaaaggcatcagcatggaacaggcccgcgacatcatgtccgaccccacctactacggtaccatgatggtgcataaaaacgacgcagacggcatggtttccggtgccatcaacaccaccgcgcacaccatccgccccgcgtttgaattcatcaagaccaagcccacggcttccatcgtatccagcgtgttcctcatgtgcctcaaagacagagtgcacgtgttcggcgactgcgcggtcaaccccaacccgtctgccgaacagctggccgagattgctctcaactcttcggatacggcacgcattttcggcatcgagcccaaggttgccatgctctcttactccaccggttcttccggcaagggtgcagatgtggaaaaggtcatcgaagccacccgcatcgccaaagagcgcgcaccggaacttgcacttgaagggcctttgcagtacgacgccgccatcgacgccgatgtggcccgcaccaaaatgcccgacagcaatgtggcaggtcaggccaccgtgttcatcttccccgacctgaacaccggcaacaacacctacaaggcggttcagcgcgccgcaggcgccgtggccatcggccccgtgctgcagggcctgaacaaacccgtcaacgacctgtcccgcggttgtctggtgcctgacatcgtcaacaccgtcgccatcaccgccattcaggctcaggcggaaaaaggccttcgctag

SEQ ID NO: 147901 - protein, 719 aa, Desulfovibrio desulfuricans G20
MPDPGQMKWICKESNVSKNLYITATESKSGKSAIVLGMMQLLLRDVRKVAFFRPIINNTSKEVRDHDINLILTRFGLDIPYEKTYAYSLHEARELINNGQHATLLENILNKYKALEAEYDFVLCEGTDFLGKDAAFEFDLNADIAANLGCPVLVVANGLDKNSEEIIGSTQLTIDQLDEKSLDVVAAVVNRASVTPAEKDNIIKSLECKVNCANPLAVYVVPEEPTLGKPTMGDVKKWLGASVLYGHGRLDTLVDDYIIAAMQVGNFLDYLGQGTLIITPGDRSDIILASLASRLSSSYPDISGILLTGGLEPAANVHRLIEGWTGVPVPVLCAKEHTYLTTQILNDLYGKIDPEDDRKIATALGVFEQNVDTAEISNRIISRRSSRITPKMFEYNLIEQAKKHKMRIVLPEGAEERILRAADILVRRGVADLILLGNADEVGKKIGDLGLDLDGVTIIQPELAPNFEDYVQTYYEARKKKGISMEQARDIMSDPTYYGTMMVHKNDADGMVSGAINTTAHTIRPAFEFIKTKPTASIVSSVFLMCLKDRVHVFGDCAVNPNPSAEQLAEIALNSSDTARIFGIEPKVAMLSYSTGSSGKGADVEKVIEATRIAKERAPELALEGPLQYDAAIDADVARTKMPDSNVAGQATVFIFPDLNTGNNTYKAVQRAAGAVAIGPVLQGLNKPVNDLSRGCLVPDIVNTVAITAIQAQAEKGLR

SEQ ID NO: 147902 - DNA, 2112 bp, Rhodospirillum rubrum ATCC 11170
  CDS (1)..(2112): transl_table=11
atgcccgcacgcatgttctttctcgccccgatggcccaggatgtcggactgacctcggtggcccttggtctggcccgcgcccttcagcgcgacggcatcaaggttggcttcgccaagccgatcggccatgccgaggccgatggcgagcccggcgatccgtcgagccatttcgcccgcagcctgtgcctgctggaggccccggaatcgatcgccttcgcccgcgccgaggatcaggtgcgccggggcgatctggccgccctgatggaagaggtggtcaccctggtcgacggcctgcgcgccagccatgatgcggtgatcatcgaagggctgatcccaggggccgatacccaggtggccgggcggttgaacgccgagatggcgcgggctttgggggccgatctgatccccgtgctgtcgggggcgggtcgcgatggcgccgatctggccgaggccatcgccctggcgcgccgccagtatgatggcgcccagaacgcggccttcgccggggtgctgatcaacaaggtctcgccctcccatggcgccgagctgcgcggcgatctggagcgggcggtgggcgaacgcctgcccattctcgccaccattccctttgaaacccgcctgcagtcgccgcgtctggccgatgtggtgcgcggcctgggcctgaccgtcgagcacgagggcgcgcttgctcaaacccgggtgcgcgagatcgtcatcgccgcgcgctcggtggaaaacatcatcgaacgcctgcggccgggcgccctggtcgtcaccccggtcgaccgcatcgatatcgtgctggccgccaccctggccagcctgcgcggcgtgccgctggctggcgtgttgctaacctgtggcggatccctgcccgataccgtggcctcgctggtgctttccgcccggcccgaggggctgccgatcctgtcgaccccggccgacacctatgccaccgccagccggctgtcgcgcttgagcggccatgtcggcgccgatgatcacgcgcagatggaagaggtgatcgacttcatcgccgagcagatcgccaccgcgccgttgcgccggcgcatcggcgagccgggcgaggtgcggatgtcgccgccggccttccgcaaccgcttgatccaaagcgcccggcgggcggccaagcgcatcgttttgcccgagggcgacgagccgcgcaccctgcaggcggccatcgcctgccacgccaagggcatcgcccgctgcgtgctgctcggccatcccgcccaggtccgtcaggtcgcgagcgcccaggggctggagatccccgccgatctggaaatcctcgatcccgagctggtgcgcgggcgctatgtcgaggctttggtcgagatgcgccgggccaagggattgaccgcccttcaggccgccgcccagcttgaggacacggtcgtgctgggcacggtgatgctggccttgggcgaggtcgacggtctggtctcgggcgccgttcacaccaccgccagcacggtgcggccggccctgcagctgatcaagacggcgccgggcgccagcatcgtttcaagcgtgttcttcatgctgatgcccgatcaggtgctggtctatggcgattgcgcgatcaatcccaatccgacggccgagcaactggccgatatcgccatccaatcggccgatagcgccctggcctttggcatcgagccgagggtggcgatgatttcctattccaccggcagttcgggggtgggcgacgacgtggagaaggtccgcgccgccaccgccctggccaagctcaagcgccccgacttgatgatcgacgggccgatgcaatacgacgccgccagcgtggaaagcgtcggccgccagaaggcccccgacagcccggtcgccggtcgggccaatgtcttcgtcttccccgacctcaacaccggcaacaccacctataaggcggtgcagcgctcggccaatgtggtcagcgtcggcccgatgcttcagggcctgcgcaagccggtcaatgatctgtcgcgcggcgccctggtcgacgacatcgtctataccatcgccctgaccgccatccaggccgaccagggggccgatccgatggccgaaaaagtcgccgccgagtaa

SEQ ID NO: 147903 - protein, 703 aa, Rhodospirillum rubrum ATCC 11170
MPARMFFLAPMAQDVGLTSVALGLARALQRDGIKVGFAKPIGHAEADGEPGDPSSHFARSLCLLEAPESIAFARAEDQVRRGDLAALMEEVVTLVDGLRASHDAVIIEGLIPGADTQVAGRLNAEMARALGADLIPVLSGAGRDGADLAEAIALARRQYDGAQNAAFAGVLINKVSPSHGAELRGDLERAVGERLPILATIPFETRLQSPRLADVVRGLGLTVEHEGALAQTRVREIVIAARSVENIIERLRPGALVVTPVDRIDIVLAATLASLRGVPLAGVLLTCGGSLPDTVASLVLSARPEGLPILSTPADTYATASRLSRLSGHVGADDHAQMEEVIDFIAEQIATAPLRRRIGEPGEVRMSPPAFRNRLIQSARRAAKRIVLPEGDEPRTLQAAIACHAKGIARCVLLGHPAQVRQVASAQGLEIPADLEILDPELVRGRYVEALVEMRRAKGLTALQAAAQLEDTVVLGTVMLALGEVDGLVSGAVHTTASTVRPALQLIKTAPGASIVSSVFFMLMPDQVLVYGDCAINPNPTAEQLADIAIQSADSALAFGIEPRVAMISYSTGSSGVGDDVEKVRAATALAKLKRPDLMIDGPMQYDAASVESVGRQKAPDSPVAGRANVFVFPDLNTGNTTYKAVQRSANVVSVGPMLQGLRKPVNDLSRGALVDDIVYTIALTAIQADQGADPMAEKVAAE

SEQ ID NO: 147904 - DNA, 2097 bp, Francisella tularensis subsp. holarctica
  CDS (1)..(2097): transl_table=11
atgaaaaaatctatatttattctgcctacttcaaaacataccggtttacgtttattagcaagtagtatggtatatgcattacagcaaaagggattaaaggttggttcatttcatcctatctatgatatgcaaatgagcattaaaaatatacaggagtatttgcttaataatcgagttaaggattatgttgagattgttttagataagttctatcaaaaatcgcaagaatttgattttataataatctctggtctatttagacagggtaataatgctcacaaactgtacccaataaatgctattattgatgagctaaatatagagatcgttaaagcgctaagctctgaagtaattataacttcatatcatggtaataagccactaattgatatcaatgatgagttggattatgcaatgcgtagtttaccaaaacaaattaatattatcggtacgataatcacaaaattaaacgcgccatacgatgatgatggtagagtaagctttagtttaacagatgaggatatttcatcagagcaacagcagcaagtaactgtaaatatgcttagagaattaccagtctttgcacaaaaaggtctaaatctgataggtgttgtagagtggcagcaagaaaaaacttcaccaaggatattagatattaaaaatattcttaagttaaaccttatatcaagagtaagcctagaggcgcgtgttgatagagttatgatgtgctcaagaggcgttgataactttatcaatgatttaactccaaattctttagtaataacatctgctgataggtctgatattcttgtgacagtatgcttagctgcaaaaaatggtatgaaaattgctggaattttgttaacagcagaagaatatcttaatgataaggtgaaagagctttgtgttgaaacagccgaaaaagttggtctagcaattcttactactagaaataaaagtgtcaaaactattttacgaattgctgatattgatttgatgggtataccgcttgacgataaagagcgtatccagcgagtcaaagagattatttgtaattcattagatagagataaaataattaacgctattacagcggatgtgcttggacatcaggtgatgtcgccaccggcatttaggtatcatctactgaaaatggcgacaaaagctaaaaagagaattattttgcctgagagttatgagccaagaacccttcaagctgcaaaaaacagtcatgagcagggtttagctgaatgtgtgcttataggtgatagagataaaatccataaagtagcagaaatgaatggttttagccttcctaaggatatacaagttgtcaatatcgatgatgaggctgagataaaatatctaaataccttgatgaatcttagaaaacataaaggtttatctgaaagtatggctcgagatgctcttaaaaaccctatagtagtagcaacagttatgctttatcttggtgaggtcgatggtttagtttcaggtgctgagcatactacggcagatgtgcttagaccagcgttacagctaattaagattaagccaaactcttcgttggtatcatcagtattttttatgtgcatgcctgatcaagtgatagtatttggtgactgtgctgtaaatcaggatccctcggctgagcagcttgtcgatatagcgattcaaagtgctgaatccgcaaagaaatttggtattgagccgcgtgttgcaatgattagctatagtacaggaacatcaggctcaggtgtgcaggttgaaaaagtgcgtactgctacagaattgcttaaacaaaaagctccagagttattggttgatggaccgcttcagtatgatgctgcgatgattgaaagtgtcgctaagagtaaagctccagatagtccagttgcaggtagagcaaccgtattaatcttcccagatttaaatactggtaatacagtgtataaagcagtccaaagaagtgctaatgttttaagtataggaccagtattgcaaggtatcaataaacctgtaaatgacctttcaagaggggcaacagttgatgatataacttatacaattgctataacagctattcaagcaatataa

SEQ ID NO: 147905 - protein, 698 aa, Francisella tularensis subsp. holarctica
MKKSIFILPTSKHTGLRLLASSMVYALQQKGLKVGSFHPIYDMQMSIKNIQEYLLNNRVKDYVEIVLDKFYQKSQEFDFIIISGLFRQGNNAHKLYPINAIIDELNIEIVKALSSEVIITSYHGNKPLIDINDELDYAMRSLPKQINIIGTIITKLNAPYDDDGRVSFSLTDEDISSEQQQQVTVNMLRELPVFAQKGLNLIGVVEWQQEKTSPRILDIKNILKLNLISRVSLEARVDRVMMCSRGVDNFINDLTPNSLVITSADRSDILVTVCLAAKNGMKIAGILLTAEEYLNDKVKELCVETAEKVGLAILTTRNKSVKTILRIADIDLMGIPLDDKERIQRVKEIICNSLDRDKIINAITADVLGHQVMSPPAFRYHLLKMATKAKKRIILPESYEPRTLQAAKNSHEQGLAECVLIGDRDKIHKVAEMNGFSLPKDIQVVNIDDEAEIKYLNTLMNLRKHKGLSESMARDALKNPIVVATVMLYLGEVDGLVSGAEHTTADVLRPALQLIKIKPNSSLVSSVFFMCMPDQVIVFGDCAVNQDPSAEQLVDIAIQSAESAKKFGIEPRVAMISYSTGTSGSGVQVEKVRTATELLKQKAPELLVDGPLQYDAAMIESVAKSKAPDSPVAGRATVLIFPDLNTGNTVYKAVQRSANVLSIGPVLQGINKPVNDLSRGATVDDITYTIAITAIQAI

SEQ ID NO: 147906 - DNA, 2121 bp, Rhodococcus sp. RHA1
  CDS (1)..(2121): transl_table=11
atggccatggctgcgccagcgacaccctcacccgtgaatccgcccgcccgatcccagccctcgagcgtttacatcgcctcaccggagggggacaccggcaagtccaccatcgcgctgggtgtcctgcagatgctctgtgcgtcggcggcgagggtgggcgtcttccgtcccatcgcccgatcgacgcaggaaaccgactacatcctcgagttgctgctcgaacacacgacggccgacgtcggctacgaggaggccctcggggtcacgtacgagcatgtccacgccgatcccgacggggcgctcagcgagatcgtctcccggtatcaccaggtggcggcgcagtgcgacgccgtcgtggtgatcggcagcgattacaccgacgtggcgagcccgagcgaactcggttacaacgcgaggatcgccgccaacctgggcgcaccggtgctgctcgccgtgaagggagcgcggcgcacccccgaggaggtcgcgcaactcgcccatctcgcgatcggtgaactgacttctcaccacgcccatccgctcgctgtggtcgcgaaccgctgcgacccggatgagctcgatgcggtcaccgccgcgttggcgtccaccggtgtgcccgcgtggagcctgcccgagatcccgctgctggtcgcgccgaccatggccgaactcctcgagtcgatcgacggcagcctgttcagcggcgaccccgagcttctccaccgcgaggcgctgcgggtaatggtgggcggaatgacggcggagcacattctcgaacggttgaccgagggcacggtggtgatcgccccggccgaccgttccgacgtgctgctggcgatggtgaatgcgcatgaagccgaaggtttcccgtcgctggcgggcatcatcatgaacggcggcctgatgccgcacccggcgatcgcgaagctgatggccggcctgaagccgcggttgccgatcctcaccaccggactgggcacgttcgacacggccagtgcggccgcgcagacccgtggccgggtggcggtcggttcgcagcgcaagatcgacaccgccctgagcgtcatggaactgcgggtggacgcacccacactgctggagcgcttgaagttgccgatcccctcggtggtgactccgcagatgttcgaataccagctgatcgaccgtgcccgccgcgaccgcaagcacatcgtgctgccggaaggcgacgacgaccgcatcctccgcgcggcggggagactgttgcagcggcaggtggcggcgctgaccattctcggcgacgaggtgcaggtgcggcgccgcgcggcggaactcggcgtcgacctcggtgacgcacaggttctcgacccccggacgtccgaccacgccgggccgttcgccgaggagtacgcgcggctccgcgcccacaagggcatgaccgtggagcgggcccgcgaggtgatggccgacatctcgtacttcggaaccatgatggtgcacttgggaatcgcggacggcatggtctccggtgccgcgcacaccacggcgcacaccatccggccgtcgttcgagatcatcaagacgcaaccgggggtgtccacggtgtcgagcgtgttcctgatgtgcctgtccgatcgggtactcgcgtacggggactgcgcggtggtgcccgaccccaccgccgaacagttggccgacatcgcgatctcgtcggcgcagacggcggctcagttcggcatcgatccgcggatcgcgatgctgtcgtactcgaccggcgactccgggagcggcgcggacgtcgacaaggtgcgctccgcgacgaaactcgtccgcgagcgtcgcccggacctgttggtggagggccccattcagtacgacgccgccatcgagcagagtgtggccgacaagaagatgcccgattcggcggtggccgggaaggcgacggtcttcatcttccccgacctcaacaccgggaacaacacctacaaggccgtgcagcgcagtgccggcgccatcgccgtcggtccggtgttgcagggcctcaacaagcccgtcaacgacctgtcgcgaggggcgctggtcgaggacatcgtgaacaccgtggccatcaccgcgatccaggcgcagggagcagagaagtga

SEQ ID NO: 147907 - protein, 706 aa, Rhodococcus sp. RHA1
MAMAAPATPSPVNPPARSQPSSVYIASPEGDTGKSTIALGVLQMLCASAARVGVFRPIARSTQETDYILELLLEHTTADVGYEEALGVTYEHVHADPDGALSEIVSRYHQVAAQCDAVVVIGSDYTDVASPSELGYNARIAANLGAPVLLAVKGARRTPEEVAQLAHLAIGELTSHHAHPLAVVANRCDPDELDAVTAALASTGVPAWSLPEIPLLVAPTMAELLESIDGSLFSGDPELLHREALRVMVGGMTAEHILERLTEGTVVIAPADRSDVLLAMVNAHEAEGFPSLAGIIMNGGLMPHPAIAKLMAGLKPRLPILTTGLGTFDTASAAAQTRGRVAVGSQRKIDTALSVMELRVDAPTLLERLKLPIPSVVTPQMFEYQLIDRARRDRKHIVLPEGDDDRILRAAGRLLQRQVAALTILGDEVQVRRRAAELGVDLGDAQVLDPRTSDHAGPFAEEYARLRAHKGMTVERAREVMADISYFGTMMVHLGIADGMVSGAAHTTAHTIRPSFEIIKTQPGVSTVSSVFLMCLSDRVLAYGDCAVVPDPTAEQLADIAISSAQTAAQFGIDPRIAMLSYSTGDSGSGADVDKVRSATKLVRERRPDLLVEGPIQYDAAIEQSVADKKMPDSAVAGKATVFIFPDLNTGNNTYKAVQRSAGAIAVGPVLQGLNKPVNDLSRGALVEDIVNTVAITAIQAQGAEK

SEQ ID NO: 147908 - DNA, 2139 bp, Haemophilus somnus 129PT
  CDS (1)..(2139): transl_table=11
atgtctcgtacaattatccttattcctattagcactggtgttggtttaaccagtgtaagtttaggtttaatccacgctcttgagcaaaaaggggcaaaaatcggtttcatgaagccaatttcgcaaccaagtaccgatgaagataaattagaccgcactacttcaattgtgcgtaccagtacaacacttgaaacagccgaaccgtttatgctaagtgtggctgaaaatctaatcggtcaaaatcaatccgatgtgttactggaaaagattgttgaaaatcatcaacaactagctaaaaataatgaattgattattgttgaaggcttagttccaactcgcaagcatggctatgcaaacagtatcaactacgaaattgcaaaggcgttagatgctgaaatcgtattagttgcagcacctgcaacagaaacgccggcagagttaaaagaacgcattgaagcagcggcctcccaatttggcggaaaaaataatccaaacttacttggtgtcataattaataaatttaatgcaccaattgatgaatccggacgtactcgtccagacctaagtgaaatttttgatgcttaccaacataaacaaaataaccttaatgaggtttacaagctatttgaaaaaagccctattaaagtattagcttgcgttccgtggaatgcggagcttattgcaactcgtgctattgatttggtcaatcatttaggtgcttctattctacatgagggtgatattaaaactcgtcgtattcgtagtattactttctgtgctcgttcattacaaaatatggttgagcatttcaaaacaggtagtctgttagttacctccgctgatcgtcctgatgtcctaactgcctccgcacttgctgcgactaacgggatcgagctaggtggtattttactcacagggggttacaaaattgacaatcaaattaaaaaactatgccaaccagtatttgaaaataccggcttacctatttttcgaattgaaggtaatacatggcaaagtgcattggctctacaaagcttcaaccttgaagtacctgttgatgataaagaacgcatcgaaaacattaaacaatacacaagccaacaatttaaatcttcatttattgaaaatttagttgccgcctcaactcgtcctcgtcgtttatctcctcctgcattccgttttcaattaactgagttagctcgtgcagccaaaaaacgaatagtattacctgagggagatgaacctcgtacagttaaagctgctagtctttgtgcagaacgtggtattgcagaatgtatcttattagcaaatcctgatgatgttaaacgtgttgctgatgctcaaggcgttgtattaggaaaaggtattacaataattgatcctgtctctgtacgtgaaaattatgtagaccgtttagtagaattacgtaaagccaaaggtatgactgaaacgtctgcacgagagcaattagaagataccgtcgtattaggcactatgatgcttgaggctaacgaagtcgatggacttgtttcaggtgcgatacatacaacagcgaatactattcgtccaccgatgcaaatcattaaaacagcacctggtaactcaattgtttcttcaattttctttatgttattacctgaccaagtacttgtttatggcgactgtgcagttaatcctgatccaactgccgaacaattggcagagattgcaattcaatctgctgattccgcaaaagcattcggtattgatccaaaagtggcgatgatctcttactcaacaggaacgtcaggttccggtgctgatgttgagaaagtaaaagaagcaactcgtattgcccaagaaaaacgcccagatttattaatagatggcccattacaatatgatgcggcagtaatggaagatgtagcaaaatctaaagcaccaaattctccggttgccggtaaagcgacagtatttgtcttcccagatctcaataccggaaatacaacctataaagcagtacaacgctcagcagatttagtatctattggtccgatgttacaaggtatgcgtaagccggtcaatgacctatctcgtggagcattggttgatgatattgtgtatactattgcattaactgcaattcaagcgacacaataa

SEQ ID NO: 147909 - protein, 712 aa, Haemophilus somnus 129PT
MSRTIILIPISTGVGLTSVSLGLIHALEQKGAKIGFMKPISQPSTDEDKLDRTTSIVRTSTTLETAEPFMLSVAENLIGQNQSDVLLEKIVENHQQLAKNNELIIVEGLVPTRKHGYANSINYEIAKALDAEIVLVAAPATETPAELKERIEAAASQFGGKNNPNLLGVIINKFNAPIDESGRTRPDLSEIFDAYQHKQNNLNEVYKLFEKSPIKVLACVPWNAELIATRAIDLVNHLGASILHEGDIKTRRIRSITFCARSLQNMVEHFKTGSLLVTSADRPDVLTASALAATNGIELGGILLTGGYKIDNQIKKLCQPVFENTGLPIFRIEGNTWQSALALQSFNLEVPVDDKERIENIKQYTSQQFKSSFIENLVAASTRPRRLSPPAFRFQLTELARAAKKRIVLPEGDEPRTVKAASLCAERGIAECILLANPDDVKRVADAQGVVLGKGITIIDPVSVRENYVDRLVELRKAKGMTETSAREQLEDTVVLGTMMLEANEVDGLVSGAIHTTANTIRPPMQIIKTAPGNSIVSSIFFMLLPDQVLVYGDCAVNPDPTAEQLAEIAIQSADSAKAFGIDPKVAMISYSTGTSGSGADVEKVKEATRIAQEKRPDLLIDGPLQYDAAVMEDVAKSKAPNSPVAGKATVFVFPDLNTGNTTYKAVQRSADLVSIGPMLQGMRKPVNDLSRGALVDDIVYTIALTAIQATQ

SEQ ID NO: 147910 - DNA, 2154 bp, Shewanella sp. ANA-3
  CDS (1)..(2154): transl_table=11
atgtctcgaaatatcatgttaatccccataggcactggagttggcctgacctccttaagcctaggtatggtgcgcgcgttagagcgccacggggtaaaagtccaattctttaaacccatttcccagctgcgtcctaatgataatggcccagagcgctcaaccacgattttaagcaaatcgcccacggtcaatccgttagagcccttcgacatggcccatgccgaagcactgatccgtgccgatcaaaccgatgtgctaatggagcaaatcattgcccgcgccgcagaatgcgccagcaataccgaaaccctgattgttgaaggcctagtgccaacccgtaaccatccctttgccgacgatgtgaactacgccatcgccaaggcaatggatgcggacgtgattttcattgccacccccggcagcgacaccccaaccggcctgatgaaccgcctcgaaattgcctacaactcgtggggcggcaaaaacaacaaacgtcttattggtgccgtgatcaacaagattggcgcaccggtagacgatgaaggtcgcgctcgcccagacttatcggaagtgttcgatcatcaaggcgtacaacgctcagatgcgtccatcatgttccaaatgccaggtaagagcccactgcgcatcttaggtagcgtgccttacaacctcgatttggttgcgccacgcgcatcggatctggcgaagcatttacgtgcccgcattctcaatgccggcgagatgaacacccgccgtctgcgtaaagtcaccttctgcgcccgcagcttgcccaatatggtcaaccacattaagacagactcactgctggtgacctctggcgatcgctccgatgtgattgtgtcagcgtgtctcgccgccatgaacggcgtgaagattggtgccctactgctcactggtagctacgagccagagcctgaaattctgaaactgtgtgaacaggccttcgagacaggtttaccggtattcctcatcgatactaacacttggcagacgtcattaaatatccaacgcttcgaccacgaagtgccagtggatgatgcggtacgtatcgatttagtccaagagtacgttgccagccatatcgatcagagctggattgaaagcgtgaccaaaaactctccaagggaacatcgtttatcacctcccgcgttccgttataagctcaccgaacttgcgcgcgccgcccacaaaactgtggtactgcctgagggtgatgagccacgtaccatcaaggccgccgcgatatgtgccgaacggggtattgcgcgttgcgtgctgttaggtaaaaaagatgaaattcaacgtattgcagcacagcaagacgttgttctgggcgaaggcgttgtgattgtcgaccccgatgaagttcgcgatcgctatgttgaaccaatgctcgatctgcgtcgcaacaaaggtttgactgaagtcgttgccaaagaacaattagaagacaacatggtgctcggcactatgatgctggcgcaaaacgaagtcgatggtatcgtctctggcgcggtaaacactacggccaatacgattcgtccgccgctgcaactgatcaaaaccgcaccgggttctagccttgtttcttccatcttctttatgttgatgccagaccaagtgctggtttacggtgactgtgcgattaaccccgatcctaacgctgaacaactggccgatatcgcgattcaatcggcagaatctgccaaggccttcggcatagaaccaagagtggcgatgatcagctactcaaccggtaactcaggtactggttcagatgtggataaagtgcgtgaagcgacccgtatcgcgaaagaaaaacgtcctgatctagtaatcgacggtccactgcaatacgatgcggccgtcatgccaaacgtggctcgctctaaggcgcctaacagccctgttgcaggtcaagcgactgtattcgtgttcccagatctcaacacgggtaacaccacttacaaagctgtacagcgtagtgctgacctcatcagtattggccccatgctgcaaggcatgcgtaagcctgtgaacgacttatcccgcggcgccttagtggacgatatcgtctacactatcgcactgacggcgattcaagcgtcacaaaacgatgccagcaaagcctaa

SEQ ID NO: 147911 - protein, 717 aa, Shewanella sp. ANA-3
MSRNIMLIPIGTGVGLTSLSLGMVRALERHGVKVQFFKPISQLRPNDNGPERSTTILSKSPTVNPLEPFDMAHAEALIRADQTDVLMEQIIARAAECASNTETLIVEGLVPTRNHPFADDVNYAIAKAMDADVIFIATPGSDTPTGLMNRLEIAYNSWGGKNNKRLIGAVINKIGAPVDDEGRARPDLSEVFDHQGVQRSDASIMFQMPGKSPLRILGSVPYNLDLVAPRASDLAKHLRARILNAGEMNTRRLRKVTFCARSLPNMVNHIKTDSLLVTSGDRSDVIVSACLAAMNGVKIGALLLTGSYEPEPEILKLCEQAFETGLPVFLIDTNTWQTSLNIQRFDHEVPVDDAVRIDLVQEYVASHIDQSWIESVTKNSPREHRLSPPAFRYKLTELARAAHKTVVLPEGDEPRTIKAAAICAERGIARCVLLGKKDEIQRIAAQQDVVLGEGVVIVDPDEVRDRYVEPMLDLRRNKGLTEVVAKEQLEDNMVLGTMMLAQNEVDGIVSGAVNTTANTIRPPLQLIKTAPGSSLVSSIFFMLMPDQVLVYGDCAINPDPNAEQLADIAIQSAESAKAFGIEPRVAMISYSTGNSGTGSDVDKVREATRIAKEKRPDLVIDGPLQYDAAVMPNVARSKAPNSPVAGQATVFVFPDLNTGNTTYKAVQRSADLISIGPMLQGMRKPVNDLSRGALVDDIVYTIALTAIQASQNDASKA

SEQ ID NO: 147912 - DNA, 2079 bp, Mycobacterium smegmatis str. MC2 155
  CDS (1)..(2079): transl_table=11
gtgcccgagggagaagcagccaccgcgatctacatcgcctcacccgagggcgacaccggtaagtcgacgatcgcgctgggcatcctgcaccggttggccgcgaccgtgcccaaggtcggggtgttccgccccatcacgcggctgggcgaggaccgcgactacatcctggagctgctactggcgggaaccaccgccgggttgccctacgaagactgcgtcggcgtcagctaccagcaggttcacgaggatcccgacgccgcgatcgccgagatcgtcgatcggtaccaccgcgtcgccgaccagtgcgacgcggtgctgatcgtcggcagcgactacaccgacatcgccacccccagcgaactgagcatgaacgcgcgcatcgcggtcaacctcggcgcgcccgtcgtcctcgccgtcaaggccgccgaccgcacccccgacgaggtggtccacgtcgtcgaggtgtgcctcgccgaactggccggccagcacgcacacacctcggccgtcgtcgccaaccgctgcgatccggcacagttgacggccgtgtccgaggcgctgcgcccgctcggaccgccggcctacgtgctgcccgaggagccgctgttggtggcgccgtcggttgctgagctgcagaaagccgtcgacggcacggtcgtggcgggcgatcccgcgctgctctcgcgcgaggcgctcggcgtgctggtggccggcatgaccgccgaacacgtgctggaacgcctcaccgaaggcgtcgccgtcgtcacccccggtgaccgctccgacgtggtgctcgcggtggtcagcgcccacgccgccgagggcttcccgtcgctgtcgacgatcatcctcaacggcggcctcgacctgcacccggcgatcgccaagctggtggacgggctgggcctcaagctgccgatcatcgcgacgccgtacggcacgttcgagaccgcgagccgtgtcgcatccgcgcgcggccgggtgacctcgacgtcgcagcgcaagatcgacaccgcgctgcagatcatggaacgtcacgtcgacatcgacgacctgctggcacggctgcggctgccgatccccgaggtcacgacgccgcagatgttcacctaccagctgctagaccgggcccgcgccgaccgcaagcgcatcgtgctgcccgaaggcgacgacgaccgcatcctcaaggccgcgggacggctgctgcggcgcggtgtcgccgatctgaccatcctcggcgaggagaaccagatccgttcccgcggcgcggaactcggtgtcgacctatcggcggcgaccgtgctcgacccgcgcaccagcgacctgtgcgaggcgttcgcgcagcagtacgccgagttgcgcaagcacaagggcatcacgctggaccaggcccgcgagatcatcgtcgacgtgtcctacttcggcaccatgctggtgcacaacgacatggtcgacggcatggtctccggcgccgcacacaccaccgcccacacggtgcggcccgcgttcgagatcatcaagaccctcccggacgtgtcgaccgtgtccagcatctttttgatgtgcctggaggatcgcgtactcgcctacggcgactgcgcgatcgtgccggatcccacggccgagcaactggccgacatcgcgatctcgtcggcgcgcaccgcggcacagttcggcatcgaaccgcgcgtcgcgatgctctcgtactcgaccggcacctcgggtaccggcgctgacgtcgagaaggtcaaggcggcaacagatctggtgcgtgagagggacaagacgttgctcgtggaagggcccatccaatacgacgcggcggtcgaaccgtcggtggccaagaccaagatgcccgattcggaggtggcggggcgcgcgaccgtgctgatcttccccgacctcaacaccggcaacaacacgtacaaggccgtacagcgcagcgccggtgcgattgcgatcggccctgtgctgcaagggctcaacaagcccgtcaacgatctgtcccgaggcgcgctggtggaggacatcgtcaacaccgtcgccatcaccgcgatccaggcgcagggccggtcgtga

SEQ ID NO: 147913 - protein, 692 aa, Mycobacterium smegmatis str. MC2 155
MPEGEAATAIYIASPEGDTGKSTIALGILHRLAATVPKVGVFRPITRLGEDRDYILELLLAGTTAGLPYEDCVGVSYQQVHEDPDAAIAEIVDRYHRVADQCDAVLIVGSDYTDIATPSELSMNARIAVNLGAPVVLAVKAADRTPDEVVHVVEVCLAELAGQHAHTSAVVANRCDPAQLTAVSEALRPLGPPAYVLPEEPLLVAPSVAELQKAVDGTVVAGDPALLSREALGVLVAGMTAEHVLERLTEGVAVVTPGDRSDVVLAVVSAHAAEGFPSLSTIILNGGLDLHPAIAKLVDGLGLKLPIIATPYGTFETASRVASARGRVTSTSQRKIDTALQIMERHVDIDDLLARLRLPIPEVTTPQMFTYQLLDRARADRKRIVLPEGDDDRILKAAGRLLRRGVADLTILGEENQIRSRGAELGVDLSAATVLDPRTSDLCEAFAQQYAELRKHKGITLDQAREIIVDVSYFGTMLVHNDMVDGMVSGAAHTTAHTVRPAFEIIKTLPDVSTVSSIFLMCLEDRVLAYGDCAIVPDPTAEQLADIAISSARTAAQFGIEPRVAMLSYSTGTSGTGADVEKVKAATDLVRERDKTLLVEGPIQYDAAVEPSVAKTKMPDSEVAGRATVLIFPDLNTGNNTYKAVQRSAGAIAIGPVLQGLNKPVNDLSRGALVEDIVNTVAITAIQAQGRS

SEQ ID NO: 147914 - DNA, 2091 bp, Nocardioides sp. JS614
  CDS (1)..(2091): transl_table=11
gtgtgcacgagcgtctacgtcgcgtccgtcgagggctacaccggcaagtcagcggtcgcgctggggatcctggacgtgctctcccgcagggtcgagcgggtcggggtgttccgcccgatcgtgcgcaacgaccaggccaccgcgcgcggtgagcgcgactacgtcctggacctgctgaccgcccacgaggcggtcacgctcagctacgacgactgcaccggcgtcacctacgacgacgtccacgccgacccggtcgccgccctggacacgatcgtcgagcgctaccaccgggtcgcggagcagtgcgacgccgtggtggtgatcggctcggactacaccgacgtcgccacccccaccgagctgtcctacaacgcgcggatcgctgccaacctcagctcgccggtcctcctcgtcctcaacggcgcggaccggacgcccgccgagctggtgacgctggccgacatcgccagcaccgcgatctcggccagtcacgcggcactgttcgcggtggtcgccaaccgggtcacccaccccgagcccgccgaggtcgtcgccgccctcggccgcgacgaggtgccggcgtacgcgatcccctacgacccgctgctctcggccccctcggtcgccgacctgatgcccgcctgcaacgggacggtcgtctccggggacccggccctgctcgaccgcgaggtgctcggcctcctggtggctggcatgacgatgccgaacgtgctggaccggctcttcgacggcgccgtcgtcgtgactgcgggcgaccggcccgaggtggtgctgggcgtcttgatggcgcacgtgtcgtcgaacttcccgcaggtcgccggcatcgtgctcaacggcgggatcgagctgcccgcccaggtcgcccgcctgttggcgggcatcggcgccacgctgccgatcatcgcgaccgacctggccacccaggagacctcggcggcgctcaccggcgtccgtggccgcctgaccgtgagctcgccccgcaagatcgcggcggcgctggccctgttcgcccagcacgtcgagggcgacgcgctgctcgaccggctcgacgtgtcgccgacgaccgcggtgaccccgctgatgttcgagcaccagctcctggactcggcgaccagccggcggatgcggatcgtgctcccggagggcgaggaggaacggatcctgcgcgccgccgacctgctgctgcgccgcggcgtggccgacctgacgctgctcggcgacccgatccggatcaatgcgcacgccgcccgggtcggagccgacgtctcggccgccaccctgctcgacccccggtcctccgagctcgctgagcggttcgccgaggagtacttcgaccggcgcaagcaccgcggcgtggaccgcgacgacgcgctcgtccgggtgctcgacgagtcctacttcggcaccctgatggtcgagctcgggctcgccgacgggatggtctccggcgccgtccacacgacggcccacacgatccggccggcgctcgaggtggtccgcacggcgcccggggtgtcggtcgtgtcgtcggtgttcttcatgtgcctggagaaccaggtcctcgtgtacggcgactgcgcggtcaacccggacccgaccgcggagcagctcgccgacatcgcgatctcctcggccgagaccgccgcggcgttcggtgtcgagccgcgggtcgcgatgctgtcctacgcgaccgggtcctccggagccggcagcgacgtcgagaaggtctcggcggccacggcgctggtccgcgaccgggccccggagctgctggtcgaggggccgatccagtacgacgcggccatcgaccccgcggtcgcccggaccaagctcccgggatcgccggttgccggccaggcgacggtgttcatcttcccggacctcaacaccggcaacaacacctacaaggcggtgcagcgctccgccggcgcggtcgcgatcggcccggtgctgcaggggctgcgcaagccggtcaacgacctgtcccgcggcgcgacggttcgcgacatcgtcaacaccgtcgcgatcaccgctgtccaggcccagcagctcgccgaggtcgcccgatga

SEQ ID NO: 147915 - protein, 696 aa, Nocardioides sp. JS614
MCTSVYVASVEGYTGKSAVALGILDVLSRRVERVGVFRPIVRNDQATARGERDYVLDLLTAHEAVTLSYDDCTGVTYDDVHADPVAALDTIVERYHRVAEQCDAVVVIGSDYTDVATPTELSYNARIAANLSSPVLLVLNGADRTPAELVTLADIASTAISASHAALFAVVANRVTHPEPAEVVAALGRDEVPAYAIPYDPLLSAPSVADLMPACNGTVVSGDPALLDREVLGLLVAGMTMPNVLDRLFDGAVVVTAGDRPEVVLGVLMAHVSSNFPQVAGIVLNGGIELPAQVARLLAGIGATLPIIATDLATQETSAALTGVRGRLTVSSPRKIAAALALFAQHVEGDALLDRLDVSPTTAVTPLMFEHQLLDSATSRRMRIVLPEGEEERILRAADLLLRRGVADLTLLGDPIRINAHAARVGADVSAATLLDPRSSELAERFAEEYFDRRKHRGVDRDDALVRVLDESYFGTLMVELGLADGMVSGAVHTTAHTIRPALEVVRTAPGVSVVSSVFFMCLENQVLVYGDCAVNPDPTAEQLADIAISSAETAAAFGVEPRVAMLSYATGSSGAGSDVEKVSAATALVRDRAPELLVEGPIQYDAAIDPAVARTKLPGSPVAGQATVFIFPDLNTGNNTYKAVQRSAGAVAIGPVLQGLRKPVNDLSRGATVRDIVNTVAITAVQAQQLAEVAR

SEQ ID NO: 147916 - DNA, 2115 bp, Mycobacterium sp. KMS
  CDS (1)..(2115): transl_table=11
atgtcgctgatgcggcaggctgtgagggtgcctgaccagaccgactcgcgggtttccgccatctacgtcgcgtcgccggagggcgacacaggaaaatccaccatcgcgctcggactgctcgaccgcctgacggcgaccgcgccccgggtcggggtgttccggcccatcacccgatcggggccggcgcgcgactacatcctcgaactgctgctcgcacactccaccgcgggtctgacgtacgaggacagcgtcggcgtcacctaccaccaattgcacgaggatcccgacagcgcactcgccgacatagtcgaccgcttccaccgcgtcgccgaccgatgcgacgtggtgctgattgtcggcagcgactacaccgacgtggcgagccccagcgagctgtcgatgaacgcgcgcatcgccgccaacctcggcgcgccggtcgtcctcgccgtcaaggcccgcgggcgcaccccagacgacgtggtgcaggtcgtcgaggtgtgtctcgacgagatcgccgcccaacacgcctacaccgccgcggtggtcgccaaccggtgcgatcccgaccagctcaccgaggtgcgcgaggcgctgaaacgtgacggcgccccgcaggtctacgtgctgcccgaggaaccgctgctggtcgcaccgtcggtcgccgaactgcgcgatgccgtcgacgggtcgatggtcagcggtgacgagtcgcttctcgaccgcgaggcgttggatgtgctggtcgccggaatgaccgccgagcacgtgctggagcggctgaccgaaggcgtcacggtcgtcacgccgggcgaccggtccgacgtggtactcgccgtcgtgagcgcccatgcggccgagggttttccgtcgctgtcgagcatcatcctcaacggcgggctggaactgcacccgtcgatcgcgaagctggtcgccgggctcgggcttcggctgccgatcgtcgccaccgggtacggcacgttcgaaaccgccagccgggtggcaggcaccagggggcgggtgactgcggcctcggtgcgcaagatcgacaccgcgctgacgctcatggagacccacgtcgacaccgcagaactgctgagccgcctggcgatcccgatccccactgtcgtcacgccgcagatgttcacctaccaactgctcgaccaggcccggtcggatcgcaaacgcatcgtgctgcccgagggggacgacgaccggatcctcaaagcggccgggcgactgctccagcgcggcgtcgcggacctcacgatcctcggcgaggagggcccggtacgggcgcgcgcggccgaactcggtgtcgacctcgcggcggcaacggtgctcgacccgcgcaccagtgagctgtgcgaccagttcgccgagcaatacgcagaactgcgcaggcacaagggcgtcaccgtcgagcaggcccgcgagatcatccacgacgtctcgtacttcggcaccatgttggtgcacaacgacatggtcgacggcatggtctccggtgccgcgcacacgacggcgcacacggtccgtccggcgttcgagatcatcaagaccctgcccgatgtgtcgacggtgtcgagcatcttcttgatgtgcctggccgaccgcgtgctcgcctacggcgactgcgcgatcgttcccgacccgacagccgaacagctggccgacatcgccatctcgtccgcgcgcaccgcggcgcagttcggcatcgagccgcgggtggcgatgctgtcctactcgacagggacctccggtaccggcgctgacgtcgaaaaggtccgcgaggcaacggacctggtgcacaagcgggaacccgacctgctcgtcgaggggccgatccagtacgacgccgcagtggaaccgtcggtcgccaagaccaagatgccggattcacccgtcgccggccgcgccaccgtgctgatcttccccgacctcaacaccggcaacaacacgtacaaggcggtgcagcgcagcgcaggggccatcgccatcggtccggtgctgcaggggctcaacaaaccggtcaacgacctgtcacgcggtgcgttggtagaggacatcgtcaacacggtcgcgatcaccgcgatccaggcccagggagatcgatga

SEQ ID NO: 147917 - protein, 704 aa, Mycobacterium sp. KMS
MSLMRQAVRVPDQTDSRVSAIYVASPEGDTGKSTIALGLLDRLTATAPRVGVFRPITRSGPARDYILELLLAHSTAGLTYEDSVGVTYHQLHEDPDSALADIVDRFHRVADRCDVVLIVGSDYTDVASPSELSMNARIAANLGAPVVLAVKARGRTPDDVVQVVEVCLDEIAAQHAYTAAVVANRCDPDQLTEVREALKRDGAPQVYVLPEEPLLVAPSVAELRDAVDGSMVSGDESLLDREALDVLVAGMTAEHVLERLTEGVTVVTPGDRSDVVLAVVSAHAAEGFPSLSSIILNGGLELHPSIAKLVAGLGLRLPIVATGYGTFETASRVAGTRGRVTAASVRKIDTALTLMETHVDTAELLSRLAIPIPTVVTPQMFTYQLLDQARSDRKRIVLPEGDDDRILKAAGRLLQRGVADLTILGEEGPVRARAAELGVDLAAATVLDPRTSELCDQFAEQYAELRRHKGVTVEQAREIIHDVSYFGTMLVHNDMVDGMVSGAAHTTAHTVRPAFEIIKTLPDVSTVSSIFLMCLADRVLAYGDCAIVPDPTAEQLADIAISSARTAAQFGIEPRVAMLSYSTGTSGTGADVEKVREATDLVHKREPDLLVEGPIQYDAAVEPSVAKTKMPDSPVAGRATVLIFPDLNTGNNTYKAVQRSAGAIAIGPVLQGLNKPVNDLSRGALVEDIVNTVAITAIQAQGDR

SEQ ID NO: 147918 - DNA, 2139 bp, Haemophilus somnus 2336
  CDS (1)..(2139): transl_table=11
atgtctcgtacaatcatccttattcctattagcaccggtgttggtttaaccagtgtaagtttaggtttaatccacgctcttgaacaaaaaggggcaaaaatcggtttcatgaagccaatttcgcaaccaagtaccgatgaagataaattagaccgcactacttcaattgtgcgtaccagtacaacacttgaaacagccgaaccgtttatgctaagtgtggctgaaaatctaatcggtcaaaatcaatccgatgtgttactggaaaagattgttgaaaatcatcaacaactagctaaaaataatgaattgattattgttgaaggcttagttccaactcgcaagcatggctatgcaaacagtatcaactacgaaattgcaaaggcgttagatgctgaaatcgtattagttgcagcacctgcaacagaaacgccggcagagttaaaagaacgcattgaagcagcggcctcccaatttggcggaaaaaataatccaaacttacttggtgtcataattaataaatttaatgccccaattgatgaatccggacgtactcgtccagacctaagtgaaatttttgatgcttaccaacataaacaaaataaccttaatgaggtttacaagctatttgaaaaaagccctattaaagtattagcttgcgttccgtggaatgcggagcttattgcaactcgtgctattgatttggtcaatcatttaggtgcttctattctacatgagggtgatattaaaactcgtcgtattcgtagtattactttctgtgctcgttcattacaaaatatggttgagcatttcaaaacaggtagtctgttagttacctccgctgatcgtcctgatgtcctaaccgcctccgcacttgctgcgactaacgggatcgagctaggtggtattttactcacaggtggttacaaaattgacaatcaaattaaaaaactatgccaaccagtatttgaaaataccggcttacctatttttcgaattgaaggtaatacatggcaaagtgcattggctctacaaagcttcaaccttgaagtacctgttgatgataaagaacgcatcgaaaacattaaacaatacacaagccaacaatttaaatcttcatttattgaaaatttagttgccgcctcaactcgtcctcgtcgtttatctcctcctgcattccgttttcaattaactgagttagctcgtgcagccaaaaaacgaatagtattacctgagggagatgaacctcgtacagttaaagctgctagtctttgtgcagaacgtggtattgcagaatgtatcttattagcaaatcctgatgatgttaaacgtgttgctgatgctcaaggcgttgtattaggaaaaggtattacaataattgatcctgtctctgtacgtgaaaattatgtagaccgtttagtagaattacgtaaagccaaaggtatgactgaaacgtctgcacgagagcaattagaagataccgtcgtattaggcactatgatgcttgaggctaacgaagtcgatggacttgtttcaggtgcgatacatacaacagcgaatactattcgtccaccgatgcaaatcattaaaacagcacctggtaactcaattgtttcttcaatcttctttatgttattacctgatcaagtgcttgtttatggtgactgtgcagttaatcctgatccaactgccgaacaattggcagagattgcaattcaatctgctgattccgcaaaagcattcggtattgatccaaaagtggcgatgatctcttactcaacaggcacgtcaggttccggtgctgatgttgagaaagtaaaagaagcaactcgtattgcccaagaaaaacgcccggatttattaatagatggcccattacaatatgatgcggcagtaatggaagatgtagcaaaatctaaagcaccaaattctccggttgccggtaaagcgacagtatttgtcttcccagatctcaacaccggaaatacaacctataaagcagtacaacgctcagcagatttaatctctattggtccgatgttacaaggtatgcgtaagccggtcaatgacctatctcgtggagcattggttgatgatattgtgtatactattgcattaactgcaattcaagcgacacaataa

SEQ ID NO: 147919 - protein, 712 aa, Haemophilus somnus 2336
MSRTIILIPISTGVGLTSVSLGLIHALEQKGAKIGFMKPISQPSTDEDKLDRTTSIVRTSTTLETAEPFMLSVAENLIGQNQSDVLLEKIVENHQQLAKNNELIIVEGLVPTRKHGYANSINYEIAKALDAEIVLVAAPATETPAELKERIEAAASQFGGKNNPNLLGVIINKFNAPIDESGRTRPDLSEIFDAYQHKQNNLNEVYKLFEKSPIKVLACVPWNAELIATRAIDLVNHLGASILHEGDIKTRRIRSITFCARSLQNMVEHFKTGSLLVTSADRPDVLTASALAATNGIELGGILLTGGYKIDNQIKKLCQPVFENTGLPIFRIEGNTWQSALALQSFNLEVPVDDKERIENIKQYTSQQFKSSFIENLVAASTRPRRLSPPAFRFQLTELARAAKKRIVLPEGDEPRTVKAASLCAERGIAECILLANPDDVKRVADAQGVVLGKGITIIDPVSVRENYVDRLVELRKAKGMTETSAREQLEDTVVLGTMMLEANEVDGLVSGAIHTTANTIRPPMQIIKTAPGNSIVSSIFFMLLPDQVLVYGDCAVNPDPTAEQLAEIAIQSADSAKAFGIDPKVAMISYSTGTSGSGADVEKVKEATRIAQEKRPDLLIDGPLQYDAAVMEDVAKSKAPNSPVAGKATVFVFPDLNTGNTTYKAVQRSADLISIGPMLQGMRKPVNDLSRGALVDDIVYTIALTAIQATQ

SEQ ID NO: 147920 - DNA, 2136 bp, Haemophilus influenzae R2846
  CDS (1)..(2136): transl_table=11
atgtctcgcacgattattcttatccctgtaagtacaggcgtgggtttaactagcattagtcttggattaatccactctctcgaacaaaaaggcacaaaagttgcttttatgaaaccagtttctcaaccaagcactggcgaagataaattggatcgcacaacttctattattcgcactagcactagccttgaaactgccgaaccttttatgttaagcgtggcagaatcattaattggtcaaaatcagtctgacgtattgttagaaaaaattgtagctaaccaccaacaattaaccaaaaataatgatatcgttgtagttgaaggtttaatacccacaagaaaacacggttacgcaaacagtatcaactatgaaattgcacaagcattagatgcggaaatcgtattagttgcagcacctgcaactgaaacgccaaccgaattaaaagatcgcgtagaagctgcagcctctctatttggtggtaaaaacaatccaaatcttttaggtgttgttgtaaacaaattcaatgcacctgttgatgaatcagatcgtactcgtccagatcttgctgaaatttttgattcattccaacacaatcatattagcgaaacagaagtaaacaagttatttgcaggtagtgccatcaagttattagcttgtgtgccttggaatgcaaatttaatcgcgacacgagcaattgacttagtcaaacatttaggtgcatcaatcattaatgaaggagaaatcaatcgccgtatccgtggcatcactttctgtgcaagaagtttatcaaatatgatagaacatttccgcgcaggtagcttattggttgcctctgctgaccgtcctgatgtaattgttgctgcttcacttgctgctgcaaacggtattgaaatcggcggtattctattaacaggcggctacaaaattgatgctcaaattaataaactttgccgtccaacttttgaaaaagcgaaattaccgatcttccgtattgaaggcaatacttggcaaactgcattaagtttacaaagttttaatcttgaagtgcctgttgatgacaaagaacgtattgaaaatattaaacaatacattagccaacactttaatgctgactttatcaataatttagttgcagattccagccgtttacctcgcttatccccacctgcattccgtttccaattaactgaacttgctcgtgcggcgaaaaaacgtattgtgcttcctgaaggcgatgaacctcgtacaatcaaagctgccgtactttgtgcagaacgtggcattgcggaatgtgtgcttttagcagatcctgcatccgttcaacgagttgcagaagcacaaggtgttaaattaggtaaaggtattacaatcatcaatcctgctgacgttcgtgaaaactatgttgatcgtttagttgaattacgtaaagcaaaaggtatgaccgaaactgcggctcgtgaacaattagaagacaccgtagtacttggtaccatgatgttagaagcaaatgaagtagatggtttagtatctggcgctgtccacaccactgcaaacaccattcgcccaccaatgcaaatcatcaaaactgcaccaggtagttcgattgtttcttctatcttctttatgttattaccagatcaagtgcttgtttatggtgactgtgcggtaaacccagatccaactgcagaacaacttgctgaaattgcaattcaatctgcggattctgcgaaagcatttggtattgatccaaaagtcgcgatgatttcttactcaacaggtacatctggtagcggtgctgatgtagaaaaagtgaaagaagcaactcgtattgcgaaagaaaaacgccctgatttattaatcgatggcccattacaatacgatgcggctgtgatggaagatgtggctcgctctaaagcaccaaattcacctgtagcaggtaaagcaacggtatttgtattccctgacttaaatactggtaacacgacttacaaagcagtacaacgttctgcagatttagtgtctattggcccaatgcttcaaggtatgcgcaaaccagtcaatgacttatctcgtggtgccttagttgatgatattgtgtacacaattgccttaaccgcaattcaagcaacacaataa

SEQ ID NO: 147921 - protein, 711 aa, Haemophilus influenzae R2846
MSRTIILIPVSTGVGLTSISLGLIHSLEQKGTKVAFMKPVSQPSTGEDKLDRTTSIIRTSTSLETAEPFMLSVAESLIGQNQSDVLLEKIVANHQQLTKNNDIVVVEGLIPTRKHGYANSINYEIAQALDAEIVLVAAPATETPTELKDRVEAAASLFGGKNNPNLLGVVVNKFNAPVDESDRTRPDLAEIFDSFQHNHISETEVNKLFAGSAIKLLACVPWNANLIATRAIDLVKHLGASIINEGEINRRIRGITFCARSLSNMIEHFRAGSLLVASADRPDVIVAASLAAANGIEIGGILLTGGYKIDAQINKLCRPTFEKAKLPIFRIEGNTWQTALSLQSFNLEVPVDDKERIENIKQYISQHFNADFINNLVADSSRLPRLSPPAFRFQLTELARAAKKRIVLPEGDEPRTIKAAVLCAERGIAECVLLADPASVQRVAEAQGVKLGKGITIINPADVRENYVDRLVELRKAKGMTETAAREQLEDTVVLGTMMLEANEVDGLVSGAVHTTANTIRPPMQIIKTAPGSSIVSSIFFMLLPDQVLVYGDCAVNPDPTAEQLAEIAIQSADSAKAFGIDPKVAMISYSTGTSGSGADVEKVKEATRIAKEKRPDLLIDGPLQYDAAVMEDVARSKAPNSPVAGKATVFVFPDLNTGNTTYKAVQRSADLVSIGPMLQGMRKPVNDLSRGALVDDIVYTIALTAIQATQ

SEQ ID NO: 147922 - DNA, 2148 bp, Pseudoalteromonas tunicata D2
  CDS (1)..(2148): transl_table=11
atgtctcatcgcatcatgcttattcctgtttcaacgggagtgggtttaacctctgtatcggtcggaattgtccgtgcgcttgaacaaaaagcggtccgggtaaacttttttaaacccattgcacaaccaagagcgggcgaaagcggccctgaaaaatcaaccgaaattgtcaaattaggttcaaacatcaaaccaccgatgccgattgaactgaaatatgctgagcaaatgattggtgatggtaaaggtgatattttactcgaagaggtgatagctcgctttgaagaaagtgtgcacgatggtgaagtggcgattatcgaaggtatggtgccgacccgaaaacaaccttatgctggtcgactaaaccgtgaaatagcgcaagcacttggggccgaaattgtatttgttttaacaccaggcaacgatccgcttgatcaaatagaacaccgcttagagattgcagcaagcttttatggcggcgttgaaaacgagcgtgtccttggctgtatttttaacaaagtgaatgctccccttgatgaagaaggtcgagctcgtgcagatctggcagaacaattcgatccagaaaaccttgttgcagaacaaaatcgcctagcggccatgccgttatttagaaagcatccatttaaattactaggttcggtaccttgggattttgagctggttgcaccacgagtctctgatcttgcgcgttacctcaaagccgaaattctcaatgagggtgattttgctcaccgtcgcctgcgcagtgtcacattttgtgcgcgcacagtatcaaatattctatgtcattttacccctggggtattgttagtcacaccgggcgaccgctctgatgtattagttgctgcctgtttatctgcaatgaatggcactaaaattggcgcaattttattaacgggtggctttatacctgaagataggatcatgaaactatgtgaacaagcgatggccactggattaccaatattatcaacccaagcagatacatggcgcacatcattgttactgcataattttaatatggaagtaccaattgatgatgaacagcgcattgaacgagtaaaagaccataatgcagctcatcttgatgccgattggctccaaagcttaactaaaggggtcgaaaaaactcgtaaaatgtcaccacctgcctttaggcatttattgacaactaaagcacgattagccaataaaaccatcgtattacctgaaggtacggagcctcgcaccatcaaagcggctgcaatttgtggcgaacgcggcattgcaaaaaccgtattacttggcgagcgtgaagaaattttacgtattgctgaacaacaaggtgtacaacttaatgacgctgtaaccattattgacccggttgatgtgcgtgaaaactatgtagcacctctggtagagcttcgtaaaaacaaggggatgaccgaggttattgcacaagaacaattactcgacaataccgttttggccaccatgatgctggcgcaaggtcaagtcgacggattagtgtcaggtgctgtcaataccacagccaatacaattcgcccgccccttcaacttgttaaaacagcgccaggttcgtctttggtctcgtcaatattttttatgctattacccgaccaagttttggtttacggcgattgtgcaattaatcccgacccaacggcggaacaattagctgatatcgccattcaatcggcagattctgcaatcgcttttggtattgatgccaaagttgctatgatttcttacagcaccggcacttcaggtgtcggggcggatgttgagaaagtaagattagcaaccgagcttgcacaagcaaaaagaccagatcttattattgatggcccactgcaatatgatgccgcgattatggaaagtgttgctcgcaaaaaagcgcccaatagtttagttgcaggcaaagctacggtctttattttccccgatctcaatacgggtaataccacctataaagcagtgcagcgaagtgccaagctcattagcatcggcccaatgttgcaagggatgagaaaaccagtgaatgatttaagtcgtggtgccttggttgatgacattgtttacactattgcactcactgcaattcaagcaactcaagttacccattaa

SEQ ID NO: 147923 - protein, 715 aa, Pseudoalteromonas tunicata D2
MSHRIMLIPVSTGVGLTSVSVGIVRALEQKAVRVNFFKPIAQPRAGESGPEKSTEIVKLGSNIKPPMPIELKYAEQMIGDGKGDILLEEVIARFEESVHDGEVAIIEGMVPTRKQPYAGRLNREIAQALGAEIVFVLTPGNDPLDQIEHRLEIAASFYGGVENERVLGCIFNKVNAPLDEEGRARADLAEQFDPENLVAEQNRLAAMPLFRKHPFKLLGSVPWDFELVAPRVSDLARYLKAEILNEGDFAHRRLRSVTFCARTVSNILCHFTPGVLLVTPGDRSDVLVAACLSAMNGTKIGAILLTGGFIPEDRIMKLCEQAMATGLPILSTQADTWRTSLLLHNFNMEVPIDDEQRIERVKDHNAAHLDADWLQSLTKGVEKTRKMSPPAFRHLLTTKARLANKTIVLPEGTEPRTIKAAAICGERGIAKTVLLGEREEILRIAEQQGVQLNDAVTIIDPVDVRENYVAPLVELRKNKGMTEVIAQEQLLDNTVLATMMLAQGQVDGLVSGAVNTTANTIRPPLQLVKTAPGSSLVSSIFFMLLPDQVLVYGDCAINPDPTAEQLADIAIQSADSAIAFGIDAKVAMISYSTGTSGVGADVEKVRLATELAQAKRPDLIIDGPLQYDAAIMESVARKKAPNSLVAGKATVFIFPDLNTGNTTYKAVQRSAKLISIGPMLQGMRKPVNDLSRGALVDDIVYTIALTAIQATQVTH

SEQ ID NO: 147924 - DNA, 2148 bp, Photobacterium sp. SKA34
  CDS (1)..(2148): transl_table=11
gtgtcccgtactattatgcttgttccagttggcgctggcgttggtctaacaagtgttagccttggtgtacttcgtgcaatggaacgcaaaggcgttcgcgtttctttctttaagcctattgcgcaaccgcgtaaaggtggcgatcaaccagatctaacaacaacaattattagtgctaacagcgatatgaaaattgctgagtcattctcaatggcaagcgctgaagaattgatccgtaacgacaaaactgatgttcttctagaagacattgttgcacgctttaaagcggcaacagcagatgctgacgtaacgctaatcgaaggtctagttgctactcgtaagcacccttttgcaaaccaaatcaactttgaaattgcaaaaacactagatgctgaaatcgtgttcgttgtatctccaggtactgataacccagctcaacttaaagagcgtatcgaagtagcatgttctaacttcggtggtatcaagaacaaacaaatctctggtgttattgttaacaaacttaacgcaccagttgatgctgaaggtcgtactcgtccagatctttctgagatctttgatgacgcagaaggtactgttccttcaaatgttgaaatcatgcaagtgttcaactcaagcccaattcgtgtactaggttgtgcaccttggagcgcagagctaatcgctacacgtgcaactgatattgctcagcacctaaatgctgaaattatcaatgcaggtgatatcgaaactcgtcgtattaagagcatcactttctgtgcacgttctatccctaatatggttgagcacttccgtccaggttcactgcttgtaacgtcagctgaccgtccagacgtaatcgttgcagcatgtcttgctgcaatgaacggcgttgaactaggtgcacttcttctaacaggtggttacgacctaccaaaacctgttatggatctatgtgagcgcgcgttctcgactggtcttccagtaatgacggctcaaggtaacacttggcagacctctctaaatctacagagcttcacgctagaagtacctgcagacgataaagagcgtgtagagctagttaacgagtacatggcaagccacatcgacggtaactggattgagtctctaactgaaggttcaaaccgtgagcgtcgccttagcccaccagcattccgttaccagttaactgagctagctcgtaaagcggctaagcgtatcgttcttcctgaaggtgacgagccacgcacagttaaagctgcagctatctgtgctgagcgcggtatcgcggaatgtgtacttctaggtaaccctgatgaaatccgtcgcgttgctgagcaacaaggcgtagttcttggtactggcgtaacgatcatcaactctgacgaagtacgtgaaaactacgttgctcgtttagttgagctacgtggcgcgaaaggtatgactgacgttgttgctcgtgagaagctacaagattcagtattcctaggcacaatgatgcttgagaacaacgaagttgacggtctagtgtctggtgctgttcacactacagcaaacactattgttcctccgttccaaatcatcaagactgcacctgatgcatctatcgtatcttctgtattcttcatgcttctaccagaccaagtattggtttacggtgactgtgcgatcaacccagatccaacagctgagcaacttgctgaaatcgctatccaatctgcagattctgcaaaagcatttggtatcgacccacgtgttgctatgatctcttactctactggtgaatcaggtaagggtgcagacgtagataaagtacgtgaagcaacgaagatcgctcaagagaaacgtccagatctagtgatcgatggtcctcttcagtacgatgctgcaatcatggaaaacgtagctgcttctaaagcacctaactctccagtcgcaggtaaagcaactgtatttgtattcccagacctaaacactggtaacacaacatacaaagcggtacagcgttcagcagatctagtatctatcggtccaatgcttcagggcatgcgtaagccagttaacgacctttctcgtggcgcactagtagacgatatcgtttataccgttgcactaactgcgattcaggcagaacaagctacagaaaaataa

SEQ ID NO: 147925 - protein, 715 aa, Photobacterium sp. SKA34
MSRTIMLVPVGAGVGLTSVSLGVLRAMERKGVRVSFFKPIAQPRKGGDQPDLTTTIISANSDMKIAESFSMASAEELIRNDKTDVLLEDIVARFKAATADADVTLIEGLVATRKHPFANQINFEIAKTLDAEIVFVVSPGTDNPAQLKERIEVACSNFGGIKNKQISGVIVNKLNAPVDAEGRTRPDLSEIFDDAEGTVPSNVEIMQVFNSSPIRVLGCAPWSAELIATRATDIAQHLNAEIINAGDIETRRIKSITFCARSIPNMVEHFRPGSLLVTSADRPDVIVAACLAAMNGVELGALLLTGGYDLPKPVMDLCERAFSTGLPVMTAQGNTWQTSLNLQSFTLEVPADDKERVELVNEYMASHIDGNWIESLTEGSNRERRLSPPAFRYQLTELARKAAKRIVLPEGDEPRTVKAAAICAERGIAECVLLGNPDEIRRVAEQQGVVLGTGVTIINSDEVRENYVARLVELRGAKGMTDVVAREKLQDSVFLGTMMLENNEVDGLVSGAVHTTANTIVPPFQIIKTAPDASIVSSVFFMLLPDQVLVYGDCAINPDPTAEQLAEIAIQSADSAKAFGIDPRVAMISYSTGESGKGADVDKVREATKIAQEKRPDLVIDGPLQYDAAIMENVAASKAPNSPVAGKATVFVFPDLNTGNTTYKAVQRSADLVSIGPMLQGMRKPVNDLSRGALVDDIVYTVALTAIQAEQATEK

SEQ ID NO: 147926 - DNA, 2133 bp, Oceanobacter sp. RED65
  CDS (1)..(2133): transl_table=11
atgcagcatacgtttttcattgcgccgacggaaatgaaaaccggactcacgtccattacattgggactcatgcgcgcactagatcaactgggcgtaaaagtcgccgcatgcaaacctatttctcgcgaacaatacgacaatactcaccgttcgatagaattaatcgccgccgccagtggcaagcaaccacccactcccattagcttgccagaagcacaaaaaatgatgagcgataaaaaacatgatcgcctcatggaagaagtggttgccatgcaccataagatcgccaaagacgtcgatgtggtgattgtcgagggtgtcgaacctgatagaaatgaaccctacgcgttgcgtctgaatgtagaaatggcaaaaacattggacgcagaagtcattctcgtggctgcacctaatgatcgtgatcaaaaagccttggcaagccatgtggatatggcgaagaacctttacggtggtgacaaaaaccaaaagctattgggtattatcctgaataaaattaatgcccctgcaaaccgcagtattccaattaaaacgcaggagggaccagaacctacgccactcagtttggacgaactcaaagcgtcctataaatctttggaaaccgatcattttaaattgcttggccttattccatgggattctgatttggttgcaccgcgaaccaaagatattgccaattacttacaagctgatgtcatcagtgcggccaatatggaggacgcccgtgttaaacgcatcagtctttgcgcacgtactgttcctaacatgattacagctttacaacctggcgccctcattgtgacaccaggtgaccgcgaagacatattgctagccgctgctatggctgcacaaaacggcatgcccttggcgggccttttatttaccagcgatcttgatccagacgaacgtgtcatggggctcatcgcgcccgctctagcccatatgccagtgctgaaagtaagcacagacaccttcacaacagcaacacagctagccagtatggacgatggtgttaaagccagcgacccacagcgtatgaacgcgatcatgacgcacatggcagagcacttggacagtgaatatctagcagcgcgtttagaagtagaccatcacgtgcgactcagtcctgcagccttccgttaccaacttgtgcagcttgccagccaagccaataagcgcatcgtattgccagagggtgatgagccccgaaccattcaggcagccgccatgtgccagcaacgaggtattgcacgctgtgttctgctaggtaacccagagcgaattcaacaagtggcagcaagtttaggtgtaacattaccggaagaccttgaaatactcgatccagaagccatccgtgagcgctatatcgatccaatggtcgagctacgtaaacacaaaaacctaacggctccaatggcagaggcacagctggaagacaatgtcgtattgggaacaatgatgcttgccctagacgaagtggatggtttagtcagtggtgccgtacacactacagcgaatactattcgtcctgcactgcagatagtaaaaaccgctccagacgctaagctggtgtcctcggtattttttatgctgttaccagaacaggtaatggtatatggcgactgtgcagtcaacccagaccccaatgcttctgagctagcggatatcgcactgcaaagcgcacaaagtgcagaagcctttggtatcgcccccaaagttgccatgatcagctacagcactggctcatccggcagtggcagcgatgtggaaaaagtacgtgaagccaccagcattgcacaaaaaaaccggcccgatctgctgatcgatgggccactgcaatatgatgcggccaccaccgcaagcgtagccgcatctaaagcacccgatagtaaggttgccggccaggcaagcgtcgttattttccctgacctaaatacaggtaatacgacctataaagcggtgcagcgcagtgcaaatgtcgtaagtattggcccaatgttgcaaggtttggcaaaaccggtaaatgatttgtcccgtggtgctttagtagaagatattatctacaccattgcactgacagctatccaagcggcgaatcaagccaaagcaaaataa

SEQ ID NO: 147927 - protein, 710 aa, Oceanobacter sp. RED65
MQHTFFIAPTEMKTGLTSITLGLMRALDQLGVKVAACKPISREQYDNTHRSIELIAAASGKQPPTPISLPEAQKMMSDKKHDRLMEEVVAMHHKIAKDVDVVIVEGVEPDRNEPYALRLNVEMAKTLDAEVILVAAPNDRDQKALASHVDMAKNLYGGDKNQKLLGIILNKINAPANRSIPIKTQEGPEPTPLSLDELKASYKSLETDHFKLLGLIPWDSDLVAPRTKDIANYLQADVISAANMEDARVKRISLCARTVPNMITALQPGALIVTPGDREDILLAAAMAAQNGMPLAGLLFTSDLDPDERVMGLIAPALAHMPVLKVSTDTFTTATQLASMDDGVKASDPQRMNAIMTHMAEHLDSEYLAARLEVDHHVRLSPAAFRYQLVQLASQANKRIVLPEGDEPRTIQAAAMCQQRGIARCVLLGNPERIQQVAASLGVTLPEDLEILDPEAIRERYIDPMVELRKHKNLTAPMAEAQLEDNVVLGTMMLALDEVDGLVSGAVHTTANTIRPALQIVKTAPDAKLVSSVFFMLLPEQVMVYGDCAVNPDPNASELADIALQSAQSAEAFGIAPKVAMISYSTGSSGSGSDVEKVREATSIAQKNRPDLLIDGPLQYDAATTASVAASKAPDSKVAGQASVVIFPDLNTGNTTYKAVQRSANVVSIGPMLQGLAKPVNDLSRGALVEDIIYTIALTAIQAANQAKAK

SEQ ID NO: 147928 - DNA, 2154 bp, Alteromonadales bacterium TW-7
  CDS (1)..(2154): transl_table=11
atggcacaccgtattatgttgataccgatttctacgggagttggtttaacatctgtttccgtcgggcttgtgcgtgcgcttgagcaaaaggcggtaaaagttaatttctttaaacctattgctcaaccgcgctctggcgaaaccggtccagaaaaatcgacacaaataataaagcaaggctcccctattgacccaccaacaccgtttgcattggattacgcagagcaaatgattggtgatgcaaagggcgacgacttattagaagaaattgttgagcgctttgaaagtaaaattaacgacgatgaagtagccattattgaaggcatggttccgactcgtaaacaaccttatgcagggcgcgtaaaccgtgaaatagcgcaaacactcggcgcagatattgtatttgtattaacgcctggtaacgataatattacccaacttgaagatcgtcttgagattgctgctggtaattacggtggtattgaccacccgcgtgtattaggctgtatttttaataaagtaaatgcccctctagatgaagaaggcagagcacgcgccgatttagtcgactcttacaaacctgatgaagtagataacgaactaaaccgtttagcatcactgccaatttttagaaaaaacccatttatgttacttggtgcaataccatgggattttgatttagtcgcaccacgtgtgaaagacctaagtgcgtatttaaaagccacaattattaacgaaggtgacatgctgcatcgacgcctgcgtcgtatcacattttgtgcacgtacagtgtctaatattttaaaccatttcacaccaggtgcactattagttactcctggcgatcgctctgatattttagtagctgcgtgtttatcggcaatgaatggtactaaaattggggcaatactactcaccggtggttttatgccagaacagcgtattatggcgctgtgcgaacaagcaatgcaaactggcctcccaattttagcaacagaagccgatacatggcgaacatcgttgttacttcataactttaatatggaagtgccaagcgatgatgaccaacgtatagaaaaagtgaaaagccacaatgctgaatatattgactcagattggctgaactcactggcaaaaaatgtggggaaaacacgtaaactctcgccaccagctttcagatacttacttacagataaagcccgtaaagcaggcaaaacggttgttttacctgaaggcaacgaacctagaactattaaagcggctgctatctgtgggcaacgcggtatagcaaaaaccattttattaggtgatcgcgaagaaataatgcgtattgctgagcaacaaggtatagagctcaacgaaaatgtaagtattgtagaaccaagcagcatcattaatgattatgtcgagcctatggtcgaaatccgaaaaagcaaaggtctcactgctgttgtagcgcaagaacaattactcgataatgttgtactaggtactatgatgcttgaacaaggcaaagttgacggacttgtttcaggagcagttaacacaaccgctaatacaattagaccgccattacagctcatcaaaacggccccgggctcatcgcttgtatcgtcggtattttttatgttgctgcctgatcaggtactcgtttacggagactgtgcaattaacccagatccaaatgctgagcaacttgctgacattgcgattcagtcagctgactcagctgcagcttttggtatagagccgcgtgttgccatgatcagctacagtacaggtacatctggtacaggagccgacgttgaaaaagtgcgagaggcaaccaaaatagctcaacaaaaacgtcccgatttgattattgatggtccccttcagtacgatgcagcaattatggaaaacgttgcgcttaaaaaagcaccaaatagccccgtagcgggtaaagcaacggtgtttattttccctgatttaaataccggtaatacaacctataaagccgtgcaaagaagcgcagacctcatcagtattggtccaatgcttcaaggtatgcgtaaaccagtcaacgatttaagccgtggtgcattagttgatgacattgtatacacaatcgcacttaccgctattcaagcagcgcaagtcgaagcacttaattaa

SEQ ID NO: 147929 - protein, 717 aa, Alteromonadales bacterium TW-7
MAHRIMLIPISTGVGLTSVSVGLVRALEQKAVKVNFFKPIAQPRSGETGPEKSTQIIKQGSPIDPPTPFALDYAEQMIGDAKGDDLLEEIVERFESKINDDEVAIIEGMVPTRKQPYAGRVNREIAQTLGADIVFVLTPGNDNITQLEDRLEIAAGNYGGIDHPRVLGCIFNKVNAPLDEEGRARADLVDSYKPDEVDNELNRLASLPIFRKNPFMLLGAIPWDFDLVAPRVKDLSAYLKATIINEGDMLHRRLRRITFCARTVSNILNHFTPGALLVTPGDRSDILVAACLSAMNGTKIGAILLTGGFMPEQRIMALCEQAMQTGLPILATEADTWRTSLLLHNFNMEVPSDDDQRIEKVKSHNAEYIDSDWLNSLAKNVGKTRKLSPPAFRYLLTDKARKAGKTVVLPEGNEPRTIKAAAICGQRGIAKTILLGDREEIMRIAEQQGIELNENVSIVEPSSIINDYVEPMVEIRKSKGLTAVVAQEQLLDNVVLGTMMLEQGKVDGLVSGAVNTTANTIRPPLQLIKTAPGSSLVSSVFFMLLPDQVLVYGDCAINPDPNAEQLADIAIQSADSAAAFGIEPRVAMISYSTGTSGTGADVEKVREATKIAQQKRPDLIIDGPLQYDAAIMENVALKKAPNSPVAGKATVFIFPDLNTGNTTYKAVQRSADLISIGPMLQGMRKPVNDLSRGALVDDIVYTIALTAIQAAQVEALN

SEQ ID NO: 147930 - DNA, 2088 bp, Pseudomonas putida GB-1
  CDS (1)..(2088): transl_table=11
atgcagacatttttcattgcgccgaccgacttcggtgtcggcctgacatccatcagcctgggcctggtgcgtaccctggagcgcgccggcctgaaggtcggtttcttcaagccgatcgcccaaccccacccgggtgacaccggccccgagcgctctaccgaactggtggctcgcacccacggtatcaaccctccggtaccactgagcctggcccaggtcgagcgcatgctcggcgatggccagttggacgagttgctggaggaaatcatccgtctctaccagcaagcctgtatcggcaatgacgtggtagtggtcgagggtatggtgcccacgcgccacgccagctacgccgcgcgggtcaaccttcacctggcgaaaagcctggatgccgaggtgatcctggtatcggcaccggaaaacgaagtgctcagcgaactgtccggccgggtcgaactacaggcccagctgttcggcgggccgcgcgacccgaaagtgctcggggtgatcctcaacaaggttcgcaccgacgagagcatggccgacttcgccacccgcctgcgtgaacactcgccgttgctgcgcggcaatgacttccgcctgcttggctgcattccctaccaacccgagctgaacgccccgcgtacccgcgacgtggccgagctgctcggcgcccaggtgctcaatgccggcgactacgagcagcggcgcatgagcaagatcatcatctgcgcacgcacggtcgccaacaccgtgccgctgctgacctcgggtaccctggtggtcacgccgggcgaccgcgacgacatcatcctcgccgtcagcctggcggcaatcaatggcgtgccactggccgggctgctgctgaccagcgacagcaagcccgacgcgcgcatccttggcctgtgccgcggcgccctacaggccggcctgccgatcctgtcggtcagcaccggctcgtacgacacggccaaccagctcaactcactgaaccgcgagattcccgtggacgaccgcgagcgcgccgagttcatcaccgacttcgtcgccagccacctcgacgcagcctggctgcaccaacgctgcggcaccccgcgtgaaatgcgcctgtcgccggcagtgttccgctaccagttgatccagcgcgcgcagcaggccaacaagcgcatcgttttgccagaaggtgccgagccgctgttggtgcaggccgcagccatctgccaggcccgtggcattgcccgctgcgtactgctggccaagcccgaagatgtcgaggccgtggcccgcgctcaaggcattgccctgccgcccggcctggaagtcctcgaccccgagctgattcgcgggcgctacgtggagcccatggtggcgctgcgcaagagcaagaacctcaacgcaccgatggccgagcagcaactggaagacccggtcgtgatcggcaccatgatgctggccctggacgaagtggacggcctggtctcgggcctggttcactccaccgccaataccatccgcccggcgctgcagttgatcaagaccgcgccaggctcaagcctggtgtcgtcggtgttcttcatgctgttccccgagcaggtactggtgtacggcgactgcgtgatgaacccccaccccagtgctgccgaactggcagagatcgcccgccagagcgccgaatcggcgcaggccttcggtatcgcgccgcgggtggcgatgatcagttattcaagcgattcggccagcgatgaagaagtcgagaaagtgcgcgaagcgactcgcctggcgcaaggtgcagcagaggcgttgctgatcgatgggcctttgcagtatgacgcggcagccaacccggccattgctcgggagctggcaccaggcagccctgtggccgggcgtgccacggtgttcgtgttccccgacctgaataccggcaataccacgcacaaggcggtgcagcgtagcaccgacggggtcagcctggggccgatgttgcagggtttgcgcaagccagtgaacgatttgccacgcggggcacaggttgacgatatcgtgcataccattgccctgacggcgattcaggccagcgtggtgcgctag

SEQ ID NO: 147931 - protein, 695 aa, Pseudomonas putida GB-1
MQTFFIAPTDFGVGLTSISLGLVRTLERAGLKVGFFKPIAQPHPGDTGPERSTELVARTHGINPPVPLSLAQVERMLGDGQLDELLEEIIRLYQQACIGNDVVVVEGMVPTRHASYAARVNLHLAKSLDAEVILVSAPENEVLSELSGRVELQAQLFGGPRDPKVLGVILNKVRTDESMADFATRLREHSPLLRGNDFRLLGCIPYQPELNAPRTRDVAELLGAQVLNAGDYEQRRMSKIIICARTVANTVPLLTSGTLVVTPGDRDDIILAVSLAAINGVPLAGLLLTSDSKPDARILGLCRGALQAGLPILSVSTGSYDTANQLNSLNREIPVDDRERAEFITDFVASHLDAAWLHQRCGTPREMRLSPAVFRYQLIQRAQQANKRIVLPEGAEPLLVQAAAICQARGIARCVLLAKPEDVEAVARAQGIALPPGLEVLDPELIRGRYVEPMVALRKSKNLNAPMAEQQLEDPVVIGTMMLALDEVDGLVSGLVHSTANTIRPALQLIKTAPGSSLVSSVFFMLFPEQVLVYGDCVMNPHPSAAELAEIARQSAESAQAFGIAPRVAMISYSSDSASDEEVEKVREATRLAQGAAEALLIDGPLQYDAAANPAIARELAPGSPVAGRATVFVFPDLNTGNTTHKAVQRSTDGVSLGPMLQGLRKPVNDLPRGAQVDDIVHTIALTAIQASVVR

SEQ ID NO: 147932 - DNA, 2088 bp, Mycobacterium avium
  CDS (1)..(2088): transl_table=11
ttggctgacatttcggcgatctacgttgccgctcccgaaccggagaccggcaagtccaccgtcgcgctgggcctgctgcaccggctgaccgccacggtcgccaaagtcggtgtgtttaggccgattacgcgtgaggggcaggaccgcgactacatcttggagctgctgctgtcgcgcaccaccgcggggctgtcctaccagcagtgcgtcggcgtcacctaccaacagctgcacgccgacggcgacgcggcgatcgccacgatcgtcgacgcctaccacgcgatggccgagctgtgcgacgtggtggtcatcgtcggcagcgactattccgaactgggacaggcgatccggcccgcggagctgtccaccaacgcccggatcgcggtcaacctcggtgcgccgatcctgctgacggtcagcggcaaggggcgcaccgccgccgaggtcgccaccgtcgtgcaggtctgcctggccgagctggacgcccagcacgcgcacaccgcggcggtggtggccaaccggtgcgagccggccgagctggacgcggtggccgaagcgttgcgcggctttccccagcgctgctacgtgctgcccgacgagccgctgctgtcggcgccgacggtggccgaactggaaaaggcggtcgccggttcgccggtcagcggcgaggagtcgctgcgcgagcgcgaggtcaccggcatcctggtcgccgggatgaccgccgaccacgtgctggagcgcctcgcggacggcatggccgtgatcacccccggcgaccgctccgacgtggtgctcgccgtggccagcgcccatgccgccgaaggctttccgtcgctgtcgtgcatcgtgctcaacggcgggttcgcgctgcatccgtccatcgcggcgctggtggccgggctgcggctgcggctgcccatcgtcgccaccgcgctgggcacctacgacaccgccagcgcggcggccgcggcccgcggcagggtgacggccacctcacagcgcaagatcgacaccgcgctggagctgatggaccggcacgtcgacatcgcggatctgcttgaacagcttgccattccgattcccaccgtgaccacgccgcagatgttcatccatcagctgaccctgcaggcgcgcgccgaccgcaagcacatcgtgctgcccgagggcgacgacgaccgcatcctgcgcgccgccggcagggtgctgcagcgccgcgtcgccgacctgaccatcctgggcgacgaggcccggatccggcagcgctcgggagaactcggggtggacctgagcgacgttaaggtcatcgacccgcgcaccagcgcgctgcggcccgagttcgcgcagcagtacgcgcagctgcgcaaggccaagggcgtcaccgtcgagcaagcccgcgaaatcatgcgcgacgcaacgtacttcggcaccatgctggtgtacacctcccaggtcgacggcatggtgtccggcgccgcccacaccaccgcgcacaccgtgcgcccggccttcgagatcatcaagacggtgccggacgtctccaccgtgtccagcatcttcctgatgtgtctgcccgaccgggtgctggcctacggcgactgcgcgatcatccccaacccgacaccggagcagctggccgacatcgcgatctcctcggcgcgcaccgccgcccagttcggcatcgaaccgcgggtggccatgctgtcctactcgacgggtgactccggcaccggagccgacgtcgaaaaggtgagaactgcaacgcaattggtgcggcagcgcaaccccgacctgccggtcgagggccccatccagtacgacgccgccatcgaaccgtcggtcgccgccaccaagctgcgggattcgccggtggccggtcgggccaccgtgttgatctttcccgacctcaacaccggcaacaacacctacaaggcggtgcagcgcagcgccggcgcgctggccatcgggcccgtgctgcagggcctgcgcaagccggtcaacgacctgtcgcggggtgcgctggtcgaagacatcgtgaacacgattgccatcaccgcgattcaggcgcaggggctgcccggtggacggtag

SEQ ID NO: 147933 - protein, 695 aa, Mycobacterium avium
MADISAIYVAAPEPETGKSTVALGLLHRLTATVAKVGVFRPITREGQDRDYILELLLSRTTAGLSYQQCVGVTYQQLHADGDAAIATIVDAYHAMAELCDVVVIVGSDYSELGQAIRPAELSTNARIAVNLGAPILLTVSGKGRTAAEVATVVQVCLAELDAQHAHTAAVVANRCEPAELDAVAEALRGFPQRCYVLPDEPLLSAPTVAELEKAVAGSPVSGEESLREREVTGILVAGMTADHVLERLADGMAVITPGDRSDVVLAVASAHAAEGFPSLSCIVLNGGFALHPSIAALVAGLRLRLPIVATALGTYDTASAAAAARGRVTATSQRKIDTALELMDRHVDIADLLEQLAIPIPTVTTPQMFIHQLTLQARADRKHIVLPEGDDDRILRAAGRVLQRRVADLTILGDEARIRQRSGELGVDLSDVKVIDPRTSALRPEFAQQYAQLRKAKGVTVEQAREIMRDATYFGTMLVYTSQVDGMVSGAAHTTAHTVRPAFEIIKTVPDVSTVSSIFLMCLPDRVLAYGDCAIIPNPTPEQLADIAISSARTAAQFGIEPRVAMLSYSTGDSGTGADVEKVRTATQLVRQRNPDLPVEGPIQYDAAIEPSVAATKLRDSPVAGRATVLIFPDLNTGNNTYKAVQRSAGALAIGPVLQGLRKPVNDLSRGALVEDIVNTIAITAIQAQGLPGGR

SEQ ID NO: 147934 - DNA, 2127 bp, Buchnera aphidicola subsp
  CDS (1)..(2127): transl_table=11
atgtcccgtattataatgttaatccctttagataaagatattggtttgacttcaatcggtttgagtatcatttattttttttatcaaaaaaaaataaaaaagaaatctgttcagtctatattgtatttttcctgcacacaaaattcatctaatagtacatcgcatgttattaataaatatttttcaaaaatcgttcatacagtagattacatagatttttctaaagttttgtttaattctccagagtattcatttttattaaataaagttatagatgaacattataataacaaatttttacgtgaacttattctaattgaaggtataaaaaataattattgtattaattctgaagaaatgaattatgatatttctcaaaatttgaatgcggaagtaatatttatagcaaatttagaaaattcttctcccgaatatattaaaaataaagaaaaaaaaattaatttttttttaaaacaaaaaaaatataaaaatattttaggtgttatttttaatcaaattaattctccttttctagaaaacaaatatgattttataaaaaagttgatagttttaaaaaaaataaaaaatgaaacaaaaacaatagtgcctaaaaaaatattaaaaaataattttttctcaattatagcctgtattccttggaatcgaaacatcgtaacaacacgtgtaatagatctttttaattttttaaatatacaacatactaatttagtacaaaaaaaaaatcatatcatagaagaaataatcatattcgatacgcatcatctaaatttattaaataaacactctttaaatactttagtaatagtttcttttagtcgtgtagatgtttttttaaatgttttaaattgtaatgtgaatcgtagtaaagtgaagtgtattatattaacgggaatattaaaattaaaaaaaaatattgcttctttatataaatttttaattaaaagatctatttctattttttttacagaaaaaaatacaatagagattttatctcaattgcaaaactttaactttgatatttctgtaaaagatataacatatattaaaaaattacagagatatatttccaattttttttgtcattcttcttttatgttttttaaaaaaaaatataatataaatgtaatatatcctccgaaagaattttgttataatttaaaattattatcacaaaaaaaaaataaacgtattaaattgcctgaatcatatgaaattcgaatattaaaatccgttgcaatatgcagtgattctaatattgctcaatgtgtgttattgggtgatccaaaaaaaatttatagtattgcaaacgataacgggattaatttaaaaaaaaatattgaaataattgatcctatttcagtaagacaagaatatcttgcacgttttttagaaatacggaaaggaaaaaatatcaacgaattttctgctaaaaaacaattagaagataatactgttttagcaactttgatactggaatctaatcatgtagatggattagtttctggatccataaataccacatctgatactatacgtccagcattgcaaattattaaaactaatcctcaaagtttattagtctcatctatttttttcatgttgttaccaaatcaagttttaatttatggtgattgtgcaattaatatcaatcctactgcagaagaattagcagtaattgccattcaatctgcagattcagcaaaaatgtttggaatagaaccacgtattgcaatgttgtcttattcaacgggttgttctggatttgggtgtcaagttgaaaaagtcaaagaagctacttctattattaagaatagaagatccgatttaataattgacgggcctatacaatatgatgcagcagtttcaaataaggttgctaaattaaaagcaccttcttcaccaatttcaggatctgcgaatgtttttatttttccagatttaaattctggtaatatagcttataaagcagttcaacgttcttcaagaatagtttctattggtccaatgcttcagggtttgagaaaaccagtaaatgatttgtcaagaggtgcctcagtggaagacattatttataccattgcattaacatcaattcaatctgaataa

SEQ ID NO: 147935 - protein, 708 aa, Buchnera aphidicola subsp
MSRIIMLIPLDKDIGLTSIGLSIIYFFYQKKIKKKSVQSILYFSCTQNSSNSTSHVINKYFSKIVHTVDYIDFSKVLFNSPEYSFLLNKVIDEHYNNKFLRELILIEGIKNNYCINSEEMNYDISQNLNAEVIFIANLENSSPEYIKNKEKKINFFLKQKKYKNILGVIFNQINSPFLENKYDFIKKLIVLKKIKNETKTIVPKKILKNNFFSIIACIPWNRNIVTTRVIDLFNFLNIQHTNLVQKKNHIIEEIIIFDTHHLNLLNKHSLNTLVIVSFSRVDVFLNVLNCNVNRSKVKCIILTGILKLKKNIASLYKFLIKRSISIFFTEKNTIEILSQLQNFNFDISVKDITYIKKLQRYISNFFCHSSFMFFKKKYNINVIYPPKEFCYNLKLLSQKKNKRIKLPESYEIRILKSVAICSDSNIAQCVLLGDPKKIYSIANDNGINLKKNIEIIDPISVRQEYLARFLEIRKGKNINEFSAKKQLEDNTVLATLILESNHVDGLVSGSINTTSDTIRPALQIIKTNPQSLLVSSIFFMLLPNQVLIYGDCAININPTAEELAVIAIQSADSAKMFGIEPRIAMLSYSTGCSGFGCQVEKVKEATSIIKNRRSDLIIDGPIQYDAAVSNKVAKLKAPSSPISGSANVFIFPDLNSGNIAYKAVQRSSRIVSIGPMLQGLRKPVNDLSRGASVEDIIYTIALTSIQSE

SEQ ID NO: 147936 - DNA, 2130 bp, Buchnera aphidicola subsp
  CDS (1)..(2130): transl_table=11
atgtcacgaattataatgttaattcctttaaacaaaaaagttagtttaacaacaataagtttaagtatactttatttttttaataaaaaagaacaaaaaaattgttttaagtctttttcttatttacctcttatcaaatcagataatataaactttatcagggcatatttttcaaaaaaaataaatgtactagatgacataaatttttttaagaaaaattttaattctgatgaatattcttatcttttagataagataattaaggaatgttttaataaaaaaaagataaacgaattcattttaattaagggtattagtcgaaaagagcacgatgatgcagatcaaattaattttgatattgcgcaaaatatagatgcagaagtaatatttatagataatttaaaagatttttctttagggtgttttaaaagaaaagaaagaaaaataaatgtgtttttacaacaaaaaaaatataaaaattttttaggtttaatatttagtgatattaattctccctttatttttaataaaatgaaatataatttttttgataaattaataattttgaaaaatacaaaaaaaaatacatgtattcatgcaattaaaaaaaatattttttttaatagtttttttcgtgttatagcttttattccttggaataaaaaattagttaaatcatctgtaataaatatttttaaatttttaaatgcaactcttgttaatacaataagcataaaagatgcttttataaaaaacataacaatatttgatgaagattcttcagtcattttaaaaaaaagttatgctaatacactagtattaatttcttcaagtcgaatggaaacgtttttcaaaacattatatttagtatgcaaatcaaaaaaaataggtgcaattttattaacaggcgtattaaaattaagtgaaaattctattaaactcttgaaatttttaaccaatcaaggtgttcctgtattttttataaaagaaaacacagtagaaacgttgtctcaattgcaaaaatttaattttaatattaatgttcaaaacaaatattttattaataaattattagaatatacctctagtttctttaataagaatcatttaattagcttaaagaaaaaaactactaatttttataaaaaaacatattcacctaaagaattttgttatcgattaaaaatactatctaaaagcaaacataaacgtattatacttcctgaatcatatgagccacgtatattaaaagcagcttcgatatgtcatcgattaggtatagcagaatgtatattattaggtgatccgaaaaaaatttataatattgcaaatgaaaataaaattgatttaaataaaaatattgagataaaagatcctattttaataagagaccaatatgtcccacgtttattagaaattcgtaaaaataaaaaaatagatgaaatttttgcaagaaagcaattaaaagataatgtgattttagcaactttaatattagaatctggtaaagttgacggattagtttctggaacaattaatacaacagctaatactatacgtccagcactacagataattaaaactgatcctatttattctttagtatcatctatattttttatcttgttaccaaacgaagttttaatttatggagattgcgcaattaatatagaaccaaattcaaaagaattagctgaaattgcaattcaatctgctaattcagcgaaaatgtttggtatagaaccacgtatagcaatgttatcctattctactggtttttctggaactggatggcaagtagaaaaaattagagatgctacttctattgtaaaaagtaaaagacctgatttacttattgatggtccaattcagtatgatgcagcaatttcaaaagaggtggctaagttaaaaattccgtattcgtctattttaggatcagctaatatttttatttttccagatttaaattctggtaatataacctataaagcagttcaaagatcagctgatcttatttgtattggaccaatgctacagggtttaaaaaaaccagtaaatgacttgtcaagaggtgcatcagttgaggatatagtctatacaattgcattgacatcaattcagtctttataa

SEQ ID NO: 147937 - protein, 709 aa, Buchnera aphidicola subsp
MSRIIMLIPLNKKVSLTTISLSILYFFNKKEQKNCFKSFSYLPLIKSDNINFIRAYFSKKINVLDDINFFKKNFNSDEYSYLLDKIIKECFNKKKINEFILIKGISRKEHDDADQINFDIAQNIDAEVIFIDNLKDFSLGCFKRKERKINVFLQQKKYKNFLGLIFSDINSPFIFNKMKYNFFDKLIILKNTKKNTCIHAIKKNIFFNSFFRVIAFIPWNKKLVKSSVINIFKFLNATLVNTISIKDAFIKNITIFDEDSSVILKKSYANTLVLISSSRMETFFKTLYLVCKSKKIGAILLTGVLKLSENSIKLLKFLTNQGVPVFFIKENTVETLSQLQKFNFNINVQNKYFINKLLEYTSSFFNKNHLISLKKKTTNFYKKTYSPKEFCYRLKILSKSKHKRIILPESYEPRILKAASICHRLGIAECILLGDPKKIYNIANENKIDLNKNIEIKDPILIRDQYVPRLLEIRKNKKIDEIFARKQLKDNVILATLILESGKVDGLVSGTINTTANTIRPALQIIKTDPIYSLVSSIFFILLPNEVLIYGDCAINIEPNSKELAEIAIQSANSAKMFGIEPRIAMLSYSTGFSGTGWQVEKIRDATSIVKSKRPDLLIDGPIQYDAAISKEVAKLKIPYSSILGSANIFIFPDLNSGNITYKAVQRSADLICIGPMLQGLKKPVNDLSRGASVEDIVYTIALTSIQSL

SEQ ID NO: 147938 - DNA, 23 bp, Artificial sequence
  primer
atgacgagttccctttatttaag

SEQ ID NO: 147939 - DNA, 20 bp, Artificial sequence
  primer
ttatttaacttgcaaagctg

SEQ ID NO: 147940 - protein, 739 aa, Artificial sequence
  consensus sequence
  Variant (2)..(6): Xaa in position 2 to 6 is any amino acid
  Variant (9)..(23): Xaa in position 9 to 23 is any amino acid
  Variant (24)..(24): Xaa in position 24 is any or no amino acid
  Variant (27)..(45): Xaa in position 27 to 45 is any amino acid
  Variant (46)..(72): Xaa in position 46 to 72 is any or no amino acid
  Variant (74)..(96): Xaa in position 74 to 96 is any amino acid
  Variant (97)..(97): Xaa in position 97 is any or no amino acid
  Variant (99)..(110): Xaa in position 99 to 110 is any amino acid
  Variant (111)..(119): Xaa in position 111 to 119 is any or no amino acid
  Variant (121)..(123): Xaa in position 121 to 123 is any amino acid
  Variant (125)..(126): Xaa in position 125 to 126 is any amino acid
  Variant (128)..(128): Xaa in position 128 is any amino acid
  Variant (130)..(133): Xaa in position 130 to 133 is any amino acid
  Variant (135)..(165): Xaa in position 135 to 165 is any amino acid
  Variant (166)..(181): Xaa in position 166 to 181 is any or no amino acid
  Variant (183)..(206): Xaa in position 183 to 206 is any amino acid
  Variant (207)..(234): Xaa in position 207 to 234 is any or no amino acid
  Variant (236)..(239): Xaa in position 236 to 239 is any amino acid
  Variant (241)..(263): Xaa in position 241 to 263 is any amino acid
  Variant (264)..(265): Xaa in position 264 to 265 is any or no amino acid
  Variant (267)..(287): Xaa in position 267 to 287 is any amino acid
  Variant (289)..(289): Xaa in position 289 is any amino acid
  Variant (290)..(290): Xaa in position 290 is any or no amino acid
  Variant (292)..(293): Xaa in position 292 to 293 is any amino acid
  Variant (295)..(296): Xaa in position 295 to 296 is any amino acid
  Variant (299)..(299): Xaa in position 299 is any amino acid
  Variant (301)..(307): Xaa in position 301 to 307 is any amino acid
  Variant (309)..(319): Xaa in position 309 to 319 is any amino acid
  Variant (320)..(321): Xaa in position 320 to 321 is any or no amino acid
  Variant (324)..(334): Xaa in position 324 to 334 is any amino acid
  Variant (336)..(341): Xaa in position 336 to 341 is any amino acid
  Variant (342)..(344): Xaa in position 342 to 344 is any or no amino acid
  Variant (347)..(356): Xaa in position 347 to 356 is any amino acid
  Variant (358)..(405): Xaa in position 358 to 405 is any amino acid
  Variant (406)..(408): Xaa in position 406 to 408 is any or no amino acid
  Variant (410)..(411): Xaa in position 410 to 411 is any amino acid
  Variant (413)..(415): Xaa in position 413 to 415 is any amino acid
  Variant (417)..(419): Xaa in position 417 to 419 is any amino acid
  Variant (421)..(424): Xaa in position 421 to 424 is any amino acid
  Variant (426)..(426): Xaa in position 426 is any amino acid
  Variant (433)..(433): Xaa in position 433 is any amino acid
  Variant (435)..(435): Xaa in position 435 is any amino acid
  Variant (437)..(439): Xaa in position 437 to 439 is any amino acid
  Variant (442)..(446): Xaa in position 442 to 446 is any amino acid
  Variant (449)..(449): Xaa in position 449 is any amino acid
  Variant (451)..(453): Xaa in position 451 to 453 is any amino acid
  Variant (456)..(464): Xaa in position 456 to 464 is any amino acid
  Variant (465)..(466): Xaa in position 465 to 466 is any or no amino acid
  Variant (468)..(470): Xaa in position 468 to 470 is any amino acid
  Variant (472)..(473): Xaa in position 472 to 473 is any amino acid
  Variant (475)..(480): Xaa in position 475 to 480 is any amino acid
  Variant (481)..(482): Xaa in position 481 to 482 is any or no amino acid
  Variant (485)..(497): Xaa in position 485 to 497 is any amino acid
  Variant (498)..(499): Xaa in position 498 to 499 is any or no amino acid
  Variant (502)..(503): Xaa in position 502 to 503 is any amino acid
  Variant (505)..(509): Xaa in position 505 to 509 is any amino acid
  Variant (510)..(510): Xaa in position 510 is any or no amino acid
  Variant (512)..(516): Xaa in position 512 to 516 is any amino acid
  Variant (518)..(521): Xaa in position 518 to 521 is any amino acid
  Variant (524)..(524): Xaa in position 524 is any amino acid
  Variant (526)..(530): Xaa in position 526 to 530 is any amino acid
  Variant (534)..(534): Xaa in position 534 is any amino acid
  Variant (538)..(540): Xaa in position 538 to 540 is any amino acid
  Variant (544)..(544): Xaa in position 544 is any amino acid
  Variant (546)..(546): Xaa in position 546 is any amino acid
  Variant (549)..(552): Xaa in position 549 to 552 is any amino acid
  Variant (556)..(556): Xaa in position 556 is any amino acid
  Variant (558)..(559): Xaa in position 558 to 559 is any amino acid
  Variant (561)..(561): Xaa in position 561 is any amino acid
  Variant (565)..(565): Xaa in position 565 is any amino acid
  Variant (569)..(573): Xaa in position 569 to 573 is any amino acid
  Variant (582)..(582): Xaa in position 582 is any amino acid
  Variant (585)..(585): Xaa in position 585 is any amino acid
  Variant (587)..(587): Xaa in position 587 is any amino acid
  Variant (589)..(590): Xaa in position 589 to 590 is any amino acid
  Variant (593)..(593): Xaa in position 593 is any amino acid
  Variant (596)..(597): Xaa in position 596 to 597 is any amino acid
  Variant (600)..(601): Xaa in position 600 to 601 is any amino acid
  Variant (603)..(604): Xaa in position 603 to 604 is any amino acid
  Variant (608)..(608): Xaa in position 608 is any amino acid
  Variant (614)..(614): Xaa in position 614 is any amino acid
  Variant (620)..(620): Xaa in position 620 is any amino acid
  Variant (623)..(623): Xaa in position 623 is any amino acid
  Variant (625)..(625): Xaa in position 625 is any amino acid
  Variant (628)..(628): Xaa in position 628 is any amino acid
  Variant (631)..(632): Xaa in position 631 to 632 is any amino acid
  Variant (635)..(641): Xaa in position 635 to 641 is any amino acid
  Variant (642)..(645): Xaa in position 642 to 645 is any or no amino acid
  Variant (647)..(647): Xaa in position 647 is any amino acid
  Variant (649)..(651): Xaa in position 649 to 651 is any amino acid
  Variant (654)..(654): Xaa in position 654 is any amino acid
  Variant (660)..(663): Xaa in position 660 to 663 is any amino acid
  Variant (666)..(667): Xaa in position 666 to 667 is any amino acid
  Variant (669)..(669): Xaa in position 669 is any amino acid
  Variant (671)..(671): Xaa in position 671 is any amino acid
  Variant (673)..(673): Xaa in position 673 is any amino acid
  Variant (677)..(677): Xaa in position 677 is any amino acid
  Variant (682)..(682): Xaa in position 682 is any amino acid
  Variant (691)..(691): Xaa in position 691 is any amino acid
  Variant (701)..(705): Xaa in position 701 to 705 is any amino acid
  Variant (708)..(708): Xaa in position 708 is any amino acid
  Variant (712)..(713): Xaa in position 712 to 713 is any amino acid
  Variant (724)..(724): Xaa in position 724 is any amino acid
  Variant (726)..(726): Xaa in position 726 is any amino acid
  Variant (730)..(730): Xaa in position 730 is any amino acid
  Variant (732)..(732): Xaa in position 732 is any amino acid
  Variant (734)..(734): Xaa in position 734 is any amino acid
GXXXXXLGXXXXXXXXXXXXXXXXPIXXXXXXXXXXXXXXXXXXXXXXXXXXXXXXXXXXXXXXXXXXXXXXDXXXXXXXXXXXXXXXXXXXXXXXXGXXXXXXXXXXXXXXXXXXXXXNXXXAXXLXAXXXXVXXXXXXXXXXXXXXXXXXXXXXXXXXXXXXXXXXXXXXXXXXXXXXXNXXXXXXXXXXXXXXXXXXXXXXXXXXXXXXXXXXXXXXXXXXXXXXXXXXXXPXXXXLXXXXXXXXXXXXXXXXXXXXXXXXXRXXXXXXXXXXXXXXXXXXXXXGXXLXXTXXDRXDXXXXXXXAXXXXXXXXXXXXXLTXXXXXXXXXXXLXXXXXXXXXLPXXXXXXXXXXTXXXXXXXXXXXXXXXXXXXXXXXXXXXXXXXXXXXXXXXXXXXXXXXXXXXPXXFXXXLXXXAXXXXKXIVLPEGXEXRXXXAAXXXXXRGXAXXXLLXXXXXXXXXXXAXXXGXXLXXXXXXXXDPXXXXXXXXXXXXXXXLRXXKXXXXXXAXXXXXDXXXXGTXMXXXXXVDGXVSGXXXTTAXTXRPXXXXIKTXPXXSXVSSXFFMXXXXXVLVYGDCAXNPXPXAXXLAXIAXXSAXXAXXFGIXPRVAMXSYSTGXSGXGXDVXKVXXATXXXXXXXXXXXPXLXXXGPXQYDAAXXXXVAXXKXPXSXVAGXATVFXFPDLNTGNXTYKAVQRSAXXXXXGPXLQGXXKPVNDLSRGAXVXDIVXTXAXTAIQA

SEQ ID NO: 147941 - protein, 61 aa, Artificial sequence
  protein pattern
  Variant (2)..(4): Xaa in position 2 to 4 is any amino acid
  Variant (5)..(5): Xaa in position 5 is any or no amino acid
  Variant (7)..(7): Xaa in position 7 is any or no amino acid
  Variant (9)..(9): Xaa in position 9 is any amino acid
  Variant (10)..(10): Xaa in position 10 is Phe, Leu or Met
  Variant (11)..(11): Xaa in position 11 is any amino acid
  Variant (12)..(12): Xaa in position 12 is Asp, Glu or Asn
  Variant (13)..(13): Xaa in position 13 is any amino acid
  Variant (15)..(15): Xaa in position 15 is any amino acid
  Variant (17)..(17): Xaa in position 17 is Phe or Tyr
  Variant (20)..(20): Xaa in position 20 is Ala or Cys
  Variant (21)..(21): Xaa in position 21 is Ala or Val
  Variant (22)..(22): Xaa in position 22 is Ile, Met or Val
  Variant (23)..(23): Xaa in position 23 is any amino acid
  Variant (24)..(24): Xaa in position 24 is Pro or Gln
  Variant (25)..(25): Xaa in position 25 is any amino acid
  Variant (27)..(27): Xaa in position 27 is Asp, Asn, Ser or Thr
  Variant (28)..(28): Xaa in position 28 is Ala or Val
  Variant (29)..(29): Xaa in position 29 is any amino acid
  Variant (30)..(30): Xaa in position 30 is Asp, Glu or Gln
  Variant (32)..(32): Xaa in position 32 is Ala, Cys, Ser, Thr or Val
  Variant (33)..(33): Xaa in position 33 is Asp, Glu or Gln
  Variant (36)..(36): Xaa in position 36 is any amino acid
  Variant (37)..(37): Xaa in position 37 is Asn, Gln, Ser or Thr
  Variant (38)..(38): Xaa in position 38 is Ala or Ser
  Variant (39)..(39): Xaa in position 39 is Ala, Asn or Ser
  Variant (40)..(40): Xaa in position 40 is any amino acid
  Variant (41)..(41): Xaa in position 41 is Ser or Thr
  Variant (43)..(44): Xaa in position 43 to 44 is any amino acid
  Variant (45)..(45): Xaa in position 45 is Phe or Leu
  Variant (46)..(46): Xaa in position 46 is Asp or Gly
  Variant (47)..(47): Xaa in position 47 is Ile or Val
  Variant (48)..(48): Xaa in position 48 is any amino acid
  Variant (49)..(49): Xaa in position 49 is Ala, Pro or Val
  Variant (50)..(50): Xaa in position 50 is Lys or Arg
  Variant (51)..(51): Xaa in position 51 is Ile or Val
  Variant (53)..(53): Xaa in position 53 is Leu or Met
  Variant (54)..(54): Xaa in position 54 is Ile or Leu
  Variant (57)..(57): Xaa in position 57 is Ala or Ser
  Variant (58)..(58): Xaa in position 58 is Ser or Thr
  Variant (59)..(59): Xaa in position 59 is Asp or Gly
  Variant (60)..(60): Xaa in position 60 is any amino acid
  Variant (61)..(61): Xaa in position 61 is Ala or Ser
VXXXXFXMXXXXXVXVXGDXXXXXXPXXXXLXXIAXXXXXXAXXXXXXXXXAXXSYXXXXX

SEQ ID NO: 147942 - protein, 59 aa, Artificial sequence
  protein pattern
  Variant (3)..(4): Xaa in position 3 to 4 is any amino acid
  Variant (6)..(6): Xaa in position 6 is Gly, Asn or Ser
  Variant (7)..(7): Xaa in position 7 is Ile, Leu, Met or Val
  Variant (8)..(8): Xaa in position 8 is Asp, Asn, Ser or Thr
  Variant (9)..(11): Xaa in position 9 to 11 is any amino acid
  Variant (13)..(13): Xaa in position 13 is any amino acid
  Variant (14)..(14): Xaa in position 14 is Ala, Asp, Glu, Gln or Ser
  Variant (15)..(15): Xaa in position 15 is any amino acid
  Variant (16)..(16): Xaa in position 16 is Ile, Leu, Met or Val
  Variant (17)..(17): Xaa in position 17 is any amino acid
  Variant (18)..(18): Xaa in position 18 is Asp or Asn
  Variant (19)..(21): Xaa in position 19 to 21 is any amino acid
  Variant (22)..(22): Xaa in position 22 is Phe, Ile, Leu or Val
  Variant (23)..(23): Xaa in position 23 is Ala or Gly
  Variant (25)..(25): Xaa in position 25 is Leu, Met or Val
  Variant (26)..(26): Xaa in position 26 is Leu or Met
  Variant (27)..(27): Xaa in position 27 is Leu or Val
  Variant (28)..(29): Xaa in position 28 to 29 is any amino acid
  Variant (30)..(30): Xaa in position 30 is Asp, Gly, Asn or Ser
  Variant (31)..(31): Xaa in position 31 is any amino acid
  Variant (32)..(32): Xaa in position 32 is Ala or Val
  Variant (33)..(33): Xaa in position 33 is Asp or Gly
  Variant (35)..(35): Xaa in position 35 is Ile, Leu or Met
  Variant (39)..(41): Xaa in position 39 to 41 is any amino acid
  Variant (42)..(42): Xaa in position 42 is Ser or Thr
  Variant (44)..(44): Xaa in position 44 is Ala or Gln
  Variant (45)..(45): Xaa in position 45 is any amino acid
  Variant (46)..(46): Xaa in position 46 is Thr or Val
  Variant (47)..(47): Xaa in position 47 is Ile, Leu, Met or Val
  Variant (48)..(48): Xaa in position 48 is any amino acid
  Variant (50)..(50): Xaa in position 50 is Ala, Pro or Ser
  Variant (51)..(51): Xaa in position 51 is Phe, Leu or Met
  Variant (52)..(52): Xaa in position 52 is Glu or Gln
  Variant (53)..(53): Xaa in position 53 is Phe, Ile or Leu
  Variant (54)..(54): Xaa in position 54 is Ile or Val
  Variant (55)..(55): Xaa in position 55 is Lys or Arg
  Variant (56)..(58): Xaa in position 56 to 58 is any amino acid
  Variant (59)..(59): Xaa in position 59 is Asp, Gly, Asn or Ser
LRXXKXXXXXXAXXXXXXXXXXXTXXXXXXXXXGXVSGXXXXTXXXXXPXXXXXXXXXX

SEQ ID NO: 147943 - protein, 38 aa, Artificial sequence
  protein pattern
  Variant (2)..(2): Xaa in position 2 is any or no amino acid
  Variant (4)..(4): Xaa in position 4 is any amino acid
  Variant (5)..(6): Xaa in position 5 to 6 is any or no amino acid
  Variant (9)..(10): Xaa in position 9 to 10 is any amino acid
  Variant (11)..(11): Xaa in position 11 is Ala, Leu or Val
  Variant (12)..(15): Xaa in position 12 to 15 is any amino acid
  Variant (17)..(17): Xaa in position 17 is Asp, Glu, Asn or Gln
  Variant (18)..(18): Xaa in position 18 is Ile or Leu
  Variant (19)..(19): Xaa in position 19 is any amino acid
  Variant (20)..(20): Xaa in position 20 is Ile, Leu or Val
  Variant (21)..(21): Xaa in position 21 is Ala, Asp or Glu
  Variant (24)..(24): Xaa in position 24 is Ile, Leu or Met
  Variant (30)..(32): Xaa in position 30 to 32 is any amino acid
  Variant (33)..(33): Xaa in position 33 is Ala, Asp, Glu, Asn, Ser or Thr
  Variant (35)..(35): Xaa in position 35 is Ala or Gly
  Variant (36)..(37): Xaa in position 36 to 37 is any amino acid
VXKXXXATXXXXXXXPXXXXXGPXQYDAAXXXXVXXXK

SEQ ID NO: 147944 - DNA, 1419 bp, Thermus thermophilus
  CDS (1)..(1419): transl_table=11
atgggaaagacgctctacgagaaggtttgggaagcccacgaggtgaggaagctcaaaaacggccaaagccagctcttcatagacctccacctcctccacgaggtcacgagcccccaggccttcgggatgctcaaggaccttggccttcgggtacgctacccccaccgcaccttcgccaccgtggaccacatcgtccccacccacgaccgcaccgagcccttccaggaccctctggcccagagcatgctggaggccctcagggcgaacacaagggagcacggcatcaccttctttgacctggggagcggcaaccaaggcatcgtccacgtcatcgggccccagctcggcctcacccagcccgggatgaccatcgcctgcggggactcccacacctccacccacggggccttcggggccgtggccttcggcatcggcacgagccaggtccgggacgtcctcgccacccagaccctcgccgcccaaaagctcaaggtgcggcggatcaacgtggaggggaggctcgcccccggggtctacgccaaggacgtgatcctccacatcatccgccacctgggggtgaaggggggcttgggctacgcctatgaatacgggggaagcgccgtggaggccatggacatggaaagccgcatgaccctctgcaacatgtccattgagggcggagcccgcatcggctacgtgaaccccgacgagaccaccttccagtacctcgagggccgcccctacgtccccaaggggtccgagtgggaggaggccaagaggaggtggctcgcttggcgctccgaccccgacgcctcctacgacgacgtggtcaccttccgcgccgaggagatcgcccccaccgtcacctggggcatcaccccgggccaggccatccccattgacggcaggatccccctcctggaggagctccccgaggaggagcgccccgtggccgaggaggctttggcctacatgggcttcaggccgggccagcccatcaagggggtgcccatccaggtggccttcatcggaagctgcaccaacgccaggctttccgacctccgggaggtcgcccgctacctcaaggggcacaaggtgaagaagggggtgcgggccctggtggtgccgggctcggagtgggtggcgaggaaggccgaggaggaggggatcgccgaggtcttccgcgaggcggggtttgagtggcggatgcccggctgctccatgtgcctcgccatgaacccggaccggctggaaggggacgagctttgcgccagcagctccaaccggaactacaagggacgcatgggaagccccaggggccgcaccgtcctcatgagccccctcatggtggcggcggcggccgtggccggggagatcgccgacgcccgggaggtcttcggcctggcgggcgtccgctaa

SEQ ID NO: 147945 - protein, 472 aa, Thermus thermophilus; identical to SEQ ID NO: 103364

SEQ ID NO: 147946 - DNA, 1909 bp, Oryza sativa
  CDS (69)..(1613)
cttgacctcacaccccacaggtgttcgccatttggccggggccaccaccgcgcgccgccgccgccgccatggcctccatctccgccgcctcccccgtcgctgggaaggccgccgccttcgcccacaagaacgggcctgcccccgccgccgtggcgccgtcgcagcagcagctgcagcggagggtgagtgggaggagggcgcgttcggggagggtccgcgccgtcgccacgcccgcccgcgccccccgcgccccgtcctccactggctcggtgaagagcgccatgacgatgacagagaagatcctggcgagggcgtcggagcgcgccagcttggagcccggggagaacgtgtgggtggacgtcgacgtgctgatgacgcacgacgtctgcggccctggcaccatcgggatcttcaagcgggagttcggggaggacgccaaggtttgggaccgagagaaggtggtcatcatcccggaccactacatcttcaccagcgatgagcgagcaaaccgaaatgttgatatcctcagggatttctgtatggagcagaacatcaagtacttctatgacatcaaggacctgagcaatttcaaagcaaatccagactacaagggtgtttgccacgttgctcttgctcaagagggtcattgcagaccaggcgaggttctccttggtactgattctcatacatgcaatgctggagcctttggccaatttgcaactggaattggaaacactgatgctggttttgtgatgggcactgggaaggctcttcttaaggtgcctccaactatcaggtttgtattagatggagaaatgccaccttatttacttgcaaaggatctgattttacaaattattggtgagatttctgtatctggcgcaacatacaaatccatggagtttgttggatcaactgtggaaagtctaaatatggaagagcgaatgacactgtgcaacatggttattgaagctggtggcaagaatggtgttgtgcctgccgatcaaactacatttaactatcttgagggcaagacatcagttgaatacgagcctgtctatagtgatgctcaggccagatttgttagtgactaccggtttgatgtatccaaattggagccagttattgccaagccacattcacctgacaaccgtgctctagcaagagagtgcaaagatgtcaagattgaccgggtctatatcggttcttgtactggaggtaaaactgaggacttctttgctgctgcgaaggtgttcttagcttcggggaagaaggttaaagttcccacttttctcgttccggcgacacaaaaggtgtggatggacatttatagcatccctgtaccaggagccggtggcaaaacttgctcacagatatttgaggaggctggttgtgatacaccagctagccctagttgtggtgcttgtttgggtggtcctcgtgatacatatgctcgcatgaatgaacctatggtgtgtgtgtcgacgacgaacaggaatttccccggcaggatggggcacaaggaagggcagatctacctggcttcgccgttcaccgcggcggcttcagccctcaccggatacgtcactgaccccagggacttcctgatgtaaacagttaaaacacaaaaggagttggatgctcagagccattggcgtcttgtactactgtacaacggctgttttttcttgttcaatttcaggtgtagtgtaggtttgtccccttgggtaataacaaccaataagttattttcctttcattctatttcctaattgtgtactgggatattatatatttggtggacatgattttgcttgtggacagagcgcgttatagcaatttacagaattgtgtactacaaaaagaaaaaacacaggaggatggagcccggggagaacgagagggagga

SEQ ID NO: 147947 - protein, 514 aa, Oryza sativa
MASISAASPVAGKAAAFAHKNGPAPAAVAPSQQQLQRRVSGRRARSGRVRAVATPARAPRAPSSTGSVKSAMTMTEKILARASERASLEPGENVWVDVDVLMTHDVCGPGTIGIFKREFGEDAKVWDREKVVIIPDHYIFTSDERANRNVDILRDFCMEQNIKYFYDIKDLSNFKANPDYKGVCHVALAQEGHCRPGEVLLGTDSHTCNAGAFGQFATGIGNTDAGFVMGTGKALLKVPPTIRFVLDGEMPPYLLAKDLILQIIGEISVSGATYKSMEFVGSTVESLNMEERMTLCNMVIEAGGKNGVVPADQTTFNYLEGKTSVEYEPVYSDAQARFVSDYRFDVSKLEPVIAKPHSPDNRALARECKDVKIDRVYIGSCTGGKTEDFFAAAKVFLASGKKVKVPTFLVPATQKVWMDIYSIPVPGAGGKTCSQIFEEAGCDTPASPSCGACLGGPRDTYARMNEPMVCVSTTNRNFPGRMGHKEGQIYLASPFTAAASALTGYVTDPRDFLM

SEQ ID NO: 147948 - DNA, 1969 bp, Sorghum bicolor; identical to SEQ ID NO: 102943
  CDS (192)..(1715)

SEQ ID NO: 147949 - protein, 507 aa, Sorghum bicolor; identical to SEQ ID NO: 102944

SEQ ID NO: 147950 - DNA, 1913 bp, Zea mays
  CDS (116)..(1630)
ccatcaccgcctcgtgtgcagcgtgctcgctcacctcctctgtcgacgcaccaccccgaagccctcccgccgcgctcgcagggtgttcgacccttcgcccgcgcgccctcacgacatggcctcctccgtctccgccgccgccaaggccgccgcggcgttcgcgcacaaggtccagaaggagctggccgcgccggcgcagcgccgcgcgggcttgacccgccggaccaagccgtgcagcgtgcgcgccgtcgcttcgcccgcgcgcgccctgtcgtccaccggctcggtgaagagcgcgatgacgatgacggagaagatactggcgcgggcgtcggagcgcgcggcgctggagcccggggagaacgtgtgggtcgacgtcgacgtgctcatgacgcacgacgtctgcgggcccggcgccttcgacatcttcaagaaggagttcggggaggacgccagggtctgggaccgcgagaagctcgtcgtcatcccggaccactacatcttcaccagcgacggccgtgccaaacgcaacgtcgacatcctcagggacttctgtgcggagcagaacatcaagtacttctatgacatcaaggacctcagcgatttcagggctaatccggactacaaaggcgtctgccacatcgcacttgctcaggaagcccactgccgaccaggcgaggttctcttgggcactgattctcatacatgcaatgctggagcttttggtcagtttgcaactggaatcggaaacactgatgcaggttttgtgttgggcactggaaaggctcttctcaaggtgccacctactatcaggtttatattagatggagagatgccgccttatttacttgcgaaggatctgattttgcaaattattggagagatttcagtatctggtgcgacctacaaatcaatggagtttgttggatcaactgtagaaagtctaaccatggaagagcgtatgacactatgcaacatggttattgaagctggtggaaagaacggtgttgtgcctgctgatgaaactacatttaaataccttgagggtaagacatcagtcgattatgaacctgtctacagtgatgctcaagccagattttttagcgactaccggtttgatgtatcaaaactggagccagtagttgccaagccacattcgcctgacaaccgtgctccagcacgagaatgcaaagatgtgaagatcgaccgagtctatattggttcttgcactggtggtaagaccgaggatttccttgctgctgcaaaggtgttcttagcctcgggaaagaaggttaaagttcccacatttcttgtccctgccacacaaaaggtgtggttggacatatatagcctccctgtaccaggatctggtggcaaaacttgctcccagatatttgaggaggctggttgtgacacaccagcaagtcctaattgtggtgcttgtttgggtggccctcgtgatacatatgcacggatgaatgaacctactgtctgcgtgtccaccacgaacaggaactttccgggcaggatggggcacaaggaagggcaaatctacctggcgtctccctacactgcggctgcctcagccctgacggggtatgttacggaccccagggacttcctcatgtaaccgtcttgaaacaacaacagatttcatgatgtaacagagtggttgtactgctgtttttcgtgctgaacttttgtctaggcatgtccttcgttgagaaataaactgcactagaataagcagcgacttctcgggagccatagcagatgtgacctcatatttatttgtgcaactttttttgtttttggctctgaagtcatgcaaggaaaccacataaaagagtgatttatgtatgtgtcagaatcaaacaataattgtcaaaaaaaaaaaaaaaacccagttctgt

SEQ ID NO: 147951 - protein, 504 aa, Zea mays; identical to SEQ ID NO: 103422

SEQ ID NO: 147952 - DNA, 1965 bp, Zea mays subsp. mays
  CDS (111)..(1628)
aaggcctcaacacacacacacactctctcgcttgacctacccccctccgccccccgccgggcctgcagggtgttcgacgcttcgcccgcccgcccgagcgccgccacggcatggcttcctccatctccgccgccgctaaggcctccgcggcctttgcccaaaagaaggagctggccgcgccggcgccgcaccgcgcgggctcgagccgtcggaccaagccgtgccgcgtgcgcgccgtcgcgtcgcccgcgcgcaccccccgcgccccgtcgtccaccggctcggtgaagaccgcgatgacgatgacggagaagatcctggcgagggcgtcggagcgcgcggcgctggagcccggggagaacgtgtgggtggacatcgacgtgctcatgacgcacgacgtctgcgggcccggcaccatcggcatcttcaagaaggagttcggggaggatgccaaggtctgggaccgcgagaaggtcgtcatcatccccgaccactacatcttcaccagcgacgagcgcgccaaccgcaacgtcgatatcctcagggacttctgtctggagcagaacatcaagtacttctatgatatcaaggacctcagcgatttcagggctaatccagactacaagggtgtctgccacattgcacttgctcaggaaggccactgccgaccaggcgaggttctcctgggtactgattctcatacgtgcaatgctggagcctttggtcaatttgcaaccggaattggaaacactgatgcaggttttgtgatgggcactggaaaggctcttctcaaggtgccacctactatcaggtttgtattagatggagaaatgccgccttatttacttgcgaaggatctgattttgcaaattattggtgagatttcagtatctggtgcaacctacaaatcgatggagtttgttggatcaactgtagaaagtctaaccatggaagaacgtatgacactatgcaacatggttgttgaagctggtggaaagaacggtgtcgtgcctgctgatgaaactacatttaaataccttgagggtaggacatcagttgattatcaacctgtctacagtgatgctgaggccagattttttagtgactaccggtttgatgtatcgaaactggagccagtagttgccaagccacattcgcctgacaaccgtgccctagcaagagaatgcaaagatgtcaagatcgaccgagtctatattggttcctgcactggtggcaagactgaggacttccttgctgccgcaaaggtgttcttagcctcgggaaagaaggttaaagttcccacattccttgtccctgccacacaaaaggtgtggatggacgtatatagccttcctgtaccaggatctggcggcaaaacttgcgcccagatattcgaggaggctggttgtgatacaccagcaagtcctaattgcggcgcttgtctgggtggccctcgcgatacgtatgcacggatgaatgaacctacggtctgcgtgtccaccacgaacaggaacttcccgggcaggatggggcacaaggaagggcagatctacctggcgtccccctacaccgctgcagcctcggccctgacggggtacgtcacggaccccagggacttcctcatgtgaaacgatcttgaaacagccacagagtgcctgcaccgctgttttttgtgttgaaccttagtttaggcgtgtgcccttcgttgagaaataaactcccatgtcgggaggctgccattgccatttatgttttttgcgttatatttattacagtgactgccgataacgtagttgagcgttacaagggaaatacattcattcttcccagtatcgatggcagtcactagactccgttcttacaaaaaaaaaggcatgtcgagagatcttgtagttcatacacttgttaaaacacttttttgtacaatgtatgggaaagaagctcagtcgatctttcttgttttgc

SEQ ID NO: 147953 - protein, 505 aa, Zea mays subsp. mays; identical to SEQ ID NO: 103420

SEQ ID NO: 147954 - DNA, 1965 bp, Zea mays subsp. mays; identical to SEQ ID NO: 147952
  CDS (297)..(1628)

SEQ ID NO: 147955 - protein, 443 aa, Zea mays subsp. mays
MTMTEKILARASERAALEPGENVWVDIDVLMTHDVCGPGTIGIFKKEFGEDAKVWDREKVVIIPDHYIFTSDERANRNVDILRDFCLEQNIKYFYDIKDLSDFRANPDYKGVCHIALAQEGHCRPGEVLLGTDSHTCNAGAFGQFATGIGNTDAGFVMGTGKALLKVPPTIRFVLDGEMPPYLLAKDLILQIIGEISVSGATYKSMEFVGSTVESLTMEERMTLCNMVVEAGGKNGVVPADETTFKYLEGRTSVDYQPVYSDAEARFFSDYRFDVSKLEPVVAKPHSPDNRALARECKDVKIDRVYIGSCTGGKTEDFLAAAKVFLASGKKVKVPTFLVPATQKVWMDVYSLPVPGSGGKTCAQIFEEAGCDTPASPNCGACLGGPRDTYARMNEPTVCVSTTNRNFPGRMGHKEGQIYLASPYTAAASALTGYVTDPRDFLM

SEQ ID NO: 147956 - DNA, 1965 bp, Zea mays subsp. mays; identical to SEQ ID NO: 147952
  CDS (303)..(1628)

SEQ ID NO: 147957 - protein, 441 aa, Zea mays subsp. mays
MTEKILARASERAALEPGENVWVDIDVLMTHDVCGPGTIGIFKKEFGEDAKVWDREKVVIIPDHYIFTSDERANRNVDILRDFCLEQNIKYFYDIKDLSDFRANPDYKGVCHIALAQEGHCRPGEVLLGTDSHTCNAGAFGQFATGIGNTDAGFVMGTGKALLKVPPTIRFVLDGEMPPYLLAKDLILQIIGEISVSGATYKSMEFVGSTVESLTMEERMTLCNMVVEAGGKNGVVPADETTFKYLEGRTSVDYQPVYSDAEARFFSDYRFDVSKLEPVVAKPHSPDNRALARECKDVKIDRVYIGSCTGGKTEDFLAAAKVFLASGKKVKVPTFLVPATQKVWMDVYSLPVPGSGGKTCAQIFEEAGCDTPASPNCGACLGGPRDTYARMNEPTVCVSTTNRNFPGRMGHKEGQIYLASPYTAAASALTGYVTDPRDFLM

SEQ ID NO: 147958 - DNA, 1683 bp, Glycine max; identical to SEQ ID NO: 102947
  CDS (75)..(1577)

SEQ ID NO: 147959 - protein, 500 aa, Glycine max; identical to SEQ ID NO: 102948

SEQ ID NO: 147960 - DNA, 1683 bp, Glycine max; identical to SEQ ID NO: 102947
  CDS (249)..(1577)

SEQ ID NO: 147961 - protein, 442 aa, Glycine max
MTMTEKILARASEKAQLTPGDNVWVNVDILMTHDVCGPGSIGIFKREFGEDAKVWDREKLVIIPDHYIFTSDERANRNVDILRDFCHEQNIKYFYDIKDLSNFKVNPDYKGVCHVALAQEGHCRPGEVLLGTDSHTCTAGAFGQFATGIGNTDAGFVLGTGKLLLKVPPTLRFVMDGEMPDYLLSKDLILQIIGEITVAGATYKSMEFVGTTVESLTMEERMTLCNMVVEAGGKNGVVPADSTTFKYLEGKTSLPYEPVYSDDQARFLAEYRFDVSKLEPVVAKPHSPDNRALARECKDVKIDRVYIGSCTGGKTEDFMAAAKVFLASGKQVKVPTFLVPATQKVWMDLYSLPVPGSGGKTCSQIFEEVGCDTPASPSCGACLGGPKDTYARMNEPKVCVSTTNRNFPGRMGHKEGQIYLASPYTAAASALTGYVTDPREFL

SEQ ID NO: 147962 - DNA, 1688 bp, Zea mays; identical to SEQ ID NO: 102949
  CDS (264)..(1595)
  misc_feature (1673)..(1673): n is a, g, c or t

SEQ ID NO: 147963 - protein, 443 aa, Zea mays; identical to SEQ ID NO: 102950

SEQ ID NO: 147964 - DNA, 1804 bp, Zea mays; identical to SEQ ID NO: 102951
  CDS (84)..(1598)

SEQ ID NO: 147965 - protein, 504 aa, Zea mays; identical to SEQ ID NO: 102952

SEQ ID NO: 147966 - DNA, 1401 bp, Klebsiella pneumoniae subsp. pneumoniae MGH 78578; identical to SEQ ID NO: 102953
  CDS (1)..(1401): transl_table=11

SEQ ID NO: 147967 - protein, 466 aa, Klebsiella pneumoniae subsp. pneumoniae MGH 78578; identical to SEQ ID NO: 102954

SEQ ID NO: 147968 - DNA, 1434 bp, Kineococcus radiotolerans SRS30216; identical to SEQ ID NO: 102955
  CDS (1)..(1434): transl_table=11

SEQ ID NO: 147969 - protein, 477 aa, Kineococcus radiotolerans SRS30216; identical to SEQ ID NO: 102956

SEQ ID NO: 147970 - DNA, 1443 bp, Xanthobacter autotrophicus Py2; identical to SEQ ID NO: 102957
  CDS (1)..(1443): transl_table=11

SEQ ID NO: 147971 - protein, 480 aa, Xanthobacter autotrophicus Py2; identical to SEQ ID NO: 102958

SEQ ID NO: 147972 - DNA, 1428 bp, Buchnera aphidicola str. APS (Acyrthosiphon pisum); identical to SEQ ID NO: 102959
  CDS (1)..(1428): transl_table=11

SEQ ID NO: 147973 - protein, 475 aa, Buchnera aphidicola str. APS (Acyrthosiphon pisum); identical to SEQ ID NO: 102960

SEQ ID NO: 147974 - DNA, 1458 bp, Mycobacterium leprae TN; identical to SEQ ID NO: 102963
  CDS (1)..(1458): transl_table=11

SEQ ID NO: 147975 - protein, 485 aa, Mycobacterium leprae TN; identical to SEQ ID NO: 102964

SEQ ID NO: 147976 - DNA, 1428 bp, Agrobacterium tumefaciens str. C58; identical to SEQ ID NO: 102965
  CDS (1)..(1428): transl_table=11

SEQ ID NO: 147977 - protein, 475 aa, Agrobacterium tumefaciens str. C58; identical to SEQ ID NO: 102966

SEQ ID NO: 147978 - DNA, 1530 bp, Arabidopsis thaliana; identical to SEQ ID NO: 102969
  CDS (1)..(1530)

SEQ ID NO: 147979 - protein, 509 aa, Arabidopsis thaliana; identical to SEQ ID NO: 102970

SEQ ID NO: 147980 - DNA, 1362 bp, Methanosarcina mazei Go1
  CDS (1)..(1362): transl_table=11
atgaacttcatttctttttgggatcatcaattaaatttatttattagaaagcgccagttatttcccatgaccggaatgtctggtagtgacaatcgcccgatgaccgtttcggagaagatcttttcgaaagcctccggaactcccgtgaaagccggggatttcgtactggcaaatatagacctggcaatgacccacgacatcacaggtccgctggcagtccagggcttctacgaaatcatgagagatgaagaagacaagaaagtatgggacccgagcaaaattgtaattatattcgaccaccaggtccctgcagactcaattaatgccgctcaaaaccatatcatgctcagaaagtttgcaaaagagcagggcattttaaattatgatgtttatgaaggagtctgccaccaagtccttccagaaaaagggcatgttaagcccggagacctgattgttggttctgactcccatacctgtgcatacggatctttaggggcattttctaccggcataggctctaccgatatggcagcggtttttgccacaggcaagctctggttccgggttcccgagactttccgctttgaagtggaaggaaaactaccagagcgcgtttattccaaagaccttatactgcacctaataggagacgtaggcgtggaaggggtcagatacatggcagccgagtacgcgggttctacaatccgttccctttccatccccgagcgcatgaccatgtccaacatggcaattgaaatgggaggaaaagcagggataattgaagccgatgaagttaccgaggcataccttaaagagcgcattccgggtttcaagcttgatccgtactggaaatccgatgaaggtgccaaatatctggatatcaggtattatgatgtttctgaccttgagccccaggtagcctgcccgcataatgttgacaacgtaaagccggtaagcgaagttgaaggcacaaaactcgaccagatctttatgggatcctgcacaaacggcaggtttgaagacatcaagataatggctgacatcatgggagatgaacctgttgcgaaaaatttgcgcctccttgttgttcccgcttcaaaaactgaatatatgaagctgttaaaagccggatatattgaaaaactcgtgaacgcgggcgcaatcgtggaagctccctgctgcgggccatgcatgggcggctcttttggtcttctcggacctggagaggtcggacttgccacctcaaaccgcaatttcaagggcagagaaggaagtgcagagtcttttgtttacctttcttccccggcaactgcaggagcatccgccctcactggagaaatcacggatcccaggaaggtttaa

SEQ ID NO: 147981 - protein, 453 aa, Methanosarcina mazei Go1
MNFISFWDHQLNLFIRKRQLFPMTGMSGSDNRPMTVSEKIFSKASGTPVKAGDFVLANIDLAMTHDITGPLAVQGFYEIMRDEEDKKVWDPSKIVIIFDHQVPADSINAAQNHIMLRKFAKEQGILNYDVYEGVCHQVLPEKGHVKPGDLIVGSDSHTCAYGSLGAFSTGIGSTDMAAVFATGKLWFRVPETFRFEVEGKLPERVYSKDLILHLIGDVGVEGVRYMAAEYAGSTIRSLSIPERMTMSNMAIEMGGKAGIIEADEVTEAYLKERIPGFKLDPYWKSDEGAKYLDIRYYDVSDLEPQVACPHNVDNVKPVSEVEGTKLDQIFMGSCTNGRFEDIKIMADIMGDEPVAKNLRLLVVPASKTEYMKLLKAGYIEKLVNAGAIVEAPCCGPCMGGSFGLLGPGEVGLATSNRNFKGREGSAESFVYLSSPATAGASALTGEITDPRKV

SEQ ID NO: 147982 - DNA, 2352 bp, Drosophila melanogaster; identical to SEQ ID NO: 66840
  CDS (1)..(2352)

SEQ ID NO: 147983 - protein, 783 aa, Drosophila melanogaster; identical to SEQ ID NO: 66841

SEQ ID NO: 147984 - DNA, 1539 bp, Bradyrhizobium japonicum USDA 110; identical to SEQ ID NO: 103187
  CDS (1)..(1539): transl_table=11

SEQ ID NO: 147985 - protein, 512 aa, Bradyrhizobium japonicum USDA 110
MAPCQTVTAHLRDALLSCFPGLPSVGMIGGTTARQMPIRGGRIVDTRGRTLLAKIWDQHVIAHVSDDTDLLHVDRHLLHDLGGSRGLIDLKSRNLPVHNPELTFATPDHAISTASGRAGTITTGQELLAALRTETSASGIRLFDIDQPGQGIVHVIGPELGLSLPGCLIVCGDSHTCTHGGLGALAFGIGSSELTHVLATQTIIQRRPKTMRVTFDGRMPFGVTAKDLILALIGHVGAAGGTGYAVEYAGSAIRGMPIEGRLTICNLSVELGAKMGLIAPDQTTFDYVRGRPYAPQGEMWERAVTAWRTLRSDSDAMFDREVTIDVGTIIPQITWGTSPEHVLGVDGRVPDPRDIADPARRGAIEIALDYMGLKPGAPIAGTKVDWVFIGSCTNSRLSDLRAAAEVARGRKVAPGVRAWVVPGSETVKRDAVAEGLDKIFIDAGFEWREPGCSMCLAANGETVPPGQRSVSTSNRNFIGRQGPRARTHLASPAMAAAAAVSGAIADVRTMER

SEQ ID NO: 147986 - DNA, 1536 bp, Rhodopirellula baltica SH 1; identical to SEQ ID NO: 102975
  CDS (1)..(1536): transl_table=11

SEQ ID NO: 147987 - protein, 511 aa, Rhodopirellula baltica SH 1; identical to SEQ ID NO: 102976

SEQ ID NO: 147988 - DNA, 1311 bp, Bordetella parapertussis 12822
  CDS (1)..(1311): transl_table=11
atggcaggcatgggcaagaccatgacggaaaagattctgtcggccgcggcgggcaggaacgtgtcgcgcggcgatttcggctgggccaaggttcacgtggtgtcgatgatcgatgccttgcacttttgcgactgggacttcttcgatcgcaaccaggtcaaggtgtgggacccatcgcgggtggtgttttcgttcgaccacctggcctaccccgggttcggcctcggcgtgcaggggctgggccgcatccgcgactgggcgcgacggcatggcgtgccgaacgagaacatcttcgacatcgggcgcaacggcatttcgcaccaggtccccgcggaacacggctgggtcttgcccggcaccgtctacatcggcgccgacacgcaggccgccaccctgggcgcattcaactgtttcgccattccggctcttgccgaaacgcccttcatcatggccaccggcgacacctggttcaaggttcctccgtgcgtcagaatccgcttgtccggccggctgcccaaaggcgtgctgggcaaggacatctacctgcggctgctgcaggacctgcgcggcaagttggaaggatgcgccatcgaattcgacggcccgggcgtggcgaccatgccgctggacgtgcgcatggcggtggccaacggcgcgtcgcacattggcgccacgaccatgatcttcccgtccgacgatatcctgctggattatctgcggccacgcgcgcgcgaggccttcgcgccggtcgccgccgacggcgatgcggcctatgaccaggcctatgaatacgacctggcgtcgttcgagcccctgatcgccgggccggacgatcccgggcgcatttccccgttgcgggccatggcggcgacgcgcatccacgccgcctacatcggatcctgttcgtcgggccggctcgaagacctcacgcaagccgccgaggtgctgcgcggccggaaaatctccccggacgtgcgcatggtggtgacgccgatctccaccgaggtgatgctgcaggccgtcgaggcgggactggtcgccgcgtttgtcgaggcgggcgccacggtcacggcgccaggctgcggcgcgtgcttttacggcaacgcgtcgccgctgcatctggaagacggggaaaactgcatcacgggctcggtcgagaactggccgggccgcatgggcagcaacaaggcaagcatctacctggccaatgcggcggtcgtagcggcctcggcattggccgggcatatcgccgatccggacatggtccggccatccaacgctggcgcggccagcgccagggagcagccatga

SEQ ID NO: 147989 - protein, 436 aa, Bordetella parapertussis 12822
MAGMGKTMTEKILSAAAGRNVSRGDFGWAKVHVVSMIDALHFCDWDFFDRNQVKVWDPSRVVFSFDHLAYPGFGLGVQGLGRIRDWARRHGVPNENIFDIGRNGISHQVPAEHGWVLPGTVYIGADTQAATLGAFNCFAIPALAETPFIMATGDTWFKVPPCVRIRLSGRLPKGVLGKDIYLRLLQDLRGKLEGCAIEFDGPGVATMPLDVRMAVANGASHIGATTMIFPSDDILLDYLRPRAREAFAPVAADGDAAYDQAYEYDLASFEPLIAGPDDPGRISPLRAMAATRIHAAYIGSCSSGRLEDLTQAAEVLRGRKISPDVRMVVTPISTEVMLQAVEAGLVAAFVEAGATVTAPGCGACFYGNASPLHLEDGENCITGSVENWPGRMGSNKASIYLANAAVVAASALAGHIADPDMVRPSNAGAASAREQP

SEQ ID NO: 147990 - DNA, 1311 bp, Bordetella bronchiseptica RB50
  CDS (1)..(1311): transl_table=11
atggcaggcatgggcaagaccatgacggaaaagattctgtcggccgcggcgggcaggaacgtgtcgcgcggcgatttcggctgggccaaggttcacgtggtgtcgatgatcgatgccttgcacttttgcgactgggacttcttcgatcgcaaccaggtcaaggtgtgggacccatcgcgggtggtgttttcgttcgaccacctggcctaccccgggttcggcctcggcgtgcaggggctgggccgcatccgcgactgggcgcgacggcatggcgtgccgaacgagaacatcttcgacatcgggcgcaacggcatttcgcaccaggtccccgcggaacacggctgggtcttgcccggcaccgtctacatcggcgccgacacgcaggccgccaccctgggcgcattcaactgtttcgccattccggcgcttgccgaaacgcccttcatcatggccaccggcgacacctggttcaaggttcctccgtgcgtcagaatccgcttgtccggccggctgcccaaaggcgtgctgggcaaggacatctacctgcggctgctgcaggacctgcgcggcaagttggaaggatgcgccatcgaattcgacggcccgggcgtggcgaccatgccgctggacgtgcgcatggcggtggccaacggcgcgccgcacattggcgccacgaccatgatcttcccgtccgacgatatcctgctggattatctgcggccacgcgcgcgcgaggccttcgcgccggtcgccgccgacggcgatgcggcctatgaccaggcctatgaatacgacctggcgtcgttcgagcccctgatcgccgggccggacgatcccgggcgcatttccccgttgcgggccatggcggcgacgcgcatccacgccgcctacatcggatcctgttcgtcgggccggctcgaagacctcacgcaagccgccgaggtgctgcgcggccggaaaatctccccggacgtgcgcatggtggtgacgccgatctccaccgaggtgatgctgcaggccgtcgaggcgggactggtcgccgcgtttgtcgaggcgggcgccacggtcacggcgccaggctgcggcgcgtgcttctacggcaacgcgtcgccgctgcatctggaagacggggaaaactgcatcacgggctcggtcgagaactggccaggccgcatgggcagcaacaaggcaagcatctacctggccaatgcggcggtcgtggcggcctcggcattggccgggcatatcgccgatccggacatggtccggccatccaacgctggcgcggccagcgccagggagcagccatga

SEQ ID NO: 147991 - protein, 436 aa, Bordetella bronchiseptica RB50
MAGMGKTMTEKILSAAAGRNVSRGDFGWAKVHVVSMIDALHFCDWDFFDRNQVKVWDPSRVVFSFDHLAYPGFGLGVQGLGRIRDWARRHGVPNENIFDIGRNGISHQVPAEHGWVLPGTVYIGADTQAATLGAFNCFAIPALAETPFIMATGDTWFKVPPCVRIRLSGRLPKGVLGKDIYLRLLQDLRGKLEGCAIEFDGPGVATMPLDVRMAVANGAPHIGATTMIFPSDDILLDYLRPRAREAFAPVAADGDAAYDQAYEYDLASFEPLIAGPDDPGRISPLRAMAATRIHAAYIGSCSSGRLEDLTQAAEVLRGRKISPDVRMVVTPISTEVMLQAVEAGLVAAFVEAGATVTAPGCGACFYGNASPLHLEDGENCITGSVENWPGRMGSNKASIYLANAAVVAASALAGHIADPDMVRPSNAGAASAREQP

SEQ ID NO: 147992 - DNA, 1395 bp, Bordetella bronchiseptica RB50
  CDS (1)..(1395): transl_table=11
atggccgcacgcacactgttcgacaagatctgggacaaccacgtcatcgcctccaccgaggaaggcgacgtgctgcacgtggaccgccactacctgcacgacctgggcggcgcgccggccctgaaggcgctggcggcgcgcggcctggcggtgcgcgcgccggacctgaccgtggccatccccgaccatacggtggccaccgggccggggcgcgtcagccccattccgcatatcgtgctgcgcctggtcgacgacctgcaggcgcgctgccaggccgccggcatccgctacatcgccgccgacgacgacgcgcacggcatcgtgcacgtcatcgcgccggagcagggcctgaccctgcccgacatgatcgtggtgtgctgcgacagccacacctgcacgcatggcgcgctgggcgccatcggctttggcatcgggtccagcgaagtcgagcacgtgctggccacgcaggccatcgtgcagcgcaagccgcgccagttgcgcgtgcggctgcacgggcgccgccgtcccggcgtcacggccaaggatgtggccctgcacctggtcagcgtcatcggcgcggccggcggcagcggccatgcggtcgaatacgccggcgaggccgtcgcggccatggacatcgaagagcgcatgacgctgtgcaacctgtcgatcgagttcggcgccaagatcggcctcatcgcccccgacgacaccacgttcgcctggctggcgggccgccggcacgcgccgcgcggcgcacggctgcagcaggcgctggccgcctggcgcgcgctgcgcagcgacgcggacgcggtgttcgaccgcgagctggacctggacctcggcgcgctggcgccgcaaatcacctggggcaccagcccgcaggacgccatggacgtggccggcgtcgcgcccgacccgcgcggctatgccgatccggcgcggcaacgcgccgccgccgccggccaggcctacctgggcgtcacgcccggggccccgttggccggcctggcggtggaccgggtgttcatcggctcgtgcgccaacggccggctcgacgatctgcgcgccgccgcggcgcaagtgcgcggacgccgcgtcgccgatcacgtgaccgcctgggtggtgccgggctcgcaggcggtcaagcggcaggccgaggccgaaggactggcgcgcgtgttcaccgacgccggattcgactggcgcgaacccggctgctcgatgtgcctggccgccaacggcgaactggccgagccgggacagcgcgtggtggccacctccaaccgcaatttcgtcggccgccaggggcgcgacgtgcgcacccacctggccagccccgccaccgccgcggcctgcgccatcgccggcgtgatcgccgcgccgctgccctga

SEQ ID NO: 147993 - protein, 464 aa, Bordetella bronchiseptica RB50
MAARTLFDKIWDNHVIASTEEGDVLHVDRHYLHDLGGAPALKALAARGLAVRAPDLTVAIPDHTVATGPGRVSPIPHIVLRLVDDLQARCQAAGIRYIAADDDAHGIVHVIAPEQGLTLPDMIVVCCDSHTCTHGALGAIGFGIGSSEVEHVLATQAIVQRKPRQLRVRLHGRRRPGVTAKDVALHLVSVIGAAGGSGHAVEYAGEAVAAMDIEERMTLCNLSIEFGAKIGLIAPDDTTFAWLAGRRHAPRGARLQQALAAWRALRSDADAVFDRELDLDLGALAPQITWGTSPQDAMDVAGVAPDPRGYADPARQRAAAAGQAYLGVTPGAPLAGLAVDRVFIGSCANGRLDDLRAAAAQVRGRRVADHVTAWVVPGSQAVKRQAEAEGLARVFTDAGFDWREPGCSMCLAANGELAEPGQRVVATSNRNFVGRQGRDVRTHLASPATAAACAIAGVIAAPLP

SEQ ID NO: 147994 - DNA, 1434 bp, Bordetella bronchiseptica RB50; identical to SEQ ID NO: 102977
  CDS (1)..(1434): transl_table=11

SEQ ID NO: 147995 - protein, 477 aa, Bordetella bronchiseptica RB50; identical to SEQ ID NO: 102978

SEQ ID NO: 147996 - DNA, 1428 bp, Bordetella bronchiseptica RB50
  CDS (1)..(1428): transl_table=11
atgaccccgtccaccccgtccggcgccgccagtgcgccgccgcgcaccctgttcgaccgcctgtgggacagccaccacgtggccgacctgcccgacggccgcagcctgatccacatcgaccggcacctgctgcacgatctttccagcccgcaggccttctccgcgctgcgcgcgcagggccgcaccgtgcacagtccggcgcgcaacgtggcgatcgccgaccacatcgtctccaccgcgcccgggcggcgcggcgaacacgtggacggcagccaggcgatgatcgatgcgctggccgccaacgccgcgcgcaccggcatccgccactacggcccggacgaccccgaccagggcatcgtgcacgtgatcgcgcccgaactgggcctggtgctgccgggcatgacggtggcctgtggcgacagccacacctcgacgctgggggcgctgggcgcctgggcctggggcatcggcacctcggaggccgagcatgtgctggcgacccagaccctggccatgcgccgcccgcgcgcgatgcgcctgacgctgcaaggcgccctgcccgccggcctgagcgccaaggacctgaccctgcatgtcctgcgccagctcggcgtgcgcggcgcggccgtggggttcctggagctggccggcgagccggtggcggcgctctcgatggaagaacgcctgaccttgtgcaacatggccatcgaggccggcgcgcgcgccgcgctgatcgcgcccgacgacgtgaccctggactacctgcgccgccatgcccccgcggtgcgtggcgacgaggcggcgctggcggcgtttcgcgcgctgcgcagcgacgccggcgcgcgctacgagtccgagcgcgcgatcaccctgggactgcaggcgccgcagatgacctggggcgtgaacccggcccaggtcgtggacgtgcacgaaccgctgcctgatccggccgccgccgacgccggcgagcgcgccgccatgcagcaggcctatgactacatgggcctgcgggcgggccgtccgctggcgggcgtgccggtgcagtgggcgttcatcggttcatgcaccaacggcaggctgtccgacctgcaagccgccgcggcggtggcgcgcggccggcgcgtggccgccggcgtgcgcgcgctggtggtgccgggctcgcagcgggtcaagcgcgccgccgaagcgctggggctggaccgcgtgttcctcgacgccggcttcgaatggcgcgaaccgggctgctcgatgtgcgtgggcatgaacgccgacaaggtgccggccggccagcgctgcgtctccacctccaaccgcaacttcgaaggccgccaggggccgggcgcgcgcactcacctggccagcccggccagcgccgcggccgccgccatcgcgggcgccatcgtcgatcacagggatctggtctaa

SEQ ID NO: 147997 - protein, 475 aa, Bordetella bronchiseptica RB50
MTPSTPSGAASAPPRTLFDRLWDSHHVADLPDGRSLIHIDRHLLHDLSSPQAFSALRAQGRTVHSPARNVAIADHIVSTAPGRRGEHVDGSQAMIDALAANAARTGIRHYGPDDPDQGIVHVIAPELGLVLPGMTVACGDSHTSTLGALGAWAWGIGTSEAEHVLATQTLAMRRPRAMRLTLQGALPAGLSAKDLTLHVLRQLGVRGAAVGFLELAGEPVAALSMEERLTLCNMAIEAGARAALIAPDDVTLDYLRRHAPAVRGDEAALAAFRALRSDAGARYESERAITLGLQAPQMTWGVNPAQVVDVHEPLPDPAAADAGERAAMQQAYDYMGLRAGRPLAGVPVQWAFIGSCTNGRLSDLQAAAAVARGRRVAAGVRALVVPGSQRVKRAAEALGLDRVFLDAGFEWREPGCSMCVGMNADKVPAGQRCVSTSNRNFEGRQGPGARTHLASPASAAAAAIAGAIVDHRDLV

SEQ ID NO: 147998 - DNA, 1263 bp, Bordetella bronchiseptica RB50
  CDS (1)..(1263): transl_table=11
atgcctgcccagacgctagcccagaaactgctggccgccgccgccggccgcgacgccgtgcgcgtcggcgagatcgtgacctgcaaggtcgacctggccatgttccacgattccagcggcccgcgccgcctgcagcccatgctcgaagagctgggcaccggcctgtgggaccgctcccgcatcgtgctggtcatggaccattacgtgcccgagtccgatgacgaatcgcgccgcatcgtgcgcatcgcccgcgattgggcgcgcgaacaggccctgccgcacgtgtacgactcgctgggcatctgccacgtggtggtgccggaacacggccatgtgcgccccggcatgttctgcgtgggcggcgactcccattcgcccaccggcggcgccttcggcgcctatatgttcggcgtgggcagcaccgagatgctgggcgtggtcagcagcggcgaaatctggatgcgcgtgcccgacacgctgatgatgcactggcgcggccggctgcgcccgggcgtcatggccaaggacatgatgctgcacatgataggcctgcacggcatgaacggcgggcgctaccaggctgtggagttctgcggcgaagcggtgcgcgccctgtccatgcaggaacgcatgacgctgtcgaacatgtcggccgaactgggcgcccaggccggcctgatcgcgcccgaccggaccactgctcagtacctgcgccaggccggcgcgcccgagcccgataccgcgcgctggcagtccgacccggatgcgcccgcccaatggcacgagtacgacgccgacagcctgccgccctacgtggcggcgccgcacagtccggccaacgccgccccggtccaggcatacgccgacaccgccgtgcaggtggcctatatcggcgcgtgcaccggcgccaagctggacgatctgcgcgcggccgcgcaggtcttgcgcggccgccgcgtggccccgggcgtcagcctgctggtggccccggccagccagcgcgaccaggcgcgcgcgcaggacgaaggcgtgctgccggcgctggtcgaggccggcgcgacggtgctgcccaccacctgcggcgcctgttccggctacggcggctccatcccggacggcgccaatgtaatttccaccacggcccgcaacttcaagggccgcatgggcgcggccagcgcccgggtctacctggcgtccccgtacaccgtggcggcctcggccctggccggccgcatcgccgacccgcgcgaggtcctgtcatga

SEQ ID NO: 147999 - protein, 420 aa, Bordetella bronchiseptica RB50
MPAQTLAQKLLAAAAGRDAVRVGEIVTCKVDLAMFHDSSGPRRLQPMLEELGTGLWDRSRIVLVMDHYVPESDDESRRIVRIARDWAREQALPHVYDSLGICHVVVPEHGHVRPGMFCVGGDSHSPTGGAFGAYMFGVGSTEMLGVVSSGEIWMRVPDTLMMHWRGRLRPGVMAKDMMLHMIGLHGMNGGRYQAVEFCGEAVRALSMQERMTLSNMSAELGAQAGLIAPDRTTAQYLRQAGAPEPDTARWQSDPDAPAQWHEYDADSLPPYVAAPHSPANAAPVQAYADTAVQVAYIGACTGAKLDDLRAAAQVLRGRRVAPGVSLLVAPASQRDQARAQDEGVLPALVEAGATVLPTTCGACSGYGGSIPDGANVISTTARNFKGRMGAASARVYLASPYTVAASALAGRIADPREVLS

SEQ ID NO: 148000 - DNA, 1431 bp, Chromobacterium violaceum ATCC 12472; identical to SEQ ID NO: 102979
  CDS (1)..(1431): transl_table=11

SEQ ID NO: 148001 - protein, 476 aa, Chromobacterium violaceum ATCC 12472; identical to SEQ ID NO: 102980

SEQ ID NO: 148002 - DNA, 1284 bp, Geobacter sulfurreducens PCA
  CDS (1)..(1284): transl_table=11
atggggaaaactattgcggaaaagatttttgccagtcatctggttgatgaaccctttgccggcaccaaggtgctgaggctcgatgtggtgatgtgtcacgagatcaccacgcccatcgccattgccgacctgatggcgcgcggcaaggatcgggttttcgacccgacaaagatcaaggcggtcattgatcacgtgacccccagcaaggactccaagacggccacccaggcgaagatgttgcgcgattgggcgcggcgccatggcatcgtggactttttcgacgtcggagctaacggcgtttgtcatgcactgttccccgagaaggggttcatccggcccggctatacggtgatcatgggcgattcgcatacctgtactcacggagcgttcggcgcgtttgcggcaggcatcggcaccaccgatctcgaggtcggcattctcaagggagtctgcgccttccgcgagccgaaaacgatccgcatcaacctgaacggctctctgcctgaaggggtgtatgccaaggacgtaatcctccatgtcatcggcaggattggtgtgaacggggcaaccgaccgggtaatggagttccgcggatcggtggtcgacaccatgaccatggagtcgcggatgacactgtgcaacatggccatcgaggcgggtggcacctcgggtatctgtatgcctgacatggtgacggtcgattacctctggcccttcctcaaggatgagtaccagtcccgggaggccgcccttgcggcattcagcctgtggcggtccgacgaagacgccgtctacgagcaggtgcttgattttgatgtgtcgagtctcgaacccattgtcacatttggctataagccggaccaggtgaagccggtctctgaaattgccggtacccccgtggaccaggtttatctcggctcctgcaccaacggccggctggaggatctgcgcattgccgcacggattctcaagggaaagaagatcgcacccacggtacgcggcatactctctcccgccacgccgaagatctaccaggatgccatgcgtgaggggctgatcgatatcttcatggaagccggcttctgtgtgaccaatcccacctgcggcgcctgtctcggcatgagcaacggcgtcctggccgaaggagaagtctgcgcatcgaccacaaaccgtaacttcatggggcggatgggcaagggggggatggtccacctcatgtctccggcaacgagtgctgcaaccgctatcgagggtaagatagccgacccccggaagtatctgtag

SEQ ID NO: 148003 - protein, 427 aa, Geobacter sulfurreducens PCA
MGKTIAEKIFASHLVDEPFAGTKVLRLDVVMCHEITTPIAIADLMARGKDRVFDPTKIKAVIDHVTPSKDSKTATQAKMLRDWARRHGIVDFFDVGANGVCHALFPEKGFIRPGYTVIMGDSHTCTHGAFGAFAAGIGTTDLEVGILKGVCAFREPKTIRINLNGSLPEGVYAKDVILHVIGRIGVNGATDRVMEFRGSVVDTMTMESRMTLCNMAIEAGGTSGICMPDMVTVDYLWPFLKDEYQSREAALAAFSLWRSDEDAVYEQVLDFDVSSLEPIVTFGYKPDQVKPVSEIAGTPVDQVYLGSCTNGRLEDLRIAARILKGKKIAPTVRGILSPATPKIYQDAMREGLIDIFMEAGFCVTNPTCGACLGMSNGVLAEGEVCASTTNRNFMGRMGKGGMVHLMSPATSAATAIEGKIADPRKYL

SEQ ID NO: 148004 - DNA, 1500 bp, Yersinia pestis biovar Microtus str. 91001
  CDS (1)..(1500): transl_table=11
atggtcacgcaatcggcactcacgaaatgggcgatatcatcgctaaattcgtggttgaaggggtataaaatgggcacaacatcatctcagagcaaaacgttataccaaaaattgtacgatgcgcacattgtgcatgaagcccccaatgagaccccattgctgtatatcgaccgccatttagtgcatgaggtcacctcaccgcaagcctttgatggtttgcgtgccatgggccgcccggtgcgtcaaccgggtaagactttcgctaccatggatcacaacgtttctacccaaacaaaagacattaacgccagtggtgagatggcccgtattcagatgcaagagttaattaaaaactgcgctgaattcggtgtctcattgtatgacctgaaccaccctttccaagggatcgtgcatgtcattggccctgagcaaggcatgacgttaccgggcatgaccatcgtttgtggtgactcacataccgccactcacggcgcattcggctccttggcctttggtatcggcacctcagaagttgagcatgtgttggcgacccaaaccctgaagcaggggcgagccaaaaccatgagaatcgaagtgaatggcactgtcggcgcgggtattacggctaaagacatcgtgctggcgattatcggtaaaaccgggagcgcaggcggtactggccatgtggtggagttctgtggcagcgcgattgaagcgttgagcatggaaggccggatgacattatgcaacatggcgatcgaaatgggggccaaagccggtttggttgcccctgatgacaccacctttgcctatctgaaaggccgtcagttcgccccaactggcgagcaatgggaacaaggtgttgcctactggcgtaccctgaaatctgatgctgatgcccaattcgataccatcgtgacactggatgccgctgatatcgcgccacaggtgacgtggggaaccaatccgggtcaggtcattgcggttaatcaaatcattcctgcccctgagtctttcagcgatccggtcgaacgtgcatcagcagagaaagccttagcttatatggacttgcgccccggcattaaattgactgaagtggcgattgataaagtctttatcggctcttgcactaactcacgtattgaagatttacgtgcggcagcggctattgcccaagggcgtaaagtcgccaagggtgtgcaagctatcgtggtgccaggctccggcccggtgaaagcgcaggcagaagcggaaggtttggataagatctttatcgccgcaggttttgagtggcgtctgcccggttgctcgatgtgtttggccatgaataatgaccgcctggagcccggcgaacgttgtgcctccaccagcaaccgtaattttgaaggccgccaaggccgtggggggcgcacacatttggtcagcccagccatggccgccgctgccgccgtcagtggtcattttgctgatgttcgcgaattatccgccaccacccactaa

SEQ ID NO: 148005 - protein, 499 aa, Yersinia pestis biovar Microtus str. 91001
MVTQSALTKWAISSLNSWLKGYKMGTTSSQSKTLYQKLYDAHIVHEAPNETPLLYIDRHLVHEVTSPQAFDGLRAMGRPVRQPGKTFATMDHNVSTQTKDINASGEMARIQMQELIKNCAEFGVSLYDLNHPFQGIVHVIGPEQGMTLPGMTIVCGDSHTATHGAFGSLAFGIGTSEVEHVLATQTLKQGRAKTMRIEVNGTVGAGITAKDIVLAIIGKTGSAGGTGHVVEFCGSAIEALSMEGRMTLCNMAIEMGAKAGLVAPDDTTFAYLKGRQFAPTGEQWEQGVAYWRTLKSDADAQFDTIVTLDAADIAPQVTWGTNPGQVIAVNQIIPAPESFSDPVERASAEKALAYMDLRPGIKLTEVAIDKVFIGSCTNSRIEDLRAAAAIAQGRKVAKGVQAIVVPGSGPVKAQAEAEGLDKIFIAAGFEWRLPGCSMCLAMNNDRLEPGERCASTSNRNFEGRQGRGGRTHLVSPAMAAAAAVSGHFADVRELSATTH

SEQ ID NO: 148006 - DNA, 2352 bp, Strongylocentrotus purpuratus; identical to SEQ ID NO: 66894
  CDS (1)..(2352)

SEQ ID NO: 148007 - protein, 783 aa, Strongylocentrotus purpuratus; identical to SEQ ID NO: 66895

SEQ ID NO: 148008 - DNA, 2754 bp, Nasonia vitripennis; identical to SEQ ID NO: 66896
  CDS (1)..(2754)

SEQ ID NO: 148009 - protein, 917 aa, Nasonia vitripennis; identical to SEQ ID NO: 66897

SEQ ID NO: 148010 - DNA, 2331 bp, Magnaporthe grisea 70-15
  CDS (1)..(2331)
atgcttcctgcgagacgtagcctggcgctcgtcgccacgcgaggctgccgcaggctccccagccttttgccggttgttcgccgtacacaacaagtcaggccgctgagctcgacccccaggttacggcagaatgcgttccactcacagctgcaagacacaccctcggacctattctcctccttccagacacctccttcgaacccccagaccctcaccgagaagatcgttcagagatactctgttggccttgcgccgggaaagaaggtcaaatccggcgactatgtgaccctgtcaccgcaccactgcatgacgcacgacaactcgtggcctgttgccctcaaattcatgtcgatcggagcctccaagatccatgacaacaggcaggttgtcatgaccttggaccacgatgtccagaacaagagcgagtccaacctcaagaagtacaggcagattgaggagtttgccaagacacacggcgtagacttctaccctgcgggccgtggcatcggtcatcagattatggttgaggagggttacgcgtggccaggcacggttacagtcgcgtcggacagccacagcaacatgtacggaggtgttggctgtctcggtacgcccatggttcgtactgacgccgcctccatctgggctaccgggaaaacgtggtggcagattccccctatcgccaaggtgacgttgacaggtgtgctaccccctggtgtcactggaaaggatgtcatcgtcgcactttgcggtctgttcaacaatgacgaggttttaaaccatgcgattgagttcaccggttcggaggagacgatgcgcagcattcctgtggacgatcgtctggccatcgcaaacatgacgacggaatggggcgccttggctggacttttcccgatcgattcagtccttcaagggtggctccgcggcaaggcgaccacttctgccatgttcggaggcggccgggacgttttcacacacgagaaaatcgaggagctcatccagaaccagctgagggccgaccccggagcgaaatatgccaagtcgctgtacctgaacctatcaacactggccccctttgttgccggccccaactcggtcaaggtcgctacccccctcaaggaccttgaggctaaggatatcaaagtcaacaaggcctacctagtctcatgcacaaactcccgggcttccgatatcgctgccgcagctaaagttttcaaagaggcttccaaggatggcaagcccgcagtcattgcgcctggtgtcaagttctacatcggagccgcatccacacttgagcaggccgccgccgaagaggccggcgactggaaggtgctgctagacgcaggtgcccaggcccttcccgcaggctgcggaccgtgcattggactaggcacgggtcttttggagcccggcgaggtgggaatcagcgcaagcaaccgcaacttcaagggtcggatggggtcgacggacgccaaggcctaccttgccagccaggaagtcgtggccgctagcgctctcaagggcaagattgccggtcctggctggtacgagaagcccgagggcgtggagaaggtcattatcggcgagggcaacggtgatgcagtccatgacaaggccgtcagcatagaagaggcactggctaagcttcttggggaagcggaaagcatgatttctgacgctgagcagaacctgggtggctcatcgcaacaagccgagagtgccgaggaggaaaccctgaccgagattctgcctgggttccccgagcgggtcgagggtgaaatcgttttttgcgatgcggacaacatcaacacggatggaatctaccctggcaagtacacataccaagacaacgtctcgacggagaagatggccgaggtgtgcatggagaactacgacaaggagtttggcaaggttgcgcgggagggtgatgtgctggtggcgggtttcaactttggctgcggcagctcccgtgagcaggccgccacggcgatcctggccaagcgcatcccgctcgtggttgcgggcagtttcggtaacatctttagccgcaacagcataaacaatgcgctcatgggcgtcgaggtgccaaggctcgtcgagaggctgcgggagacatttggcggcaaggagcagggtgaggagaacaaggcgctcacgcgccggacgggttggacattcgtctgggatgtcaggaggagcaaggtcaccgtgaccgaaggcagtggcggtgagacgtggagccaaaaggttggcgagctgcctcccaacgtccaggagattattgccaggggagggctcgagaagtgggtcaagagtcaaatcgaggcttag

SEQ ID NO: 148011 - protein, 776 aa, Magnaporthe grisea 70-15
MLPARRSLALVATRGCRRLPSLLPVVRRTQQVRPLSSTPRLRQNAFHSQLQDTPSDLFSSFQTPPSNPQTLTEKIVQRYSVGLAPGKKVKSGDYVTLSPHHCMTHDNSWPVALKFMSIGASKIHDNRQVVMTLDHDVQNKSESNLKKYRQIEEFAKTHGVDFYPAGRGIGHQIMVEEGYAWPGTVTVASDSHSNMYGGVGCLGTPMVRTDAASIWATGKTWWQIPPIAKVTLTGVLPPGVTGKDVIVALCGLFNNDEVLNHAIEFTGSEETMRSIPVDDRLAIANMTTEWGALAGLFPIDSVLQGWLRGKATTSAMFGGGRDVFTHEKIEELIQNQLRADPGAKYAKSLYLNLSTLAPFVAGPNSVKVATPLKDLEAKDIKVNKAYLVSCTNSRASDIAAAAKVFKEASKDGKPAVIAPGVKFYIGAASTLEQAAAEEAGDWKVLLDAGAQALPAGCGPCIGLGTGLLEPGEVGISASNRNFKGRMGSTDAKAYLASQEVVAASALKGKIAGPGWYEKPEGVEKVIIGEGNGDAVHDKAVSIEEALAKLLGEAESMISDAEQNLGGSSQQAESAEEETLTEILPGFPERVEGEIVFCDADNINTDGIYPGKYTYQDNVSTEKMAEVCMENYDKEFGKVAREGDVLVAGFNFGCGSSREQAATAILAKRIPLVVAGSFGNIFSRNSINNALMGVEVPRLVERLRETFGGKEQGEENKALTRRTGWTFVWDVRRSKVTVTEGSGGETWSQKVGELPPNVQEIIARGGLEKWVKSQIEA

SEQ ID NO: 148012 - DNA, 2337 bp, Magnaporthe grisea 70-15; identical to SEQ ID NO: 102983
  CDS (1)..(2337)

SEQ ID NO: 148013 - protein, 778 aa, Magnaporthe grisea 70-15; identical to SEQ ID NO: 102984

SEQ ID NO: 148014 - DNA, 2451 bp, Magnaporthe grisea 70-15
  CDS (1)..(2451)
atggccgacgaatcgctccagtctcgattgggacagctcttgcacacaatacgcaacgttcaactggaagatgacgcatggagctccattccagacggcgagaagcagtcgtcgctgcatcctctgaccgtcttctctgttttgggcgcacatttgcgaagaaacggacaggtcaaggagagcgacgccctgctgcagaccgtcagcatcgccacggcacccaccaacctgggcggcatggccttgtcgtggacggatgaaatttcggcggatgacgttgacgagcttctccttcttacatctgcgtggctcgaggcattaaattcggccgagcgatacgacggggccatgacggcgcctctgagtctgcgtcctgccggccgaccacccatgaacgtgacggaaaagatctttgcaatgcacgatctgtcgcgtactgggtatgtcaagacgggagataccattcgggtgtcggtagactgggtcatggcgagcgaagccagctggcatggcatgcttcaggtgtacaacaagctgggcgaccccggggtgttccgcaacgaccggttctggctggcgggagaccacgtggtggacccgcgggtgtcagacacgccgctggtgcagagcctggtgcgggagatggactttgcgcgcaaaaagttcaagatgacgcagttccagggcagcaactacaccatcatgcacaccgagttctaccgcgagcgggcgcagccggggcagctggtgatcgggtcggactcgcacacgtgcagcgcgggggccaacggctgcctgtccatcggcctgggcgccaccgaggtcaccatggcgctggtcacgggccagatctggttcaaggtgcccgaggtggtcgagatccgcctgaccggccgccccgcccgcggcgtcggcggcaaggacgtcatcctgcacatcctgcagcagctcaagcgcaacaccgtcgccgccgaccgcgtcgtcgagtacaccggccccggctgccggtggctgagctccgactcgcgcttcgccgtcgccaacatgaccaccgagtttggcggcatcaccggcatctttgcccccgacgccgtgaccaagcgcttcgtcgacgcccgcaagaccccccaccaccgccggggctcgcgctacttccgccccgaccgcggctgcgcctacgccgagtcctacgagatcgacctctcgcgcgccgagccgtgcgtcgcccgctaccccagccccgacgacgtcgtgcccgtcggccaggtcgccggcaccgcgctggacggcgtcttcatcggcgcctgcaccaccgccgaggaggacctggtcgtcggcgccctcgtgctcaaggcgggcctggacaaggggctccggcccgtcgcccgtggcgagcgccgcgtcgtgcccggcagtcgccccatcgccgagcacctgcgcaagaccggcctggccgagatttacgagcgcgccggcttcaccattggcatcccgggctgctcgtactgcgtgggcatgggtgccgatatggccgcgcccggctcggtttggctgagcagtcaaaaccgcaactttgagaaccgcatgggtagaggcgctcttggttcgttggcttcagccgccaccgtggccgcatcgtcttttgacatgaaggtcacatcgccccaggagctgattgatctcatcccagacgagcactgggacaaggtcaagggcaaaggctccctgcctactggtgccctggaggagccatcctgggttgagcctgccggaagagatggtctcgaagcagctgatgagccagctgaagagagccctgcggcagccaacaacactgcagctgattcaaccaccacagaaaaggctccggcgcagggggtcatcaagagcaaagtgtaccgcctgggagactttgtcgatacagacgcgcttgctcctgcccagttcctacttacatccaaagacaacaaagagctcgggtcccactgcatggagaggaacgagccaggtttccgcgatgcagtcaaggacggccacgaggtcattgtcggcggcaaggcgtttggttgcgggtcaagtcgccaggaggccgtacaggctttgctaggcgtcggagcaaaatgcgtcatcgccaagagcttcgccttcatctttgcccgcaacatgccgtccctgggcctgctgggattcaccatcgccgacgagcgcttctacgagctcgccggcacgggcgccgcgatcgagatcgacctggaccagaacgtgctccgcgtcggcggcgaggcctttccctttgcgctgtcggccctggagaagaggctgacggagattgggggcatgaccaacgccttttcgaggttcggcaagcgcatctacgacgtgctggccggtggtgccgtcgcaaaggcggtgccgaggccgctggcggccgagggcgccatgtcctggtga

SEQ ID NO: 148015 - protein, 816 aa, Magnaporthe grisea 70-15
MADESLQSRLGQLLHTIRNVQLEDDAWSSIPDGEKQSSLHPLTVFSVLGAHLRRNGQVKESDALLQTVSIATAPTNLGGMALSWTDEISADDVDELLLLTSAWLEALNSAERYDGAMTAPLSLRPAGRPPMNVTEKIFAMHDLSRTGYVKTGDTIRVSVDWVMASEASWHGMLQVYNKLGDPGVFRNDRFWLAGDHVVDPRVSDTPLVQSLVREMDFARKKFKMTQFQGSNYTIMHTEFYRERAQPGQLVIGSDSHTCSAGANGCLSIGLGATEVTMALVTGQIWFKVPEVVEIRLTGRPARGVGGKDVILHILQQLKRNTVAADRVVEYTGPGCRWLSSDSRFAVANMTTEFGGITGIFAPDAVTKRFVDARKTPHHRRGSRYFRPDRGCAYAESYEIDLSRAEPCVARYPSPDDVVPVGQVAGTALDGVFIGACTTAEEDLVVGALVLKAGLDKGLRPVARGERRVVPGSRPIAEHLRKTGLAEIYERAGFTIGIPGCSYCVGMGADMAAPGSVWLSSQNRNFENRMGRGALGSLASAATVAASSFDMKVTSPQELIDLIPDEHWDKVKGKGSLPTGALEEPSWVEPAGRDGLEAADEPAEESPAAANNTAADSTTTEKAPAQGVIKSKVYRLGDFVDTDALAPAQFLLTSKDNKELGSHCMERNEPGFRDAVKDGHEVIVGGKAFGCGSSRQEAVQALLGVGAKCVIAKSFAFIFARNMPSLGLLGFTIADERFYELAGTGAAIEIDLDQNVLRVGGEAFPFALSALEKRLTEIGGMTNAFSRFGKRIYDVLAGGAVAKAVPRPLAAEGAMSW

SEQ ID NO: 148016 - DNA, 2334 bp, Gibberella zeae PH-1; identical to SEQ ID NO: 102985
  CDS (1)..(2334)

SEQ ID NO: 148017 - protein, 777 aa, Gibberella zeae PH-1; identical to SEQ ID NO: 102986

SEQ ID NO: 148018 - DNA, 2367 bp, Apis mellifera; identical to SEQ ID NO: 66906
  CDS (1)..(2367)

SEQ ID NO: 148019 - protein, 788 aa, Apis mellifera; identical to SEQ ID NO: 66907

SEQ ID NO: 148020 - DNA, 2355 bp, Candida glabrata CBS 138; identical to SEQ ID NO: 102987
  CDS (1)..(2355)

SEQ ID NO: 148021 - protein, 784 aa, Candida glabrata CBS 138; identical to SEQ ID NO: 102988

SEQ ID NO: 148022 - DNA, 2358 bp, Kluyveromyces lactis NRRL Y-1140; identical to SEQ ID NO: 102989
  CDS (1)..(2358)

SEQ ID NO: 148023 - protein, 785 aa, Kluyveromyces lactis NRRL Y-1140; identical to SEQ ID NO: 102990

SEQ ID NO: 148024 - DNA, 2325 bp, Debaryomyces hansenii CBS767; identical to SEQ ID NO: 102991
  CDS (1)..(2325)

SEQ ID NO: 148025 - protein, 774 aa, Debaryomyces hansenii CBS767; identical to SEQ ID NO: 102992

SEQ ID NO: 148026 - DNA, 2292 bp, Yarrowia lipolytica CLIB122; identical to SEQ ID NO: 102993
  CDS (1)..(2292)

SEQ ID NO: 148027 - protein, 763 aa, Yarrowia lipolytica CLIB122; identical to SEQ ID NO: 102994

SEQ ID NO: 148028 - DNA, 2397 bp, Aspergillus nidulans FGSC A4; identical to SEQ ID NO: 66924
  CDS (1)..(2397)

SEQ ID NO: 148029 - protein, 798 aa, Aspergillus nidulans FGSC A4; identical to SEQ ID NO: 66925

SEQ ID NO: 148030 - DNA, 2319 bp, Aspergillus nidulans FGSC A4; identical to SEQ ID NO: 102995
  CDS (1)..(2319)

SEQ ID NO: 148031 - protein, 772 aa, Aspergillus nidulans FGSC A4; identical to SEQ ID NO: 102996

SEQ ID NO: 148032 - DNA, 2331 bp, Candida albicans SC5314; identical to SEQ ID NO: 102997
  CDS (1)..(2331): transl_table=12

SEQ ID NO: 148033 - protein, 776 aa, Candida albicans SC5314; identical to SEQ ID NO: 102998

SEQ ID NO: 148034 - DNA, 2187 bp, Cryptococcus neoformans var. neoformans B-3501A
  CDS (1)..(2187)
atggtcgcaatcccacgactcgcaaggctctcagtcccagcatgggctcttagtgcaagaggcaggttctacgcaacagtctccaccccccagacgctcgtcgaaaagatcgtccaaaagtacgcggtcggtctctcagagggtgtcaaagttcgtgccggggactatgtcatgattaagccagagcatgtgatgacccatgacaacactggtcctgtcatttccaagtttctctctctctcctgttccaagctcgacaaccctagacaacccgtttttgcccttgatcacgacgtgcaaaaccagtctgaaaccaaccagaagaagtacaagaagattcaggcttttgccaaggagcatggtgttgacttttaccctgctggtcgaggtattggtcaccagatcatcgtcgaggagggttacgcctggccagggaagatggtggttgcaagtgatagtcattctaaccactacggtggtgtcggatgtttgggtactgcgattgtcagaactgatgccgctggcatctgggctacaggcaagttctggtggcaaatccctcgaattgtctccgtttctctcgacggccgattgtctcctggtgtgactggcaaggacgttatcgttgctctcgctggtcttttcaacaaggacgaagtcctcaatgccgctatcgaatttaccggttctggtgtcgagcacttgtccattgacgaacgtctcactattgccaacatgactaccgaatggggagctgttgctggtgtattccctgttgacgacaagctcaaagagtggtaccaaggcatcctccgaaaggcggaattacggaagttcatcagccccaccgtcccttccacagtcggcgctaaggtccaccctcgtctcaatgccgcccgtctcgacgacgctatgaccaacagggtcgttgctgaccctggagcccactatgcagctcgcctttccctcgacctttccactctcgttcctcatgtctcaggtcccaactctgttaaggttgccaccgctctccctaagcttctcgaccctcccatccctatcaacaaggcgtatcttgtctcatgtaccaactctcgagcgtctgacattgcctctgccgctcaagttctgcgaggaaagaaggttgctcctggcgttgaattttacatcgccgccgcctctagccgagtccaggaagatgccgaagctgccggtgattggcagactttgattgacgcaggtgccaaaactctccctgcaggttgcggcccttgtatcggtcttggtgtcggtctccttgagaagggtgaagtgggtatcagtgccaccaacagaaactataaaggtcgtatgggtagccccgatgctatcgcctaccttgcctcccctgctgtcgtcgctgcctctgctgccaagggtgtcatttgcggccccgagtctatggacctcagccaacttccccagtacgaacagccaaagttttctatcatcaaggaaggtgctgctggtgaggagaagcctgttgaggttgacgaggcttcccttgagcccttgctcgaaggtttccctgcctactttgagggtccacttctttttgcccctcaagataacttgacaaccgatggaatgtatcctggaaagtacacataccaggatgacatcacccctgagcgacaagccgaagttgtcatggaaaactatgaccccacttttgctgctaccgcccgcgaactccgtaccgccctccccactgcttcttccccctccactcttcccggcgccatccttctttctggttacaactttggtaccggttcatcccgtgaacaagctgctactgccatcaagaacgccggtatccctctcgttatctgcggttctttcggtgacattttcaagagaaactccatcaacaacggtctaattcttatcgaatctcctagcttgatcaaggacatgacggagagattcgccaaggacggagtaaggaacaagggtggcaaggatggcaagttgactgtcgtccctgagggctggagaatcaaggtggactctcaaagagggctggtgaccgttaacatgggtgaggaagaggagaagacctatcctgcggccaaggttggtaggagtgtgcaagaattatgggtcaacggcggtttggagggtttcattagggcttcattatag

SEQ ID NO: 148035 - protein, 728 aa, Cryptococcus neoformans var. neoformans B-3501A
MVAIPRLARLSVPAWALSARGRFYATVSTPQTLVEKIVQKYAVGLSEGVKVRAGDYVMIKPEHVMTHDNTGPVISKFLSLSCSKLDNPRQPVFALDHDVQNQSETNQKKYKKIQAFAKEHGVDFYPAGRGIGHQIIVEEGYAWPGKMVVASDSHSNHYGGVGCLGTAIVRTDAAGIWATGKFWWQIPRIVSVSLDGRLSPGVTGKDVIVALAGLFNKDEVLNAAIEFTGSGVEHLSIDERLTIANMTTEWGAVAGVFPVDDKLKEWYQGILRKAELRKFISPTVPSTVGAKVHPRLNAARLDDAMTNRVVADPGAHYAARLSLDLSTLVPHVSGPNSVKVATALPKLLDPPIPINKAYLVSCTNSRASDIASAAQVLRGKKVAPGVEFYIAAASSRVQEDAEAAGDWQTLIDAGAKTLPAGCGPCIGLGVGLLEKGEVGISATNRNYKGRMGSPDAIAYLASPAVVAASAAKGVICGPESMDLSQLPQYEQPKFSIIKEGAAGEEKPVEVDEASLEPLLEGFPAYFEGPLLFAPQDNLTTDGMYPGKYTYQDDITPERQAEVVMENYDPTFAATARELRTALPTASSPSTLPGAILLSGYNFGTGSSREQAATAIKNAGIPLVICGSFGDIFKRNSINNGLILIESPSLIKDMTERFAKDGVRNKGGKDGKLTVVPEGWRIKVDSQRGLVTVNMGEEEEKTYPAAKVGRSVQELWVNGGLEGFIRASL

SEQ ID NO: 148036 - DNA, 2313 bp, Cryptococcus neoformans var. neoformans B-3501A; identical to SEQ ID NO: 67120
  CDS (1)..(2313)

SEQ ID NO: 148037 - protein, 770 aa, Cryptococcus neoformans var. neoformans B-3501A; identical to SEQ ID NO: 67121

SEQ ID NO: 148038 - DNA, 2289 bp, Cryptococcus neoformans var. neoformans B-3501A; identical to SEQ ID NO: 102999
  CDS (1)..(2289)

SEQ ID NO: 148039 - protein, 762 aa, Cryptococcus neoformans var. neoformans B-3501A; identical to SEQ ID NO: 103000

SEQ ID NO: 148040 - DNA, 2373 bp, Tribolium castaneum; identical to SEQ ID NO: 66936
  CDS (1)..(2373)

SEQ ID NO: 148041 - protein, 790 aa, Tribolium castaneum; identical to SEQ ID NO: 66937

SEQ ID NO: 148042 - DNA, 1410 bp, Prochlorococcus marinus str. MIT 9515
  CDS (1)..(1410): transl_table=11
ttgagtcaagataccttatttgataaagtctgggaattacacaaagttgcaaatcttcctggtggctcggatcaaatctttatcggtcttcaccttattcatgaagttactagcccccaagcgtttggagctttaaaagataaaaatttaaaagtcaaatttccaaataggactgttgcaacagttgatcatatcgtcccaacagataatcaaaacaggccttttagagataatctggctgaacaaatgattgatactctagaaaagaattgtttcgaacacaaaattaaattttttaatattggtagtggtaagcaaggaattgtacatgtagtagctccagaacttggattaacacagccaggcatgactatagcctgtggagattctcatacatcaacacatggagcctttggatcaatagcttttggcattggtactagtcaagtaagagatgtccttgctagtcaaacgattgctatgaataagctaaaagttaggcaaatttggtgtgagaataaattatccaatggaatttatgctaaagatttagtactacatataattaatcatcttggagtaaaagctggagtaggttatgcctatgaatttgcgggcccagctataagtgcattatcaatggaagagaggatgacaatatgcaatatgtctattgaaggaggagcaagatgcggttatataaatcctgatgaaaaaacctttagttacatcaaggataaattatgctcgcctcaaaatgaaaattgggataaggctattaagtggtggaaatcattacaaagtaatgagaattctatttttgatgacgttatcaaaatagatgcctcaagagtggaacctactgttacatggggtattactcctggacaaagtataggcattagccagaaaatcccttcattgggagaaatacatccaaatgatcagtttattgctggggaggcttatgaatatatgggtttcaaacctggacaaccaataaaagatactcctatcgatgtttgttttataggtagttgcactaatggaagaatcagtgatctaagagttgctgctcgagtattagggaatcataaaatagcaaaaaatatcaaagcttttgtggttccaggatcagagagggttgcaaaagaagcgaaagaggagggtcttgataaagttttcatagatgcaggttttcagtggagagagccaggatgttcgatgtgtttagcaatgaattctgacaaattaataggtaaccaagtaagtgcaagctcgagcaatagaaatttcaaagggagacaaggatctccgagcggtagaacgcttttaatgagccctgcgatggtagctgctgctgctataaagggaaaagtaagtgatgttagagattttctaaataaatga

SEQ ID NO: 148043 - protein, 469 aa, Prochlorococcus marinus str. MIT 9515
MSQDTLFDKVWELHKVANLPGGSDQIFIGLHLIHEVTSPQAFGALKDKNLKVKFPNRTVATVDHIVPTDNQNRPFRDNLAEQMIDTLEKNCFEHKIKFFNIGSGKQGIVHVVAPELGLTQPGMTIACGDSHTSTHGAFGSIAFGIGTSQVRDVLASQTIAMNKLKVRQIWCENKLSNGIYAKDLVLHIINHLGVKAGVGYAYEFAGPAISALSMEERMTICNMSIEGGARCGYINPDEKTFSYIKDKLCSPQNENWDKAIKWWKSLQSNENSIFDDVIKIDASRVEPTVTWGITPGQSIGISQKIPSLGEIHPNDQFIAGEAYEYMGFKPGQPIKDTPIDVCFIGSCTNGRISDLRVAARVLGNHKIAKNIKAFVVPGSERVAKEAKEEGLDKVFIDAGFQWREPGCSMCLAMNSDKLIGNQVSASSSNRNFKGRQGSPSGRTLLMSPAMVAAAAIKGKVSDVRDFLNK

SEQ ID NO: 148044 - DNA, 1410 bp, Prochlorococcus marinus str. NATL1A
  CDS (1)..(1410): transl_table=11
ttgagttctagaaccctctacgacaaagtttggaacttccatcaggtaaaagaattacctggaggatcaactcaactttttattggtcttcatttaattcacgaagttacaagtcctcaggctttctctgcacttaatgaaaaaaaacttggagtaaagtttcccaatcttactgtcgcaacagttgaccatatagttccgacttcaaaccagcaacgtccttttagtgatcctcttgccgaggaaatgttgtctactttagaaaaaaactgcaaaactcatgggataaaatttcacggaattggaagtaattcgcaaggagtagtacatgttatggctccagaattaggattaacccagcctggaatgacagtagcctgcggagattcgcatacctcaacccatggagcatttggagcaattgcctttggaattggaactagtcaagtgcgagatgttttagccagtcaaagcttggcaatgaataaattaaaagtaagaagaatatgggtagagggtgaattgcaaaagggagtctatgcaaaagacctaattcttcatatcattcgtcatcttggagttaaaggaggtgttggatttgcatatgaatttgctgggcctgcaatagaaaaactctcaatggagggacgaatgaccatatgcaatatggctattgaaggtggtgcaagatgcggttatatcaatccagatgaaaccactttcaaatatttaaaagggaaagaacatgcgcccaaaggtcaagaatgggataaggcgatttcttggtggaaaagtttagctagtgattcaaaagcaacattcgatgatgagattcaattagatggatcatcaatcgaacccactgttacttggggtataactcctgggcaaggaatttcaatcaaagaaacaattccaaaccctgagtttcttcccaaaaatgagcaacaaatcgctaaagacgcatgcaaatacatgaatctaaaaccagacgaacccatagagggacaatcaattgatgtttgctttatagggagctgtactaatggaagattaagtgatctccaagaggcatctaaaattgttaagggtaatacagtagctgatgggattagagcatttgtcgttcctggttctcaaaaggtcgctaaggaggcaaaagaaaaaggattagataaaatatttcttaaagcaggttttgagtggcgagaaccaggttgttcaatgtgtctagccatgaacccagacaaactagaaggcagacaaataagcgctagttcgagtaatagaaatttcaaaggaagacaaggctccgcaaaagggagaaccttgctaatgagccccgctatggttgctgctgctgcaataaatgggagggttacagatgtaagaaagttcctgcaagagtaa

SEQ ID NO: 148045 - protein, 469 aa, Prochlorococcus marinus str. NATL1A
MSSRTLYDKVWNFHQVKELPGGSTQLFIGLHLIHEVTSPQAFSALNEKKLGVKFPNLTVATVDHIVPTSNQQRPFSDPLAEEMLSTLEKNCKTHGIKFHGIGSNSQGVVHVMAPELGLTQPGMTVACGDSHTSTHGAFGAIAFGIGTSQVRDVLASQSLAMNKLKVRRIWVEGELQKGVYAKDLILHIIRHLGVKGGVGFAYEFAGPAIEKLSMEGRMTICNMAIEGGARCGYINPDETTFKYLKGKEHAPKGQEWDKAISWWKSLASDSKATFDDEIQLDGSSIEPTVTWGITPGQGISIKETIPNPEFLPKNEQQIAKDACKYMNLKPDEPIEGQSIDVCFIGSCTNGRLSDLQEASKIVKGNTVADGIRAFVVPGSQKVAKEAKEKGLDKIFLKAGFEWREPGCSMCLAMNPDKLEGRQISASSSNRNFKGRQGSAKGRTLLMSPAMVAAAAINGRVTDVRKFLQE

SEQ ID NO: 148046 - DNA, 1437 bp, Prochlorococcus marinus str. MIT 9303
  CDS (1)..(1437): transl_table=11
ttgagctccggcaccctctacgacaaggtgtgggatctacatcgggtggctgacctacctggtggatccactcagttatttgtgggtttgcatttgatccatgaggtcaccagcccgcaggctttcgctgctttgcaggacaagggtttgccggtgcggtgccctgagcgcaccgtggcgactgttgatcacatcgtgccgacgatcagtcagaagcgtccgtttgctgaccctttggctgaggagatgctcagcaccttggaacgaaactgtgccaattacgggattgttctttgcggccttggcagtggccgccagggcatcgtgcatgtgatagctcctgagttggggctgacccagccgggcatgactgtggcttgtggtgactcacacacgtccacccatggggcgtttggcgccattgcgttcggcatcggcaccagccaggtgcgggatgtgcttgccagtcagagtcttgccatgaacaagctcaaggtgcgccggatctgggtcgacggtcagcttggttccggtgttcatgccaaggatttgatccttcatgtgatccgaagccttggggtcaaagctggcgtgggctatgcctatgagttcgccggaccagcaattgatgtgctctccatggaagaacgcatgaccctctgcaatatggcgattgagggaggcgcccgctgcggatatgtcaatcctgatggggtcacttttgactatttgcaaggacggttttatgcgcctactggggaggcttggcatcgggcagtggcctggtggagcagcttggccagtgatcccaatgctgtctttgatgatgaggtgatgtttgatgcggccagtattgctcccatggtgacctggggcatcactcctggtcagggcattgctgtagacgaatcggtaccgaccattgattcgcttgagccaaatgaacgtccaatcgccgaggaagcttgtcgctatatggatttggagccgggaatggcgattgaaggggttccagttgatgtttgttttattggcagttgtaccaatggtcgtcttagtgatttaaaggctgctgccgctattgccaagggccgccatgtagcacaagggatcaaggcctttgtggtgccagggtcagaacaagtcgccagggctgcggaagcagaggggctcgatggtgtttttcggaaggctggatttgaatggcgtgaaccaggctgttccatgtgtctggcaatgaatcctgatcgtcttgaggggcgtcagatcagtgcaagttccagtaacaggaatttcaaggggcgtcagggttcgtccagaggccgcaccttgttgatgagtcccgcaatggtggctgctgctgccattaccggccaggtcaccgatgtgcgcaagctaatcagcaacactgttccttctaaaagcttccaccaatga

SEQ ID NO: 148047 - protein, 478 aa, Prochlorococcus marinus str. MIT 9303
MSSGTLYDKVWDLHRVADLPGGSTQLFVGLHLIHEVTSPQAFAALQDKGLPVRCPERTVATVDHIVPTISQKRPFADPLAEEMLSTLERNCANYGIVLCGLGSGRQGIVHVIAPELGLTQPGMTVACGDSHTSTHGAFGAIAFGIGTSQVRDVLASQSLAMNKLKVRRIWVDGQLGSGVHAKDLILHVIRSLGVKAGVGYAYEFAGPAIDVLSMEERMTLCNMAIEGGARCGYVNPDGVTFDYLQGRFYAPTGEAWHRAVAWWSSLASDPNAVFDDEVMFDAASIAPMVTWGITPGQGIAVDESVPTIDSLEPNERPIAEEACRYMDLEPGMAIEGVPVDVCFIGSCTNGRLSDLKAAAAIAKGRHVAQGIKAFVVPGSEQVARAAEAEGLDGVFRKAGFEWREPGCSMCLAMNPDRLEGRQISASSSNRNFKGRQGSSRGRTLLMSPAMVAAAAITGQVTDVRKLISNTVPSKSFHQ

SEQ ID NO: 148048 - DNA, 1446 bp, Mycobacterium sp. JLS
  CDS (1)..(1446): transl_table=11
atggcacagcccgccacaccgcgcaccatggccgagaaggtgtgggccgaccacgtcgtcgcccacggcaccggggagggtgccgcgcgtgaaccggatctgatctacatcgacctgcacctcgtgcacgaggtgaccagtccgcaggcgttcgacggtctgcggctggcgaaccggccggtgcgacggccggatctcaccatcgcgaccgaagaccacaacgtgccgacggtcgacatcgacaagccgatcgccgacccggtgtcgcgcacccaggtggagacgttgcggcgcaactgcgccgagttcgggatccggctgcacccgatgggcgacgccgaacagggcatcgtgcacatcatcggtccgcagctcgggctcacccagccgggaatgaccgtcgtgtgcggtgacagccacacctccacccacggcgcgttcggcgccctggcgatgggtatcggcacctccgaggtggaacacgtgctggcgacgcagacgctgccgctgcggccgtttcgcacgatggcggtcaacgtcgacggggaactcccgccgggcgtgagcgccaaggacatcatcctggcggtcatcgccaagatcggcaccggcggcggacagggccacgtcatcgaataccgcggcagcgccatcgaatccctgtcgatggagggccggatgacgatctgcaacatgagcatcgaggccggcgcgcgggccggcatggtggcccccgacgacaccacattcgaattcctgcgcggccgcccgcacgcacccaccggcgccgactgggatgcggcggtggaggcgtggcggcagctgcgcaccgatccgggcgccgaattcgacaccgaggtccatctcgacgcggccgagctgagcccgttcgtcacctggggcaccaaccccgggcagggggtgccgctgtccggcgcggtgcccgaccccgagctgatcgtcgacgagggtgagcgacaggcggccgaaaaggcgttgacctacatgggtcttcaggccggtacggcgatgcgtgacgtcgccgtcgacaccgtgttcgtcggatcgtgcaccaacggccgcatcgaggatctgcgcgtggtggccgacgtcctgcgtggccgcagggtcgccgatgggatccgcatgctcgtggtgcccggctcgatgcgcgtgcgtgcgcaggccgaatccgaagggctcgaccggatcttcatcgacgccggtgccgaatggcggcaggcgggctgctcgatgtgcctggggatgaaccccgatcagctgtcgcccgggcagcggtgcgcatccacgtccaaccgcaacttcgaggggcgccagggcaaaggcgggcggacacatctggtctcacccgccgtggccgccgccaccgccgtccgcggcacgctgtcctcacccgccgacctgtccgccgtccccgctcgctga

SEQ ID NO: 148049 - protein, 481 aa, Mycobacterium sp. JLS
MAQPATPRTMAEKVWADHVVAHGTGEGAAREPDLIYIDLHLVHEVTSPQAFDGLRLANRPVRRPDLTIATEDHNVPTVDIDKPIADPVSRTQVETLRRNCAEFGIRLHPMGDAEQGIVHIIGPQLGLTQPGMTVVCGDSHTSTHGAFGALAMGIGTSEVEHVLATQTLPLRPFRTMAVNVDGELPPGVSAKDIILAVIAKIGTGGGQGHVIEYRGSAIESLSMEGRMTICNMSIEAGARAGMVAPDDTTFEFLRGRPHAPTGADWDAAVEAWRQLRTDPGAEFDTEVHLDAAELSPFVTWGTNPGQGVPLSGAVPDPELIVDEGERQAAEKALTYMGLQAGTAMRDVAVDTVFVGSCTNGRIEDLRVVADVLRGRRVADGIRMLVVPGSMRVRAQAESEGLDRIFIDAGAEWRQAGCSMCLGMNPDQLSPGQRCASTSNRNFEGRQGKGGRTHLVSPAVAAATAVRGTLSSPADLSAVPAR

SEQ ID NO: 148050 - DNA, 1278 bp, Clostridium difficile 630
  CDS (1)..(1278): transl_table=11
atggggatgactatgacgcagaaaatattagccaaacatgctaaattaaatgaagttaagaaagggcaattaatcgaagcagatttagatgtagttttaggtaatgatataacatcaccagtagccattagagaatttgaaaaattaggaattgaagatgtttatgataagactaaagtagtgatggttttagaccactttacacctaataaagatataaagagtgcagaacaatgtaaatttacaagaagtttcgcaaaatcaaaaggagttgtaaatttttttgatgtaggagatatgggaatagagcatgttcttcttcctgaaaaaggtatagtaactgctggagatgtaattataggtgctgactctcatacttgcacatatggagcattaggagcattttctactggtgtaggttcaactgatatgggagcaggtatggctacaggaaaatgttggtttaaggttcctggagcaataaaatttgttttgaaaaataaaccaaataaatggataagtggtaaagatataatacttcatataataggggagataggtgttgatggagcactttacaagtcaatggaattttgtggagatggagtagaatacttatctatggatgatagatttactatttgtaatatggcaatagaagcaggagcaaaaaatggaatttttccagtagacgataagactatggaatatataaattcacataagtgttcaactatgacaaaagatgtaaatatatatgaagcagatgaagatgcagtctatgatgaagtatacgaaatagatttagccaaactaaaagaaacagtagcctttcctcatcttcctgaaaatactagaacagtagatgagatagataaggatataaagatagaccaagttgtaataggctcttgtacaaatggaagaatatcagaccttgaagtagtagctgagataatgaaaggcaaaaaagtagcagatggagttagagttatgatatttcctggaactcaaaaagtatatcttgaagctatagaaaaagggtatattaccacttttatagaggcaggagcagcagtttctacaccaacttgtggtccatgtctagggggacatatgggtatacttgcagcaggagaaaaatccatttcaacaacaaataggaatttcgtaggaagaatggggcatgttgattcagaggtgtatcttgcaagcccagctgtagcagcagcatcagctataactggaaaaatatcaaaaccatcagaaataatttaa

SEQ ID NO: 148051 - protein, 425 aa, Clostridium difficile 630
MGMTMTQKILAKHAKLNEVKKGQLIEADLDVVLGNDITSPVAIREFEKLGIEDVYDKTKVVMVLDHFTPNKDIKSAEQCKFTRSFAKSKGVVNFFDVGDMGIEHVLLPEKGIVTAGDVIIGADSHTCTYGALGAFSTGVGSTDMGAGMATGKCWFKVPGAIKFVLKNKPNKWISGKDIILHIIGEIGVDGALYKSMEFCGDGVEYLSMDDRFTICNMAIEAGAKNGIFPVDDKTMEYINSHKCSTMTKDVNIYEADEDAVYDEVYEIDLAKLKETVAFPHLPENTRTVDEIDKDIKIDQVVIGSCTNGRISDLEVVAEIMKGKKVADGVRVMIFPGTQKVYLEAIEKGYITTFIEAGAAVSTPTCGPCLGGHMGILAAGEKSISTTNRNFVGRMGHVDSEVYLASPAVAAASAITGKISKPSEII

SEQ ID NO: 148052 - DNA, 1404 bp, Prochlorococcus marinus str. MIT 9301
  CDS (1)..(1404): transl_table=11
ttgagtaaagataccttatttgataaagtttgggatttacacaaagtttccagtctccctggtggctcagatcaaatttttattggtcttcacctcatccatgaagtaacaagtcctcaagcatttggcgctttaaaagacaaaaatttaagggtaaaattccctagtaggactgtcgctacagttgatcatattgtgccaacggataatcaaagcagaccttttaaagataatcttgccgagcaaatgattgaaacacttgaaaagaactgcatagaacataagataagattttttaatattggcagtggaaatcaaggtatagttcatgtagtagctccagaattggggctaacccagcctggtatgacaatcgcttgtggagattctcatacttcaacgcatggagcttttgggtccattgcttttgggataggtacaagccaagttagagatgttcttgctacccaaaccatagccatgaacaaattgaaagtaaggcagatttggtgtgaaaataaattatctaatggggtttatgctaaagatttagttcttcatattatcaataaacttggtgtaaaggctggagtaggttttgcatatgagtttgcaggacccgcaatcaattcattatcaatggaagaaagaatgacaatatgcaatatgtctattgaaggtggggcgagatgcggctacataaatcctgatgaaaagacttttagttacattaaaaataaattatgtgcgcccagaaatgagaattgggatgaagcacttttatggtggaaatcattaaaaagcgatgcaaattctatttatgatgatgtaactaaaattgatgcttcaaaagtagaaccaaccgtaacctggggaattactccaggtcaaagtgtaggcatcaaccaaaaaatccctcttttagaagaattgtccccagatgaccaatttgttgctaaagaagcttatgaatatatgggtttcaaaccaggacagtcaattaaggatactccaattgatgtttgtttcataggcagttgtaccaatggaagaataagtgacttaagagttgctgctaaagtagtaaaagacaaaaaagtatctcagaatataaaagcatttgtagtcccaggatctgagaaagtagcaaaagaagcaaaaatagaaggacttgacaaaattttccttgatgcaggttttcaatggagagaaccaggctgttcaatgtgtttagcaatgaattcagataagctaataggtaatcaacttagtgcaagttctagtaatagaaatttcaaaggaagacaaggatccccaaatggaaggacattattaatgagtcctgcgatggttgcagctgctgcaatatcagggaaagtaacagacataagaaattttatgtga

SEQ ID NO: 148053 - protein, 467 aa, Prochlorococcus marinus str. MIT 9301
MSKDTLFDKVWDLHKVSSLPGGSDQIFIGLHLIHEVTSPQAFGALKDKNLRVKFPSRTVATVDHIVPTDNQSRPFKDNLAEQMIETLEKNCIEHKIRFFNIGSGNQGIVHVVAPELGLTQPGMTIACGDSHTSTHGAFGSIAFGIGTSQVRDVLATQTIAMNKLKVRQIWCENKLSNGVYAKDLVLHIINKLGVKAGVGFAYEFAGPAINSLSMEERMTICNMSIEGGARCGYINPDEKTFSYIKNKLCAPRNENWDEALLWWKSLKSDANSIYDDVTKIDASKVEPTVTWGITPGQSVGINQKIPLLEELSPDDQFVAKEAYEYMGFKPGQSIKDTPIDVCFIGSCTNGRISDLRVAAKVVKDKKVSQNIKAFVVPGSEKVAKEAKIEGLDKIFLDAGFQWREPGCSMCLAMNSDKLIGNQLSASSSNRNFKGRQGSPNGRTLLMSPAMVAAAAISGKVTDIRNFM

SEQ ID NO: 148054 - DNA, 1413 bp, Herminiimonas arsenicoxydans
  CDS (1)..(1413): transl_table=11
atggcacgcacgctttaccaaaaactggtggacacgcacacggtagcgcagctcgacagagacaacgtcctgctgtttgccgatctgcatttgctcaacgagtacaccagcccgcaagcatttgccgggctcgacgagcgcggcctgcgcgccctgattcccggacagaacgtggcgacggtgagccatattattcccacgacacctgatccgctgcggatcatcagggatacggattctgcgctgcaggccagtaacctgaaacgcaattgcgacctgcaccacattccattgttcgatacgaacgacgccttgcagggcatcgaacatgtgatcgcgcctgagcacggcatgattcggcccggcatggttgtcatctgcggtgatagccataccaccacttacggcgcattgggcgcgctgggttttggtatcggaacgacggaagtcgaacacgtgctggcaacccagaccctggtttatcgacttgcaaagaacatgcgcattcgtgtcgatggcaagctgccgaacggaacgaccgccaaggatctggtgctgatgatcatcagtcgcatcggtgcacaaggtgcacgcggtttcgtggtcgagttcagcggcaccgcgattgatgcgctgagtgtcgaagcgcgctttaccttatgcaatatggccgtggaggcgggtgcacgtggaggcttgattgcgcctgaccaggccgcggtggactacgtcatgcaacgatgtcctgacattgcggccaatcctgcctggcgtgtagcggcgctggccgattggcaagcgctgcgcagcgatgaggatgcggcgtttgatgtcgaccatgtctttgcggccgcagatgttgcgccattcgtgacgtggggaaccagtcctgatcaggcgatcccgattagcggtcatatccctgagtgcgatcaggagaatgacgcagaaaaagaaagtaccgaacgcgcgttgcgttataccggtctgcaggtcggcatgtccctggaaggcttgtcggtcaagcatgtgtttatcggctcatgcaccaacggccggattgaagatctgcgcgccgtgattgcaacgataggcgatcgcaaggttgcggccggcgtgcgggcgatggtcgtgccgggttcgggggcagtgcgcatgcaggcggaacaagaaggcatagccgcaaagctgattgccgccggatttgaatggcgcaagcccggttgttccatgtgcctggccatgaatgacgacgtacttgcatccggcacacgttgcgcatcaaccaccaatcgcaacttcgaaggccgccagggtcgcggctccattacgcacctgatgagtcctgcgatggcggcggccgccgccgttaccggcacgattaccgatgtgcgcaaactggaaatccgatga

SEQ ID NO: 148055 - protein, 470 aa, Herminiimonas arsenicoxydans
MARTLYQKLVDTHTVAQLDRDNVLLFADLHLLNEYTSPQAFAGLDERGLRALIPGQNVATVSHIIPTTPDPLRIIRDTDSALQASNLKRNCDLHHIPLFDTNDALQGIEHVIAPEHGMIRPGMVVICGDSHTTTYGALGALGFGIGTTEVEHVLATQTLVYRLAKNMRIRVDGKLPNGTTAKDLVLMIISRIGAQGARGFVVEFSGTAIDALSVEARFTLCNMAVEAGARGGLIAPDQAAVDYVMQRCPDIAANPAWRVAALADWQALRSDEDAAFDVDHVFAAADVAPFVTWGTSPDQAIPISGHIPECDQENDAEKESTERALRYTGLQVGMSLEGLSVKHVFIGSCTNGRIEDLRAVIATIGDRKVAAGVRAMVVPGSGAVRMQAEQEGIAAKLIAAGFEWRKPGCSMCLAMNDDVLASGTRCASTTNRNFEGRQGRGSITHLMSPAMAAAAAVTGTITDVRKLEIR

SEQ ID NO: 148056 - DNA, 1401 bp, Herminiimonas arsenicoxydans; identical to SEQ ID NO: 103003
  CDS (1)..(1401): transl_table=11

SEQ ID NO: 148057 - protein, 466 aa, Herminiimonas arsenicoxydans; identical to SEQ ID NO: 103004

SEQ ID NO: 148058 - DNA, 1410 bp, Burkholderia vietnamiensis G4; identical to SEQ ID NO: 103005
  CDS (1)..(1410): transl_table=11

SEQ ID NO: 148059 - protein, 469 aa, Burkholderia vietnamiensis G4; identical to SEQ ID NO: 103006

SEQ ID NO: 148060 - DNA, 1407 bp, Bradyrhizobium sp. ORS278; identical to SEQ ID NO: 103007
  CDS (1)..(1407): transl_table=11

SEQ ID NO: 148061 - protein, 468 aa, Bradyrhizobium sp. ORS278; identical to SEQ ID NO: 103008

SEQ ID NO: 148062 - DNA, 1419 bp, Bradyrhizobium sp. ORS278
  CDS (1)..(1419): transl_table=11
atgacgggaacagggcagccgcggacgctgttcgacaaggtctgggatgggcatgtggtgacgcgccgcgaggacggcgcggagctgttgttcatcgaccgccacctcttgcatgagggctcgttccatgccttcaacaagctcaaggacaagcgcgccaaggtccggcggccggatctcaccatcggtgtcgcggatcattatgtgccgactcgtacgcgcgcgctgagcgaggtcgcgcccgacatcgccggcatgatccgtcaactcgacgacaattgccgcgccaacgccatccgcatcttcggcttcgacgatccccgccagggcatcgtgcacgtcgtcggtcccgagcagggcctgacgctgcccggactcaccatggtctgcggcgacagccacacctcgacgcatggcgcgttcggcgcgctggccttcggcatcggcgcctccgaggtcgcgcatgtgctgctgacgcagacgctgtggcagaagaagccaaggcggatgcgcatcacggtggacggcgcgaccgcgccggggatcaccgccaaggacatcgcgctctcgatcatcgcaaggatcagcgccgacggcgcgcaggggcacgcggtcgagtatacgggatccgcgatccgcgcgctgacgatggagggccggctgacgctctgtaatctctcgatcgagagcggcgcgcgatgcggcatgattgcgcctgacgagacgacgttcgcctacgtgaggggacggccactcgcgcccgccggcgaggtgctcgacggcgccatcgcggcctggcgagagctgacgagcgatgccgacgcggcgttcgaccgcgcggtcctgctcgatggcaaggacatcgcgccgactgtgacctggggcatcagcccagaggatgcgctgccgatcggcgcgtcggtgcctgatcccgcagccatggacgatgcgtcgcgcgcgagccatgtccgcgaggcgctcgactacatgggcctcgcgcccggccaatcactcgagacggtcaggatcgaccgcgtgttcatcggctcctgcaccaacagccgcatcgaggatctgcgcgctgcggcaagcgtcctcgctggccgtaaggcgcgcgtgcccggtctcgtctcgccgggctcgcaccttgtcaagcagcaggccgagcaggaaggcctcgaccgcatcttcgtcgatgccggcctggactgggttggttcaggctgctcgatgtgcgtcggcatgaacggcgatctcgttccagcgggcgagcgctgcgcctccaccaccaaccgcaacttcaagggccgccagggccccggcgcgcgcacgcatctgatgtcgccggcgatggtcgcggccgccgcggtcaccggccatctcaccgacgtgcggccgctgctgaggagcgatgcatga

SEQ ID NO: 148063 - protein, 472 aa, Bradyrhizobium sp. ORS278
MTGTGQPRTLFDKVWDGHVVTRREDGAELLFIDRHLLHEGSFHAFNKLKDKRAKVRRPDLTIGVADHYVPTRTRALSEVAPDIAGMIRQLDDNCRANAIRIFGFDDPRQGIVHVVGPEQGLTLPGLTMVCGDSHTSTHGAFGALAFGIGASEVAHVLLTQTLWQKKPRRMRITVDGATAPGITAKDIALSIIARISADGAQGHAVEYTGSAIRALTMEGRLTLCNLSIESGARCGMIAPDETTFAYVRGRPLAPAGEVLDGAIAAWRELTSDADAAFDRAVLLDGKDIAPTVTWGISPEDALPIGASVPDPAAMDDASRASHVREALDYMGLAPGQSLETVRIDRVFIGSCTNSRIEDLRAAASVLAGRKARVPGLVSPGSHLVKQQAEQEGLDRIFVDAGLDWVGSGCSMCVGMNGDLVPAGERCASTTNRNFKGRQGPGARTHLMSPAMVAAAAVTGHLTDVRPLLRSDA

SEQ ID NO: 148064 - DNA, 1296 bp, Dehalococcoides sp. BAV1
  CDS (1)..(1296): transl_table=11
atgggaatatacctttgtaaaggaaggttgcataaacaaaacatggggaaaacactagcagaaaaaatactcagcctgaaatctggcagtgatgccagtgccggagacattgtagtctccatggtggacttggcatttgttcaggataccaccggccctctgactgtcagggaattttgggataacggttttaccaaactggctaatccattgcggactgccctttttctggatcatgccgcacccagcccccagagacagctctcaacagaccatatcctgcttcgcaaatttgcccgggataccggagcccttatttttgatgtaggcgagggagtttgccaccagctggtggctgaaaagctggccagaccgggggatgtgattgtaggggcagattctcatacagttaccgccggaggtctgtgtgcctttgctaccggcatgggctcgtctgatattgcggtggcgtttgctctgggcaagacttggtttcgggtgccggagactattaaagtggtagtcagcgggcgtttcaagcatgggctttacgcaaaagaccttattttgcatcttatcggacttatcggggcggatggggctacctataaagctctggagttttccggtaatgttgtgaacaatatgacggtagccgaaaggctgactattgccaatatggcggttgaggccggggctaaagtagggcttttcccgtctgaccgccagacacttgaatacctgcgttcggtggggcgtgaggctgactaccagcctttggcggcggatgcagatgcagtgtacgaaagggtaatagaaatagatgctaccgcccttgaacccaccatatccaaaccccataccgtggataatactgctactgcccgtgaacttaagggtaccaaactggatcaggtgtttatcggtacctgcaccggagggcgtctggatgatttggcggtggcggcggctatatttaaaaaccgcaaacgccatccccaaacccgtcttatagtcacgcctgcctcacaaaaaatatatctggaagctatccgtctgggttatatagaaatactggtacaggccggggctaatattatgccgcccggttgcggtgcctgtctgggcgtccatcagggtgtgctgggagacggcgaagtttgcctttccactgccaaccgcaattttaaaggccgtatgggtaaccccgaagggtttatctatttggccagtgcggcaactgctgccgcatctgccatcaaaggtgaaatttcagatcccagagaggtaatgtaa

SEQ ID NO: 148065 - protein, 431 aa, Dehalococcoides sp. BAV1
MGIYLCKGRLHKQNMGKTLAEKILSLKSGSDASAGDIVVSMVDLAFVQDTTGPLTVREFWDNGFTKLANPLRTALFLDHAAPSPQRQLSTDHILLRKFARDTGALIFDVGEGVCHQLVAEKLARPGDVIVGADSHTVTAGGLCAFATGMGSSDIAVAFALGKTWFRVPETIKVVVSGRFKHGLYAKDLILHLIGLIGADGATYKALEFSGNVVNNMTVAERLTIANMAVEAGAKVGLFPSDRQTLEYLRSVGREADYQPLAADADAVYERVIEIDATALEPTISKPHTVDNTATARELKGTKLDQVFIGTCTGGRLDDLAVAAAIFKNRKRHPQTRLIVTPASQKIYLEAIRLGYIEILVQAGANIMPPGCGACLGVHQGVLGDGEVCLSTANRNFKGRMGNPEGFIYLASAATAAASAIKGEISDPREVM

SEQ ID NO: 148066 - DNA, 1419 bp, Synechococcus sp. WH 7803
  CDS (1)..(1419): transl_table=11
atgagcagcgggaccctttacgacaaggtttgggatctgcatcgcgtcgctgatcttcccggtggatccacccagctgttcatcggcctgcacctgatccatgaggtaaccagtccccaggcttttgcggctctcgaagacaagggactcacggtgcgctgtccgcagcgcaccgtggccacggtggaccacatcgtgcccaccaccagtcaggccagaccctttgcggatcctctcgccgaggagatgctgagcaccctggaacgcaactgttcccatcacggcatcaccctgcatggtcttggcagtggtcgccagggcatcgtgcatgtgatcgcgccggagcttggcctgacccagccgggaatgaccgtggcctgcggtgactcgcacacctccacgcacggcgccttcggagccatcgccttcgggatcggcaccagtcaggtgcgcgacgtcctcgccagccagagcctggcgatgaacaaactcaaggtgcgtcggatttgggtggagaaccagctcagcccaggggtgttcgccaaagatttgatcctgcacgtgattcgctccctgggcgtgaaggcaggggttggatacgcctatgagttctcaggtccagccatcgaggccctgtcgatggaggagcgcatgaccctctgcaacatggcgattgaagggggggcgcgctgcgggtacgtgaaccctgatcaaaccaccttcgactatctccatgggcgtgcgcaggcgccttcggcagaggcctgggaccgggcggtgagctggtggcgctccctggcttccggtgctgatgcctgcttcgacgatgaggtgcgttttgacgctgccaccattgcccccacggtgacctggggcatcacacccggtcagggaatcggtgtggatgaaaccgtgcccaggcctgagcagctggacccagccgatcgccccattgccgaggaggcctatcgctacatggatctggcgcccggtcaggccatcgcaggggtgcctgtggatgtgtgcttcatcggcagctgcaccaatggacgactcagtgacctgcaggccgcggccgcagtggccaagggccgtcatgtggcctcaggcatccgtgcgtttgtggttcctggttctgaacaggtggcccgggctgcggaagccgaagggcttgatgctgtgttccgtgaagccggttttgaatggcgggaaccgggctgttccatgtgtctggccatgaatcctgatcggctggaggggcgtcagatcagcgccagctcgagcaatcgcaatttcaaaggtcggcagggttcggcgagtggccgaaccctgctgatgagtcccgcgatggttgccgccgccgcgatcaccgggcaggttcgtgatgtgcggcagttgaactgcatgacgactgactga

SEQ ID NO: 148067 - protein, 472 aa, Synechococcus sp. WH 7803
MSSGTLYDKVWDLHRVADLPGGSTQLFIGLHLIHEVTSPQAFAALEDKGLTVRCPQRTVATVDHIVPTTSQARPFADPLAEEMLSTLERNCSHHGITLHGLGSGRQGIVHVIAPELGLTQPGMTVACGDSHTSTHGAFGAIAFGIGTSQVRDVLASQSLAMNKLKVRRIWVENQLSPGVFAKDLILHVIRSLGVKAGVGYAYEFSGPAIEALSMEERMTLCNMAIEGGARCGYVNPDQTTFDYLHGRAQAPSAEAWDRAVSWWRSLASGADACFDDEVRFDAATIAPTVTWGITPGQGIGVDETVPRPEQLDPADRPIAEEAYRYMDLAPGQAIAGVPVDVCFIGSCTNGRLSDLQAAAAVAKGRHVASGIRAFVVPGSEQVARAAEAEGLDAVFREAGFEWREPGCSMCLAMNPDRLEGRQISASSSNRNFKGRQGSASGRTLLMSPAMVAAAAITGQVRDVRQLNCMTTD

SEQ ID NO: 148068 - DNA, 1284 bp, Desulfotalea psychrophila LSv54; identical to SEQ ID NO: 103011
  CDS (1)..(1284): transl_table=11

SEQ ID NO: 148069 - protein, 427 aa, Desulfotalea psychrophila LSv54; identical to SEQ ID NO: 103012

SEQ ID NO: 148070 - DNA, 1359 bp, Silicibacter pomeroyi DSS-3
  CDS (1)..(1359): transl_table=11
gtgctgcgccgcgaggacggcagcgcgctcctttgggtcgaccggcatctggtgcacgagggatcgcaccacgcctttgcgcggctggccgagaggggcttgccggtggccgaacccggcctgacatttgcggtggtcgatcactatgcgcccacgcgccgggcggggccgatcgccgatccggcgattgcccgcatgatcgagaccctgcgcggcaatgccgtccggcatggggtgcgcctgtttgatctggatgaccccgatcaggggatcgtgcatgtggtcgggcccgagcaggggctgaccctgcccggcctgctgatcacctgcggcgacagccatacctcgacccatggggcattcggcgcgctcgcctttggcatcggcgcgaccgaggtggcgcatgtgctggcaacccagaccatctggcagcgcaagccgcgcgcgatgcggatcaccgtcgatggcacgttgccagcgggtgtgtcggccaaggatatcgcgctcaactggatcgcgcggctcggcgccgacggggcacagggccatgcggtggaatatgcgggcagcgccattcgtagcctgtcgatggagggtcggatgaccctgtgcaacctgaccatcgaagggggcgggcgcatgggcatggtggccccggacgaggtgagctttgcctatctacgtgaccggccgcacgcaccgcggggcggggactggcacaaggcgttggacaactggcaggccctggccagcgatgccgatgcccggttcgaccgcgatgtcgccctgtcgaccgaagagatcgcgcccatcgtgacctggggcaccagccccgaacaggccctgcccattgatgcgtccgtacccatccccgacacattgcagcccgccaaggcgcaggccgcccgcgccgcgctagactacatggggctggtgccgggccgcccgttggcgggcacgccggttgatcaggtgttcatcggctcctgcaccaatggccggatcgaggatttgcgcgccgccgccgctgttctggccgggcgcaaggcacgcgtgccggggctggtgtcgcccggttcggcccgggtcaaggcgcaggccgagcaggaggggctggaccgcgtgttcaccgaggcagggctcgactgggtcgcgtcgggctgttccatgtgcgtgggcatgaacggcgatctggtcgcggcgggcaagcgatgcgcctcctcgaccaaccgcaactttcgcggccgtcagggcaagggcgcgcgcacacatctgatgtcgcctgccatggtggcggcggcggcggtgaccggcacgctgtgcgacgttcgacccatgttgcaggggagggcgctctga

SEQ ID NO: 148071 - protein, 452 aa, Silicibacter pomeroyi DSS-3
MLRREDGSALLWVDRHLVHEGSHHAFARLAERGLPVAEPGLTFAVVDHYAPTRRAGPIADPAIARMIETLRGNAVRHGVRLFDLDDPDQGIVHVVGPEQGLTLPGLLITCGDSHTSTHGAFGALAFGIGATEVAHVLATQTIWQRKPRAMRITVDGTLPAGVSAKDIALNWIARLGADGAQGHAVEYAGSAIRSLSMEGRMTLCNLTIEGGGRMGMVAPDEVSFAYLRDRPHAPRGGDWHKALDNWQALASDADARFDRDVALSTEEIAPIVTWGTSPEQALPIDASVPIPDTLQPAKAQAARAALDYMGLVPGRPLAGTPVDQVFIGSCTNGRIEDLRAAAAVLAGRKARVPGLVSPGSARVKAQAEQEGLDRVFTEAGLDWVASGCSMCVGMNGDLVAAGKRCASSTNRNFRGRQGKGARTHLMSPAMVAAAAVTGTLCDVRPMLQGRAL

SEQ ID NO: 148072 - DNA, 1308 bp, Ralstonia eutropha JMP134
  CDS (1)..(1308): transl_table=11
atggcgcaggtgtccgcacaggccgtcgcagcggccacgccccagacgctcgcccagaaactgctggcccgcgcatccggccgcgcgcatgtcacgccgggcgagatcgtcacctgccgtgtcgatctggccatgatgcatgattcgggtggcccgcggcgcgtcaagccgctgctggagaagatcggcgcccgggtctgggacccgtccagggtggtggtggtcacagaccactatgtgccggcccatgacgccgacagccgcaagatcgtgcagatcgcgcgcgagtgggtcagggaggagggcgtggcgcgcttccatgacatggagggcatctgccatgtggtggtgccgcagaagggctacctgcgtccgggcatgatggcggtgggtggtgacagccactcctcaacgggtggggccttcggcacatacatgttcggcatcggggcgacagagatgctcggcgtactggtgaccggcgagatctgggtgcgcgtaccgcagaccctccgcatgcaatggcacggccggctgcgccccggcgtgtcggcaaaggacatgatgctgcgcatgtgcacgcaattcggcatggacgggggccagtatcaggccgttgaatatgccggcaccgccgtgtcggcgttgtcgatgcaggagcgcatgacgctgtcgaacatgaccgcggagctgggcgcccaggtcggcctggtggcgcccgacgcggtgacgcgcgactggctgctcgacgccggcgtggagccatcggagattgacgtcgaccgctggcagtcggacgccggcgccgcatgcctggctacgcacgacttcgacgctgcgtcgctggcgccgcaagtgtcgcggccgcataccccggccgatgccagcgacgtcgacagcctgggcaatgtggcggtcaatatcgcatacatcggtgcctgcaccggcgccaagctcgacgacctgcgcatggccgcgcaagtgctgcgcggacagcgcgtggcgcgcaatagccggctgctggtggcgccggccagcgccgcggaccaggcgcaggccgagcgcgagggcacgctgggcgcgctggtggcggccggcgccgagcttctgccaaacgcttgcggcgcgtgcgctggctatggcgagcaccgctttggcgaggacaccgtggtgatcagtaccactgcgcgcaatttcaagggacgcatgggcgccgcatcgtcgcaggtttatctcggttcgccctacacggtggccgcgtctgcaattgccggccgaatcgccgatccacgggggatgctgtcatga

SEQ ID NO: 148073 - protein, 435 aa, Ralstonia eutropha JMP134
MAQVSAQAVAAATPQTLAQKLLARASGRAHVTPGEIVTCRVDLAMMHDSGGPRRVKPLLEKIGARVWDPSRVVVVTDHYVPAHDADSRKIVQIAREWVREEGVARFHDMEGICHVVVPQKGYLRPGMMAVGGDSHSSTGGAFGTYMFGIGATEMLGVLVTGEIWVRVPQTLRMQWHGRLRPGVSAKDMMLRMCTQFGMDGGQYQAVEYAGTAVSALSMQERMTLSNMTAELGAQVGLVAPDAVTRDWLLDAGVEPSEIDVDRWQSDAGAACLATHDFDAASLAPQVSRPHTPADASDVDSLGNVAVNIAYIGACTGAKLDDLRMAAQVLRGQRVARNSRLLVAPASAADQAQAEREGTLGALVAAGAELLPNACGACAGYGEHRFGEDTVVISTTARNFKGRMGAASSQVYLGSPYTVAASAIAGRIADPRGMLS

SEQ ID NO: 148074 - DNA, 1305 bp, Ralstonia eutropha JMP134
  CDS (1)..(1305): transl_table=11
atgaacgtcgccgcagcatccgggcacatccctcccgccacgctggcccagaagctggtggcgcgagccgccgggctcgcgcacgccgagcccggttcactcgcgatgtgccgcgtcgacctcgcgatgtcgcacgactccagcggaccgcgccgcgtcgcgccgttgctggaggcgctcggcacgaccgtgtgggatccgtcgcgctacgtggtcgtgaccgaccatttcgtgccggcctccgatcccgctgctgaagccatcctgcacttcacgcgcgactggacgcgcagcagcggcgcgcatctgatcgacggagaaggcatctgccacgtggtactacccgagcacggccacgtgctgcccggccgcctgatcgtgggcggcgacagccacagcccgaccggtggcgcgttcggcgcgtatatgttcggcgtgggcgccacggagatggccggcgtgctcgccacgggcgaaatctggctgcgcgtgccgcagaccatccggctgcagtgggacggcgcgctggcgcccggtgtctgcgccaaggacatgatgctgttcctgtgcgcgaagctgggactgggcggcggccgctacgaggcgatcgagtatgccggcagcgccgtggccgcgctgcccatgcaggaacgcatgacgctggccaatatgagcgcggagctcggcgcgcagaccgggctggtcgcgcccgatgtcgtcaccctggactggcttgccgctgctggcgtaccggcgcaaacgctggcggaaattgacctcgcacactggcgcagcgataccgatgcgccactgctggcgaatcatgtcttcgatgccgccgcactgacaccgcaggtggccgctccccattcgcccgccaacagcgcgccggtggatcaggccgccggcgaatccgtgcagatcgcctaccttggcgcctgcaccggcgccaagctcgaggacctgcgcatggccgccagcgtgctgcgcggacgccgcgtggcgccaggcgtcagcctgcaggtagcacccgcttccgcgcgcgaccagcagcaggcgcagcgcgaaggcacgctggccgtactggccgacgcgggcgccgacctgctgcccaatgcctgcggagcctgcgccggctatggcgcggcacgctttcccgccggcagccgggcgattgcctcgaccgcgcgcaacttctccgggcgcatgggcgatgccggcagcgcggtgtggctcgcgtccccgctgactgtagcggccagcgccgtgaccggacgcatcaccgacccacgtaccctgctctga

SEQ ID NO: 148075 - protein, 434 aa, Ralstonia eutropha JMP134
MNVAAASGHIPPATLAQKLVARAAGLAHAEPGSLAMCRVDLAMSHDSSGPRRVAPLLEALGTTVWDPSRYVVVTDHFVPASDPAAEAILHFTRDWTRSSGAHLIDGEGICHVVLPEHGHVLPGRLIVGGDSHSPTGGAFGAYMFGVGATEMAGVLATGEIWLRVPQTIRLQWDGALAPGVCAKDMMLFLCAKLGLGGGRYEAIEYAGSAVAALPMQERMTLANMSAELGAQTGLVAPDVVTLDWLAAAGVPAQTLAEIDLAHWRSDTDAPLLANHVFDAAALTPQVAAPHSPANSAPVDQAAGESVQIAYLGACTGAKLEDLRMAASVLRGRRVAPGVSLQVAPASARDQQQAQREGTLAVLADAGADLLPNACGACAGYGAARFPAGSRAIASTARNFSGRMGDAGSAVWLASPLTVAASAVTGRITDPRTLL

SEQ ID NO: 148076 - DNA, 1404 bp, Anabaena variabilis ATCC 29413; identical to SEQ ID NO: 103017
  CDS (1)..(1404): transl_table=11

SEQ ID NO: 148077 - protein, 467 aa, Anabaena variabilis ATCC 29413; identical to SEQ ID NO: 103018

SEQ ID NO: 148078 - DNA, 1419 bp, Pseudomonas fluorescens PfO-1; identical to SEQ ID NO: 103019
  CDS (1)..(1419): transl_table=11

SEQ ID NO: 148079 - protein, 472 aa, Pseudomonas fluorescens PfO-1; identical to SEQ ID NO: 103020

SEQ ID NO: 148080 - DNA, 1419 bp, Pseudomonas fluorescens PfO-1
  CDS (1)..(1419): transl_table=11
atgcccagcccgagaacgctgtaccagaagcacatcgacagtcacaccgtctgcaccctcgacgatcagggccacgtgctgctttacatcgaccgccaggtcgccaacgaatacaccagcccgcaagccttcagcggcctgcgcgaggccgggcgcacggtgtggcggcctgcggcgacgctggcggtggtcgatcatgtgaaccccaccgcaccgaaacgcatcgcgaccatgcccgacgccgggggcgcgcggcaggtgtcgtacttcgaagaaaactgccgcgacttcggcatcgagctgttcgatgtgctggacaagcgccagggcatcgaacacgtcgtagcgccggaacagggtttcattttgccgggcatggtggtcgcggccggtgacagccacaccaccacttacggcgcactgggagcgttcggtttcggcatcggcacctcggaaatcgagcacctgctggcaacccagacgctggtctacaaacgtctgaaaaccctgcgggtgacggtcaacggcgaactgggcgcaggcgtcacctccaaggacatcatcatggcgctgatcgaaaagatcggcgcgtccggcgccaccggttacgccatcgagttcaccggcccggccatcagcgccctcagcgtcgaagcgcgcatgaccatctgcaacatggccgtcgaggccggcgcccggggtgcgttcatggcaccggatgacaaggtgttcgcctacctgcaacacaagccgcgtgcgcccaagggcaagctctgggagcaggccatcgatcactggaaaaccctgcacagcgatgagggcgcagtgttcgatcgcgaagtcatccttgatgtcgccgagctggaaccaatggtgacctggggcaccagccccgatcaggccgcgccgatcaaggcacacgtgccggatccggccgcccagcccgatccgatcctgcgtcagggcctgcagcgcgccctcgactacatggggctgacgcccggcatgccgctgaacgaagtgacgatcagccatgccttcatcggttcctgcaccaatgcgcggatcgaagatttgcgtgatgttgcccgcgtggtgcgcggcaagcgtgtggcggcccacgtgcgggcgatgatcgttcccggctcgacgttggtgcgcaatcaggccgaggacgaaggcctggcgcagatctttctcgacgccggtttcgaatggcggcaatcgggttgctcgatgtgcctggcgatgaacgacgacgtgctcgcgccaggtgatcgctgtgcgtcgagcaccaatcgcaacttcgaaggccgtcagggcgccggtgcgcgcacccacctgatgagcccggcgatggtcgccgccgccatcagcggccatttgactgacgtgcgcaccgtcgcgctggaggcttga

SEQ ID NO: 148081 - protein, 472 aa, Pseudomonas fluorescens PfO-1
MPSPRTLYQKHIDSHTVCTLDDQGHVLLYIDRQVANEYTSPQAFSGLREAGRTVWRPAATLAVVDHVNPTAPKRIATMPDAGGARQVSYFEENCRDFGIELFDVLDKRQGIEHVVAPEQGFILPGMVVAAGDSHTTTYGALGAFGFGIGTSEIEHLLATQTLVYKRLKTLRVTVNGELGAGVTSKDIIMALIEKIGASGATGYAIEFTGPAISALSVEARMTICNMAVEAGARGAFMAPDDKVFAYLQHKPRAPKGKLWEQAIDHWKTLHSDEGAVFDREVILDVAELEPMVTWGTSPDQAAPIKAHVPDPAAQPDPILRQGLQRALDYMGLTPGMPLNEVTISHAFIGSCTNARIEDLRDVARVVRGKRVAAHVRAMIVPGSTLVRNQAEDEGLAQIFLDAGFEWRQSGCSMCLAMNDDVLAPGDRCASSTNRNFEGRQGAGARTHLMSPAMVAAAISGHLTDVRTVALEA

SEQ ID NO: 148082 - DNA, 1428 bp, Rhodobacter sphaeroides 2.4.1; identical to SEQ ID NO: 103021
  CDS (1)..(1428): transl_table=11

SEQ ID NO: 148083 - protein, 475 aa, Rhodobacter sphaeroides 2.4.1; identical to SEQ ID NO: 103022

SEQ ID NO: 148084 - DNA, 1413 bp, Burkholderia sp. 383
  CDS (1)..(1413): transl_table=11
atgggacagacgctttaccggaagatcgtggcgagccacacggtatcccgcgtcgacgcgcagcacgtcgtgctgtacgccgacctgcacatcatgaacgagtacacgagcccgcaggcgttcgccgggctcgcggcaaggaacctgccggtacgctgcccggaaaagcagatgggcatcgtcgatcacgtgattccgacgcatcccgttccggtcggccagcgcatgatcgtcatcgacgcggcggccagccaggccgcgaatttcacgcgcaactgccgccggcacggcatccacctgttcgacgtccaggacaccgaacagggcatcgagcacgtggtcgcgcccgagatcgggctgatccggcccggcatggttgtgctgtgcggcgacagccacacgacgacctatggtgcgctgggcgcgctcggcttcggcatcggcacgtcggaagtcgagcatgtgctggcgacgcagacgctggtgtaccgcgtcgcgcgcgacatgcgcatccgcgtggacggcacgctgccggccggcaccacgtcgaaggatctcgtgctgtacatcatctcgaagatcggcgcgcagggcgcgcgcggcttcgtcgtcgagtactgcgggccggcgatcgacgcgctgagcgccgaagcgcgtatgaccctgtgcaacatgacggtcgaagctggtgcgcgcggcgcactcatcgcgcccgacgcgacgacggtcgaatatgtccgcgaccggatccgcgatctgccggcggcccgccttgacgaggccgccgcgcagtggacacaactgcaatccgacgccgacgcgccgttcgacgtcacgcatcgcttcaatgcggcggacgtcgcgccgttcgtgacctggggcacgagccccgaccaggccatcgcgattaccgcgcgcattccggcgctgtcggccgagccgctcgaacgcgacaacgcgcgcaaggcgctcgattacatgggactcgatgccgggcagccgatcgatggcctgcatatcgaccacgtgttcatcgggtcgtgcaccaatgcgcgcatcgaagacctgcgcgccgtggcggacgtcgtgcgcggccgcacggtcgcgccgtcggtgcgcgcgatggtcgtaccggggtcggtcgcggtgcgcgaacaggccgagcgcgaaggcgtcgcgcgcacactgatcgacgccggattcgaatggcgccagcccggctgctcgatgtgcctcgcgatgaacgacgacatcctcgcgcccggccagcgctgcgcgtcgacgacgaatcgcaatttcgagggccgccagggacgtggcgcccgcacccacctgatgagtccggcgatggccgccgccgccgcgctggccggacgcatcgtcgacgtacgcaaggagttcgatcatgcgtga

SEQ ID NO: 148085 - protein, 470 aa, Burkholderia sp. 383
MGQTLYRKIVASHTVSRVDAQHVVLYADLHIMNEYTSPQAFAGLAARNLPVRCPEKQMGIVDHVIPTHPVPVGQRMIVIDAAASQAANFTRNCRRHGIHLFDVQDTEQGIEHVVAPEIGLIRPGMVVLCGDSHTTTYGALGALGFGIGTSEVEHVLATQTLVYRVARDMRIRVDGTLPAGTTSKDLVLYIISKIGAQGARGFVVEYCGPAIDALSAEARMTLCNMTVEAGARGALIAPDATTVEYVRDRIRDLPAARLDEAAAQWTQLQSDADAPFDVTHRFNAADVAPFVTWGTSPDQAIAITARIPALSAEPLERDNARKALDYMGLDAGQPIDGLHIDHVFIGSCTNARIEDLRAVADVVRGRTVAPSVRAMVVPGSVAVREQAEREGVARTLIDAGFEWRQPGCSMCLAMNDDILAPGQRCASTTNRNFEGRQGRGARTHLMSPAMAAAAALAGRIVDVRKEFDHA

SEQ ID NO: 148086 - DNA, 1410 bp, Burkholderia sp. 383; identical to SEQ ID NO: 103025
  CDS (1)..(1410): transl_table=11

SEQ ID NO: 148087 - protein, 469 aa, Burkholderia sp. 383; identical to SEQ ID NO: 103026

SEQ ID NO: 148088 - DNA, 1419 bp, Synechococcus sp. CC9605; identical to SEQ ID NO: 103027
  CDS (1)..(1419): transl_table=11

SEQ ID NO: 148089 - protein, 472 aa, Synechococcus sp. CC9605; identical to SEQ ID NO: 103028

SEQ ID NO: 148090 - DNA, 1284 bp, Geobacter metallireducens GS-15; identical to SEQ ID NO: 103029
  CDS (1)..(1284): transl_table=11

SEQ ID NO: 148091 - protein, 427 aa, Geobacter metallireducens GS-15; identical to SEQ ID NO: 103030

SEQ ID NO: 148092 - DNA, 1410 bp, Prochlorococcus marinus str. MIT 9312
  CDS (1)..(1410): transl_table=11
ttgagtcaaaataccttatttgataaagtttgggatttacacaaagtttctagtctacctggtggctcagatcaaatttttattggtcttcatctcatacatgaagtaacaagtcctcaggcatttggtgctttaaaagacaaaaacttaaaagtaaaatttcctagtagaaccgtggccactgttgatcatattgtgccaacagataatcaaagcagacctttcaaagataatcttgcagaacaaatgattgaaacacttgaaaataactgcttacaacataaaataaaattttttaatattggcagtggcaatcaaggaatagtacatgtagtagctccagaattagggctaactcagccaggaatgacaatcgcttgtggtgattcacacacttcaactcatggagcttttgggtcaattgcctttgggataggcactagccaagtaagggatgttcttgctacccaaaccatagccatgaacaaattgaaggtgagacagatttggtgtgaaaataatttatctaatggcgtttacgctaaggatttagtgcttcacattattaatgaacttggtgtaaaggctggagtaggttttgcatatgaattcgcggggcctgcaatcgatgaattatcaatggaagaaaggatgacaatatgcaatatgtctattgaagggggcgcgagatgtggctacataaaccctgatgaaaagacctttagttacattaaaaatagattatatgctccaaaacatacacaatgggataaagctctcttatggtggaaatcattaaaaagtgatgaaaattcaatttatgatgatgtaattaaattagatgcttcaaaagtagaaccaaccgtaacttggggaattactcccggtcaaagtttaggcatcaatcaactgattcctctgttagatgacttgcccccaaatgaccaatttattgctgaagaggcttttgaatatatgggtttcatgccagggcaatcaataaaagatactccagtagatgtttgtttcatagggagttgcacaaatgggagaatcagtgacttaagagttgcagctaaaatattgaaagacaaaaaagtatctaaaaaagtaaaagcatttgtagttccaggttcagagaaagttgccactgaagccaaagaagaaggtcttgataagatctttaaggattctggatttcaatggagagagccaggttgctcaatgtgtttagcaatgaattcagataagctaataggtaatcaagttagtgctagttctagcaatagaaatttcaaaggtaggcaaggatctccaagcggaagaacacttcttatgagtccagctatggttgctgccgccgcaattaatggcaaagtaagtgacgttagagaatttataaacaaatga

SEQ ID NO: 148093 - protein, 469 aa, Prochlorococcus marinus str. MIT 9312
MSQNTLFDKVWDLHKVSSLPGGSDQIFIGLHLIHEVTSPQAFGALKDKNLKVKFPSRTVATVDHIVPTDNQSRPFKDNLAEQMIETLENNCLQHKIKFFNIGSGNQGIVHVVAPELGLTQPGMTIACGDSHTSTHGAFGSIAFGIGTSQVRDVLATQTIAMNKLKVRQIWCENNLSNGVYAKDLVLHIINELGVKAGVGFAYEFAGPAIDELSMEERMTICNMSIEGGARCGYINPDEKTFSYIKNRLYAPKHTQWDKALLWWKSLKSDENSIYDDVIKLDASKVEPTVTWGITPGQSLGINQLIPLLDDLPPNDQFIAEEAFEYMGFMPGQSIKDTPVDVCFIGSCTNGRISDLRVAAKILKDKKVSKKVKAFVVPGSEKVATEAKEEGLDKIFKDSGFQWREPGCSMCLAMNSDKLIGNQVSASSSNRNFKGRQGSPSGRTLLMSPAMVAAAAINGKVSDVREFINK

SEQ ID NO: 148094 - DNA, 1419 bp, Rhodospirillum rubrum ATCC 11170; identical to SEQ ID NO: 103033
  CDS (1)..(1419): transl_table=11

SEQ ID NO: 148095 - protein, 472 aa, Rhodospirillum rubrum ATCC 11170; identical to SEQ ID NO: 103034

SEQ ID NO: 148096 - DNA, 1410 bp, Burkholderia thailandensis E264
  CDS (1)..(1410): transl_table=11
atggcacagacgctctacgacaaattgtggaattcgcacgtcgtccacaccgaagaggacggcaccgcattgctctatatcgatcgccagctgctgcacgaggtcacgagcccgcaggcgttcgaaggcctgaagctcgcgcagcgtccggtgtggcggatcagcgcgaacctcgcggtgtccgaccacaacgtgccgaccaccgaccgcagccacggcatcgccgatccggtgtcgaagctgcaggtcgacacgctcgacgcgaactgcgacgcgtacggcatcacgcaattcaagatgaatgacgtgcgccagggcatcgtccacatcatcggccccgagcagggcgcgacgctgcccggcatgacgatcgtctgcggcgattcgcacacgtcgacgcacggcgcgttcggcgcgctcgcgcacggcatcggcacgtcggaggtcgagcacgtgctcgcgacgcagacgctcttgcagaagaagagcaagaacatgctcgtgaaggtcgagggccaactgccgcgcggctgcaccgcgaaggacatcgtgctcgcgatcatcggcaagatcggcaccgcgggcggcaccggctacgcgatcgagttcggcggctcgacgatccgcgcgctcacgatggaaggccggatgacggtctgcaacatggcgatcgaggcgggcgcgcgcgccggcatggtcgccgtcgacgacacgacggtcgaatacctgaagggccgcccgttcgtgccgacgggcgcgcaatgggatcaggcggtcgaatactggaagacgttcaagtccgacgaaggcgcgcagttcgaccgcgtcgtcgagctgaacgcagccgagatcgtcccgcaggtcacgtggggcacgtcgcccgagatggtcacgtcgatcgacggccgcgtgcccgaccccgagcgcgagaaggacccggtcaagcgcgacgcgatggagcgcgcgctcgcgtacatggcgctcacgccgaacacgccgatcgaggcgatcaaggtcgacaagatcttcatcggctcgtgcacgaacgcgcgcatcgaggacatccgcgcggccgcgtacgtcgtgaagaagctcaatcgccgcgtcgcgccgaacgtgcggctcgcgatggtcgtgccgggctcgggcctcgtgaaggcgcaggccgagcgagaagggctcgacaaggtgttcaccgaggcgggcttcgaatggcgcgagccgggctgctcgatgtgcctcgcgatgaacgccgaccggctcgagccgggcgagcgctgcgcgtcgacgtcgaaccgcaacttcgaggggcgtcagggccagggcggccgcacgcatctcgtcagcccggcgatggccgctgcggcggcgatcgaaggccatttcgtcgacattcgccggctggggtga

SEQ ID NO: 148097 - protein, 469 aa, Burkholderia thailandensis E264
MAQTLYDKLWNSHVVHTEEDGTALLYIDRQLLHEVTSPQAFEGLKLAQRPVWRISANLAVSDHNVPTTDRSHGIADPVSKLQVDTLDANCDAYGITQFKMNDVRQGIVHIIGPEQGATLPGMTIVCGDSHTSTHGAFGALAHGIGTSEVEHVLATQTLLQKKSKNMLVKVEGQLPRGCTAKDIVLAIIGKIGTAGGTGYAIEFGGSTIRALTMEGRMTVCNMAIEAGARAGMVAVDDTTVEYLKGRPFVPTGAQWDQAVEYWKTFKSDEGAQFDRVVELNAAEIVPQVTWGTSPEMVTSIDGRVPDPEREKDPVKRDAMERALAYMALTPNTPIEAIKVDKIFIGSCTNARIEDIRAAAYVVKKLNRRVAPNVRLAMVVPGSGLVKAQAEREGLDKVFTEAGFEWREPGCSMCLAMNADRLEPGERCASTSNRNFEGRQGQGGRTHLVSPAMAAAAAIEGHFVDIRRLG

SEQ ID NO: 148098 - DNA, 1263 bp, Syntrophus aciditrophicus SB; identical to SEQ ID NO: 103039
  CDS (1)..(1263): transl_table=11

SEQ ID NO: 148099 - protein, 420 aa, Syntrophus aciditrophicus SB; identical to SEQ ID NO: 103040

SEQ ID NO: 148100 - DNA, 1398 bp, Frankia sp. CcI3; identical to SEQ ID NO: 103041
  CDS (1)..(1398): transl_table=11

SEQ ID NO: 148101 - protein, 465 aa, Frankia sp. CcI3; identical to SEQ ID NO: 103042

SEQ ID NO: 148102 - DNA, 1437 bp, Novosphingobium aromaticivorans DSM 12444; identical to SEQ ID NO: 103043
  CDS (1)..(1437): transl_table=11

SEQ ID NO: 148103 - protein, 478 aa, Novosphingobium aromaticivorans DSM 12444; identical to SEQ ID NO: 103044

SEQ ID NO: 148104 - DNA, 1404 bp, Francisella tularensis subsp. holarctica; identical to SEQ ID NO: 103045
  CDS (1)..(1404): transl_table=11

SEQ ID NO: 148105 - protein, 467 aa, Francisella tularensis subsp. holarctica; identical to SEQ ID NO: 103046

SEQ ID NO: 148106 - DNA, 1419 bp, Saccharophagus degradans 2-40; identical to SEQ ID NO: 103049
  CDS (1)..(1419): transl_table=11

SEQ ID NO: 148107 - protein, 472 aa, Saccharophagus degradans 2-40; identical to SEQ ID NO: 103050

SEQ ID NO: 148108 - DNA, 1407 bp, Methylobacillus flagellatus KT; identical to SEQ ID NO: 103051
  CDS (1)..(1407): transl_table=11

SEQ ID NO: 148109 - protein, 468 aa, Methylobacillus flagellatus KT; identical to SEQ ID NO: 103052

SEQ ID NO: 148110 - DNA, 1410 bp, Burkholderia xenovorans LB400; identical to SEQ ID NO: 103053
  CDS (1)..(1410): transl_table=11

SEQ ID NO: 148111 - protein, 469 aa, Burkholderia xenovorans LB400; identical to SEQ ID NO: 103054

SEQ ID NO: 148112 - DNA, 1434 bp, Burkholderia xenovorans LB400
  CDS (1)..(1434): transl_table=11
atgacccagccccgtaccctgtacgacaggattttcgacgcgcacgtcgttcgcaccgatgcggacggcacgacattgctttacatcgaccggcatctgctgaacgaggtgacgagcccgcaggcgttcgaatcgttgcggcgcgagggacggccggtctggcgcccgcaggccaatctcgcggtcgcggaccataacgtgccgacgaccgaccggcgcctcgggatcgccgatccggtgtcccggatccaggtggacgtattgcgcgagaactgcgagcgcagcgggattgttcactatgggatggacgacgcgcgccagggcatcgtgcatgtcgtcggcccggaacttggctgcacgctgccgggtatgacgatagtctgcggcgattcgcatacgagcacacatggcgcgctgggtgcgctcgcattcggtatcggtacgtcggagatcgaacacgtgctcggcacgcagacgctgattacgcggcgcagccggacgatgcgcatgacgctggacggtgtgctgccgcccggctgcacggcgaaggacgtcgcgcttgccgtgatcggtgcgctcggcacggccggcggcacgggttacgcaatcgagttcgcgggcccggtggtacgtgcgctgtcgatggaagggcgcatgacgctgtgcaatatgtctatcgaagcgggcgcgcgtgccggcctgatcgcggtcgacgagaccacgctcgattactgccgcacgcggccgcatgcgccgcaaggcgagacgtgggaactttcggcacgcgtatggcgcgcgctgcgctcggacgacgacgcgcgctttgacgccgaatgctcgctcgacgtctcgacgttggcgccgcaggtgacctggggcacgtcgccggagatggtgaccggcatcgacggccgggtgcccgatccgctggacatccacgacgccgggcggcgcgcgtcgtggcagcgcgcgctcgactacatggggctcgacgcgggcacgcgcatcgatacgattgcgatcgacaaggtgttcatcggctcgtgcacgaacggccggctcgaagatctgcgcgcggccgccgacattctgcgtgcaacgggcggacggatcgcgtcgaatgtacgcctcgcgctcgcggtgccgggttcgcagcaggtcaagcgcgacgcggaagcggagggtctgcacgacgtattcatcgccgccggcttcgaatggcgcgagccgggctgctcgatgtgtctcgcgatgaatcccgaccggctcgaaccgggtgaacgcgtggcgtcgacgtcgaaccgcaatttcgagggccggcaaggcgccggcggccgttcgcatctggtcagcccggcaatggccgcggccgccgcgctcgcgggccggttcgccgatgtccggccgttcgcttctggtatgggaggcctctga

SEQ ID NO: 148113 - protein, 477 aa, Burkholderia xenovorans LB400
MTQPRTLYDRIFDAHVVRTDADGTTLLYIDRHLLNEVTSPQAFESLRREGRPVWRPQANLAVADHNVPTTDRRLGIADPVSRIQVDVLRENCERSGIVHYGMDDARQGIVHVVGPELGCTLPGMTIVCGDSHTSTHGALGALAFGIGTSEIEHVLGTQTLITRRSRTMRMTLDGVLPPGCTAKDVALAVIGALGTAGGTGYAIEFAGPVVRALSMEGRMTLCNMSIEAGARAGLIAVDETTLDYCRTRPHAPQGETWELSARVWRALRSDDDARFDAECSLDVSTLAPQVTWGTSPEMVTGIDGRVPDPLDIHDAGRRASWQRALDYMGLDAGTRIDTIAIDKVFIGSCTNGRLEDLRAAADILRATGGRIASNVRLALAVPGSQQVKRDAEAEGLHDVFIAAGFEWREPGCSMCLAMNPDRLEPGERVASTSNRNFEGRQGAGGRSHLVSPAMAAAAALAGRFADVRPFASGMGGL

SEQ ID NO: 148114 - DNA, 1422 bp, Burkholderia xenovorans LB400
  CDS (1)..(1422): transl_table=11
atgaatgcgccgcgcacgctgttcgacaagctgtgggacagccacacgattgcgaatctgccgggcggcgccgatctgttgcaggtggatcgcaatctgatgcatgagttgaccggcgtcgaagcggtacgtgtactcgaagcccgccatttgccggtcagcaaccccgagttgacgttcgcgacgctcgatcacgtgatctccacgcgccccggccgcgaggcgggggatgccgactggagcacgacaatggtcgacacgctgcgcgaacaggcggcgcagcacgccattcccctgttcgatattggcaccgaaggcaggcagggcattgtccacgtgatcggaccggagctcggtttgtcgctgccgggcacgctgatcgtctgcgccgacagccatacctgcactcacggggcattgggtgcgctcgcgttcggcatcggttcgaccgaactggtgcatgtgctggcgacgcaaaccgtacgccagaagaagcccaaaacgatgcgcatacggtttaaaggcagcgttgccgagggcgtcacggccaaggacatgatcctttacgtgatcggcgcgctcggcgccggcgcgggcaccggctacgcggtcgagttcgccggcgaggcggtcgaagcgctctcgatggaagcacgtttgacgctgtgcaatctgacgatcgaactcggcgccaagttcggcctcgtcgcgccggacgagacgacctttgcctatctgcgcggacgtccgtatgcaccgcaaggcgcgagcttcgaggcggcgctggaagactggcgccgcttgccgacggatgacggtgcgcacttcgagcgcgaagtggagatcgacgccgcggcgatcgcggtgcaggtcacctggggcacgagccccgaacacgtgatcgcgatcgacgctgccgtaccggacccgggcaacgagtccgatcccgcgcgccgtgaagcgttgcaacgggcgctcgattacatgggcgtgcatgcggggcagcatctggatgaactggcggtcgatcgcgtgttcatcggctcgtgcaccaacagccgcatcgaagacttgcaggcggccgcgcgcatcgtggcgggccaccatgtcgccgagggtgtgaccgcatgggtggtgccggggtcgctgagcgttgcgcgagaggcggaggcgcagggccttgcacagatattccgcacggccggcttcgaatggcgcgagcccggctgctcgatgtgcgtcggggcgaacggcgacgtggtggggcgtggcgagcgttgcgtatcgacatcgaatcggaacttcgtcggccgtcaggggccgggcgcgcgcacgcatctggcgagtccggccgtggctgcggccagtgcgctggctggtcacattgccgcgccggtgtcgtacgcgggagccgcatcatga

SEQ ID NO: 148115 - protein, 473 aa, Burkholderia xenovorans LB400
MNAPRTLFDKLWDSHTIANLPGGADLLQVDRNLMHELTGVEAVRVLEARHLPVSNPELTFATLDHVISTRPGREAGDADWSTTMVDTLREQAAQHAIPLFDIGTEGRQGIVHVIGPELGLSLPGTLIVCADSHTCTHGALGALAFGIGSTELVHVLATQTVRQKKPKTMRIRFKGSVAEGVTAKDMILYVIGALGAGAGTGYAVEFAGEAVEALSMEARLTLCNLTIELGAKFGLVAPDETTFAYLRGRPYAPQGASFEAALEDWRRLPTDDGAHFEREVEIDAAAIAVQVTWGTSPEHVIAIDAAVPDPGNESDPARREALQRALDYMGVHAGQHLDELAVDRVFIGSCTNSRIEDLQAAARIVAGHHVAEGVTAWVVPGSLSVAREAEAQGLAQIFRTAGFEWREPGCSMCVGANGDVVGRGERCVSTSNRNFVGRQGPGARTHLASPAVAAASALAGHIAAPVSYAGAAS

SEQ ID NO: 148116 - DNA, 1434 bp, Burkholderia xenovorans LB400
  CDS (1)..(1434): transl_table=11
atggaacctgcgacttcaccccgtacgctgctcgacaagctgtggcaaagccacgtcgtcgcggaaacgcccaacggcccaacgctgctttatgttgaccgccatctcgtttacgaggtgacaagcccacaagcgttcgaggcgattcgcctgtcgggccgcaaaccctggcggcctgaaacagtactcgcggtcgctgaccataacgtaccgacgatcgccgcggagcgcacgagcatggacgcgatcgctgacccactctcgcgcattcaggtcgcgcagctcgacaaaaattgcaaggagtttggtatcaagtcgtacggtatccggaacccgcagcaaggaatcatccacgtagtcggcccggaactcggggcgacgttgccgggcatgacggtcgtggcgggagactcgcacacgagtacccacggtgcgttcgccgcactggcgttcggggtgggcacgtcggaagtcgagcacgtgctggcaacccaatgcctgtcggttgggaaaatgaagtcgatgctcgtgaacgttgagggcgtactgccggtgggcgtcacggccaaggacgtgattctcgcgatcatccgcaggaccggtaccgccggcggcaccggttacgcaatggaattcgcgggcagcacgatccgcacgctgtcgatggagggtcgcatgaccctgtgcaacatggcgatcgaggcgggcgcccgggtggggctgatcggcgtcgacgatgtcacgatcgactatgtgaaggggcgtcccttcgcgcccgcagaagcacactgggatgcggcggtcgcctattggcgcacgctggtcagcgatgcggacgcccggttcgacaagatcgtcaacatcgacgcaacgcagctacggccgatggttacctggggcacgtcgcccgaaatggtggtcacggtcgacgacgctgtaccgaatccgttggacgatcccgatcccgttcgccgcgccaccatggccggcgcgcttacgtatatgggacttgagccaggtacgtcgctcaagagcatttcactcgacaagattttcatcggctcctgcacgaatgcacgcatcgaggatctgcgtgcagccgccgcgatcgtcaagggcaggcacgtcgcgccgaccgtccagcttgcgctggtggtgcccggctcgggtctcgtcaaggcacaggccgaggccgaggggctggacgccatattcaaggaggccggctttgaatggcgcgaaccgggttgttcgatgtgcctcggcatgaacgacgaccgcctgcgtccgggggagcggtgtgcgtctacatctaaccgaaattttgaaggccgtcaggggcctggtggccgcagccacctcgtcagtcctgcgatggcagccgcggcagcgattgcaggtcacttcgttgacgtttcccacggaggcttctag

SEQ ID NO: 148117 - protein, 477 aa, Burkholderia xenovorans LB400
MEPATSPRTLLDKLWQSHVVAETPNGPTLLYVDRHLVYEVTSPQAFEAIRLSGRKPWRPETVLAVADHNVPTIAAERTSMDAIADPLSRIQVAQLDKNCKEFGIKSYGIRNPQQGIIHVVGPELGATLPGMTVVAGDSHTSTHGAFAALAFGVGTSEVEHVLATQCLSVGKMKSMLVNVEGVLPVGVTAKDVILAIIRRTGTAGGTGYAMEFAGSTIRTLSMEGRMTLCNMAIEAGARVGLIGVDDVTIDYVKGRPFAPAEAHWDAAVAYWRTLVSDADARFDKIVNIDATQLRPMVTWGTSPEMVVTVDDAVPNPLDDPDPVRRATMAGALTYMGLEPGTSLKSISLDKIFIGSCTNARIEDLRAAAAIVKGRHVAPTVQLALVVPGSGLVKAQAEAEGLDAIFKEAGFEWREPGCSMCLGMNDDRLRPGERCASTSNRNFEGRQGPGGRSHLVSPAMAAAAAIAGHFVDVSHGGF

SEQ ID NO: 148118 - DNA, 1287 bp, Methanococcoides burtonii DSM 6242
  CDS (1)..(1287): transl_table=11
atgttcaatactaatgatcatccaatgacgatctctgagaagatcttttcaaaagcttcaggaaaaacggttaaagccggggatttcgtacttgcgaacatcgaccgtgcaatgactcacgatatcactggtcccctcgcagtagatggtttttatgacatcatgcgtgacaaggaagagaaaaaggtatgggacccaagcaagatcgtgatagtctttgaccatcaggttcctgctgattctctcaatgcttctgcaaaccatatcatgctcaggaagtttgcaaaggaacagggaattcttaactatgatgtctatgagggcgtatgccatcaggtcatgcctgaaatgggtcatgtaagacctggtgaccttattgtggggtctgattcccatacttgtgcatacgggtctcttggtgccttctctaccggtgtcggttctactgatatgtctgcagtgtttgcatcaggtaagctctggttcagggtacctgagaccatcaggttcgaagccaatggaaagcttccaaaacacgtctattcaaaggaccttatactgcacatgataggtgacgtcggtgcagaaggtgcaagatatatggctgctgagtatgcgggttctgccattgagggccttacgatatccgagcgtatgaccatttccaatatggcaattgaaatgggcggtaaggcaggtatcattgaagctgacaagaccacagaggcatatcttaaggagcgtattcctgactatgagttcgatccatactggaagtccgatgaggatgccgaatatgctgagttccatgattataatgtttctgaccttgagccacaggtggcatgtcctcacaacgttgacaatgtaaaaccggtctctgaagtggaaggtactaaggtcgaccaggtattcgtgggttcatgcaccaacggtcgctttgaggacatcaagatcgtggctgagatgatgggtgacgagcctgttgcaaaggatgtacgtcttttgatcatccctgcatcaaggaccgagtacatgaaagtgcttcgtgcaggatatgtggagcagttcatggaagccggtgcaattgtggaagcaccatgctgtggcccatgtatgggtggttcttttggtctgcttggtgacggtgaagtgggacttgcaacctccaaccgtaacttcaaaggaagggaaggcagccctgattcattcgtatatcttagttcacctgcaacagctgcagcatctgcactgaccggtgtgataactgaccccagaaagatctga

SEQ ID NO: 148119 - protein, 428 aa, Methanococcoides burtonii DSM 6242
MFNTNDHPMTISEKIFSKASGKTVKAGDFVLANIDRAMTHDITGPLAVDGFYDIMRDKEEKKVWDPSKIVIVFDHQVPADSLNASANHIMLRKFAKEQGILNYDVYEGVCHQVMPEMGHVRPGDLIVGSDSHTCAYGSLGAFSTGVGSTDMSAVFASGKLWFRVPETIRFEANGKLPKHVYSKDLILHMIGDVGAEGARYMAAEYAGSAIEGLTISERMTISNMAIEMGGKAGIIEADKTTEAYLKERIPDYEFDPYWKSDEDAEYAEFHDYNVSDLEPQVACPHNVDNVKPVSEVEGTKVDQVFVGSCTNGRFEDIKIVAEMMGDEPVAKDVRLLIIPASRTEYMKVLRAGYVEQFMEAGAIVEAPCCGPCMGGSFGLLGDGEVGLATSNRNFKGREGSPDSFVYLSSPATAAASALTGVITDPRKI

SEQ ID NO: 148120 - DNA, 1242 bp, Methanococcoides burtonii DSM 6242
  CDS (1)..(1242): transl_table=11
ttgagtaccatcagtgaaaaaatattcagcaaagcaagtggaaaggatgtaaaagccaatgagttcgtcatggcaaaagtagactatgcaatggctcacgatggcacaagtgtgcttgcagtacgttctttcaagaacatggggcttgaaaatgtgtgggatccaaagcgcattgttattccttttgatcatttaactcctgcaaacacggaaactactgcggatttacatcatgatatccgtgaatggatcggggggcagggcataccgaacttcttcgatgttggtgaaggtatctgccatcaggtccttcctgagaacggctttgcaatgccgggaaagctcgttgttggtgctgattcccattcatgcacctatggcgctttcggtgcgtttggtacgggtgtcggtgcaactgacatgtccgagatatttgcatccggtgaactctggttcagggtgcctgagaccattaaagtaactgcttccggaaaactgaagaaggatgttcttgccaaggacgtaacactcaaagtgatcggtacggttggtgcatccggagctacttacaaagctgctgaattctatggtgatacaataaccgatctgtcaatatccggcaggatgaccttatcaaatatggctattgagatgggtgctaaagcaggcatcgttccgcctgaccaaaagaccttcgatttccttgaaggcagggctgtggaaggttatgagccagtttatgcagatgaggatgctgaatactgtgcagaatatgacattgatggtgcgaaccttgagccacagattgcacttccgcatcaggtggacaatgtgtgtgatgtatcggagatcgagggtaaaaaggtggaccaggtgttcatcggaacctgtaccaatggacgactggaagatcttgaagtggccgctgagatcctcaaaggtgagcaggtcgctgtaaggaccattgtaattccggcatcccgttcaataatgcttgaagctgtccgaaatggtacagcagaaacacttctcgatgctggtgtcacactgggctctcctggatgtggtccatgtcttggcggacatatgggggttatcggtgaaggtgaggtatgtatctcgacagcaaaccgtaatttcagaggcaggatgggcaaaggcggtttcatctatctttcatctcctgctacagcagcggcatcagcgatcacaggtgaaataaccgacccaagaactgtatga

SEQ ID NO: 148121 - protein, 413 aa, Methanococcoides burtonii DSM 6242
MSTISEKIFSKASGKDVKANEFVMAKVDYAMAHDGTSVLAVRSFKNMGLENVWDPKRIVIPFDHLTPANTETTADLHHDIREWIGGQGIPNFFDVGEGICHQVLPENGFAMPGKLVVGADSHSCTYGAFGAFGTGVGATDMSEIFASGELWFRVPETIKVTASGKLKKDVLAKDVTLKVIGTVGASGATYKAAEFYGDTITDLSISGRMTLSNMAIEMGAKAGIVPPDQKTFDFLEGRAVEGYEPVYADEDAEYCAEYDIDGANLEPQIALPHQVDNVCDVSEIEGKKVDQVFIGTCTNGRLEDLEVAAEILKGEQVAVRTIVIPASRSIMLEAVRNGTAETLLDAGVTLGSPGCGPCLGGHMGVIGEGEVCISTANRNFRGRMGKGGFIYLSSPATAAASAITGEITDPRTV

SEQ ID NO: 148122 - DNA, 1410 bp, Ralstonia metallidurans CH34; identical to SEQ ID NO: 103055
  CDS (1)..(1410): transl_table=11

SEQ ID NO: 148123 - protein, 469 aa, Ralstonia metallidurans CH34; identical to SEQ ID NO: 103056

SEQ ID NO: 148124 - DNA, 1413 bp, Acidobacteria bacterium Ellin345; identical to SEQ ID NO: 103057
  CDS (1)..(1413): transl_table=11

SEQ ID NO: 148125 - protein, 470 aa, Acidobacteria bacterium Ellin345; identical to SEQ ID NO: 103058

SEQ ID NO: 148126 - DNA, 1404 bp, Silicibacter sp. TM1040
  CDS (1)..(1404): transl_table=11
atgtcccccaaaacactctatgacaagatctgggatgcgcatgtcgcgcaagaagccgaagacggcacctgtctgctttatatcgaccgtcacctcgttcacgaggtgacaagcccgcaagcctttgaagggctgcgcatggcaggtcgcaaggtgcacgcgccagagaaaaccatcgcggtgccagatcacaacgtccccaccactgcaggacgcgaaaaccccgaccagatgccggaggacagccgcatccaggtagccgcccttgacaccaacgcgcgtgagttcggcgtgcattactatccggtgaccgacatccgccagggtatcgtgcacatcgtcggccccgagcaaggctggaccctgcccggtatgaccgtggtctgtggcgacagccacaccgcgacccacggtgcctttggcgcgctggcgcatggcattggcacctcggaggtggagcatgtgcttgccacccagacgctgatccagaagaagtccaagaacatgaaggtcgagatcaccggcaagctgtcgccgggcgtgaccgccaaggacatcgttctgaccatcattggcgaaaccggcaccggtggcggcactggctatgtcatcgagtattgcggtgaagcgatccgcgatctgtcgatggaaggccgcatgacaatctgcaacatggccattgagggcggcgcacgcgccggcctgatcgcgcccgacgagaccacctttgaatacgtcaaaggccgcccgcatgcccccaaaggcgcgcagtgggaagccgccgtgaactggtggaaaacgctctactctgacgacgacgcccattgggacaagattgtgaccatccgcggcgaagacatcgcgccgaccgtcacatggggcaccagccccgaagacgcgctgccgatcaccgcaaccgtccccgcccccgaggatttcactggtggcaaagtcgaggccgcgcgccgcgcgcttgactacatgggcctcacccccgggatgaagctgtcggacatcgagatcgacaccgtgttcatcggctcctgcaccaacggccgcatcgaagatctgcgcgccgctgcggatgtagtcaaaggcaagaagatcaaggacggcatgcgcgccatggtggttccgggttccggcctcgtgcgcgcccaggcagaagaagagggccttgccgagatcttcaaggatgccggtttcgaatggcgtctggcgggctgctccatgtgtctggcaatgaaccccgaccagctgagcgagggcgagcgctgcgcctccacctccaaccggaactttgaaggccgtcagggctttaagggacgcacgcacctggtgtcgccagccatggccgccgctgctgccgttaccggcaaactcaccgacgttcgcgagctctga

SEQ ID NO: 148127 - protein, 467 aa, Silicibacter sp. TM1040
MSPKTLYDKIWDAHVAQEAEDGTCLLYIDRHLVHEVTSPQAFEGLRMAGRKVHAPEKTIAVPDHNVPTTAGRENPDQMPEDSRIQVAALDTNAREFGVHYYPVTDIRQGIVHIVGPEQGWTLPGMTVVCGDSHTATHGAFGALAHGIGTSEVEHVLATQTLIQKKSKNMKVEITGKLSPGVTAKDIVLTIIGETGTGGGTGYVIEYCGEAIRDLSMEGRMTICNMAIEGGARAGLIAPDETTFEYVKGRPHAPKGAQWEAAVNWWKTLYSDDDAHWDKIVTIRGEDIAPTVTWGTSPEDALPITATVPAPEDFTGGKVEAARRALDYMGLTPGMKLSDIEIDTVFIGSCTNGRIEDLRAAADVVKGKKIKDGMRAMVVPGSGLVRAQAEEEGLAEIFKDAGFEWRLAGCSMCLAMNPDQLSEGERCASTSNRNFEGRQGFKGRTHLVSPAMAAAAAVTGKLTDVREL

SEQ ID NO: 148128 - DNA, 1446 bp, Mycobacterium sp. MCS
  CDS (1)..(1446): transl_table=11
atggcacagcccgccacaccgcgcaccatggccgagaaggtgtgggccgaccacgtcgtcgcccacggcatcggggagggtgccgcgcgtgaaccggatctgatctacatcgacctgcacctcgtgcacgaggtgaccagtccgcaggcgttcgacggtctgcggctggcgaaccggccggtgcgacggccggatctcaccatcgcgaccgaagaccacaacgtgccgacggtcgacatcgacaagccgatcgccgacccggtgtcgcgcacccaggtggagacgttgcggcgcaactgcgccgagttcgggatccggctgcacccgatgggcgacgccgaacagggcatcgtgcacatcatcggtccgcagctcgggctcacccagccggggatgaccgtcgtgtgcggtgacagccacacctccacccacggcgcgttcggcgccctggcgatgggtatcggcacctccgaggtggaacacgtgctggcgacgcagacgctgccgctgcggccgtttcgcacgatggcggtcaacgtcgacggggaactgccgccgggcgtgagcgccaaggacatcatcctggcggtcatcgccaagatcggcaccggcggcggacagggccacgtcatcgaataccgcggcagcgccatcgaatccctgtcgatggagggccggatgacgatctgcaacatgagcatcgaggccggcgcgcgggccggcatggtggcccccgacgacaccacattcgaattcctgcgcggccgcccgcacgcacccaccggcgccgactgggatgcggcggtggaggcgtggcggcagctgcgcaccgatccgggcgccgaattcgacaccgaggtccatctcgacgcggccgagctgagcccgttcgtcacctggggcaccaaccccgggcagggggtgccgctgtccggcgcggtgcccgaccctgagctgatcgtcgacgagggtgagcgacaggcggccgaaaaggcgttgacctacatgggtcttcaggccggtacggcgatgcgtgacgtcgccgtggacaccgtgttcgtcggatcgtgcaccaacggccgcatcgaggatctgcgcgtggtggccgacgtcctgcgtggccgcagggtcgccgatgggatccgcatgctcgtggtgcccggctcgatgcgcgtgcgtgcgcaggccgaatccgaagggctcgaccggatcttcatcgacgccggtgccgaatggcggcaggcgggctgctcgatgtgcctggggatgaaccccgatcagctgtcgcccgggcagcggtgcgcatccacgtccaaccgcaacttcgaggggcgccagggcaaaggcgggcggacacatctggtctcacccgccgtggctgccgccaccgccgtccgcggcacgctgtcctcacccgccgacctgtccgccgtccccgctcgctga

SEQ ID NO: 148129 - protein, 481 aa, Mycobacterium sp. MCS
MAQPATPRTMAEKVWADHVVAHGIGEGAAREPDLIYIDLHLVHEVTSPQAFDGLRLANRPVRRPDLTIATEDHNVPTVDIDKPIADPVSRTQVETLRRNCAEFGIRLHPMGDAEQGIVHIIGPQLGLTQPGMTVVCGDSHTSTHGAFGALAMGIGTSEVEHVLATQTLPLRPFRTMAVNVDGELPPGVSAKDIILAVIAKIGTGGGQGHVIEYRGSAIESLSMEGRMTICNMSIEAGARAGMVAPDDTTFEFLRGRPHAPTGADWDAAVEAWRQLRTDPGAEFDTEVHLDAAELSPFVTWGTNPGQGVPLSGAVPDPELIVDEGERQAAEKALTYMGLQAGTAMRDVAVDTVFVGSCTNGRIEDLRVVADVLRGRRVADGIRMLVVPGSMRVRAQAESEGLDRIFIDAGAEWRQAGCSMCLGMNPDQLSPGQRCASTSNRNFEGRQGKGGRTHLVSPAVAAATAVRGTLSSPADLSAVPAR

SEQ ID NO: 148130 - DNA, 1410 bp, Rubrobacter xylanophilus DSM 9941; identical to SEQ ID NO: 103059
  CDS (1)..(1410): transl_table=11

SEQ ID NO: 148131 - protein, 469 aa, Rubrobacter xylanophilus DSM 9941; identical to SEQ ID NO: 103060

SEQ ID NO: 148132 - DNA, 1410 bp, Mesorhizobium sp. BNC1; identical to SEQ ID NO: 103061
  CDS (1)..(1410): transl_table=11

SEQ ID NO: 148133 - protein, 469 aa, Mesorhizobium sp. BNC1; identical to SEQ ID NO: 103062

SEQ ID NO: 148134 - DNA, 1401 bp, Cytophaga hutchinsonii ATCC 33406; identical to SEQ ID NO: 103063
  CDS (1)..(1401): transl_table=11

SEQ ID NO: 148135 - protein, 466 aa, Cytophaga hutchinsonii ATCC 33406; identical to SEQ ID NO: 103064

SEQ ID NO: 148136 - DNA, 1404 bp, Rhodococcus sp. RHA1
  CDS (1)..(1404): transl_table=11
atgggctacacgctggcggacaagatctggaggagccatgtggtgcgctccgccgagggtgaaccggacttggtctacatcgacatgcacctgctgcacgaggtgaacacccccgccgccttcgccggtctgcgtgccgccggccgcaccgtccgccgccccgacttgaccctgggcaccgaggatcacaacacaccgaccgacgacgtgctgcggatgatcaccgacccgggcgcggtcgagcagctcgaccacattcggcgtaactgccgggatttcggtatcgagctgtattcgctcggggattccgcgcgggggatcgtgcacgtcatcggtcccgagctcggactgacccagcccgggatgacgctggtctgctgtgactcgcacaccagcacccacggcgctttcggcgtcctggccttcggcatcggcaccagccaggtcgagcacgttctggccacccagacactgccgatggcgccgatgcagaacatgcgcgtggtcgtcgacggtcagctgccaccgggagcaacggcgaaggacctcatcctcgcggtgatcgagcagatcggtaccagcggcgggcagggccacgtcatcgagtaccagggtgaggccattcgtgcgttatccatggaaggccggatgacggtgtgcaacatgtccatcgaagccggcgcccgggccggtctcatcgcccccgacgacgtcaccatcgagtatctgcgcggccgcccgcacgcgccgtccggggccgcgttcgaggaggaggccgcgtactggcggaccttccattccgacgacgacgccgtcttcggcaaggaagtgcacctcgacgccggcaccatcacccctcgggtgtcctggggaaccaaccctgcccagtccctgccactccacgccaacgtccccgacccgggcaccttcgtcgacgcggtggatcgcgccgccgccgaacgcgccctggcctacatgcagctgactccgggaacgccgctgcgcgacatcgcggtcgatgcggtgttcatcgggtcgtgcaccaacggccggatcgaggacctgcgggaggtggccgccgtgtgggagggccggcgcatcgcgcccggggtcgacgttctcgtcgtccccgggtcggaggccgtccgcgcgcaggccgtggaggaaggcctcgccgagatcttcgccgcggccggtgccccgctgcggtactccgggtgctcgatgtgcgtggcgctcaacgacgaccgactacgcccaggccagcgggcggcgtcgaccaacaaccgcaacttcgagggccggcaggggcggggtgtgatgacgcacctggtctcacccgcagtggccgccgcgaccgcgatcaccggacgcctcacggcgcccgcagacctggaggactga

SEQ ID NO: 148137 - protein, 467 aa, Rhodococcus sp. RHA1
MGYTLADKIWRSHVVRSAEGEPDLVYIDMHLLHEVNTPAAFAGLRAAGRTVRRPDLTLGTEDHNTPTDDVLRMITDPGAVEQLDHIRRNCRDFGIELYSLGDSARGIVHVIGPELGLTQPGMTLVCCDSHTSTHGAFGVLAFGIGTSQVEHVLATQTLPMAPMQNMRVVVDGQLPPGATAKDLILAVIEQIGTSGGQGHVIEYQGEAIRALSMEGRMTVCNMSIEAGARAGLIAPDDVTIEYLRGRPHAPSGAAFEEEAAYWRTFHSDDDAVFGKEVHLDAGTITPRVSWGTNPAQSLPLHANVPDPGTFVDAVDRAAAERALAYMQLTPGTPLRDIAVDAVFIGSCTNGRIEDLREVAAVWEGRRIAPGVDVLVVPGSEAVRAQAVEEGLAEIFAAAGAPLRYSGCSMCVALNDDRLRPGQRAASTNNRNFEGRQGRGVMTHLVSPAVAAATAITGRLTAPADLED

SEQ ID NO: 148138 - DNA, 1503 bp, Rhodococcus sp. RHA1; identical to SEQ ID NO: 103065
  CDS (1)..(1503): transl_table=11

SEQ ID NO: 148139 - protein, 500 aa, Rhodococcus sp. RHA1; identical to SEQ ID NO: 103066

SEQ ID NO: 148140 - DNA, 1410 bp, Haemophilus somnus 129PT; identical to SEQ ID NO: 103067
  CDS (1)..(1410): transl_table=11

SEQ ID NO: 148141 - protein, 469 aa, Haemophilus somnus 129PT; identical to SEQ ID NO: 103068

SEQ ID NO: 148142 - DNA, 1407 bp, Synechococcus sp. CC9311
  CDS (1)..(1407): transl_table=11
atgagcagcggaaccctttacgacaaagtttgggatcttcatcgcgttgcggaactctctggcggctctacccagctgttgattgggttgcatctgatccatgaagtcacgagccctcaggcatttgttgccctcgaagacaaggggttgaaggtgcgttgtccggagcgaacggtggcgaccgtggaccacatcgttcccactaccaatcaggccaggccttttgctgaccccttggcggaggagatgctcagcaccctggagcgcaactgcagcaagcatggaatcgtgctcaatgggattggtagtggtcgtcaaggaattgtgcatgtgattgcgccggagttgggattgacgcagcccggcatgacggtggcctgcggggactcgcacacctcaacgcacggagcctttggggcaatcgcctttggtattggcacgtctcaggttcgtgatgtgctggctagccaaagcttggcgatgaacaaactcaaggttcgtcggctttggtttgacaatcagctgagccccggggtgtttgccaaagatttgatcctgcatgtgattcgttcgcttggggtcaaggctggggttggccatgcctacgagttcgctggaccggcgatcgatgctctctcgatggaagagcggatgaccctctgcaacatggcgattgaggggggagcccgctgcggttacgtcaatcccgaccagacgacctttgattatttgaaggggcgaccttccgtaccgagtggtggggcctggaatcgggcgacacgttggtggcgctcactggcatcgaatgccgatgctgtctttgacgatgaactgcgttttgatgcagcaacgatttccccaacggtgacctgggggatcactcctggtcaggggatcggtgtggatgaacaggtcccaacgccagagcaactagatcccgccgatcgaccgatcgcggaagaggcttatcgctacatggatttaacgcctggtcaggccattgccggtgtgccagtcgatgtctgcttcatcggcagttgcaccaatggtcgcctcagtgatctgaaggccgccgccgctgtggctcgggggaggcaagtggctgctgggatcaaggcctttgttgttcctggttctgagcaggtggctcgtgctgctgaggctgaaggccttgaccaagtgtttcgcgatgctgggtttgagtggcgtgagcctggctgctcgatgtgcttagcaatgaatcccgatcgccttgaggggcgtcagatcagtgcgagctccagtaaccgcaacttcaaggggcgccagggatctgccagcggccgaacattactgatgagccctgccatggtggctgccgctgccgtgactggttatgtcagcgatgttcgctcgctcggggactga

SEQ ID NO: 148143 - protein, 468 aa, Synechococcus sp. CC9311
MSSGTLYDKVWDLHRVAELSGGSTQLLIGLHLIHEVTSPQAFVALEDKGLKVRCPERTVATVDHIVPTTNQARPFADPLAEEMLSTLERNCSKHGIVLNGIGSGRQGIVHVIAPELGLTQPGMTVACGDSHTSTHGAFGAIAFGIGTSQVRDVLASQSLAMNKLKVRRLWFDNQLSPGVFAKDLILHVIRSLGVKAGVGHAYEFAGPAIDALSMEERMTLCNMAIEGGARCGYVNPDQTTFDYLKGRPSVPSGGAWNRATRWWRSLASNADAVFDDELRFDAATISPTVTWGITPGQGIGVDEQVPTPEQLDPADRPIAEEAYRYMDLTPGQAIAGVPVDVCFIGSCTNGRLSDLKAAAAVARGRQVAAGIKAFVVPGSEQVARAAEAEGLDQVFRDAGFEWREPGCSMCLAMNPDRLEGRQISASSSNRNFKGRQGSASGRTLLMSPAMVAAAAVTGYVSDVRSLGD

SEQ ID NO: 148144 - DNA, 1425 bp, Shewanella sp. MR-4; identical to SEQ ID NO: 103071
  CDS (1)..(1425): transl_table=11

SEQ ID NO: 148145 - protein, 474 aa, Shewanella sp. MR-4; identical to SEQ ID NO: 103072

SEQ ID NO: 148146 - DNA, 1410 bp, Alkalilimnicola ehrlichei MLHE-1; identical to SEQ ID NO: 103073
  CDS (1)..(1410): transl_table=11

SEQ ID NO: 148147 - protein, 469 aa, Alkalilimnicola ehrlichei MLHE-1; identical to SEQ ID NO: 103074

SEQ ID NO: 148148 - DNA, 1398 bp, Hyphomonas neptunium ATCC 15444; identical to SEQ ID NO: 103075
  CDS (1)..(1398): transl_table=11

SEQ ID NO: 148149 - protein, 465 aa, Hyphomonas neptunium ATCC 15444; identical to SEQ ID NO: 103076

SEQ ID NO: 148150 - DNA, 1392 bp, Hyphomonas neptunium ATCC 15444; identical to SEQ ID NO: 103077
  CDS (1)..(1392): transl_table=11

SEQ ID NO: 148151 - protein, 463 aa, Hyphomonas neptunium ATCC 15444; identical to SEQ ID NO: 103078

SEQ ID NO: 148152 - DNA, 1431 bp, Hyphomonas neptunium ATCC 15444; identical to SEQ ID NO: 103079
  CDS (1)..(1431): transl_table=11

SEQ ID NO: 148153 - protein, 476 aa, Hyphomonas neptunium ATCC 15444; identical to SEQ ID NO: 103080

SEQ ID NO: 148154 - DNA, 1410 bp, Rhizobium leguminosarum bv. viciae 3841; identical to SEQ ID NO: 103081
  CDS (1)..(1410): transl_table=11

SEQ ID NO: 148155 - protein, 469 aa, Rhizobium leguminosarum bv. viciae 3841; identical to SEQ ID NO: 103082

SEQ ID NO: 148156 - DNA, 1377 bp, Leuconostoc mesenteroides subsp. mesenteroides ATCC 8293; identical to SEQ ID NO: 103085
  CDS (1)..(1377): transl_table=11

SEQ ID NO: 148157 - protein, 458 aa, Leuconostoc mesenteroides subsp. mesenteroides ATCC 8293; identical to SEQ ID NO: 103086

SEQ ID NO: 148158 - DNA, 1401 bp, Solibacter usitatus Ellin6076; identical to SEQ ID NO: 103087
  CDS (1)..(1401): transl_table=11

SEQ ID NO: 148159 - protein, 466 aa, Solibacter usitatus Ellin6076; identical to SEQ ID NO: 103088

SEQ ID NO: 148160 - DNA, 1404 bp, Magnetococcus sp. MC-1; identical to SEQ ID NO: 103089
  CDS (1)..(1404): transl_table=11

SEQ ID NO: 148161 - protein, 467 aa, Magnetococcus sp. MC-1; identical to SEQ ID NO: 103090

SEQ ID NO: 148162 - DNA, 1425 bp, Shewanella sp. ANA-3
  CDS (1)..(1425): transl_table=11
atgacgactccttcaacatcaaacgctccgaaaaccctgtatcaaaaggtgtgggatgcccacgttgtggcaaccccagagggcgaagcgccgatcatttatgtcgacagacatttggttcacgaagtgacatcaccccaagcctttagtggcttaaaagtggcggggcgtaagttacgtgctccagagaaaaccttcgcgaccatggatcacaacacttcgacgcgcagtgctagcttagatgctttaagccctatggcgcgcactcaggtcgagaccttggcgcaaaactgcaaagacttcggtgtgcgcttatatgacattcaccatcctaatcaagggattgtgcatgtgatggggcctgagcttgggattaccttacccggcactgtcattgtgtgtggtgattcccatacggcgactcatggtgcatttggcgccttggctttcggtattggcacttccgaggttgagcatgtgctggcgacgcaaaccctgcgacaattaaaagctaagaccatgaaaatcgaagtccgtggtcaggtcaccgatggcgtcactgctaaagatatcgtattggcgattatcggtaagattggtatggatggcggcactggctatgtggttgagttttgtggtgaggccattgaagcgctgtcgatggaagggcgcatgactgtctgcaatatggcgattgaaatgggcgctaaggcgggcatggtcgcgccggatcaaaccactttcgattacctagaaggccgtgagtttgcaccaaagggcgaagattgggcagaggccgtcgccgcctggaaggcgctgaaaaccgatgtcggcgctgagtttgatgccaccgtcgtgttggatgcggccaatatcgcgccgcaattgacttggggcaccaaccccggacaagtggttgccatcgatgcgcccgtgccgaatcctgccgatgaggcgaatccgacgattcgcgctagcatggaaaaagcgctggactatatcggcttaaccgctggcacgccgatgacagacgtcgcgattaacaaagtctttattggttcttgcactaactcgcggattgaagatttacgcagcgcggcgaaacaggccaaagggcgtaaagtggcttcgggcgttacggcaatcgtagtaccgggctctggccaagtgaaggcacaggccgaggccgaagggctagataaaatttttatcgaggctggattcgaatggcgtttaccgggctgttctatgtgtttggcgatgaacgacgacagattagaagcgggcgatcgctgcgcctcgaccagtaaccgtaacttcgaggggcgccaaggtcgtggtagccgtacccatttggtgagtccagcgatggcggcagcggcggcgatcgcggggcattttgtcgatatccgtaaaccttactaa

SEQ ID NO: 148163 - protein, 474 aa, Shewanella sp. ANA-3
MTTPSTSNAPKTLYQKVWDAHVVATPEGEAPIIYVDRHLVHEVTSPQAFSGLKVAGRKLRAPEKTFATMDHNTSTRSASLDALSPMARTQVETLAQNCKDFGVRLYDIHHPNQGIVHVMGPELGITLPGTVIVCGDSHTATHGAFGALAFGIGTSEVEHVLATQTLRQLKAKTMKIEVRGQVTDGVTAKDIVLAIIGKIGMDGGTGYVVEFCGEAIEALSMEGRMTVCNMAIEMGAKAGMVAPDQTTFDYLEGREFAPKGEDWAEAVAAWKALKTDVGAEFDATVVLDAANIAPQLTWGTNPGQVVAIDAPVPNPADEANPTIRASMEKALDYIGLTAGTPMTDVAINKVFIGSCTNSRIEDLRSAAKQAKGRKVASGVTAIVVPGSGQVKAQAEAEGLDKIFIEAGFEWRLPGCSMCLAMNDDRLEAGDRCASTSNRNFEGRQGRGSRTHLVSPAMAAAAAIAGHFVDIRKPY

SEQ ID NO: 148164 - DNA, 1431 bp, Mycobacterium avium 104; identical to SEQ ID NO: 103091
  CDS (1)..(1431): transl_table=11

SEQ ID NO: 148165 - protein, 476 aa, Mycobacterium avium 104; identical to SEQ ID NO: 103092

SEQ ID NO: 148166 - DNA, 1455 bp, Mycobacterium smegmatis str. MC2 155; identical to SEQ ID NO: 103093
  CDS (1)..(1455): transl_table=11

SEQ ID NO: 148167 - protein, 484 aa, Mycobacterium smegmatis str. MC2 155; identical to SEQ ID NO: 103094

SEQ ID NO: 148168 - DNA, 1410 bp, Azoarcus sp. BH72; identical to SEQ ID NO: 103097
  CDS (1)..(1410): transl_table=11

SEQ ID NO: 148169 - protein, 469 aa, Azoarcus sp. BH72; identical to SEQ ID NO: 103098

SEQ ID NO: 148170 - DNA, 1410 bp, Neisseria meningitidis FAM18; identical to SEQ ID NO: 103099
  CDS (1)..(1410): transl_table=11

SEQ ID NO: 148171 - protein, 469 aa, Neisseria meningitidis FAM18; identical to SEQ ID NO: 103100

SEQ ID NO: 148172 - DNA, 1422 bp, Acidovorax sp. JS42; identical to SEQ ID NO: 103101
  CDS (1)..(1422): transl_table=11

SEQ ID NO: 148173 - protein, 473 aa, Acidovorax sp. JS42; identical to SEQ ID NO: 103102

SEQ ID NO: 148174 - DNA, 1404 bp, Nostoc punctiforme PCC 73102; identical to SEQ ID NO: 103103
  CDS (1)..(1404): transl_table=11

SEQ ID NO: 148175 - protein, 467 aa, Nostoc punctiforme PCC 73102; identical to SEQ ID NO: 103104

SEQ ID NO: 148176 - DNA, 1470 bp, Actinobacillus pleuropneumoniae serovar 1 str. 4074; identical to SEQ ID NO: 103105
  CDS (1)..(1470): transl_table=11

SEQ ID NO: 148177 - protein, 489 aa, Actinobacillus pleuropneumoniae serovar 1 str. 4074; identical to SEQ ID NO: 103106

SEQ ID NO: 148178 - DNA, 1410 bp, Haemophilus influenzae R2846; identical to SEQ ID NO: 103107
  CDS (1)..(1410): transl_table=11

SEQ ID NO: 148179 - protein, 469 aa, Haemophilus influenzae R2846; identical to SEQ ID NO: 103108

SEQ ID NO: 148180 - DNA, 1389 bp, Listeria monocytogenes str. 1/2a F6854
  CDS (1)..(1389): transl_table=11
atggggaaaacactttttgataaactttggaaccgtcatgtcatttatggcaaagaaggtgaaccgcaattattatacgttgatcttcatttgattcatgaagttacttctcctcaagcgtttgaaggactgagaatggaaaaaaggccactgcgtagaccggataaaacgttcgcgacaatggatcataacgttccaaccgaagatattttcaacatccaagatcttgtggctaaaaagcaaattgaagcgctacaaactaactgcgcggaattcggcgtaacgctagctgatatgggcagtgaccgtcaaggaatcgtgcatatggttggaccagaaactggactaacgcaacctggcaaagtgattgtttgtggggattctcatacggcgacacatggtgcttttggagcgattggctttgggattggttctagtgaagtagagcatgtttttgcgactcaaacaatttggcaacaaaagccaaaatcaatgggcattgaaattaacggcaaacttccaaaaggtgtatatgcgaaagatattattttgcatttgattgccacgtatggtgttgcttttggaactggttatgccgtcgagtattatggtgaaactattcgtaatatgtcgatggaagaacggatgacaatttgcaatatggcaattgaaggcggcgcaaaaatgggcatgatggcgccagatgaaactacttttgaatatgtgcgcggtcgtgaatacgctcctactgatatggataaagcaattagcgactggaaaacactccaaactgactccgatgcagaatacgaccttcatatccaaatggatgcgagtattttggaaccatatgtcacttggggaacaaatcccgaaatgggtgttcctttttctaaagcatttccggaaattaaagatatgaactatgagcgcgcttatgaatatatggggctaaaacctggacaaacggcggaacaaatcgagcttggctatgtgtttattggttcttgtacgaatgccaggctttctgacttagaagaagccgctcgtatcgtcaaaggaaacaaagtgaaaaataatattcgcgcactcgttgtccctggttcccgccaagttcgtaatgcggcagaatctattggactagataaaatttttatagaagctggttttgaatggcgtgaacctggttgttcgatgtgtctaggaatgaatcctgaccaagtaccggacggcgttcactgtgcctctacttcgaatcgtaattttgaaggacggcaaggtaaaggcgcccgtactcatctcgtttcaccagcaatggctgcggccgcggcaatcaatggacactttatcgatattcgaaaggaggcggttatcagtggaggaaattaa

SEQ ID NO: 148181 - protein, 462 aa, Listeria monocytogenes str. 1/2a F6854
MGKTLFDKLWNRHVIYGKEGEPQLLYVDLHLIHEVTSPQAFEGLRMEKRPLRRPDKTFATMDHNVPTEDIFNIQDLVAKKQIEALQTNCAEFGVTLADMGSDRQGIVHMVGPETGLTQPGKVIVCGDSHTATHGAFGAIGFGIGSSEVEHVFATQTIWQQKPKSMGIEINGKLPKGVYAKDIILHLIATYGVAFGTGYAVEYYGETIRNMSMEERMTICNMAIEGGAKMGMMAPDETTFEYVRGREYAPTDMDKAISDWKTLQTDSDAEYDLHIQMDASILEPYVTWGTNPEMGVPFSKAFPEIKDMNYERAYEYMGLKPGQTAEQIELGYVFIGSCTNARLSDLEEAARIVKGNKVKNNIRALVVPGSRQVRNAAESIGLDKIFIEAGFEWREPGCSMCLGMNPDQVPDGVHCASTSNRNFEGRQGKGARTHLVSPAMAAAAAINGHFIDIRKEAVISGGN

SEQ ID NO: 148182 - DNA, 1395 bp, Bacillus cereus G9241; identical to SEQ ID NO: 103109
  CDS (1)..(1395): transl_table=11

SEQ ID NO: 148183 - protein, 464 aa, Bacillus cereus G9241; identical to SEQ ID NO: 103110

SEQ ID NO: 148184 - DNA, 1404 bp, Crocosphaera watsonii WH 8501; identical to SEQ ID NO: 103111
  CDS (1)..(1404): transl_table=11

SEQ ID NO: 148185 - protein, 467 aa, Crocosphaera watsonii WH 8501; identical to SEQ ID NO: 103112

SEQ ID NO: 148186 - DNA, 1392 bp, Streptococcus suis 89/1591; identical to SEQ ID NO: 103119
  CDS (1)..(1392): transl_table=11

SEQ ID NO: 148187 - protein, 463 aa, Streptococcus suis 89/1591; identical to SEQ ID NO: 103120

SEQ ID NO: 148188 - DNA, 1410 bp, Sulfitobacter sp. EE-36; identical to SEQ ID NO: 103121
  CDS (1)..(1410): transl_table=11

SEQ ID NO: 148189 - protein, 469 aa, Sulfitobacter sp. EE-36; identical to SEQ ID NO: 103122

SEQ ID NO: 148190 - DNA, 1398 bp, Sulfitobacter sp. EE-36
  CDS (1)..(1398): transl_table=11
atgaccgcgccgcagaccctctttggcaagctttgggccgcacatgaggtgatgcggcgcgatgacggcacgtcactgctatgggtcgatcgacatctggtgcacgaaggatcgcaccacgcatttgtgaaactggagagccgcggcatgaaggtcgccgcccctgatctgaccttcggagtcgtcgatcactatgcccccacccgcgccggcgagatggcggcggatatccggcggatgatcgacacattggggcgcaacgccaaggcgcagggcatccggctattcgatctgcgcgatccggggcagggcattgtgcatgtgatcggccccgagcaagggctgaccttgccggggctgctgatcaattgcggcgacagccatacctctactcatggggcctttggtgcgctggcctttggcgtcggtgcaacagaggtggcgcatattctggcgacgcagacaatctggcaacaacgccccaaaacgatgcggatcaccgtggacggcgcgttgggggccggtgtcacggccaaagatctggcgctgcactggatcgcagagctgggggccgatggcgcacgcggccacgcgattgaatatgccggccccgctgtccgcgcgttaagcatggaggggcgcctgacgctgtgcaatctcagcatcgaagggggtgcgcggttggggctggtggccccggatcaggtgacattcgattatatcaaagggcgcaactttgccccgaaaggcgcggattgggaggcggccctacgcgactggtcgcagcttgcgactgacacagacgcccgtttcgaccgcgaggttgcactcaacgccagcgatatcgcgccaaccgtgacctggggcacctcccccgaagaggcgctgcccatcaccggacatgtccctgatccggcgcggctgtcgggcagcaaacaggcgcaggcgcgcgcggcgctggagtatatggcgctggaaccgggaatggcgctggaccagattacagtggatcaggtgtttatcggatcgtgcaccaatggccggatcgaagacctgcgcctagccgccaaagtattggcggggcgcaaggccgtcgtgccggggttggtgtcgcccggatcggcgcaggtcaagaagcaggccgaagccgaaggtctgtccgacgtgtttgcccaagcggggcttgaatgggccgcatcgggctgttcgatgtgtgtcggcatgaatggtgatcgggtcggggcgggcaaacgctgcgcgtcttcgaccaatcgtaacttcaagggccgtcagggacgcggggcgcggacccatctgatgagccccgcgatggtcgccgccgccgcagttaccgggcacctcgccgatgtgcgcccgctactggagggacgcgcatga

SEQ ID NO: 148191 - protein, 465 aa, Sulfitobacter sp. EE-36
MTAPQTLFGKLWAAHEVMRRDDGTSLLWVDRHLVHEGSHHAFVKLESRGMKVAAPDLTFGVVDHYAPTRAGEMAADIRRMIDTLGRNAKAQGIRLFDLRDPGQGIVHVIGPEQGLTLPGLLINCGDSHTSTHGAFGALAFGVGATEVAHILATQTIWQQRPKTMRITVDGALGAGVTAKDLALHWIAELGADGARGHAIEYAGPAVRALSMEGRLTLCNLSIEGGARLGLVAPDQVTFDYIKGRNFAPKGADWEAALRDWSQLATDTDARFDREVALNASDIAPTVTWGTSPEEALPITGHVPDPARLSGSKQAQARAALEYMALEPGMALDQITVDQVFIGSCTNGRIEDLRLAAKVLAGRKAVVPGLVSPGSAQVKKQAEAEGLSDVFAQAGLEWAASGCSMCVGMNGDRVGAGKRCASSTNRNFKGRQGRGARTHLMSPAMVAAAAVTGHLADVRPLLEGRA

SEQ ID NO: 148192 - DNA, 1407 bp, Roseovarius nubinhibens ISM; identical to SEQ ID NO: 103123
  CDS (1)..(1407): transl_table=11

SEQ ID NO: 148193 - protein, 468 aa, Roseovarius nubinhibens ISM; identical to SEQ ID NO: 103124

SEQ ID NO: 148194 - DNA, 1404 bp, Oceanicola batsensis HTCC2597; identical to SEQ ID NO: 103125
  CDS (1)..(1404): transl_table=11

SEQ ID NO: 148195 - protein, 467 aa, Oceanicola batsensis HTCC2597; identical to SEQ ID NO: 103126

SEQ ID NO: 148196 - DNA, 1404 bp, Oceanicola batsensis HTCC2597
  CDS (1)..(1404): transl_table=11
atgacgggcaagacactctatgacaaaatctgggagcagcatgtggttgcccctttcgagggcagagactgcctgttgtatgtagaccggcacctcgttcaggaagtgtcgagcccgcaggcattcgcctctctcgaccagaacgaccgtccgttgcggcgaccggatctgcacatcgcggtcgcggaccacgcggtgccgacacggcgacggggacatcccttcgccgacggacttgcgcgtcagcaggtcgatcggcttcgcgagaacgctgaaaaattcggcatcgcatacatgccgatgaacggagaccggcacggcatcgtgcacgtcatcgggcccgaaaccggcttcaccctgcccggttgcacgctggtctgcggcgatagccacacgtccacccacggcgccttcggatgcatcgccttcggcatcggcgccagcgaatgcgcttcggtcttcgccacgcagacgatccgccagacccggcagaagacgatgcgcgtgaacctcgagggcggccttcccgccggcgtcaccgtcaaggatgtgattctcgcgctgatcgccgagatcggaacggggggcggcgtcggatacgccatcgaatacgcgggatccacgatcgcggggctgtcgatggaagcgcgcatgacgctctgcaacatgacgatcgaagccggcagccgcgtcggcatggtcgcgccggacgaggtgacattcgcctatctagagggccgccccctggcgcccgaaggagagatgtgggatcgcgccgtcgcggcctggagcaacctgcgcagcgacgaggatgccgtcttcgaccgcgaaataactttcgacacctccgtgctcgagcctcaggtctcctggggcaccacgccggaacagaccggcgcgattacgggcgtcgtgcccaaccccgagcagatgaccgaccggggccgggccgcgcggatccgcaagagcctggactacatggacctgacgcccggaacccggctgaacgagatcacgatcgaccgcgtcttcatcgggtcctgcaccaacgggcgcctggaagatctccgcgccgccgcccgggttctcgaagggcgtcgcgtggccgggtcggtcaaggcgattgcggtcccgggatcggccgccgtccggctggccgcagaagcggagggcctgcacgagattttcctggcagcgggattcgagtggcgcgattcgggttgttcgatgtgtgtcgcgatgaacgatgaccgtctcgaagaaggcgagcgctgtgcctcgacctccaatcgcaacttcgagggccgtcagggcaagggtggacgcacgcatctgatgagcccccagatggccgccgccgctgccgtgaccggccgcctgtccgacgtgagggagctattgtaa

SEQ ID NO: 148197 - protein, 467 aa, Oceanicola batsensis HTCC2597
MTGKTLYDKIWEQHVVAPFEGRDCLLYVDRHLVQEVSSPQAFASLDQNDRPLRRPDLHIAVADHAVPTRRRGHPFADGLARQQVDRLRENAEKFGIAYMPMNGDRHGIVHVIGPETGFTLPGCTLVCGDSHTSTHGAFGCIAFGIGASECASVFATQTIRQTRQKTMRVNLEGGLPAGVTVKDVILALIAEIGTGGGVGYAIEYAGSTIAGLSMEARMTLCNMTIEAGSRVGMVAPDEVTFAYLEGRPLAPEGEMWDRAVAAWSNLRSDEDAVFDREITFDTSVLEPQVSWGTTPEQTGAITGVVPNPEQMTDRGRAARIRKSLDYMDLTPGTRLNEITIDRVFIGSCTNGRLEDLRAAARVLEGRRVAGSVKAIAVPGSAAVRLAAEAEGLHEIFLAAGFEWRDSGCSMCVAMNDDRLEEGERCASTSNRNFEGRQGKGGRTHLMSPQMAAAAAVTGRLSDVRELL

SEQ ID NO: 148198 - DNA, 1416 bp, Prochlorococcus marinus str. MIT 9211
  CDS (1)..(1416): transl_table=11
ttgagctcaaaaacgctctacgacaaagtctgggatcttcatcggatagcagatctccctggaggagctacccagttatttgttgggcttcatttgattcatgaagtaaccagtcctcaagcatttgcagctttagaagaaaaaggactctccgtaaattgtcctgatagaacaattgcaaccgtcgaccacatagtacccactacaaatcaccaaagacctttctcagatcctctagctgaggaaatgcttcatacacttgaaaaaaattgctcaaaccatcacatcaaactatttggaataggttcagggaatcaaggcatcgtccatgtgatggcaccagaatcaggtctaacacaacctggcatgacgattgcttgtggagactctcatacctctacccatggagcttttggtgcaatcgcatttgggattggcaccagccaagttagagatgtactcgctacccaaagcctggcaatgaaaaagttaaaggttcgtagaatttgggtagatggtcaactcaccaatggtgtttttgcaaaagatcttatccttcatgtaattcgccatcttggcgtcaaaggaggcgttggatatgcttatgagtttgctgggcccgcaataaaaaaactctcaatggaagagagaatgactatatgcaatatggctatagaaggtggagcaagatgcggatatgtcaatcctgatcaaacaacctttgattacttagaagggaagccctatataccaactggccaggaatgggagtctgctctccaatggtggaaggaattagcctctgatcagaatgcgatttttgacgacgaagtgaaatttgatgcatgcaaaatctccccaacagtcacttggggtattacacccggccaagcgattgggattgacgaattaataccaaaggtcgactcactagagacaagtgaccaacaaacagcaagagaagcttatctttatatgaatctgcatccaggaagctctattgaaggtcttggaatagacgtttgttttataggaagttgtactaatggccgcctaagtgatcttcaagcagcagcaaagattgttaaaaatagacatgtggctaagggtattaaagcctttgtagttcctggctctgagaaagtagctaaagctgctgaagcagaaggtttagatgttttatttcaaaatgcagggtttgaatggagaaagccaggttgctctatgtgtcttgcaatgaacccagatcgattagaaggcaatcaaataagcgctagttctagcaataggaactttaaaggaagacaaggatcagccagaggaagaacattgttaatgagtccagcaatggttgccgctgctgctatttctggatctgtaacagatgtaaggaacctaattaaccaaggaccatag

SEQ ID NO: 148199 - protein, 471 aa, Prochlorococcus marinus str. MIT 9211
MSSKTLYDKVWDLHRIADLPGGATQLFVGLHLIHEVTSPQAFAALEEKGLSVNCPDRTIATVDHIVPTTNHQRPFSDPLAEEMLHTLEKNCSNHHIKLFGIGSGNQGIVHVMAPESGLTQPGMTIACGDSHTSTHGAFGAIAFGIGTSQVRDVLATQSLAMKKLKVRRIWVDGQLTNGVFAKDLILHVIRHLGVKGGVGYAYEFAGPAIKKLSMEERMTICNMAIEGGARCGYVNPDQTTFDYLEGKPYIPTGQEWESALQWWKELASDQNAIFDDEVKFDACKISPTVTWGITPGQAIGIDELIPKVDSLETSDQQTAREAYLYMNLHPGSSIEGLGIDVCFIGSCTNGRLSDLQAAAKIVKNRHVAKGIKAFVVPGSEKVAKAAEAEGLDVLFQNAGFEWRKPGCSMCLAMNPDRLEGNQISASSSNRNFKGRQGSARGRTLLMSPAMVAAAAISGSVTDVRNLINQGP

SEQ ID NO: 148200 - DNA, 1434 bp, Erythrobacter sp. NAP1; identical to SEQ ID NO: 103127
  CDS (1)..(1434): transl_table=11

SEQ ID NO: 148201 - protein, 477 aa, Erythrobacter sp. NAP1; identical to SEQ ID NO: 103128

SEQ ID NO: 148202 - DNA, 1422 bp, Synechococcus sp. RS9917
  CDS (1)..(1422): transl_table=11
atgagcagcggcacgctttacgacaaggtctgggatcttcatcgtgtggccgagctgccggggggatcgacccagctcttcatcggccttcacctcattcatgaggtcaccagtccgcaggctttcgccgcccttgaagacaagggcctgagcgtgcgctgtgctgagcggacggtggccaccgtcgatcacattgtgcccaccaccagccaggcccgacccttcgccgatcccctggcggaggagatgctcagcacgctggagcgcaactgcgcccgccatggcatcaccctgcacggcctgggcagtggccgtcagggcatcgtgcatgtgatcgcgccggagctcggtctcacccaaccggggatgacggtggcctgcggtgattcccacacctccacccacggcgccttcggagcgatcgccttcggaatcggcaccagccaggtgcgcgatgtgctggccagccagagcctggcgatgaacaagctcaaggtgcgcaggatctgggtcgacaatcagctcggatcgggggtcttcgccaaagacctgatcctgcacgtgatccgcacgctgggggtcaaggcgggggtgggtcatgcctatgaattcgccggaccggcgattgaagccctctcgatggaggagcgcatgaccctctgcaacatggcgatcgaaggtggtgctcgctgcggttatgtcaatcccgaccaggtgaccatcgattacctcgcaggacgcccgggcgcgcccagtggcgaggcctgggacagggctgtggcctggtggcggtcgctggcgtccgattctgatgccagcttcgatgacgaggtgcgtttcgatgctgcagcgattgcccccaccgtgacctgggggatcacgcctgggcagggcatcgccgtcgatgaagcggtgccgaccccggagcagctcgaaccctccgagcgtccgatcgccgaggaggcctatcgctacatggatctcacccccggacagccgatcgccggggtgtcggtggatgtgtgtttcatcggcagctgcaccaacggccgcttgagtgatctgcaggcggcggcggcggtggcgcgggggcgccaggtctcccctgggatccgggcgtttgtggtgcccggttccgagcaggtggcccgggccgccgaagccgagggcctcgatgcggtgttccgtgcggcgggtttcgaatggcgtgagcccggctgttcgatgtgtctggccatgaatccggatcgcctggagggcaggcagatcagtgccagctccagcaaccgcaatttcaagggccggcaggggtcggccagtggtcgcacgctgctgatgagcccggcgatggtggcggccgccgccgtcaccggacaggtgacggatgtgcgccacctcgcggctctgccggtcacggcttga

SEQ ID NO: 148203 - protein, 473 aa, Synechococcus sp. RS9917
MSSGTLYDKVWDLHRVAELPGGSTQLFIGLHLIHEVTSPQAFAALEDKGLSVRCAERTVATVDHIVPTTSQARPFADPLAEEMLSTLERNCARHGITLHGLGSGRQGIVHVIAPELGLTQPGMTVACGDSHTSTHGAFGAIAFGIGTSQVRDVLASQSLAMNKLKVRRIWVDNQLGSGVFAKDLILHVIRTLGVKAGVGHAYEFAGPAIEALSMEERMTLCNMAIEGGARCGYVNPDQVTIDYLAGRPGAPSGEAWDRAVAWWRSLASDSDASFDDEVRFDAAAIAPTVTWGITPGQGIAVDEAVPTPEQLEPSERPIAEEAYRYMDLTPGQPIAGVSVDVCFIGSCTNGRLSDLQAAAAVARGRQVSPGIRAFVVPGSEQVARAAEAEGLDAVFRAAGFEWREPGCSMCLAMNPDRLEGRQISASSSNRNFKGRQGSASGRTLLMSPAMVAAAAVTGQVTDVRHLAALPVTA

SEQ ID NO: 148204 - DNA, 1494 bp, Synechococcus sp. WH 5701
  CDS (1)..(1494): transl_table=11
ttgggcttggagggaacggtgagcgccggcacgctgtacgacaaggtctgggacaggcatcgcgtggcggaactgcctggagggtccacccagctgttcatcggtctgcacctgatccatgaggtgaccagcccccaggcctttgctgccttgaaggagctgggtctgggtgtgcgccatcccgagcgcaccgtggccacagtggatcacatcgtgcccaccacctcgcaggctcgtcccttcgctgattctctcgctgaggagatgctctccaccctggagcgcaactgcgcccagcacggcatcactctgcatggccttggcagcggccgccagggcatcgtccatgtgatcgcaccggagctgggcctcagccagccgggcatgacggtcgcctgcggtgattcgcacacctccacccacggtgccttcggggcgatcgccttcggcatcggcaccagccaggtgcgcgatgtgctcgccagccagagcctggcgatgaacaagctcaaggtgcggaggatcctggtggagggcagcctgcagccgggcgtgttcgccaaggacctgattctccacgtgatccgcagtctgggtgtgaagggcggtgtgggttatgcctatgaattcgcgggatcctgcatcgaggccctctcgatggaggagcgcatgaccctgtgcaacatggcgatcgaggggggcgcccgctgcggctacgtcaaccccgatgccaccaccttcgcctacatcaaaggtcggcccttcgcgcccgagggggcggcctgggagcgggcggtgacctggtggagcaccctcgccagcgggcctgacgcggtgttcgacgacgaagtgcgcttcgatgccgccacgatcgcccccacagtcacctgggggatcacgccgggtcaggggatcggggtggatgaaacggtgcccacccccgagcagatgcccgcagaggagcgcccgatcgccgaagaggcctaccgctacatggatctggctccgggcgcagcgattcgggggctgccggtggatgtctgtttcatcggcagctgcaccaatggccgcctcagtgacctgcgctcggcggcggcggtggcccggggccgccaggtggctccagggatcaaggccttcgtggtgcccggctctgagcaggtggctgcattggccagggcggagggcctcgaccggctgttccaggaggcgggcttcgaatggcgtgaacccggctgctcgatgtgcctggcgatgaacccggatcggcttgagggccgccagatcagtgccagctccagcaaccgcaatttcaagggccggcagggttcagcttccggccgcaccctgctgatgagcccggcgatggtggccgcggcggccgtgaccggccaggtgagcgatgtacgcgagctgctgcagagcccctccgcgctcgcttccgctccggccgatcccaggcccgtggccgtgtcccctgcagtgctgtcgtga

SEQ ID NO: 148205 - protein, 497 aa, Synechococcus sp. WH 5701
MGLEGTVSAGTLYDKVWDRHRVAELPGGSTQLFIGLHLIHEVTSPQAFAALKELGLGVRHPERTVATVDHIVPTTSQARPFADSLAEEMLSTLERNCAQHGITLHGLGSGRQGIVHVIAPELGLSQPGMTVACGDSHTSTHGAFGAIAFGIGTSQVRDVLASQSLAMNKLKVRRILVEGSLQPGVFAKDLILHVIRSLGVKGGVGYAYEFAGSCIEALSMEERMTLCNMAIEGGARCGYVNPDATTFAYIKGRPFAPEGAAWERAVTWWSTLASGPDAVFDDEVRFDAATIAPTVTWGITPGQGIGVDETVPTPEQMPAEERPIAEEAYRYMDLAPGAAIRGLPVDVCFIGSCTNGRLSDLRSAAAVARGRQVAPGIKAFVVPGSEQVAALARAEGLDRLFQEAGFEWREPGCSMCLAMNPDRLEGRQISASSSNRNFKGRQGSASGRTLLMSPAMVAAAAVTGQVSDVRELLQSPSALASAPADPRPVAVSPAVLS

SEQ ID NO: 148206 - DNA, 1401 bp, Pseudoalteromonas tunicata D2; identical to SEQ ID NO: 103131
  CDS (1)..(1401): transl_table=11

SEQ ID NO: 148207 - protein, 466 aa, Pseudoalteromonas tunicata D2; identical to SEQ ID NO: 103132

SEQ ID NO: 148208 - DNA, 1443 bp, Photobacterium sp. SKA34
  CDS (1)..(1443): transl_table=11
atgtcgaacactaataataacgcttcagcttcacctaaaacgctttatgaaaaagtatacgatgcccatgttgccgttgcagcagaaggggaaaatccaatcctatatatcgaccgtcaccttgtacatgaagtgacatccccgcaggcttttgatggcttgcgtgaaaagggtcgtaaagtgcgtcaggtatcaaaaactttcgccacgatggatcacaacgtttctacccaaactaaagatattaatgcatcgggtgaaatggcacgtatccagatggaaacactggcgaaaaactgtgaagagtttggcgtcaccctgtatgacttaaatcataaatatcaaggtattgtacacgtaatgggacctgaactgggtattactctgccgggtatgaccattgtttgtggtgactcacatactgcgactcacggtgcctttggcgcactagctttcggtattggtacctcagaagtggaacacgtattagccactcaaaccttaaaacaatctcgtgcgaaaaccatgaagattgaagttaaaggaaaagtggctgaaggcattacagcaaaagatatcgtccttgcaatcataggtaaaacaaccgctgctggcggtactggctatgtggttgagttctgtggcgaagcaatcacagatcttacgatggaaggtcgtatgaccgtctgtaacatggcgattgagctaggtgcgaaagcaggcttgatcgcaccggatcaaacaacatttgattatattaaagatcgtgaattttccccaaaaggcgctgagtttgatgctgcagtagaatactggacatcattaaagtccgatcctaacgctgagtttgatgccgtagtaacgctcaatgctaaagacataaagccacaagtaacatggggaacaaacccaggtcaggtgattgccgttgatgagccaattcctgcccctgaaagctttaacgatcccgttgaaaaagcctctgctgaaaaagcattagcttacatggggctagaagcaggtaaagccctatctgattttgccgttgataaggtctttattggttcatgcactaattcacgtattgaagatatgcgcgcagcagcagctattgcaaaagggcggaaagttgccgctaacgtacaagctttagtcgttccaggctcagagcaagtgaaagcacaagcggaaaaagaagggcttgataagatctttattgaagcaggctttgaatggcgactacctggttgttcaatgtgtctagcaatgaataacgatcgcttaggtcccggtgagcgttgtgcgtcaaccagtaaccgtaactttgaaggtcgccaaggtcgtgatgggcgtactcatctcgttagtcctgccatggcagcagcagcagcatgtgccggacattttgttgatattcgccaactagatgccgtatcggtgtaa

SEQ ID NO: 148209 - protein, 480 aa, Photobacterium sp. SKA34
MSNTNNNASASPKTLYEKVYDAHVAVAAEGENPILYIDRHLVHEVTSPQAFDGLREKGRKVRQVSKTFATMDHNVSTQTKDINASGEMARIQMETLAKNCEEFGVTLYDLNHKYQGIVHVMGPELGITLPGMTIVCGDSHTATHGAFGALAFGIGTSEVEHVLATQTLKQSRAKTMKIEVKGKVAEGITAKDIVLAIIGKTTAAGGTGYVVEFCGEAITDLTMEGRMTVCNMAIELGAKAGLIAPDQTTFDYIKDREFSPKGAEFDAAVEYWTSLKSDPNAEFDAVVTLNAKDIKPQVTWGTNPGQVIAVDEPIPAPESFNDPVEKASAEKALAYMGLEAGKALSDFAVDKVFIGSCTNSRIEDMRAAAAIAKGRKVAANVQALVVPGSEQVKAQAEKEGLDKIFIEAGFEWRLPGCSMCLAMNNDRLGPGERCASTSNRNFEGRQGRDGRTHLVSPAMAAAAACAGHFVDIRQLDAVSV

SEQ ID NO: 148210 - DNA, 1419 bp, Oceanospirillum sp. MED92; identical to SEQ ID NO: 103133
  CDS (1)..(1419): transl_table=11

SEQ ID NO: 148211 - protein, 472 aa, Oceanospirillum sp. MED92; identical to SEQ ID NO: 103134

SEQ ID NO: 148212 - DNA, 1287 bp, delta proteobacterium MLMS-1; identical to SEQ ID NO: 103135
  CDS (1)..(1287): transl_table=11

SEQ ID NO: 148213 - protein, 428 aa, delta proteobacterium MLMS-1; identical to SEQ ID NO: 103136

SEQ ID NO: 148214 - DNA, 1428 bp, Oceanobacter sp. RED65; identical to SEQ ID NO: 103139
  CDS (1)..(1428): transl_table=11

SEQ ID NO: 148215 - protein, 475 aa, Oceanobacter sp. RED65; identical to SEQ ID NO: 103140

SEQ ID NO: 148216 - DNA, 1416 bp, Synechococcus sp. RS9916
  CDS (1)..(1416): transl_table=11
atgagcagcggcacgctttacgacaaggtctgggatttgcaccgtgtcgcagatctccccggtgggtccacccagctgctgatcggtctgcacctcattcacgaggtcaccagtccgcaggcttttgccgccctcgaggacaaggggctgccggtgcgttgcccagagcggacggtggccaccgtggatcacatcgtgcccaccaccagccaggcccgcccgttcgccgatcctctggcggaggaaatgctcagcacgttggaacgcaactgtgagcgccatggcatcacccttcatggtctgggcagcggccgtcagggcatcgtgcatgtgattgctcctgagcttgggctgacccagccgggaatgaccgtggcctgcggtgactcccacacgtcgacccatggcgcctttggtgcgattgccttcggcatcggtaccagccaggtgcgcgatgtgctcgccagtcagagcctggcgatgaacaagctcaaggtgcggcgtctctggttcgacaaccagctcagtgccggtgtgttcgccaaagacctcatccttcacgtgatccgcacgctgggggtgaaggcaggggtgggtcatgcctatgagttcgccggtccggcgattgaggcgctgtccatggaggagcgcatgaccctctgcaacatggcgattgagggtggggcccgctgcggctacgtcaatcccgatcaggtcactttcgattacctggcgggccgcccggaagcgccgagtggcgaggcttgggagcgggctgtgcagtggtggcatgcgttggcctcagattctgatgctcacttcgacgatgaagtgcgctttgacgctgctgcgattgccccaaccgtcacctgggggatcacccctgggcagggcatcggtgttgatgaaacggtccccacgcctgagcagttggatccctccgatcgtccgatcgcggaggaggcctaccgctatatggaccttgcccccggctcagccattgccggtgttcctgtggatgtgtgtttcatcggcagttgcaccaacggccgtctcagtgatctgcaggcggcggccagcgtggctcgaggcaggcaagtggcgtctggcatcaaggcgttcgtcgtgcctggatcggagcaggtggcgcgtgccgccgaagccgagggcctggacaaggtcttccgcgctgcaggtttcgaatggcgtgaacccggctgttcgatgtgtttggccatgaaccctgatcgccttgaggggcgtcagatcagtgccagctccagcaatcgcaatttcaaaggtcgccagggttcggccagtggtcgcaccttgctgatgagtccagcgatggtggctgctgccgcgatcgaaggcagtgtcaccgacgtgcgctgcttggcgccgcttgagggctga

SEQ ID NO: 148217 - protein, 471 aa, Synechococcus sp. RS9916
MSSGTLYDKVWDLHRVADLPGGSTQLLIGLHLIHEVTSPQAFAALEDKGLPVRCPERTVATVDHIVPTTSQARPFADPLAEEMLSTLERNCERHGITLHGLGSGRQGIVHVIAPELGLTQPGMTVACGDSHTSTHGAFGAIAFGIGTSQVRDVLASQSLAMNKLKVRRLWFDNQLSAGVFAKDLILHVIRTLGVKAGVGHAYEFAGPAIEALSMEERMTLCNMAIEGGARCGYVNPDQVTFDYLAGRPEAPSGEAWERAVQWWHALASDSDAHFDDEVRFDAAAIAPTVTWGITPGQGIGVDETVPTPEQLDPSDRPIAEEAYRYMDLAPGSAIAGVPVDVCFIGSCTNGRLSDLQAAASVARGRQVASGIKAFVVPGSEQVARAAEAEGLDKVFRAAGFEWREPGCSMCLAMNPDRLEGRQISASSSNRNFKGRQGSASGRTLLMSPAMVAAAAIEGSVTDVRCLAPLEG

SEQ ID NO: 148218 - DNA, 1401 bp, Vibrio sp. Ex25
  CDS (1)..(1401): transl_table=11
atgggcaaaacactatacgaaaaagtctacgacgcacacgttgccgtcgcagcagaaggggaaaaccctatcttgtacatcgaccgtcacttggtacatgaagtgacctctccacaagcatttgacggcttacgtgaaaaaggtcgtaaagtgcgtcaggtcagcaaaacttttgccactatggaccacaacgtttcgaccaccaccaaagacattaacgcatccggtgagatggctcgtatccagatggaaacgctatcgaaaaactgtgaagagtttggcgttacgctttacgacatcaaccacaaataccaaggtattgtccacgtcatgggcccagagcttggtattaccctaccgggtatgacgattgtttgtggtgactcgcacacggctacacacggtgcgttcggctctcttgcttttggtattggtacatctgaagttgagcacgtattagcaactcaaacgctaaaacaagcgcgcgctaaaacgatgaagatcgaagtgaaaggcaaagtggcgccgggcatcacggcgaaagacatcgtgctagcgatcatcggtgagaccacagctgctggcggtacaggctacgtggttgaattctgtggggaagcgatcaccgacctttcaatggaaggtcgcatgaccgtatgtaacatggcgattgagctaggtgcgaaagccggtttgattgcaccagatgaaaccacattcgaatacatcaaaggccgtaagttctcacctcaaggtgcggattttgatgccgctgtagaatattggaagacattaaaaactgacgatgatgcccagtttgatgcggtcgtgacactaaacgcaacggatatcaaaccacaagtcacttggggtactaacccaggccaggttatcgcggtagaccaaccgatcccagcaccagaaagctttgctgacccagtagaaaaagcatcggcagaaaaagctctggcttacatgggtctagaagcaggcaagtcattgtctgattacaacgttgataaagtcttcgttggctcttgtactaactcacgtatcgaagacatgcgcgcagcggcggaagtcgcgaaaggtcgcaaagtcgcgtctcacgttcaagcgcttatcgttcctggctctgagcaagtaaaagcgcaagcggaagcagaaggcctagatgtcatctttaaagaggcgggctttgagtggcgcctaccaggttgctcgatgtgtctagcaatgaacaacgaccgtttgggtccacatgaacgttgtgcgtctacttcaaaccgtaactttgaaggccgccaaggtcgtgatggccgtacccacctagtgagccctgcgatggcagcggcagcagcaattgctggtcactttgtagatattcgtgaactagactaa

SEQ ID NO: 148219 - protein, 466 aa, Vibrio sp. Ex25
MGKTLYEKVYDAHVAVAAEGENPILYIDRHLVHEVTSPQAFDGLREKGRKVRQVSKTFATMDHNVSTTTKDINASGEMARIQMETLSKNCEEFGVTLYDINHKYQGIVHVMGPELGITLPGMTIVCGDSHTATHGAFGSLAFGIGTSEVEHVLATQTLKQARAKTMKIEVKGKVAPGITAKDIVLAIIGETTAAGGTGYVVEFCGEAITDLSMEGRMTVCNMAIELGAKAGLIAPDETTFEYIKGRKFSPQGADFDAAVEYWKTLKTDDDAQFDAVVTLNATDIKPQVTWGTNPGQVIAVDQPIPAPESFADPVEKASAEKALAYMGLEAGKSLSDYNVDKVFVGSCTNSRIEDMRAAAEVAKGRKVASHVQALIVPGSEQVKAQAEAEGLDVIFKEAGFEWRLPGCSMCLAMNNDRLGPHERCASTSNRNFEGRQGRDGRTHLVSPAMAAAAAIAGHFVDIRELD

SEQ ID NO: 148220 - DNA, 1401 bp, Alteromonadales bacterium TW-7; identical to SEQ ID NO: 103141
  CDS (1)..(1401): transl_table=11

SEQ ID NO: 148221 - protein, 466 aa, Alteromonadales bacterium TW-7; identical to SEQ ID NO: 103142

SEQ ID NO: 148222 - DNA, 1428 bp, marine gamma proteobacterium HTCC2143; identical to SEQ ID NO: 103143
  CDS (1)..(1428): transl_table=11

SEQ ID NO: 148223 - protein, 475 aa, marine gamma proteobacterium HTCC2143; identical to SEQ ID NO: 103144

SEQ ID NO: 148224 - DNA, 1473 bp, marine gamma proteobacterium HTCC2080; identical to SEQ ID NO: 103145
  CDS (1)..(1473): transl_table=11

SEQ ID NO: 148225 - protein, 490 aa, marine gamma proteobacterium HTCC2080; identical to SEQ ID NO: 103146

SEQ ID NO: 148226 - DNA, 1296 bp, Candidatus Desulfococcus oleovorans Hxd3; identical to SEQ ID NO: 103147
  CDS (1)..(1296): transl_table=11

SEQ ID NO: 148227 - protein, 431 aa, Candidatus Desulfococcus oleovorans Hxd3; identical to SEQ ID NO: 103148

SEQ ID NO: 148228 - DNA, 1434 bp, Pseudomonas putida GB-1; identical to SEQ ID NO: 103149
  CDS (1)..(1434): transl_table=11

SEQ ID NO: 148229 - protein, 477 aa, Pseudomonas putida GB-1; identical to SEQ ID NO: 103150

SEQ ID NO: 148230 - DNA, 1410 bp, Marinobacter sp. ELB17
  CDS (1)..(1410): transl_table=11
atggcttcacagacgctttacgacaaactttgggataggcacctggtagctgagctggcagacggttccgctttgctttacgttgacagacacctgctccacgaagtgacgtctccccaggcgttttcaggtttgcgttcagctggccgtaaaccgtggcgcataagccctaacgtagcggttccggaccacgcggtaccgaccatgcggcgggagcttggcgttgcgggaatcgccgatcgggtggcgcggattcaggttgaaacgctgacccataactgtcgtgagtttggtattccgcttattgagcttgaagacgaacgccagggcattgtgcatgtggtgggccccgaacagggcctgactctgcccggtatgaccatcgtttgtggtgattcccacaccgcgacccatggtgcgtttgcaacgttggccatgggtattggcaccagcgacgttgaacatgtgctggcatcccagacactgcgtactcatcgccagaaaaatatgcgagtggtgtttgatggaaccctgggatttggcgtgacacccaaggacctgattctggcattgatcggtcgcattggtaccgctggcggaaccggctacgccatagaatatgcgggagaaaccatacgaaatatgtccatggaagggcgtatgaccatttgtaatatgagtattgaggctggcgcccgggcaggcatgatcgcttacgatgcggccaccgaggcttacgtgcgtggccggccctatacgcctaagggcactgaatatgcggatgcctgtcgctactggcaaaagctgcactcagacgatgatgcggtttttgaccgtgaggagtactttccggtctccgcgctgataccgcagataacctggggcacgtcccctgagatggtggtgggcattgacggatgtgtgcctgaatcggccggatctgacgaggccgcaagggcttcgttcaagcgcacactggactacatggggcttgagcccgggcaggcgttgaaagatttgcctgtagacaaggtgtttatcggctcctgtactaatgcccggatggaagatctcagggcagttgcgaatcttgtgaagggccagaaggtaagccgctcaattacccaggcgctgattgttccgggctccggtcagattcggcttcaggctgagagagagggcctggatgcgatatttcagaaagccggttttgaatggcgctcggcaggttgttcgatgtgccttgggatgaacgatgaccgcttacagcccggcgagcgctgtgcatccacctctaatcgaaattttgaagggcggcaaggtaagggcggccgaactcatctaatgagtcctctgatggcagctgcagcagcgctgaccggtaaactcaccgatgttcgggagctatga

SEQ ID NO: 148231 - protein, 469 aa, Marinobacter sp. ELB17
MASQTLYDKLWDRHLVAELADGSALLYVDRHLLHEVTSPQAFSGLRSAGRKPWRISPNVAVPDHAVPTMRRELGVAGIADRVARIQVETLTHNCREFGIPLIELEDERQGIVHVVGPEQGLTLPGMTIVCGDSHTATHGAFATLAMGIGTSDVEHVLASQTLRTHRQKNMRVVFDGTLGFGVTPKDLILALIGRIGTAGGTGYAIEYAGETIRNMSMEGRMTICNMSIEAGARAGMIAYDAATEAYVRGRPYTPKGTEYADACRYWQKLHSDDDAVFDREEYFPVSALIPQITWGTSPEMVVGIDGCVPESAGSDEAARASFKRTLDYMGLEPGQALKDLPVDKVFIGSCTNARMEDLRAVANLVKGQKVSRSITQALIVPGSGQIRLQAEREGLDAIFQKAGFEWRSAGCSMCLGMNDDRLQPGERCASTSNRNFEGRQGKGGRTHLMSPLMAAAAALTGKLTDVREL

SEQ ID NO: 148232 - DNA, 1944 bp, Marinobacter sp. ELB17
  CDS (1)..(1944): transl_table=11
atgcctgattcattaagccataaattgatggctgcgcacctagtcaacggaaaaatgacacccggtagcgaaattgccctcaaaatggatcaagcgctattgcaggatgttctaggcacgctggtcatgctggagcttgatgcaatgggcattgaacgagtgcacacatcgcccagcgtccagtacatcgatcacaccctgattcaacaagacaacttcaatgccgatgcccacttgttccttaagagcgcatgcgagcgtttgggcatttggtacagtggacctggtaacggtataagccacccggtacacatggaacgctttggcaaacccggcgacagtctggtggggtgcgacagccacacgacttcagcgggagccctaggcatgttggccattggtgccggcggtattgaagtggcgatggcgatggccggtgaacctctgtttttagctatgccgagcatcatcggtgtacggctgactggggaactgccggattgggtcagcgccaaggacgctgtcttggaactgctacgccgccacggggtttcgggagcaaagaactgcattctcgaatactatggccctggactagcggcacttgatgctatggaccgccatgtgctggcgaacatgggaacagaaatgggagctacaaccagcgtatttccgagcgatgacgccacccttgagttcatgcgggccaggggccgcgaatccgaatggcggccgttagccgcagaccctggctgtctgtacgatcaggacgagcatattgatctgtccaaactggaacccctaattgcccttccctctagcccggataaggtcgtgcttgtcagtgatgtagccggcgaacccatttatcaagcgtatattggctcgtcgggaaaccctgggtatagcgactttgcggttgttgcggacattgtcaggggtcgtgcgatctcacctcatgtatcactggacatcaacccatctactcgccaggttctgacggcgctgattgacgaaggtcacatggccaccttgatcaaagcaggggcgcgccttcatcaacctggttgcaatggctgtatcggaatgggccaggcacccgcaaagggccgtaacagtttgcgcaccgtaccgcgtaactttcctggtcgctctggcactctcgaagacaccgtatttctatgtagcccggagaccgccgccgcatcagcactgtacggtgtgattaccgatccgcgcaccctagagcgagcccaccatcgccctaaagagcctaaaaacatgaagcccgacgagcacatgttctttccaccattagcgctcgaaaaagctcgtcgcatcaggttactggcaaccgacaacactccaccgttggctgtgctcaaacccttacccgattccatatgtgcgccagtattgctgaaggttggcgacaacatctccacagatgacatcatgccggcaggtgcccgcgtgctcccaatctggagcaacatagaggcatcaacgaaacacacttttgaaacggtggatcccagttacgccactcgggcccgcacccagggggaggccggccatatcatcgtcgccggtgataactacggtcagggttcaagccgcgaaaatgcggccctcgtgcccagggctctgggattgcaggtggttattgccaaaagtattgcccgcatacactggcagaacctgccctgcttcggtgtcttgcctttgacacttgataatcctgaggacttggaccaattgcagcaggacgatgttattcggattgatcgtcttcgtgatcaactggctgcaggcacttgtatcacggctaccataaatgaacaccagacaatcacattgacacatgagctaagtgcccgccagcaggctgttttttcatctggcggcgtcattaactggctctcgcggagaaccggatcatga

SEQ ID NO: 148233 - protein, 647 aa, Marinobacter sp. ELB17
MPDSLSHKLMAAHLVNGKMTPGSEIALKMDQALLQDVLGTLVMLELDAMGIERVHTSPSVQYIDHTLIQQDNFNADAHLFLKSACERLGIWYSGPGNGISHPVHMERFGKPGDSLVGCDSHTTSAGALGMLAIGAGGIEVAMAMAGEPLFLAMPSIIGVRLTGELPDWVSAKDAVLELLRRHGVSGAKNCILEYYGPGLAALDAMDRHVLANMGTEMGATTSVFPSDDATLEFMRARGRESEWRPLAADPGCLYDQDEHIDLSKLEPLIALPSSPDKVVLVSDVAGEPIYQAYIGSSGNPGYSDFAVVADIVRGRAISPHVSLDINPSTRQVLTALIDEGHMATLIKAGARLHQPGCNGCIGMGQAPAKGRNSLRTVPRNFPGRSGTLEDTVFLCSPETAAASALYGVITDPRTLERAHHRPKEPKNMKPDEHMFFPPLALEKARRIRLLATDNTPPLAVLKPLPDSICAPVLLKVGDNISTDDIMPAGARVLPIWSNIEASTKHTFETVDPSYATRARTQGEAGHIIVAGDNYGQGSSRENAALVPRALGLQVVIAKSIARIHWQNLPCFGVLPLTLDNPEDLDQLQQDDVIRIDRLRDQLAAGTCITATINEHQTITLTHELSARQQAVFSSGGVINWLSRRTGS

SEQ ID NO: 148234 - DNA, 1419 bp, Marinobacter sp. ELB17; identical to SEQ ID NO: 103151
  CDS (1)..(1419): transl_table=11

SEQ ID NO: 148235 - protein, 472 aa, Marinobacter sp. ELB17; identical to SEQ ID NO: 103152

SEQ ID NO: 148236 - DNA, 1437 bp, Erythrobacter sp. SD-21
  CDS (1)..(1437): transl_table=11
atgccgagcaaaccgcgcactctgtacgagaaaatctgggacgcccatgtcgtcgaacggcaggaggatggcacctgcctgatctacatcgaccggcacctcgtccatgaagtcaccagcccgcaggcattcgaagcattgcgactctcaggccgcaaagtgcgccggccagacctgaccctcgcggttcctgatcataaccttccaaccacgccgcgcctcgcgcccgacggctcccgcctgccggtcgccgatgcgcaaagcgccgcgcagctggccgcgcttgaggccaacgcgccttctttcggcatcgaatatatcgacgcggtcgcgcccgagcagggcatcgtccatgttgtcgggcccgagcagggtttctcgcttcccggcacgaccatcgtgtgcggcgacagccacaccgccgcgcatggcggtatcggcgcgctcgccttcgggatcggcaccagcgaggtcgagcacgtcctcgccacgcagaccctgctcctgcgcccgagcaagaccatggaagtgcgtgtcgaaggcgaacttggccccggcgtgacgcccaaggatctgatccttcacatcatcggcgtgatcggcacggcgggcggcacgggccacgtcatcgaataccgagggccggtgttcgagcggatgagcgtcgaaggccgcctgaccgtttgcaacatgagcattgagggcggcgcgcgcgccgggctcatcgcgccagaccagaccgtattcgattacctcgaaggccgcccctatgcgcctacggacgaagcgtgggacaaggcggtcgattggtggcgctcgctcgccaccgacgaatgcgccaccttcgacaagtccgtcgtgatcgatgcgtcgcacgtcgagccgacggtcacctggggcaccagtcccgaggacgtcgtgcctattggcggcgaggtgcctgcgcccgaaagtttcgccgacctgtccaagcaggaagcggcgcgcaagagcctcgactacatgggcctttccccgggcatgccgctggagcaagtcgaggtcgaaaacattttcatcggctcctgcaccaacagccggatcgaggatctgcgcgcggccgcagcgatcctcaaggggcgcacaaaggcacacaacgtgcgctgggccatcgccgtaccgggatcaggcctcgtcaagcggcaggccgaggaagaggggcttgatcgcatctttacagacgccggtttcgaatggcgcgagccgggctgttcggcctgcctcgcgatgaaccccgacaaggtcccgccgggcgaacgctgcgcctcgacttccaaccgaaatttcgtcggcagacaggggccgggctcgcgcacgcacttgctcagccccgccatggccgccgccgctgccgtgaccggacggcttaccgatgtccgcaagctgttggacgtgtga

SEQ ID NO: 148237 - protein, 478 aa, Erythrobacter sp. SD-21
MPSKPRTLYEKIWDAHVVERQEDGTCLIYIDRHLVHEVTSPQAFEALRLSGRKVRRPDLTLAVPDHNLPTTPRLAPDGSRLPVADAQSAAQLAALEANAPSFGIEYIDAVAPEQGIVHVVGPEQGFSLPGTTIVCGDSHTAAHGGIGALAFGIGTSEVEHVLATQTLLLRPSKTMEVRVEGELGPGVTPKDLILHIIGVIGTAGGTGHVIEYRGPVFERMSVEGRLTVCNMSIEGGARAGLIAPDQTVFDYLEGRPYAPTDEAWDKAVDWWRSLATDECATFDKSVVIDASHVEPTVTWGTSPEDVVPIGGEVPAPESFADLSKQEAARKSLDYMGLSPGMPLEQVEVENIFIGSCTNSRIEDLRAAAAILKGRTKAHNVRWAIAVPGSGLVKRQAEEEGLDRIFTDAGFEWREPGCSACLAMNPDKVPPGERCASTSNRNFVGRQGPGSRTHLLSPAMAAAAAVTGRLTDVRKLLDV

SEQ ID NO: 148238 - DNA, 1386 bp, unidentified eubacterium SCB49
  CDS (1)..(1386): transl_table=11
atgtcacaaaaaacattatttgataaagtttgggacgctcatgttgttaaaaatgaaatagagggaccacaaattttatacatagacaagcatttaatacacgaagtaacaagtcctcaagcttttaacgaacttaaagaaagaggtgtccctgtttttcgtcctaatcaaattgttgctactgcagaccacaatacaccaactataaaccaacatctacctattaaagatgagttgtctaaaaagcaactaaaacaactagctattaattgtaaaaataacggcataacactttatgatttagggcataaatacaacggtatcgttcatgtaatggcgccagagttaggtcttacacaaccaggtatgactattgtttgtggagatagccatacttctactcatggagcttttggggcaattgcttttggtataggcactagtcaagttgcacaagtttttgccagccaatgtttattacttaaaaaaccgaaaagcctaagagtaaacgtaaacggctctttacaccctaatgtgctaccaaaagatgtaatcttatatataatttcaaaaataggcactaacgcaggtacaggatatttctgtgaatacgcaggaactgtgtttgaaaatatgacaatggaagggcgtatgacagtctgtaatatgagtattgaaatgggagcacgtggtggcatgattgctccagaccaaaccacgtttgattacttaaaagacaaaaaatttgctcctaagggtgaagagttagatgaaaaaatagcatactggaaaactttgccaacagataaagaagctgtatttgataaggaatatacatttgatgccgcagaaatccaacctatgattacctatggcaccaaccccgccatgggaatgatcataaatgaagctattccaaaatttgaagatgtttcatttaaaaaatcattagactacatggactttaaagcaggtggaagcttgctaaataaaacaattaattatgtctttattggtagttgtacaaactctcgcatagaagattttagagtcgctgctaattatataaaaggaaaacaaaaagcagaaaacgtaactgcttggctcgttcctggaagcaaacaagtagaaaatcaaataaaagaagaaggcctaaacctcatttttgaaaatgcaggattccaattaagacaacctggatgtagtgcctgtttagcgatgaatgatgataaaattcctgcaggagaatattgcgtttctacgagtaacagaaattttgaaggacgccaaggacaaggcgcacgtaccatcttagcaggtccgcttgtagctgcagcaacagccatagagggaaaaataattgatattacaaaaacggttaactaa

SEQ ID NO: 148239 - protein, 461 aa, unidentified eubacterium SCB49
MSQKTLFDKVWDAHVVKNEIEGPQILYIDKHLIHEVTSPQAFNELKERGVPVFRPNQIVATADHNTPTINQHLPIKDELSKKQLKQLAINCKNNGITLYDLGHKYNGIVHVMAPELGLTQPGMTIVCGDSHTSTHGAFGAIAFGIGTSQVAQVFASQCLLLKKPKSLRVNVNGSLHPNVLPKDVILYIISKIGTNAGTGYFCEYAGTVFENMTMEGRMTVCNMSIEMGARGGMIAPDQTTFDYLKDKKFAPKGEELDEKIAYWKTLPTDKEAVFDKEYTFDAAEIQPMITYGTNPAMGMIINEAIPKFEDVSFKKSLDYMDFKAGGSLLNKTINYVFIGSCTNSRIEDFRVAANYIKGKQKAENVTAWLVPGSKQVENQIKEEGLNLIFENAGFQLRQPGCSACLAMNDDKIPAGEYCVSTSNRNFEGRQGQGARTILAGPLVAAATAIEGKIIDITKTVN

SEQ ID NO: 148240 - DNA, 1407 bp, Moritella sp. PE36
  CDS (1)..(1407): transl_table=11
atgactaaaacaatagcagaaaaaatttgggatagtcatattgttgcatcattagggaacacggaagtactgctctacattgacttgcatttactacacgaaattaacacgccacaggcttttgatggactaagagagaaaggagtcaatgtacatcgaccagatagaacgctttctaccgaagatcacaatacaccgacatcgtctgttatcgacatcgataaggacagcagcacgtggactcaaataaaattacttcgtgaaaattgtcaagagtatggtcttgagcataaaaagctcggagaactaggtcagggtattactcatgtgatagcacccgaacaggggagagtactcccaggttcaacgttggtatgttgtgattcccataccacaactcatggcgcattcggagccctcgcttttggcataggtaccagtcaggttgagcatgtattggctacacaaacattaagagcgatccctttcaatacaatgcgggtcaatgtaacaggtgcttataacgaaggtgttgatgcgaaagatttggccttattcattatcaatgaaattggtactggtggtggtcaaggctgtgtcattgaatacactggcgaagcagtttcgcaactatctatggagcaacgcatgaccctttgcaatatgacggtagaagcaggagcaagtgcaggtattatttctcccgatcaaacgaccgtttcgtacctcaaagaaaagctggcggagcgcaatgttacgatcagtgacgcagatacgactaaatggctgacatatgcgaccgatatggatgcagtgtttgataaatatgttgaaatagatgcagctaaagttccaaaaatgatctcatggggtaccaacccttcacaagttatccctgtagtagggaaggtgccatatgtcgatccccttgactgtgccagtaaacagatagccgcaacacaagcactcaaatatatgggcttaaaagaaggcgatgatctgagttcacatccaattacgaatgtctttattggttcatgtactaatggacggatcgaagatatgagagctgtagcagcggtactcaaagagcacaaggtacacaaagatgttcacatgttaattgtgccaggttcaatgaaagttcacgaacaagtaatcaaggaaggtattgataaagtattccttaatgccggagctgattttagagggttagcgggatgttctctttgtgttggtttgaattctgataagttaagcgcaggtaaaagaacagtatcgaccagtaatcgtaattttgaagggcggcaaggcgtaggcgtacgtacacatataacctcaccagtggttgctgcagcatctgctattaaggggcatatagcctcgccacaatgtttggaaaattaa

SEQ ID NO: 148241 - protein, 468 aa, Moritella sp. PE36
MTKTIAEKIWDSHIVASLGNTEVLLYIDLHLLHEINTPQAFDGLREKGVNVHRPDRTLSTEDHNTPTSSVIDIDKDSSTWTQIKLLRENCQEYGLEHKKLGELGQGITHVIAPEQGRVLPGSTLVCCDSHTTTHGAFGALAFGIGTSQVEHVLATQTLRAIPFNTMRVNVTGAYNEGVDAKDLALFIINEIGTGGGQGCVIEYTGEAVSQLSMEQRMTLCNMTVEAGASAGIISPDQTTVSYLKEKLAERNVTISDADTTKWLTYATDMDAVFDKYVEIDAAKVPKMISWGTNPSQVIPVVGKVPYVDPLDCASKQIAATQALKYMGLKEGDDLSSHPITNVFIGSCTNGRIEDMRAVAAVLKEHKVHKDVHMLIVPGSMKVHEQVIKEGIDKVFLNAGADFRGLAGCSLCVGLNSDKLSAGKRTVSTSNRNFEGRQGVGVRTHITSPVVAAASAIKGHIASPQCLEN

SEQ ID NO: 148242 - DNA, 1401 bp, Moritella sp. PE36
  CDS (1)..(1401): transl_table=11
atgaaaaagacaatgtatgaaaaaatttgggattcacacttagttcacgaacctaagaatggcaccccgctactctacatcgatcgtcacttgatgcatgaagtaacaagtccacaagcatttgaaggcttaagagttcaacaccgtccgatccgtaatcgtcatagtatcttggcaacaatggatcactgtgtaccgactgttgaccgtcatttaccgattaaagatccaattgccgcgaaacaaattgatacgatggcaaataactgtagtgaacacgacctgcttatttacgatatgcagagcgttaataacggcgttattcatattgttgtacctgaacatggtttcattcacccaggtatgacagcagtgtgtggtgattcacatacagcaacacacggtgcattcggtgcgttagcattcggtatcggtacttctgaagttgaacatgtcatggcaactcagacgctacaacaacaaaaatcaaaaactatgctaataagtgtagaaggtaaattatctaaatattcaacagcaaaagatattgcccttgctgttatcggtaaaattggtactgctggcggtactggccatgtcatcgaatttgcaggttctgccatccgagacctgacaatggaaggtcgtatgaccttatgtaatatggcgattgaaggtggcgcacgtgctggccttattgcaccagatgaaacgacatatgcttaccttgaaggtaaagaattcgcaccaaaaggtgatcactggcctgctgcactcgcatactggaaatcactgccaactgatgacggcgctgtatttgatactatcgtcgagcttaaagcggaagatattgcaccacaagttacttggggtacttcaccagagcaagttgtagcagttaacgcaacggtaccttcaccaagtgatttcagtgatgaaattaaagcgtcggcatgtaaaggtgcccttgcctacatggacattgaagccggtgccgcaatcacagatattaatattgatcttgtgttcgttggttcttgtactaacggtcgtattgaagatttccgtgccatagctgaattaacagcaggtaaaaaggtaagcgcttcagtacaagctatcgcagttcctggttcatatttagtgaaagaacaagcagaaaaagaaggtctagataagatcttagttgctgcgggttgggaatggcgtgaaccaggttgttctatgtgtctagcaatgaatggtgatcaactaggtgaaggtcaacgtagtgcatctacgtcaaaccgtaacttcgaaggtcgtcaaggtaaaggtggacgtactcatctagtatcaccagcaatggctgcagcggcagcgattgaaggccattttgttgacatccgtaactgggcataa

SEQ ID NO: 148243 - protein, 466 aa, Moritella sp. PE36
MKKTMYEKIWDSHLVHEPKNGTPLLYIDRHLMHEVTSPQAFEGLRVQHRPIRNRHSILATMDHCVPTVDRHLPIKDPIAAKQIDTMANNCSEHDLLIYDMQSVNNGVIHIVVPEHGFIHPGMTAVCGDSHTATHGAFGALAFGIGTSEVEHVMATQTLQQQKSKTMLISVEGKLSKYSTAKDIALAVIGKIGTAGGTGHVIEFAGSAIRDLTMEGRMTLCNMAIEGGARAGLIAPDETTYAYLEGKEFAPKGDHWPAALAYWKSLPTDDGAVFDTIVELKAEDIAPQVTWGTSPEQVVAVNATVPSPSDFSDEIKASACKGALAYMDIEAGAAITDINIDLVFVGSCTNGRIEDFRAIAELTAGKKVSASVQAIAVPGSYLVKEQAEKEGLDKILVAAGWEWREPGCSMCLAMNGDQLGEGQRSASTSNRNFEGRQGKGGRTHLVSPAMAAAAAIEGHFVDIRNWA

SEQ ID NO: 148244 - DNA, 1404 bp, Magnetospirillum gryphiswaldense; identical to SEQ ID NO: 103153
  CDS (1)..(1404): transl_table=11

SEQ ID NO: 148245 - protein, 467 aa, Magnetospirillum gryphiswaldense; identical to SEQ ID NO: 103154

SEQ ID NO: 148246 - DNA, 2268 bp, Piromyces sp
  CDS (1)..(2268)
atggctaccaaagttgctatgtccgctttcgaccaaaacaatttcattcaatatgaaaaaatggccgaaaacatcaaaatcgttcgtgaaagattaaatcgtccattaacttatgccgaaaagattgtttacggtcacttagctgatccaaagaaccaagatattgaacgtggtaagagttatcttaacttacatccagatcgtgttgcttgtcaagatgctactgctcaaatggctcttcttcaatttatgtctgctggtcttccaactgttgccgttccaactaccgttcactgtgatcacttaattcaagctcaagttggtgctgaaagtgatttaccacgtgctaaggaaattaacaaggaagtttacgatttcctttcttcctgttctgctaaatacggtattggtttctggaaaccaggtagtggtattattcaccaaattgttcttgaaaactatgcttacccaggtggtatgatgattggtactgattcacacactccaaatgctggtggtcttggtatgatcgctgttggtgtcggtggtgcagatgctgtcgatgttatggctggtattccatgggaattaaagtgcccaaagattattggtgttaagttaactggtaagcgtaacggttggacttctccaacggatattattttaaaggttgccggtatccttactgttaagggtggtactggtgctattgttgaatacttcggtgaaggtgttgaatctatctcatgtactggtatggctactatttgtaacatgggtgctgaaattggtgctactacctccgtttttccattcaatgaacgtatggaagaatacttaaaggctactggacgtagtgaaattgctgaattagctaagcaatacaaggacttattaaaggctgatgaaggttgtcattacgatcaaattattgaaattaaccttagtgaattagaaccacacatcaacggtccattcactccagatttagctactccattatctgaattcaagaatgctgttgaaaagaatggatggccagaagaattaaaggttggtcttattggttcctgtactaattcatcttatgaagatatgtgccgtgtttcctctttaattaagcaagctcttgataatggtgttccagccaaatccaaattcatcattactccaggtagtgaacaaattagagctaccattgctaaggatggtcaaatggaattaatgaagaaggtcggtggtgttgttttagctaatgcttgtggtccatgtattggtcaatgggatcgtaaagatattaagaagggtgaccttaatagtattattacttcctacaaccgtaacttcactgctagaaatgatgctaacccacaaactcacgccttcgttgcttctccagaaattgttactgctatggtctttggtggttcccttaagttcaacccaatgaaggatgaaatcactaagccagatggttctaagttcaaattccaaccaccaagtggtgatgctcttccaccaactggatatgataagggagaaatggtttaccaagctccaccagaagatcgttccaacgtccaagttattgtcagtccaaccagtcaaagattacaactcttaactccattcaacaaatggaatggtgaagattacgaaaaccttactattcttattaaggttaagggtaagtgtactactgatcacatcagtatggctggtccatggcttaagtaccgtggtcacttagataacatctctaacaacatgttaattggtgctattaactctgaaaacggtgaagctaacaagatccgtaacattttaactggtgaatacgatgctgttccagctgttgccagagactacaaggctcacggtatgccatgggttgttattgccgacgaaaactatggtgaaggtagttctcgtgaacacgctgccttagaaccaagacacttaggtggtgttgctgttattgtcaagagtttcgctagaattcacgaaactaaccttaagaagcaaggtgttcttccacttactttcgctgatccagctgattacgataagattaacccagctgataagatctccattcttggtcttaagactcttactccaggtgttccattaactgctaagtttaccaaggctgatggttctacctacgaaattaaacttaaccacaccttaaatgaaggtcaaattgaatggttcaaggctggttctgccttaaacttattagctgctgctgctaagaagaactaa

SEQ ID NO: 148247 - protein, 755 aa, Piromyces sp
MATKVAMSAFDQNNFIQYEKMAENIKIVRERLNRPLTYAEKIVYGHLADPKNQDIERGKSYLNLHPDRVACQDATAQMALLQFMSAGLPTVAVPTTVHCDHLIQAQVGAESDLPRAKEINKEVYDFLSSCSAKYGIGFWKPGSGIIHQIVLENYAYPGGMMIGTDSHTPNAGGLGMIAVGVGGADAVDVMAGIPWELKCPKIIGVKLTGKRNGWTSPTDIILKVAGILTVKGGTGAIVEYFGEGVESISCTGMATICNMGAEIGATTSVFPFNERMEEYLKATGRSEIAELAKQYKDLLKADEGCHYDQIIEINLSELEPHINGPFTPDLATPLSEFKNAVEKNGWPEELKVGLIGSCTNSSYEDMCRVSSLIKQALDNGVPAKSKFIITPGSEQIRATIAKDGQMELMKKVGGVVLANACGPCIGQWDRKDIKKGDLNSIITSYNRNFTARNDANPQTHAFVASPEIVTAMVFGGSLKFNPMKDEITKPDGSKFKFQPPSGDALPPTGYDKGEMVYQAPPEDRSNVQVIVSPTSQRLQLLTPFNKWNGEDYENLTILIKVKGKCTTDHISMAGPWLKYRGHLDNISNNMLIGAINSENGEANKIRNILTGEYDAVPAVARDYKAHGMPWVVIADENYGEGSSREHAALEPRHLGGVAVIVKSFARIHETNLKKQGVLPLTFADPADYDKINPADKISILGLKTLTPGVPLTAKFTKADGSTYEIKLNHTLNEGQIEWFKAGSALNLLAAAAKKN

SEQ ID NO: 148248 - DNA, 2244 bp, Yarrowia lipolytica
  CDS (1)..(2244)
  misc_feature (102)..(102): k is g or t
  misc_feature (151)..(151): y is t or c
atgaacaactgggaggccaacaacttcctcaacttcaagaagcacaccgagaacgtccagattgtcaaggagcgactcaaccgacccctgacctacgctgakaagattctctacggccatctcgacaagccccatgagcaggagattgtcygaggtcagtcctacctcaagctgcgacccgatcgagccgcctgccaggatgccaccgcccagatggccattctgcagttcatgtctgccggtatccccaccgtccagacccccaccaccgtccactgtgaccatcttatccaggcccaggttggtggtgagcaggatcttgctcgagccatcgacatcaacaaggaggtctacaacttccttggcaccgcctccgccaagtacgacattggtttctggaaggccggatccggtattatccaccagatcattctcgagaactacgccttccccggtgcccttctcattggttccgactctcatacccccaacgccggtggtctcggtatgctcgccatcggtgtcggtggtgccgatgtcgtcgacgtcatggccggtctcccctgggagcttaaggcccccaagattatcggtgtcaagctgaccggtaagctctctggctggacctcccccaaggatattatcctgaaggtcgctggtatcctcaccgtcaagggtggaaccggtgctatcgtcgagtacttcggtgatggtgtcgataacctgtcctgcactggtatgggaaccgtctgtaacatgggtgccgagattggtgctaccacctccaccttccccttcaacgagcgaatggccgactaccttaacgccactggccgaaaggagattgccgactttgctcgactttacaaccacttcctctctgccgatgagggttgtgagtacgatcagctcatcgagattgacctgaacacccttgagccttacgtcaacggtcccttcactcccgatcttgccacccccatctccaagctcaaggatgtcgccgtcgagaacggatggccccttgaggtcaaggtcggtcttatcggctcttgcaccaactcctcttacgaggatatggagcgatccgcctccattgccaaggacgccatggcccacggtcttaagtccaagtccatctacaccgtcacccccggttccgagcagatccgagccaccattgagcgagatggtcagctccagaccttcctcgacttcggtggtatcgtccttgctaacgcttgtggcccctgcattggtcagtgggaccgacgagacatcaagaagggtgagaagaacaccattgtctcttcttacaaccgaaacttcactggccgaaacgattctaaccctgccacccacgctttcgtcacctctcccgatctcgtcaccgctttcgccattgctggtgacctccgattcaaccctctcactgactccctgaaggattctgagggtaaggagttcaagctcaaggagcccactggaaagggtctgcccgaccgaggttacgaccccggcatggacacctaccaggctccccccgccgaccgatctgccgtcgaggttgatgtttcccccacttccgaccgactccagatcctcaagcccttcaagccttgggacggcaaggacggtattgacatgcccatcctcatcaagtctcttggtaagaccaccactgaccatatctctcaggccggtccctggcttaagtaccgaggccatctccagaacatctccaacaactacatgattggagccatcaacgctgagaacgaggaggccaacaacgtccgaaaccagatcactggcgagtggggaggagttcccgagactgccattgcttaccgagacaacggtatccgatgggttgttgtcggaggtgataacttcggtgagggttcttctcgagagcacgctgctcttgagccccgattcctcggtggtttcgccatcatcaccaagccttttgcccgaattcacgagactaacctgaagaagcagggtctcctgccccttaacttcgtcaacggtgctgactacgacaagatccagccctccgataagatctccattcttggtcttaaggaccttgcccccggcaagaacgtcaccattgaggttacccccaaggacggtgccaagtggaccaccgaggtttctcacacctacaactctgagcagctcgagtggttcaagtacggctctgccctcaacaagatggctgcctccaagaaataa

SEQ ID NO: 148249 - protein, 747 aa, Yarrowia lipolytica; identical to SEQ ID NO: 67113
  misc_feature (34)..(34): The Xaa at location 34 stands for Asp, or Glu.
  misc_feature (51)..(51): The Xaa at location 51 stands for Stop, or Arg.

SEQ ID NO: 148250 - DNA, 2310 bp, Aspergillus oryzae; identical to SEQ ID NO: 103163
  CDS (1)..(2310)

SEQ ID NO: 148251 - protein, 769 aa, Aspergillus oryzae; identical to SEQ ID NO: 103164

SEQ ID NO: 148252 - DNA, 2340 bp, Aspergillus oryzae; identical to SEQ ID NO: 67114
  CDS (1)..(2340)

SEQ ID NO: 148253 - protein, 779 aa, Aspergillus oryzae; identical to SEQ ID NO: 67115

SEQ ID NO: 148254 - DNA, 2421 bp, Aspergillus oryzae; identical to SEQ ID NO: 67118
  CDS (1)..(2421)

SEQ ID NO: 148255 - protein, 806 aa, Aspergillus oryzae; identical to SEQ ID NO: 67119

SEQ ID NO: 148256 - DNA, 1938 bp, Thiobacillus thiooxidans; identical to SEQ ID NO: 67122
  CDS (1)..(1938): transl_table=11

SEQ ID NO: 148257 - protein, 645 aa, Thiobacillus thiooxidans; identical to SEQ ID NO: 67123

SEQ ID NO: 148258 - DNA, 2367 bp, Antheraea yamamai; identical to SEQ ID NO: 67126
  CDS (1)..(2367)

SEQ ID NO: 148259 - protein, 788 aa, Antheraea yamamai; identical to SEQ ID NO: 67127

SEQ ID NO: 148260 - DNA, 2244 bp, Mucor circinelloides f; identical to SEQ ID NO: 103175
  CDS (1)..(2244)

SEQ ID NO: 148261 - protein, 747 aa, Mucor circinelloides f; identical to SEQ ID NO: 103176

SEQ ID NO: 148262 - DNA, 2244 bp, Mucor circinelloides f; identical to SEQ ID NO: 103177
  CDS (1)..(2244)

SEQ ID NO: 148263 - protein, 747 aa, Mucor circinelloides f; identical to SEQ ID NO: 103178

SEQ ID NO: 148264 - DNA, 2367 bp, Daphnia pulex; identical to SEQ ID NO: 67138
  CDS (1)..(2367)

SEQ ID NO: 148265 - protein, 788 aa, Daphnia pulex; identical to SEQ ID NO: 67139

SEQ ID NO: 148266 - DNA, 1530 bp, Arabidopsis thaliana; identical to SEQ ID NO: 103181
  CDS (1)..(1530)

SEQ ID NO: 148267 - protein, 509 aa, Arabidopsis thaliana; identical to SEQ ID NO: 103182

SEQ ID NO: 148268 - DNA, 1539 bp, Bradyrhizobium japonicum; identical to SEQ ID NO: 103187
  CDS (106)..(1539): transl_table=11

SEQ ID NO: 148269 - protein, 477 aa, Bradyrhizobium japonicum; identical to SEQ ID NO: 103188

SEQ ID NO: 148270 - DNA, 1428 bp, Mannheimia succiniciproducens
  CDS (1)..(1428): transl_table=11
ttggagaatgctatgagtaaaacactttacgataaacatattgattcccacactattaaagaacttgataatgaagggaatgtattactttacattgatagaactattctaaatgaatataccagcccgcaagctttcagtggcttgcgtgaggaaaatcgcgatgtttggaataaaaaatcaattctattgaatgtggatcatgttaatcctactcgtcctgtacgtgatgccaatatgactgatcccggcggcacattgcaagttaattatttccgtgaaaacagtaagctttttgatattgaattatttgacgttactgatccacgccaaggtattgagcatgtagtggcgcatgagcaaggtttagctttaccaggaatggtgattgcagcaggtgatagccacactactacctatggcgctttcggtgcgtttggtttcggtatcggaacatctgaaatcgaacaccttttggcgacgcaaaccctagtgtataaaaaattgaaaaatatgcgtgtgactttgaccggcaaattacctttcggcacaacggcaaaagacgtgattatggcgttagtggcaaaaatcggagctgatggcgcaactaattacgctattgaattttgcggtgaagttatcgatgagctcagcgttgaaggacgaatgaccatttgcaatatggcagtggaatgtggtgctcgcggtgcatttatggctcctgatgaaaaggtttatgaatatatcaaaggtacgccaagagcgccaaaaggcgaaatgtgggatttagcaattgcagaatggcgtaagttgaaaagcgataatgatgccgtttttgacaaagaaattcacatggactgttctgatttagaaccgtttgttacttggggtattagtccggatcaagccgacgtcattagcggtgaagttccggatcccaatttattacctgaaggacaaaaacgtaaagactaccaagccgctcttgaatatatggggcttgaacccggtatgaaatttgaagagataaaaatttctcatgcctttattggttcttgtacaaatggacgtattgaagatttacgtgaagtggcgaaagtacttaagggcagaaaaattgcacaaggtgtacgaggcatgattattccgggttcaactcaagttagagctagagctgaagcggaaggattggcaaaaatttttattgatgcaggttttgaatggcgtcaatcaggttgttcaatgtgtttagcgatgaatgaagatgtgttatcgccgggtgatcgttgtgcctcaggtaccaaccgtaactttgccggtcgtcaaggcgcaggctcaagaacccacttaatgagccctgctatggtggcagccgcagctgtagccggtcatttagtagatgtgcgtaaattcgttgaaggagactaa

SEQ ID NO: 148271 - protein, 475 aa, Mannheimia succiniciproducens
MENAMSKTLYDKHIDSHTIKELDNEGNVLLYIDRTILNEYTSPQAFSGLREENRDVWNKKSILLNVDHVNPTRPVRDANMTDPGGTLQVNYFRENSKLFDIELFDVTDPRQGIEHVVAHEQGLALPGMVIAAGDSHTTTYGAFGAFGFGIGTSEIEHLLATQTLVYKKLKNMRVTLTGKLPFGTTAKDVIMALVAKIGADGATNYAIEFCGEVIDELSVEGRMTICNMAVECGARGAFMAPDEKVYEYIKGTPRAPKGEMWDLAIAEWRKLKSDNDAVFDKEIHMDCSDLEPFVTWGISPDQADVISGEVPDPNLLPEGQKRKDYQAALEYMGLEPGMKFEEIKISHAFIGSCTNGRIEDLREVAKVLKGRKIAQGVRGMIIPGSTQVRARAEAEGLAKIFIDAGFEWRQSGCSMCLAMNEDVLSPGDRCASGTNRNFAGRQGAGSRTHLMSPAMVAAAAVAGHLVDVRKFVEGD

SEQ ID NO: 148272 - DNA, 1260 bp, Methanobacterium thermoautotrophicum
  CDS (1)..(1260): transl_table=11
atgtctatgactgtttctgagaagatacttgccagggcttcaggtaaggatagggtggaagccggtgaaatagttatggcggatatagatgttgcgatgacccatgacctcacaggtcccctgtcggttgagtccttcagggccataggtgaggatagggtctgggaccctgaaaaaatcgttgtgatattcgatcaccaggtccctgcagactccattgaagccgcccagaaccacatgataatgagggacttcgtagaggagcagggaatacggaacttctatgacgttcgtgaaggcgtctgtcaccaggtgctccctgagaagggccatgttgtgcccggtgaggtcgtggtgggtacagactcccacacctgcacccacggggccctcggagccttcgcaacgggtataggttcaacagatatggccatggtatttgcaactgggaaactttggttcagggtccctgaaaccctgagatttgatgtgaggggaaaactcagggagcacgtctatgcaaaggacgtcatactgaacataatagggagggttggtgccgatggcgcaacctacatggcctgtgaatttgcaggtgaaaccgttgcagaaatgagtgtatccgaccgtatggtcctctcaaatatggcaatagagatgggtggtaagacaggaatcgtggaacctgacgaaaaaaccctgaactatgtcaggaggaggtcaggtaaaccctggagggtcttcaaaacagaccctgacgctccatccctcagtgtcatggaggtcgacgtgagtgaccttgaaccccaggtcgcctgtccacacaatgtggacaatgtgaaacccgtcaccgaggtggaggggacagagatagaccaggtcttccttggttcatgcacaaatggaaggctcagtgacctcagggacgctgccgccatactgaagaacaggaaggtctcagacagtgtcaggatgctcgtcatacctgcctccagggaggtctaccgcagggcccttgacgagggactgattgagatattcgtggatgcaggagccctggtatgcaacccctgctgcggcccctgcctcggaggacacgttggactggtcggaccaggggaggtgagcctctcaacctcaaacaggaacttcagggggaggcagggaagccccgaagcagaggtctacctctcctcagcagccgtggcagccgcatctgcagtgaagggcagcataacccaccctgggagtctgaagtag

SEQ ID NO: 148273 - protein, 419 aa, Methanobacterium thermoautotrophicum
MSMTVSEKILARASGKDRVEAGEIVMADIDVAMTHDLTGPLSVESFRAIGEDRVWDPEKIVVIFDHQVPADSIEAAQNHMIMRDFVEEQGIRNFYDVREGVCHQVLPEKGHVVPGEVVVGTDSHTCTHGALGAFATGIGSTDMAMVFATGKLWFRVPETLRFDVRGKLREHVYAKDVILNIIGRVGADGATYMACEFAGETVAEMSVSDRMVLSNMAIEMGGKTGIVEPDEKTLNYVRRRSGKPWRVFKTDPDAPSLSVMEVDVSDLEPQVACPHNVDNVKPVTEVEGTEIDQVFLGSCTNGRLSDLRDAAAILKNRKVSDSVRMLVIPASREVYRRALDEGLIEIFVDAGALVCNPCCGPCLGGHVGLVGPGEVSLSTSNRNFRGRQGSPEAEVYLSSAAVAAASAVKGSITHPGSLK

SEQ ID NO: 148274 - DNA, 1272 bp, Pyrococcus abyssi; identical to SEQ ID NO: 103191
  CDS (1)..(1272): transl_table=11

SEQ ID NO: 148275 - protein, 423 aa, Pyrococcus abyssi; identical to SEQ ID NO: 103192

SEQ ID NO: 148276 - DNA, 1275 bp, Pyrococcus furiosus; identical to SEQ ID NO: 103193
  CDS (1)..(1275): transl_table=11

SEQ ID NO: 148277 - protein, 424 aa, Pyrococcus furiosus; identical to SEQ ID NO: 103194

SEQ ID NO: 148278 - DNA, 1401 bp, Salmonella choleraesuis; identical to SEQ ID NO: 103195
  CDS (1)..(1401): transl_table=11

SEQ ID NO: 148279 - protein, 466 aa, Salmonella choleraesuis; identical to SEQ ID NO: 103196

SEQ ID NO: 148280 - DNA, 1401 bp, Salmonella typhimurium; identical to SEQ ID NO: 103197
  CDS (1)..(1401): transl_table=11

SEQ ID NO: 148281 - protein, 466 aa, Salmonella typhimurium; identical to SEQ ID NO: 103198

SEQ ID NO: 148282 - DNA, 1407 bp, Bradyrhizobium japonicum; identical to SEQ ID NO: 103199
  CDS (1)..(1407): transl_table=11

SEQ ID NO: 148283 - protein, 468 aa, Bradyrhizobium japonicum; identical to SEQ ID NO: 103200

SEQ ID NO: 148284 - DNA, 1296 bp, Deinococcus radiodurans; identical to SEQ ID NO: 103201
  CDS (1)..(1296): transl_table=11

SEQ ID NO: 148285 - protein, 431 aa, Deinococcus radiodurans; identical to SEQ ID NO: 103202

SEQ ID NO: 148286 - DNA, 1410 bp, Mannheimia succiniciproducens; identical to SEQ ID NO: 103203
  CDS (1)..(1410): transl_table=11

SEQ ID NO: 148287 - protein, 469 aa, Mannheimia succiniciproducens; identical to SEQ ID NO: 103204

SEQ ID NO: 148288 - DNA, 1422 bp, Salmonella choleraesuis
  CDS (1)..(1422): transl_table=11
atgtctgctaaaacgctgtatgaaaaattagttgagtcacataccattcgtgaacttgataacgaaggacatgttttactttatattgatcgttcaatactgaatgaatataccagcccgcaggcatttagcgggttaagagaacgcggtcgcgccgttcggcaccccgacacgtttttattgaatattgaccatgttaatcccacgcggtcgcaacgggatgtcttaatgaccgatccgggaggacagctacaggttgattactttcgggaaaatgccgctgactttggcatcacattatttgatgtgctggatccgcgtcaggggattgaacacgtggttgctcatgaacaagggctagtgatgcctggcatggtgatcgccgccggggatagtcacacgacaacctacggtgcatttggcgcgctgggctttggtatcgggacgtcggaaattgaacatctgctggccacgcagacgctggtttaccgcaagctcaaaaccatgcgcgtaagtgttcagggagagctacctttcgcctgttccgcaaaagatattgttcttgaattgcttgaacgtattggcgctgatggcgcgacgggatatgccattgaatttgtgggtgaggccatcagcgcgttgagcgttgaaggacgaatgacgctctgcaacatggcggtagaagcgggggcgcgtggtgctattattgcgccggataaaaaggtttttgactatatctacggtaaaccgcaaatgcctgtaggtgaactctggcagcaggcattgctggaatggtcacagttgagcagcgatgctgatgcggtatttgataagacggtggcgatcaactgccatgatcttgagcctaaagtcacctggggaatcagtccggatcaaacaggttccatcaccggacgtgttcctttcccggaacaggaaaccaatccgcttaagcgcctggcgcttgagaaggcccttcattacatgggattaacggctggcatgttgctgaaagatattcgtatctctcacgcttttattggttcatgcacaaatggtcgcattgaggatttgcgtgccgttgcgaaggtgcttgaagggcgcaaaatcgccagccatgttcgcgggatcattgtgcctggttcaacaatggtaagacgccaggcggaagaagaaggactggcgaaaatctttattgctgccggttttgaatggcggcagtcgggttgctcaatgtgccttgcgatgaatgaagatgtattgtcgcccggcgatcgctgtgcatcaggtacgaatcgtaacttccttggacgacagggcgctggagcaagaacgcatttgatgagcccggcgatggttgcggcggcggcggtagcggggcatctggtcgatgttcggtcattacttcaggcaggggaataa

SEQ ID NO: 148289 - protein, 473 aa, Salmonella choleraesuis
MSAKTLYEKLVESHTIRELDNEGHVLLYIDRSILNEYTSPQAFSGLRERGRAVRHPDTFLLNIDHVNPTRSQRDVLMTDPGGQLQVDYFRENAADFGITLFDVLDPRQGIEHVVAHEQGLVMPGMVIAAGDSHTTTYGAFGALGFGIGTSEIEHLLATQTLVYRKLKTMRVSVQGELPFACSAKDIVLELLERIGADGATGYAIEFVGEAISALSVEGRMTLCNMAVEAGARGAIIAPDKKVFDYIYGKPQMPVGELWQQALLEWSQLSSDADAVFDKTVAINCHDLEPKVTWGISPDQTGSITGRVPFPEQETNPLKRLALEKALHYMGLTAGMLLKDIRISHAFIGSCTNGRIEDLRAVAKVLEGRKIASHVRGIIVPGSTMVRRQAEEEGLAKIFIAAGFEWRQSGCSMCLAMNEDVLSPGDRCASGTNRNFLGRQGAGARTHLMSPAMVAAAAVAGHLVDVRSLLQAGE

SEQ ID NO: 148290 - DNA, 1422 bp, Salmonella typhimurium; identical to SEQ ID NO: 103207
  CDS (1)..(1422): transl_table=11

SEQ ID NO: 148291 - protein, 473 aa, Salmonella typhimurium; identical to SEQ ID NO: 103208

SEQ ID NO: 148292 - DNA, 1434 bp, Acinetobacter sp; identical to SEQ ID NO: 103211
  CDS (1)..(1434): transl_table=11

SEQ ID NO: 148293 - protein, 477 aa, Acinetobacter sp; identical to SEQ ID NO: 103212

SEQ ID NO: 148294 - DNA, 1458 bp, Actinoplanes teichomyceticus; identical to SEQ ID NO: 103213
  CDS (1)..(1458): transl_table=11

SEQ ID NO: 148295 - protein, 485 aa, Actinoplanes teichomyceticus; identical to SEQ ID NO: 103214

SEQ ID NO: 148296 - DNA, 1410 bp, Agrobacterium tumefaciens; identical to SEQ ID NO: 103215
  CDS (1)..(1410): transl_table=11

SEQ ID NO: 148297 - protein, 469 aa, Agrobacterium tumefaciens; identical to SEQ ID NO: 103216

SEQ ID NO: 148298 - DNA, 1404 bp, Anabaena sp
  CDS (1)..(1404): transl_table=11
atgagcaaaggcaccctgtttgataaagtttgggacttacacactgttggtacacttccttcagggctaacacagctatttattggactgcacctagtccatgaagtcactagtccacaagcctttgctatgttacgggaacgaggtttaaaggtactatttcctgagaggactgtggctacagtggatcacattgtacctacagagaatcaggcgcgtccctttgtcgatcgcttggctgaggaaatgatccaagcgctagagcagaattgtcaagaaaataacattactttttataacattggttccggtaaccaaggtatagtccacgtcatagcgccagaactgggactgacacagccgggaatgaccatcgcctgtggtgatagccacacttctagtcatggggcgtttggggcgatcgcttttggtattggtactagccaagtgcgggatgttctcgcctcccaaaccctatccctgtctaaactcaaagtccgtaaaattgaagttaacggcgcactcaaccctggggtttatgccaaagatgtcatcctgcatatcatccgtaccctgggagtgaaaggtggtgtaggttacgcctacgaatacgcaggtacgacctttgagcaaatgaacatggaagaacggatgactgtctgcaatatggctattgagggtggtgctagatgcggttatgtcaatcctgatcaagttacctacgattatctccaaggtagagactttgccccccaaggtgctgattgggaaaaagccgtgacttggtgggaatcgatcaagagtgatgctgatgctgaatacgatgatgtgatagtattcaacgctgcggatatccccccgaccgttacttggggaattacccctggtcagggtattggtgtcaatcagttgattcctcagccagaagaactattagaagaagaccgctttgtagctgaagaagcataccgttacatggatctatatcctggtcaaccgattaagggaacgaaaattgatgtttgctttatcggtagctgcacaaacggacgactcaccgacctgcaagaagcggcaaaaattgccaaaggtcgccgtgtggccgcaggagttaaggcttttgtggttcctggttccgaacgagtgaaaaaagctgccgaagctgaaggtttagataaaatctttgaggccgcaggctttgaatggcgggaacccggatgttctatgtgtttggccatgaaccccgacaaattagaagggagacaaattagcgcttcttcctccaaccgcaactttaaaggacgacaaggatcagcttccggtcgtactttgttaatgagtccggcgatggttgccactgcggcgattcagggggaagttgcggacgtgcgggagttgttgtag

SEQ ID NO: 148299 - protein, 467 aa, Anabaena sp
MSKGTLFDKVWDLHTVGTLPSGLTQLFIGLHLVHEVTSPQAFAMLRERGLKVLFPERTVATVDHIVPTENQARPFVDRLAEEMIQALEQNCQENNITFYNIGSGNQGIVHVIAPELGLTQPGMTIACGDSHTSSHGAFGAIAFGIGTSQVRDVLASQTLSLSKLKVRKIEVNGALNPGVYAKDVILHIIRTLGVKGGVGYAYEYAGTTFEQMNMEERMTVCNMAIEGGARCGYVNPDQVTYDYLQGRDFAPQGADWEKAVTWWESIKSDADAEYDDVIVFNAADIPPTVTWGITPGQGIGVNQLIPQPEELLEEDRFVAEEAYRYMDLYPGQPIKGTKIDVCFIGSCTNGRLTDLQEAAKIAKGRRVAAGVKAFVVPGSERVKKAAEAEGLDKIFEAAGFEWREPGCSMCLAMNPDKLEGRQISASSSNRNFKGRQGSASGRTLLMSPAMVATAAIQGEVADVRELL

SEQ ID NO: 148300 - DNA, 1299 bp, Aquifex aeolicus; identical to SEQ ID NO: 103217
  CDS (1)..(1299): transl_table=11

SEQ ID NO: 148301 - protein, 432 aa, Aquifex aeolicus; identical to SEQ ID NO: 103218

SEQ ID NO: 148302 - DNA, 2331 bp, Ashbya gossypii; identical to SEQ ID NO: 103219
  CDS (1)..(2331)

SEQ ID NO: 148303 - protein, 776 aa, Ashbya gossypii; identical to SEQ ID NO: 103220

SEQ ID NO: 148304 - DNA, 1410 bp, Azoarcus sp; identical to SEQ ID NO: 103221
  CDS (1)..(1410): transl_table=11

SEQ ID NO: 148305 - protein, 469 aa, Azoarcus sp; identical to SEQ ID NO: 103222

SEQ ID NO: 148306 - DNA, 1413 bp, Azotobacter vinelandii; identical to SEQ ID NO: 103223
  CDS (1)..(1413): transl_table=11

SEQ ID NO: 148307 - protein, 470 aa, Azotobacter vinelandii; identical to SEQ ID NO: 103224

SEQ ID NO: 148308 - DNA, 1395 bp, Bacillus anthracis; identical to SEQ ID NO: 103225
  CDS (1)..(1395): transl_table=11

SEQ ID NO: 148309 - protein, 464 aa, Bacillus anthracis; identical to SEQ ID NO: 103226

SEQ ID NO: 148310 - DNA, 1395 bp, Bacillus cereus
  CDS (1)..(1395): transl_table=11
atgggaaaaaggttactagataagctttgggaaagacatgtagttgcgactaatgaaaatggattggatttattatatatcgatctacatcttgttcatgaagtaacgtcaccgcaagcctttgaaggcttgcggcttacaaatcgaacagtccgcagaccagatttaacatttgcaacgatggatcataatattccaacgaaagatgtttggaatattaccgaccgcattgcgaagcagcaactagatacacttcggcaaaactgtaaacaatttcaggtgccattagcggatatcggagatgaagagcaagggatcgttcatgtaataggaccagaacttggactcacacagccaggaaaaacgattgtttgtggtgatagtcatacagcaacacacggtgcttttggcgcactagcgtttggtattggtacgagtgaagtggaacatgtattggcaacgcaaacgttatggcaacgaaagccgaaagcgatgggcattgagttaaaagggaagttaccgcaaggtgtctatgcgaaagatattattttacaccttctttcaaagtacggagtagcagttggaacaggttacgtaatggaattttatggagaggccattcatgctatggatatggaagagaggatgacgctttgcaatatggcaattgaagggggagcaaaggctggcattattgcaccagatgaaaaaacgtttgcttacgtaaaagggcgtaaatatgcaccgaaagactatgaatctattaagaaaaaatggtcagaactttatacagatttagatgcagtttatgatttacatattctagtagatgttacggatttagcgccgtacgttacgtggggaacaaatcctagtatgggtgttcggatcgatgagaaattgccagaaaagcatgatgcaaatgatgaaagagcgttttcttatatgggattgagtcccggacaaagtacgtatgacattccagttcaacatgttttcattggatcttgtacaaattccaggctttctgacttagaaattgctgcatctgtcgtgaaaggtaaaaaagtaaaagaaggtgtgcgagcacttgttgtacctggatctcaaagggtaagagaagcagcgatgcataaaggattacatcgcatatttgaagaagctggatttgaatggagagagcccggatgctcaatgtgtctaggtatgaatccagatcaagtgcctgaaggagaacattgtgcctctacgtccaatcgcaattttgaaggaagacaaggaaagggagcacgaacgcatttagttagcccggcaatggcggcagcggctgcgttatatggtcattttgttgatattagaaaggagagttatgatggagccatttcgtattcataa

SEQ ID NO: 148311 - protein, 464 aa, Bacillus cereus
MGKRLLDKLWERHVVATNENGLDLLYIDLHLVHEVTSPQAFEGLRLTNRTVRRPDLTFATMDHNIPTKDVWNITDRIAKQQLDTLRQNCKQFQVPLADIGDEEQGIVHVIGPELGLTQPGKTIVCGDSHTATHGAFGALAFGIGTSEVEHVLATQTLWQRKPKAMGIELKGKLPQGVYAKDIILHLLSKYGVAVGTGYVMEFYGEAIHAMDMEERMTLCNMAIEGGAKAGIIAPDEKTFAYVKGRKYAPKDYESIKKKWSELYTDLDAVYDLHILVDVTDLAPYVTWGTNPSMGVRIDEKLPEKHDANDERAFSYMGLSPGQSTYDIPVQHVFIGSCTNSRLSDLEIAASVVKGKKVKEGVRALVVPGSQRVREAAMHKGLHRIFEEAGFEWREPGCSMCLGMNPDQVPEGEHCASTSNRNFEGRQGKGARTHLVSPAMAAAAALYGHFVDIRKESYDGAISYS

SEQ ID NO: 148312 - DNA, 1395 bp, Bacillus cereus
  CDS (1)..(1395): transl_table=11
atggggaaaaggttgctagataagctttgggaaaaacacgtagttacgacaaatgaaaatggattagatttattatatatcgatctgcaccttgttcatgaagtaacgtcaccgcaagcctttgaaggcttgcggcttacaaatcgaaaggtacgcagaccagatttaacattcgcaacgatggatcataatattccaacgaaagatgtttggaatattaccgatcgcattgcgaagcagcaactagatacacttcgggaaaattgtaaacaatttcaggtgccgttagcggatattggagatgaagagcaggggatcgttcatgttatcgggccagaacttgggctcacgcagccaggaaaaacaattgtttgtggtgatagtcatacagcgacgcacggtgcgtttggtgcgctagcgtttggtattggtacgagtgaagtggaacatgtattggcaacgcaaacgctgtggcaaagaaaaccgaaagcgatgggaattgaactaaaaggaaaattacagaaaggcgtttacgcaaaagatattattttgcatctcctttcaaagtacggtgtagcagttggaactggatacgtaatggaattttacggagagacgattggggctatggagatggaagagagaatgacgctttgtaatatggcgatcgaaggaggagcaaaagcgggtattatcgcgccagatgaaaaaacatttgcttatgtaaaaggacgtaaatatgcaccgagagactatgaaactttcgagaagaaatggtctgaactttatacagatgcagatgcaatttatgatttacatatttcgatagatgttacagatttagcgccatacgttacgtggggaacaaatccgagtatgggagttcgtattgatgagaaattgccagaaaaacatgatgtaaatgacgaaagagcattttcttatatgggattaagccctggacaaagtacgtatgatattccagttcagcatgtcttcattggatcttgtacaaattccaggctatctgatttagaaattgctgcagctgttgtgaaagggagaaaggtaaaagaaggtgtgcgagcactcgttgtacctggatcgaaaagagtaagggacgcggcgatgcaaaaaggactacatcacatatttgaagaagcaggatttgaatggagagaacctggatgttccatgtgtcttggaatgaatccagatcaagtacctgaaggagagcattgcgcttcaacttcaaatcgtaattttgaaggaagacaaggaaaaggagcacgaacgcatttagttagcccagcaatggcggcagcagctgcgttatatggtcattttgttgatacaagaaaggagagttatgatggagccatttcgtattcataa

SEQ ID NO: 148313 - protein, 464 aa, Bacillus cereus
MGKRLLDKLWEKHVVTTNENGLDLLYIDLHLVHEVTSPQAFEGLRLTNRKVRRPDLTFATMDHNIPTKDVWNITDRIAKQQLDTLRENCKQFQVPLADIGDEEQGIVHVIGPELGLTQPGKTIVCGDSHTATHGAFGALAFGIGTSEVEHVLATQTLWQRKPKAMGIELKGKLQKGVYAKDIILHLLSKYGVAVGTGYVMEFYGETIGAMEMEERMTLCNMAIEGGAKAGIIAPDEKTFAYVKGRKYAPRDYETFEKKWSELYTDADAIYDLHISIDVTDLAPYVTWGTNPSMGVRIDEKLPEKHDVNDERAFSYMGLSPGQSTYDIPVQHVFIGSCTNSRLSDLEIAAAVVKGRKVKEGVRALVVPGSKRVRDAAMQKGLHHIFEEAGFEWREPGCSMCLGMNPDQVPEGEHCASTSNRNFEGRQGKGARTHLVSPAMAAAAALYGHFVDTRKESYDGAISYS

SEQ ID NO: 148314 - DNA, 1395 bp, Bacteroides fragilis; identical to SEQ ID NO: 103227
  CDS (1)..(1395): transl_table=11

SEQ ID NO: 148315 - protein, 464 aa, Bacteroides fragilis; identical to SEQ ID NO: 103228

SEQ ID NO: 148316 - DNA, 1419 bp, Bacillus halodurans; identical to SEQ ID NO: 103229
  CDS (1)..(1419): transl_table=11

SEQ ID NO: 148317 - protein, 472 aa, Bacillus halodurans; identical to SEQ ID NO: 103230

SEQ ID NO: 148318 - DNA, 1395 bp, Bacillus thuringiensis subsp; identical to SEQ ID NO: 103231
  CDS (1)..(1395): transl_table=11

SEQ ID NO: 148319 - protein, 464 aa, Bacillus thuringiensis subsp; identical to SEQ ID NO: 103232

SEQ ID NO: 148320 - DNA, 1419 bp, Bacillus subtilis; identical to SEQ ID NO: 103235
  CDS (1)..(1419): transl_table=11

SEQ ID NO: 148321 - protein, 472 aa, Bacillus subtilis; identical to SEQ ID NO: 103236

SEQ ID NO: 148322 - DNA, 1395 bp, Bacteroides thetaiotaomicron
  CDS (1)..(1395): transl_table=11
atgaatacattatttgataaaatatgggatgcccacgtggtgactacggtggaagatgggccgacacaactttatattgatcgtttatattgtcatgaagtgaccagtccgcaggcttttgccggattgcgcgagcgtggcatcaaggtattgcgtccggaaaaggtattctgtatgcccgatcacaatactccgacacatgatcaggataaaccgattgaagacccgatctccaagactcaggtggatacactgacgaaaaatgcgaaagatttcggtctgacacatttcggtatgatgcatcctaaaaacggaattatccatgtggtaggtccggaacgtgcactgacactgccgggcatgacgattgtttgcggtgactcgcatacttctactcacggtgcaatgggagctatcgctttcggcatcggtaccagtgaagtggaaatggtactggcttcacaatgtatccttcagtcaagaccgaaaacaatgcgaattaccgtagatggcgaactgggtaaaggagtgactgcgaaagatgtcgctctgtacatgatgtctaagatgactaccagcggagctaccggttacttcgtggaatatgcaggttcggccatccgcaatctgactatggaaggacgtcttactctttgtaatctgtccattgaaatgggagcacgtggtggtatggttgctccggatgaagtgactttcgaatatatcaaaggacgtgagaatgctccgcagggggaagcatgggatcaggctatggaatactggaaaacgctgaagagcgatgatgacgccgtattcgatcaggaggtccgttttgatgcagcggatatcgagccgatgattacgtacggaaccaatccgggcatgggaatgggaattacgcaaaacattcctactacggaaggaatgggagaggctgcacaggtttctttcaaaaaatcgatggaatatatgggattccagccgggtgaatcgttactgggtaaaaagattgattacgtatttctgggtgcttgtactaatggccgtattgaggacttccgcgcattcgcttctctagtgaagggacgcaggaaagcggataatgtaatcgcatggctggttccgggatcatggatggttgatgcacagattcgtaaggaaggaattgacaagatattgactgaagcgggatttgcaatccgtcagccgggatgttcagcatgccttgcgatgaatgatgacaagattcctgcaggaaaatattcagtatcaaccagtaaccgtaactttgaaggtcgtcagggaccgggagcccgtactttactggccagcccgttggttgctgctgccgctgcggtgacaggagtgattaccgacccgcgtgagctgatgtaa

SEQ ID NO: 148323 - protein, 464 aa, Bacteroides thetaiotaomicron
MNTLFDKIWDAHVVTTVEDGPTQLYIDRLYCHEVTSPQAFAGLRERGIKVLRPEKVFCMPDHNTPTHDQDKPIEDPISKTQVDTLTKNAKDFGLTHFGMMHPKNGIIHVVGPERALTLPGMTIVCGDSHTSTHGAMGAIAFGIGTSEVEMVLASQCILQSRPKTMRITVDGELGKGVTAKDVALYMMSKMTTSGATGYFVEYAGSAIRNLTMEGRLTLCNLSIEMGARGGMVAPDEVTFEYIKGRENAPQGEAWDQAMEYWKTLKSDDDAVFDQEVRFDAADIEPMITYGTNPGMGMGITQNIPTTEGMGEAAQVSFKKSMEYMGFQPGESLLGKKIDYVFLGACTNGRIEDFRAFASLVKGRRKADNVIAWLVPGSWMVDAQIRKEGIDKILTEAGFAIRQPGCSACLAMNDDKIPAGKYSVSTSNRNFEGRQGPGARTLLASPLVAAAAAVTGVITDPRELM

SEQ ID NO: 148324 - DNA, 1404 bp, Bifidobacterium longum; identical to SEQ ID NO: 103237
  CDS (1)..(1404): transl_table=11

SEQ ID NO: 148325 - protein, 467 aa, Bifidobacterium longum; identical to SEQ ID NO: 103238

SEQ ID NO: 148326 - DNA, 1434 bp, Bordetella bronchiseptica; identical to SEQ ID NO: 102977
  CDS (31)..(1434): transl_table=11

SEQ ID NO: 148327 - protein, 467 aa, Bordetella bronchiseptica
MAQTLYDKLWDAHVVHQESDGTCLLYIDRHLLHEVTSPQAFEGLALAGRQPWRVGANLAVADHNVPTLNRAQGIEDPISRLQVDTLDDNCAKYGITEFRMNDLRQGIVHVIGPEQGATLPGMTVVCGDSHTSTHGALGALAFGIGTSEVEHVLATQTLLMKKAKSMQINVEGELPFGCTAKDVVLHIIGIIGTAGGTGHAIEFSGSTIRGLSVEGRMTVCNMAIEAGARSGMVAVDDKTIDYFRGRPFAPVGVLWDQAVGYWRTLHSDAGARFDRVINVDARDIKPQVTWGTSPEMVLPVDGRVPDPDREKDDVRRSGMERALEYMGLKPNTPLVDIRVDRVFIGSCTNSRIEDLRAAAVVARGKRVAANVRQAMVVPGSGLVKQQAEREGLDKIFIEAGFEWREPGCSMCLAMNADRLEPGERCASTSNRNFEGRQGQGGRTHLVSPAMAAAAAVAGHFVDVRSFR

SEQ ID NO: 148328 - DNA, 1404 bp, Bordetella pertussis; identical to SEQ ID NO: 103241
  CDS (1)..(1404): transl_table=11

SEQ ID NO: 148329 - protein, 467 aa, Bordetella pertussis; identical to SEQ ID NO: 103242

SEQ ID NO: 148330 - DNA, 1410 bp, Brucella melitensis; identical to SEQ ID NO: 103243
  CDS (1)..(1410): transl_table=11

SEQ ID NO: 148331 - protein, 469 aa, Brucella melitensis; identical to SEQ ID NO: 103244

SEQ ID NO: 148332 - DNA, 1410 bp, Buchnera aphidicola subsp
  CDS (1)..(1410): transl_table=11
atgaaaaaaactttatatgaaaaaatatatgatgcacatattgtgcatgaagaaaagaacaatatatcaattttatatatagatttacatttacttcatgaagtaacatcacctcaagcttttgattcactacgaatgagaaatcgttctgttagacaacctaaaaaaacttttgctacgatggatcataatgtttctacagaaagtaaagatattaatgcatcaggatctatggctaaaatacaaatgcagcaattgataaaaaattgtgaagaattcaatatagccttatatgatttaaataatcccaaacagggcatagttcatgttataggtccagaacagggtctgacattacccggtagtactatagtttgtggcgattctcatacctctactcatggcgcatttggtgctttatcttttggaattggtacttctgaagttgaacatgttctcgtaacacaaacgttaaaacaacaacgttttaaaaatatgaagattaaaatcgtaggaaaggttaaaaaatttattactgctaaggatattatactgtttattataggaaagctaggtacctcttctggttctggctatgtaattgagttttgtggcgatgttattaaaaaaatgaatatggaagaacgaatgacaatttgtaacatggcaattgaaatgggtgctaagtctgctttaattgcgccagatgaaactacatatttatatttgaaaaataaacgttattcacctaagaataaatattgggacagtgctataagatattggaaaacattagtaacagatgaaaatgctttatttgataaagaatttacctttgatatatctgatatttctcctcaagtgacttgggggacaagtcctgatcaagtcttatcaattaatgaaaaaatacctgattttaattcttttaaagattctataaaaaaagatttagctcgttctgcatgtaattatatggatttaaagccaggttcatatttaaaaaatattaaaattgataaggtatttattggttcttgtactaattctcgtatagaagatttaagatctgcagcaacaatattaaaaaataaaaaaatttcaaaaaatattaaagcaattgttgtacctggttctggttcggtaaaaaatcaagctgaaaaagaaggtttagataaaattttcattgatgcaggatttgagtggagattgccaggttgttctatgtgtttaggtatgaataatgataaattaagtgatggggaacgttgtgcatctactagcaaccgaaattttgaaggacgtcagggcaggggggggagaacccatctagttagtcctattatggctgctgcagctatatatggtcattttgttgatgttagaaatttaaatagtgagactaattaa

SEQ ID NO: 148333 - protein, 469 aa, Buchnera aphidicola subsp
MKKTLYEKIYDAHIVHEEKNNISILYIDLHLLHEVTSPQAFDSLRMRNRSVRQPKKTFATMDHNVSTESKDINASGSMAKIQMQQLIKNCEEFNIALYDLNNPKQGIVHVIGPEQGLTLPGSTIVCGDSHTSTHGAFGALSFGIGTSEVEHVLVTQTLKQQRFKNMKIKIVGKVKKFITAKDIILFIIGKLGTSSGSGYVIEFCGDVIKKMNMEERMTICNMAIEMGAKSALIAPDETTYLYLKNKRYSPKNKYWDSAIRYWKTLVTDENALFDKEFTFDISDISPQVTWGTSPDQVLSINEKIPDFNSFKDSIKKDLARSACNYMDLKPGSYLKNIKIDKVFIGSCTNSRIEDLRSAATILKNKKISKNIKAIVVPGSGSVKNQAEKEGLDKIFIDAGFEWRLPGCSMCLGMNNDKLSDGERCASTSNRNFEGRQGRGGRTHLVSPIMAAAAIYGHFVDVRNLNSETN

SEQ ID NO: 148334 - DNA, 1398 bp, Buchnera aphidicola subsp
  CDS (1)..(1398)
  misc_feature (109)..(109): y is t or c
atgggaaaaactttatatcacaaattatataattcacatatagtatatgaacaaaataatgtaacatcaattttatatattgatttacatttaattcatgaagttactycccctcaagcatttaattcactccgtttaaaaaatagaaaaattagacaacctaaaaaaacttttgcaacaatggatcataatgtacctacccataatcgagatattaaaaactctgaatatatggctaaaatacaaatggaagaattatctaaaaattgtaaagattttaatattaaattatatgatattaatcatcctcatcaaggtatagtacatgttttaggtcctgaaaaaggtatgacattacctggtatggtaattgtatgtggagattctcatacttccactcatggagcttttggtgctttagctttcggaattggaacttcagaagtagaacatgttcttgcaacacaaacattgcaacaaaatcgtttaaaaacgatgaatattgaaattactggtaatattaatcctatggtttttgctaaagatattattttatcaataataagaaaacttagtacttccggaggaataggttatgtaatagaattttctggtagtgtcatttcacaattaagtatggaatctcgtatgactatatgtaatatgtctattgaaatgggtgcaaaatcaggattaatagcacctgatataatcacatataattatttaaaaaataaatcttatagtccaaaaaataaatattggaataatgcaataaattactggaatactttaaaatcagataaaaatgctttttttgataaaaaaatttctataaatatatctaatttagcacctcaaattacatggggtacaaaaccagatcaagttatatctatagatgaaccaattcctaatatagattcattaaaaatgtttctcaacaagaatcagctaaaaaatcctttattatatatgggtttaaaaccaggtgaatacttaaataatcttgttgttgataaagtatttattggttcatgcactaattcaagaactgaagatttacgagcagctgcgaatattgttcaaaatacacatgttgctaaaaatgtacatgctatagtggtaccagggtcaggaatggtaaaattacaagctgaagaagaaggattagataaaatatttattaacgcaggttttgaatggcgtttacctggttgttccatgtgtttaggaatgaatttagaccgtttaaaacctaaagaacgttgtgcttctactagtaatagaaattttgaaggaagacaaggcagagatggaagaacacatttggttagtcctgcaatggctgctgctgctgctatttttggtcattttgtagatattagaaaaatttaa

SEQ ID NO: 148335 - protein, 465 aa, Buchnera aphidicola subsp
  misc_feature (37)..(37): The Xaa at location 37 stands for Pro, or Ser.
MGKTLYHKLYNSHIVYEQNNVTSILYIDLHLIHEVTXPQAFNSLRLKNRKIRQPKKTFATMDHNVPTHNRDIKNSEYMAKIQMEELSKNCKDFNIKLYDINHPHQGIVHVLGPEKGMTLPGMVIVCGDSHTSTHGAFGALAFGIGTSEVEHVLATQTLQQNRLKTMNIEITGNINPMVFAKDIILSIIRKLSTSGGIGYVIEFSGSVISQLSMESRMTICNMSIEMGAKSGLIAPDIITYNYLKNKSYSPKNKYWNNAINYWNTLKSDKNAFFDKKISINISNLAPQITWGTKPDQVISIDEPIPNIDSLKMFLNKNQLKNPLLYMGLKPGEYLNNLVVDKVFIGSCTNSRTEDLRAAANIVQNTHVAKNVHAIVVPGSGMVKLQAEEEGLDKIFINAGFEWRLPGCSMCLGMNLDRLKPKERCASTSNRNFEGRQGRDGRTHLVSPAMAAAAAIFGHFVDIRKI

SEQ ID NO: 148336 - DNA, 1416 bp, Buchnera aphidicola subsp; identical to SEQ ID NO: 103245
  CDS (1)..(1416): transl_table=11

SEQ ID NO: 148337 - protein, 471 aa, Buchnera aphidicola subsp; identical to SEQ ID NO: 103246

SEQ ID NO: 148338 - DNA, 1401 bp, Buchnera aphidicola subsp
  CDS (1)..(1401): transl_table=11
atgggacaaactctttacgaaaaattatataattctcatattatttatgaagacaaaaatacattaccaattatatatatagaccttcatttattacatgaagtaacttctcctcaagcatttgagtcattaaaaaataaaaaaagaatagtgcatgcccccataaaaacatttgctactatggatcacaacgtttctaccaaaacaaataaaattagcgcttcaggtaaagcagctcaaattcaaatgcaacaattgattaataattgtaaagattttaacattaaattatatgatttaaatcatattaatcaaggtatagtccatgtaatgggacctgaacaaggtttaacgctacccggtatgactatagtatgtggagattcgcatacatcaactcatggtgcatttggaactcttgcttttgggataggaacatcagaagtagagcatgttttagctacccagacattaaaacaagctcgttctaaaacaatgaaaattggaatcaacgggattctaaaaccctatattacagcaaaggatgttattctttatattataaagaaagtaggaactgcatttggcaccggatatgttgttgaattttcaggagaaacaatagaaaatttaacaatggaaggaagaatgactatatgtaatatggttatagaaatgggggcaaaatcaggaattatagcacctgatgcaactacatataaatatttaaaaaacttaccgtacgctcctaaaaaagaaaagtggaaaaacgcattagaatattggaaaaatttaaaaaccgataatgatgccaaatttgataaaatagtaaaatttgatgtatctcaaatagaaccgcaaataacttgggggacaaatccaagtcaaacaataaatattacagaatctaatcctgatccaaaaaaaataaataatataatagataaacaagctactgaaaaagctttaaaatatatgaatttaaaacctaatcaaaaaatgattaatttagttgttgataaagtattcatcggttcttgcactaattctagaattgaagatttaagaatcgcatcgaaaataataaaaaataaaaaagtagcaaaaacaacaaaagcaatagttgtccctggatcaaaattagtaaaaattcaagcagaaaaagaaggtctagataaaatttttataaatgcaggatttgaatggagattacctggatgttctatgtgtctagctatgaatgatgataaactaaatagaggagaaaggtgtgcttctacaagtaatagaaattttgaagatagacaaggaagaggtggcagaactcatttagtgagccctattactgcagcagcagcagcaatttttggttactttgttgatattaaaaatatattataa

SEQ ID NO: 148339 - protein, 466 aa, Buchnera aphidicola subsp
MGQTLYEKLYNSHIIYEDKNTLPIIYIDLHLLHEVTSPQAFESLKNKKRIVHAPIKTFATMDHNVSTKTNKISASGKAAQIQMQQLINNCKDFNIKLYDLNHINQGIVHVMGPEQGLTLPGMTIVCGDSHTSTHGAFGTLAFGIGTSEVEHVLATQTLKQARSKTMKIGINGILKPYITAKDVILYIIKKVGTAFGTGYVVEFSGETIENLTMEGRMTICNMVIEMGAKSGIIAPDATTYKYLKNLPYAPKKEKWKNALEYWKNLKTDNDAKFDKIVKFDVSQIEPQITWGTNPSQTINITESNPDPKKINNIIDKQATEKALKYMNLKPNQKMINLVVDKVFIGSCTNSRIEDLRIASKIIKNKKVAKTTKAIVVPGSKLVKIQAEKEGLDKIFINAGFEWRLPGCSMCLAMNDDKLNRGERCASTSNRNFEDRQGRGGRTHLVSPITAAAAAIFGYFVDIKNIL

SEQ ID NO: 148340 - DNA, 1410 bp, Burkholderia mallei; identical to SEQ ID NO: 103247
  CDS (1)..(1410): transl_table=11

SEQ ID NO: 148341 - protein, 469 aa, Burkholderia mallei; identical to SEQ ID NO: 103248

SEQ ID NO: 148342 - DNA, 1410 bp, Burkholderia pseudomallei; identical to SEQ ID NO: 103249
  CDS (1)..(1410): transl_table=11

SEQ ID NO: 148343 - protein, 469 aa, Burkholderia pseudomallei; identical to SEQ ID NO: 103250

SEQ ID NO: 148344 - DNA, 1413 bp, Campylobacter jejuni; identical to SEQ ID NO: 103251
  CDS (1)..(1413): transl_table=11

SEQ ID NO: 148345 - protein, 470 aa, Campylobacter jejuni; identical to SEQ ID NO: 103252

SEQ ID NO: 148346 - DNA, 1407 bp, Campylobacter jejuni
  CDS (1)..(1407): transl_table=11
atggctaaaactttatatgagaaagtctttgatgctcatgtggtttatgaaggcaaaaacgaacttcctatactttatatcgatagacatttaatccatgaagtaacaagccctcaagcattttcagggcttaaaatggctaagcgtagaatggcaagagcggatttaactttggctaccatagatcatgatgtttcaactaaaagcgtggatttaaatgcttgttctgatatggcaaaagagcaaattacaactttgatgcaaaatactaaggaatttggagtaaggcttttaggacttggagataaaaatcaaggcatagttcatatagtaggtcctgagcttggctttactttacctggggttactttagtttgtggggattctcatacggcaacacatggggcttttggagctttagcctttggtataggcacgagtgaagtagagcatgtcatggcaacgcaaactttaaaacaagccaaacttaaaactatgaaaatcgaatgtaaagggcagtttcaaaaaggcgtttatactaaggatttgattttgtatttgatcgcacaatacggcacagcaaaaggcacaggctatgctatagaattttgcggagaacttataagaaatctaagcatggaagctagaatgactctttgtaatatggctatagaatttggagcgaaagtaggtatgatagctcctgatgagatcacttttgagtatattaagggaaaggaatttgcacctaaaggagaagaatttcaaaagtattgtgagtattggaagagtttaagaagtgatgaaggagcaaaatatgatgcgagtattactctagatgtaagcaagataaaaccacaaattagctatggaacaaatccttcgcaagtgattggcatagatgaaaaaattccaaaaataagtgattttaaaaatcaaagcgagcaaaaatctttgcttgatgctttatattatgtaaatttagagcaagatcaagttatagaaggggtaaaaatcgacattgtatttataggatcttgcacaaatgggcgtttagaagatcttaaaatagctgctgatatcttaaaagggcgcaaaattcataaaaatgttaaagctttaatcgtgcctggttcaatgcaagtaagaaaagaagctgaaaatttaggacttgataagatttttatcgaggcagggtgtgagtggagatatgcagggtgttctatgtgtcttggtatgaatgatgacaaagcaaattcaggtcaaagagttgcttcaacttcaaatcgtaactttgtaggcagacaaggtaaaggttctatcactcatttgatgagtcctgcaagtgcggcagcttgtgccatagaaggtgttatttgtgataatagaaagtatttaggagtttaa

SEQ ID NO: 148347 - protein, 468 aa, Campylobacter jejuni
MAKTLYEKVFDAHVVYEGKNELPILYIDRHLIHEVTSPQAFSGLKMAKRRMARADLTLATIDHDVSTKSVDLNACSDMAKEQITTLMQNTKEFGVRLLGLGDKNQGIVHIVGPELGFTLPGVTLVCGDSHTATHGAFGALAFGIGTSEVEHVMATQTLKQAKLKTMKIECKGQFQKGVYTKDLILYLIAQYGTAKGTGYAIEFCGELIRNLSMEARMTLCNMAIEFGAKVGMIAPDEITFEYIKGKEFAPKGEEFQKYCEYWKSLRSDEGAKYDASITLDVSKIKPQISYGTNPSQVIGIDEKIPKISDFKNQSEQKSLLDALYYVNLEQDQVIEGVKIDIVFIGSCTNGRLEDLKIAADILKGRKIHKNVKALIVPGSMQVRKEAENLGLDKIFIEAGCEWRYAGCSMCLGMNDDKANSGQRVASTSNRNFVGRQGKGSITHLMSPASAAACAIEGVICDNRKYLGV

SEQ ID NO: 148348 - DNA, 2313 bp, Candida maltosa; identical to SEQ ID NO: 103253
  CDS (1)..(2313)

SEQ ID NO: 148349 - protein, 770 aa, Candida maltosa; identical to SEQ ID NO: 103254

SEQ ID NO: 148350 - DNA, 1440 bp, Caulobacter crescentus; identical to SEQ ID NO: 103255
  CDS (1)..(1440): transl_table=11

SEQ ID NO: 148351 - protein, 479 aa, Caulobacter crescentus; identical to SEQ ID NO: 103256

SEQ ID NO: 148352 - DNA, 1416 bp, Chromobacterium violaceum; identical to SEQ ID NO: 103257
  CDS (1)..(1416): transl_table=11

SEQ ID NO: 148353 - protein, 471 aa, Chromobacterium violaceum; identical to SEQ ID NO: 103258

SEQ ID NO: 148354 - DNA, 1416 bp, Colwellia psychrerythraea
  CDS (1)..(1416): transl_table=11
atgacaacttctaccccgcaaaccatgtatgaaaaattatggcaaacccacttagttgaagcaacgaagggggaaacaccattactgtatgttgaccgtcatctaattcatgaagtgacctcaccacaagcttttgcaaatttacgttttcataaccgcccagttcgtcatcctgaacgtactattgcgaccatggatcataatatttcaacgcgttcgattaaaattgatgccgctggtgaaggcgctgccaaccaattacgcgcattagcaataaactgtaaagactttggtatcgaactttttgacatgggtcataaaaaccagggtatagcacatgttattgggcctgaactagggttgacattgccaggtactattattgtttgtggtgactcacataccgctactcatggcgcttttggtgctcttgcttttggtattggtacctctgaagtagaacatgtttttgcaacgcagactttacgtcaaaacaaagcaaaaacaatgaagattgaagttaaaggccatgtcggtgccggtattagtgcaaaagatattatcttagctattatcgggaaaaccggtagtgctggtgcaacaggttatgtggttgagtactgtggcgaagctatcgaagcgctaagtatggaagagcgcatgacggtttgtaacatgagtatcgaatttggcgcaaaagcaggtttaatagcaccggatcaaactacctttgattatgttgaaggtaaagagtacgcaccaaaaggtgaagtatttgaacaagcagttgttgattggaaaaacctaaaatctgatgctgatgcacaatttgatgcggtattaacgttagatgccaaagacattaaggcgcaagttacttggggtacaaatccagggcaagttatcagtgtcgacggtactgtgccttctccagaagactttagtgacccggttgaaaaagagtcttgtgttagtgcgcttaactatatgggcttaactgcaggcaccaagatgactgatattcatgtgaataaggtgtttattggttcttgtactaactcacgtattgaagatttacgtgccgctgccggtgttgttcaaaaatatgaaggtcagcaagtagtcaaaactattgatgccatcatagttcctggttcatatcgcgttaaagagcaggctgaaagtgaaggtttagacaaaatattcaccgatgcaggttttgaatggcgtttacctggttgctcaatgtgtttgggcatgaatgacgatgtccttgaagaaggtgaccgttgtgcatcaaccagtaaccgtaactttgaaggtcgtcaaggccgtggtagtcgtactcacttagttagccctgaaatggcagccgctgcagctattactggtcacttcgttgatttaaacgcctaa

SEQ ID NO: 148355 - protein, 471 aa, Colwellia psychrerythraea
MTTSTPQTMYEKLWQTHLVEATKGETPLLYVDRHLIHEVTSPQAFANLRFHNRPVRHPERTIATMDHNISTRSIKIDAAGEGAANQLRALAINCKDFGIELFDMGHKNQGIAHVIGPELGLTLPGTIIVCGDSHTATHGAFGALAFGIGTSEVEHVFATQTLRQNKAKTMKIEVKGHVGAGISAKDIILAIIGKTGSAGATGYVVEYCGEAIEALSMEERMTVCNMSIEFGAKAGLIAPDQTTFDYVEGKEYAPKGEVFEQAVVDWKNLKSDADAQFDAVLTLDAKDIKAQVTWGTNPGQVISVDGTVPSPEDFSDPVEKESCVSALNYMGLTAGTKMTDIHVNKVFIGSCTNSRIEDLRAAAGVVQKYEGQQVVKTIDAIIVPGSYRVKEQAESEGLDKIFTDAGFEWRLPGCSMCLGMNDDVLEEGDRCASTSNRNFEGRQGRGSRTHLVSPEMAAAAAITGHFVDLNA

SEQ ID NO: 148356 - DNA, 1443 bp, Corynebacterium diphtheriae
  CDS (1)..(1443): transl_table=11
atgaccagccccatgacatcgaaggattcaaaactcacgctcgctgaaaaagtctggcgtgaccacgtcgtttctcaaggagaaggcgaccaaccagatcttatcttcattgaccttcaattactgcatgaagtcacctcacctcaggctttcgacggtctgcgcatggccggacgtacactgcgacacccagaactgcacctagccaccgaagaccacaacgttcccaccgagggaatccacaacggctccctgctagaaatcaacgaccttgtctcacgcacccaggtagaaaccctgcggaaaaactgcgaagaatttggagtgcgcctccacgccatgggcgataaaaaacaaggcatcgtgcaccaggtaggcccacaattaggtgccacccagccaggcatgaccatcgtgtgcggcgactcgcacacctccacgcacggagccttcggtgctatggcctttggtatcggaacctctgaggtagaacatgtgatggcaacacaaacgctgtcgctaaaaccatttaagaccatggccattaatgtcaccggcgagctgcaaccaggggtcaccgcaaaagacctcattttggcggtcatcgcaaccatcggcaccggcggcggacaaggccacgtgatcgaataccgcggtgaagcaatcgaaaaactgtccatggaagcgcgcatgacagtctgcaacatgtccatcgaagcaggtgctcgcgccggcatgatcgcccccgacgagaccacattcgactacatcaaaggccgcgaaatggcgcccaccggccaagactgggacgacgccgtggcctactggaagaccctgcccaccgacgaaggagccgaattcgataccgaaatcactatcgacggctccgcgatcacaccatttatcacatggggaacaaacccaggccaaggcctaccgctgtcaagcgtcgtgccctcgccagaggacttcccaggagataacgaaaaagtcgcagccgaaaaagcactcgcctacatgggactaaccccaggaaccccactacgcgacattgccatcgacacagtcttcctcggatcctgcaccaacgcccgcatggatgacctccgcattgcagccgacatcctgcgcggccgaagcatcgccgactccgtgcgcatgatggtcgtcccatcctcaaccatgattaaagagcaagcagaggcagaaggcctagacaagatcttcatcgaagccggcgcacaatggcgtaccgcaggatgctccatgtgtctaggaatgaaccccgatcaactcaccccaggcgagcgctgtgcatccacctcgaaccgcaacttcgaaggccgccaaggcccaggcggacgcacccacttggtatcaccagcagttgccgccgcaaccgcaatcaagggaaccctggcaagccccgccgatctggactaa

SEQ ID NO: 148357 - protein, 480 aa, Corynebacterium diphtheriae
MTSPMTSKDSKLTLAEKVWRDHVVSQGEGDQPDLIFIDLQLLHEVTSPQAFDGLRMAGRTLRHPELHLATEDHNVPTEGIHNGSLLEINDLVSRTQVETLRKNCEEFGVRLHAMGDKKQGIVHQVGPQLGATQPGMTIVCGDSHTSTHGAFGAMAFGIGTSEVEHVMATQTLSLKPFKTMAINVTGELQPGVTAKDLILAVIATIGTGGGQGHVIEYRGEAIEKLSMEARMTVCNMSIEAGARAGMIAPDETTFDYIKGREMAPTGQDWDDAVAYWKTLPTDEGAEFDTEITIDGSAITPFITWGTNPGQGLPLSSVVPSPEDFPGDNEKVAAEKALAYMGLTPGTPLRDIAIDTVFLGSCTNARMDDLRIAADILRGRSIADSVRMMVVPSSTMIKEQAEAEGLDKIFIEAGAQWRTAGCSMCLGMNPDQLTPGERCASTSNRNFEGRQGPGGRTHLVSPAVAAATAIKGTLASPADLD

SEQ ID NO: 148358 - DNA, 1446 bp, Corynebacterium efficiens; identical to SEQ ID NO: 103259
  CDS (1)..(1446): transl_table=11

SEQ ID NO: 148359 - protein, 481 aa, Corynebacterium efficiens; identical to SEQ ID NO: 103260

SEQ ID NO: 148360 - DNA, 1446 bp, Corynebacterium glutamicum; identical to SEQ ID NO: 103261
  CDS (1)..(1446): transl_table=11

SEQ ID NO: 148361 - protein, 481 aa, Corynebacterium glutamicum; identical to SEQ ID NO: 103262

SEQ ID NO: 148362 - DNA, 1407 bp, Dechloromonas aromatica; identical to SEQ ID NO: 103263
  CDS (1)..(1407): transl_table=11

SEQ ID NO: 148363 - protein, 468 aa, Dechloromonas aromatica; identical to SEQ ID NO: 103264

SEQ ID NO: 148364 - DNA, 1401 bp, Escherichia coli O157; identical to SEQ ID NO: 103265
  CDS (1)..(1401): transl_table=11

SEQ ID NO: 148365 - protein, 466 aa, Escherichia coli O157; identical to SEQ ID NO: 103266

SEQ ID NO: 148366 - DNA, 1401 bp, Escherichia coli O6; identical to SEQ ID NO: 103267
  CDS (1)..(1401): transl_table=11

SEQ ID NO: 148367 - protein, 466 aa, Escherichia coli O6; identical to SEQ ID NO: 103268

SEQ ID NO: 148368 - DNA, 1401 bp, Erwinia carotovora subsp; identical to SEQ ID NO: 103269
  CDS (1)..(1401): transl_table=11

SEQ ID NO: 148369 - protein, 466 aa, Erwinia carotovora subsp; identical to SEQ ID NO: 103270

SEQ ID NO: 148370 - DNA, 1416 bp, Geobacillus kaustophilus; identical to SEQ ID NO: 103271
  CDS (1)..(1416): transl_table=11

SEQ ID NO: 148371 - protein, 471 aa, Geobacillus kaustophilus; identical to SEQ ID NO: 103272

SEQ ID NO: 148372 - DNA, 1422 bp, Gloeobacter violaceus; identical to SEQ ID NO: 103273
  CDS (1)..(1422): transl_table=11

SEQ ID NO: 148373 - protein, 473 aa, Gloeobacter violaceus; identical to SEQ ID NO: 103274

SEQ ID NO: 148374 - DNA, 1428 bp, Gluconobacter oxydans; identical to SEQ ID NO: 103275
  CDS (1)..(1428): transl_table=11

SEQ ID NO: 148375 - protein, 475 aa, Gluconobacter oxydans; identical to SEQ ID NO: 103276

SEQ ID NO: 148376 - DNA, 1410 bp, Haemophilus influenzae
  CDS (1)..(1410): transl_table=11
atggcaaaaacactttacgaaaaattatttgattcccacattgtttatgaagcagagggcgaaacgccaattttgtatattaaccgtcatttgattcacgaagtaactagtccgcaggcttttgatgggttacgcgtcgcaaatcgccaagtacgccaagtaaacaaaacttttggcacaatggatcacagcatttctactcaagtacgagacgtcaataaacttgaaggtcaagcgaaaattcaagtgttagaattggataaaaataccaaagcaacaggtattaaattatttgatataacaaccaaagagcaaggcattgtacacgttatggggcctgaacaaggtttaaccttaccgggtatgacaattgtttgtggtgattcacacaccgcaacgcacggtgcatttggtgccttggcttttggtattggtacttctgaagtagaacacgtattagccactcaaactttaaaacaggctcgagcaaaaagtatgaaaattgaagtgcgtggtaaagttgcatcaggtattacggcaaaagatattattcttgccattatcggtaaaaccactatggcaggcggaacaggacacgttgtagaattctgcggcgaagcgatccgagacctttctatggaggggcgtatgactgtatgtaatatggcgattgaaatgggtgcaaaagcaggcttgattgcgccagacgaaaccacatttgcatatttgaaagatcgtccacacgcaccgaaaggcaaagattgggatgatgccgtagcttattggaaaaccttaaaatctgacgatgatgcacaatttgacactgtggtaacgctagaagcaaaagacatcgcaccacaagtcacttgggggacaaacccagggcaggtaatttctgtgaatgaaactataccaaatccgcaagaaatggcagatcctgtacaacgtgcttcggcagaaaaagccttacattatattggcttggaagctggcactaatttaaaagatattaaagttgatcaggtgttcatcggatcttgcaccaactcgcgtattgaagatttacgcgcagcagcggctgtaatgaaaggtcgtaaaaaagcggataatgtaaaacgtattttagtagtaccaggttctggcttagtgaaagaacaagcggaaaaagagggcttggataaaatctttattgccgcaggtgcagaatggcgtaatccaggttgttcaatgtgtttaggaatgaacgacgaccgtttaggcgaatgggaacgttgtgcttccacgtcaaaccgtaactttgaggggcgtcaaggtcgtaatgggcgtacccatttagtaagtcctgcaatggcggcagcagcaggaatgttcggtaaatttgttgatattcgtgaagtggcattaaattaa

SEQ ID NO: 148377 - protein, 469 aa, Haemophilus influenzae
MAKTLYEKLFDSHIVYEAEGETPILYINRHLIHEVTSPQAFDGLRVANRQVRQVNKTFGTMDHSISTQVRDVNKLEGQAKIQVLELDKNTKATGIKLFDITTKEQGIVHVMGPEQGLTLPGMTIVCGDSHTATHGAFGALAFGIGTSEVEHVLATQTLKQARAKSMKIEVRGKVASGITAKDIILAIIGKTTMAGGTGHVVEFCGEAIRDLSMEGRMTVCNMAIEMGAKAGLIAPDETTFAYLKDRPHAPKGKDWDDAVAYWKTLKSDDDAQFDTVVTLEAKDIAPQVTWGTNPGQVISVNETIPNPQEMADPVQRASAEKALHYIGLEAGTNLKDIKVDQVFIGSCTNSRIEDLRAAAAVMKGRKKADNVKRILVVPGSGLVKEQAEKEGLDKIFIAAGAEWRNPGCSMCLGMNDDRLGEWERCASTSNRNFEGRQGRNGRTHLVSPAMAAAAGMFGKFVDIREVALN

SEQ ID NO: 148378 - DNA, 1422 bp, Haloarcula marismortui; identical to SEQ ID NO: 103277
  CDS (1)..(1422): transl_table=11

SEQ ID NO: 148379 - protein, 473 aa, Haloarcula marismortui; identical to SEQ ID NO: 103278

SEQ ID NO: 148380 - DNA, 1509 bp, Halobacterium volcanii; identical to SEQ ID NO: 103279
  CDS (88)..(1509): transl_table=11

SEQ ID NO: 148381 - protein, 473 aa, Halobacterium volcanii; identical to SEQ ID NO: 103280

SEQ ID NO: 148382 - DNA, 1263 bp, Helicobacter hepaticus
  CDS (1)..(1263): transl_table=11
atgggaatgacgatgtcacaaaaaattcttgctgatagagcagggttagaatctgtgcgccctaatgatttaattatggcaaaacttgatatggtgcttggcaatgacattaccacaccggtggcgattaacgctttcaaggaagcaaaatttcaaaaagtttttgacaaagataaaatttcacttgtaatggatcatttcgcacctaataaagatatcaaagcagctacacaaagtgctcaatgccgatgttttgccaaagattttgatatttctcattattatgatgtgggcaatatgggcgtagaacacgcgctcttgccagaacaaggcattgtaactattggagaccttatcattggtgcagattctcatacctgcacttatggggcattaggtgcgttttcaacaggggtaggctctactgatatggctgtgggtatggcaacaggacaagcgtggtttaaagtgccttatgctataaaatttaacctcaagggcaaactgcgtccttatgtcagtggtaaagatgtgattttacatattattggcaaaattggcgttgatggtgcgctgtataaaagtatggaatttggtggagagggattaaaaaatcttaccattgatgataggctttgcattgcaaatatggcaatagaagcaggagcaaaaaatggtatttttgaggttgatgatattacaattagttatgccaaagggcgcacaaagagagattttagaatctacaaagcagatgttgatgcggagtatgagcaagtttttgatattgacttagattctatcaatcacacagtggcatttccacatttgcctgaaaacacaaaagaaaaagatgattggggcgaaatcaaaattgaccaagttgtcattggctcctgcacaaatgggagattaagcgatatggcagtggctgcagagattctaaaggataaaaccattgcaaaaaatacacgctgtattattatccctgctactcaaaatatttacctagagtgcatcaatcgtggatatttagaaacctttatcaaagctggggctgttgtctctacacctacttgcggaccttgtcttggcggacatatggggattttagcggcaaatgaaaaatgtgtctctacgactaatcgtaactttgtaggcagaatgggacatatcacaagtgaagtctatctctcctcgcctgaagtggcagcagcaagtgctgtaagagggattttaagtgcgccacaagatatagcctag

SEQ ID NO: 148383 - protein, 420 aa, Helicobacter hepaticus
MGMTMSQKILADRAGLESVRPNDLIMAKLDMVLGNDITTPVAINAFKEAKFQKVFDKDKISLVMDHFAPNKDIKAATQSAQCRCFAKDFDISHYYDVGNMGVEHALLPEQGIVTIGDLIIGADSHTCTYGALGAFSTGVGSTDMAVGMATGQAWFKVPYAIKFNLKGKLRPYVSGKDVILHIIGKIGVDGALYKSMEFGGEGLKNLTIDDRLCIANMAIEAGAKNGIFEVDDITISYAKGRTKRDFRIYKADVDAEYEQVFDIDLDSINHTVAFPHLPENTKEKDDWGEIKIDQVVIGSCTNGRLSDMAVAAEILKDKTIAKNTRCIIIPATQNIYLECINRGYLETFIKAGAVVSTPTCGPCLGGHMGILAANEKCVSTTNRNFVGRMGHITSEVYLSSPEVAAASAVRGILSAPQDIA

SEQ ID NO: 148384 - DNA, 1461 bp, Leifsonia xyli subsp; identical to SEQ ID NO: 103281
  CDS (1)..(1461): transl_table=11

SEQ ID NO: 148385 - protein, 486 aa, Leifsonia xyli subsp; identical to SEQ ID NO: 103282

SEQ ID NO: 148386 - DNA, 1398 bp, Leptospira interrogans serogroup Icterohaemorrhagiae serovar; identical to SEQ ID NO: 103283
  CDS (1)..(1398): transl_table=11

SEQ ID NO: 148387 - protein, 465 aa, Leptospira interrogans serogroup Icterohaemorrhagiae serovar; identical to SEQ ID NO: 103284

SEQ ID NO: 148388 - DNA, 1389 bp, Listeria monocytogenes serotype 4b; identical to SEQ ID NO: 103287
  CDS (1)..(1389): transl_table=11

SEQ ID NO: 148389 - protein, 462 aa, Listeria monocytogenes serotype 4b; identical to SEQ ID NO: 103288

SEQ ID NO: 148390 - DNA, 1389 bp, Listeria monocytogenes
  CDS (1)..(1389): transl_table=11
atggggaaaacactttttgataaactttggaaccgtcatgtcatttatggcaaagaaggtgaaccgcaattattatacgttgatcttcatttgattcatgaagttacttctcctcaagcgtttgaaggactaagactggaaaatcggccactgcgcagaccagataaaacgttcgcgacaatggatcataacgttccaaccgaagatattttcaacatccaagaccttgttgctaaaaaacaaattgaagcactgcaaaccaactgcgcggaattcggcgtaacgctagctgacatgggcagtgaccgtcaaggaatcgtgcatatggttggaccagaaactggactaacgcaacctggcaaagtgattgtttgtggggattctcatacggcgacacatggtgcttttggagcgattggctttgggattggttctagtgaagtagagcatgtttttgcgactcaaacaatttggcaacaaaagccaaaatcaatgggcattgaaattaacggcaaacttccaaaaggtgtatatgcgaaagatattattttgcatttgattgccacgtatggtgttgcttttggaactggttatgccgtcgagtattatggtgaaactattcgtaatatgtcgatggaagaacggatgacaatttgcaatatggcaattgaaggcggcgcaaaaatgggcatgatggcgccagatgaaactacttttgaatatgtgcgcggtcgtgaatacgctcctactgatatggataaagcaattagcgactggaaaacgctccaaactgactccgatgcagaatacgatcttcatatcaaaatggatgcgagtattttggaaccatatgtcacttggggaacaaatcccgaaatgggtgttcctttttcgaaagcatttccggaaattaaagatatgaactatgagcgtgcttatgaatatatggggctaaaacctggacaaacggcggaacaaatcgagcttggctatgtgtttattggttcttgtacgaatgccaggctttctgacttagaagaagccgctcgtatcgtcaaaggaaataaagtgaaaaataatattcgcgcactcgttgtccctggttcccgccaagttcgtaatgcggcagaatctattggactagataaaatttttatagaagctggttttgaatggcgtgaacctggttgttcgatgtgtctaggaatgaatcctgaccaagtaccggacggcgttcactgtgcctctacttcgaatcgtaattttgaaggacggcaaggtaaaggcgcccgtactcatctcgtttcaccagcaatggctgcggccgcggcaatcaatggacactttatcgatattcgaaaggtggcggttatcagtggaggaaattaa

SEQ ID NO: 148391 - protein, 462 aa, Listeria monocytogenes
MGKTLFDKLWNRHVIYGKEGEPQLLYVDLHLIHEVTSPQAFEGLRLENRPLRRPDKTFATMDHNVPTEDIFNIQDLVAKKQIEALQTNCAEFGVTLADMGSDRQGIVHMVGPETGLTQPGKVIVCGDSHTATHGAFGAIGFGIGSSEVEHVFATQTIWQQKPKSMGIEINGKLPKGVYAKDIILHLIATYGVAFGTGYAVEYYGETIRNMSMEERMTICNMAIEGGAKMGMMAPDETTFEYVRGREYAPTDMDKAISDWKTLQTDSDAEYDLHIKMDASILEPYVTWGTNPEMGVPFSKAFPEIKDMNYERAYEYMGLKPGQTAEQIELGYVFIGSCTNARLSDLEEAARIVKGNKVKNNIRALVVPGSRQVRNAAESIGLDKIFIEAGFEWREPGCSMCLGMNPDQVPDGVHCASTSNRNFEGRQGKGARTHLVSPAMAAAAAINGHFIDIRKVAVISGGN

SEQ ID NO: 148392 - DNA, 1413 bp, Methylococcus capsulatus; identical to SEQ ID NO: 103289
  CDS (1)..(1413): transl_table=11

SEQ ID NO: 148393 - protein, 470 aa, Methylococcus capsulatus; identical to SEQ ID NO: 103290

SEQ ID NO: 148394 - DNA, 1422 bp, Mycobacterium bovis
  CDS (1)..(1422): transl_table=11
atggccttgcagaccggcgagccacgcacactggccgagaagatttgggacgaccacattgtggtatcaggcgggggctgtgcgcccgacttgatctacatcgatctgcatctggtgcatgaggtcaccagcccgcaggcgttcgacggcctgcgcctggccgggcgccgggtgcggcggcccgagctcaccctcgccaccgaggatcacaacgtgcccaccgtcgacatcgaccagccgatcgccgacccggtgtcacgcacccaggtggagacgttgcgccgaaactgcgccgaattcggaatccggctgcattcaatgggcgatatcgagcagggcatcgtgcacgtcgtcggaccgcaattgggtctcacccagccgggaatgacgatcgtctgtggcgatagccacacctcaacccacggcgcattcggcgcgttggcgatgggcatcggtacgtcggaggtcgagcacgtgctggccacccagacgctgccgctgcggccgttcaagaccatggcggtcaacgtcgatgggcggctgcccgacggtgtgtcggccaaggacatcatcctggcgttgatcgccaagatcggcaccggcggcggccaggggcatgtcatcgaataccggggcagcgccatcgaatcgctgtccatggaaggccggatgacgatctgcaacatgagcatcgaagccggcgctcgtgcgggcatggtggctccggacgaaaccacctacgcgttcttgcgtggtcgtccgcacgcacccaccggtgcccagtgggacaccgcactcgtctactggcaacggcttcgcaccgacgtcggcgccgttttcgacaccgaggtgtatctcgacgccgcgtcgttgagcccgtttgtcacctggggcaccaacccaggccaaggggtaccgctggcggccgcggtgccagatccgcaactgatgaccgacgacgccgagcggcaggccgccgagaaagcattggcgtacatggaccttcgacccggaaccgcgatgcgcgaaatcgcggtcgacgccgtgttcgtcgggtcgtgtaccaacggtcgcattgaagatctgcgggtggtcgccgaagtgctgcgtggccgcaaggtggccgacggcgtgcggatgctgatcgttccgggctcaatgcgggtacgcgcgcaggccgaggccgaagggctcggtgagatcttcaccgacgcgggcgcgcaatggcggcaggcgggatgctcgatgtgtctgggcatgaatcccgatcagctggcgtccggggagcgctgcgccgcgacgtccaaccgcaacttcgaagggcggcagggcgcgggcggccgcacacatttggtgtccccagcagtggcggccgccaccgcggttcgcggcacactgtccagcccggccgatttgaattga

SEQ ID NO: 148395 - protein, 473 aa, Mycobacterium bovis
MALQTGEPRTLAEKIWDDHIVVSGGGCAPDLIYIDLHLVHEVTSPQAFDGLRLAGRRVRRPELTLATEDHNVPTVDIDQPIADPVSRTQVETLRRNCAEFGIRLHSMGDIEQGIVHVVGPQLGLTQPGMTIVCGDSHTSTHGAFGALAMGIGTSEVEHVLATQTLPLRPFKTMAVNVDGRLPDGVSAKDIILALIAKIGTGGGQGHVIEYRGSAIESLSMEGRMTICNMSIEAGARAGMVAPDETTYAFLRGRPHAPTGAQWDTALVYWQRLRTDVGAVFDTEVYLDAASLSPFVTWGTNPGQGVPLAAAVPDPQLMTDDAERQAAEKALAYMDLRPGTAMREIAVDAVFVGSCTNGRIEDLRVVAEVLRGRKVADGVRMLIVPGSMRVRAQAEAEGLGEIFTDAGAQWRQAGCSMCLGMNPDQLASGERCAATSNRNFEGRQGAGGRTHLVSPAVAAATAVRGTLSSPADLN

SEQ ID NO: 148396 - DNA, 1431 bp, Mycobacterium leprae
  CDS (1)..(1431): transl_table=11
gtgggtggcgcccgcaaaccgcgcacgttggccgaaaaggtttgggacgaccacgttgtggtagccggtcagggctaccatcaagatcggggtcccgatttgatttacatcgatctacatttggtgcacgaggtcaccagcccgcaggctttcgatggcctgcgcttggccggccggtgggtgcggcgccccgatttaacagtggccaccgaggatcacaacgtgcccaccgtcgacatcgacaagccgatcgctgacccggtgtcgcgcattcaagtggagacgttgcggcgcaactgcgccgaatttggtgtccggttacacccgatgggcgatatcgagcagggcatcgttcatgtcgtagggccacagttaggcctcactcaaccgggcatgacgatcgtttgcggcgacagtcacacctctacccatggcgcttttggtgcaatcgcgatgggcatcggcacctcggagatcgagcatgtactcgctacccaaacgctgccgttgcgcccattcaagacaatggcggtcactgtcgatgggcggttgcccgccggcgtcacagccaaggacatcatccttgcgttgattgctaagattggcaccggcggcgggcagggctatgtactcgaataccggggcagtgtcatcgaatcgatgtccatggaaggacggatgacgatctgcaacatgagcatcgaagccggtgctcgagcaggaatggtggctcccgacgagactacctacgagttcttacgtgaccgtccgcacgcaccgactggcaagcaatgggatgccgcagtagcctactggcaacagctgcgcactgacgacgacgctgtgttcgacaccgaggtctatctcgatgcgacctcgttgagcccgtttgtcacctgggggacaaaccccggtcaaggagtgccgttggccgcatctgtgcctgatcccgaactgatgattgacgatgttgcccgacaagccgccgagaaagctttggcgtacatggaccttcgcccaggtacaccgatgcgcgatattgcggtcgatgcggtgttcgttgggtcgtgtaccaacggccgcattgaggatctgcggttggtggccgatgtgttacgtggccacaaggtggccgacggtgtgcggatgctgatcgtccccggctcgatgcgggtacgtgcgcaggctgaagccgaggggctcggtgagatttttattactgcgggagcgcagtggcggcagccgggttgttcgatgtgtctgggcatgaaccccgatcagcttgcgcccggggagcggtgcgctgcgacgtccaaccgaaacttcgaaggacggcaaggcaagggtggccgtacacatttggtatccccggccgtcgccgctgccaccgcggttcgcggcactttctctgctccggccgatttgaactaa

SEQ ID NO: 148397 - protein, 476 aa, Mycobacterium leprae
MGGARKPRTLAEKVWDDHVVVAGQGYHQDRGPDLIYIDLHLVHEVTSPQAFDGLRLAGRWVRRPDLTVATEDHNVPTVDIDKPIADPVSRIQVETLRRNCAEFGVRLHPMGDIEQGIVHVVGPQLGLTQPGMTIVCGDSHTSTHGAFGAIAMGIGTSEIEHVLATQTLPLRPFKTMAVTVDGRLPAGVTAKDIILALIAKIGTGGGQGYVLEYRGSVIESMSMEGRMTICNMSIEAGARAGMVAPDETTYEFLRDRPHAPTGKQWDAAVAYWQQLRTDDDAVFDTEVYLDATSLSPFVTWGTNPGQGVPLAASVPDPELMIDDVARQAAEKALAYMDLRPGTPMRDIAVDAVFVGSCTNGRIEDLRLVADVLRGHKVADGVRMLIVPGSMRVRAQAEAEGLGEIFITAGAQWRQPGCSMCLGMNPDQLAPGERCAATSNRNFEGRQGKGGRTHLVSPAVAAATAVRGTFSAPADLN

SEQ ID NO: 148398 - DNA, 1431 bp, Mycobacterium paratuberculosis
  CDS (1)..(1431): transl_table=11
atgggaatcgacacggggacgacggccacgccgcgcacgctggccgaaaaagtctgggacgaccacgttgtggtgtccggcggggccaacgagccggacctgatctacatcgatctgcacctggtgcacgaggtcaccagcccgcaggcgttcgacggcctgcggctggccggccggccggtgcggcggcccgatctgacgctggccaccgaggaccacaacgtgcccaccgtcgacatcgacaagccgatcgccgacccggtgtcgcgcacccaggtcgagacattgcgccgaaattgtgccgaattcggcgtccggctgtacccgatgggcgacgcggagcagggcatcgtgcatgtcgtcgggccgcagctgggcctgacccaaccgggaatgacggtggtgtgtggggatagtcacacctcgacgcacggcgcattcggcgcactggccatgggaattggcacctcggaggtcgagcacgtgctggccacccagacgttgccgctgcggccgttcaagacgatggcggtcaacgtcgacggcgagttgccggccggcgtgacggccaaggacatcatcctggcgctgatcgccaagatcggcaccggcggcgggcaggggcacgtcatcgaataccgcggcagcgccatcgaatcgctgtcgatggaaggccggatgaccgtgtgcaacatgagcatcgaggccggtgcccgagcggggatgatcgctcccgacgacaccacctacgagttcctgcgggaccgcccgcacgcccccaagggcgcgcaatgggatgcggccatgcgctattggcagcagctgcgcaccgatcccggcgcggtgttcgacaccgaggtctatctggatgccgcgtcgctgagcccgttcgtgacgtggggcacaaacccgggtcagggcgtgccgttggctgccgcggtaccggatcccgaactgatgaccgacgatgccgagcgtcaggccgccgagaaagcgttggcatacatggaccttcgaccgggcacgccgatgcgcgacatcgcggtcgacgcggtgttcgtcggctcttgtaccaacggtcgtatcgaggatctgcgggtcgtcgccgacgtgctgcgcggccgcaaggtcgcgccgggggtgcggatgctcgtggtgcccggctcgatgcgggtgcgcgcgcaggccgaagccgaagggctgggcgaggttttcaccgccgcgggcgccgaatggcggcaggcgggctgctcgatgtgtttgggaatgaatcccgatcagctggcgccgggggagcggtgcgcggcgacctcgaaccgcaacttcgaagggcgccagggcaaaggcggccgcacgcatttggtgtctccggccgtcgccgcggccacggcggtgcgcggcacattgtccgctccggccgatttggactga

SEQ ID NO: 148399 - protein, 476 aa, Mycobacterium paratuberculosis
MGIDTGTTATPRTLAEKVWDDHVVVSGGANEPDLIYIDLHLVHEVTSPQAFDGLRLAGRPVRRPDLTLATEDHNVPTVDIDKPIADPVSRTQVETLRRNCAEFGVRLYPMGDAEQGIVHVVGPQLGLTQPGMTVVCGDSHTSTHGAFGALAMGIGTSEVEHVLATQTLPLRPFKTMAVNVDGELPAGVTAKDIILALIAKIGTGGGQGHVIEYRGSAIESLSMEGRMTVCNMSIEAGARAGMIAPDDTTYEFLRDRPHAPKGAQWDAAMRYWQQLRTDPGAVFDTEVYLDAASLSPFVTWGTNPGQGVPLAAAVPDPELMTDDAERQAAEKALAYMDLRPGTPMRDIAVDAVFVGSCTNGRIEDLRVVADVLRGRKVAPGVRMLVVPGSMRVRAQAEAEGLGEVFTAAGAEWRQAGCSMCLGMNPDQLAPGERCAATSNRNFEGRQGKGGRTHLVSPAVAAATAVRGTLSAPADLD

SEQ ID NO: 148400 - DNA, 1410 bp, Neisseria gonorrhoeae; identical to SEQ ID NO: 103291
  CDS (1)..(1410): transl_table=11

SEQ ID NO: 148401 - protein, 469 aa, Neisseria gonorrhoeae; identical to SEQ ID NO: 103292

SEQ ID NO: 148402 - DNA, 1413 bp, Nitrosomonas europaea; identical to SEQ ID NO: 103293
  CDS (1)..(1413): transl_table=11

SEQ ID NO: 148403 - protein, 470 aa, Nitrosomonas europaea; identical to SEQ ID NO: 103294

SEQ ID NO: 148404 - DNA, 1425 bp, Nocardia farcinica; identical to SEQ ID NO: 103295
  CDS (1)..(1425): transl_table=11

SEQ ID NO: 148405 - protein, 474 aa, Nocardia farcinica; identical to SEQ ID NO: 103296

SEQ ID NO: 148406 - DNA, 1407 bp, Oceanobacillus iheyensis; identical to SEQ ID NO: 103297
  CDS (1)..(1407): transl_table=11

SEQ ID NO: 148407 - protein, 468 aa, Oceanobacillus iheyensis; identical to SEQ ID NO: 103298

SEQ ID NO: 148408 - DNA, 1407 bp, Pasteurella multocida; identical to SEQ ID NO: 103299
  CDS (1)..(1407): transl_table=11

SEQ ID NO: 148409 - protein, 468 aa, Pasteurella multocida; identical to SEQ ID NO: 103300

SEQ ID NO: 148410 - DNA, 1410 bp, Photorhabdus luminescens subsp; identical to SEQ ID NO: 103301
  CDS (1)..(1410): transl_table=11

SEQ ID NO: 148411 - protein, 469 aa, Photorhabdus luminescens subsp; identical to SEQ ID NO: 103302

SEQ ID NO: 148412 - DNA, 1500 bp, Photobacterium profundum; identical to SEQ ID NO: 103303
  CDS (70)..(1500): transl_table=11

SEQ ID NO: 148413 - protein, 476 aa, Photobacterium profundum; identical to SEQ ID NO: 103304

SEQ ID NO: 148414 - DNA, 1242 bp, Picrophilus torridus
  CDS (1)..(1242): transl_table=11
atgaaaacggcagttgagaagatatttagtgataaatcaggcaatgatgcaagggccggcgattatgttatagccaatttagattatgttatggtaaatgatataacaggcccaatagcaattgacgcattcaatgaacttggttataaaccattaagcgatagaatcgttgttatacctgatcactttgtaccgccaaaggatataaattctgcaatacagtataaaaaggtaaaggattttgcattaaagcataacacacatttttatgatcttggccgtggaggtgtttgccatcaggtcatgatggaaaagggctttgctgcaccgggcagattaatagcaggcgcggattcacatacaaacacctatggtgcactatcatgcgtttcagttggcataggcagcacagaggccggtgtcatctttggaacaggcaggatgtggtttaaggttcctgagacagatttaataagaataaatggaagaccaaaaaagggcgtctatggcaaggatataatattaaacgtgctttcaaggattggcaacgggggctctgcatacaaatgcatggagttcacaggcagcaccattgattaccttgatataaatgaaagaatgaccatggcaaatatgaccactgaggccggtgcaaaatgctcattttttaatgccgatgaaaaaacactggattatataagaaataaaacgaatgattacaaaatatataaagatgatgaaaacgcagagtactcaaggataatagatatagatgcctcggaaatagagccgtctgttgcgattccaaactcaccggataatgtaagacccgtatcaaaggtatctgaaagaattgaccaggcatatataggttcatgcaccaatggcaggatagaggatataagaagggcggccctgatattaaaggataaaaagatagataaaaatgtaaggttaatggtcgttcccgccagtcaggaggtgtataaccaggcattaaaagaggggcttgttgatattataactgatgccggtggatattttgcagggacaacatgcggtgcatgccttggaggctacatgggcgttcttggccctggagaaacatgcatatcaacaacaaacagaaactttataggaaggatgggtgacaggacatcgagagtctacctggcaaatccagaggttgttgccgcatctgcaataatgggaagaatagcatcaccggaggagatacaatga

SEQ ID NO: 148415 - protein, 413 aa, Picrophilus torridus
MKTAVEKIFSDKSGNDARAGDYVIANLDYVMVNDITGPIAIDAFNELGYKPLSDRIVVIPDHFVPPKDINSAIQYKKVKDFALKHNTHFYDLGRGGVCHQVMMEKGFAAPGRLIAGADSHTNTYGALSCVSVGIGSTEAGVIFGTGRMWFKVPETDLIRINGRPKKGVYGKDIILNVLSRIGNGGSAYKCMEFTGSTIDYLDINERMTMANMTTEAGAKCSFFNADEKTLDYIRNKTNDYKIYKDDENAEYSRIIDIDASEIEPSVAIPNSPDNVRPVSKVSERIDQAYIGSCTNGRIEDIRRAALILKDKKIDKNVRLMVVPASQEVYNQALKEGLVDIITDAGGYFAGTTCGACLGGYMGVLGPGETCISTTNRNFIGRMGDRTSRVYLANPEVVAASAIMGRIASPEEIQ

SEQ ID NO: 148416 - DNA, 1407 bp, Prochlorococcus marinus; identical to SEQ ID NO: 103305
  CDS (1)..(1407): transl_table=11

SEQ ID NO: 148417 - protein, 468 aa, Prochlorococcus marinus; identical to SEQ ID NO: 103306

SEQ ID NO: 148418 - DNA, 1410 bp, Prochlorococcus marinus subsp
  CDS (1)..(1410): transl_table=11
ttgagtcaagataccttatttgataaagtgtgggatttacacaaagttgcaaatcttcctggtggctccgatcaaatcttaatcggtcttcaccttattcatgaagttactagcccgcaagcattcggagctctaaaagataaaaatttaaaagtaaaattccctcaaagaactgtagctacagttgatcatattgtgccaacagataatcaaagcaggcctttcaaagataatctggcagaacaaatgatcgatactttagaaaagaactgtatcgagcacaaaattaaattttttaatattgggagtggtaatcaaggaatagttcatgtagtagctcctgaacttggtttgacccaaccaggcatgactattgcttgtggagattctcatacatcaactcacggagcctttgggtcaattgcttttggtattggtactagccaagtaagagatgtacttgctagtcaaaccatagctatgaataagctcaaagtcagacaaatttggtgtgaaaataaattatcaaatggaatttatgctaaagatttagtgctacatataattaatcaactcggagtaaaagcaggagtaggttatgcctatgaatttgcaggtcctgccataagtgaattatcaatggaagaaaggatgactatatgcaatatgtccattgaaggaggagcaagatgcggttatataaatcctgatgaaaaaacctttagttatatgaaggataaattatgctcgcctcaaaatgaaaattgggaaaaagccgttaaatggtggaaatcattagaaagtagtgataattgtgtttatgatgatgtattcaagttagatgcttctaaagtagaacctaccattacatggggtattacgcctgggcaaagtatcggcgtaaatcaaaaaatcccttcattaaatcaaatacatccaaacgaccaatttattgctgaggaggcatatgaatatatgagtttcaaaccgggacaatcaattaaaaatactccaattgatgtttgttttattgggagttgtacaaatggaaggataagtgacctaagagttgccgctcaagttttggagcataataaagtagcaaaaaatataaaagcttttgtagttccaggctcagagaaggttgcgaaagaagcgaaagaggaaggtcttgataaaatatttataaaagcaggttttcagtggagagaacctggttgctcaatgtgtttagcaatgaattcagacaaactcattgggaatcaagtaagtgccagctctagcaatagaaatttcaaaggtagacagggttctccaaatggaagaacgcttctcatgagtccagcaatggttgccgctgcatcaattacaggaaaagttagtgacgtaagagattttattaacaaatga

SEQ ID NO: 148419 - protein, 469 aa, Prochlorococcus marinus subsp
MSQDTLFDKVWDLHKVANLPGGSDQILIGLHLIHEVTSPQAFGALKDKNLKVKFPQRTVATVDHIVPTDNQSRPFKDNLAEQMIDTLEKNCIEHKIKFFNIGSGNQGIVHVVAPELGLTQPGMTIACGDSHTSTHGAFGSIAFGIGTSQVRDVLASQTIAMNKLKVRQIWCENKLSNGIYAKDLVLHIINQLGVKAGVGYAYEFAGPAISELSMEERMTICNMSIEGGARCGYINPDEKTFSYMKDKLCSPQNENWEKAVKWWKSLESSDNCVYDDVFKLDASKVEPTITWGITPGQSIGVNQKIPSLNQIHPNDQFIAEEAYEYMSFKPGQSIKNTPIDVCFIGSCTNGRISDLRVAAQVLEHNKVAKNIKAFVVPGSEKVAKEAKEEGLDKIFIKAGFQWREPGCSMCLAMNSDKLIGNQVSASSSNRNFKGRQGSPNGRTLLMSPAMVAAASITGKVSDVRDFINK

SEQ ID NO: 148420 - DNA, 1410 bp, Prochlorococcus marinus
  CDS (1)..(1410): transl_table=11
ttgagttctagaaccctctacgacaaagtttggaacttccatcaggtaaaagaattacctggaggatcgactcaactttttattggtcttcatttaattcacgaagtcacaagtcctcaggctttctctgcactgaatgaaaaaaaacttggagtaaagtttcccaatcttactgtcgcaacagttgaccatatagttccgacctcaaaccagcaacgtccttttagtgatcctcttgcagaggaaatgttggctactttagaaaaaaactgcaaaactcatgggataaaatttcacggaattggaagtaattcgcaaggagtagttcatgttatggctccagaattaggattaacccagcctggaatgacagtagcttgcggagattcacatacctcaacccatggagcatttggagcaattgcctttggtattggaaccagtcaagtgcgagatgttttagccagtcaaagcttggcaatgaataaattaaaagtaagaagaatatgggtagagggtgaattgcaaaagggagtctatgcaaaagacctaattcttcatatcattcgtcatcttggagttaaaggaggtgtgggatttgcatatgaatttgctgggcctgcaatagaaaaactctcaatggagggacgaatgaccatatgcaatatggctattgaaggtggtgcaagatgcggttatatcaacccagatgaaaccactttcaaatatataaaagggaaagaacacgcgcccaaaggtcaagaatgggataaggctatttcttggtggaaaagtttagctagtgattcaaaagcaacattcgatgatgagattcaattagatggatcatcaatcgaacccactgttacttggggtataactcctgggcaaggaatttcaatcaaagaaacaattccaaaccctgagtttcttcccaaaaatgagcaacaaatcgctaaagacgcttgtaaatacatgaatctaaaaccagacgaacccatagagggacaatcaattgatgtttgctttattgggagctgtaccaatggaagattaagtgatctcgaagaggcatctaaaattgttaaaggtaatacagtcgctgatgggattagagcatttgtcgttcctggttctcaaaaggtcgccaaggaggcaaaagaaaaaggattagataaaatatttcttaaagcaggttttgaatggcgagaaccaggttgttcaatgtgtctcgccatgaacccagataaactagaaggcagacaaataagcgctagttcaagtaatagaaatttcaaaggaagacaaggctctgcaaatgggagaaccttgttaatgagccccgctatggttgctgctgctgcaataaatgggaaggttacagatgtaagaaagttcctgaaagagtaa

SEQ ID NO: 148421 - protein, 469 aa, Prochlorococcus marinus
MSSRTLYDKVWNFHQVKELPGGSTQLFIGLHLIHEVTSPQAFSALNEKKLGVKFPNLTVATVDHIVPTSNQQRPFSDPLAEEMLATLEKNCKTHGIKFHGIGSNSQGVVHVMAPELGLTQPGMTVACGDSHTSTHGAFGAIAFGIGTSQVRDVLASQSLAMNKLKVRRIWVEGELQKGVYAKDLILHIIRHLGVKGGVGFAYEFAGPAIEKLSMEGRMTICNMAIEGGARCGYINPDETTFKYIKGKEHAPKGQEWDKAISWWKSLASDSKATFDDEIQLDGSSIEPTVTWGITPGQGISIKETIPNPEFLPKNEQQIAKDACKYMNLKPDEPIEGQSIDVCFIGSCTNGRLSDLEEASKIVKGNTVADGIRAFVVPGSQKVAKEAKEKGLDKIFLKAGFEWREPGCSMCLAMNPDKLEGRQISASSSNRNFKGRQGSANGRTLLMSPAMVAAAAINGKVTDVRKFLKE

SEQ ID NO: 148422 - DNA, 1425 bp, Pseudomonas aeruginosa; identical to SEQ ID NO: 103311
  CDS (1)..(1425): transl_table=11

SEQ ID NO: 148423 - protein, 474 aa, Pseudomonas aeruginosa; identical to SEQ ID NO: 103312

SEQ ID NO: 148424 - DNA, 1419 bp, Pseudomonas fluorescens
  CDS (1)..(1419): transl_table=11
atggccggcaagacgctctacgacaagctctgggattcgcatttggtcaagcagcgcgacgatggttcggcgctgatctatatcgatcgtcacatcatccacgaagtgacctcgccgcaagccttcgaaggcctgcgtctggccgggcgcaagccatggcgcatcgatgccaacatcgccaccccggaccacaacgtaccgaccacgccggagcgcaagggcgggatcgaagcgatcgccgaccaggtttcccgcctccaggtgcagaccctcgacgacaactgcgatgaatacggcattgtcgaattcaagatgaacgacgtgcgccagggcatcgtccacgtgatcggcccggagcagggcgccaccttgccgggcatgaccgtggtctgtggtgactcccacacctcgacccacggtgctttcggcgccctggcccatggcatcggcacctccgaggtggagcacgtccttgccacccagtgcctggtggccaagaaaatgaagaacatgctggtgcgcgtggaaggcaccttgcctttcggcgtgaccgccaaggacatcgtcctggccgtgatcggcaagatcggcaccgccggcggtaacggccatgccatcgagttcgccggtagcgcgattcgcgagctgtccgtcgaaggccgcatgaccatctgcaacatgtccatcgaagccggtgcccgtgtcggcctggtggcggcggacgaaaagaccgtggcatacgtcaagggacgtccgttcgcccccaaggacgccgaatgggacttggccgtcgaggcctggaaggacctggtgtccgatgccgacgccaagttcgataccgtggtcgagctcgatgccgcacagatcaagccgcaggtcagctggggcacgtccccggaaatggtcctggcggtggatcagaacgtaccggacccggccaaggaaatggatctggtcaagcgcgattccatcgtccgcgccttgaagtacatgggcttgagcgccaatcaggcgatcaccgacattcagttggaccgcgtcttcatcggctcctgcaccaactcgcggatcgaagacttgcgcgccgccgcggtcatcgccaagggccgcaaagtggcttccaccatcaagcaggcgatcgtggtgccgggctcgggcctggtcaaggcgcaggccgaatcggaaggcctggacaagatcttcctcgaagccgggttcgaatggcgtgagccgggctgctcgatgtgcctggcgatgaacccggaccgcctggagtccggcgagcattgcgcctcgacctcgaaccgcaacttcgaagggcgccagggtgcgggtgggcgtacccacctggtcagcccggccatggccgccgccgccgctgtcagcggtcgtttcgtcgacgtccgtgaattgatctaa

SEQ ID NO: 148425 - protein, 472 aa, Pseudomonas fluorescens
MAGKTLYDKLWDSHLVKQRDDGSALIYIDRHIIHEVTSPQAFEGLRLAGRKPWRIDANIATPDHNVPTTPERKGGIEAIADQVSRLQVQTLDDNCDEYGIVEFKMNDVRQGIVHVIGPEQGATLPGMTVVCGDSHTSTHGAFGALAHGIGTSEVEHVLATQCLVAKKMKNMLVRVEGTLPFGVTAKDIVLAVIGKIGTAGGNGHAIEFAGSAIRELSVEGRMTICNMSIEAGARVGLVAADEKTVAYVKGRPFAPKDAEWDLAVEAWKDLVSDADAKFDTVVELDAAQIKPQVSWGTSPEMVLAVDQNVPDPAKEMDLVKRDSIVRALKYMGLSANQAITDIQLDRVFIGSCTNSRIEDLRAAAVIAKGRKVASTIKQAIVVPGSGLVKAQAESEGLDKIFLEAGFEWREPGCSMCLAMNPDRLESGEHCASTSNRNFEGRQGAGGRTHLVSPAMAAAAAVSGRFVDVRELI

SEQ ID NO: 148426 - DNA, 1434 bp, Pseudomonas putida; identical to SEQ ID NO: 103313
  CDS (1)..(1434): transl_table=11

SEQ ID NO: 148427 - protein, 477 aa, Pseudomonas putida; identical to SEQ ID NO: 103314

SEQ ID NO: 148428 - DNA, 1410 bp, Ralstonia eutropha; identical to SEQ ID NO: 103319
  CDS (1)..(1410): transl_table=11

SEQ ID NO: 148429 - protein, 469 aa, Ralstonia eutropha; identical to SEQ ID NO: 103320

SEQ ID NO: 148430 - DNA, 1410 bp, Ralstonia solanacearum; identical to SEQ ID NO: 103321
  CDS (1)..(1410): transl_table=11

SEQ ID NO: 148431 - protein, 469 aa, Ralstonia solanacearum; identical to SEQ ID NO: 103322

SEQ ID NO: 148432 - DNA, 1410 bp, Rhizobium loti; identical to SEQ ID NO: 103323
  CDS (1)..(1410): transl_table=11

SEQ ID NO: 148433 - protein, 469 aa, Rhizobium loti; identical to SEQ ID NO: 103324

SEQ ID NO: 148434 - DNA, 1410 bp, Rhizobium meliloti; identical to SEQ ID NO: 103325
  CDS (1)..(1410): transl_table=11

SEQ ID NO: 148435 - protein, 469 aa, Rhizobium meliloti; identical to SEQ ID NO: 103326

SEQ ID NO: 148436 - DNA, 2253 bp, Rhizopus niveus; identical to SEQ ID NO: 103327
  CDS (1)..(2253)

SEQ ID NO: 148437 - protein, 750 aa, Rhizopus niveus; identical to SEQ ID NO: 103328

SEQ ID NO: 148438 - DNA, 2268 bp, Rhizomucor pusillus; identical to SEQ ID NO: 103329
  CDS (1)..(2268)

SEQ ID NO: 148439 - protein, 755 aa, Rhizomucor pusillus; identical to SEQ ID NO: 103330

SEQ ID NO: 148440 - DNA, 1935 bp, Rhizomucor racemosus; identical to SEQ ID NO: 103331
  CDS (1)..(1935)

SEQ ID NO: 148441 - protein, 644 aa, Rhizomucor racemosus; identical to SEQ ID NO: 103332

SEQ ID NO: 148442 - DNA, 1536 bp, Rhodopirellula baltica; identical to SEQ ID NO: 102975
  CDS (79)..(1536): transl_table=11

SEQ ID NO: 148443 - protein, 485 aa, Rhodopirellula baltica; identical to SEQ ID NO: 103334

SEQ ID NO: 148444 - DNA, 1410 bp, Rhodopseudomonas palustris; identical to SEQ ID NO: 103335
  CDS (1)..(1410): transl_table=11

SEQ ID NO: 148445 - protein, 469 aa, Rhodopseudomonas palustris; identical to SEQ ID NO: 103336

SEQ ID NO: 148446 - DNA, 1401 bp, Salmonella paratyphi; identical to SEQ ID NO: 103337
  CDS (1)..(1401): transl_table=11

SEQ ID NO: 148447 - protein, 466 aa, Salmonella paratyphi; identical to SEQ ID NO: 103338

SEQ ID NO: 148448 - DNA, 2277 bp, Schizosaccharomyces pombe; identical to SEQ ID NO: 103339
  CDS (1)..(2277)

SEQ ID NO: 148449 - protein, 758 aa, Schizosaccharomyces pombe; identical to SEQ ID NO: 103340

SEQ ID NO: 148450 - DNA, 1425 bp, Shewanella oneidensis
  CDS (1)..(1425): transl_table=11
atgacagttccttcaaaaacaatcgccccaaaaaccttatatcaaaaagtctgggatgcccacatagtggctacaccagaaggtgaagcgcccatcatttatgttgataggcacttagtccatgaagtgacttctccccaagcctttagcggcttaaaagtcgcgggtcgtcagttacgtgcgcccgaaaaaacctttgccaccatggatcacaacacctcgacccgcagcgccagtttagacgccttaagcccaatggcgcgcattcaggtggaaacgctagcgcaaaattgcaaagattttggcgtgctcttatatgatattcaccatccgaatcaaggaattgtgcatgtgatggggcctgagcttggcattaccttgcccggtactgtgattgtttgtggtgattctcacaccgcgacccacggcgcctttggcgctctggccttcggtattggcacatctgaggttgagcatgtattggcaacccaaactttgcgccaattaaaagccaaaacgatgaaaatcgaagtccgcggccaagtgacggatggtgtgaccgctaaagatatcgtactggcgattatcggtaagattggcatggacggcggcacgggttatgtggtggagttttgcggcgaggcgattgaagccctgtcgatggaaggacgcatgaccgtctgcaatatggcgattgaaatgggtgctaaggcgggcatggtcgcgccggaccaaaccaccttcgattaccttgagggccgtgaatttgcacccaagggcgaagattgggcgcaagctgtcgctgaatggaaaacactcaaaaccgatgttggcgctgagtttgatgccactgtagtgttggatgcggctgatatcgcgccgcagctaacgtggggcacaaatcctgggcaagtcgttgccattgacgctcctgtgccgaatcctgccgatgaagtcaatccaacgattcgctctagcatggaaaaagcgctggattatatcggcttaaccgcaggcacgccgatgacagaagtcgcgattaataaagtctttatcggttcttgcactaactcgcggattgaagatttacgcagcgcggcgaagcatgccaaagggcgtaaagtggctgcgggcgttacggcaatcgtagtaccgggttctggccaagtgaaggcacaggccgaggcggaaggcttagataaaatctttatcgaggccggatttgaatggcgtttaccgggctgttctatgtgtttggcgatgaacgatgacagattagaagcgggtgatcgctgcgcatcgaccagcaaccgtaactttgaaggtcgccaaggtcgtggtagtcgcacgcacttggtgagtccggcgatggcggcagctgctgcaattgctgggcattttgtcgatatccgtaaaccttactaa

SEQ ID NO: 148451 - protein, 474 aa, Shewanella oneidensis
MTVPSKTIAPKTLYQKVWDAHIVATPEGEAPIIYVDRHLVHEVTSPQAFSGLKVAGRQLRAPEKTFATMDHNTSTRSASLDALSPMARIQVETLAQNCKDFGVLLYDIHHPNQGIVHVMGPELGITLPGTVIVCGDSHTATHGAFGALAFGIGTSEVEHVLATQTLRQLKAKTMKIEVRGQVTDGVTAKDIVLAIIGKIGMDGGTGYVVEFCGEAIEALSMEGRMTVCNMAIEMGAKAGMVAPDQTTFDYLEGREFAPKGEDWAQAVAEWKTLKTDVGAEFDATVVLDAADIAPQLTWGTNPGQVVAIDAPVPNPADEVNPTIRSSMEKALDYIGLTAGTPMTEVAINKVFIGSCTNSRIEDLRSAAKHAKGRKVAAGVTAIVVPGSGQVKAQAEAEGLDKIFIEAGFEWRLPGCSMCLAMNDDRLEAGDRCASTSNRNFEGRQGRGSRTHLVSPAMAAAAAIAGHFVDIRKPY

SEQ ID NO: 148452 - DNA, 1401 bp, Shigella flexneri; identical to SEQ ID NO: 103341
  CDS (1)..(1401): transl_table=11

SEQ ID NO: 148453 - protein, 466 aa, Shigella flexneri; identical to SEQ ID NO: 103342

SEQ ID NO: 148454 - DNA, 1407 bp, Silicibacter pomeroyi; identical to SEQ ID NO: 103343
  CDS (1)..(1407): transl_table=11

SEQ ID NO: 148455 - protein, 468 aa, Silicibacter pomeroyi; identical to SEQ ID NO: 103344

SEQ ID NO: 148456 - DNA, 1371 bp, Staphylococcus aureus; identical to SEQ ID NO: 103345
  CDS (1)..(1371): transl_table=11

SEQ ID NO: 148457 - protein, 456 aa, Staphylococcus aureus; identical to SEQ ID NO: 103346

SEQ ID NO: 148458 - DNA, 1368 bp, Staphylococcus aureus; identical to SEQ ID NO: 103347
  CDS (1)..(1368): transl_table=11

SEQ ID NO: 148459 - protein, 455 aa, Staphylococcus aureus; identical to SEQ ID NO: 103348

SEQ ID NO: 148460 - DNA, 1434 bp, Streptomyces avermitilis; identical to SEQ ID NO: 103353
  CDS (1)..(1434): transl_table=11

SEQ ID NO: 148461 - protein, 477 aa, Streptomyces avermitilis; identical to SEQ ID NO: 103354

SEQ ID NO: 148462 - DNA, 1431 bp, Streptomyces coelicolor; identical to SEQ ID NO: 103355
  CDS (1)..(1431): transl_table=11

SEQ ID NO: 148463 - protein, 476 aa, Streptomyces coelicolor; identical to SEQ ID NO: 103356

SEQ ID NO: 148464 - DNA, 1386 bp, Streptococcus mutans
  CDS (1)..(1386): transl_table=11
atgagtggaaaatcaatttttgataaattatgggatcgccatgtgattaccggtaaggaaggagagccccaactcatgtatgtggatcagcactatatacatgaggtgactagcccgcaagcctttcagggcttgcgagatgctggtcgaaaagtgcgccgtcctgatttaacttttggaacatttgatcacaatgtaccgaccgttaatatttatgatattcgtgatgttatttctaaggcacaaatggatgctcttgctagaaatgttatcgaatttaatattcctcatgcagaccatggttctgaaaatcagggaattgtccatatggttggccctgagactggtcgtacacagccgggtaaatttatcgtttgcggagatagccatacggcaacacatggcgcttttggtgctattggttttggaattggaactaccgaagttgagcatgtttttgcgacccagactatctggcaggtaaaacctaaaaagctcttggtaaaatttacaggaaaaccacaaaagggtgtttattccaaggattacattttagccttaattgctaaatatggtgtggctttaggtgttggttatgttgttgagtatattggtgatgctgttgatgccctaagcatggaagaacgaatgactatatgcaatatgtccatagaatttggttctaaaatgggaattatgaatcctgatcaaaagacctttgattaccttaagaacaaagcgtgtgtccctgaagattttgaaacagcagtggctgattggaagactttggtttctgatgaagatgctcattacgacaaggtgattgaattagatgtttctcaattagctcccatggtgacttggggaactaatccttcaatgggagtcgcttttgggcaagcttttcctgatattagagatatgaatgataagcgggcttatgattatatggacatgaagccgggccaaacagcagaggatattgaacttggttatgtttttttaggttcttgtaccaatgcgcgattaagtgatttgaaagtggcagctaagtacgttgctggtaaacatattgctcctaatttgaccgctattgtggttccgggcagccgtcctgtcaagcaggctgctgaaaaaattggtctggataaaattttcttagatgctggctttgaatggcgcgatccgggctgttccatgtgtcttggtatgaatcctgataaggtacctgaaggcatgcactgtgcttcaactagcaatcgtaattttgaagatagacagggagttggagcgaaaacacacctttgcagccctgctatggcagcagcagcagcaattgctggtcgctttatagatgttcgtcaattaccggaggcacaagtttaa

SEQ ID NO: 148465 - protein, 461 aa, Streptococcus mutans
MSGKSIFDKLWDRHVITGKEGEPQLMYVDQHYIHEVTSPQAFQGLRDAGRKVRRPDLTFGTFDHNVPTVNIYDIRDVISKAQMDALARNVIEFNIPHADHGSENQGIVHMVGPETGRTQPGKFIVCGDSHTATHGAFGAIGFGIGTTEVEHVFATQTIWQVKPKKLLVKFTGKPQKGVYSKDYILALIAKYGVALGVGYVVEYIGDAVDALSMEERMTICNMSIEFGSKMGIMNPDQKTFDYLKNKACVPEDFETAVADWKTLVSDEDAHYDKVIELDVSQLAPMVTWGTNPSMGVAFGQAFPDIRDMNDKRAYDYMDMKPGQTAEDIELGYVFLGSCTNARLSDLKVAAKYVAGKHIAPNLTAIVVPGSRPVKQAAEKIGLDKIFLDAGFEWRDPGCSMCLGMNPDKVPEGMHCASTSNRNFEDRQGVGAKTHLCSPAMAAAAAIAGRFIDVRQLPEAQV

SEQ ID NO: 148466 - DNA, 1251 bp, Sulfolobus solfataricus
  CDS (1)..(1251): transl_table=11
ttgatgtcggcaaaaacgttaactgagaaaattttaagcagagcatcgggaaaggatgtctcgcctggagacgttatagaggctaaagtagacttagtagcatttcatgacttaactggttatcacgtgattgaggtaatggaaaaggctaacatgattaaagttttcgataaaagtaaattagtaatagcttttgatcatttagctccacctccagatgtaaggagtgcagaaattcaaggctatataagaaagttcgtgaaatcggaaggtattcctaatttttatgatataaattacggaattttacatgaagtcatgatagagcaatacgccaaccctggacaagttattttagcagctgatagtcacacaaccacatccggtgctgtaggagcatttgctcaaggtatgggagctagtgatattgcagccgctttaataactggtaaaacttggctagtagtgccacaaccatttaaagtagttttagaaggaaaacctgctaaatggataactgggaaggacgttgcactaaaattgctaggagactttaaggcagattactttaatggaatgacgttagaaatcttcgtcaaggatccgttaagttttccaatggattatagggcaacagtatcaaatatgggaattgaaatgaatgctgatgcattaatgttcataccagatcaagagactaagagatacatcaaagagatgagaggatacgaaccagaacttgttacaccagataacggcgctaaatacgttgatgaatacactattcaactagacgaaatggaaccactagttgctgctccacatagtgtagataatgttaaggtcgtaaatgagttagaaggtactccagtagatcaagtttacataggctcttgtacaaatggtaggttgagcgatttcgaaatagctgctaaaataatgaaaggaaagaaggtcaagagtaggtgcatcgccatccctgcgtcttacagaatgtttaaggaggctttagaaagaggttatatacaaacattagttgatgctggttgtattgtaacgtatggaacttgtggaccatgcctaggtggtcatttcggtatagctggtccaggtgagaatattgtatcaacaagttccagaaactttaaagggagaatgggaagtaatgaggctaaagtttacttatctggtcccgctgttgctgcaattagcgcattagaaggtaagattacagatcccagggtgatctga

SEQ ID NO: 148467 - protein, 416 aa, Sulfolobus solfataricus
MMSAKTLTEKILSRASGKDVSPGDVIEAKVDLVAFHDLTGYHVIEVMEKANMIKVFDKSKLVIAFDHLAPPPDVRSAEIQGYIRKFVKSEGIPNFYDINYGILHEVMIEQYANPGQVILAADSHTTTSGAVGAFAQGMGASDIAAALITGKTWLVVPQPFKVVLEGKPAKWITGKDVALKLLGDFKADYFNGMTLEIFVKDPLSFPMDYRATVSNMGIEMNADALMFIPDQETKRYIKEMRGYEPELVTPDNGAKYVDEYTIQLDEMEPLVAAPHSVDNVKVVNELEGTPVDQVYIGSCTNGRLSDFEIAAKIMKGKKVKSRCIAIPASYRMFKEALERGYIQTLVDAGCIVTYGTCGPCLGGHFGIAGPGENIVSTSSRNFKGRMGSNEAKVYLSGPAVAAISALEGKITDPRVI

SEQ ID NO: 148468 - DNA, 1446 bp, Symbiobacterium thermophilum; identical to SEQ ID NO: 103357
  CDS (1)..(1446): transl_table=11

SEQ ID NO: 148469 - protein, 481 aa, Symbiobacterium thermophilum; identical to SEQ ID NO: 103358

SEQ ID NO: 148470 - DNA, 1410 bp, Synechococcus elongatus; identical to SEQ ID NO: 103359
  CDS (1)..(1410): transl_table=11

SEQ ID NO: 148471 - protein, 469 aa, Synechococcus elongatus; identical to SEQ ID NO: 103360

SEQ ID NO: 148472 - DNA, 1407 bp, Synechococcus sp
  CDS (1)..(1407): transl_table=11
atgagccgcggtaccctgttcgacaaagtttgggacttgcacacggttgccaccttgccctcgggccagacgcagctgttcattggcctgcacctgatccacgaagtcaccagcccgcaagccttttcgatgctgcgcgatcgcggcttgaccgtgaaatttccgggacgaacggtcgcaacggttgaccatattgtgccgacggaaaatcaggcgcgtccttttgcagacagcttggccgaggagatgattgtcaccttggagcgcaactgccgcgagaatggcatccgcttctacaacatcggttcgggcagtcagggcatcgtccatgtgattgcgccagagcaaggcttgactcagcccggcatgacgatcgcttgcggtgatagccataccagtactcacggggcgtttggtgccatcgcttttgggattggcaccagccaagttcgcgatgtcttggcctcacaaacgctggcgctgagtaagctgaaagttcgcaagatcgaagtcaacggcgagctgcagcccggcgtctacgccaaggacgtgattctgcacatcatccgtaagctcggtgtcaaaggtggcgtcggctacgcctacgagttcgcgggtagcactttcgcggcgatgtcgatggaagaacggatgaccgtctgcaacatggcgatcgagggcggggcgcgttgcggctacgtcaatccagatcagatcacctatgactatctgcaaggtcgtgagtttgcgccccaaggcgaagcctgggatcgggcgatcgcttggtgggagagcctgcgcagcgaagccgatgcggaatatgacgatgttgttgtctttgatgcggcggagattgcaccgaccgtgacttgggggattacccccggccaaggcatcgggatcacggagaccatcccgacgcccgatagtttgctcgatgaagatcgggcggtagcggcggaagcctacagctacatggatttggagcctggtgcaccgctgcaaggtacgaaagttgatgtctgtttcatcggtagttgcactaatggccggttgagcgacttgcgcgaagctgccaaggttgcccaaggtcgcaaggtcgcggcggggattaaagccttcgtggtgcccggttccgagcgcgtcaaacagcaagccgaagccgaaggcctcgaccaaatctttacggcggcaggctttgagtggcggcaggccggctgctcgatgtgtctggcgatgaacccggacaaactggaaggccgccaaatcagtgcttcttcatccaaccgcaacttcaaggggcgccaaggctcagcttcgggtcggacgcttttgatgagtccggcgatggtggcggcagcagcgatcgcgggcgaagtgacggacgttcgtaactggctgaactag

SEQ ID NO: 148473 - protein, 468 aa, Synechococcus sp
MSRGTLFDKVWDLHTVATLPSGQTQLFIGLHLIHEVTSPQAFSMLRDRGLTVKFPGRTVATVDHIVPTENQARPFADSLAEEMIVTLERNCRENGIRFYNIGSGSQGIVHVIAPEQGLTQPGMTIACGDSHTSTHGAFGAIAFGIGTSQVRDVLASQTLALSKLKVRKIEVNGELQPGVYAKDVILHIIRKLGVKGGVGYAYEFAGSTFAAMSMEERMTVCNMAIEGGARCGYVNPDQITYDYLQGREFAPQGEAWDRAIAWWESLRSEADAEYDDVVVFDAAEIAPTVTWGITPGQGIGITETIPTPDSLLDEDRAVAAEAYSYMDLEPGAPLQGTKVDVCFIGSCTNGRLSDLREAAKVAQGRKVAAGIKAFVVPGSERVKQQAEAEGLDQIFTAAGFEWRQAGCSMCLAMNPDKLEGRQISASSSNRNFKGRQGSASGRTLLMSPAMVAAAAIAGEVTDVRNWLN

SEQ ID NO: 148474 - DNA, 1419 bp, Synechococcus sp
  CDS (1)..(1419): transl_table=11
ttgagttccggcaccctctacgacaaggtgtgggacctgcatcgggtggcggagcttcccggcggatccacccaactgttcgtgggtcttcatctgatccatgaggtcaccagccctcaggcgtttgcggcgctgcgcgacaagggtctgagcgtgcgctgccccgagcggactgtggccacggtcgatcacatcgtgcccaccacctcccagagtcgtccgtttgctgattccttggctgaggagatgctcagcaccttggagcgcaactgcgctgaccatgggatcaccctcaacggcatcggcagcggccgacagggcatcgtgcatgtgatcgctccggagctggggctgacccagcccgggatgaccgtcgcctgtggcgactcccatacgtcgacccatggggcctttggagccatcgccttcggcattggcaccagtcaggtgcgcgatgtgctggccagtcagagcctggccatgtcgaaactcaaggtccggcgcatccaggtgaacggtcggctgtccgatggggtctcggccaaggacctgatccttcacgtgatccggacgctcggtgtgaaggggggcgtcggatttgcctatgagttcgcgggcccagcggtggaggcgctgtcgatggaagagcggatgaccctttgcaatatggcgatcgagggtggtgcccgttgcggttatgtgaatccagatcaagtcacctttgattacctcagcggtcgagcaggagccccttcgggtgctgcctgggatcgggccgtgagctggtggcgcggcttggccagcgatccggacgctgtggtggatgacgaggtggtgtttgatgcggccagcatcgctcccacagtgacctggggcatcacaccgggtcaggggctgggcatcgatgagtgcattccgcagcttgagcagctggagccaggtgagcgacccatcgccgaggaggcctatcgctatatggatctgcagcccggtaccgccattgcgggggtgcctgtggatgtctgcttcattggcagttgcaccaacggtcgactcagcgatctgcgggcggcggcggctgtggcccgtggtcgccacgtcgctgatggcatcaaggcctttgtggtgccgggttccgagcaggtggcgaaggcagcggaagcggaaggactcgatcgtgtgttccaagacgctggcttcgagtggcgtgaaccgggttgttcgatgtgtctggcgatgaatcccgatcgcctcgaaggccggcagatcagtgccagttccagcaatcgcaacttcaaggggcggcaggggtctgccagcggacgcaccctgttgatgagtccggcgatggtggcagctgccgctgtccacggccaggtgaccgatgtccgcaccctgtcacttcaatccgcggtctga

SEQ ID NO: 148475 - protein, 472 aa, Synechococcus sp
MSSGTLYDKVWDLHRVAELPGGSTQLFVGLHLIHEVTSPQAFAALRDKGLSVRCPERTVATVDHIVPTTSQSRPFADSLAEEMLSTLERNCADHGITLNGIGSGRQGIVHVIAPELGLTQPGMTVACGDSHTSTHGAFGAIAFGIGTSQVRDVLASQSLAMSKLKVRRIQVNGRLSDGVSAKDLILHVIRTLGVKGGVGFAYEFAGPAVEALSMEERMTLCNMAIEGGARCGYVNPDQVTFDYLSGRAGAPSGAAWDRAVSWWRGLASDPDAVVDDEVVFDAASIAPTVTWGITPGQGLGIDECIPQLEQLEPGERPIAEEAYRYMDLQPGTAIAGVPVDVCFIGSCTNGRLSDLRAAAAVARGRHVADGIKAFVVPGSEQVAKAAEAEGLDRVFQDAGFEWREPGCSMCLAMNPDRLEGRQISASSSNRNFKGRQGSASGRTLLMSPAMVAAAAVHGQVTDVRTLSLQSAV

SEQ ID NO: 148476 - DNA, 1407 bp, Synechocystis sp
  CDS (1)..(1407): transl_table=11
atgagcgcaagaaccttatttgacaaagtttgggatctccacaccatcagtgttttgccatcgggtcaaacccaactcttcatcgggttgcacctgatccacgaagtcaccagtccccaggcctttgccatgctgaaagagcgggggttgcgggttatgtatccagaaagaacggtggctacggtggaccacattgtgccgacggaaaatcagcaacggcctttccaggattccttagctgaagaaatgatgcaagcgttggaggttaataccaaagcccataatattcgcttccatcccattggctccggcaatcaaggcattgtccatgtcattgccccggaacagggcctaacccaaccaggtatgaccattgcctgtggcgattctcacacttctacccacggggccttcggggcgatcgcctttggcattggcacttcccaagtgcgggacgtgttggcagcccagagtttgagcttaaataagttaaaagtaagaaaaattgaggttaacggtgatttagcccctggggtctacgccaaggacgtgattctccacattatccgcaaattgggcgttaagggcggggtgggctatgcctatgagtatgccggatcaacctttgtcgccatgaatatggaagaacgcatgaccgtttgtaatatgtccattgaggggggagctcgctgcggctatatcaacccagatgaagtaacttttgcatacctcaaagggcgggagtttgctccccaaggggaagattgggacaaggcagtgcaatggtggcgcagtattgccagtgaacccgatgcggtgtacgacgatgtggtttccttccgggcagaggacattgaacccaccgttacctggggcattacccccggccaaggcattggcatcagtgagccggttcctacccttgacagcctcaaccccgatgatcaggcgatcgccagcgaagcctacaaatatatgcaattccagccgggacaaccgctgaaaggcaccaaggtcgatgtttgtttcattggtagttgcaccaatggtcgtttgagcgacctggaggaagccgctaaggtagccaagggtcaccaggtagcggccggggtaaaagcttttgtggtgcccggttccgaacaagtcaagcaacaggccgaagcagcagggctagatcaaattttccaagcggcgggttttgaatggcgagaagcaggctgttccatgtgtttggccatgaaccccgacaaactccagggtgatcaactgagtgcttcctcttccaaccgtaactttaagggtcgtcagggttctgcctctggccgtactttgttaatgagtccagcgatggtcgcggcggcggccattacggggcaagtagctgatgtgcgggaagtactaggctaa

SEQ ID NO: 148477 - protein, 468 aa, Synechocystis sp
MSARTLFDKVWDLHTISVLPSGQTQLFIGLHLIHEVTSPQAFAMLKERGLRVMYPERTVATVDHIVPTENQQRPFQDSLAEEMMQALEVNTKAHNIRFHPIGSGNQGIVHVIAPEQGLTQPGMTIACGDSHTSTHGAFGAIAFGIGTSQVRDVLAAQSLSLNKLKVRKIEVNGDLAPGVYAKDVILHIIRKLGVKGGVGYAYEYAGSTFVAMNMEERMTVCNMSIEGGARCGYINPDEVTFAYLKGREFAPQGEDWDKAVQWWRSIASEPDAVYDDVVSFRAEDIEPTVTWGITPGQGIGISEPVPTLDSLNPDDQAIASEAYKYMQFQPGQPLKGTKVDVCFIGSCTNGRLSDLEEAAKVAKGHQVAAGVKAFVVPGSEQVKQQAEAAGLDQIFQAAGFEWREAGCSMCLAMNPDKLQGDQLSASSSNRNFKGRQGSASGRTLLMSPAMVAAAAITGQVADVREVLG

SEQ ID NO: 148478 - DNA, 1398 bp, Thermobifida fusca; identical to SEQ ID NO: 103361
  CDS (1)..(1398): transl_table=11

SEQ ID NO: 148479 - protein, 465 aa, Thermobifida fusca; identical to SEQ ID NO: 103362

SEQ ID NO: 148480 - DNA, 1404 bp, Thiobacillus denitrificans; identical to SEQ ID NO: 103367
  CDS (1)..(1404): transl_table=11

SEQ ID NO: 148481 - protein, 467 aa, Thiobacillus denitrificans; identical to SEQ ID NO: 103368

SEQ ID NO: 148482 - DNA, 2322 bp, Ustilago maydis; identical to SEQ ID NO: 103369
  CDS (1)..(2322)

SEQ ID NO: 148483 - protein, 773 aa, Ustilago maydis; identical to SEQ ID NO: 103370

SEQ ID NO: 148484 - DNA, 1404 bp, Vibrio cholerae; identical to SEQ ID NO: 103371
  CDS (1)..(1404): transl_table=11

SEQ ID NO: 148485 - protein, 467 aa, Vibrio cholerae; identical to SEQ ID NO: 103372

SEQ ID NO: 148486 - DNA, 1416 bp, Vibrio parahaemolyticus
  CDS (1)..(1416): transl_table=11
atgggcaaaacactatacgaaaaagtctacgacgcacacgttgccgtcgcggcagaaggggaaacccctattctttatattgatcgtcacttggtacacgaagtgacctctccacaagcctttgatggcttgcgtgaaaaaggtcgtaaagttcgtcaggttagcaaaacgttcgccacgatggatcacaacgtttcgaccacaaccaaagacatcaatgcctctggcgagatggcgcgtatccaaatggaaacgctatcgaaaaactgcgaagagttcggtgttaccctttacgacctaaaccacaaatatcagggcatcgtccatgttatgggcccagagctaggcattactctaccgggtatgaccatcgtttgtggtgactctcataccgcaacacacggggcatttggctcactggctttcggtatcggtacatcagaagttgaacacgtactagcgactcaaacgctaaaacaagcacgtgcgaaaacaatgaaaatcgaagtgaaaggtaaagtcgcgccgggtattaccgcaaaagatatcgttctagcgatcatcggcaaaacaacggctgcgggcggtactggctatgtggttgaattctgcggtgaagcgattactgacctttctatggaaggccgcatgacggtatgtaacatggccattgaattgggcgcaaaagcaggcctaattgcaccagatgaaaccacgtttgaatatatcaaaggtcgtaagttctcaccgcaaggcgcagattttgatgctgcagtagagtactggaagacgttaaaaactgacgcagatgccgaatttgatgccgtagtaacgctaaatgctgctgacatcaaaccacaagtaacttggggcacaaacccaggtcaggtcattgccgttgaccaaccgattccagcaccagaaagcttcactgatccaatcgaaaaagcgtctgctgaaaaagcattggcttacatgggcctagaagcaggcaaatcattgtctgattaccaagtaaataaagtgtttgttggctcttgtactaactctcgcatcgaagacatgcgcgctgccgccgtcgtggcgaaaggccgtaaggtcgcatcgcacgttcaagcattgattgtcccgggctcagaacaggtgaaagcacaagcagaagccgaaggcttggatgtcatctttaaagaagcgggctttgaatggcgtctaccaggttgttcaatgtgtttagcaatgaacaatgaccgtttgggacctcacgagcgttgtgcatcaacatcaaaccgtaactttgaaggccgtcagggtcgtgatggccgcactcacttggttagccctgcaatggcagccgcggcagctatcgctggtcactttgttgacattcgtgaattaacttttgataaacaggattag

SEQ ID NO: 148487 - protein, 471 aa, Vibrio parahaemolyticus
MGKTLYEKVYDAHVAVAAEGETPILYIDRHLVHEVTSPQAFDGLREKGRKVRQVSKTFATMDHNVSTTTKDINASGEMARIQMETLSKNCEEFGVTLYDLNHKYQGIVHVMGPELGITLPGMTIVCGDSHTATHGAFGSLAFGIGTSEVEHVLATQTLKQARAKTMKIEVKGKVAPGITAKDIVLAIIGKTTAAGGTGYVVEFCGEAITDLSMEGRMTVCNMAIELGAKAGLIAPDETTFEYIKGRKFSPQGADFDAAVEYWKTLKTDADAEFDAVVTLNAADIKPQVTWGTNPGQVIAVDQPIPAPESFTDPIEKASAEKALAYMGLEAGKSLSDYQVNKVFVGSCTNSRIEDMRAAAVVAKGRKVASHVQALIVPGSEQVKAQAEAEGLDVIFKEAGFEWRLPGCSMCLAMNNDRLGPHERCASTSNRNFEGRQGRDGRTHLVSPAMAAAAAIAGHFVDIRELTFDKQD

SEQ ID NO: 148488 - DNA, 1401 bp, Vibrio vulnificus
  CDS (1)..(1401): transl_table=11
atgggcaaaacactatacgaaaaagtttatgaagcacacgtcgcggttgccgcagaaggtgagacgccgatcctatatatcgaccgtcatttagtgcatgaagtgacttctccacaagcgtttgatggcttacgtgaaaaggggcgccaagtgcgtcaagtgagcaaaacgttcgcgaccatggatcataacgtatccaccaccaccaaagacataaatgcgtctggtgaaatggcccgtattcagatggaaaccctgatcaaaaactgtcaggaattcggcgtcaccttgtacgacatcaaccataaatatcaaggcattgtgcatgttatggggccagaattgggcatcactttaccaggcatgaccattgtctgtggtgattctcacaccgcaacacacggtgcgtttggttcgctggcatttggtattggtacttctgaagtcgagcacgtgctggcaacacaaacccttaagcaagcgcgcgccaaaaccatgaaaatcgaagttcaaggcaaagtcgctgacggtatcaccgccaaggacatcgtccttgccatcattggcaaaaccaccgcagcgggtggaacgggctatgtggtggagttctgtggtgaagcaattacagacctttccatggaaggccgcatgaccgtgtgcaatatggcaattgagttgggtgccaaagcaggcttgatcgcaccagaccagaccaccttcgactacatcaaaggtcgtaaattcgcgccaactggcgcagattgggatgcggcggttgaatactggaaaacactcaaaaccgatgaagacgctaaatttgatgccgtggtgacgctaaacgctgccgatatcaaacctcaagtgacttggggcacgaacccaggccaggtgattgccgtggatgagcccattccagcaccagaaagcttcagcgatcccgttgaaaaagcgtccgctgaaaaagcactggcgtacatgggactggaagcaggtaaatcgctgtccgaatacaaagtcgacaaagtctttgtcggctcttgcacaaactcacgtatcgaagatatgcgcgccgccgctgtcgtcgccaaagggcgcaaagtggcatcacacgttcaagcgctgattgttccggggtctgagcaagtcaaagcgcaagccgaagccgaaggtttggatgtcattttcaaagaagcgggttttgaatggcgcctacctggttgctctatgtgcctggcaatgaacaatgatcgtctagggccacatgagcgctgtgcgtcaacgtcaaaccgtaactttgaaggccgccaaggtcgtgatggtcgtacgcatctagtcagtccagccatggctgccgcggcggcaattgctggtcattttgttgatattcgagattggaaataa

SEQ ID NO: 148489 - protein, 466 aa, Vibrio vulnificus
MGKTLYEKVYEAHVAVAAEGETPILYIDRHLVHEVTSPQAFDGLREKGRQVRQVSKTFATMDHNVSTTTKDINASGEMARIQMETLIKNCQEFGVTLYDINHKYQGIVHVMGPELGITLPGMTIVCGDSHTATHGAFGSLAFGIGTSEVEHVLATQTLKQARAKTMKIEVQGKVADGITAKDIVLAIIGKTTAAGGTGYVVEFCGEAITDLSMEGRMTVCNMAIELGAKAGLIAPDQTTFDYIKGRKFAPTGADWDAAVEYWKTLKTDEDAKFDAVVTLNAADIKPQVTWGTNPGQVIAVDEPIPAPESFSDPVEKASAEKALAYMGLEAGKSLSEYKVDKVFVGSCTNSRIEDMRAAAVVAKGRKVASHVQALIVPGSEQVKAQAEAEGLDVIFKEAGFEWRLPGCSMCLAMNNDRLGPHERCASTSNRNFEGRQGRDGRTHLVSPAMAAAAAIAGHFVDIRDWK

SEQ ID NO: 148490 - DNA, 1269 bp, Wolinella succinogenes
  CDS (1)..(1269): transl_table=11
atgggacagactctcaccgagaaaattttttctgcgcacaccaataagcaggtgagcgcgggcgaaatcatcgaatcgcctattgatatggtcataggaaacgacatcaccacgcccctctctattcgcgcttttgaggagagcggcgcaacaaagctcgctaatcctgatggattttgcattgtcatggatcacttcatccccgccaaggatatcgctagcgccaatcaagcgcgaatcagccgagattttgccaaaaagcatcagctaaaacactattttgatgagcgcgatatgggaatcgaacacgccatcctccccgaaaaagggttggtactccctggcgatgtgattattggggccgattctcacacctgtacacacggtgctcttggcgcctttgccacgggtatgggaagcaccgatcttgcctacgccatgatcacgggaaaaaactggttcaaggtacccccaagcatccgcgtggtctttaaaggcaagctccaagagcatgtctatggcaaagatctcatcctggagatcatccgccaaatcggcgtggatggagccctctacaaggctttagaattccaaggtgacaccatcgagcagctcagcatggatgatcgattctctctttgcaatatggcgattgaagcgggagccaaaaatggcattatcgctgctgattccatcaccaaagagttccttgcctcaagaaaatccctccgagctgaacctaaatactatcaggcggatgcggatgccctctatgagcagacgattgagattgatgtagagaaactagagcccgtgatcgcctatccctttctccctagcaatggcaaaagcatctcccaagcggtcaaagatgacctcaaaatcgatcaagccttcatcggaagctgcaccaacggccgcctaagcgaccttcgaatcgccgctcaaatcctcaaaggcaagcgcgtccatcccgatgtgcgcctcatcatcaccccaggaacccaacaaatttacaaagacgcccaccaagagggactcatcgacaccctcctagaagcgggtgcgcttattagcaaccccacctgtggcgcttgccttggcggctacatgggaatccttggagacaacgaacgatgtgtctccaccaccaaccgaaactttgtcggccgaatgggtgctagaagctccgaggtctatctcgccaactccgccgtagctgcggctagcgccctaaagggcaaaatcaccgacccaagaaaactataa

SEQ ID NO: 148491 - protein, 422 aa, Wolinella succinogenes
MGQTLTEKIFSAHTNKQVSAGEIIESPIDMVIGNDITTPLSIRAFEESGATKLANPDGFCIVMDHFIPAKDIASANQARISRDFAKKHQLKHYFDERDMGIEHAILPEKGLVLPGDVIIGADSHTCTHGALGAFATGMGSTDLAYAMITGKNWFKVPPSIRVVFKGKLQEHVYGKDLILEIIRQIGVDGALYKALEFQGDTIEQLSMDDRFSLCNMAIEAGAKNGIIAADSITKEFLASRKSLRAEPKYYQADADALYEQTIEIDVEKLEPVIAYPFLPSNGKSISQAVKDDLKIDQAFIGSCTNGRLSDLRIAAQILKGKRVHPDVRLIITPGTQQIYKDAHQEGLIDTLLEAGALISNPTCGACLGGYMGILGDNERCVSTTNRNFVGRMGARSSEVYLANSAVAAASALKGKITDPRKL

SEQ ID NO: 148492 - DNA, 1440 bp, Xanthomonas axonopodis pv; identical to SEQ ID NO: 103373
  CDS (1)..(1440): transl_table=11

SEQ ID NO: 148493 - protein, 479 aa, Xanthomonas axonopodis pv; identical to SEQ ID NO: 103374

SEQ ID NO: 148494 - DNA, 1449 bp, Xanthomonas oryzae pv; identical to SEQ ID NO: 103375
  CDS (1)..(1449): transl_table=11

SEQ ID NO: 148495 - protein, 482 aa, Xanthomonas oryzae pv; identical to SEQ ID NO: 103376

SEQ ID NO: 148496 - DNA, 1425 bp, Xylella fastidiosa
  CDS (1)..(1425): transl_table=11
atggccggtaagactctgtatagcaaattgtgggacattcatgaggtggcccgtcgcgacgatgggtcttcgctcatttacattgatcgccatatacttcacgaagtgacttcaccacaggcttttgaagggttgcgtttagctggacggccgttgtggcgggtcaatgccaatattgcgactccggatcataatgtcccgacgaccaaggcggagcgtcaaggcagtttgctatcgattgccgatacggtttcgcgtttgcaggtacagacgttggatgaaaattgcgacgatttcggtatcttcgaattcaagatgaatgatgtgcgtcaagggatcgtccacgtgatcggtccagaacagggagccaccttgcctggtatgacagtagtgtgcggtgattcacacacctccacacacggtgcctttggtgcgttggcgcatggcattggtacctctgaagttgagcacgtgttagccacgcagtgcttagtcacccagaagatgaaaaatatgcaagtgcgtgtggaaggcaccttgccatggggggtgacggccaaagatatcgtattggcgttgattgggaagataggcacggccggaggcaacggttatgcggtggagttttccgggagtaccatccgcgcgttgtcgatggaagggcgcatgaccatttgtaatatggctattgaggctggtgcgcgcgtgggtatggtggcggtggacgagaagaccatccagtatgtgcatggccgcccgtttgcacctaaaggatccgattgggatgctgctgttgcattctggcgtggtttggtttccgatccagatgcgcactttgatcgtgtggttgagttatctgctgaagagattaaacctcaggtcacttgggggacctcgccagagatggtgtcggcagtggatcaatcggtgccagacccagagcgcgaaactgatccagtcaagaaggagtctttgattcgtgccctgaaatatatgggtttgcagccgaatgatccgatcacttcaataaagctggaccgtgtatttattggctcctgtacgaattcccgtattgaagacttacgtgctgctgcggaagtagttaaaggccgtaaagttgcttccacggtgaagcaggcgatggtcgtgcctggctcgggattggtaaaggcacaggctgaagttgagggcttggacaagatattcattgaggctggtttcgagtggcgtgaacctggatgttcgatgtgtttggcgatgaatcccgataaattgggcagtggcgagcattgcgcatctacttctaatcgtaacttcgaggggcgccagggcatcggtggtcgtacccatttagtcagccctgcgatggcagctgctgcggccgtggctggtcactttgtcgatgtccgcgaaatgatgcggtga

SEQ ID NO: 148497 - protein, 474 aa, Xylella fastidiosa
MAGKTLYSKLWDIHEVARRDDGSSLIYIDRHILHEVTSPQAFEGLRLAGRPLWRVNANIATPDHNVPTTKAERQGSLLSIADTVSRLQVQTLDENCDDFGIFEFKMNDVRQGIVHVIGPEQGATLPGMTVVCGDSHTSTHGAFGALAHGIGTSEVEHVLATQCLVTQKMKNMQVRVEGTLPWGVTAKDIVLALIGKIGTAGGNGYAVEFSGSTIRALSMEGRMTICNMAIEAGARVGMVAVDEKTIQYVHGRPFAPKGSDWDAAVAFWRGLVSDPDAHFDRVVELSAEEIKPQVTWGTSPEMVSAVDQSVPDPERETDPVKKESLIRALKYMGLQPNDPITSIKLDRVFIGSCTNSRIEDLRAAAEVVKGRKVASTVKQAMVVPGSGLVKAQAEVEGLDKIFIEAGFEWREPGCSMCLAMNPDKLGSGEHCASTSNRNFEGRQGIGGRTHLVSPAMAAAAAVAGHFVDVREMMR

SEQ ID NO: 148498 - DNA, 2340 bp, Saccharomyces cerevisiae; identical to SEQ ID NO: 103379
  CDS (1)..(2340)

SEQ ID NO: 148499 - protein, 779 aa, Saccharomyces cerevisiae; identical to SEQ ID NO: 103380

SEQ ID NO: 148500 - DNA, 1431 bp, Yersinia pestis; identical to SEQ ID NO: 103381
  CDS (1)..(1431): transl_table=11

SEQ ID NO: 148501 - protein, 476 aa, Yersinia pestis; identical to SEQ ID NO: 103382

SEQ ID NO: 148502 - DNA, 1431 bp, Yersinia pseudotuberculosis; identical to SEQ ID NO: 103383
  CDS (1)..(1431): transl_table=11

SEQ ID NO: 148503 - protein, 476 aa, Yersinia pseudotuberculosis; identical to SEQ ID NO: 103384

SEQ ID NO: 148504 - DNA, 1455 bp, Zymomonas mobilis; identical to SEQ ID NO: 103385
  CDS (1)..(1455): transl_table=11

SEQ ID NO: 148505 - protein, 484 aa, Zymomonas mobilis; identical to SEQ ID NO: 103386

SEQ ID NO: 148506 - DNA, 2061 bp, Ashbya gossypii
  CDS (1)..(2061)
atgcgggtagtgcggtgtgtgcggcggttttctgcgagcagagccgtgtcaggccagaataccacagagaagatcgtgcaagcgcacgcggtcggcctgcggcccggccaccgggtggcgtcgggcgactacgtttcgatccggccggcgcattgcatgtcccacgacaactcatggccggtagccttgaagttcatgggcctcggcgccacgcgcgtgcacgacgcgcgccaggtggtatgcacgctcgaccacgacgtgcagaaccgctcggaaaagaacctcgccaaataccgcaatatagagctgtttgccgcgcagcaaggcgtggacttttacccagcccgcaggggcattgggcaccagatcatggtcgaggagggctacgccttcccactgggtctgactgtcgcgtcggactcccactctaatacgtacggaggcgtcggcgccctaggcacccccgtagtgcgcacagatgcggcggctatctgggccacgggacagacgtggtggcaggttccgccggtggcacgggtggagctgacaggcgagcttcctgcgggtgtttctgggaaggacgcaatcgtggcgctgtgcggggtgtttgggcgggacgaggtgctaaaccatgccgtagagttcgcggggccaggagtggcgcggctgacggtcgagcagcggctgacagtggccaacatgacgacggaatggggcgcgctgtccgggttgttcccggttgacggggtgctcctggactggtaccgcgagcaagtagcgcgggcaccagccggccacgcacggttgactgcagcccgcgtggacgcgctggcagagcgtgcggcggcaatgcagccagacacagacgcgcgctacgcgaagcagctgacactggacctgtcatcactgacacactacgtcagcggccccaatagtgtgaaggtcgcgcggccgatagctgagctagcgccacagcagctccgcatagacaaggcgtacctcctgtcatgcacgaacgggcgcctggaggacctagaggcggcagcggcagttctccgtgcagacggcaatgtgcggcaggtggcaccaggcgtcgaattctacattgcagctgcctctgccgaagtggaagcacaggcgcgtgcgcgggggacgtgggacgtgctgctgagcgcgggatgcatcccgctgccgtctggatgcggcccgtgcatcggactgggcaaaggcctactggaagccggcgaggttggcatatctgctactaaccggaacttccgcggacgtatgggctccaaggacgcggaggcatacctggcgtcgcccgcggtcgttgcagcgtctgctgtcctgggccggatcgcggcgccgtgcgaggtgcttggcttgtcgccgcccgccgcccctgcagtgcgtgcgtctgtggcccagtgtggcgcacccgccgcagcggacggagctgccgcggccgtggaggtgctgccgggcttcccgcgcgccatcacaggtgaattagttctatgcgatgcagacaatatcaacacagacgggatctaccccggtaaatatacctacgaggacgatataccgcgcgagaccatggcgcgcgtttgcatggaaaattatgacctcgatttccagcacaatgtacatgccggcgacattgttgttggcggctacaacttcgggaccggctcgtcccgcgagcaagccgcgaccgcgctgcttgcgaagggcgtgccacttgtcgtcgcagggtccttcagtaacacgttcagccgaaatgccatcaataacgcactgctcaccctggagctgccggctttgctgcagctactacgtgagcgctacgcagacgcgccctcacaggcaactcgccgcacaggcgttttcctgacatgggacgtggccgcggcaaccgtcaccgtcaccgttggctcccccaccggcgaacgcgtgctgcaccagagggtgggcgagttcagcgcaaatctccaggagatcattgtaaagggcggcctcgagggctgggtcaagcacgctttggcgcaaagcgcctaa

SEQ ID NO: 148507 - protein, 686 aa, Ashbya gossypii
MRVVRCVRRFSASRAVSGQNTTEKIVQAHAVGLRPGHRVASGDYVSIRPAHCMSHDNSWPVALKFMGLGATRVHDARQVVCTLDHDVQNRSEKNLAKYRNIELFAAQQGVDFYPARRGIGHQIMVEEGYAFPLGLTVASDSHSNTYGGVGALGTPVVRTDAAAIWATGQTWWQVPPVARVELTGELPAGVSGKDAIVALCGVFGRDEVLNHAVEFAGPGVARLTVEQRLTVANMTTEWGALSGLFPVDGVLLDWYREQVARAPAGHARLTAARVDALAERAAAMQPDTDARYAKQLTLDLSSLTHYVSGPNSVKVARPIAELAPQQLRIDKAYLLSCTNGRLEDLEAAAAVLRADGNVRQVAPGVEFYIAAASAEVEAQARARGTWDVLLSAGCIPLPSGCGPCIGLGKGLLEAGEVGISATNRNFRGRMGSKDAEAYLASPAVVAASAVLGRIAAPCEVLGLSPPAAPAVRASVAQCGAPAAADGAAAAVEVLPGFPRAITGELVLCDADNINTDGIYPGKYTYEDDIPRETMARVCMENYDLDFQHNVHAGDIVVGGYNFGTGSSREQAATALLAKGVPLVVAGSFSNTFSRNAINNALLTLELPALLQLLRERYADAPSQATRRTGVFLTWDVAAATVTVTVGSPTGERVLHQRVGEFSANLQEIIVKGGLEGWVKHALAQSA

SEQ ID NO: 148508 - DNA, 2334 bp, Aspergillus fumigatus
  CDS (1)..(2334)
atgtttaaacgcaccggatctttgctgcttcggtgcagagcatcgcgagtccccgttatcggtcgacctttgatctcattatcaacctcctccacctccctgtctctatctcgtcctcgatcctttgccactacatcccttcgccgttacacggaggcatcatcctccacgacacaaacttctccttcgtcctcgagttggcccgctcccgatgccgccccccgcgtcccccagaccctgaccgagaagatcgtccaagcatattctctgggcctcgccgaaggccaatacgtaaaggctggagactatgtcatgcttagccctcaccgctgcatgacccacgacaactcatggcccaccgcgctcaagttcatggcaattggcgcatccaaggtccacaaccccgaccagattgtgatgaccctagaccacgatgtccagaacaagagcgagaagaacctaaagaaatacgaatcgattgagaagtttgccaagcaacatggcatcgacttctatccagccggtcacggcgtcggccatcagatcatgattgaggagggatatgccttccccggcaccgtcactgtggcgagtgacagtcactccaacatgtacggtggagttggttgtcttggtactcccatggttcgtaccgatgccgcgaccatctgggctaccggccgtacctggtggaaggtcccccctatcgcaaaggtgcagttcactggcaccctccccgagggtgtcactggaaaggacgtcattgtcgctttgtcaggtctcttcaacaaagacgaggttctcaactacgccattgagtttactggctcggaggagaccatgaagagtctctctgtcgacacccgtctgaccatcgccaacatgaccaccgaatggggtgcgctgaccggactgttccccattgactcgaccctggagcaatggctgagacacaaggccgctaccgcatcacggacagagacagcgcgccgattcgccgaggagcgtatcaacgagttgttcgccaaccccaccgtcgctgatcgtggcgccaggtacgccaaatacctctacctggatctgtcgaccctgtcgccctacgtttccggaccgaactccgtcaaggtcgccaccccccttgacgaactggaaaagcacaagctgaagatcgacaaagcctacttggtgtcctgcactaactcgcgagcgtcggatattgccgccgcggctaaggtgtttaaggacgccgttgcccggacgggtgggcctgtgagggtcgcggacggcgttgagttctacgttgcggcggcttccaaggccgaacagaagattgcagaggaggcgggtgactggcaagccctgatggacgccggcgctatccccctgccagcggggtgcgccgtctgtattggtctgggcgccggtcttctcaaggagggcgaagttggaatctcggccagtaaccgaaacttcaaaggccgcatgggttcgcctgatgccaaggcctaccttgccagtcctgaagtggttgcggccagtgcactgaacggtgttattagcgggcctggcatctacaagcgccccgaagactggaccggcgtttccatcggcgaaggtgaagttgtcgagtccggctctcgcatcgacaccactttggaagcaatggagaagttcattggacaactggatagcatgatcgactcgtcgagcaaggccgtgatgccggaagagtcgactggctccggagccactgaagtcgacatcgttcccggcttccctgagaagattgagggtgaaatactcttccttgatgctgacaacatcagcactgatggcatctaccctggcaaatacacataccaggacgacgtcaccaaggacaagatggcacaggtctgcatggagaactacgaccctgccttcagcggcattgcccgcgcaggagacatcttcgtctccggcttcaacttcggctgtggctcgtcccgcgagcaagccgccacctccatcctcgctaagcagctccctctcgtcgtcgccggcagcatcggcaacaccttcagccgcaatgccgtcaacaacgccctccctctcctcgagatgcctcgcctcatcgagcgcctgcgcgaagcctttggcagcgaaaagcaaccaactcgtcgcacgggctggaccttcacctggaacgtgcgcacttcccaggtcactgtccaggaaggcccgggcggtgaaacctggagccagagcgtacctgctttccctcccaacctgcaagacattattgcccagggtggattggagaagtgggtgaagaaggagattagcaaggcttga

SEQ ID NO: 148509 - protein, 777 aa, Aspergillus fumigatus
MFKRTGSLLLRCRASRVPVIGRPLISLSTSSTSLSLSRPRSFATTSLRRYTEASSSTTQTSPSSSSWPAPDAAPRVPQTLTEKIVQAYSLGLAEGQYVKAGDYVMLSPHRCMTHDNSWPTALKFMAIGASKVHNPDQIVMTLDHDVQNKSEKNLKKYESIEKFAKQHGIDFYPAGHGVGHQIMIEEGYAFPGTVTVASDSHSNMYGGVGCLGTPMVRTDAATIWATGRTWWKVPPIAKVQFTGTLPEGVTGKDVIVALSGLFNKDEVLNYAIEFTGSEETMKSLSVDTRLTIANMTTEWGALTGLFPIDSTLEQWLRHKAATASRTETARRFAEERINELFANPTVADRGARYAKYLYLDLSTLSPYVSGPNSVKVATPLDELEKHKLKIDKAYLVSCTNSRASDIAAAAKVFKDAVARTGGPVRVADGVEFYVAAASKAEQKIAEEAGDWQALMDAGAIPLPAGCAVCIGLGAGLLKEGEVGISASNRNFKGRMGSPDAKAYLASPEVVAASALNGVISGPGIYKRPEDWTGVSIGEGEVVESGSRIDTTLEAMEKFIGQLDSMIDSSSKAVMPEESTGSGATEVDIVPGFPEKIEGEILFLDADNISTDGIYPGKYTYQDDVTKDKMAQVCMENYDPAFSGIARAGDIFVSGFNFGCGSSREQAATSILAKQLPLVVAGSIGNTFSRNAVNNALPLLEMPRLIERLREAFGSEKQPTRRTGWTFTWNVRTSQVTVQEGPGGETWSQSVPAFPPNLQDIIAQGGLEKWVKKEISKA

SEQ ID NO: 148510 - DNA, 2310 bp, Aspergillus niger; identical to SEQ ID NO: 103387
  CDS (1)..(2310)

SEQ ID NO: 148511 - protein, 769 aa, Aspergillus niger; identical to SEQ ID NO: 103388

SEQ ID NO: 148512 - DNA, 2328 bp, Aspergillus oryzae
  CDS (1)..(2328)
atgcagtctcgattgatgccatccggtggccctggcaggcgctgggcattcctgcgcgtgccgagcactcctcaacgacgtgcgttcgcctccactaggttctacttccaagatattttccagtcgcaattggaggatccctcatcagctgcggtctactcctcccttcaggcgtcgagagctgttccgcagacactcacagagaagatcgttcagaaatactccgttggtttggccaaggataagttcgtcaaatccggcgattatgtcactatctcgcctcaccggtgtatgactcacgacaattcgtggcctgttgcattgaaattcatgtctattggtgcaacgaaactacatgatccgaagcagattgtgatgacgctcgaccacgatgtacagaacaagtcggagaagaatctccagaagtatcgtcagatcgaagactttgccaagcaccagggggttgagttttatccggccggaagaggtattgggcatcaagtcatggtcgaagaaggctatgcttggcccggtactcttgtggtcgcttccgatagccatagtaacatgtacggtggcgtcggctgcttgggtacgccaatagtgagaacggacggtgctagcatctgggccactgggaagacatggtggcagatcccgccggttgcaaaggtcactttaaccggtgtattaccaccgggtgtgaccggcaaggatgtgatcgtcgctctttgcggattgttcgataaggacgatgttttgaaccatgcaatcgaatttactggccccgaggagactatgcgcagtctatcggtagatgcccggttaacgatcgccaacatgacgacagaatggggtgccttgtctggactgttcccaattgacaatgtattgaaaggatggctgaaaggcaaggctacaacagcagccatggggcttgcggagggtcccttcaagaccctagccccccagcatttcacacacccgctcctcgagcagctgtttgccaatcctctgactgctgacaagggcgccaaatatgctaaggaacttttcctggatctttctacactttccccttacgtttccggtccaaactcggtgaaggttgccacgcctctcaaggacctcgaggcccagaatatcaaagttaacaaggcatacctcgtttcatgcaccaactccagggcttcagatatcgctgcagctgctagagtcttcaaggaagctgcggaaaagaatggtggcaaagtccccaagattgccgatggtgttgagttctatgttgcagctgcatctatccctgagcaattagctgcagaagaagccggtgattggcaggccttactagatgccggagctacgccactactgccgggatgcgcacaatgtatcgggctggggaccggtctcttagaggctggagaagtaggaatcagcgcctcgaatcgtaatttcaaaggccgtatgggtagcaccgatgcgaaagcataccttggtagccccgaagtcgttgccgctagcgccttgaccggaaagctcagcgggcccggctggtaccaggcgccggaaggtttgactgaagttgtgcgtggagaaggagacggaattcgggaggaggatcgcatgcttaccgccgaacaagccttggagaaattgatcggccagattgataatctggttgccgatggtgagaagcagtttgctccagaagagagtgaggagtcatccggtgattctctgacggaggtataccctggatttccagagcgtgtctcgggtgaaattgttttctgcgatgcagacaacatcaacaccgatggtatctatcctggcaaatatacctaccaagatgatgtttcccaagagacaatggctcaggtctgcatgtccaactacgatgctcagttctcgtcgatcgccaaagaaggtgacattctagtcactggtttcaactttggctgtggaagctccagagagcaggcagcgaccgccattctggcaaagaagatcccgctcgttgtgtcgggaagctttggcaatatcttctctcgcaacagtattaacaatgccctgatgggtctggaggttccccgtctcatcaaccgtcttcgtgagagcttctccggagaaggaagtgacaaatccctcacacgccgcactggctggaccctaacctgggacgtccgaagaagccgtattgaggtccaggagggagagaatggtcccaagtggacacaccaggtgggtgaactccctcccaatgtgcaagaaatcattgccaagggagggctggagaaatgggtcaagaacgagatcggggcctaa

SEQ ID NO: 148513 - protein, 775 aa, Aspergillus oryzae
MQSRLMPSGGPGRRWAFLRVPSTPQRRAFASTRFYFQDIFQSQLEDPSSAAVYSSLQASRAVPQTLTEKIVQKYSVGLAKDKFVKSGDYVTISPHRCMTHDNSWPVALKFMSIGATKLHDPKQIVMTLDHDVQNKSEKNLQKYRQIEDFAKHQGVEFYPAGRGIGHQVMVEEGYAWPGTLVVASDSHSNMYGGVGCLGTPIVRTDGASIWATGKTWWQIPPVAKVTLTGVLPPGVTGKDVIVALCGLFDKDDVLNHAIEFTGPEETMRSLSVDARLTIANMTTEWGALSGLFPIDNVLKGWLKGKATTAAMGLAEGPFKTLAPQHFTHPLLEQLFANPLTADKGAKYAKELFLDLSTLSPYVSGPNSVKVATPLKDLEAQNIKVNKAYLVSCTNSRASDIAAAARVFKEAAEKNGGKVPKIADGVEFYVAAASIPEQLAAEEAGDWQALLDAGATPLLPGCAQCIGLGTGLLEAGEVGISASNRNFKGRMGSTDAKAYLGSPEVVAASALTGKLSGPGWYQAPEGLTEVVRGEGDGIREEDRMLTAEQALEKLIGQIDNLVADGEKQFAPEESEESSGDSLTEVYPGFPERVSGEIVFCDADNINTDGIYPGKYTYQDDVSQETMAQVCMSNYDAQFSSIAKEGDILVTGFNFGCGSSREQAATAILAKKIPLVVSGSFGNIFSRNSINNALMGLEVPRLINRLRESFSGEGSDKSLTRRTGWTLTWDVRRSRIEVQEGENGPKWTHQVGELPPNVQEIIAKGGLEKWVKNEIGA

SEQ ID NO: 148514 - DNA, 2067 bp, Candida parapsilosis
  CDS (1)..(2067): transl_table=12
atgaggctacaccttcatcgttttatatctacttccacgccattacgcagtggtcagaacttgactgagaaaatcgtgcaaaaatatgctgtcaacttacctccaaacaagctagtccacactggtgattatgtcaccatcaagccagctcattgtatgtcacatgataactcatggccagtagcgacaaaattcatgggattgggtgccaaaagggtcaaagacaatcgtcaaattgtgtgtactttggatcatgatgtgcaaaataagacggaaaagaatttggccaagtatgccaatattgaacgatttgccaaagagcaaggtatcgatttctatcctgctggaagaggaattggccatcaaatcatgattgaagaaggatatgcgtttccattaaacttgacggtggcttcagattcacatagtaatacctatggtggtgttggatcattgggtacaccaattgtgcgtactgatgccgcaagtatatgggccactgtccaaacatggtggcaaatcccacccgtagccaaagttgaattaaaggggaacttgcaaaacggggtcactggtaaggatattattgttgcattgtgtggagttttcaataacgatgaagtattaaatcatgctattgaatttgttggagatggtgttgagaatttgcctattgattatcgattaactatagctaatatgactactgaatggggtgcattgagtggattgttccccattgatgacaagttgattgagttttatgaagggaggttgcaaaaattgggtccaaaccatcctagaatcaataaagacactatagaagctttaaggagaggaagtttagccagtgatgaggatgccaaatatgccaagcacttggttattgatttgaatacgttatcgccttatgtctcgggtccgaactcagtcaaagtgtccaatccgttgtcaaaattatctcaagataatattgccatcaataaggcgtacttggtttcatgtaccaactcacgtttatccgatatccaagcagctgctgatgtcttgaagggtcataaagtgcacccaaatgttgaattttacgttgccgctgcttcttcattagtgcaacaggatgctgaagctgctggtgcttggcaaaccataattgatgctggcgcgaaaccattacctgctggatgtggaccatgtattggcttgggtactgggttattaaaagatggcgaagtagggatcagtgcaacgaatcgtaacttcaaaggaagaatgggctctaaggatgcattggcatatttggcttcacctgaagttgtcgctgcgtcggccgtattgggtaaaattggtgctcccgaggaaattgatggcaagcccgtcaatgcatcaccagaaattgttaaaagtattgatttaccaaagagtagtggcaatactggtgccacttctgaagaaccaattagtgaagacgataccagcgaagcttcagttgaagtgttgcctggattccccaaatcaattcaaggtgaactcatcttgtgtaatgccgataacatcaacactgacggaatataccctgggaaatacacttaccaagatgatatatcacgcgaacaaatggcagaagtgtgtatggaaaactatgaccccgaattcaagaccaagaccaaactggatgacattataattagtggttacaattttggtactggctcatctcgtgaacaagcagctacatgtattttagcacgtggcatgaagttggttgttgctggatcatttggaaacatattcagtagaaattcaatcaataatgccttgttaacacttgagattcctgaattgattgagaagttacgtgtcaagtatgatggtgtaaatgagttgactatacgtacaggatggtttttgaagtgggatgttacgaaagcccttgttactgttgctgatttggatggtgaagtgattttgcaacagaaggttggtgagttgggtactaatttacaggatattatcgttaaaggtgggttagaaggatgggttaagtcggagttgcaaaaagaacaataa

SEQ ID NO: 148515 - protein, 688 aa, Candida parapsilosis
MRLHLHRFISTSTPLRSGQNLTEKIVQKYAVNLPPNKLVHTGDYVTIKPAHCMSHDNSWPVATKFMGLGAKRVKDNRQIVCTLDHDVQNKTEKNLAKYANIERFAKEQGIDFYPAGRGIGHQIMIEEGYAFPLNLTVASDSHSNTYGGVGSLGTPIVRTDAASIWATVQTWWQIPPVAKVELKGNLQNGVTGKDIIVALCGVFNNDEVLNHAIEFVGDGVENLPIDYRLTIANMTTEWGALSGLFPIDDKLIEFYEGRLQKLGPNHPRINKDTIEALRRGSLASDEDAKYAKHLVIDLNTLSPYVSGPNSVKVSNPLSKLSQDNIAINKAYLVSCTNSRLSDIQAAADVLKGHKVHPNVEFYVAAASSLVQQDAEAAGAWQTIIDAGAKPLPAGCGPCIGLGTGLLKDGEVGISATNRNFKGRMGSKDALAYLASPEVVAASAVLGKIGAPEEIDGKPVNASPEIVKSIDLPKSSGNTGATSEEPISEDDTSEASVEVLPGFPKSIQGELILCNADNINTDGIYPGKYTYQDDISREQMAEVCMENYDPEFKTKTKSDDIIISGYNFGTGSSREQAATCILARGMKLVVAGSFGNIFSRNSINNALLTLEIPELIEKLRVKYDGVNELTIRTGWFLKWDVTKALVTVADLDGEVILQQKVGELGTNLQDIIVKGGLEGWVKSELQKEQ

SEQ ID NO: 148516 - DNA, 2187 bp, Cryptococcus neoformans
  CDS (1)..(2187)
atggtcgcaatcccacgactcgcaaggctctcagtcccagcatgggctcttagtgcaagaggcaggttctacgcaacagtctccaccccccagacgctcgtcgaaaagatcgtccaaaagtacgcggtcggtctctcagagggtgtcaaagttcgtgccggggactatgtcatgatcaagccagagcatgtgatgacccatgacaacactggtcctgtcatttccaagtttctctctctctcctgttccaagctcgacaaccctagacaacccgtttttgcccttgatcacgacgtgcaaaaccagtctgaaaccaaccagaagaagtacaagaagattcaggcttttgccaaggagcatggtgttgacttttaccctgctggtcgaggtattggtcaccagatcatcgtcgaggagggttacgcctggccagggaagatggtggttgcaagtgatagtcattctaaccactacggtggtgtcggatgtttgggtactgcgattgtcagaactgatgccgctggcatctgggctacaggcaagttctggtggcaaatccctcgaattgtctccgtttctctcgacggccgattgtctcctggtgtgactggcaaggacgttatcgttgctctcgctggtcttttcaacaaggacgaagtcctcaatgccgctatcgaatttaccggttctggtgtcgagcacttgtccattgacgaacgtctcactattgccaacatgactaccgaatggggagctgttgctggtgtattccctgttgacgacaagctcaaagagtggtaccaaggcatcctccgaaaggcggaattacggaagttcatcagccccaccgtcccttccacagtcggcgctaaggtccaccctcgtctcaatgccgcccgtctcgacgacgctatgaccaacagggtcgttgctgaccctggagcccactatgcagctcgcctttccctcgacctttccactctcgttcctcatgtctcaggtcccaactctgttaaggttgccaccgctctccctaagcttctcgaccctcccatccctatcaacaaggcgtatcttgtctcatgtaccaactctcgagcgtctgacattgcctctgccgctcaagttctgcgaggaaagaaggttgctcctggcgttgaattttacatcgccgccgcctctagccgagtccaggaagatgccgaagctgccggtgattggcagactttgattgacgcaggtgccaaaactctccctgcaggttgcggcccttgtatcggtcttggtgtcggtctccttgagaagggtgaagtgggtatcagtgccaccaacagaaactataaaggtcgtatgggtagccccgatgctatcgcctaccttgcctcccctgctgtcgtcgctgcctctgctgccaagggtgtcatttgcggccccgagtctatggacctcagccaacttccccagtatgaacagccaaagttttctatcatcgaggaaggtgctgctggtgaggagaagcctgttgaggttgacgaggcttcccttgagcccttgctcgaaggtttccctgcctactttgagggtccacttctttttgcccctcaagataacttgacaaccgatggaatgtatcctggaaagtacacataccaggatgacatcacccctgagcgacaagccgaagttgtcatggaaaactatgaccccacttttgctgctaccgcccgcgaactccgtaccgccctccccactgcttcttccccctccactcttcccggcgccatccttctttctggttacaactttggtaccggttcatcccgtgaacaagctgctactgccatcaagaacgccggtatccctctcgttatctgcggttctttcggtgacattttcaagagaaactccatcaacaacggtctaattcttatcgaatctcctagcttgatcaaggacatgacggagagattcgccaaggacggagtaaggaacaagggtggcaaggatggcaaattgactgtcgtccctgagggctggagaatcaaggtggactctcaaagagggttggtgaccgttaacatgggtgaggaagaggagaagacctatcctgcggccaaggttggtaggagtgtgcaagaattatgggtcaacggcggtttggagggtttcattagggcttcattatag

SEQ ID NO: 148517 - protein, 728 aa, Cryptococcus neoformans
MVAIPRLARLSVPAWALSARGRFYATVSTPQTLVEKIVQKYAVGLSEGVKVRAGDYVMIKPEHVMTHDNTGPVISKFLSLSCSKLDNPRQPVFALDHDVQNQSETNQKKYKKIQAFAKEHGVDFYPAGRGIGHQIIVEEGYAWPGKMVVASDSHSNHYGGVGCLGTAIVRTDAAGIWATGKFWWQIPRIVSVSLDGRLSPGVTGKDVIVALAGLFNKDEVLNAAIEFTGSGVEHLSIDERLTIANMTTEWGAVAGVFPVDDKLKEWYQGILRKAELRKFISPTVPSTVGAKVHPRLNAARLDDAMTNRVVADPGAHYAARLSLDLSTLVPHVSGPNSVKVATALPKLLDPPIPINKAYLVSCTNSRASDIASAAQVLRGKKVAPGVEFYIAAASSRVQEDAEAAGDWQTLIDAGAKTLPAGCGPCIGLGVGLLEKGEVGISATNRNYKGRMGSPDAIAYLASPAVVAASAAKGVICGPESMDLSQLPQYEQPKFSIIEEGAAGEEKPVEVDEASLEPLLEGFPAYFEGPLLFAPQDNLTTDGMYPGKYTYQDDITPERQAEVVMENYDPTFAATARELRTALPTASSPSTLPGAILLSGYNFGTGSSREQAATAIKNAGIPLVICGSFGDIFKRNSINNGLILIESPSLIKDMTERFAKDGVRNKGGKDGKLTVVPEGWRIKVDSQRGLVTVNMGEEEEKTYPAAKVGRSVQELWVNGGLEGFIRASL

SEQ ID NO: 148518 - DNA, 2328 bp, Emericella nidulans
  CDS (1)..(2328)
atgcagtcgcgtttagtgtcgcaaagcggcctcggtcgccgctgggcagtgctgcgatgcgcgctgtcaaagacctaccaacgacgaacactcacttccaccagacgccaattccaagacgtttttcagtcgcaacttgaagatcctacctcagctgcgctattttctgctttgaactcttcaaaagccgtaccccaaacgcttaccgaaaagatcgtacagaagtactctgtgggattgccacagggcaagttcgtcaagtctggcgactatgttactatccaaccccaccgttgcatgacacatgacaacagttggccatgcgcattgaagtttatgtccattggtgcttctcgtttgcataacccggatcagattgtgatgactctcgaccatgatgtgcagaataagtctgacaagaacttgaaaaaatatcggcaaatcgaggaattcgccactcagcacggcgtggaattttaccccgctggtagaggtattggccatcagatcatgatcgaagagggatttgcctggcctggtactcttgctgtcgcgagtgactcgcacagtaacatgtacggtggtgttgggtgtctgggcactccaatcgtgagaactgacgcggctagtgtttgggcgactggtaaaacctggtggcagattccccctgtggcgaaggtgacgttcaagggcgtcttaccaccaggtgtgaccggtaaagatgttattgtcgccctttgtggtctgttcaacaaggacgatgttttgaatcatgcgattgaattcactggatctgaggagacaatgcgaagcctctcagtggatactcggttgaccatcgccaacatgacaactgagtggggggctttgtctggactcttccccattgacagcgtgctgaaggggtggctgaggggcaaggccacgacggcagccatggggcttgcggacggccctttcaagacccgggctgctgagcgattcacgcacccgctcctagagcagctgttcgagaatccgttgactgctgataaaggcgccaaatatgccaaggagctgttcctggacctttcaagcctttctccttacgtctctggacccaactcagtcaaggtggctactcctcttaaagagcttgaggcccagaacatcaaagtggacaaagcataccttgtctcctgcacaaactctcgagcctcagatattgctgccgctgcgaaggttttcaaggaggctgccgaaaagaacggcggcaagatccccaaaatccacggcgtcaagttttacatcgcggctgcgtcaattccggagcagttagcagccgagggaaatggtgattggcagacgttacttgaagctggagcaacgcagctgcccgctgggtgtggaccctgcatcggtatgggccagggtctgctggaacctggcgaagtcggtattagtgcttcgaaccgtaacttcaagggtcgcatgggtagtactgaggcgaaggcgtatctgggaagcccggaggtcgtcgctgccagcgcgctgagcggaaagctcagtgggcccggctggtaccaaacccctgaaggctggacagaagtgattcgcggtgaaggagacggcatccgcgaagaggatcgaatgctgacgaacgaagaagctctggagaagataattggtcagctggatgaccttgtggccgatggtgagaagcgttttgcttcggagaccccagcagttgaggaatccgagcaaggcctgacagagatctaccccggatttcccgaacgcgtctctggagaacttgtcttctgcgacgccgataatgtcaacacagatgggatctaccctggaaagtacacctatcaagacgacgtgccccctgagactatggcccgcgtctgcatggagaattacgatccagaattctcgaccactgctaaggaaggggatatcctggtaagcggtttcaacttcggctgtggcagctctcgagagcaagctgccactgctatcttggcgaagaagattcctttggttgtatcaggcagctttggaaacattttctcccgtaacagtattaacaatgctctgatgggcctcgaggtcccacggctggtcaaccgccttcgtgagacatttggatctggcgacaaggttctcactcgccgtactggctggactctgacctgggacgtgcggaagagccagatcgaggttcaggaaggcccgggcggacccaagtggacgcacaaggttggagagctaccaccaaacgtccaggagatcattgccaagggcggtttggagaaatgggttaagaacgccattggtgcttga

SEQ ID NO: 148519 - protein, 775 aa, Emericella nidulans
MQSRLVSQSGLGRRWAVLRCALSKTYQRRTLTSTRRQFQDVFQSQLEDPTSAALFSALNSSKAVPQTLTEKIVQKYSVGLPQGKFVKSGDYVTIQPHRCMTHDNSWPCALKFMSIGASRLHNPDQIVMTLDHDVQNKSDKNLKKYRQIEEFATQHGVEFYPAGRGIGHQIMIEEGFAWPGTLAVASDSHSNMYGGVGCLGTPIVRTDAASVWATGKTWWQIPPVAKVTFKGVLPPGVTGKDVIVALCGLFNKDDVLNHAIEFTGSEETMRSLSVDTRLTIANMTTEWGALSGLFPIDSVLKGWLRGKATTAAMGLADGPFKTRAAERFTHPLLEQLFENPLTADKGAKYAKELFLDLSSLSPYVSGPNSVKVATPLKELEAQNIKVDKAYLVSCTNSRASDIAAAAKVFKEAAEKNGGKIPKIHGVKFYIAAASIPEQLAAEGNGDWQTLLEAGATQLPAGCGPCIGMGQGLLEPGEVGISASNRNFKGRMGSTEAKAYLGSPEVVAASALSGKLSGPGWYQTPEGWTEVIRGEGDGIREEDRMLTNEEALEKIIGQLDDLVADGEKRFASETPAVEESEQGLTEIYPGFPERVSGELVFCDADNVNTDGIYPGKYTYQDDVPPETMARVCMENYDPEFSTTAKEGDILVSGFNFGCGSSREQAATAILAKKIPLVVSGSFGNIFSRNSINNALMGLEVPRLVNRLRETFGSGDKVLTRRTGWTLTWDVRKSQIEVQEGPGGPKWTHKVGELPPNVQEIIAKGGLEKWVKNAIGA

SEQ ID NO: 148520 - DNA, 2331 bp, Gibberella zeae
  CDS (1)..(2331)
atggttgctcttaggagagctgtcgctctcaatgctgtcgctatcgcacggctacaaacccgagcattgactgcccgcactcgatccctcgccctcgcctcctcccagtaccgtgcctacaagacgagttctcgacaacatgctttccactcccagctcgagaacactcccactccttctgctttccagtaccagaagccccctaccgtcgagaacccccaaactctggttgagaagatcgcgcaacagtacgctgtaggacttgccccaggaaagaagatcaaagcgggagactatatcgcactcgctccccaccattgtatgagccacgacaacacatggcccatcgcaaagaagttcctcgacattggcgcttccaagattcacaacaaccgccaagtggtattcacactggaccacgacgtccaaaacaaatccgaagccaacctcaagaaatactctcttatccacgaattcgccgagaagcatggagtcatacactatcccgccggtcggggtatcggtcaccaaatcatggttgaggaaggatatgcctggcctggaactgtctctgtcgcaagtgacagccacagcaacatgtacggtggaattggctgtctaggaactgccgtcgttcgcacagacgccgcttccatctgggctactggtcaaacctggtggcaagttcctcccgtcgccaaggtcactttcactggaattctcccccctggtgtcaccggaaaggatgttattattgccctctgcggtcttttccgagacgaccaagtgctgaaccacgccgtcgagtttgctggcggtgaaagcctccctattgacgaccgcctgactatcagcaacatgactactgaatggggtgctctcgccggtgtcttccctgtcgacgagatgctcatctcctggtaccgaggcaaggccaccaccaacgccatgttcggtggttcctccaaggaccgtatcaaccacaagcgcgtcgacgagttggagcagaacagactggaggctgatcccaacgccaagtacgccaaggagctctacctcaacctgtctacactttctcccattgtcgctggtcccaactctgtcaagatcgccacgcccctgaagaacctcgaggctgaggatatccccgtcaacaaggcctacctcgtttcttgcaccaactctcgagcttctgatatcgccgccgctgcccgtgtcttccgcgaggccgccaaggagaacaaggacgtcaagatcgctcctggtgtcaacttctacattgctgcggcttcgcttcctgaacaggagattgctgaagaggctggtgactggcaagtcctgcgtgacgctggtgcgcaggtactaccagcaggctgtggaccttgtatcggactgggcacaggtcttcttgagcctggtgaggtcggcatcagcgccagtaaccgtaacttcaagggacgcatgggttccacctctgccaaggcttaccttgccagtcctgagatcgtcgctgccagtgcgctcaagggtaagattgctggccctggctggtaccagaagcctgagggtgtcgagaaggtcatcattggcgagggtagcggcgactatgtcgccgacaaggctctgtcaatcgaggatgctctggacaagctcatcaacgaggccgatgccttgattgctgctgctgagacctcagagggtgccaaggagcaggctgctagccctactgctgctgagggagaggagtctctgaccgagatcctccccggtttccctgagaaggttgagggcgagatcgtcttctgcgatagcgacaacatcaacactgatggcatctacccgggcaagtacacttaccaagacaacgtctcagtggagaagatggccgaagtatgcatggagaactacgacacagagttcggcaagttcgccaaggctggcgacatcctcgtcacaggtttcaactttggctgcggtagctccagagagcaagctgccacggccctcctagccaagaagattcccctcgttgtctctggcagcttcggcaacatcttcagccgcaacagtatcaacaacgccctcatgggcgtcgaagttccccgcctcgtcgagcgtctccgcgagacatacaagaacgacaccgagaagcctttgacccgtcgtactggttggaagcttgtctgggatgttcgtcgctccaaggttattgtcacggagaaggatggctcatcttgggagcaaaaggttggcgagttacctgccaacgtgcaggagattattgctcgtggcggtctcgaaaagtgggttaaggctaagattgatgcttaa

SEQ ID NO: 148521 - protein, 776 aa, Gibberella zeae
MVALRRAVALNAVAIARLQTRALTARTRSLALASSQYRAYKTSSRQHAFHSQLENTPTPSAFQYQKPPTVENPQTLVEKIAQQYAVGLAPGKKIKAGDYIALAPHHCMSHDNTWPIAKKFLDIGASKIHNNRQVVFTLDHDVQNKSEANLKKYSLIHEFAEKHGVIHYPAGRGIGHQIMVEEGYAWPGTVSVASDSHSNMYGGIGCLGTAVVRTDAASIWATGQTWWQVPPVAKVTFTGILPPGVTGKDVIIALCGLFRDDQVLNHAVEFAGGESLPIDDRLTISNMTTEWGALAGVFPVDEMLISWYRGKATTNAMFGGSSKDRINHKRVDELEQNRLEADPNAKYAKELYLNLSTLSPIVAGPNSVKIATPLKNLEAEDIPVNKAYLVSCTNSRASDIAAAARVFREAAKENKDVKIAPGVNFYIAAASLPEQEIAEEAGDWQVLRDAGAQVLPAGCGPCIGLGTGLLEPGEVGISASNRNFKGRMGSTSAKAYLASPEIVAASALKGKIAGPGWYQKPEGVEKVIIGEGSGDYVADKALSIEDALDKLINEADALIAAAETSEGAKEQAASPTAAEGEESLTEILPGFPEKVEGEIVFCDSDNINTDGIYPGKYTYQDNVSVEKMAEVCMENYDTEFGKFAKAGDILVTGFNFGCGSSREQAATALLAKKIPLVVSGSFGNIFSRNSINNALMGVEVPRLVERLRETYKNDTEKPLTRRTGWKLVWDVRRSKVIVTEKDGSSWEQKVGELPANVQEIIARGGLEKWVKAKIDA

SEQ ID NO: 148522 - DNA, 2082 bp, Kluyveromyces lactis
  CDS (1)..(2082)
atgtttagagttcaacgattacgaatgtttagcacgtcccgtgctttgtatgctggacagaacatgactgaaaagattgttcagagacatgctgttggtttacccgaggggaagacagttgtgtctggtgattacgtttccatcaaacctgctcattgtatgtcacatgacaattcatggcctgtagcgttgaagttcatgggtcttggtgcgtccactattaagaacccaagacaagtggttaatactttggatcatgatgttcagaataagagtgagaagaatttgaccaaatataagaacattgagaactttgccaagaagcatgggatcgatttttaccccgcaggtcgtggtattggtcatcagatcatgatcgaagaaggttatgcgtttccgttaactatgactgtggcatctgattctcattccaatacatacggtggtattggtgcgcttggtactccgatcgtgcgtaccgatgcagcagccatttgggccactggtcaaacttggtggcagattcctccggtggctcaagtggagttgaagggagagttaccagctgggatttccggtaaagatatcattgtggctttatgtggtgttttcaaccaggatcaagtattgaatcatgccatcgaattcactggtgactctttagataagattcctatcgattatagattaacaattgccaatatgaccaccgaatggggtgctctttccgggttattcccagtcgataatgtgcttcttgatttctatcgcaacagattgaccaaggttggaaacaaccatccaagaattaacgaagccagaatcaatgagctacaggctaaatctgattctttacaggcagaccctgatgctaagtacgctaagaaattgattatcgatttatccactttgacacattacgtcagtggaccaaattctgtgaaaatcagttccaccgtggatgatctttccaaacaggatattaaagtcaacaaagcttatctagtttcttgtaccaactccagattaagtgatttggaaagtgcagcaaatgtggtttgtccaagtggtgacatcaaccaagttcacaaagtggcagaaggtgtggagttctacattgcggccgcctcttctgaagtggaagccgaagcaagagctactggtgcttggcaaaagctattaaatgccggatgtttgcctcttcctgcaggttgtggaccatgtatcggtctcggaactggtttgttagaagagggccaagtcggtatttctgccactaatagaaatttcaagggtagaatgggttctaaggatgcattagcatatctagcgtcaccatctgtggttgctgcctccgctatcttgggtaagattggttccccagccgaagttttaggtacaaaggatccaaatttcacaggtgtcgtggctacggtagaagatgccccagctacttcagctgacggcaaggatgttgctgatgaaagtggtgcttctggtagcgtagaaattctagaaggtttcccaagtgaaatttctggtgagttggtgctctgtgatgctgacaacatcaacactgatggtatctacccaggtaagtacacatatcaagatgatgttccaaaggaaactatggccaaggtttgtatggaaaattacgatcctgatttccaaaccaaggcaaaccctggagatattttgatctctggtttcaactttggtacaggttcttctcgtgaacaagcagctactgctatccttgctaaagggattaaattggttgtgtctggttctttcggtaacatttttttcagaaactcaatcaataatgcattacttaccctggagattccagccttgatcaatatgctaagagacagatataaagatgcaccaaaggaattgactcgtagaacaggatggttcttgaagtgggacgtgtcacaagctaaagtttacgtgaccgaaggttcagtaaacggtccaattgttcttgaacaaaaagtcggagaactaggtaagaacttgcaagagatcattgttaaaggtggtttagaatcatgggtcaaatcacaattataa

SEQ ID NO: 148523 - protein, 693 aa, Kluyveromyces lactis
MFRVQRLRMFSTSRALYAGQNMTEKIVQRHAVGLPEGKTVVSGDYVSIKPAHCMSHDNSWPVALKFMGLGASTIKNPRQVVNTLDHDVQNKSEKNLTKYKNIENFAKKHGIDFYPAGRGIGHQIMIEEGYAFPLTMTVASDSHSNTYGGIGALGTPIVRTDAAAIWATGQTWWQIPPVAQVELKGELPAGISGKDIIVALCGVFNQDQVLNHAIEFTGDSLDKIPIDYRLTIANMTTEWGALSGLFPVDNVLLDFYRNRLTKVGNNHPRINEARINELQAKSDSLQADPDAKYAKKLIIDLSTLTHYVSGPNSVKISSTVDDLSKQDIKVNKAYLVSCTNSRLSDLESAANVVCPSGDINQVHKVAEGVEFYIAAASSEVEAEARATGAWQKLLNAGCLPLPAGCGPCIGLGTGLLEEGQVGISATNRNFKGRMGSKDALAYLASPSVVAASAILGKIGSPAEVLGTKDPNFTGVVATVEDAPATSADGKDVADESGASGSVEILEGFPSEISGELVLCDADNINTDGIYPGKYTYQDDVPKETMAKVCMENYDPDFQTKANPGDILISGFNFGTGSSREQAATAILAKGIKLVVSGSFGNIFFRNSINNALLTLEIPALINMLRDRYKDAPKELTRRTGWFLKWDVSQAKVYVTEGSVNGPIVLEQKVGELGKNLQEIIVKGGLESWVKSQL

SEQ ID NO: 148524 - DNA, 2355 bp, Neurospora crassa
  CDS (1)..(2355)
atgattcaccccgtgagaagagccctggccgtggctgccagcagagccccccgtcaattccttgcagccgcctcgagaaccacctctgtccgcagtgtccgcgccgccgccgcctccggttcctactacagcaccacctcgcgccgtcttcaagatgccttcccctcgcagctcgagaatctggcctcctcgaccctccccaaggtcgtcccccaggtgccccagaccttgaccgagaagattgtccagcgctactcggtcggcctcgctcccggcaagaaggtcaagtctggcgactatgtcaccctccagcctcaccactgcatgacccacgacaactcgtggcccgtcgccatgaagttcatgtccatcggcgcctccaagatccacgacaaccgccaggtcgtcatgaccctcgaccacgacgtgcagaacaagagcgaggccaacctcaaaaagtaccgccagatcgaggagttcgccaacacgcacggcgtcgatttctaccctgccggccggggcatcggccaccagatcatggttgaagagggctacgcgtggccgggcaccgtcactgtcgcctccgactcgcacagcaacatgtacggcggtgttggctgcctgggcacgcccatggtgcgtaccgacgcggcctccatctgggctaccggcaagacatggtggcagatcccgcccatcgccaaggtcaccttcaccggtctgctcccgcccggtgtcacgggtaaggacgtgatcgttgctttgtgcggcctattcaacaacgacgacgtgctcaaccacgccatcgagttcaccggtgccgaagaaaccatgcgctccatccccgtcgacgaccgcctgaccatcgccaacatgaccaccgaatggggcgccctctccggtctcttccccatcgacgccgtcctggcctcctggatgcgcgccaaggccaccgtcaccgccatggaacaccccgagctgggcgacaaggccaagttcacccacgccaagatcgacgcccttctcgagaaccctctggttgccgaccccggcgccacttacgccaaacagctctacctcaacctgtccaccctctcccccttcgtcgccggccccaactccgtcaagatcgctactcccctcaaggacctcgaggcccaaaacctcaagctcgacaaggcgtacctcgtctcgtgcaccaactcgcgcgcctccgacatcgccgccgccgcccgcgtgttcaaggacgccgctgctgacaacaacggtgtcatccccaaggtcgctcccggcgtcaagttctacatcgccgccgcctccctcctcgagcaaaagcaagccgaagactcgggcgactggcaagtccttctcgatgctggcgccgagcctttgccctccggctgcggcccctgcatcggtctgggcaccggtctgttggagcccggtgagatcggcatctctgcttccaaccgtaacttcaagggccgcatgggttccaccgacgccaaggcctacctcgcctcgcccgaagtcgtcgctgcttctgctctgaagggcaagatcgccggtcccggttggtaccaaaagcccgagggtgtcgagaaggtaatcatcggcgaaggcaacggtgtcgttgagcaagacaaggccatgtccattgaagacgctctcgacaagatcattgccgaggccgagtcgctcatcgccaacgccgaggctggcctcactcccgagtccacctcttcttcttcttcttcttcttcgtcgtcggaagaagaatccctcactgaaatcctccccggcttccccgaagccatttccggcgaaatcatcttctgcgacgccgacaacatcaacacggacggcatctaccccggcaaatacacctaccaggacaacatcaccccggccaagatggccgaagtctgcatggagaactacgatgcctcctttggctccatcgcgcgcgccggcgacattctcgtgacaggcttcaactttggctgcggttcctcgcgtgagcaagcggcgaccgccatcctagcaaagcaaatcccgctggtggtcagcggcagtttcggcaacatctttagcaggaactccatcaacaacgcgctgatgggcgtcgaggtgcccaagctggttcagcgactccgtgaagaattcggcgacaaggtggctactagacgcaccgggtggaagttgacgtgggatgtgcgacgcagcaaggtggttgtcgaagaggcgtcaggcaagaagtgggagcaaaaggtgggcgagttgccgccgaatgtgcaggagattattgccaggggaggattggagaagtgggtcaagagtcagattgaggcttga

SEQ ID NO: 148525 - protein, 784 aa, Neurospora crassa
MIHPVRRALAVAASRAPRQFLAAASRTTSVRSVRAAAASGSYYSTTSRRLQDAFPSQLENLASSTLPKVVPQVPQTLTEKIVQRYSVGLAPGKKVKSGDYVTLQPHHCMTHDNSWPVAMKFMSIGASKIHDNRQVVMTLDHDVQNKSEANLKKYRQIEEFANTHGVDFYPAGRGIGHQIMVEEGYAWPGTVTVASDSHSNMYGGVGCLGTPMVRTDAASIWATGKTWWQIPPIAKVTFTGLLPPGVTGKDVIVALCGLFNNDDVLNHAIEFTGAEETMRSIPVDDRLTIANMTTEWGALSGLFPIDAVLASWMRAKATVTAMEHPELGDKAKFTHAKIDALLENPLVADPGATYAKQLYLNLSTLSPFVAGPNSVKIATPLKDLEAQNLKLDKAYLVSCTNSRASDIAAAARVFKDAAADNNGVIPKVAPGVKFYIAAASLLEQKQAEDSGDWQVLLDAGAEPLPSGCGPCIGLGTGLLEPGEIGISASNRNFKGRMGSTDAKAYLASPEVVAASALKGKIAGPGWYQKPEGVEKVIIGEGNGVVEQDKAMSIEDALDKIIAEAESLIANAEAGLTPESTSSSSSSSSSSEEESLTEILPGFPEAISGEIIFCDADNINTDGIYPGKYTYQDNITPAKMAEVCMENYDASFGSIARAGDILVTGFNFGCGSSREQAATAILAKQIPLVVSGSFGNIFSRNSINNALMGVEVPKLVQRLREEFGDKVATRRTGWKLTWDVRRSKVVVEEASGKKWEQKVGELPPNVQEIIARGGLEKWVKSQIEA

SEQ ID NO: 148526 - DNA, 2064 bp, Yarrowia lipolytica; identical to SEQ ID NO: 103389
  CDS (1)..(2064)

SEQ ID NO: 148527 - protein, 687 aa, Yarrowia lipolytica; identical to SEQ ID NO: 103390

SEQ ID NO: 148528 - DNA, 2082 bp, Saccharomyces cerevisiae
  CDS (1)..(2082)
atgctacgatcaaccacatttactcgttcgttccacagttctagggcctggttgaaaggtcagaacctaactgaaaaaattgttcagtcgtatgcggtcaaccttcccgagggtaaagttgtgcattctggtgactatgtatcgatcaagccggcacactgtatgtcccacgataattcgtggcctgtagctttgaaattcatggggcttggcgctaccaagatcaagaatccttcacagattgtgaccactctggaccacgatattcagaacaaatcagagaaaaatttgaccaagtacaagaacatcgaaaattttgctaagaaacaccatatagaccactaccctgccggtagaggtattggtcatcaaattatgattgaggagggctatgctttccccttgaacatgactgtcgcatctgactcgcattcaaacacctacggtggtctggggtcgctgggcactccaatagtgagaacagacgctgcagccatatgggccacgggacagacgtggtggcagatcccaccagtggctcaggttgagttgaaaggtcaattgcctcagggtgtttccggaaaagatatcattgtcgcattatgtgggcttttcaacaatgatcaagttctaaatcacgccattgaattcacgggtgactctttgaatgcattgcctatcgatcacagactcactattgctaacatgaccaccgagtggggggctctttctggtttgttccccgtggacaaaactttgatcgactggtataaaaaccgtttgcaaaagctgggcaccaataatcatccaaggattaatccaaagactatccgcgcactagaagaaaaggcgaagattccgaaagcagacaaggatgcacattatgccaagaaactgatcatcgatctagccacgctaactcactacgtctcaggtccaaatagtgttaaggtctccaacaccgtgcaagatctatctcaacaagacatcaagataaataaagcttatctagtgtcatgtacaaactcccgtctatctgatttgcaatctgcagcggatgtggtttgtcctactggagacttaaacaaagtcaacaaggtggctccaggtgtggagttctatgtcgctgctgcctcttcagaaattgaggctgatgcccgtaaatcaggcgcttgggaaaagctgctaaaggctggctgtatcccactgccttctggttgtggtccatgcatcggtctaggtgcgggattactggaaccaggtgaagttggtatcagtgccacaaacagaaacttcaaaggtagaatgggttccaaggatgcattggcttacttagcttcccctgctgtagtcgccgcttctgccgtgctgggtaagattagttctcctgctgaggtattgtccacaagcgaaattccattcagcggcgttaagactgagataattgagaatcccgtggttgaagaggaagttaacgctcaaacagaggctccaaaacaatccgttgagatattagaaggtttcccaagagagttttctggtgaattagttttatgtgatgccgataacatcaataccgatggtatatatcctggtaagtacacttatcaggatgatgtgcctaaagaaaagatggcgcaagtttgtatggaaaattatgatgccgagttcagaaccaaggttcatccaggtgatatagtggtcagtgggttcaatttcggtaccggttcctccagggaacaagcggccaccgccttattggctaaaggtatcaacttagttgtttcaggatcttttggtaatattttttcaagaaactccattaacaatgctcttctgaccttggaaatcccagcattaatcaaaaaattacgtgagaaatatcaaggtgctccaaaagaacttacaagaagaactggttggtttttgaaatgggatgtagctgatgctaaagtggtcgttaccgaaggttctttggacggccctgtgatcttggagcaaaaagtgggtgagctaggtaagaacctacaagaaattattgtaaaaggaggcttggaaggttgggtcaaatcccaactataa

SEQ ID NO: 148529 - protein, 693 aa, Saccharomyces cerevisiae
MLRSTTFTRSFHSSRAWLKGQNLTEKIVQSYAVNLPEGKVVHSGDYVSIKPAHCMSHDNSWPVALKFMGLGATKIKNPSQIVTTLDHDIQNKSEKNLTKYKNIENFAKKHHIDHYPAGRGIGHQIMIEEGYAFPLNMTVASDSHSNTYGGLGSLGTPIVRTDAAAIWATGQTWWQIPPVAQVELKGQLPQGVSGKDIIVALCGLFNNDQVLNHAIEFTGDSLNALPIDHRLTIANMTTEWGALSGLFPVDKTLIDWYKNRLQKLGTNNHPRINPKTIRALEEKAKIPKADKDAHYAKKLIIDLATLTHYVSGPNSVKVSNTVQDLSQQDIKINKAYLVSCTNSRLSDLQSAADVVCPTGDLNKVNKVAPGVEFYVAAASSEIEADARKSGAWEKLLKAGCIPLPSGCGPCIGLGAGLLEPGEVGISATNRNFKGRMGSKDALAYLASPAVVAASAVLGKISSPAEVLSTSEIPFSGVKTEIIENPVVEEEVNAQTEAPKQSVEILEGFPREFSGELVLCDADNINTDGIYPGKYTYQDDVPKEKMAQVCMENYDAEFRTKVHPGDIVVSGFNFGTGSSREQAATALLAKGINLVVSGSFGNIFSRNSINNALLTLEIPALIKKLREKYQGAPKELTRRTGWFLKWDVADAKVVVTEGSLDGPVILEQKVGELGKNLQEIIVKGGLEGWVKSQL

SEQ ID NO: 148530 - DNA, 1545 bp, Oryza sativa; identical to SEQ ID NO: 103391
  CDS (1)..(1545)

SEQ ID NO: 148531 - protein, 514 aa, Oryza sativa; identical to SEQ ID NO: 103392

SEQ ID NO: 148532 - DNA, 1332 bp, Oryza sativa; identical to SEQ ID NO: 103393
  CDS (1)..(1332)

SEQ ID NO: 148533 - protein, 443 aa, Oryza sativa; identical to SEQ ID NO: 103394

SEQ ID NO: 148534 - DNA, 1518 bp, Brassica napus; identical to SEQ ID NO: 103395
  CDS (1)..(1518)

SEQ ID NO: 148535 - protein, 505 aa, Brassica napus; identical to SEQ ID NO: 103396

SEQ ID NO: 148536 - DNA, 1527 bp, Brassica napus; identical to SEQ ID NO: 103397
  CDS (1)..(1527)

SEQ ID NO: 148537 - protein, 508 aa, Brassica napus; identical to SEQ ID NO: 103398

SEQ ID NO: 148538 - DNA, 1533 bp, Linum usitatissimum; identical to SEQ ID NO: 103399
  CDS (1)..(1533)

SEQ ID NO: 148539 - protein, 510 aa, Linum usitatissimum; identical to SEQ ID NO: 103400

SEQ ID NO: 148540 - DNA, 1515 bp, Brassica napus; identical to SEQ ID NO: 103401
  CDS (1)..(1515)

SEQ ID NO: 148541 - protein, 504 aa, Brassica napus; identical to SEQ ID NO: 103402

SEQ ID NO: 148542 - DNA, 1515 bp, Brassica napus; identical to SEQ ID NO: 103403
  CDS (1)..(1515)

SEQ ID NO: 148543 - protein, 504 aa, Brassica napus; identical to SEQ ID NO: 103404

SEQ ID NO: 148544 - DNA, 1515 bp, Zea mays; identical to SEQ ID NO: 103405
  CDS (1)..(1515)

SEQ ID NO: 148545 - protein, 504 aa, Zea mays; identical to SEQ ID NO: 103406

SEQ ID NO: 148546 - DNA, 1506 bp, Glycine max; identical to SEQ ID NO: 103411
  CDS (1)..(1506)

SEQ ID NO: 148547 - protein, 501 aa, Glycine max; identical to SEQ ID NO: 103412

SEQ ID NO: 148548 - DNA, 1506 bp, Glycine max; identical to SEQ ID NO: 103413
  CDS (1)..(1506)

SEQ ID NO: 148549 - protein, 501 aa, Glycine max; identical to SEQ ID NO: 103414

SEQ ID NO: 148550 - DNA, 1509 bp, Glycine max; identical to SEQ ID NO: 103417
  CDS (1)..(1509)

SEQ ID NO: 148551 - protein, 502 aa, Glycine max; identical to SEQ ID NO: 103418

SEQ ID NO: 148552 - DNA, 21 bp, Artificial sequence
  primer
atgggaaagacgctctacgag

SEQ ID NO: 148553 - DNA, 25 bp, Artificial sequence
  primer
ttagcggacgcccgccaggccgaag

SEQ ID NO: 148554 - protein, 571 aa, Artificial sequence
  consensus sequence
  Variant (2)..(4): Xaa in position 2 to 4 is any amino acid
  Variant (6)..(9): Xaa in position 6 to 9 is any amino acid
  Variant (11)..(23): Xaa in position 11 to 23 is any amino acid
  Variant (24)..(37): Xaa in position 24 to 37 is any or no amino acid
  Variant (39)..(42): Xaa in position 39 to 42 is any amino acid
  Variant (44)..(45): Xaa in position 44 to 45 is any amino acid
  Variant (47)..(47): Xaa in position 47 is any amino acid
  Variant (49)..(49): Xaa in position 49 is any amino acid
  Variant (51)..(66): Xaa in position 51 to 66 is any amino acid
  Variant (67)..(78): Xaa in position 67 to 78 is any or no amino acid
  Variant (81)..(83): Xaa in position 81 to 83 is any amino acid
  Variant (85)..(111): Xaa in position 85 to 111 is any amino acid
  Variant (112)..(166): Xaa in position 112 to 166 is any or no amino acid
  Variant (169)..(169): Xaa in position 169 is any amino acid
  Variant (171)..(175): Xaa in position 171 to 175 is any amino acid
  Variant (176)..(179): Xaa in position 176 to 179 is any or no amino acid
  Variant (181)..(183): Xaa in position 181 to 183 is any amino acid
  Variant (186)..(191): Xaa in position 186 to 191 is any amino acid
  Variant (196)..(196): Xaa in position 196 is any amino acid
  Variant (198)..(198): Xaa in position 198 is any amino acid
  Variant (201)..(201): Xaa in position 201 is any amino acid
  Variant (203)..(204): Xaa in position 203 to 204 is any amino acid
  Variant (206)..(206): Xaa in position 206 is any amino acid
  Variant (210)..(214): Xaa in position 210 to 214 is any amino acid
  Variant (215)..(215): Xaa in position 215 is any or no amino acid
  Variant (217)..(217): Xaa in position 217 is any amino acid
  Variant (220)..(235): Xaa in position 220 to 235 is any amino acid
  Variant (237)..(244): Xaa in position 237 to 244 is any amino acid
  Variant (247)..(248): Xaa in position 247 to 248 is any amino acid
  Variant (250)..(251): Xaa in position 250 to 251 is any amino acid
  Variant (253)..(257): Xaa in position 253 to 257 is any amino acid
  Variant (258)..(258): Xaa in position 258 is any or no amino acid
  Variant (260)..(265): Xaa in position 260 to 265 is any amino acid
  Variant (266)..(266): Xaa in position 266 is any or no amino acid
  Variant (268)..(269): Xaa in position 268 to 269 is any amino acid
  Variant (271)..(276): Xaa in position 271 to 276 is any amino acid
  Variant (277)..(280): Xaa in position 277 to 280 is any or no amino acid
  Variant (282)..(282): Xaa in position 282 is any amino acid
  Variant (286)..(286): Xaa in position 286 is any amino acid
  Variant (290)..(291): Xaa in position 290 to 291 is any amino acid
  Variant (293)..(293): Xaa in position 293 is any amino acid
  Variant (296)..(297): Xaa in position 296 to 297 is any amino acid
  Variant (299)..(302): Xaa in position 299 to 302 is any amino acid
  Variant (304)..(305): Xaa in position 304 to 305 is any amino acid
  Variant (307)..(308): Xaa in position 307 to 308 is any amino acid
  Variant (310)..(322): Xaa in position 310 to 322 is any amino acid
  Variant (323)..(354): Xaa in position 323 to 354 is any or no amino acid
  Variant (356)..(356): Xaa in position 356 is any amino acid
  Variant (357)..(357): Xaa in position 357 is any or no amino acid
  Variant (359)..(371): Xaa in position 359 to 371 is any amino acid
  Variant (372)..(372): Xaa in position 372 is any or no amino acid
  Variant (374)..(374): Xaa in position 374 is any amino acid
  Variant (376)..(380): Xaa in position 376 to 380 is any amino acid
  Variant (382)..(398): Xaa in position 382 to 398 is any amino acid
  Variant (399)..(430): Xaa in position 399 to 430 is any or no amino acid
  Variant (437)..(437): Xaa in position 437 is any amino acid
  Variant (439)..(440): Xaa in position 439 to 440 is any amino acid
  Variant (442)..(444): Xaa in position 442 to 444 is any amino acid
  Variant (447)..(460): Xaa in position 447 to 460 is any amino acid
  Variant (461)..(471): Xaa in position 461 to 471 is any or no amino acid
  Variant (474)..(474): Xaa in position 474 is any amino acid
  Variant (476)..(477): Xaa in position 476 to 477 is any amino acid
  Variant (478)..(479): Xaa in position 478 to 479 is any or no amino acid
  Variant (481)..(483): Xaa in position 481 to 483 is any amino acid
  Variant (485)..(487): Xaa in position 485 to 487 is any amino acid
  Variant (489)..(492): Xaa in position 489 to 492 is any amino acid
  Variant (493)..(500): Xaa in position 493 to 500 is any or no amino acid
  Variant (502)..(503): Xaa in position 502 to 503 is any amino acid
  Variant (506)..(511): Xaa in position 506 to 511 is any amino acid
  Variant (512)..(512): Xaa in position 512 is any or no amino acid
  Variant (515)..(516): Xaa in position 515 to 516 is any amino acid
  Variant (519)..(531): Xaa in position 519 to 531 is any amino acid
  Variant (532)..(537): Xaa in position 532 to 537 is any or no amino acid
  Variant (539)..(540): Xaa in position 539 to 540 is any amino acid
  Variant (545)..(545): Xaa in position 545 is any amino acid
  Variant (548)..(548): Xaa in position 548 is any amino acid
  Variant (550)..(555): Xaa in position 550 to 555 is any amino acid
  Variant (556)..(557): Xaa in position 556 to 557 is any or no amino acid
  Variant (559)..(559): Xaa in position 559 is any amino acid
  Variant (562)..(564): Xaa in position 562 to 564 is any amino acid
  Variant (567)..(567): Xaa in position 567 is any amino acid
  Variant (569)..(570): Xaa in position 569 to 570 is any amino acid
TXXXKXXXXHXXXXXXXXXXXXXXXXXXXXXXXXXXXDXXXXHXXTXPXAXXXXXXXXXXXXXXXXXXXXXXXXXXXXDHXXXTXXXXXXXXXXXXXXXXXXXXXXXXXXXXXXXXXXXXXXXXXXXXXXXXXXXXXXXXXXXXXXXXXXXXXXXXXXXXXXXXXXGIXHXXXXXXXXXGXXXPGXXXXXXDSHTXTXGAXGXXAXGIGXXXXXXVXATXXXXXXXXXXXXXXXXGXXXXXXXXKDXXLXXIXXXXXXGXXXXXXXEXXGXXXXXXXXXXEXRMTXCNMXXEXGAXXGXXXXDXXTXXYXXXXXXXXXXXXXXXXXXXXXXXXXXXXXXXXXXXXXXXXXXXXXDXXAXXXXXXXXXXXXXXPXVXXXXXPXXXXXXXXXXXXXXXXXXXXXXXXXXXXXXXXXXXXXXXXXXXXXXXXXIGSCTNXRXXDXXXAAXXXXXXXXXXXXXXXXXXXXXXXXXVPXSXXXXVXXXAXXXGXXXXXXXXXXXXFXXAGXXXXXXXGCXXCLXXXXXXXXXXXXXXXXXXXSXXNRNFXGRXGXXXXXXXXLXSPXXXAAXAXXG

SEQ ID NO: 148555 - protein, 12 aa, Artificial sequence
  protein pattern
  Variant (2)..(2): Xaa in position 2 is Ala, Glu, Gly, Gln or Ser
  Variant (4)..(4): Xaa in position 4 is Leu or Met
  Variant (5)..(5): Xaa in position 5 is Ser or Thr
  Variant (6)..(6): Xaa in position 6 is Ile, Leu, Met or Val
  Variant (7)..(7): Xaa in position 7 is Cys or Ser
  Variant (9)..(9): Xaa in position 9 is Leu or Met
  Variant (10)..(10): Xaa in position 10 is Ala, Ser, Thr or Val
  Variant (11)..(11): Xaa in position 11 is Ile or Val
EXRXXXXNXXXE

SEQ ID NO: 148556 - protein, 11 aa, Artificial sequence
  protein pattern
  Variant (6)..(6): Xaa in position 6 is Ala, Gly or Ser
  Variant (7)..(7): Xaa in position 7 is Arg or Ser
  Variant (8)..(8): Xaa in position 8 is any amino acid
  Variant (9)..(9): Xaa in position 9 is Glu or Ser
  Variant (11)..(11): Xaa in position 11 is Phe, Ile, Leu or Met
GSCTNXXXXDX

SEQ ID NO: 148557 - protein, 14 aa, Artificial sequence
  protein pattern
  Variant (2)..(2): Xaa in position 2 is Ala or Gly
  Variant (3)..(7): Xaa in position 3 to 7 is any amino acid
  Variant (8)..(8): Xaa in position 8 is Ala, Cys, Gly, Ser or Thr
  Variant (13)..(13): Xaa in position 13 is any amino acid
PXXXXXXXDSHTXT

SEQ ID NO: 148558 - protein, 14 aa, Artificial sequence
  protein pattern
  Variant (2)..(2): Xaa in position 2 is Ala or Gly
  Variant (3)..(3): Xaa in position 3 is Phe, Leu or Met
  Variant (4)..(4): Xaa in position 4 is Ala or Gly
  Variant (5)..(6): Xaa in position 5 to 6 is any amino acid
  Variant (7)..(7): Xaa in position 7 is Ala, Gly or Ser
  Variant (8)..(8): Xaa in position 8 is any amino acid
  Variant (12)..(12): Xaa in position 12 is Ala, Asn, Ser or Thr
  Variant (13)..(13): Xaa in position 13 is Ser or Thr
  Variant (14)..(14): Xaa in position 14 is Asp, Glu or Gln
GXXXXXXXGIGXXX

SEQ ID NO: 148559 - DNA, 1134 bp, THERMUS THERMOPHILUS
  CDS (1)..(1134): transl_table=11
atgcgcgcgcccgtctaccgcttcctcctcgccggctttctctggtccttcggggccaacctcgtctacttcttcctcaacttccacctcgaggccttgggcttttcccgccaggccatcggcctggcccaggcggtggtcctcctctccggggtggccttcgcctggcccctcgcccggctcatcccccgggtggggtatgtgcggagcctggagctcgccttcctcctcggcgtgggcggaggggtccttttgggccttgggcttttcgtcttccccggcctcgccctctacggcctggcgggggccttggtccagggggcggcggctcccctcctcgcccgcctcgtccccgaggaaaggcgggtggccttcttcagcctccaggccgccctcaccacggcaagcggcttcttctccaccctgcttgcgggctacctctcggacctccttggggcgcggtgggtcctccttttcgccctccccttcttcgccctcgcctaccccttggtccgggggcttccccgggggggcggggaggggaagcccttccgcttccgcggccggtttagggcctggctccgcctccttttgccccaggtggtcatcggcttcggggcggggctcgtcatccccttcctgaacctcttcctcaaggagaagttcggcctctcctacgggaccacgggcctcctcttcgccctctcctccctggccacgggggcggccatgctcctccagcccttcctcgccgggaggctcgggcggcttggggccatcgtcttcgtccaggccctctccctgcccttcctcgccgccttggcctgggccccatggcttcccctggtcaccctcgccctcctcatccggggggccctgatgaacgccgccgggcccgtctacgccgccttggtcatggactacctgaccgaggaggagcgccccggcttcttcctcctggaaagcgccctctggagcctcctcttcgccctgggaagcgccctctccggggcggtgcaggaggccctgggcctaaaggcctttgacctcctcttcggggggaccctggccctctacgccctgggcatcctgctctggccctgggccttccgggggcttgagcgggtagactaa

SEQ ID NO: 148560 - protein, 377 aa, THERMUS THERMOPHILUS
MRAPVYRFLLAGFLWSFGANLVYFFLNFHLEALGFSRQAIGLAQAVVLLSGVAFAWPLARLIPRVGYVRSLELAFLLGVGGGVLLGLGLFVFPGLALYGLAGALVQGAAAPLLARLVPEERRVAFFSLQAALTTASGFFSTLLAGYLSDLLGARWVLLFALPFFALAYPLVRGLPRGGGEGKPFRFRGRFRAWLRLLLPQVVIGFGAGLVIPFLNLFLKEKFGLSYGTTGLLFALSSLATGAAMLLQPFLAGRLGRLGAIVFVQALSLPFLAALAWAPWLPLVTLALLIRGALMNAAGPVYAALVMDYLTEEERPGFFLLESALWSLLFALGSALSGAVQEALGLKAFDLLFGGTLALYALGILLWPWAFRGLERVD

SEQ ID NO: 148561 - DNA, 1221 bp, Deinococcus radiodurans R1
  CDS (1)..(1221): transl_table=11
atgagctggcgctttacccggcaggtctggctgtacctgctctcggccttcagcttcgggctgtcgcaggcgttcatgatgctgtttctcaatttctacctgcgggcgctgggcctcgacccggcgtggcagggctttctcaacgcgctgcccgcgctgaccctggcggcgctgagcctgccggcggtggcgctcgcccggcgcatcagcaacgcgcacaccctcaaggtcggcgcggcgctgagtatgctcggcacgctgctgatggcgctcgcgcacgggccggtgctggtcatcgtgggcgggctgattcagggcgcaggctcggcgctgagcgtggttgccggggcgcccttcatggcgaacaacagcgacgaaaagtcgcgggtggcgctgttcagcgtgcaaagcgccctgatgaccggcgccggctttctgggcaacctgctggggggccgggtgcccgaactgtacgcggcagccacccacacgctgccgagcagcctgggcgccctgcgcgtggccctgctcgttgcggcgggactgcaactgctggggctcttgccggtgctgttcctgcgtccgagcggcaagacccggcccgcgggccgcagcctcgccgtgcgcgacaaggccaccatggcccggctggtctttcccaacgtgctggtgggcctgggggcgggggcgaccattccctttctgaacgtgtatatcgagggccgctttcacgtggattacgccagcctgggcagcctgttcgcctggaccagcctggcgacggcgctcacctcattggtgcagcccctgctggtgcggcggctcgggcagttgccgacagtgctggcggtgcaggtgagcagcttgccgtttctggcgctgttgggcttcgcgccgcagctctggatggtcacggtggcgatgtttacgcgcggcgccctgatgaacgcggcgggcccggtctacagcgcctacgccatgaccgtgctgcccgaggaagaccggcccatgtactcggcggtcaacaccatggcctgggacctgggctgggcgctcagttccatgctctcaggcgtggtgcgcggggcgctggacttcagtctcgctttcaacgtgctgttcggctggacgctgctgatgtacgccgccagcgtgctcgccatctatctggggctctatcgccgcgcgggggccggcgtgcgggccgggggagtacactga

SEQ ID NO: 148562 - protein, 406 aa, Deinococcus radiodurans R1
MSWRFTRQVWLYLLSAFSFGLSQAFMMLFLNFYLRALGLDPAWQGFLNALPALTLAALSLPAVALARRISNAHTLKVGAALSMLGTLLMALAHGPVLVIVGGLIQGAGSALSVVAGAPFMANNSDEKSRVALFSVQSALMTGAGFLGNLLGGRVPELYAAATHTLPSSLGALRVALLVAAGLQLLGLLPVLFLRPSGKTRPAGRSLAVRDKATMARLVFPNVLVGLGAGATIPFLNVYIEGRFHVDYASLGSLFAWTSLATALTSLVQPLLVRRLGQLPTVLAVQVSSLPFLALLGFAPQLWMVTVAMFTRGALMNAAGPVYSAYAMTVLPEEDRPMYSAVNTMAWDLGWALSSMLSGVVRGALDFSLAFNVLFGWTLLMYAASVLAIYLGLYRRAGAGVRAGGVH
